United States Patent Application Publication US 2025/0327064 A1 - sequence listing, part 3

SEQ ID NO: 33761 - DNA, 120 bp, synthetic construct
  source 1..120: mol_type = other DNA
tcatgtttgcccataactcaattcctttatcttctcagagcgctgctcatggtcaaaaatgacacacctttccctgcatattttatacatcttaacctttacctctctggccattttact

SEQ ID NO: 33762 - DNA, 120 bp, synthetic construct
  source 1..120: mol_type = other DNA
agtgtaattactagctgcctaccctactccatccccttgctattgagaattactttcttgttctgaaatcagacattatcatgtacgttctccataggaaatattctgagatccatgcag

SEQ ID NO: 33763 - DNA, 120 bp, synthetic construct; identical to SEQ ID NO: 9373
  source 1..120: mol_type = other DNA

SEQ ID NO: 33764 - DNA, 120 bp, synthetic construct
  source 1..120: mol_type = other DNA
attgacagcattaggatgtgggtcagaagaaggcaaggaagttttgtgaacctgcatagataacactggggtcagactagggattgattaatcagtgaattttcaatgccttgaaagtat

SEQ ID NO: 33765 - DNA, 120 bp, synthetic construct
  source 1..120: mol_type = other DNA
aaagaatgctgtgtatttgggggaggcttcaggtcctggtgcataactgtgggttgattacttaaagtgtttatcatgtaccaatattacgatatataaagtggcaatgctaatctctaa

SEQ ID NO: 33766 - DNA, 120 bp, synthetic construct
  source 1..120: mol_type = other DNA
ggatagtgatggggggagggagaaaatctactccaaaagcaacctgaaactatttttattcaataatttagtggcttcaatctatgtattccaaagcttctgctcttttcattgtgccat

SEQ ID NO: 33767 - DNA, 120 bp, synthetic construct; identical to SEQ ID NO: 9374
  source 1..120: mol_type = other DNA

SEQ ID NO: 33768 - DNA, 120 bp, synthetic construct
  source 1..120: mol_type = other DNA
ttaagaaaacagaattacgatgaataataatttgaagccaaaagttaaaatatcttatttcacaactgtaattgctggatgccctgcgcgcagttgtggagcagccctaactccaccagg

SEQ ID NO: 33769 - DNA, 120 bp, synthetic construct
  source 1..120: mol_type = other DNA
cgaaggtaaggcacgaggaggcaaacgcataaggcacaaggcaagaacatgcagagcagaggacaaggccgatggacggggaggctggggacacactgggcagcctaacccaaccctgca

SEQ ID NO: 33770 - DNA, 120 bp, synthetic construct
  source 1..120: mol_type = other DNA
gtccttgaggccgcgccgtcctcgcccctctgtgcgcaagagactcgggccccggccaagggtgagccccgcggaaggacgacgacgctcaccttgccgctgcaaggtcgtgcgcagctc

SEQ ID NO: 33771 - DNA, 120 bp, synthetic construct; identical to SEQ ID NO: 9375
  source 1..120: mol_type = other DNA

SEQ ID NO: 33772 - DNA, 120 bp, synthetic construct
  source 1..120: mol_type = other DNA
aaattgagttcttggctgggcccgtgcctcgtgctccggacctgggatcctcgaggcatctctgccccagccctgcccgccctctctgagggcctcgggaatctgccttcctttagggag

SEQ ID NO: 33773 - DNA, 120 bp, synthetic construct
  source 1..120: mol_type = other DNA
catggagctcttgggaatctcggagacagagttatccacataaatttgagagttcaagggaataacgagaaaggttcaggaattaagcttgttctcatcctgatgtaagtattctcttgg

SEQ ID NO: 33774 - DNA, 120 bp, synthetic construct
  source 1..120: mol_type = other DNA
cctagaaggaaacatttattcatggaaagagcccaagcttttgaattctatagggtccaattaaactgagtcaatcaccagcttgggcaggttacttaacagaatatccatatcacaagt

SEQ ID NO: 33775 - DNA, 120 bp, synthetic construct; identical to SEQ ID NO: 9376
  source 1..120: mol_type = other DNA

SEQ ID NO: 33776 - DNA, 120 bp, synthetic construct
  source 1..120: mol_type = other DNA
tcctttacctccaatacagagactacagacaccattgctgccttacattttcccagtgcagaaaaatcctactgtgtctttggggaaatgcatatctttggggaaatgcataaccgtgga

SEQ ID NO: 33777 - DNA, 120 bp, synthetic construct
  source 1..120: mol_type = other DNA
tataaggtggaaataaaaatgcaacatagctctatttcccaaaaagaataaatggtgataaaagactgtgttctgagatcatggagatcaccatcccccatactccaacccaaggagagc

SEQ ID NO: 33778 - DNA, 120 bp, synthetic construct
  source 1..120: mol_type = other DNA
cctccagggatctgcagagccatcttccaagacgtaagtgagaccaaggaaaaagcagtggtagtcaacacagctcaaacctaatggatcttatgtacctgccggaaagaataaaaacct

SEQ ID NO: 33779 - DNA, 120 bp, synthetic construct; identical to SEQ ID NO: 9377
  source 1..120: mol_type = other DNA

SEQ ID NO: 33780 - DNA, 120 bp, synthetic construct
  source 1..120: mol_type = other DNA
tctgaagagccttaagttttggtgagaagagcaaagttcttagaaggaaatgatggtgagttgcagttctaccactaatgtgctttatgagagtcaacaaattactgaactccttttcac

SEQ ID NO: 33781 - DNA, 120 bp, synthetic construct
  source 1..120: mol_type = other DNA
tatgtgtaactatcaggctaataggaggaacaagaaaaaaaaaagttgacacccagccctactggcaagtgattctttattatgcaagaaggtattgcattcatgctcttcgagtgaaag

SEQ ID NO: 33782 - DNA, 120 bp, synthetic construct
  source 1..120: mol_type = other DNA
tcacatttagttttgaagatagagagcaaaagctgtgaagaagaatttcctgggggctgaatcgtattaatgatggagcaaatgtttagagttacaggtcatattgggccagccctaaac

SEQ ID NO: 33783 - DNA, 120 bp, synthetic construct; identical to SEQ ID NO: 9378
  source 1..120: mol_type = other DNA

SEQ ID NO: 33784 - DNA, 120 bp, synthetic construct
  source 1..120: mol_type = other DNA
cggtagcaagaggtttgcaatagtggcacatgaaagcattgagccactctaatattctgtattattctgtgcatagatttagatcacctgagactgggaacgttgttactgggcttctag

SEQ ID NO: 33785 - DNA, 120 bp, synthetic construct
  source 1..120: mol_type = other DNA
acatcaaactcagacctagaacggaactgggggcaagaaagaataggcagagagggacctgaagatgccctcaatgtcctctcagtccccacctcagcgtccctcagaatagaggcctct

SEQ ID NO: 33786 - DNA, 120 bp, synthetic construct
  source 1..120: mol_type = other DNA
ttttttcttttcttttcctttttttttattttccttttttcttttcttttcttttttagggacagggtctggctctatcacctaggctggagtacactggcatgatcatggcacactgca

SEQ ID NO: 33787 - DNA, 120 bp, synthetic construct; identical to SEQ ID NO: 9379
  source 1..120: mol_type = other DNA

SEQ ID NO: 33788 - DNA, 120 bp, synthetic construct
  source 1..120: mol_type = other DNA
ttgaggtcaggaatttgagaccagcctggccaacatggtgaaacccgtctctaccaaaaataaaaaaaattagccaagtgtggtggtgcatgcctgtaatctcaattactcagtaggctg

SEQ ID NO: 33789 - DNA, 120 bp, synthetic construct
  source 1..120: mol_type = other DNA
aaacaaaaaaaaaacacctaatctaaaaggctttggtttggggcttctgccagttgtgtccccctgatccagccttctctacagttctttgcaatgttcctatccctgctccattactca

SEQ ID NO: 33790 - DNA, 120 bp, synthetic construct
  source 1..120: mol_type = other DNA
acgcaccccatgtgggaagatgggataaagacactgctgttattatgggtcaaggttacactagggagactctccccagggcacattgtctcttctttcagggcagaaaaaggttgtgga

SEQ ID NO: 33791 - DNA, 120 bp, synthetic construct; identical to SEQ ID NO: 9380
  source 1..120: mol_type = other DNA

SEQ ID NO: 33792 - DNA, 120 bp, synthetic construct
  source 1..120: mol_type = other DNA
atataaggtaggccttttctctttaaacagttatctctttaaaatgacaatttagaaagtctgaagagagagtctgtagcattcagaggctgtgctcaaacagtgcctccttcaagcaag

SEQ ID NO: 33793 - DNA, 120 bp, synthetic construct
  source 1..120: mol_type = other DNA
aagctttagcaggaagatagaaaatcagatgatacaaggcatttgggacacttgggggaaatggggaaggtgagtgatctctggcacaggagtccagagcccaccagtctcatggcttct

SEQ ID NO: 33794 - DNA, 120 bp, synthetic construct
  source 1..120: mol_type = other DNA
ttccagtcaatctcatccatgcatcacctcagctggaccactgacgatttcatcacccagagctaacctacacatgtcactctttgcaacatatctgttcgtctctacttctggttccct

SEQ ID NO: 33795 - DNA, 120 bp, synthetic construct; identical to SEQ ID NO: 9381
  source 1..120: mol_type = other DNA

SEQ ID NO: 33796 - DNA, 120 bp, synthetic construct
  source 1..120: mol_type = other DNA
ttcaggatgactattatcaaaaagacaaaaaataacaagtgttaacaaggacgtggagataagggaacatttgcacactgttggtgggaatgtaaattagtatggccactagggaaaaca

SEQ ID NO: 33797 - DNA, 120 bp, synthetic construct
  source 1..120: mol_type = other DNA
cattgcagcattatgcacaatagtcaaggtatgaaatcaacctgtgtcattcagcagatgaatgggtaaagataatgtatgtatacacaatggaattctattcaggctttaaaaagaaag

SEQ ID NO: 33798 - DNA, 120 bp, synthetic construct
  source 1..120: mol_type = other DNA
cttattccaaagagggttttgagaacttcaatgtttaaaaagaaagagtaagcaggaagggaaagagagaggaaaaaaaaaaaaaaaggagggaaggtaggcaatgacacaagtggttac

SEQ ID NO: 33799 - DNA, 120 bp, synthetic construct; identical to SEQ ID NO: 9382
  source 1..120: mol_type = other DNA

SEQ ID NO: 33800 - DNA, 120 bp, synthetic construct
  source 1..120: mol_type = other DNA
atatagcatctaaaatagttttgaacacatagtagatgctcaataataattttttttaatttttaatataattttaattcaatagcttttaggttacaagtggttttttgttatatggat

SEQ ID NO: 33801 - DNA, 120 bp, synthetic construct
  source 1..120: mol_type = other DNA
tatccttcaccctccttcccatcctccccaatttcttactctccattgtcctttataccattctgtatgcctttgagtacccatagcttagtacccacttagctcctacttacaaatcaa

SEQ ID NO: 33802 - DNA, 120 bp, synthetic construct
  source 1..120: mol_type = other DNA
tttcttgcctatgccctcggtgttatatccaagaaatcattgcctaatcaaatatcatgaagattttccctattttttttctaagagttttatggttttagttttcacatttaggtcttt

SEQ ID NO: 33803 - DNA, 120 bp, synthetic construct
  source 1..120: mol_type = other DNA
tggccctggcactcctgttgaaaatcgtttgactatatatgtcaggataatttcctggttttgatattgcactttagttatgtaagatgttacaattggggaaaactggatgaaggctat

SEQ ID NO: 33804 - DNA, 120 bp, synthetic construct; identical to SEQ ID NO: 9383
  source 1..120: mol_type = other DNA

SEQ ID NO: 33805 - DNA, 120 bp, synthetic construct
  source 1..120: mol_type = other DNA
gtcctcccgtcttagcctcttgagtagctgggaataccagcaccatgcttgcccacttaatttttctctctttgtagacaaggtctccttatgttgcccaggctgctctttaggttcaag

SEQ ID NO: 33806 - DNA, 120 bp, synthetic construct
  source 1..120: mol_type = other DNA
tttactctctttctctctttgtgtttcactctgggtaatttttattgatctatttcaaactcactgattcttcccagggctgtaccacatttgctgatgagcttgtcaaatgcattcttt

SEQ ID NO: 33807 - DNA, 120 bp, synthetic construct
  source 1..120: mol_type = other DNA
ttaatcacagtttatgaagcaggtttactaattaccaataccaagggaggaaagggaggacttccactgcatggagaatagaaaagatcatcactatgccaaccaccaggaaaagaggtc

SEQ ID NO: 33808 - DNA, 120 bp, synthetic construct
  source 1..120: mol_type = other DNA
aacagaacacactcacacacaaattatgtgaagcagttttattacttacagatcagtagcaagggacagaagaagcctcagctccattgtgagtcagtctcctaaagctcaagaaagctg

SEQ ID NO: 33809 - DNA, 120 bp, synthetic construct; identical to SEQ ID NO: 9384
  source 1..120: mol_type = other DNA

SEQ ID NO: 33810 - DNA, 120 bp, synthetic construct
  source 1..120: mol_type = other DNA
ttcatgtaagaggagggtaaggaaaaatagtcattcatgcctttgtctggctcagttaatctgcattttttttacataagatgacatagacaaaacgggggaaggggaacaattagatat

SEQ ID NO: 33811 - DNA, 120 bp, synthetic construct
  source 1..120: mol_type = other DNA
tctctactaaaagtacaaaaaaaaaaaattagccaggcatggtggcagatgcctgtaatctcagctacttgggaggctgaggcaggagaatcacttgaacccgggaggtggaggttgcag

SEQ ID NO: 33812 - DNA, 120 bp, synthetic construct
  source 1..120: mol_type = other DNA
cacctgtaaagataagctaccaatttacattgccatggtaaaattttaacagaaacaccttagagtaaagatcttgcagctcacaaggactttccttgtggacaaaatatgagggaggca

SEQ ID NO: 33813 - DNA, 120 bp, synthetic construct; identical to SEQ ID NO: 9385
  source 1..120: mol_type = other DNA

SEQ ID NO: 33814 - DNA, 120 bp, synthetic construct
  source 1..120: mol_type = other DNA
aactaggttgttcttctggtttagtgacagagactactatcccagatgaaaatacaatagtcttttagtgcttctatgcatggtcatgtctgtcagtagacactaaaacaatcataattc

SEQ ID NO: 33815 - DNA, 120 bp, synthetic construct
  source 1..120: mol_type = other DNA
ttcagaggatgaggggaatcaagaatggcttgtgaaggagggaaacaaatattagttacagtcataatgacaactataatagtagacactgtagcaaatttcactaactttcttgcctta

SEQ ID NO: 33816 - DNA, 120 bp, synthetic construct
  source 1..120: mol_type = other DNA
aaatgaaaggcaccatattggactatgggagcttggaattctgaatcaccacctggagaaaagtgactcacaaatcttcaatatcctccttctgctacattagtgagttataaacttcta

SEQ ID NO: 33817 - DNA, 120 bp, synthetic construct
  source 1..120: mol_type = other DNA
tttaatagtttctcctgacttagactcacctgaaatgatcctcattctttgttttaggattagcagagatgtaagacagaatttcatgaaaatattcaacctggtggatgatgccaaatt

SEQ ID NO: 33818 - DNA, 120 bp, synthetic construct; identical to SEQ ID NO: 9386
  source 1..120: mol_type = other DNA

SEQ ID NO: 33819 - DNA, 120 bp, synthetic construct
  source 1..120: mol_type = other DNA
tggaaagaaagacttcatttggatgtaaatacatgaaaatagcagcccagacactcaagacaagaggaataataactaagtgaccacaaaggaaattttttatcacatgcctggctgttc

SEQ ID NO: 33820 - DNA, 120 bp, synthetic construct
  source 1..120: mol_type = other DNA
aaaaaaaaaaaaagattcacaaaagtcacgttcaagttaaaccattaaatactttcttctccaactaatgagaagatgtggggcctcattaattctctctggcagattaggtcaatgaat

SEQ ID NO: 33821 - DNA, 120 bp, synthetic construct
  source 1..120: mol_type = other DNA
caatgataccactttcttggacagggcaatttgtgtcacttttccagacaaaatacatggatttggtgatgctttaatctaaatagtaataagacagttttattaacaaaatgtttctaa

SEQ ID NO: 33822 - DNA, 120 bp, synthetic construct; identical to SEQ ID NO: 9387
  source 1..120: mol_type = other DNA

SEQ ID NO: 33823 - DNA, 120 bp, synthetic construct
  source 1..120: mol_type = other DNA
ctaataataaaatagaacaattataacaatatactgtaataaaagttatgtaaatgagatctctctctctctttctctgtctctttctctctcccctcttctcaaaatatcttattgtac

SEQ ID NO: 33824 - DNA, 120 bp, synthetic construct
  source 1..120: mol_type = other DNA
gaccactgtattacatttctaggaagtcgcaaaccctttgagaaaattttgggatgggagacaaacatatttctaagaagccttcaatgttacaggttatattcttcacttcttcaaagt

SEQ ID NO: 33825 - DNA, 120 bp, synthetic construct
  source 1..120: mol_type = other DNA
agtgggatgtaaggggtccggaaacaagttttttgaaatatacttgattgtcatgacaccaatatggaatgaaagagaaagcagcatagtgatgaggaaattatggtgagatttttagga

SEQ ID NO: 33826 - DNA, 120 bp, synthetic construct
  source 1..120: mol_type = other DNA
ttgcaatataatttgaagtatttgaaatggagtatggggaaatttgctctggcctctctaaagaacatcaaactgggactgctttcaaggatagaacaagttatcctgcatttatgttgg

SEQ ID NO: 33827 - DNA, 120 bp, synthetic construct; identical to SEQ ID NO: 9388
  source 1..120: mol_type = other DNA

SEQ ID NO: 33828 - DNA, 120 bp, synthetic construct
  source 1..120: mol_type = other DNA
aattgtctcttggggtgtactgttgattctgcacctaactttcagagtatcctttctcctttgcaagaaattgctctatgttgtatctcctttgctgtgtgtctgttgtttaaattcttt

SEQ ID NO: 33829 - DNA, 120 bp, synthetic construct
  source 1..120: mol_type = other DNA
agaaaccgtacaggaaagtattcttagactatactaagaaaaagtaaagaattaatatgtgaaaggtatatcaattttaagcattctgtttatgtcaaaggtgcttatggtgcagtatgt

SEQ ID NO: 33830 - DNA, 120 bp, synthetic construct
  source 1..120: mol_type = other DNA
ctaggcaaagctcaactgggctctctgcttaggatctcacaagactgaagtcacaagctgaccttataattctcatttgaatatggagtcctcttccaagctcactgcctgttgacagaa

SEQ ID NO: 33831 - DNA, 120 bp, synthetic construct; identical to SEQ ID NO: 9389
  source 1..120: mol_type = other DNA

SEQ ID NO: 33832 - DNA, 120 bp, synthetic construct
  source 1..120: mol_type = other DNA
tctggccataaactggccccaaatttatggcccagtttatggccataaactggccataaataaaatctctgcagcactgtaacatgtccataatggccttaacgcccaagctggaaggtt

SEQ ID NO: 33833 - DNA, 120 bp, synthetic construct
  source 1..120: mol_type = other DNA
gctgcaattaattcagcccatcccttcgtttcccataggaatacttttagttaatttaatatctatagaaacaatgctaatgactggtttgctattaataaatatgtgagtaaatctctg

SEQ ID NO: 33834 - DNA, 120 bp, synthetic construct
  source 1..120: mol_type = other DNA
ctggtctcggtaggttccacccacatttaaaggaaaataattttataaggtatgtacaacagggggtgatagatattcctgggggccatcttagaattctgctttccttctcacctcttc

SEQ ID NO: 33835 - DNA, 120 bp, synthetic construct; identical to SEQ ID NO: 9390
  source 1..120: mol_type = other DNA

SEQ ID NO: 33836 - DNA, 120 bp, synthetic construct
  source 1..120: mol_type = other DNA
aatgtcattgaatccctggggatagagacagggaagcacagggatctgatgatatttatagtcacttaacaaaaaagactaggtggtatttttttcacccacacctagctttgctggcat

SEQ ID NO: 33837 - DNA, 120 bp, synthetic construct
  source 1..120: mol_type = other DNA
tatacttacatagtatataccagaacacttaaattaatttcatctccaattactgtatattattattattttttttgagacagagtcttactccattgcccaggctggagtgcagtggca

SEQ ID NO: 33838 - DNA, 120 bp, synthetic construct
  source 1..120: mol_type = other DNA
agtagagacagggtttccccatgttggccaggctggtctcaaactcctgaactcaggtaatccgcctgcctcggcctcccaaagtgctgggattattttgtattctagatgtcgattttg

SEQ ID NO: 33839 - DNA, 120 bp, synthetic construct; identical to SEQ ID NO: 9391
  source 1..120: mol_type = other DNA

SEQ ID NO: 33840 - DNA, 120 bp, synthetic construct
  source 1..120: mol_type = other DNA
tacataagatttagaggagcaaactttcaaaccatagcatttcacccctgcagcctcaaaactcatattcttctcacattcaaatacattcattttatctccagagccccaaagtcttaa

SEQ ID NO: 33841 - DNA, 120 bp, synthetic construct
  source 1..120: mol_type = other DNA
gaaagaagtaacaggcctcaaggaagtctgaaactcaacagggaaagacattaaattttaaagctggaaataatgtcttttgactccatgttcctcatcctgagcacacaggggcagaag

SEQ ID NO: 33842 - DNA, 120 bp, synthetic construct; identical to SEQ ID NO: 9392
  source 1..120: mol_type = other DNA

SEQ ID NO: 33843 - DNA, 120 bp, synthetic construct
  source 1..120: mol_type = other DNA
aaataaggggacccaggggaccagcgttcagcatatggaggatcccgccggcttctgagttcccttcatatttattgatcattcgtgggtgtttctcagagagggggatgtgtcagggtc

SEQ ID NO: 33844 - DNA, 120 bp, synthetic construct
  source 1..120: mol_type = other DNA
gctttacaaagcagtattgctgcctgcatgtctcacctccagtcttaaggcggtttttccctatctcagtagatggaacgtacaatcgggttttataccgagacattccattgcccaggg

SEQ ID NO: 33845 - DNA, 120 bp, synthetic construct
  source 1..120: mol_type = other DNA
tcccttcccacgaggccatatttcagactatcccatggggagaaaccttggacaatacctggctttcctaggcagaggtccctgcagccttccgcagtgtttgtgtccctgggtacttga

SEQ ID NO: 33846 - DNA, 120 bp, synthetic construct
  source 1..120: mol_type = other DNA
agagcacggtgttgggggtaaggtcatagattaacagcatctcaaggcagaagaatttttcttagtgcagaacaaaatggagtctcctatgtctacttctttctacacagacacagtaac

SEQ ID NO: 33847 - DNA, 120 bp, synthetic construct; identical to SEQ ID NO: 9393
  source 1..120: mol_type = other DNA

SEQ ID NO: 33848 - DNA, 120 bp, synthetic construct
  source 1..120: mol_type = other DNA
cctgtgatggcaggggtagacttgaagatctctaaagtgcattcagtgtttgtctcccattgtcttgatgaatagcttctggctttattctattcatacaattctccttatcaatcagtc

SEQ ID NO: 33849 - DNA, 120 bp, synthetic construct
  source 1..120: mol_type = other DNA
ccacctttaagttattttttacctctcacagctttaatgtaagcagttaaaagtagccatgcagctgcctgactgctttgctgcttagatatttcttctgccatatagcctaataaaacc

SEQ ID NO: 33850 - DNA, 120 bp, synthetic construct
  source 1..120: mol_type = other DNA
gtccatatttctattgacattctggtcctgaccactcaaatcatcacaaaggagttccagacttttcctagtcttcttgacttcttctaagccctcaccaaaatcaccctttatcaccag

SEQ ID NO: 33851 - DNA, 120 bp, synthetic construct; identical to SEQ ID NO: 9394
  source 1..120: mol_type = other DNA

SEQ ID NO: 33852 - DNA, 120 bp, synthetic construct
  source 1..120: mol_type = other DNA
tctctgtttctcctctcaatgccccaccctcaagacctcatctaatcctaattacttcccaaaggtgccacctctcaaataccatagttggatttacagccctcttaatactattactat

SEQ ID NO: 33853 - DNA, 120 bp, synthetic construct
  source 1..120: mol_type = other DNA
tcctcttcttttctgtactccactgtccctgtccagaggttttatttagccactccacctcagcccatcaggcttccaatcaaaatcccagttcttcagtgatcattcagatttattgtc

SEQ ID NO: 33854 - DNA, 120 bp, synthetic construct
  source 1..120: mol_type = other DNA
tctgtgtcttctcacttccttatatctatagcatacaagtgtttgaaaacattctcctcaacctcctttaaaatcatggggagcccaacctcagctcctagccagaagcagaaagtcaaa

SEQ ID NO: 33855 - DNA, 120 bp, synthetic construct
  source 1..120: mol_type = other DNA
tcccacttaggaattaaattcccagccaataatgcctactttcaggcatagaagtcaagacttcagccctactcaccatatgcatatctatcttatttgaagttctcaggaagaactttt

SEQ ID NO: 33856 - DNA, 120 bp, synthetic construct; identical to SEQ ID NO: 9395
  source 1..120: mol_type = other DNA

SEQ ID NO: 33857 - DNA, 120 bp, synthetic construct
  source 1..120: mol_type = other DNA
tgtcatgatcctaatgcttgttttattcctcaatgtcatcattgattcaaccatagcttttatttttaatttgctttttgtttgtttgttttctttttttttttttttttttttttgaga

SEQ ID NO: 33858 - DNA, 120 bp, synthetic construct
  source 1..120: mol_type = other DNA
ggcgggcaccaccatgcccggctaattttttgtatttttagtagagacggggtttcactgtgtcagccaggatagtctcgatctcctgacctcgtgatccgcccgtctcggcctcccaaa

SEQ ID NO: 33859 - DNA, 120 bp, synthetic construct
  source 1..120: mol_type = other DNA
ttgtacagattattttgtcaaacagttattaagcctagtacttattagttatttttcctgatcctctccctcttcccactctccaccctctgataggccccagtgtgtgttgttttcctt

SEQ ID NO: 33860 - DNA, 120 bp, synthetic construct
  source 1..120: mol_type = other DNA
tgcaaaggacatgattttgtttctttatggctgcatagtattccatggtgtatatgtaccacattttatttatctagtctatcattgatgggcatttaggttgattccatgtctttgcta

SEQ ID NO: 33861 - DNA, 120 bp, synthetic construct; identical to SEQ ID NO: 9396
  source 1..120: mol_type = other DNA

SEQ ID NO: 33862 - DNA, 120 bp, synthetic construct
  source 1..120: mol_type = other DNA
acttttatccccaagacacacaattatcagcttccccaaggtcaaaatgaaagaaaaaatgttaaaaaataaaaaataaaaacaactagagagaaagatcaggtcacctacaaagggaag

SEQ ID NO: 33863 - DNA, 120 bp, synthetic construct
  source 1..120: mol_type = other DNA
gaagcctcatattgaaggagaaataagatccttttcagacaggcaaatgctgagcaaattcattaccaccaaacctaccttacaagagcttctgaaggaagcactaaatatgaaaaggaa

SEQ ID NO: 33864 - DNA, 120 bp, synthetic construct
  source 1..120: mol_type = other DNA
acacatatcaatactaaccttaaatgtaaatgagctaaataccccaattaaaagacacagagtgacaagctggataaagaaccaagatgtattggtatgctgtcttcaagagactcatct

SEQ ID NO: 33865 - DNA, 120 bp, synthetic construct; identical to SEQ ID NO: 9397
  source 1..120: mol_type = other DNA

SEQ ID NO: 33866 - DNA, 120 bp, synthetic construct
  source 1..120: mol_type = other DNA
ttcatttcggtcttttccatgatttcaatgacttttttcctgttagcccatttctataacccattctagcatgtgtatcaggctgggatggcaggtggattcattctaacctctaccttg

SEQ ID NO: 33867 - DNA, 120 bp, synthetic construct
  source 1..120: mol_type = other DNA
tatggcctgtctctggacttaacatcccatgtcctcactcagactacataactttagacccaccctattactatggactccctgtctatttgtattttttcagcaaaacgtctaaaagta

SEQ ID NO: 33868 - DNA, 120 bp, synthetic construct
  source 1..120: mol_type = other DNA
aactataccccctggataatcttacctgtacacagtttgaatagatgtcctttacagctagaataatgatactagttaaaatcagaggactaatccatgggtagatcatttcaaaattta

SEQ ID NO: 33869 - DNA, 120 bp, synthetic construct
  source 1..120: mol_type = other DNA
aatagtatctgggatcctcacatgtgaaaaaaataaactagattacaaaagagaggacttacatacacttagttcttgcaggaggaaaggaactatctagacgttgttattttgttcaaa

SEQ ID NO: 33870 - DNA, 120 bp, synthetic construct; identical to SEQ ID NO: 9398
  source 1..120: mol_type = other DNA

SEQ ID NO: 33871 - DNA, 120 bp, synthetic construct
  source 1..120: mol_type = other DNA
gacaaataaatggatacattcattgatgaatttgatgtccacataaaggctatctttatttaaataaacccgttatttccatgagtcacttgctcctcctgctacatgtagagaactatc

SEQ ID NO: 33872 - DNA, 120 bp, synthetic construct
  source 1..120: mol_type = other DNA
tcaacagaagtgcctttggacattcacacttgatcttccaaaaccacatcagcttctagaacaatgcttctagacagtttcttagtaacccctcaaagacgtgatttcacatttttatca

SEQ ID NO: 33873 - DNA, 120 bp, synthetic construct
  source 1..120: mol_type = other DNA
gctgttttccatttgagtttcttctgtgaattactgttcatctactttccaatatttcaactaggttatttaatccattgatttgagcagtactttatttcttcctttgtgtaatatatg

SEQ ID NO: 33874 - DNA, 120 bp, synthetic construct; identical to SEQ ID NO: 9399
  source 1..120: mol_type = other DNA

SEQ ID NO: 33875 - DNA, 120 bp, synthetic construct
  source 1..120: mol_type = other DNA
ataccccacatacacaaagatacacatattaccattaaaagtcattgacctggggataatgctagtggaggaaaggaatggcatgaagggctcttgttttcattaaaatacatctttatt

SEQ ID NO: 33876 - DNA, 120 bp, synthetic construct
  source 1..120: mol_type = other DNA
tatcaagaatgctgcagatggtggcaggatgctcaatgtgaaaaaggatagtggcttgcattagaatgacagcagcgaagtttgttttaagcatgtaattttatagtaccaatctcttat

SEQ ID NO: 33877 - DNA, 120 bp, synthetic construct
  source 1..120: mol_type = other DNA
tgcttctcaaacacccataaccacatctcagattgcatcatattttgaacacatggaaggaagagtaagggaaaaaagagtggctgggttaccaccctcaagaaatgctgatccctcaaa

SEQ ID NO: 33878 - DNA, 120 bp, synthetic construct
  source 1..120: mol_type = other DNA
tcttcctaggacattgacttcttctagtagaatcagtgtgcttcagctcagttttacaccagaagataaacaaaatataaatccaagatttttgcagtgcagtggaggtctctgagggtg

SEQ ID NO: 33879 - DNA, 120 bp, synthetic construct; identical to SEQ ID NO: 9400
  source 1..120: mol_type = other DNA

SEQ ID NO: 33880 - DNA, 120 bp, synthetic construct
  source 1..120: mol_type = other DNA
tttcctgcccacaccctgcttccccatgcgttaagttagcagccttttttccctcttgttgttttctgccttctgatatttcagataagaaatctgtttctgggccgggtgcggtggctc

SEQ ID NO: 33881 - DNA, 120 bp, synthetic construct
  source 1..120: mol_type = other DNA
cattggtcatctacttggtgtccagcactaggttattcctaagtatcactgaactttgtgataacgctgaagatatgtttggaagtttcaggaaccagaagaagaacacgattcaggatg

SEQ ID NO: 33882 - DNA, 120 bp, synthetic construct
  source 1..120: mol_type = other DNA
ataattgtctaagaattgttcattttttccttgtcttggcactatgagacactgggatataatataaaaggtaacagattttgagaaaaatgcatttgtcccgtagttggagaattcgtt

SEQ ID NO: 33883 - DNA, 120 bp, synthetic construct
  source 1..120: mol_type = other DNA
ggtgggattaatattaagatgaaatgaaattttatatatgagacctactaattgcgtattctgacagagagctacaacaccaaagctaagccctgttatgtgcttccacaggggacaaaa

SEQ ID NO: 33884 - DNA, 120 bp, synthetic construct; identical to SEQ ID NO: 9401
  source 1..120: mol_type = other DNA

SEQ ID NO: 33885 - DNA, 120 bp, synthetic construct
  source 1..120: mol_type = other DNA
acccacaaatgatctcccattcacaattgccacaaatagaataaaatacctaggaatatagctaacaaggtaagtgaagaacctcttcaaggaaaactgcaaatcactcttcaaagaaat

SEQ ID NO: 33886 - DNA, 120 bp, synthetic construct
  source 1..120: mol_type = other DNA
accattgacattcttcaaagaatttttaaaaaactattttaaaattcacatggaaccaaaaaaagagctcgaagagccaaggcaatcctaagcaaaaagaacaaagctgaaggcatcaca

SEQ ID NO: 33887 - DNA, 120 bp, synthetic construct
  source 1..120: mol_type = other DNA
tactagcatctgatattcaacaaatctgacaaaaacaagcaatggggaaaggattccctctttaataaatggtgctgggagaactggctagccatatgcagaagattgaaactggacctc

SEQ ID NO: 33888 - DNA, 120 bp, synthetic construct; identical to SEQ ID NO: 9402
  source 1..120: mol_type = other DNA

SEQ ID NO: 33889 - DNA, 120 bp, synthetic construct
  source 1..120: mol_type = other DNA
gaacacatacttctcaaaagaaaacatacatgtggccatgaaacatatgaaaaaaagctcaatatcactgatcattagagaaatgcaaaccaaaaccgtaatgagataccatctcacacc

SEQ ID NO: 33890 - DNA, 120 bp, synthetic construct
  source 1..120: mol_type = other DNA
gagacagaaatactgtttgacccagcaatctcattactgggtatataaccaaaagaatataaattactctattataaaagacatatgcatgcatatgttcattgcagcactattcacaat

SEQ ID NO: 33891 - DNA, 120 bp, synthetic construct
  source 1..120: mol_type = other DNA
ctggaggccatccttagcaaattaacacaggaacagaaaaccaaatatcatatgttctcatttataggtgggagctgaattatgagtttatagttctcattataggtgggagatgaatga

SEQ ID NO: 33892 - DNA, 120 bp, synthetic construct; identical to SEQ ID NO: 9403
  source 1..120: mol_type = other DNA

SEQ ID NO: 33893 - DNA, 120 bp, synthetic construct
  source 1..120: mol_type = other DNA
aacagactatgaggtaattattattatctaaattttcagataaggaaaacatctttcagtttgagtaccttgcccaagatcacagctcataatttgttttaatgatataccttagataat

SEQ ID NO: 33894 - DNA, 120 bp, synthetic construct
  source 1..120: mol_type = other DNA
tacataatttcaaataacacagcttttactaacccattaaattcattacaaggaaccagtctaaggactgttgattgaatcaaaagagtgatggtgacattctctttctaattgtcttga

SEQ ID NO: 33895 - DNA, 120 bp, synthetic construct
  source 1..120: mol_type = other DNA
acattcgtattttaatgccccagttacacctctcccaatgtattactgagtaatctttttaatttttattgcgcaaacagaatctcaggtaagtctttgaattaattaatgctggtgatt

SEQ ID NO: 33896 - DNA, 120 bp, synthetic construct; identical to SEQ ID NO: 9404
  source 1..120: mol_type = other DNA

SEQ ID NO: 33897 - DNA, 120 bp, synthetic construct
  source 1..120: mol_type = other DNA
tatattttgggggaggaaatacactaaaatattttttaatcaaatattttaccagccattatgcatcagtcactctctaggtgccaggaatgttgcatggaaggaaaatgggcatggact

SEQ ID NO: 33898 - DNA, 120 bp, synthetic construct
  source 1..120: mol_type = other DNA
gtgagcttcgtgaaagaataagaaggccagtgaggctggaacagaacgggttggttggacaattataggagacaagattggacaagtacacatgtaagacatggtaaggagatttgattt

SEQ ID NO: 33899 - DNA, 120 bp, synthetic construct
  source 1..120: mol_type = other DNA
aaccttcatattctcaaaactaaggagatagcacccaagagcagaacctaaggagaagcaaatagaaaaagagaaattaggaaataagaaagttagcagttttctttgatagcaagtgga

SEQ ID NO: 33900 - DNA, 120 bp, synthetic construct; identical to SEQ ID NO: 9405
  source 1..120: mol_type = other DNA

SEQ ID NO: 33901 - DNA, 120 bp, synthetic construct
  source 1..120: mol_type = other DNA
aaggggaaaacacgaaatacaaagctgtcacctggcttccgtcaacagtgatctgatgatgaacggtgtcccctcagaatataaaggtgttctttgaacgttcacaggagcgatacctaa

SEQ ID NO: 33902 - DNA, 120 bp, synthetic construct
  source 1..120: mol_type = other DNA
gaacgcagagccatttgcacgcttcctgtccttggaaacggaagaaacttcaattacatgatggctttatgctacctagacctctttcttcagtctttggcatgttctaatctcggaggc

SEQ ID NO: 33903 - DNA, 120 bp, synthetic construct
  source 1..120: mol_type = other DNA
caccttcatctcctttcctttattcaggacagtcgtgccaagaaatgcctaagagaagggtgaccctggaaatgtcttgactctgggaagatcttctaaccactccacatggtaataagc

SEQ ID NO: 33904 - DNA, 120 bp, synthetic construct; identical to SEQ ID NO: 9406
  source 1..120: mol_type = other DNA

SEQ ID NO: 33905 - DNA, 120 bp, synthetic construct
  source 1..120: mol_type = other DNA
ttgcttgtagcagcctcagttatcttaaatattcctccaacacattattttctttattaactgttactatgcccatggcattcatcactctgacactttcataatggattatgaggcttg

SEQ ID NO: 33906 - DNA, 120 bp, synthetic construct
  source 1..120: mol_type = other DNA
ccttccaaagtgctcagatcatgggcatgcacccagccacatttttaacctatataaatagagatggggagaaaaaacaaaaaactccaaagcatttttccttctgtcttacacagttac

SEQ ID NO: 33907 - DNA, 120 bp, synthetic construct
  source 1..120: mol_type = other DNA
cagattgagggatcagtcatgcaaaactgcccccttcccacttcagatgccagttgctatcacctgtacttctgaccatccaattatagattggaggttcccacaaacctttcctcaggt

SEQ ID NO: 33908 - DNA, 120 bp, synthetic construct; identical to SEQ ID NO: 9407
  source 1..120: mol_type = other DNA

SEQ ID NO: 33909 - DNA, 120 bp, synthetic construct
  source 1..120: mol_type = other DNA
cttctccccagagattgtgagtgggctgaaaatcccaaccctctaatcctgccttggtctttctggtgaccagccccagccaccagtcacctcattagcatgcaaaagacactcttatca

SEQ ID NO: 33910 - DNA, 120 bp, synthetic construct
  source 1..120: mol_type = other DNA
caatatcacacacactagcttgggtcaatcagttgcattaattatttgtgtatgatgtgaagtactctttttagtcacaaatttatctctttcaaattaccaggtaggaagtcaaaggga

SEQ ID NO: 33911 - DNA, 120 bp, synthetic construct
  source 1..120: mol_type = other DNA
atatagaccctatatgcctgttatgaataatagatgagctttgcaatgaagagctatgcatgttactttttattagaatgagtatggcttcaatttttatgtgactatcaaaagagaaat

SEQ ID NO: 33912 - DNA, 120 bp, synthetic construct
  source 1..120: mol_type = other DNA
tcaccatctccctatacaagagatccccgacctagcaagctcatctacaaacaaatattcttattcttggaacagagttgccaaaagcagaggcacacagaaaaaaaagtctgtgtttga

SEQ ID NO: 33913 - DNA, 120 bp, synthetic construct; identical to SEQ ID NO: 9408
  source 1..120: mol_type = other DNA

SEQ ID NO: 33914 - DNA, 120 bp, synthetic construct
  source 1..120: mol_type = other DNA
aaacttctttttatagaatcagctccccttcctctgcgcttgtggtttccattactataaaagagagcactgaagtccaaagaaagtactgtgtatttcccttttggggccctgatgttc

SEQ ID NO: 33915 - DNA, 120 bp, synthetic construct
  source 1..120: mol_type = other DNA
cagagaaacagagaagttctgacctcaacaccaccttttcctacagaatatgtggcacccgtattttgtcagagaagacaaatgcgttgttcctcagattggtaggattcatgggcattt

SEQ ID NO: 33916 - DNA, 120 bp, synthetic construct
  source 1..120: mol_type = other DNA
agtcatactcagaagttaacaagaactttggggagagaggaagtcaaaatacagaaatgcattcaaaaaaaagtttaggatgtagaggaggatgggatcaccatgagacagccgtccaat

SEQ ID NO: 33917 - DNA, 120 bp, synthetic construct; identical to SEQ ID NO: 9409
  source 1..120: mol_type = other DNA

SEQ ID NO: 33918 - DNA, 120 bp, synthetic construct
  source 1..120: mol_type = other DNA
ctttttttcatggcatccatcttggcagtagcaagttcatagcccagagtaagaggattacctgttgggatgcacaaaggaatttaaaccccattgaaatttgtgacccaaatcattgtt

SEQ ID NO: 33919 - DNA, 120 bp, synthetic construct
  source 1..120: mol_type = other DNA
tacattccccagcgtgctcagaatatgcatagagagtttaaatcaaggcgtaagagtttccaacccttctatctgtatggccaagccccattcatgttagtgctggaagcattcttcctg

SEQ ID NO: 33920 - DNA, 120 bp, synthetic construct
  source 1..120: mol_type = other DNA
gaaagaaatcacacaaattgcaaggtcgcaatttttttcaacccatcacagagctgggattgagcttccaactagcttgaaatctaggaaagttgttgcctgagtgcttgcttacctaag

SEQ ID NO: 33921 - DNA, 120 bp, synthetic construct; identical to SEQ ID NO: 9410
  source 1..120: mol_type = other DNA

SEQ ID NO: 33922 - DNA, 120 bp, synthetic construct
  source 1..120: mol_type = other DNA
ttgtttgtttgtttgtttgtttgttttgagatggagtcttgctttgtcgcccaggctgcagtgcagtggtgcgatctcctctcactgcaacctccgcctccccattagcagggattacag

SEQ ID NO: 33923 - DNA, 120 bp, synthetic construct
  source 1..120: mol_type = other DNA
ccaaagtgctggaatacacgtgtgggccactgcgcccagcctcctccgttaatctattatcattcttctctaatattctcaaacttacttaattcattaacgtgatatatgttgacatct

SEQ ID NO: 33924 - DNA, 120 bp, synthetic construct
  source 1..120: mol_type = other DNA
atagcagacaggcatggtggccgacacctgtaaccccagcactttaggaggccgaggcaggaagatcacttgagcccagaagttcaagaccctgtggtttcagaggctgaggtgggaaga

SEQ ID NO: 33925 - DNA, 120 bp, synthetic construct; identical to SEQ ID NO: 9411
  source 1..120: mol_type = other DNA

SEQ ID NO: 33926 - DNA, 120 bp, synthetic construct
  source 1..120: mol_type = other DNA
ggttgaggtgatgtgagagaggaagcagaagcgaaggttacgcgaggaaagcccctcgttaaacttgggattttcacggggactcagtccagaggaagttgagaaaaccaacttaaatta

SEQ ID NO: 33927 - DNA, 120 bp, synthetic construct
  source 1..120: mol_type = other DNA
ggaattttatttgatgattagtctagcatcgtaatggtgtccttcgtgttgacgtgaaaacccagtcttccttcagttcatttcccgtttattagggatgcaaaactccagccacaggtg

SEQ ID NO: 33928 - DNA, 120 bp, synthetic construct
  source 1..120: mol_type = other DNA
ccatgcatcgctgggccgatgatgaaaatgaagaagtcttctgatgaagcgagaccccggaagtgcagcttcaggcaaaatcctgagcgaattctttgctgccaggacagtccataggct

SEQ ID NO: 33929 - DNA, 120 bp, synthetic construct
  source 1..120: mol_type = other DNA
agaccaggaaatcctctcacttacaatccatcaagagtagttcctccaaattgagtacaaagtctctaaaggccagcagagacaagtaaggacttgtagtgagctgcagctcaccacccg

SEQ ID NO: 33930 - DNA, 120 bp, synthetic construct; identical to SEQ ID NO: 9412
  source 1..120: mol_type = other DNA

SEQ ID NO: 33931 - DNA, 120 bp, synthetic construct
  source 1..120: mol_type = other DNA
ttaataagacacggagtcctgcttaccacccaggagacatattagcaaacaaaggggcacagcagaaatgtgtgtaaaattaggacattgaagtcacaaacaattaggaaaattttctag

SEQ ID NO: 33932 - DNA, 120 bp, synthetic construct
  source 1..120: mol_type = other DNA
ggacaggcttcgagggaagtgaaagtctttcggaattggtaaaatgggtgggtgacagatgaagcagagggctagggatggatgcctcacacaccaggctaaggacttgggtctttgatc

SEQ ID NO: 33933 - DNA, 120 bp, synthetic construct
  source 1..120: mol_type = other DNA
atgggaagagtgggttagaggagcataaaattgaaagcagagaaagcagcgtgggtaactgttagagtaacacagaccagacatgatggggctcgaattaaagtaggatcagggatctag

SEQ ID NO: 33934 - DNA, 120 bp, synthetic construct; identical to SEQ ID NO: 9413
  source 1..120: mol_type = other DNA

SEQ ID NO: 33935 - DNA, 120 bp, synthetic construct
  source 1..120: mol_type = other DNA
tagccaagtggtcctgatataattacatgggtccttctaagtgaaagaaagaggcaagagaatagaaggagatgtgatattagaagcaaaaatcagaggaaagtgattgctggaaggggg

SEQ ID NO: 33936 - DNA, 120 bp, synthetic construct
  source 1..120: mol_type = other DNA
gaggcaaaaaacagattatccgctaaagccttcagaaggggaacacagacaagctaacaccttgattagccctgtacaagtgttaaaagaaaaactttgaacaaatgaaatttattttga

SEQ ID NO: 33937 - DNA, 120 bp, synthetic construct
  source 1..120: mol_type = other DNA
gggcaggcaatatttatagagagaaaaaggaagtggtatacagaagcagcttgtttacagctcagtatttgccttatttgatcatggtctgatcagttggcaacctgtgattgcctgaag

SEQ ID NO: 33938 - DNA, 120 bp, synthetic construct
  source 1..120: mol_type = other DNA
ttaagttagatttcagtatactacgtaggaattcaaagtacagaggccgctttaagccaaatttaatttaatttaacaggacccattttaggcttataatttccagaactgtccaacaat

SEQ ID NO: 33939 - DNA, 120 bp, synthetic construct; identical to SEQ ID NO: 9414
  source 1..120: mol_type = other DNA

SEQ ID NO: 33940 - DNA, 120 bp, synthetic construct
  source 1..120: mol_type = other DNA
ctggaaagaggaatggggaggcagtgtggtcagctgttttgcataacaagccctgtagaaatacagatgctccttgacttcaggtgggtttgtgtcctgataaactgcaagttgaaaatg

SEQ ID NO: 33941 - DNA, 120 bp, synthetic construct
  source 1..120: mol_type = other DNA
caggtgagagtgttataccacatatcactagcccagagaaagactgacatttcaaatttgaagtacatttcttccagaatgtgtactgctttcacgccatcacagctgaacaatcttaag

SEQ ID NO: 33942 - DNA, 120 bp, synthetic construct
  source 1..120: mol_type = other DNA
aaaagacatttttttcttttctttttcttttctttttttttttttttaggcagagtcttgctctgtcacccaggctggagtgcagtgacatgatcttggctcactgcaggctccacctcc

SEQ ID NO: 33943 - DNA, 120 bp, synthetic construct; identical to SEQ ID NO: 9415
  source 1..120: mol_type = other DNA

SEQ ID NO: 33944 - DNA, 120 bp, synthetic construct
  source 1..120: mol_type = other DNA
atgttaacactcttccgctaaattaccactgcaattgtgtaacttcaaaatgctcaggatattgtcaacagaggaaatagaaattgatcttctagcacaatagtcaaacaaaattgacta

SEQ ID NO: 33945 - DNA, 120 bp, synthetic construct
  source 1..120: mol_type = other DNA
ataagctaagtaagaaaatcgcaaatgctgacatccaaggaagctttccaagcatagaaataaactctgatagattatttcagatccaggatatttggaaaataaatcagattgcctttt

SEQ ID NO: 33946 - DNA, 120 bp, synthetic construct
  source 1..120: mol_type = other DNA
tagaggaaacatgtaacacgacaggactccagaagcacgtgctttaaggtataaggacatgtacccctggtgacagaggatgtataaatattgtgagtccaaatatataggccacttgtt

SEQ ID NO: 33947 - DNA, 120 bp, synthetic construct; identical to SEQ ID NO: 9416
  source 1..120: mol_type = other DNA

SEQ ID NO: 33948 - DNA, 120 bp, synthetic construct
  source 1..120: mol_type = other DNA
tgataaagagcatctgcaaaaaatcttacagctaacacagcggtgaaagactgaaatttttcccccaaagatcgggaacaaagcaatgatgtccactctcgccatgcttattcaacatgg

SEQ ID NO: 33949 - DNA, 120 bp, synthetic construct
  source 1..120: mol_type = other DNA
aaggcgtgcagatttcaaaggaagaaataaaaatggatcaaagtctaatatgtaaaacataaagtcacaaaactctcaggagaaaatcttcaggatctaggattaagcaaaaagctttta

SEQ ID NO: 33950 - DNA, 120 bp, synthetic construct
  source 1..120: mol_type = other DNA
gaaaatgttaagatgctgtattaaattatactttttattttgatataattgttgattcacagacacttttaagaaatgttacagagatatctcatgtacattttacccagtttcccccaa

SEQ ID NO: 33951 - DNA, 120 bp, synthetic construct; identical to SEQ ID NO: 9417
  source 1..120: mol_type = other DNA

SEQ ID NO: 33952 - DNA, 120 bp, synthetic construct
  source 1..120: mol_type = other DNA
ccagtttttgtctgaataaagctgctatgagcatacatgtgcagatttttctctgaacataagtcttcatttctctgggataaatgctcaggagtgcaattgctgggttgtatggtggtt

SEQ ID NO: 33953 - DNA, 120 bp, synthetic construct
  source 1..120: mol_type = other DNA
tgtgcctactttttatttttagccatcatgataggtatatagtaatatcttattgtggttttaatttgtaattctctaatggctaatgacattgcacatgttttcatgtccttattttgt

SEQ ID NO: 33954 - DNA, 120 bp, synthetic construct
  source 1..120: mol_type = other DNA
gccattttgatgatattgtttcttcctatccatgagcatgcaatgtttttccatttgtttgtgtcatttctgatttcattgagcagtgctttttagttcttcttgtggagatctttcacc

SEQ ID NO: 33955 - DNA, 120 bp, synthetic construct; identical to SEQ ID NO: 9418
  source 1..120: mol_type = other DNA

SEQ ID NO: 33956 - DNA, 120 bp, synthetic construct
  source 1..120: mol_type = other DNA
ccagttttcaaggggaatgcttccaggttttgcccattcagtatgatgttggctgcgggtttgtcatagatggctcttactattttgacgtatgttccttcaataactagtttatcaaga

SEQ ID NO: 33957 - DNA, 120 bp, synthetic construct
  source 1..120: mol_type = other DNA
atgttgaacaaacctcatatcccagggataaagcctacttgatcatggtagattggcttttggatgtgctgctggattcggtttgctggtattttgttgaggattttttgcatcaatgtt

SEQ ID NO: 33958 - DNA, 120 bp, synthetic construct
  source 1..120: mol_type = other DNA
aaatagtttcagcaggaatggtaccatttcttctttgtacacctgatagaattcagctgtgaatccatttggtcctgggttttgttttgttttgttttgttttgttttggtaggctattt

SEQ ID NO: 33959 - DNA, 120 bp, synthetic construct; identical to SEQ ID NO: 9419
  source 1..120: mol_type = other DNA

SEQ ID NO: 33960 - DNA, 120 bp, synthetic construct
  source 1..120: mol_type = other DNA
tggttatttcttgtcttctgctagccttgagattggttggctgtgatactctagttcttttagttattatgttaggttgttaaattgagatctttctaagtttttgatgttggcatttag

SEQ ID NO: 33961 - DNA, 120 bp, synthetic construct
  source 1..120: mol_type = other DNA
ccaaaagtcattcaggagcaggttatttaatttccatgtaattgtacggttttgagtgaacttttttgtcttggtttctaatttgattgtgctgtggtccaagagattttttcttatgat

SEQ ID NO: 33962 - DNA, 120 bp, synthetic construct
  source 1..120: mol_type = other DNA
aagatgtctatcaggttcatttgatccagagctgagttcaggtcctgggtatctttgttaattttctgtcttgatgatctgtctaacattgtcaatgtggtgtcaaagtctcccactatc

SEQ ID NO: 33963 - DNA, 120 bp, synthetic construct
  source 1..120: mol_type = other DNA
ttaccattatgtaatgcccttcttcatcttttttgatctttgttggtttaaagtctgttttgtctgaaactagtattgcaacccctgcttttttctgttttccatttgcttggtagattt

SEQ ID NO: 33964 - DNA, 120 bp, synthetic construct; identical to SEQ ID NO: 9420
  source 1..120: mol_type = other DNA

SEQ ID NO: 33965 - DNA, 120 bp, synthetic construct
  source 1..120: mol_type = other DNA
ccttctctgaaaaggttcttatttctccttcacttttgaagattagtttggccagatatgaaattctgggttgaaattattttctttaagaataataaatgttggccccagtctcttctg

SEQ ID NO: 33966 - DNA, 120 bp, synthetic construct
  source 1..120: mol_type = other DNA
ataattatgtgcctttggaatgatcttcttgtgaagtatcttactggggttctctgcatttcctgtattttaatgttggcctctccagctaggttggggagattctcatggatgataccc

SEQ ID NO: 33967 - DNA, 120 bp, synthetic construct
  source 1..120: mol_type = other DNA
attcttttttctctattcttgtctgactatcttatttcagaaagccagtcttgaagtgtggagattcttttttccactgggtcagttctgctattaatagttgtgattgcattatgaaat

SEQ ID NO: 33968 - DNA, 120 bp, synthetic construct; identical to SEQ ID NO: 9421
  source 1..120: mol_type = other DNA

SEQ ID NO: 33969 - DNA, 120 bp, synthetic construct
  source 1..120: mol_type = other DNA
caaccttttttatttatcctatttatcctatttgatgactttgagggtttgattgtggtataaggtggattcagccaactgacttcatttctggacaattttatttggccagtattccac

SEQ ID NO: 33970 - DNA, 120 bp, synthetic construct
  source 1..120: mol_type = other DNA
gagtggtgcagtccgaagtgctcccagaccactggtcactacactccaatgagtggtgtcagccaaagtgtttcatagtacagtgacaggaggatctgtccttgtttgagtgtaccagca

SEQ ID NO: 33971 - DNA, 120 bp, synthetic construct
  source 1..120: mol_type = other DNA
ggcaactgtgtgtgtggtcacacaggaagtggtgttggcttaggggcaaggcattggcaggtgcaggtctgcgtgccttttctgtgcaggagtggtcactcagggtgggggaggatcagc

SEQ ID NO: 33972 - DNA, 120 bp, synthetic construct; identical to SEQ ID NO: 9422
  source 1..120: mol_type = other DNA

SEQ ID NO: 33973 - DNA, 120 bp, synthetic construct
  source 1..120: mol_type = other DNA
gcagatgtggccaggccagggccccaggagaggccagaagaccaacggttgctcaggtagaaccagactcatctgatgggcaagaccaccctacagatttcaggaccaacagtttcccta

SEQ ID NO: 33974 - DNA, 120 bp, synthetic construct
  source 1..120: mol_type = other DNA
ctacggcttctctaagcagctcttcctgccaactcaagtgtccatggtggtcaatgggtctcctcctgccatggttgcagaggtcatagtgacagtgggttgttccttgccagttcaact

SEQ ID NO: 33975 - DNA, 120 bp, synthetic construct
  source 1..120: mol_type = other DNA
taggtgccttctgtctgaacatctgttaggagcacgccagtcatctgggttcctcattgagaactgtttcacctggctgcatctagtcagcgatcttgccctccccccaaccaagataca

SEQ ID NO: 33976 - DNA, 120 bp, synthetic construct; identical to SEQ ID NO: 9423
  source 1..120: mol_type = other DNA

SEQ ID NO: 33977 - DNA, 120 bp, synthetic construct
  source 1..120: mol_type = other DNA
ggagattccagatagctccctttccttctgccacatgaggtcttagtgagaagatgctgccagcaggccttcaccagaaccctaccaggctgacacactgatctcagacctccagcctcc

SEQ ID NO: 33978 - DNA, 120 bp, synthetic construct
  source 1..120: mol_type = other DNA
gacactttcctaagtcttcctgaggcacctaggagaaatagtttcaaacaatcatgatgactacatcagtagcttataattcttttgatatcaggatccctttttattcataaaattgtt

SEQ ID NO: 33979 - DNA, 120 bp, synthetic construct
  source 1..120: mol_type = other DNA
ggaaaatagctgtcttctccagcacaaaaaaatagtgaaaaaaaaggaattattttacatttgtaaaaatctctttaatgtctggcttaataaagctagcttggttatatattcttctac

SEQ ID NO: 33980 - DNA, 120 bp, synthetic construct; identical to SEQ ID NO: 9424
  source 1..120: mol_type = other DNA

SEQ ID NO: 33981 - DNA, 120 bp, synthetic construct
  source 1..120: mol_type = other DNA
tttttaagccatatttgttaatatcaccaccaatctcatcagaaacatctttaagtagtgagaagctgtggcacacgtaagttttccaaaattttaattttctcttgaaattccaatttc

SEQ ID NO: 33982 - DNA, 120 bp, synthetic construct
  source 1..120: mol_type = other DNA
aatgatgacccactaaaaaaaaaatgtttaacttcactcacaactcatgcaattacataatggcttttccacaggacaactgcctttccatcagtatgcaccagaaatgctgcctatgtt

SEQ ID NO: 33983 - DNA, 120 bp, synthetic construct
  source 1..120: mol_type = other DNA
gcttatggcagtgaagaacatgacctacctgtacagcttggtgtcaccaccttgatttgtgctcaggcactaacagtttcacgtgaccaccatagatttctgtaccaatatgtaaataat

SEQ ID NO: 33984 - DNA, 120 bp, synthetic construct; identical to SEQ ID NO: 9425
  source 1..120: mol_type = other DNA

SEQ ID NO: 33985 - DNA, 120 bp, synthetic construct
  source 1..120: mol_type = other DNA
tcaaccgttttcagtagccattttggtggttgtgtatgagtgttattatccttagactgctgtctatgttaactcaggaaaagcaaataagtatggacattctaattgtgtctgtccctg

SEQ ID NO: 33986 - DNA, 120 bp, synthetic construct
  source 1..120: mol_type = other DNA
aatcttggctcactgtaacctccacctcccaagttcaagcgcttctcttgcctcagcctcccgagtagctgggactacaggcgcgtgccaccacacccagctaatttttgtatttttagt

SEQ ID NO: 33987 - DNA, 120 bp, synthetic construct
  source 1..120: mol_type = other DNA
atttttttaaatgtatacatgtataaatgttttattgccattgaacaggctggacacaatgaccattcctatctatttaggctcccccactgcccctctccctgctttctttccatgtcc

SEQ ID NO: 33988 - DNA, 120 bp, synthetic construct; identical to SEQ ID NO: 9426
  source 1..120: mol_type = other DNA

SEQ ID NO: 33989 - DNA, 120 bp, synthetic construct
  source 1..120: mol_type = other DNA
cttctttctttgaatcctaacccacaccatctcagaatggtttcaggaacttccttgtggtaactcccttgacgccacttttgaggtgactccagcagcgggttcagtgggacaaaacac

SEQ ID NO: 33990 - DNA, 120 bp, synthetic construct
  source 1..120: mol_type = other DNA
tctggccaagaaatgaacaagatgaaccagaaacatgttgtcatcccagataacaaagaaattatcaaaagaaatttgcgtcaaaagaactcagtttcatttttagccacttgaagaagt

SEQ ID NO: 33991 - DNA, 120 bp, synthetic construct
  source 1..120: mol_type = other DNA
ctgattggccatctgtaggttttattaatagtaggaaaccaatttgctaacttgaaaactggtaaataaaaggagagtcaaacactgatcctgcctttccactgtaccactaagtagccc

SEQ ID NO: 33992 - DNA, 120 bp, synthetic construct; identical to SEQ ID NO: 9427
  source 1..120: mol_type = other DNA

SEQ ID NO: 33993 - DNA, 120 bp, synthetic construct
  source 1..120: mol_type = other DNA
gggaaactctacaggtcaaatggattgagcttttcaacagattaatcataagggggaaaaaaaggctgatgggggagaaaccagtgaagtatgagagacgtaaaagacaactaagctgtg

SEQ ID NO: 33994 - DNA, 120 bp, synthetic construct
  source 1..120: mol_type = other DNA
cgaggggaaggagaggctttgattggcctgacgtacagagacttccgctggagctggcaaagtcctgttccttgacttgattacaggggtttttcttaaataattcactaaaatgtacat

SEQ ID NO: 33995 - DNA, 120 bp, synthetic construct
  source 1..120: mol_type = other DNA
ctttggagatcatgacttataggagtagggctggaccacagaaaagtaaatgatttggggctggaaggagtaaggtctcaggggagtttctggacaatgcccttggcaatggggattaat

SEQ ID NO: 33996 - DNA, 120 bp, synthetic construct; identical to SEQ ID NO: 9428
  source 1..120: mol_type = other DNA

SEQ ID NO: 33997 - DNA, 120 bp, synthetic construct
  source 1..120: mol_type = other DNA
atgtcatctccctctggccaaagaaccgggagaatgatctgccactcaaagacaaggaaaaagagacattacctcattaccagacatctgcgtcctcacatatcctggaaagaaatcgag

SEQ ID NO: 33998 - DNA, 120 bp, synthetic construct
  source 1..120: mol_type = other DNA
tctgcttatcccatttctagcttcagaaaaaaattatcccggtgatccctgagaggcacaatcagctttccttgcctcagatcattgacgttagggaaggtgggagtggggaaggtctgg

SEQ ID NO: 33999 - DNA, 120 bp, synthetic construct
  source 1..120: mol_type = other DNA
ttagcccaagtaggaaggctgcaatgccactcagcatctttctccaagaatattcagactgagctcctatgggaaacaggtctttaaattagtaaaaatatcccaatatttaaagcactt

SEQ ID NO: 34000 - DNA, 120 bp, synthetic construct
  source 1..120: mol_type = other DNA
ttacagattctcacagcccataagaatgcctcctaaatactaagaccaaagaattagaggacaccagttcatagggttggaagcacataatgaggtgattagatctcctcatttcttgga

SEQ ID NO: 34001 - DNA, 120 bp, synthetic construct; identical to SEQ ID NO: 9429
  source 1..120: mol_type = other DNA

SEQ ID NO: 34002 - DNA, 120 bp, synthetic construct
  source 1..120: mol_type = other DNA
caccacagtctgaaaggtccagtctccattcctgatagggccagtggacatgaccccagctctctcctcctgcccattcaggaaccacttgatcttgatatcccctggatagaagcctgt

SEQ ID NO: 34003 - DNA, 120 bp, synthetic construct
  source 1..120: mol_type = other DNA
ctgggacaggagattctttagggactatcactatgtctaatctctttcccagatcacccaagtgaacacaaagtataggcaagtctcagcccccaagatcagtaacagggtatgtcaatg

SEQ ID NO: 34004 - DNA, 120 bp, synthetic construct
  source 1..120: mol_type = other DNA
gacttgtgaggataatatatcacagctggggccagaacatctacacagacaaccatttatcctaaagcagaaaattgcttgtaagaaagaagagccatggccaggttcacatgggggaca

SEQ ID NO: 34005 - DNA, 120 bp, synthetic construct; identical to SEQ ID NO: 9430
  source 1..120: mol_type = other DNA

SEQ ID NO: 34006 - DNA, 120 bp, synthetic construct
  source 1..120: mol_type = other DNA
gcctggtaaattacgtcagaccacatggatctaagaggaggcctttgacctcagtatgctcaaaaagcacagtgtcaagtgagaaaagaaacagaatgggattcaacagagaatgacatt

SEQ ID NO: 34007 - DNA, 120 bp, synthetic construct
  source 1..120: mol_type = other DNA
aacggaggcaagagaagagacgagagagtcttgcactactgccaataattacaatgtgctgtgaactcattgggtaaaattaaaccaatcctatgcacttaagaacaacaactacaataa

SEQ ID NO: 34008 - DNA, 120 bp, synthetic construct
  source 1..120: mol_type = other DNA
aaagataattgctattaatgttgggttgtaatttactttcctttctaagttcagaagcctcctccaactctgaactgagccataagaatgaccttcctgggtgaaccccacttatccctc

SEQ ID NO: 34009 - DNA, 120 bp, synthetic construct; identical to SEQ ID NO: 9431
  source 1..120: mol_type = other DNA

SEQ ID NO: 34010 - DNA, 120 bp, synthetic construct
  source 1..120: mol_type = other DNA
ttgcttcatggctgcatattctgtcacctgtgctagaaaaataacagtgacaagtaacttgtacctggtagccggaggacaaggacaatgtattctattcaacttctcttacttctcaaa

SEQ ID NO: 34011 - DNA, 120 bp, synthetic construct
  source 1..120: mol_type = other DNA
ccaaaaaatcacagattgcctctgtgacccagcctactgcaggttgtttctcccagcaggctcgaacccaagccaaggccttcaacacgcccaggcactgactgaggttgatacacacaa

SEQ ID NO: 34012 - DNA, 120 bp, synthetic construct
  source 1..120: mol_type = other DNA
ggaagaacactgttctttgaaaccaaaagccacttccagtctggtctgtggcctggacttacaaagaaaggcatcactcccccatgccaattcttgcatacacactggaaaaaaacaatt

SEQ ID NO: 34013 - DNA, 120 bp, synthetic construct; identical to SEQ ID NO: 9432
  source 1..120: mol_type = other DNA

SEQ ID NO: 34014 - DNA, 120 bp, synthetic construct
  source 1..120: mol_type = other DNA
tcaaccattgtttgcctgcagaatcactgacagtaatttaggtatactaaaaatgggctgggagaagaagtaaaaatatatgtttgacatattatggggccctagaagaactaggcagac

SEQ ID NO: 34015 - DNA, 120 bp, synthetic construct
  source 1..120: mol_type = other DNA
ttaagcattctgaagcatatgcctcaagaagatttagtaaagggattatcagagaagaaatagaagacatagagaacatttggagagtacgatttcctataagccaaaatgaccacaaaa

SEQ ID NO: 34016 - DNA, 120 bp, synthetic construct
  source 1..120: mol_type = other DNA
gagagcattattgtgttttatggttagtagggcaccaataaccttcaagaggacagcagagtgttaaaggtagaagccatatttcaaaagaatgaattggaaacaagaaaacaaaggccg

SEQ ID NO: 34017 - DNA, 120 bp, synthetic construct; identical to SEQ ID NO: 9433
  source 1..120: mol_type = other DNA

SEQ ID NO: 34018 - DNA, 120 bp, synthetic construct
  source 1..120: mol_type = other DNA
ctaaaaaagttgacctcatcgaagtaaagagtacgttaggagttaccagaggctggggagtcaggggtagaaatgggtagaggttggtaacaagtacaaagttacagttagacagaagga

SEQ ID NO: 34019 - DNA, 120 bp, synthetic construct
  source 1..120: mol_type = other DNA
ggacattttctccaaaatgctgtggtctgaatgtcactcaaaattcaagtgttgcaatttaatcaccaatgtgatagtatcaaaaggtgggccctttaggaggtgattaagtcatgaatg

SEQ ID NO: 34020 - DNA, 120 bp, synthetic construct
  source 1..120: mol_type = other DNA
agttagagacctgcctggaaaacatagtgagacccccatgtccaaataaaatttaaaaaattaaagaaataaacatggtggcatgcacctgtggtcttagttactttggaggctgaggtg

SEQ ID NO: 34021 - DNA, 120 bp, synthetic construct; identical to SEQ ID NO: 9434
  source 1..120: mol_type = other DNA

SEQ ID NO: 34022 - DNA, 120 bp, synthetic construct
  source 1..120: mol_type = other DNA
gggcaatgtttactcatcatttcacatcatctttcagcatgaaatgtgcccctgatttgcctatactgtgcatgttaagaatgaacccagggtatcatggtaaccacaagttcacttcag

SEQ ID NO: 34023 - DNA, 120 bp, synthetic construct
  source 1..120: mol_type = other DNA
atcttgttacactaacacaaatggactaagacagagagcataaggcttgggggaagaagggtacacttcttcagataaaagaataaagacaggacgattagcaggggataaaggggaatg

SEQ ID NO: 34024 - DNA, 120 bp, synthetic construct
  source 1..120: mol_type = other DNA
agtttttaaagttttaattaagcaggattcagaaaagagaggtgagatgcaattgtgcaaccttttactgttctatgacccttagtaaatgcccttggttagaggcctggatcagaccaa

SEQ ID NO: 34025 - DNA, 120 bp, synthetic construct
  source 1..120: mol_type = other DNA
ttcatcctctaattcctaggcccatggaaaacgagaaactagacttcctactctcctggagctgtgtgactcgttctcaccaatggaaagtgaacaaaaggttcctggtcaaagaattta

SEQ ID NO: 34026 - DNA, 120 bp, synthetic construct; identical to SEQ ID NO: 9435
  source 1..120: mol_type = other DNA

SEQ ID NO: 34027 - DNA, 120 bp, synthetic construct
  source 1..120: mol_type = other DNA
tcatgtaaatgtgacgattcatgaagtggaaggctggccacaggcttactggtagacccccgagtacaaggcatttgaccctggttttgagtactcctcctccaggtggatggctgtgga

SEQ ID NO: 34028 - DNA, 120 bp, synthetic construct
  source 1..120: mol_type = other DNA
gttttattgcatttggaaatggagacaaacactcaacacaggctaagtgaacaaggacacggcacggagatgatcagatgcagtaacagcatgagcgggtggaagaggcgtgtgtcccct

SEQ ID NO: 34029 - DNA, 120 bp, synthetic construct
  source 1..120: mol_type = other DNA
ttagaggagagagggggttgataaatggcaagggatgtggggatggggaggaagtggaggatatggcgctggaccagaaagttaggagggctgctctttcttctctgtaaatgtgtctaa

SEQ ID NO: 34030 - DNA, 120 bp, synthetic construct; identical to SEQ ID NO: 9436
  source 1..120: mol_type = other DNA

SEQ ID NO: 34031 - DNA, 120 bp, synthetic construct
  source 1..120: mol_type = other DNA
aaggtacacaaaaagggaaaataaccaaggaatttcatcatagctgtttggtgtcaggacagatctctgtaaggaaatcatatcctacctaaccaaaggaaatcagtgatctcacatgac

SEQ ID NO: 34032 - DNA, 120 bp, synthetic construct
  source 1..120: mol_type = other DNA
ttagatggcctctggtacatcttaaataaactgaagcatcagattcacccccattagaagcgtttttgagtcattttctgtgcatagtgtcagtgtctacgatagaagggcctgggctta

SEQ ID NO: 34033 - DNA, 120 bp, synthetic construct
  source 1..120: mol_type = other DNA
tgatctttttttcctgcctgacttcagccagcagccctccctaaatagctacaggctcctctgtgatttttcactcaagctcatattttgcttctctcttttctttccttcccctttctc

SEQ ID NO: 34034 - DNA, 120 bp, synthetic construct
  source 1..120: mol_type = other DNA
acaaatatcccttcaactgctattttggtgactttgacatggaagtaaaacgtacatctcaattcattttcttccttctacttcctcctaacacatcaacataatccacactgccctgga

SEQ ID NO: 34035 - DNA, 120 bp, synthetic construct; identical to SEQ ID NO: 9437
  source 1..120: mol_type = other DNA

SEQ ID NO: 34036 - DNA, 120 bp, synthetic construct
  source 1..120: mol_type = other DNA
gtggactcacccgaagtattgttttacatgtactatttgcctcaatttccctgtgatggttttgtccatcacctcatcctgaaaaaataaatgttggtgatgctttgttccacatattcg

SEQ ID NO: 34037 - DNA, 120 bp, synthetic construct
  source 1..120: mol_type = other DNA
aaaaacaaaaaaaaccccttgatcttaatgggtgttttttaatctgtgctagaatctgtttgcaatgttttatttaggatttttgtgtcagtataataagtaaattcatctacaattttt

SEQ ID NO: 34038 - DNA, 120 bp, synthetic construct
  source 1..120: mol_type = other DNA
taatttttgtttgtttgtttgtttgttttagagacaaggcctcactctgttgcccaggctggagtgcagtggcacaatcatagctcactgcagccttgaactgggcccaagcgatcctcc

SEQ ID NO: 34039 - DNA, 120 bp, synthetic construct; identical to SEQ ID NO: 9438
  source 1..120: mol_type = other DNA

SEQ ID NO: 34040 - DNA, 120 bp, synthetic construct
  source 1..120: mol_type = other DNA
ctcccagattcaagcaattctcctgcctcggcctcccaagtagctgggattacaggcgcccaccaccacacccagctaatttttgtatttttggtagagacagggtttcaccatgttggc

SEQ ID NO: 34041 - DNA, 120 bp, synthetic construct
  source 1..120: mol_type = other DNA
ccaggcccagcctatttttttgtccacttaactggtctagtccagggaaagggaattaaagtgttctattggtagtacatttctgaatattttccttgtatctaccttaatttctgcttt

SEQ ID NO: 34042 - DNA, 120 bp, synthetic construct
  source 1..120: mol_type = other DNA
ttttttggtgaggagtgtctgaatttcatcttgtttggtaagacgaatgtgacctctgcttcccttttgtttgccttctcttgttatgtctttgcccatcatcttatttgttgaaaataa

SEQ ID NO: 34043 - DNA, 120 bp, synthetic construct; identical to SEQ ID NO: 9439
  source 1..120: mol_type = other DNA

SEQ ID NO: 34044 - DNA, 120 bp, synthetic construct
  source 1..120: mol_type = other DNA
tagttccctcttcctttagataattcctattagttttaaataatgaacaatcacaaaactagctcatatcctctcccttcctctttctgtgtgtgtgtctacctttgtagtcttaaatgt

SEQ ID NO: 34045 - DNA, 120 bp, synthetic construct
  source 1..120: mol_type = other DNA
tcattgagaaatgtgtttcaatttctcaattaatttcttcctataattctcctatatttcttacatattttgtagttttattgctaggtgcaaactgattcagttttagtataatgttct

SEQ ID NO: 34046 - DNA, 120 bp, synthetic construct
  source 1..120: mol_type = other DNA
ctgtaattacataagctgtctttctgtcttctgttagtgtttgctttgtgtatcttatatctggttttgatttaacattttcatgtttttaggtttcttgtgatcttatgaagggcatat

SEQ ID NO: 34047 - DNA, 120 bp, synthetic construct; identical to SEQ ID NO: 9440
  source 1..120: mol_type = other DNA

SEQ ID NO: 34048 - DNA, 120 bp, synthetic construct
  source 1..120: mol_type = other DNA
atctctaccctcctttcaaacaagacaaagactttaggtgctttaactttgtctgcctcattctcatgtcacttgtggttgctctgccttatttttaaatttaatagtcatttttattac

SEQ ID NO: 34049 - DNA, 120 bp, synthetic construct
  source 1..120: mol_type = other DNA
tgggtttagtatctctgttacttacatgataatattaaaaagcaaatgataactacaatacaatgctactttcacccagaagattgtcaaaattttaaaaattaacactgtctgttggtt

SEQ ID NO: 34050 - DNA, 120 bp, synthetic construct
  source 1..120: mol_type = other DNA
attggactcagcaactcccctttaagattgtatcatacttgtatttttgcacatgtgcattacaatgtctatacaagactaactagcaacagcaaaagacttccaataacctaactagcc

SEQ ID NO: 34051 - DNA, 120 bp, synthetic construct; identical to SEQ ID NO: 9441
  source 1..120: mol_type = other DNA

SEQ ID NO: 34052 - DNA, 120 bp, synthetic construct
  source 1..120: mol_type = other DNA
agtaggaagataagtggagtcagggagtataggcaactcttttgaggagttttatgcaaagctgggcaagtccacctcttccttagctatgtgacccaggcaagttagtaaatgtttcta

SEQ ID NO: 34053 - DNA, 120 bp, synthetic construct
  source 1..120: mol_type = other DNA
aggtttcagatacttggcacagcaatagcacatagtaagcaccagtgaatgcttagtagtagtagtagtctaattcctaagagtccatggaactctaggttcaaaacccagtttcttctg

SEQ ID NO: 34054 - DNA, 120 bp, synthetic construct
  source 1..120: mol_type = other DNA
ttattccctagtcctttccccacaaaattctgacaattacgcatttcctgcttgtttcacaattgccatgtggattacaagtggctatccctgggtggaggcataaaggacttgaaactc

SEQ ID NO: 34055 - DNA, 120 bp, synthetic construct; identical to SEQ ID NO: 9442
  source 1..120: mol_type = other DNA

SEQ ID NO: 34056 - DNA, 120 bp, synthetic construct
  source 1..120: mol_type = other DNA
gagtttcccctgagataagaaactttcaggacatcttaaggtctactgcatcttcctgtactgcccatcaagataagttttccacccagctttatcatgattagctgcgtgatttcatgt

SEQ ID NO: 34057 - DNA, 120 bp, synthetic construct
  source 1..120: mol_type = other DNA
cttcttctgtgagggctgcagcttccatgtagttgggagatacaggaattattattcctgttttatgaataaaggacatttgtgggagagaaaggaatcaggccagagttctttctctcc

SEQ ID NO: 34058 - DNA, 120 bp, synthetic construct
  source 1..120: mol_type = other DNA
actgcaccctgctcccaacagctgccaggcaagaaaaaatccaaaacagcagttctggggaattcattgccagcactggaaactacctgctgtttccaggaatatgaaggtttctctttc

SEQ ID NO: 34059 - DNA, 120 bp, synthetic construct; identical to SEQ ID NO: 9443
  source 1..120: mol_type = other DNA

SEQ ID NO: 34060 - DNA, 120 bp, synthetic construct
  source 1..120: mol_type = other DNA
agagttccccagactgacgacataagtaaggcctcctggaagacctgaaccctgagttaagtcttgaacttgaaaatcaggggcgagtcgagcagaaaatgggcaagaaaacaccatatg

SEQ ID NO: 34061 - DNA, 120 bp, synthetic construct
  source 1..120: mol_type = other DNA
gaacagtgtgtgctctgaaaaggatctctgcagcagggcttgagagcacctgaaggaatttccagaaatgccatcatcgtatgtgacacagaatttagaaaaatgactttgtgaagaatg

SEQ ID NO: 34062 - DNA, 120 bp, synthetic construct
  source 1..120: mol_type = other DNA
cgggactggagagaagagaatagattctgaattatttagagctaagagcagcagagcttttcttgatgggattatggattagggtttatggacccaagatgcaatataattgattgggtc

SEQ ID NO: 34063 - DNA, 120 bp, synthetic construct
  source 1..120: mol_type = other DNA
aaccaacctcatagggttggggataatgattaaaaacgataatacatgaaaaacacttagcatagctcctactcccattaaaactctataaatggtagctgttaccaatgtcgctattaa

SEQ ID NO: 34064 - DNA, 120 bp, synthetic construct; identical to SEQ ID NO: 9444
  source 1..120: mol_type = other DNA

SEQ ID NO: 34065 - DNA, 120 bp, synthetic construct
  source 1..120: mol_type = other DNA
atgtaagaaggaaaatattttaaaatatatgtattatgccacaaaatactcctcatcaccaggcaaagctctagtcaccagggaattaagtttcctggacacagacagcccccaccccac

SEQ ID NO: 34066 - DNA, 120 bp, synthetic construct
  source 1..120: mol_type = other DNA
gggtcctggagacgcccctgagaagagggcccagtatccctggggcctcagtccatcagccgctgctgcaccaggcgggaatagaggtcctgtccctcctagagctgggcaagcttctgc

SEQ ID NO: 34067 - DNA, 120 bp, synthetic construct
  source 1..120: mol_type = other DNA
cacagtgcctcagaaagacaggaatgagatggacaccacatccacctgggcaccatctcttatgatttagggtaaagaaggtgtgaaataaaagaaggtaggaaagggcagtagataaag

SEQ ID NO: 34068 - DNA, 120 bp, synthetic construct; identical to SEQ ID NO: 9445
  source 1..120: mol_type = other DNA

SEQ ID NO: 34069 - DNA, 120 bp, synthetic construct
  source 1..120: mol_type = other DNA
agacgttgtttctgtcccgcagccagctggcttcccttctcccctacatctgaggaaatcagagaaattcccttcctcagatacaagtgacacagacaacacacaaggagggacaagtgc

SEQ ID NO: 34070 - DNA, 120 bp, synthetic construct
  source 1..120: mol_type = other DNA
ctgcattgctctctgcaaacaaagactcttgatcaagagggaggctgaagaattcagtgtgtggggaaggagacgtaggaatggaggaaagggcagaggaacagcaaacatcaagctaca

SEQ ID NO: 34071 - DNA, 120 bp, synthetic construct
  source 1..120: mol_type = other DNA
tctgcgtgggcagcctgggcagccgccatcaccttatcatcttcgcagctctgcagcccataagcaatgttgttcctcacagaaccggagaacagcacaggctcctgcccaactgaaacc

SEQ ID NO: 34072 - DNA, 120 bp, synthetic construct; identical to SEQ ID NO: 9446
  source 1..120: mol_type = other DNA

SEQ ID NO: 34073 - DNA, 120 bp, synthetic construct
  source 1..120: mol_type = other DNA
accagaaaaagagttaagggcctgccccttctccctcaaaatccctccatttctcttcttagcagaggcaagaccaggttctcagaggcaaatgaactataggctgtgatgtccaattat

SEQ ID NO: 34074 - DNA, 120 bp, synthetic construct
  source 1..120: mol_type = other DNA
agagtggtgggggcaagcgtgccaggtgaaggcagatttggctgtcggtccatgtaggagaaaaccttctctgcagctcccacgttgctgagcatatccccatatatgtataccagggtc

SEQ ID NO: 34075 - DNA, 120 bp, synthetic construct
  source 1..120: mol_type = other DNA
ctccacttttaaatgtacaatttggacggaatttaaaagtggcaccaataccccagtgttccaatttgcaatataaaggatatacagtcccttctcctaccatacagcattgcctctagc

SEQ ID NO: 34076 - DNA, 120 bp, synthetic construct; identical to SEQ ID NO: 9447
  source 1..120: mol_type = other DNA

SEQ ID NO: 34077 - DNA, 120 bp, synthetic construct
  source 1..120: mol_type = other DNA
ttcagctaatacatgaagaatgatagagtatctcccttttgcagccctaattctgtcatggatgtaggtactgctcatcagtggctgatgttgccacaaatagagaaccagacattgtgt

SEQ ID NO: 34078 - DNA, 120 bp, synthetic construct
  source 1..120: mol_type = other DNA
agcttctaggtttatctatcaatagacaggaagtacagaggcagaagagcatataataccacagggattcagtcaacaaaatccagaccctaagaaactccacaggacaaacaacctatt

SEQ ID NO: 34079 - DNA, 120 bp, synthetic construct
  source 1..120: mol_type = other DNA
agtcacaatatgtggaccatttctggatcctgatttaagcaaagtataataaacacactcatacacatatactacatggataccacaagtggaaatttgacaattgactatttgataaat

SEQ ID NO: 34080 - DNA, 120 bp, synthetic construct
  source 1..120: mol_type = other DNA
ggatttgcttcagaataatatgggtggggggaagtggctggggatacagatccaacaagattgggcatgagttgatcattgttaaagcacaggatgtatacatgtgagtttgtaatatta

SEQ ID NO: 34081 - DNA, 120 bp, synthetic construct; identical to SEQ ID NO: 9448
  source 1..120: mol_type = other DNA

SEQ ID NO: 34082 - DNA, 120 bp, synthetic construct
  source 1..120: mol_type = other DNA
cccaagtgcagcacctggaagaggagaagaaagagatgaggctgggaatcttcccattctttccccctctctgcctctatgagactgagctgcaaaggcctctagaaccagctgtagttt

SEQ ID NO: 34083 - DNA, 120 bp, synthetic construct
  source 1..120: mol_type = other DNA
tgttcaagggcctctttatagcgacagacttcatgctcctcggccccaaaactgcgaacggtctgcagccctccaacggcttcccgcaccacctgccccgccctggccactgcatcctgg

SEQ ID NO: 34084 - DNA, 120 bp, synthetic construct
  source 1..120: mol_type = other DNA
caaactgtttctctccctcttccttactcttctttccagaaggaataagagtgaaggagcaagggaacaaaatattattgagctctcagtgttaggtagtataggagatacatgcaattt

SEQ ID NO: 34085 - DNA, 120 bp, synthetic construct; identical to SEQ ID NO: 9449
  source 1..120: mol_type = other DNA

SEQ ID NO: 34086 - DNA, 120 bp, synthetic construct
  source 1..120: mol_type = other DNA
aaattaataggcaaaacatatagtgaactcccacaacttaaaaaaaaatcagaaaatgggcaaagaacttgcagacattctttcaagaaagaaacataagtggccaaaatcacacgaaaa

SEQ ID NO: 34087 - DNA, 120 bp, synthetic construct
  source 1..120: mol_type = other DNA
atgaggatgtggagaaattggaaaccttatgcactgctggtgggaatttaaaatggtgctgccgctatggaaaactgtatggtggtttgatacgatctggctgtgtccctacccatatct

SEQ ID NO: 34088 - DNA, 120 bp, synthetic construct
  source 1..120: mol_type = other DNA
aaaaaggggaattcccctgcacaagctgtcttttctcttgtctgctgccatgtgaaatgtgtctttcaccttccgccatgatttgaggtcttcccagccacatggaactgtaagtccaat

SEQ ID NO: 34089 - DNA, 120 bp, synthetic construct; identical to SEQ ID NO: 9450
  source 1..120: mol_type = other DNA

SEQ ID NO: 34090 - DNA, 120 bp, synthetic construct
  source 1..120: mol_type = other DNA
taaaatatgccagtcacaaaaagacaaatactgtatggttccacttacgtaccgcaccgggagtcatcacaattcatggagacagaaggtacaatggaggttgccagcggccaggggttg

SEQ ID NO: 34091 - DNA, 120 bp, synthetic construct
  source 1..120: mol_type = other DNA
ctgaactgtacacttcaaatggttgaaatggtaaattttatgttatgtatgttttaccacaatataagagaaaaagagaaggtggagctgacattcagacttaggacttcctgatgacgc

SEQ ID NO: 34092 - DNA, 120 bp, synthetic construct
  source 1..120: mol_type = other DNA
tcctttgagaagctaatgaaaagttatcatcgcctatcatctccccttcctattccctcccccataccttcacatacactttacatttttgtttacagttctggagaatcatgaatcttc

SEQ ID NO: 34093 - DNA, 120 bp, synthetic construct; identical to SEQ ID NO: 9451
  source 1..120: mol_type = other DNA

SEQ ID NO: 34094 - DNA, 120 bp, synthetic construct
  source 1..120: mol_type = other DNA
gcacattggcatttaaaggaagccagttactcatcagggtggtatccgagctcagccgtgagttcagctcccctaagaaggacagagcaggtgaggaaaaaggaaaccatgtgtactgca

SEQ ID NO: 34095 - DNA, 120 bp, synthetic construct
  source 1..120: mol_type = other DNA
aagcatccccaagtcctggcatacgggtgaaggcaggaggagaggctgtgggtggaaggtcactgaggggcaagggatgtccatgggaatctcagacctggactccaggccccacctgtc

SEQ ID NO: 34096 - DNA, 120 bp, synthetic construct
  source 1..120: mol_type = other DNA
agtgagctgtggggtaggagaataagaggggagggagatgcagagaaggagcaagccagcgggtgaaacagaggagcaagccaggagtgcagagaagcgcaaagtcaggggaaagcatgc

SEQ ID NO: 34097 - DNA, 120 bp, synthetic construct; identical to SEQ ID NO: 9452
  source 1..120: mol_type = other DNA

SEQ ID NO: 34098 - DNA, 120 bp, synthetic construct
  source 1..120: mol_type = other DNA
gcccccacaattctctggagccccagagtcatgtgattcccatctttcatccttcgagttggaaaatccctcttagaccaactacatgctacagtaacacttagaggaaaaaatataaag

SEQ ID NO: 34099 - DNA, 120 bp, synthetic construct
  source 1..120: mol_type = other DNA
gtgttctgagaaatgtgtcgttagatggtttcatcgttgtatgaacatcatagagtgtacttacacaaacctagatgtcatagcctactgcacacctaggccatgtagtttagcctattg

SEQ ID NO: 34100 - DNA, 120 bp, synthetic construct
  source 1..120: mol_type = other DNA
aatcttgtgggtccaccatcttatatgtggcccatcattgacctaaacttcgttatgcagtgcacgactgtagtttcagcagaaagcagccaggatggaatgaaggcacaatgaaatggt

SEQ ID NO: 34101 - DNA, 120 bp, synthetic construct; identical to SEQ ID NO: 9453
  source 1..120: mol_type = other DNA

SEQ ID NO: 34102 - DNA, 120 bp, synthetic construct
  source 1..120: mol_type = other DNA
ggagagatactttggagacagacttaggggtaggaggtaggaggcagaaagaaatggaatttcatggacctaggaatgttgagagacaactgagagacattccatctgagacttaaattc

SEQ ID NO: 34103 - DNA, 120 bp, synthetic construct
  source 1..120: mol_type = other DNA
aggaagaaatgaatggatagatgaaacagaatggtgactacattcaccatattttagtttaagtatttttgtgttttgcgcctgaaagggcctagaaatggagttagggaagtgaagacc

SEQ ID NO: 34104 - DNA, 120 bp, synthetic construct
  source 1..120: mol_type = other DNA
gatgtcaatcacacgaccagaatagtgagggattaatgtctcacctgaaagaggcatgaaaaataacacaagaatgtgctggtgcccaggcccttttaccacctccaactcacaacgtcc

SEQ ID NO: 34105 - DNA, 120 bp, synthetic construct; identical to SEQ ID NO: 9454
  source 1..120: mol_type = other DNA

SEQ ID NO: 34106 - DNA, 120 bp, synthetic construct
  source 1..120: mol_type = other DNA
agccctcccagccgcagggtcccctccagccatagtcctggcagcccttgaggaagcaaagtccccagagggccctgaagcagccacagtaaagccgcgtccaccagcagcagggaggtc

SEQ ID NO: 34107 - DNA, 120 bp, synthetic construct
  source 1..120: mol_type = other DNA
catcggcttctcattttatcctattcaaccctgagagctctcctgagtaaccggtgctcatccgtacacccctcctacgacagacagctttcggccttctggggagctggaagcatgacc

SEQ ID NO: 34108 - DNA, 120 bp, synthetic construct
  source 1..120: mol_type = other DNA
ggactgggaagcaggagcgtggagtgggtagtcacttgggctgcgtccctgttggcgctccaggttcccctccgcaccaactcaccagccgcggcggggagaccgcagctccggggactt

SEQ ID NO: 34109 - DNA, 120 bp, synthetic construct; identical to SEQ ID NO: 9455
  source 1..120: mol_type = other DNA

SEQ ID NO: 34110 - DNA, 120 bp, synthetic construct
  source 1..120: mol_type = other DNA
tttatctgttgtccttgctttgtaattggagaatgctttgtaattggagaatcactgaattttctcaaagttactacttcaagctctgagcctactattaagaagtgccttctttctggt

SEQ ID NO: 34111 - DNA, 120 bp, synthetic construct
  source 1..120: mol_type = other DNA
accagcctggccaacatggtgaaaccctgtctctactaaaaatacaaaaattagccagggcgtggtggcggacgcctgtaatcccagctactcgggaggctgaggcaggggaatcgcttg

SEQ ID NO: 34112 - DNA, 120 bp, synthetic construct
  source 1..120: mol_type = other DNA
aaaaaaaaaaaaagtgccctcttccatgcaagctccagttttaggcgagcgagccgggctctcctaaatagaaggttccaaccaatctcaccaggccaaaggggattttcacgtacagac

SEQ ID NO: 34113 - DNA, 120 bp, synthetic construct
  source 1..120: mol_type = other DNA
cagcctatgagggaaatgccccgtactgagctttggttcttgttctattttaacactgtttagaacagtaattaggtttttaaatatccttcctgacccagagccttcctatgcaacaga

SEQ ID NO: 34114 - DNA, 120 bp, synthetic construct; identical to SEQ ID NO: 9456
  source 1..120: mol_type = other DNA

SEQ ID NO: 34115 - DNA, 120 bp, synthetic construct
  source 1..120: mol_type = other DNA
atgatgtgtgtctctttcttctaacctggatcttttacattttccccacactcctcacttaggggagtcctcctgatctcttcttcctctaaaattatagtcctgccatcttgcaattca

SEQ ID NO: 34116 - DNA, 120 bp, synthetic construct
  source 1..120: mol_type = other DNA
gtggaagctttttcatcctactctataaagtcaaaaacagttatcctaggtgccctactccctgttcctcaaaccattaacaatggaacacacaggagtccccaggtgcctctctatgga

SEQ ID NO: 34117 - DNA, 120 bp, synthetic construct
  source 1..120: mol_type = other DNA
cacatttcttagataggggtctgagccccttctccagaaaaagcgtctctttactttctgccccacccaacaaccacaggcccaaccccattcagccacaagacagaggtatttataacc

SEQ ID NO: 34118 - DNA, 120 bp, synthetic construct; identical to SEQ ID NO: 9457
  source 1..120: mol_type = other DNA

SEQ ID NO: 34119 - DNA, 120 bp, synthetic construct
  source 1..120: mol_type = other DNA
ctcagcaagttcctgtcactgatgttatgttgaaggcagcaacaagacacatgcgcaagcttaaaaccatatgactgggcctttaatgcccttcttctgactctgaaaatttcctcccta

SEQ ID NO: 34120 - DNA, 120 bp, synthetic construct
  source 1..120: mol_type = other DNA
cccaggttcaagtgattctcctgcctcagcctcccaagtagctgggactacaggcacccgtcaccacgtccggctaatttttgtagttttagtagagacggggtttcgccatgttggcca

SEQ ID NO: 34121 - DNA, 120 bp, synthetic construct
  source 1..120: mol_type = other DNA
tactattgacaacgcctccagaatagctgtctctgtgagtggcataagcaatagccctgcggccaaggtcataggcctcttcagggctaagattaggccgatagccactgtccatgaccc

SEQ ID NO: 34122 - DNA, 120 bp, synthetic construct; identical to SEQ ID NO: 9458
  source 1..120: mol_type = other DNA

SEQ ID NO: 34123 - DNA, 120 bp, synthetic construct
  source 1..120: mol_type = other DNA
ttctataaccaagcactctatatgccatgcatcttgtcagggagggagtaggagtatatgatgggaaacagatctgtcatccatagggaacatggtgggggaacatgaagaatggagagc

SEQ ID NO: 34124 - DNA, 120 bp, synthetic construct
  source 1..120: mol_type = other DNA
tcgcagatagtacagcctgggtgaggacaaggtggagtgaggaaagagaggttagctctttccaacttgatggggcaggaaatgattaaagagataagcattggaaaggaattattttgt

SEQ ID NO: 34125 - DNA, 120 bp, synthetic construct
  source 1..120: mol_type = other DNA
tctggcttatgagtggagcacaggctgagatttgggagaagggtcttatcaccaaaaagctgttttgtgaaatatactattagcactaagatggaccacataggacaagagtaaggagca

SEQ ID NO: 34126 - DNA, 120 bp, synthetic construct; identical to SEQ ID NO: 9459
  source 1..120: mol_type = other DNA

SEQ ID NO: 34127 - DNA, 120 bp, synthetic construct
  source 1..120: mol_type = other DNA
gcgtatacactcactaatgtaggacccagctgaggcccgagaatccactgctgcaatcactccatgctggaacttgaaggcgagcgtggtggtgccatgggccatctcaatctgaacgtt

SEQ ID NO: 34128 - DNA, 120 bp, synthetic construct
  source 1..120: mol_type = other DNA
ttctgtagtaagaggctccaggaaaaggttttagggagtatgagggtgaggagatatgcagaaatgatctaaccatcaataaatgaaacagttaataaccaatctctagaaggaaatggc

SEQ ID NO: 34129 - DNA, 120 bp, synthetic construct
  source 1..120: mol_type = other DNA
ttaccattactaaaaaattttgagagtgacttaaagggtttcttccatgcataaagcattcaaccctcacaaaacacgtttagtaacagtatcctcactttacagaagaggggcttggga

SEQ ID NO: 34130 - DNA, 120 bp, synthetic construct
  source 1..120: mol_type = other DNA
gaaaaaggctccaccatttgtgtgtggacaagggcaggaaagttctcttgtcttcctttgggagcccccacctcacctgtaactctttgtcctaacttgcacttcctcctctcaggcccc

SEQ ID NO: 34131 - DNA, 120 bp, synthetic construct; identical to SEQ ID NO: 9460
  source 1..120: mol_type = other DNA

SEQ ID NO: 34132 - DNA, 120 bp, synthetic construct
  source 1..120: mol_type = other DNA
gaaagccacagatcgaaggggagggaacaagactcttttccacatccccctgccttttccgagaaaaggacagttagtgcctggaccaggaccatcacactggggaccggcttctctgct

SEQ ID NO: 34133 - DNA, 120 bp, synthetic construct
  source 1..120: mol_type = other DNA
cgggcatccgctggaaacaggggtgggtagggtcgtgtcatctaaaggcgcagcttcaaccagaagactagaagtcagccaggagctgggagtagtgtcacgcggggtgggggttcctat

SEQ ID NO: 34134 - DNA, 120 bp, synthetic construct
  source 1..120: mol_type = other DNA
agagggcgcagtctctgaatctttccacggggtccatcctagggcccctccaggttcaacggtctcctaacctgtagtcacccacaagagcgtgccctttctgcccgcccttcctagcgt

SEQ ID NO: 34135 - DNA, 120 bp, synthetic construct; identical to SEQ ID NO: 9461
  source 1..120: mol_type = other DNA

SEQ ID NO: 34136 - DNA, 120 bp, synthetic construct
  source 1..120: mol_type = other DNA
tcttgcacattcttgggggtgggcctaaggggataggggaagtggaaggggcctcataggaattaaaaagcttaagggaaaaggtgatgcagttagggggtaaaacattgaggatgataa

SEQ ID NO: 34137 - DNA, 120 bp, synthetic construct
  source 1..120: mol_type = other DNA
gtacaaaacaccaattttattataaatatcaagaacctacagggtgtttatgggccagcatatgccttcagttatgttgaaaatagctgatcatctttccgtacattctgaacatttctc

SEQ ID NO: 34138 - DNA, 120 bp, synthetic construct
  source 1..120: mol_type = other DNA
tgtactccaggaagtctgcattatcacgaggagcttggaaaggaggtaacacactcaaggcaaatttcaagtaactcatcctggaggcagctgcctactctgcagctgtggttctccacc

SEQ ID NO: 34139 - DNA, 120 bp, synthetic construct; identical to SEQ ID NO: 9462
  source 1..120: mol_type = other DNA

SEQ ID NO: 34140 - DNA, 120 bp, synthetic construct
  source 1..120: mol_type = other DNA
tctgctaacaaccccaaggacaccaacgtttcccattctgagtacttctccgcaaaccctttgtttcattaaggactgttttacatgaagggtgcaaaagtaggataaaaatgagaaccc

SEQ ID NO: 34141 - DNA, 120 bp, synthetic construct
  source 1..120: mol_type = other DNA
ttcaagtcaggcagacctgaatttgggtcaaggctgcgccactcaaaagctatatgacctctatatgagcagcttattcaacctcttttaacctccattttgtcatctgtagaatgatga

SEQ ID NO: 34142 - DNA, 120 bp, synthetic construct
  source 1..120: mol_type = other DNA
tcctagcactttgggaggtcaaggagggaggatcacttgggcccaggagttcaaggccagcctgggcaacatagcgggacgctgtctgtacaaaaaataatttttttaaataaacgatat

SEQ ID NO: 34143 - DNA, 120 bp, synthetic construct; identical to SEQ ID NO: 9463
  source 1..120: mol_type = other DNA

SEQ ID NO: 34144 - DNA, 120 bp, synthetic construct
  source 1..120: mol_type = other DNA
cagtctgtagtttgtagatagtctcttttaactgattctaggtgtctttgcctcgtcttctatctctactccttggggaggcatccaatggaactggatttgggaactgagaactgcaag

SEQ ID NO: 34145 - DNA, 120 bp, synthetic construct
  source 1..120: mol_type = other DNA
ccagggcactggtggcatcatccaggataagtacacacggtttccggatcaatgctcgggccaacgccactgcctgtcgctgaccccctgacagctggctcccagcctcgtctacctctg

SEQ ID NO: 34146 - DNA, 120 bp, synthetic construct
  source 1..120: mol_type = other DNA
taggggagattctgggaagatgaacagaatcctgaggatgtcaggatgaagaagccataggagcatgatcttacaacttcaaattgatgtccatgagtaaggaggaactgaaggataaag

SEQ ID NO: 34147 - DNA, 120 bp, synthetic construct; identical to SEQ ID NO: 9464
  source 1..120: mol_type = other DNA

SEQ ID NO: 34148 - DNA, 120 bp, synthetic construct
  source 1..120: mol_type = other DNA
tatctagagatcgaagactcaaaatctttattgagaacatgtcacaaaatcatactacctccctcctgactacaccaccatctccacccaaggtctcttatcattccctaacccctcttt

SEQ ID NO: 34149 - DNA, 120 bp, synthetic construct
  source 1..120: mol_type = other DNA
caggtagcggtgctcatattggggaaggggcttcccatccaacagcagctgtcccccggtgggctggtacagattctgcagcagggcagccactgtgctcttcccagacccattgggtcc

SEQ ID NO: 34150 - DNA, 120 bp, synthetic construct
  source 1..120: mol_type = other DNA
aaggcctctaaccttgagagtgtcattgccttgttacatagcatgatgtcttaccccagaagaaaaacagggaaatatagaaactcctaccctcccacatgcacagatttctgggtgatg

SEQ ID NO: 34151 - DNA, 120 bp, synthetic construct
  source 1..120: mol_type = other DNA
aaaggaaaaggaaagatggaagaccgaagacacagattttgctgcagcaattccttggaacgtgagagcactctcttcgaaacctcttctctcattctctttggaagcccaaactgggtt

SEQ ID NO: 34152 - DNA, 120 bp, synthetic construct; identical to SEQ ID NO: 9465
  source 1..120: mol_type = other DNA

SEQ ID NO: 34153 - DNA, 120 bp, synthetic construct
  source 1..120: mol_type = other DNA
gaggtaagaatagtgaaagtgaggtagtctgcttgccagcattatgtgaagcaagaagggtaaagaatggaaggacatcacacagatggtgctgggccagaggaaggaatcacactgggg

SEQ ID NO: 34154 - DNA, 120 bp, synthetic construct
  source 1..120: mol_type = other DNA
ggattcccactttcagcagcatacctgaaatctataaagagaccacaaaaaaagggactgaggtagagaaatctggaggggacacaaagaaccgcagtcattaacctgaaggaaatatca

SEQ ID NO: 34155 - DNA, 120 bp, synthetic construct
  source 1..120: mol_type = other DNA
accactatcaccttgtctggggagcattttactcttcacaaaaggctttcattcatgtgatgtcagctaatacatgaagagccttataaagaaggttatatcactccatttttgaaaaat

SEQ ID NO: 34156 - DNA, 120 bp, synthetic construct
  source 1..120: mol_type = other DNA
cgtctctactaaaaatacaaaaaaaaaaaaaaaattagccgggcgtggtggcgggtgcctgtagtcccagctactcaggaggctgaggcgggagaacggcgtgaacccgggaggcggagc

SEQ ID NO: 34157 - DNA, 120 bp, synthetic construct; identical to SEQ ID NO: 9466
  source 1..120: mol_type = other DNA

SEQ ID NO: 34158 - DNA, 120 bp, synthetic construct
  source 1..120: mol_type = other DNA
aaggccctaggactggaagacacgcatctctccaatccacatggttgggtggattttatgtaccatactgaaaggaagccacctagcatctttaaagagagggagggggctagggacact

SEQ ID NO: 34159 - DNA, 120 bp, synthetic construct
  source 1..120: mol_type = other DNA
aagggaatgggtattcatcttcaggtgctcacactagtggtccaggagttgactgcataggccacagcctccttctggttgagtgtctttatttcttgcagcttttccctaaacttctgg

SEQ ID NO: 34160 - DNA, 120 bp, synthetic construct
  source 1..120: mol_type = other DNA
atggacaagagatgtcacacgggttggcaaaccatcagggacactaatacctgagttacctatttggaaattaaaggtgagaagagacagaggaaaaggagaaaagagaaagagacacag

SEQ ID NO: 34161 - DNA, 120 bp, synthetic construct; identical to SEQ ID NO: 9467
  source 1..120: mol_type = other DNA

SEQ ID NO: 34162 - DNA, 120 bp, synthetic construct
  source 1..120: mol_type = other DNA
atggtgagggacactgatccccagagcatgatccccaagagacataggcctcgcaccaggtaccacagaaataagctcagattctcactcagagaatcactcagggtggacgtgtcctct

SEQ ID NO: 34163 - DNA, 120 bp, synthetic construct
  source 1..120: mol_type = other DNA
catggggttctaaggaggctgcaggaaacaaggttagggttctccagaggtctgcaaatctcagtgcagggaagatgagtgttaaagaggaaaggcctgaccttcattttaattataaag

SEQ ID NO: 34164 - DNA, 120 bp, synthetic construct
  source 1..120: mol_type = other DNA
aggaggagggtgctgctaggaagcatgccaaagtctgtggagcactcactgggactagggttctaaccccaggtctatctctagccatatgtaactgtacagcttctagtgctgctagaa

SEQ ID NO: 34165 - DNA, 120 bp, synthetic construct; identical to SEQ ID NO: 9468
  source 1..120: mol_type = other DNA

SEQ ID NO: 34166 - DNA, 120 bp, synthetic construct
  source 1..120: mol_type = other DNA
ggagagggtatatcaagaatgagaaggaacaatgtgtgtatgtgtgtgtgagagagagagagcggggaggggggagatcaaagcagatgtatgaggatatgaacagtacatggcgtataa

SEQ ID NO: 34167 - DNA, 120 bp, synthetic construct
  source 1..120: mol_type = other DNA
agatcccgtcacccacgaactccagcactgcactataaagaacccggaaaaaaaggggatcagggtgtgttcagggaacagactgaaggtcccaggtatccccatataagtgcatttcgg

SEQ ID NO: 34168 - DNA, 120 bp, synthetic construct
  source 1..120: mol_type = other DNA
tcttgtagaatccagtcagtgaggcggcccgtaaagaatggaatggccatctcccctggagaaagagaagagaggtcacgcacaaatattaagtctaagtaggtcagttccagtcagact

SEQ ID NO: 34169 - DNA, 120 bp, synthetic construct; identical to SEQ ID NO: 9469
  source 1..120: mol_type = other DNA

SEQ ID NO: 34170 - DNA, 120 bp, synthetic construct
  source 1..120: mol_type = other DNA
acaccgaagtggtgttccaagacccacgctaggagtccttctcctgctccacatttcccagaacccacgctactctaccttactgacaattacctttgattcctgtcccagtccccttgt

SEQ ID NO: 34171 - DNA, 120 bp, synthetic construct
  source 1..120: mol_type = other DNA
ccagagccgccctgaccgccgggcacccagaggctcccgagtttgtgccacagggctgctgcgggcagtgccgctgcataactgacaacgaaggcggtagggtgacttccccagtgcagt

SEQ ID NO: 34172 - DNA, 120 bp, synthetic construct
  source 1..120: mol_type = other DNA
cagtgccgcagctaatggcttcaaagcagccagccagccctgggcacctgcgttttcgctcttggagccaaccgttgccctgaggaccccgcaggcccccagccagagcacggcccagcg

SEQ ID NO: 34173 - DNA, 120 bp, synthetic construct; identical to SEQ ID NO: 9470
  source 1..120: mol_type = other DNA

SEQ ID NO: 34174 - DNA, 120 bp, synthetic construct
  source 1..120: mol_type = other DNA
ctcagccatttaggggaaagcgaaatcgaaagcggccgcctgctcactagataacgcctacttccaaaagtggcctgcccagactattttggtagcaagcgtggaaatcagatctgagaa

SEQ ID NO: 34175 - DNA, 120 bp, synthetic construct
  source 1..120: mol_type = other DNA
cgtcacttgtctcggggcagatctgccctacacacgttagcgccgcgcgcaaagcagccccgcagcacccaggcgcctcctggcggcgccgcgaaggggcggggctgtcggctgcgcgtt

SEQ ID NO: 34176 - DNA, 120 bp, synthetic construct
  source 1..120: mol_type = other DNA
gggtaatgggtctgggcttgagggttggcagaggggtggaggagatgcagcggccaggggaccctggaagcgcgcgcggagaagtgaatgcagagaccaacgggagcgcagggaggtcgc

SEQ ID NO: 34177 - DNA, 120 bp, synthetic construct; identical to SEQ ID NO: 9471
  source 1..120: mol_type = other DNA

SEQ ID NO: 34178 - DNA, 120 bp, synthetic construct
  source 1..120: mol_type = other DNA
gcccaagcactgataatgggcgttctgtgttaactagtgatgcccttccctagcttgacccaggaaggcctctccttggcccagatgctgccttactcccttccctgtgtcttccctgcc

SEQ ID NO: 34179 - DNA, 120 bp, synthetic construct
  source 1..120: mol_type = other DNA
cggctttgttagagaggaatagcctctaacttgaagttaaccctgttctttgaccctctattcatgataagtcggtccgtcggaaagcatactcagaggagcgtcctttggggccagagt

SEQ ID NO: 34180 - DNA, 120 bp, synthetic construct
  source 1..120: mol_type = other DNA
acctgaattttagtcccaggtctactattaactctgtgtgactttgcataagtcgtttgcattttctgtgacttggtttcctcatttgaaccgaggatctttaaggctccttccaactca

SEQ ID NO: 34181 - DNA, 120 bp, synthetic construct; identical to SEQ ID NO: 9472
  source 1..120: mol_type = other DNA

SEQ ID NO: 34182 - DNA, 120 bp, synthetic construct
  source 1..120: mol_type = other DNA
gatcatagtcaattactctgtgttgggtctacaccacatctgcacatactatgagcccttccgttggagataattttcacttgcggagctgcttcacttctacctgtaggagcctcatct

SEQ ID NO: 34183 - DNA, 120 bp, synthetic construct
  source 1..120: mol_type = other DNA
aaagtggaaagatgaagggaaaaaaagcctgtactgacagtcagctctggcctgttactgtgtaatctttgagccagtcacttcgcctctctgggaatgtttcttcttctctaacatgag

SEQ ID NO: 34184 - DNA, 120 bp, synthetic construct
  source 1..120: mol_type = other DNA
gagtaaaagtgaagatgtatgcatttggaaagaagctaatggcctcaaatacacactttccttacccattcatgaaaagactggcaaactggagccttggaggaatggagttgaccttcc

SEQ ID NO: 34185 - DNA, 120 bp, synthetic construct; identical to SEQ ID NO: 9473
  source 1..120: mol_type = other DNA

SEQ ID NO: 34186 - DNA, 120 bp, synthetic construct
  source 1..120: mol_type = other DNA
actattttgtctcttctcccactcctaaccaatttcctcacatgcaaaatgagtatatggggttaggtcaatattactgacattatgttccatagaacataactctctcaagattgttaa

SEQ ID NO: 34187 - DNA, 120 bp, synthetic construct
  source 1..120: mol_type = other DNA
gagatgattatttgcctcctgctttaatccaagcattaaacttcatgctattctcttgtcaaagaaatttgagagacattgaatgatcaccctcaaaaattcctgagttctggttgggtg

SEQ ID NO: 34188 - DNA, 120 bp, synthetic construct
  source 1..120: mol_type = other DNA
tggccaacatgttgggaccttgtctctactgaaaatacaaacattagctgggcttggtggtgggtgcctgtaatcccagctattcgggaggctgaggcaggagaatcacttgaaccaggg

SEQ ID NO: 34189 - DNA, 120 bp, synthetic construct
  source 1..120: mol_type = other DNA
aaaaaaaaaaaaaacctgagttttaacttggtgactgttgactccctcctgacagcgaggcggtggtgaaccgagtgtttgacaagctgtccccgctgcacgagcgcatctactgtgcac

SEQ ID NO: 34190 - DNA, 120 bp, synthetic construct; identical to SEQ ID NO: 9474
  source 1..120: mol_type = other DNA

SEQ ID NO: 34191 - DNA, 120 bp, synthetic construct
  source 1..120: mol_type = other DNA
tataaataatcaggaagaaggtgatattgtgacccaccataatatcaggcagttaccatacgagaaatcaaggtcgttgggacggaagtaaccttatctgcttttccccataagagcagg

SEQ ID NO: 34192 - DNA, 120 bp, synthetic construct
  source 1..120: mol_type = other DNA
gcagtttgagctattgcagttacagttttcaggggtcgtttagcagggatgatggtaacagtataggagaatgagacttaaaattctatcaacctttattcctaatatttccctcaggat

SEQ ID NO: 34193 - DNA, 120 bp, synthetic construct
  source 1..120: mol_type = other DNA
aggtcaggtgagtttctcccaaagcactctctcctctgggcttccccactctcctgcagaggaagatggaagtcctatgtcattctagcaatgagttccaaggacactacctctgaaagc

SEQ ID NO: 34194 - DNA, 120 bp, synthetic construct; identical to SEQ ID NO: 9475
  source 1..120: mol_type = other DNA

SEQ ID NO: 34195 - DNA, 120 bp, synthetic construct
  source 1..120: mol_type = other DNA
taatgccgggcctggtacacttttaagagtgaaaaggggcaggacaaatgcaaagctcaatggggttcttgggcaatacggataaaccagggctgttctgagtaaatcaaatgaggatac

SEQ ID NO: 34196 - DNA, 120 bp, synthetic construct
  source 1..120: mol_type = other DNA
aagatggtgaaaccctgtctccacaaaaaacaataaaaaaaagtaaaaaaaaaaatgaactgggcatagtggtgcacacctgtagtcccagctactcaggaggctgaggtggaaagatca

SEQ ID NO: 34197 - DNA, 120 bp, synthetic construct
  source 1..120: mol_type = other DNA
gaggtgtgctgaggctggcttgggaccactcatgagagcggactgttaaatagtcaaggatttgtgaactgcttagctatttgtaacttgcaattcatcatagcgggagcatttacacca

SEQ ID NO: 34198 - DNA, 120 bp, synthetic construct; identical to SEQ ID NO: 9476
  source 1..120: mol_type = other DNA

SEQ ID NO: 34199 - DNA, 120 bp, synthetic construct
  source 1..120: mol_type = other DNA
cgagtcatcttgggcaatgaactgccaaaattctatgatgagtgaaccttccccagacttctctttcttattttgtaataaactctctagggccaaaacctggtatggtcattgggaaat

SEQ ID NO: 34200 - DNA, 120 bp, synthetic construct
  source 1..120: mol_type = other DNA
aaactagaaatataaagagccctatacatgacaggtgatcacgtactgaatgattttgaagtagtacaaacaataaaaattctcattccgcatcatcatgcggtccatgatgatgaggcc

SEQ ID NO: 34201 - DNA, 120 bp, synthetic construct
  source 1..120: mol_type = other DNA
taatgcattcattcatattaaagggcaatacatgaaaaatgcttaaatattttggggcacttgtgaatttcaaagaataatgacaataaccaaaagaagctacatttgtggcattggcta

SEQ ID NO: 34202 - DNA, 120 bp, synthetic construct; identical to SEQ ID NO: 9477
  source 1..120: mol_type = other DNA

SEQ ID NO: 34203 - DNA, 120 bp, synthetic construct
  source 1..120: mol_type = other DNA
aaacacccaaccctatataggtattattattacttctataggacacatagaggtttggaaagattaaatcacttgaccaaggtcacaaaataagttctgaggctgggatctgggattcag

SEQ ID NO: 34204 - DNA, 120 bp, synthetic construct
  source 1..120: mol_type = other DNA
taaatagccccatacattcgttggcacttaggaaactgttaccagatggctgagtaactgtattaaaacaaatttaattctgcttctatctttgccttgcacttcctgagtgacaggagt

SEQ ID NO: 34205 - DNA, 120 bp, synthetic construct
  source 1..120: mol_type = other DNA
aatactagtaggatctcaggctaaacatacgaattcaaaactctaaaacaatcacatccccctggagtgtaaagaaaaaaatctaaaattacaaatgcctggagttgtttctagccatga

SEQ ID NO: 34206 - DNA, 120 bp, synthetic construct; identical to SEQ ID NO: 9478
  source 1..120: mol_type = other DNA

SEQ ID NO: 34207 - DNA, 120 bp, synthetic construct
  source 1..120: mol_type = other DNA
ggaaattccctaattctgagtctgaaccctcaggagtaccaggttacccctgagctgcacatgcgtgtgacatgccttaagggcacagcaaagactttgagaactgaatgaagattagat

SEQ ID NO: 34208 - DNA, 120 bp, synthetic construct
  source 1..120: mol_type = other DNA
tggtgaaacctcatctctacttaaaatacaaaaattagctgggcatggtgcctgtaatcccagctactcgggaggctgaggcagggagaatcgcttgaacccgggaggcaaaggtggcag

SEQ ID NO: 34209 - DNA, 120 bp, synthetic construct
  source 1..120: mol_type = other DNA
ctaatgcccttcattccaataaaaggtttgtagcagcttacagagataatttaaaacaatttttaaaagaagaaaacaacactgggtcagagagaaaatatggttaagaaaagtaagtga

SEQ ID NO: 34210 - DNA, 120 bp, synthetic construct; identical to SEQ ID NO: 9479
  source 1..120: mol_type = other DNA

SEQ ID NO: 34211 - DNA, 120 bp, synthetic construct
  source 1..120: mol_type = other DNA
agttgccagaaaaccaaaaattatatataatagttcaagccacacagaacatttactcaaataggacatgcatcattccataaaggtaacgccaataaattccagagtatcggtatctta

SEQ ID NO: 34212 - DNA, 120 bp, synthetic construct
  source 1..120: mol_type = other DNA
caaaaccccgtctctacaaaaaatttagctggatggggtgcacctgtaatcccaactagtcagaaggctagacgggaggatcgcttgaacccaggaggcagaggttgcagtgagctgaga

SEQ ID NO: 34213 - DNA, 120 bp, synthetic construct
  source 1..120: mol_type = other DNA
acttgataactaaaatatacttaaaattgtaagtgaacaaatatatttatcagtaacatggatttaaaaggcagtcgtggatgggagcatcgctggagtccagaagatggaggctgcagt

SEQ ID NO: 34214 - DNA, 120 bp, synthetic construct; identical to SEQ ID NO: 9480
  source 1..120: mol_type = other DNA

SEQ ID NO: 34215 - DNA, 120 bp, synthetic construct
  source 1..120: mol_type = other DNA
acttaaaaatatttgtaagatattcagagttacaacaaggccgattatggataaagggagaaaaaatgaataaacaaatacataatgaaaaagggggaacagctacagatatgacacaga

SEQ ID NO: 34216 - DNA, 120 bp, synthetic construct
  source 1..120: mol_type = other DNA
tttaatctatcaaaattagcacaaaaagaaatacaaaacttgactataccaatgagtattaaagcaatttttaaagttatcaatggcatctaataaaaaaatatatttttgaaaatgccc

SEQ ID NO: 34217 - DNA, 120 bp, synthetic construct
  source 1..120: mol_type = other DNA
aaaaaactaaacctgattagctaattttatcagccgagtgtaatcttgactccaaattgagttgtggaaaactcaaggaaaaaaaaataatagacccatttcaccttgaacacagatggg

SEQ ID NO: 34218 - DNA, 120 bp, synthetic construct; identical to SEQ ID NO: 9481
  source 1..120: mol_type = other DNA

SEQ ID NO: 34219 - DNA, 120 bp, synthetic construct
  source 1..120: mol_type = other DNA
catcaagatcaaatagggaatccttggaatactagggtggttcaatataataaaacatattgttgctataatttaccatattcatagaaaagtcatttcctttgctcagtctattaataa

SEQ ID NO: 34220 - DNA, 120 bp, synthetic construct
  source 1..120: mol_type = other DNA
caaaggttataatccaaaaaatctgtaaccactagtatacataacggaaaaaccttgggtatccaagacaagaatgttcactataattactagcttatcatagcactaaagcctatgggc

SEQ ID NO: 34221 - DNA, 120 bp, synthetic construct
  source 1..120: mol_type = other DNA
aggagtttgagcttactgtgagctgtgatcacaccactgcactccagcctgggtgacaaaggaagaccgtatttctaaaaaataaaaaatacaaatacaactacaaactagcactagacc

SEQ ID NO: 34222 - DNA, 120 bp, synthetic construct; identical to SEQ ID NO: 9482
  source 1..120: mol_type = other DNA

SEQ ID NO: 34223 - DNA, 120 bp, synthetic construct
  source 1..120: mol_type = other DNA
tatctttggtcttccttaccaagttcttaactctgctggctctggggcactggacataccatgtaagaagaaaaatgttttaactccattgaacttattcagaagcatcggaaattggtt

SEQ ID NO: 34224 - DNA, 120 bp, synthetic construct
  source 1..120: mol_type = other DNA
atgttctcaaaaatgaagagataaagtatggagattctaaactctgttgacatagaagagggtggatttctcgaagaaacagccttctatagaaagtggcttgtatgagtcgggattctc

SEQ ID NO: 34225 - DNA, 120 bp, synthetic construct
  source 1..120: mol_type = other DNA
tgatgttgcggcttgagtctgaaggtggtccagaggcagaattccctcttccttggaggacctcagtctttgcccctaagaccttcaactgattggaagggccacttacattatggaggg

SEQ ID NO: 34226 - DNA, 120 bp, synthetic construct; identical to SEQ ID NO: 9483
  source 1..120: mol_type = other DNA

SEQ ID NO: 34227 - DNA, 120 bp, synthetic construct
  source 1..120: mol_type = other DNA
gaggcttttgtgccaaccttcagagactggctgcgtcagactgccctcaagagcatacaaaggaaaaaaagacaaattaaaagcctttaatccaaactcaagacatgaatgaaaaactgt

SEQ ID NO: 34228 - DNA, 120 bp, synthetic construct
  source 1..120: mol_type = other DNA
cttatgataaaggttatgaagttgtagaaatgtttgttgcatcatccaacagcagctgttgtgataaggcaagacccctggttgggatagaccggaccctgagatatgaaatagggacat

SEQ ID NO: 34229 - DNA, 120 bp, synthetic construct
  source 1..120: mol_type = other DNA
accgtattagttacctattgccatgtaatgaatgacacccgcttaaaataacagacatttactataaggtgttactgggacaataggggattttttaatatggattgtgtgtttgataat

SEQ ID NO: 34230 - DNA, 120 bp, synthetic construct
  source 1..120: mol_type = other DNA
agattactctcaaattgtttaacaaaatggttcttcaacagtaaatggataaacaaaacgtagtctattcgtgcaacacagtactatgtaaacaatgaaacttcatcaactactgaaaat

SEQ ID NO: 34231 - DNA, 120 bp, synthetic construct; identical to SEQ ID NO: 9484
  source 1..120: mol_type = other DNA

SEQ ID NO: 34232 - DNA, 120 bp, synthetic construct
  source 1..120: mol_type = other DNA
agtcctgcctccctaaagtggaaaccagaaagctcacttcccctagccttctttgaagctagagcacctaagttccaccaattaaattcatccacctaagacttcagttacaaaggggcc

SEQ ID NO: 34233 - DNA, 120 bp, synthetic construct
  source 1..120: mol_type = other DNA
tttttttttaagtgaagttcctgaaacagaagtggtttaggaggtgtcttcagtggtggctgcagcaacctccaggtcctaacaacagaaccaacagcagcgtctagaagccatggggca

SEQ ID NO: 34234 - DNA, 120 bp, synthetic construct
  source 1..120: mol_type = other DNA
ttggtagacttttcaaagttttatcaaactcaaagagggaaccagcaagaatacaagagccttgatccaaagagtatttgaaaaacagagctgtatctctctgtgaggaaataatttcta

SEQ ID NO: 34235 - DNA, 120 bp, synthetic construct; identical to SEQ ID NO: 9485
  source 1..120: mol_type = other DNA

SEQ ID NO: 34236 - DNA, 120 bp, synthetic construct
  source 1..120: mol_type = other DNA
tatcgtctctatttggcctgttttagggctaaacccagaagcaaaatcttcttcaaaatgaatgtattgacagtcaccatgccagacttggagtacgaacaagagcatccttttaccctt

SEQ ID NO: 34237 - DNA, 120 bp, synthetic construct
  source 1..120: mol_type = other DNA
gacacaggtagttcttttgatagtacagcgttaatttaaaatataaaaatcatgccaaacacatctaattacttttagcttccttcacagtaggcggaggaaggtgaaaaattaagcctt

SEQ ID NO: 34238 - DNA, 120 bp, synthetic construct
  source 1..120: mol_type = other DNA
cagtgttagtattctgaattcagggtatgaggttggaagaaggcaacaacaaaaaagaattttcagagaaactggtcacttaagtgcataggtacctgagagtgagcaattgttataact

SEQ ID NO: 34239 - DNA, 120 bp, synthetic construct; identical to SEQ ID NO: 9486
  source 1..120: mol_type = other DNA

SEQ ID NO: 34240 - DNA, 120 bp, synthetic construct
  source 1..120: mol_type = other DNA
acatatatagttgaatgacaattttgtttaaaactttccactttagttttaaaacgtagttaatcttatcaatacaatacatgaatgtatatccacactaagtttaccaccttaatttga

SEQ ID NO: 34241 - DNA, 120 bp, synthetic construct
  source 1..120: mol_type = other DNA
ctagctcagtgaaaattagtccaaagtaacaaaatcatttgaggctgcaaaacaacaatatcactattgatattaggagtttttcaaagaggtaaaattctaaaatttttacatagagtg

SEQ ID NO: 34242 - DNA, 120 bp, synthetic construct
  source 1..120: mol_type = other DNA
ttcccacaaaccactgacacactcattgacacagtgaatgagtctagtgacaagaaacaaatcctttttgttaggtcacttctaacactctgcctccaacaaaataaagaggacctattc

SEQ ID NO: 34243 - DNA, 120 bp, synthetic construct; identical to SEQ ID NO: 9487
  source 1..120: mol_type = other DNA

SEQ ID NO: 34244 - DNA, 120 bp, synthetic construct
  source 1..120: mol_type = other DNA
taaggaacccaacacttcaacacacacatgcacacacaccaggatggtgtcagagaaagtgaatagggagtcaggatggtcatgccctcttggtgaaaatgtactcctttccccaagccc

SEQ ID NO: 34245 - DNA, 120 bp, synthetic construct
  source 1..120: mol_type = other DNA
cacccagagttaatccagcaaccactccctgatacctaccactcactcctccactccactgtcccatcttggtgtcaataaaggtcatgtgagggatagtaagtggcactcctctcccaa

SEQ ID NO: 34246 - DNA, 120 bp, synthetic construct
  source 1..120: mol_type = other DNA
ccctacctggcgtcatgaagctcacctgcctacctgctggagaggtgttaaaagaagccagctaaaacagtttaaataagaccaatagccttataacataatgcctgaaatgtccaagtt

SEQ ID NO: 34247 - DNA, 120 bp, synthetic construct; identical to SEQ ID NO: 9488
  source 1..120: mol_type = other DNA

SEQ ID NO: 34248 - DNA, 120 bp, synthetic construct
  source 1..120: mol_type = other DNA
attttagaactgaaaagtgcaatagccaaaataaaaagcccagtaaataagctcagcagcagaaggagagaacagaggaaagaattagctaccttgaagacacagcaatagcaatcactt

SEQ ID NO: 34249 - DNA, 120 bp, synthetic construct
  source 1..120: mol_type = other DNA
tggacaaagcctcagggacccatggggctataacaaaagatttaatgttcatgtactcagagtcccaaaatgagaggaaaaagagagtgaagctgaaaaaaattatcaaataaatatggt

SEQ ID NO: 34250 - DNA, 120 bp, synthetic construct
  source 1..120: mol_type = other DNA
aagataaaaagaatcttgaaagcagtgagataaatgacatctaacaggtgaaaaaaatgacagagcaaaattttcatcagaaactgtgtaagcccgaaggaggtcaccacctttttccag

SEQ ID NO: 34251 - DNA, 120 bp, synthetic construct
  source 1..120: mol_type = other DNA
gggaaaactaacagaatttgtcactaacaggtctaccctaaaaaaacaaaaagttaaattgaggacagttggaacatcaggaaggaagaaagaacatggcaagaaaaaatatgggttaaa

SEQ ID NO: 34252 - DNA, 120 bp, synthetic construct; identical to SEQ ID NO: 9489
  source 1..120: mol_type = other DNA

SEQ ID NO: 34253 - DNA, 120 bp, synthetic construct
  source 1..120: mol_type = other DNA
acagaaaataaaatgtcagacttaagcctggacataacaatattataggaaatataaatcgcctaaatacatcaattttaagagacagagcttggcagaatagatttaaaaatatgactc

SEQ ID NO: 34254 - DNA, 120 bp, synthetic construct
  source 1..120: mol_type = other DNA
tacaaaaattagccagctgtggtggcacaagcctgtagccccagctactcgggaggctgaagcaggagaatctcttgaacccgggaggtggaggttgcagtgagctgagatcacaccact

SEQ ID NO: 34255 - DNA, 120 bp, synthetic construct
  source 1..120: mol_type = other DNA
tttataagttaaaggatagaaaaacatatatcagacaaaaaataataaagggaggctatattaatatcaaataaacttagaacaaagaaaattactagaaatggataggaacactatgta

SEQ ID NO: 34256 - DNA, 120 bp, synthetic construct; identical to SEQ ID NO: 9490
  source 1..120: mol_type = other DNA

SEQ ID NO: 34257 - DNA, 120 bp, synthetic construct
  source 1..120: mol_type = other DNA
ggtacatgtgcaggtctgttacataggtaaacagtgtcatggaggtttgttgtacagattatttcatcatccaggaattaagtctagtacccattagttatttttcctgaccctctgcct

SEQ ID NO: 34258 - DNA, 120 bp, synthetic construct
  source 1..120: mol_type = other DNA
agtttgctaaggataatggcctccagctccatccatgtccctgcaaaagacgtgatctcattatttttatggctgcatagtattccatggcagaatacactttttttttttttttttttg

SEQ ID NO: 34259 - DNA, 120 bp, synthetic construct
  source 1..120: mol_type = other DNA
tacaggcacacaccaccatgcctggctaattttttatttatttatttatttatttatttatttatttattttttgtatagatgaggtttcaccatgttgatcaggctggtctcaaactcc

SEQ ID NO: 34260 - DNA, 120 bp, synthetic construct; identical to SEQ ID NO: 9491
  source 1..120: mol_type = other DNA

SEQ ID NO: 34261 - DNA, 120 bp, synthetic construct
  source 1..120: mol_type = other DNA
gatacagttatagtagttataagaggtaaatttaagttccaggatacatgtacaggatgtgcaggtttgttacataggtaaacatgtgccatggtggtttgctgcacatatcaacccatc

SEQ ID NO: 34262 - DNA, 120 bp, synthetic construct
  source 1..120: mol_type = other DNA
tgttcagctcccacttataagtgagaacatgtggtgtttggttttctgttcctgcattagtttgatgaggataatggcttccagcttcatccatgtctctgcaaataacaggatctcatt

SEQ ID NO: 34263 - DNA, 120 bp, synthetic construct
  source 1..120: mol_type = other DNA
catacaagtgcatgtatctttataatagaatgatttgtattcctttgggtatatactcagtaatgggattgctgggtcaaatggtatttctggttctagatctttgaggaattgccacac

SEQ ID NO: 34264 - DNA, 120 bp, synthetic construct; identical to SEQ ID NO: 9492
  source 1..120: mol_type = other DNA

SEQ ID NO: 34265 - DNA, 120 bp, synthetic construct
  source 1..120: mol_type = other DNA
ttggcaaaccactagcaagactcagaaaaaaagacgacagaagatagaagctaccaacatcagaaatgaaatgggatatcatcaaagattctacagacatcaaaaggataacaaaagaat

SEQ ID NO: 34266 - DNA, 120 bp, synthetic construct
  source 1..120: mol_type = other DNA
gaggaaattgaattcataatttaaaaactcacaaaaggaaatatttaggaacaaatagtttcaatgaagaattctaccaaagatttaaagaagaattaacaccaattaatctcttccaga

SEQ ID NO: 34267 - DNA, 120 bp, synthetic construct
  source 1..120: mol_type = other DNA
cagcaatctttaacaaaatattagcaagtggaatttaccaacatataaaaagaattatatacaatgaccacgtgagagttatcccagggatgcaaagctggttggatattcacaattaat

SEQ ID NO: 34268 - DNA, 120 bp, synthetic construct; identical to SEQ ID NO: 9493
  source 1..120: mol_type = other DNA

SEQ ID NO: 34269 - DNA, 120 bp, synthetic construct
  source 1..120: mol_type = other DNA
tacagattgtgaagtaagaaataaacagctcccatttgtaagtgacatgattgtctatgtagaaaatcacaaggaagctacagaaaaacttctagatatgtgatttcagcaaattaacag

SEQ ID NO: 34270 - DNA, 120 bp, synthetic construct
  source 1..120: mol_type = other DNA
ttctttttttttttttttttttgagacggagtctcactctgtcgcccaggctggagtgcagtggcacgatctcggctcaccacaagctccgcctccggggttcacgccattctcctgcct

SEQ ID NO: 34271 - DNA, 120 bp, synthetic construct
  source 1..120: mol_type = other DNA
gcccaccttggcctcccaaagtgctgggattacaggcgtgagccaccgcgcctggcccaaaaatataaatatattatttacaattactcaaatacatgaaacacttatgtgtaaatctaa

SEQ ID NO: 34272 - DNA, 120 bp, synthetic construct; identical to SEQ ID NO: 9494
  source 1..120: mol_type = other DNA

SEQ ID NO: 34273 - DNA, 120 bp, synthetic construct
  source 1..120: mol_type = other DNA
catcttgctttaatcttcaacttaaagttacccttaacaattcatttataccattatgccaaattgtagtcatccctgcagaattttagacaaatgaaaatggacaaggtaacaccaaag

SEQ ID NO: 34274 - DNA, 120 bp, synthetic construct
  source 1..120: mol_type = other DNA
ttgactagttcatagcatatcaattagcaacttatgacttgaaaatactttttctcagctgcatttgactacctaaaatcctaccgagcacgctgtttggcatgtcttactcctctgaaa

SEQ ID NO: 34275 - DNA, 120 bp, synthetic construct
  source 1..120: mol_type = other DNA
aacagctacttctactaaaagaagagtatgtggatactttctaagaactcaaaaacgagaaaaccaaaatcagagggtgcatgaatatatgtgcacaggtatgtacagatttaatctcta

SEQ ID NO: 34276 - DNA, 120 bp, synthetic construct; identical to SEQ ID NO: 9495
  source 1..120: mol_type = other DNA

SEQ ID NO: 34277 - DNA, 120 bp, synthetic construct
  source 1..120: mol_type = other DNA
ccatcagttgtatggctagaaatgaaaccatcactaaaccaagacacacagggctttcctgcacttagtttcaggaaaaagttccaagtaattcttactgtgttagaagaataaagtaca

SEQ ID NO: 34278 - DNA, 120 bp, synthetic construct
  source 1..120: mol_type = other DNA
aattctctcctcatgcaaaaaaaaaaaaaaaaaacctcaaaaaaaaaaaacctgttgttttcttaagtctaattaagccaaacaaactattaatagcaatttaattagcaagctataaat

SEQ ID NO: 34279 - DNA, 120 bp, synthetic construct
  source 1..120: mol_type = other DNA
tcaatattgcagcaaatgacagaagagtgagcgaaagagttcctaatgtgtgacagtcttaatgattctttaaaaggtaaaggattgtatgcatgtgtgtggaaaggagtaggaaataaa

SEQ ID NO: 34280 - DNA, 120 bp, synthetic construct; identical to SEQ ID NO: 9496
  source 1..120: mol_type = other DNA

SEQ ID NO: 34281 - DNA, 120 bp, synthetic construct
  source 1..120: mol_type = other DNA
caagctccgcctcccgggttcacgccattctccctcctcagcctcccgagtagctggaactacaggcgcccgccaccatgcctggctagttttttgtattttttttagtagagacggggt

SEQ ID NO: 34282 - DNA, 120 bp, synthetic construct
  source 1..120: mol_type = other DNA
aggcgtgagccaccgcgcgaggtcacaatccttttcaattaaacagacaaatcaagttgaagacaagtgttaaaatactattcagcctgaatatttatcagcatacatatcctgttgttc

SEQ ID NO: 34283 - DNA, 120 bp, synthetic construct
  source 1..120: mol_type = other DNA
agttcccccccaaagatattgtttaacctctaaagcatgaaaagctatataatatacaaattaaccagtatttttacaaaagtaatacagttttggactgatgatattacaccgtatttg

SEQ ID NO: 34284 - DNA, 120 bp, synthetic construct
  source 1..120: mol_type = other DNA
agtcatgacttgtggagaacgagaagcaatgtattatagcaacggggttcatatctaacaaacaataagagtgttgaacaaatcccttctatgaacttcgtgatttattttgctgttggt

SEQ ID NO: 34285 - DNA, 120 bp, synthetic construct; identical to SEQ ID NO: 9497
  source 1..120: mol_type = other DNA

SEQ ID NO: 34286 - DNA, 120 bp, synthetic construct
  source 1..120: mol_type = other DNA
cttagccaagctatctgttgccatagcttcagtggtttctgtatcactacatgcatcttcatcatcacccatcgtactatggtaaggagtgcttggttcatctattttcattaaaccata

SEQ ID NO: 34287 - DNA, 120 bp, synthetic construct
  source 1..120: mol_type = other DNA
agtcgtagaggtgttgtccttcaggatccccttgaggggccgttgcgaggccgtggaggccgccattgccgggtgctccgcctgtcggctcagggtcgctgcttggcgtggggtccgcga

SEQ ID NO: 34288 - DNA, 120 bp, synthetic construct
  source 1..120: mol_type = other DNA
cgacgccagactcaagcggggaaaagcgggcctagagctccagggcgggagcgacgccgacgcctaaaacattcttgaaaaagaagaataaagtgagttgaaaatcagtctgccctattt

SEQ ID NO: 34289 - DNA, 120 bp, synthetic construct; identical to SEQ ID NO: 9498
  source 1..120: mol_type = other DNA

SEQ ID NO: 34290 - DNA, 120 bp, synthetic construct
  source 1..120: mol_type = other DNA
aaaatgaaaaataatgttggtgtggtggctcctgcctgtagtcccagctacttgggatgctgaggcagaaggattgcttgagcccaggagttcgaggctgtcataagctgtgacacacca

SEQ ID NO: 34291 - DNA, 120 bp, synthetic construct
  source 1..120: mol_type = other DNA
attatggagtaaatgtaaagcataaaactcttaaattttagaaaaatagaaaatatttgagatataggtctaggcgaagaattcttaggcttgacattgagagcatgatctatgaaagga

SEQ ID NO: 34292 - DNA, 120 bp, synthetic construct
  source 1..120: mol_type = other DNA
aggactagtatctagagtatataaagaactctcaaaactcaacaaagaaaacacattaaaaatccaattagaaaataggcaaaagacttaaggtaatatttcactaaggaggatataaaa

SEQ ID NO: 34293 - DNA, 120 bp, synthetic construct; identical to SEQ ID NO: 9499
  source 1..120: mol_type = other DNA

SEQ ID NO: 34294 - DNA, 120 bp, synthetic construct
  source 1..120: mol_type = other DNA
gcaccattgtacctagcctgggcaacaagagtgaaactctttctcaaaaaaaaaaaaaaaggcgacaatgctaaatgctggcaaggaagaagagatactggatctctcataatttctgat

SEQ ID NO: 34295 - DNA, 120 bp, synthetic construct
  source 1..120: mol_type = other DNA
caactgtactcctgggtatttagccccaagaaatgaaaacttgcatacacaaatacacaagcacagacaatgccttcacacaaaaccttgtatgcaaatgtttgtctaactgcctactca

SEQ ID NO: 34296 - DNA, 120 bp, synthetic construct
  source 1..120: mol_type = other DNA
tggatgaatctccagagagttatactgagtgaaaaatgccagtcccaaaaggttacatactgcagtgagctgtgatcacgtcacttcactccagcctgagcaacagagcaagaccccatc

SEQ ID NO: 34297 - DNA, 120 bp, synthetic construct; identical to SEQ ID NO: 9500
  source 1..120: mol_type = other DNA

SEQ ID NO: 34298 - DNA, 120 bp, synthetic construct
  source 1..120: mol_type = other DNA
gaggttgcagtgagctgagatggtgccactgcactccagcctgggtgacagagtgagactctatctcaaaaaaaataaataaataaataaaataaactttattgaaaagaaaaaaaaagc

SEQ ID NO: 34299 - DNA, 120 bp, synthetic construct
  source 1..120: mol_type = other DNA
cgaccataaaagggcaagataagggatacttggagtgacaaaaatactgtcttgactgtaatattgacattgacacaaatgtcaatatcctgattgcaatactgtactgaagtgttataa

SEQ ID NO: 34300 - DNA, 120 bp, synthetic construct
  source 1..120: mol_type = other DNA
gaggatgtgcatagtttttcaaaatacatttaagaagttcatgagtggaaagtttgagtgaataaaaattatatctggaattctggtttgcaaattagcctgggaaatgtagcctgactc

SEQ ID NO: 34301 - DNA, 120 bp, synthetic construct; identical to SEQ ID NO: 9501
  source 1..120: mol_type = other DNA

SEQ ID NO: 34302 - DNA, 120 bp, synthetic construct
  source 1..120: mol_type = other DNA
aggtcctaatatagctagtatccatataaaaagagattaggacatacatacacagggggcagtccataggaagatgcagggaaaagacaaccatctgccagccaaggacagagacctcgg

SEQ ID NO: 34303 - DNA, 120 bp, synthetic construct
  source 1..120: mol_type = other DNA
ctaatacatcctcctatatttggacataggcctgtccttcttgattaaaggaatgtaaaaataagactgttgtcaaagttttaacaagactttatgaaggcttgggcaaaattgaaaagg

SEQ ID NO: 34304 - DNA, 120 bp, synthetic construct
  source 1..120: mol_type = other DNA
atacctgccatgttccttgggccttaccactgtagtgcacactggctggacatttgcatcattcctgaaggcttcctcaaagccaagaagggccactctgcccgactcacagcagactag

SEQ ID NO: 34305 - DNA, 120 bp, synthetic construct; identical to SEQ ID NO: 9502
  source 1..120: mol_type = other DNA

SEQ ID NO: 34306 - DNA, 120 bp, synthetic construct
  source 1..120: mol_type = other DNA
gtcaacttttctttgcattacccaagagaaaacttagccattacctcatcatggtgcttggatccctagaaccctgtctctcatgaaaccctgattccttcctttccttgtcaagatctt

SEQ ID NO: 34307 - DNA, 120 bp, synthetic construct
  source 1..120: mol_type = other DNA
ttcattcaaatttgtaatattccgtagaccagaaacagcacactctttgatcccatccttgtatgcccaaaatatctgagttggaggaggcactgaccctctgtcacacagtttaactgg

SEQ ID NO: 34308 - DNA, 120 bp, synthetic construct
  source 1..120: mol_type = other DNA
tttctgtcttcagcctgtggattcttatcacttccacagaagaaaattggctctaagattatccggagtacttcccaaatctattatttatggaacaagtgctgacttcagatatctagt

SEQ ID NO: 34309 - DNA, 120 bp, synthetic construct
  source 1..120: mol_type = other DNA
gtacagtgacctgaacatggcttgctgtatccctaacctcctgtgcccaagcaatcctcctgcttcagcctcctgagtagctgaaaccacaagtgagcgccaccatgcccagctaatttt

SEQ ID NO: 34310 - DNA, 120 bp, synthetic construct; identical to SEQ ID NO: 9503
  source 1..120: mol_type = other DNA

SEQ ID NO: 34311 - DNA, 120 bp, synthetic construct
  source 1..120: mol_type = other DNA
tcctagtataacacaaactacacacagttacctttgggacctagaatggaatggggaggagggagaaacaaaggagaccttttactccgtacccttctgtatggtttgaacttgttgttt

SEQ ID NO: 34312 - DNA, 120 bp, synthetic construct
  source 1..120: mol_type = other DNA
gctgggactacaggcgcccgccaccacgcaaggctaattttttgtgtttttagtagagacgggggtttcactgtgttaaccaggatggtctcaatctcctgaccttgtgatccgcccgcc

SEQ ID NO: 34313 - DNA, 120 bp, synthetic construct
  source 1..120: mol_type = other DNA
ttagactaaatgattagaagaagcaggacttaaaaagaaatgaatgaatttccactagggggtggtagagaatcataatccatatcatagtctgaaactgaagggcaaaaggaaatagtc

SEQ ID NO: 34314 - DNA, 120 bp, synthetic construct; identical to SEQ ID NO: 9504
  source 1..120: mol_type = other DNA

SEQ ID NO: 34315 - DNA, 120 bp, synthetic construct
  source 1..120: mol_type = other DNA
ccctgggtaagccgaggcatgagtactctgaaggaaaagcaaccatgagtgagctgcagcatccttacttaacctccaaacttaacctttgttgtaatatatatagaaaaatgagttccg

SEQ ID NO: 34316 - DNA, 120 bp, synthetic construct
  source 1..120: mol_type = other DNA
acccagatattcttatccgggagatgctatttctttttttccagaggccagaggtggtttttagtaaccacctgtatcattttgcaggggcttcttaaatgcgtggccagactcacctca

SEQ ID NO: 34317 - DNA, 120 bp, synthetic construct
  source 1..120: mol_type = other DNA
cctcccaccagctgtgctttatttttctttgattctaactattacagaaaagacaagtcagactccttcatcgctgggcaaagttccaagtaaactgcattgggaatccttggcatttta

SEQ ID NO: 34318 - DNA, 120 bp, synthetic construct; identical to SEQ ID NO: 9505
  source 1..120: mol_type = other DNA

SEQ ID NO: 34319 - DNA, 120 bp, synthetic construct
  source 1..120: mol_type = other DNA
gttgcttcattacttctggagggaaatcttgctgctttctgtaaacatttttttctcatggcatatttatgtggaactgtgccatttcttttcctacttattctgaataaattgagcatt

SEQ ID NO: 34320 - DNA, 120 bp, synthetic construct
  source 1..120: mol_type = other DNA
actaacacgtaaactttatcttaaaatacgctgcatccatgttttttccaacttggggaatttaatctatttcagcaaggattctaccacggtgttaggaccccctgcattccagaggga

SEQ ID NO: 34321 - DNA, 120 bp, synthetic construct
  source 1..120: mol_type = other DNA
tccaacctaggctggcttctactcttagagagagaatattttcgggccctttccgagatcccgcaccactagttccctccacgctttcatctgttgccacagcaacattttggcttctta

SEQ ID NO: 34322 - DNA, 120 bp, synthetic construct; identical to SEQ ID NO: 9506
  source 1..120: mol_type = other DNA

SEQ ID NO: 34323 - DNA, 120 bp, synthetic construct
  source 1..120: mol_type = other DNA
tagcccgtgtagtttctaatttctatttaattttactttgtggtttaatgcattatgtttgggaaaatatgcattcactatttgttgagtacacaattttataaatatttgataagatca

SEQ ID NO: 34324 - DNA, 120 bp, synthetic construct
  source 1..120: mol_type = other DNA
tttttttccctaactttcaaagacttgtttaggatatgaaggcttataacttatgggtagttggtgaattgtacattttagcataataaagtatccttctttgacactgaaaaatttctt

SEQ ID NO: 34325 - DNA, 120 bp, synthetic construct
  source 1..120: mol_type = other DNA
gagaggtgtttaggtcatgacgactccatcctcataaatgaattaatgccaattacaaaaaggctaaaagcctgtgaattcaacctgttgcacttgggcgctctctctttctctttctct

SEQ ID NO: 34326 - DNA, 120 bp, synthetic construct
  source 1..120: mol_type = other DNA
ctctcagctctctttttatcccttttgccttccaccacagtatgaggcagccagaagatttttgcaagatgcaggcctctcaaccttggatttcctagcctctaggactgtaataagtca

SEQ ID NO: 34327 - DNA, 120 bp, synthetic construct; identical to SEQ ID NO: 9507
  source 1..120: mol_type = other DNA

SEQ ID NO: 34328 - DNA, 120 bp, synthetic construct
  source 1..120: mol_type = other DNA
aaccacgcctggctaatttttttatttttgtagagatagggtctcgctatgttacccaggctgatctcaaactcctgggctcaagtgatcctccctccttggcctcccaaagtgctggga

SEQ ID NO: 34329 - DNA, 120 bp, synthetic construct
  source 1..120: mol_type = other DNA
tacaaatgcatatatatctggattacttctgccatcatatttttatatttaccatgttttttcattttttagtcttctgtctcaataaatttcatcaaattgcctttgttacttctgtct

SEQ ID NO: 34330 - DNA, 120 bp, synthetic construct
  source 1..120: mol_type = other DNA
ttttcccaccagtcacatgaaggaatggaacgttacccttaacattaaagtttcctgtatttgtcttcccttagaatctcccttcctctctgcaaaatgcaactattattccaaatttgg

SEQ ID NO: 34331 - DNA, 120 bp, synthetic construct; identical to SEQ ID NO: 9508
  source 1..120: mol_type = other DNA

SEQ ID NO: 34332 - DNA, 120 bp, synthetic construct
  source 1..120: mol_type = other DNA
gctttaggatattctcagcttcaactctacaaaatgccaatttttttccaagtagattatttcagtttgaagtccaccatcagagtatgagttcccctcaccctacatcctcattgattt

SEQ ID NO: 34333 - DNA, 120 bp, synthetic construct
  source 1..120: mol_type = other DNA
ctctgataactattgtgagcttaacttttgtacgtttattggtcttttatatatccctttttgtgaactgccctttcacatcttttgatcattttcctatggggctattcttagatgttc

SEQ ID NO: 34334 - DNA, 120 bp, synthetic construct
  source 1..120: mol_type = other DNA
ttaaagtttctaattttaatgtggtcaaatttattcatcttctcttaacatttttgtttttaaaatgtgtatgtgtgtctttttaataaatatttttctaccttgaagtcatacaaatat

SEQ ID NO: 34335 - DNA, 120 bp, synthetic construct
  source 1..120: mol_type = other DNA
tgtatatatatccactaatccagtgtcataaattcaaacttattgaattatacatcctttacccactggtctttaatgaccattcttcacatacaaggggtcctgacactctttccattc

SEQ ID NO: 34336 - DNA, 120 bp, synthetic construct; identical to SEQ ID NO: 9509
  source 1..120: mol_type = other DNA

SEQ ID NO: 34337 - DNA, 120 bp, synthetic construct
  source 1..120: mol_type = other DNA
tcaacttcttttaatgattttaattttccccactaagatcttgcatgcctttcctttttgagaatttattcctgattacagtggacccttcaacaatgcgagggttagtagcgctgacca

SEQ ID NO: 34338 - DNA, 120 bp, synthetic construct
  source 1..120: mol_type = other DNA
atgtgttatatactgtactcttacagtaaagtaagctagagaaaagaaaatgttggccaggtgcggtggcccatggctgtaattccagcagtttgggaggctgaggcagaagtgcttgag

SEQ ID NO: 34339 - DNA, 120 bp, synthetic construct
  source 1..120: mol_type = other DNA
gagaatcgcttgagcccaggaggttgaagctacagtgagccatgataacactgcactctagcctgggcaacagagcaagaccttgtctcagaaaagcaaagaaaatgttatttaaaaaat

SEQ ID NO: 34340 - DNA, 120 bp, synthetic construct; identical to SEQ ID NO: 9510
  source 1..120: mol_type = other DNA

SEQ ID NO: 34341 - DNA, 120 bp, synthetic construct
  source 1..120: mol_type = other DNA
atcatctatgaataatgaaagtttgctttatttcattcctatccttccaactttttttttggtctgttgttaaaagcccccctatcccatgcctaagtaataagtaatctcaatattaca

SEQ ID NO: 34342 - DNA, 120 bp, synthetic construct
  source 1..120: mol_type = other DNA
cttagccttgaaaccctggtgaaaaaattctcagcaaggtaagaaggaaaaaaatgttctcccctgctcctgaagctggagagaacaataaatgaaaactgttgtcataaatggttattt

SEQ ID NO: 34343 - DNA, 120 bp, synthetic construct
  source 1..120: mol_type = other DNA
ggtgataatgtttgagcttaaaatctctatcttcagaaggtaacgtgatttgtgaattttctgtcaaatcaggaaagaatcactggcattgccctcttcccacacatgcataggataaaa

SEQ ID NO: 34344 - DNA, 120 bp, synthetic construct; identical to SEQ ID NO: 9511
  source 1..120: mol_type = other DNA

SEQ ID NO: 34345 - DNA, 120 bp, synthetic construct
  source 1..120: mol_type = other DNA
gaaatacatatctcctcccgatacacatgcacacacgcaaaaacatatttaactgaaacaacggtttcatgaaactatagttactctcattacctgtgatgcaggcaagtattttcaatt

SEQ ID NO: 34346 - DNA, 120 bp, synthetic construct
  source 1..120: mol_type = other DNA
gttttatctggcagtcccaaagtcaggatcagagtaaccgatggagcatcatttgtacgctccacgtctgaggaggaggtctgggaaaagatccaacgtgtaggactggcgcagaggctc

SEQ ID NO: 34347 - DNA, 120 bp, synthetic construct
  source 1..120: mol_type = other DNA
caggcgtggtggtgcgcacctgtagatccagctcctcgggaggctgaggcacgaaaatcgcttgaacgcgggaggcggaggttgcagtgagacaagatcacaccactgcactccagcctg

SEQ ID NO: 34348 - DNA, 120 bp, synthetic construct; identical to SEQ ID NO: 9512
  source 1..120: mol_type = other DNA

SEQ ID NO: 34349 - DNA, 120 bp, synthetic construct
  source 1..120: mol_type = other DNA
gggtgcgagtggggaactgaggcaagaagcagatggggcggcaccgagagaagagaaactacgctagaggaaaagctcgagctgttacccctcccaacttcttccgccttccgccttccc

SEQ ID NO: 34350 - DNA, 120 bp, synthetic construct
  source 1..120: mol_type = other DNA
ctggggcactgaggggcgggaaggttagaaggagccagggctagagtcctggaaggtggcagtcaggtcgcagggccacagcagtcactctgcgactctctcttccggtgtttctccagc

SEQ ID NO: 34351 - DNA, 120 bp, synthetic construct
  source 1..120: mol_type = other DNA
ccagctcaagggcgcgacaacctggcgccgagcatctcaggccgccgcggggaccccccctaagggactcgggaacacctgcctaccctagaagaggcggagaataaccccgtagggagt

SEQ ID NO: 34352 - DNA, 120 bp, synthetic construct; identical to SEQ ID NO: 9513
  source 1..120: mol_type = other DNA

SEQ ID NO: 34353 - DNA, 120 bp, synthetic construct
  source 1..120: mol_type = other DNA
gcttggatgcagttgcagggtgagatttgagacggtgattgtgttttccagcaggcgctcaggcggggtggtgaaggagggatacagacctctaaagattcctctctcgttggggtgagg

SEQ ID NO: 34354 - DNA, 120 bp, synthetic construct
  source 1..120: mol_type = other DNA
atgtatgtgctgagtgtccctgctctggagggattgttaaagaatccaggttcttggggagtgtctcaggagaacactccaggtgatatccttattcttcctattttcaccgtgttggtt

SEQ ID NO: 34355 - DNA, 120 bp, synthetic construct
  source 1..120: mol_type = other DNA
tctgggcctcacgtcttcatccctcaagtccgctgcctctgagctgctacttagatctggtctgtttctacctctgctggaccagaagtttgcattaacgcccccaccccatcctgcaag

SEQ ID NO: 34356 - DNA, 120 bp, synthetic construct; identical to SEQ ID NO: 9514
  source 1..120: mol_type = other DNA

SEQ ID NO: 34357 - DNA, 120 bp, synthetic construct
  source 1..120: mol_type = other DNA
gccagaggtggaacagaaatgaggtttgaaatgggaaccagaagctaatctgtgggaaattcttttactcctcagacgtgtaaagatgtgttggagactctcgtaaatatgtattcagta

SEQ ID NO: 34358 - DNA, 120 bp, synthetic construct
  source 1..120: mol_type = other DNA
gggaatcaacaattcagaatgatcaaaaatccctgtgtgtagagacatgaatctataggaatatcacacatagtgagcacaactgtgagtgaaatcccatgtttcatgcatcccagcagt

SEQ ID NO: 34359 - DNA, 120 bp, synthetic construct
  source 1..120: mol_type = other DNA
cttgatttttgccggtcactgatcacctggctacaggaaaggagacctaaatccagaacttaaatttatgaacaccaggtctgtaggcactagacctcagaagtaggtgagtaggtggct

SEQ ID NO: 34360 - DNA, 120 bp, synthetic construct
  source 1..120: mol_type = other DNA
tcagaccagggaaatcagaagccatcagatgccttcagtagggaatccagcacaaagaggatcataagtcatctccccacttctctatagtcatcatagacgtaattgctaacctaccct

SEQ ID NO: 34361 - DNA, 120 bp, synthetic construct; identical to SEQ ID NO: 9515
  source 1..120: mol_type = other DNA

SEQ ID NO: 34362 - DNA, 120 bp, synthetic construct
  source 1..120: mol_type = other DNA
ggcagaaggctgatgaaaacccaccaactgatggtcagtccgagaagcagtcaagatggagaactgcaaaattaacagcttaagttttccaggagtctcagtgcccaatgtcaggtctac

SEQ ID NO: 34363 - DNA, 120 bp, synthetic construct
  source 1..120: mol_type = other DNA
acccagacacctgagaaatgcctcccttatatccaagagatccctgtgtgtagaacacatgaatctattggaatatcacacacagtgagcagactcttcttacacttactaaactctctt

SEQ ID NO: 34364 - DNA, 120 bp, synthetic construct
  source 1..120: mol_type = other DNA
catgtgtaaatggtactatacaatggtatgattggatagtcaaaggaatatctaacccaagtgtacataaggagtaaatttggagtcagaggaagttggtcattgtaggaaagtaactgc

SEQ ID NO: 34365 - DNA, 120 bp, synthetic construct; identical to SEQ ID NO: 9516
  source 1..120: mol_type = other DNA

SEQ ID NO: 34366 - DNA, 120 bp, synthetic construct
  source 1..120: mol_type = other DNA
aattaaaggacaacctactgagctgaagagagctttggggtttggtaatttggggtgtgaggtggatcttcaggaatgccatgggcttcaagactagtgtgtctctcccttagtatgttc

SEQ ID NO: 34367 - DNA, 120 bp, synthetic construct
  source 1..120: mol_type = other DNA
caagaaggaggaagaatagctcaggggtcttcccttcacatctctcctacaaggattgtgaaatgtcatatgcctcctcccatagacttagatagacctaaaattgtcaacatgtgtcca

SEQ ID NO: 34368 - DNA, 120 bp, synthetic construct
  source 1..120: mol_type = other DNA
tcattaatttaaaaaatatacaaacaacctctttcttaatggttggaaattttacattgctcttttttcccactttgaattcatatttttattctaccccccatgtagaatttttctttt

SEQ ID NO: 34369 - DNA, 120 bp, synthetic construct; identical to SEQ ID NO: 9517
  source 1..120: mol_type = other DNA

SEQ ID NO: 34370 - DNA, 120 bp, synthetic construct
  source 1..120: mol_type = other DNA
cacttgagcccaggaggtcgaggctgcagtgagccatgatcgtgccactgcatgcactctaccctggatgacagagtaagatgctgtctcaaaaaaaagttatatggattaagataggat

SEQ ID NO: 34371 - DNA, 120 bp, synthetic construct
  source 1..120: mol_type = other DNA
cataatgagatatcttgaggccgggacccaagtctaagcatgaagttcacttatgtttcttatatacattatgcacatagcctgaaggtaattttataccatatttaaaataattttata

SEQ ID NO: 34372 - DNA, 120 bp, synthetic construct
  source 1..120: mol_type = other DNA
attttggtaaataaaagtgtaagtttgtaatggtaaaatttaactagaaatgcatctcttaatgagatggatagggactttattttcccaatttcatgttgacaaatgttacttattgtt

SEQ ID NO: 34373 - DNA, 120 bp, synthetic construct; identical to SEQ ID NO: 9518
  source 1..120: mol_type = other DNA

SEQ ID NO: 34374 - DNA, 120 bp, synthetic construct
  source 1..120: mol_type = other DNA
cctgctgctctttcccttagagataccttgttcatgaatctcaaattagataaaactagggttaaagaaaaacaaccccccacacacaaaattggagatcaaaaatcaataggttcttaa

SEQ ID NO: 34375 - DNA, 120 bp, synthetic construct
  source 1..120: mol_type = other DNA
tgttaattttataatcatgcatttgatagatgtaaaacagtgtgtcagcctccaagcgggagaaattaatccaaaataaatgaagctggatttctaaagtttagagcatcacatccaaga

SEQ ID NO: 34376 - DNA, 120 bp, synthetic construct
  source 1..120: mol_type = other DNA
ataaatataggtttacagaaattctattactgactgctattatgtgcattaattacagcagaatccacaaaacatttccatcaaattaaatcttactctaggaggtatatgataaaaata

SEQ ID NO: 34377 - DNA, 120 bp, synthetic construct; identical to SEQ ID NO: 9519
  source 1..120: mol_type = other DNA

SEQ ID NO: 34378 - DNA, 120 bp, synthetic construct
  source 1..120: mol_type = other DNA
tgtatatatatatatatttgcaactgaagcacagatgggacacaggtaagtgggagaactcaccaagctctttgttagtatttagagtgtttcatagaaagttaatatttcttaactttt

SEQ ID NO: 34379 - DNA, 120 bp, synthetic construct
  source 1..120: mol_type = other DNA
cacctgaatgaaataaaaaaaatcacgttgaaggctggtgcagtaacatgtgcctgtagtcccagctactctggaggctgagtcaggaggatcacttgagaccagaagttcaggaattca

SEQ ID NO: 34380 - DNA, 120 bp, synthetic construct
  source 1..120: mol_type = other DNA
gcaaaggagccatttgttctttacgatggtcaggaaaggaagcatcaaggtcatcaaatgaaaaattttcagcatttcagcctctctgctcagggaaatatctgaatctagaatatcaca

SEQ ID NO: 34381 - DNA, 120 bp, synthetic construct; identical to SEQ ID NO: 9520
  source 1..120: mol_type = other DNA

SEQ ID NO: 34382 - DNA, 120 bp, synthetic construct
  source 1..120: mol_type = other DNA
ccagtggtccatgggaagggttggatgaataggtggagcacagaggatttttaaggcagtgaaactattctgaatgatactgtaatggtggatacatgtcatacctttgtcaaaaccaat

SEQ ID NO: 34383 - DNA, 120 bp, synthetic construct
  source 1..120: mol_type = other DNA
actaatagtggaaactggagggaagagggcttgaggggacatacgggaactctctgtaattcctgttcagtttttctgtaactgttaaactgtccaaaaaaagtctgtttttataaatgg

SEQ ID NO: 34384 - DNA, 120 bp, synthetic construct
  source 1..120: mol_type = other DNA
ccagatcaagaatattaaagaaacttagattaatattgttaccttgaatttattttactgagtaatcctctaagactcctctacacattattaatctagaaggatttttaaagtctttat

SEQ ID NO: 34385 - DNA, 120 bp, synthetic construct; identical to SEQ ID NO: 9521
  source 1..120: mol_type = other DNA

SEQ ID NO: 34386 - DNA, 120 bp, synthetic construct
  source 1..120: mol_type = other DNA
cttgaaaacaggtgacagtggaaccctgttaggttcacaaatcctagactttgattatatagcccaggctcaaatttttctcgaatgttacgaacattcaaagcattaggagtcttggtt

SEQ ID NO: 34387 - DNA, 120 bp, synthetic construct
  source 1..120: mol_type = other DNA
ttcgtagtttctaacatcctccaaatgaggagcccatccctaatttagatgcttctttcaaaggaggctcctttccttcgttatccataatatagtcacaccagtcctgaaaaaacatgg

SEQ ID NO: 34388 - DNA, 120 bp, synthetic construct
  source 1..120: mol_type = other DNA
gcttctacatttgtgctgcttctacaccaaaacagctggaatgtatatagtatggttctggatgctcttgtatacctcactcttcatttctcacctaacccatgtgctatgatttgaatg

SEQ ID NO: 34389 - DNA, 120 bp, synthetic construct; identical to SEQ ID NO: 9522
  source 1..120: mol_type = other DNA

SEQ ID NO: 34390 - DNA, 120 bp, synthetic construct
  source 1..120: mol_type = other DNA
agtagcacaaaatggactatgacaccatgtgtttacacagaaagaaaaaaatatcatacggtaattgctcctaaatatgcagagaatatgttctgatatccttagtggatgcctgaaact

SEQ ID NO: 34391 - DNA, 120 bp, synthetic construct
  source 1..120: mol_type = other DNA
gatgtgctgtaataaaagttatgtgactgacgcctctttttcttcctctttctttcaaaatatcttaatattttcaagccatggataactgaaactgcagaaagtgaaactgtagataaa

SEQ ID NO: 34392 - DNA, 120 bp, synthetic construct
  source 1..120: mol_type = other DNA
agggttccctaagctttgcaaacaacaaatagcatccacctatccatcctcagagagcaacagttttactgttatttagaaaaagcaactatttcaggctgcaggttgtgcacatcagca

SEQ ID NO: 34393 - DNA, 120 bp, synthetic construct; identical to SEQ ID NO: 9523
  source 1..120: mol_type = other DNA

SEQ ID NO: 34394 - DNA, 120 bp, synthetic construct
  source 1..120: mol_type = other DNA
agagagtttcacaggcctgtttcttatgggattgctcaatgtaggtaaatattatcaaaccaaaaagtaattttgtaacagaaattctacagagccccaataccttacagaatgatgagt

SEQ ID NO: 34395 - DNA, 120 bp, synthetic construct
  source 1..120: mol_type = other DNA
gctaggaattcccaagcaggtagaagaagggggacattccaggcaaaggaatcatgtgaatgcaaaggtagggagtcatgaatcaatatgttcggtttttttgttgtttttgttttataa

SEQ ID NO: 34396 - DNA, 120 bp, synthetic construct
  source 1..120: mol_type = other DNA
ctacaaaaacaaaaaaaattatccctgttcagtggtgtgcgcctgtggtcccggctacctgggaggctgaggcgagaggagtgctcaaggtgggaggtggagattacagtgagcagagat

SEQ ID NO: 34397 - DNA, 120 bp, synthetic construct; identical to SEQ ID NO: 9524
  source 1..120: mol_type = other DNA

SEQ ID NO: 34398 - DNA, 120 bp, synthetic construct
  source 1..120: mol_type = other DNA
gtgtaaatcttctggttcaggggataaacaacaggaagtcattgaaatctattggcctatccgcattttgaaattatttttactcatgtaagattctgtaacattatatggtcattagga

SEQ ID NO: 34399 - DNA, 120 bp, synthetic construct
  source 1..120: mol_type = other DNA
caggagtactgtctgagcccaggagttcaagaccagcctgggcaacatggcaagaccccatctctacaaaatttttttaaatttgccaagagtggagtgcacatctgtggtctcagctac

SEQ ID NO: 34400 - DNA, 120 bp, synthetic construct
  source 1..120: mol_type = other DNA
atattatattcattaatgttgctgctgatatcagaaaaaattctaagtatcccacagtagcagatacaagcttttcaaaattccaacttctacttttaaaagcttaaattttagcactgg

SEQ ID NO: 34401 - DNA, 120 bp, synthetic construct; identical to SEQ ID NO: 9525
  source 1..120: mol_type = other DNA

SEQ ID NO: 34402 - DNA, 120 bp, synthetic construct
  source 1..120: mol_type = other DNA
atgtgtggtggtgaagaatacaatgactactaataaaatttggtgccattgccttaattcgtgctaagacaccagtcattttacccaccattggataaaatccaccatttttgcaccatc

SEQ ID NO: 34403 - DNA, 120 bp, synthetic construct
  source 1..120: mol_type = other DNA
ttcagaacccctgttgcccagaattcacataaaagaagatcatcaatggtcaattgatgctgatacctgatgaatgaaagcaaaacaggatgtatagccatctgtagatcagtccctttg

SEQ ID NO: 34404 - DNA, 120 bp, synthetic construct
  source 1..120: mol_type = other DNA
tgatttttcatccagcaggtattcagcaatgtcaactgttcaagcctttattagtctctctgtgattgtgtgtgctcctctagccaatacaatatgatggcttatcctgtaagaagcttt

SEQ ID NO: 34405 - DNA, 120 bp, synthetic construct
  source 1..120: mol_type = other DNA
ctgcaactttgttggaaccatataagtgtttgaaaatgttttactgcacaagacacaatatgataaattattaacatctataaagctgaacaaaagatcactttcaacatatttttgttg

SEQ ID NO: 34406 - DNA, 120 bp, synthetic construct; identical to SEQ ID NO: 9526
  source 1..120: mol_type = other DNA

SEQ ID NO: 34407 - DNA, 120 bp, synthetic construct
  source 1..120: mol_type = other DNA
tataacaggtataactgaagatagctggtaagagcatggtagaaaagaaataatttctgaaaactacatacttataccgtaaactcactacctttgaaaactctagaaaatacaatacac

SEQ ID NO: 34408 - DNA, 120 bp, synthetic construct
  source 1..120: mol_type = other DNA
atcttaattttatgaatatttttgaccttgttgaccctctaaaaggatccaagggatctctccctcccaacatccccaggaatcctctgatcacattttgagaactgttggataagtcag

SEQ ID NO: 34409 - DNA, 120 bp, synthetic construct
  source 1..120: mol_type = other DNA
tttaaagctttgggggggaaatgtagaataactttattatctcaaggtagatagcctaacaataccacgtgctgaagcagaaatgtgaagaaatgggaatttgcatagaatcttggtgga

SEQ ID NO: 34410 - DNA, 120 bp, synthetic construct; identical to SEQ ID NO: 9527
  source 1..120: mol_type = other DNA

SEQ ID NO: 34411 - DNA, 120 bp, synthetic construct
  source 1..120: mol_type = other DNA
aacaaatgatatgcactaactttaaactagtaattgcatctggtgagggaaaagaaaggtggacctgaagtcaggtgcaaacagcacaactgtatttgagtagtggttgcatgactgttg

SEQ ID NO: 34412 - DNA, 120 bp, synthetic construct
  source 1..120: mol_type = other DNA
atatatatatatatatatatatatatagcctatttctgttaatggttctttggataaataacagttgactttgttcctctgcttggtattttaaaaaacctattagtttacaaatctctt

SEQ ID NO: 34413 - DNA, 120 bp, synthetic construct
  source 1..120: mol_type = other DNA
aatggtttttttaataaatcagtgactacaataaaattgatacctctgaatccttccattttcttttcactgcccccagatataaccaccaatgtgaagtcagttttatcattgctatgc

SEQ ID NO: 34414 - DNA, 120 bp, synthetic construct; identical to SEQ ID NO: 9528
  source 1..120: mol_type = other DNA

SEQ ID NO: 34415 - DNA, 120 bp, synthetic construct
  source 1..120: mol_type = other DNA
tgtccccatgggtttacttaaaggatagttttgtccacttatgaacaactgtgtttcatcaaaatcagaatttactgaatgttcattcattttaacttttttaagtggtttgtcacagaa

SEQ ID NO: 34416 - DNA, 120 bp, synthetic construct
  source 1..120: mol_type = other DNA
cagtctgtctcccacaaagcttatggctgagtttttaaaatgtaattcaagcttttcaggaatacagtcaatccataaagcaatagggagaaacatttccaatatcaagaggcactgatg

SEQ ID NO: 34417 - DNA, 120 bp, synthetic construct
  source 1..120: mol_type = other DNA
ctcaccaaaggctagaagacattttgccagaaggaagtaatgtttacatttctatattttgtttctttttcctctacatatgcattttgtcctatgtctatgtctccttcttaataggct

SEQ ID NO: 34418 - DNA, 120 bp, synthetic construct; identical to SEQ ID NO: 9529
  source 1..120: mol_type = other DNA

SEQ ID NO: 34419 - DNA, 120 bp, synthetic construct
  source 1..120: mol_type = other DNA
ctagtacatgggataatgtataaataaacatgtaagtgtcgataagtactcaactcttttttactgagagggctttaggctttttttttttttaagtttcaataccacagttcaaatgtg

SEQ ID NO: 34420 - DNA, 120 bp, synthetic construct
  source 1..120: mol_type = other DNA
tccactaataaatgattccattcttcagaccatcaaactaaggactacgctttgaacatgctttggaaacattttcattaaagccaaaatgtctcagaaatgtttaattaaaaaataaaa

SEQ ID NO: 34421 - DNA, 120 bp, synthetic construct
  source 1..120: mol_type = other DNA
aaaaatacaaaaattagccaggcatagtggcaggcgcctgtagtcccagctactcgagaggctgaggcaggagaatcgcttgaacccaggaggtggaggttgcagtgagccgagatcaca

SEQ ID NO: 34422 - DNA, 120 bp, synthetic construct; identical to SEQ ID NO: 9530
  source 1..120: mol_type = other DNA

SEQ ID NO: 34423 - DNA, 120 bp, synthetic construct
  source 1..120: mol_type = other DNA
cagcccagggatcctaattcagcagttctagaggttattcagaaatctgcattttcatgaagtaccctggatgattctaatggatgttgtctgtaacacaactttcagataaatgtcctg

SEQ ID NO: 34424 - DNA, 120 bp, synthetic construct
  source 1..120: mol_type = other DNA
actccaaccattccttcttgccaactgtgatcagaagtatgaaaaaaacagcccatgttcttccttagaggaagaccatatcccaactgtgaaatggtccagacatcttggaactgaata

SEQ ID NO: 34425 - DNA, 120 bp, synthetic construct
  source 1..120: mol_type = other DNA
tcccaactgtgaaatggtccagacatcttggaactgaatatggattgtgatcctgatacccccaaccctcactgctcttcatataccagctgagcatttcataatatttattcgataaac

SEQ ID NO: 34426 - DNA, 120 bp, synthetic construct
  source 1..120: mol_type = other DNA
gggaccttggagcaggggtagatactccagtgcaaaaatagtggacactcacctcttctaagaccttttatcaatcattctctaaacacctctcaaacatgtccttcccttgtatttcct

SEQ ID NO: 34427 - DNA, 120 bp, synthetic construct; identical to SEQ ID NO: 9531
  source 1..120: mol_type = other DNA

SEQ ID NO: 34428 - DNA, 120 bp, synthetic construct
  source 1..120: mol_type = other DNA
ttcattttggttccaattctgtccagagaaatttgaatgctggagttttgggaattttaaggctttgagcaaggaacattttatgatcctctgcttaccacttgtttatttacaacagaa

SEQ ID NO: 34429 - DNA, 120 bp, synthetic construct
  source 1..120: mol_type = other DNA
gttatacggcaacttatttatttagctttgtagaggaatattggatatggaaacatagcttgtcagcctgacagcattagacatcttcatcaggagtctttatgtattctagatgctgat

SEQ ID NO: 34430 - DNA, 120 bp, synthetic construct
  source 1..120: mol_type = other DNA
atcttataccaacccatgagtgaggattccaagaaaacaggcatattcggattcaagaaacacaccataacagagtccagggcctacatttcccaacaggttttcatacgggtctggtca

SEQ ID NO: 34431 - DNA, 120 bp, synthetic construct; identical to SEQ ID NO: 9532
  source 1..120: mol_type = other DNA

SEQ ID NO: 34432 - DNA, 120 bp, synthetic construct
  source 1..120: mol_type = other DNA
tagcaactactgagcattgcaaggagaagaaattgggatgggtgcctataaagagaaaaactctctttttaaccttcaaatctaaagaaaatcaatccaacaagcatttgctgcaaacct

SEQ ID NO: 34433 - DNA, 120 bp, synthetic construct
  source 1..120: mol_type = other DNA
ttagaaaacaggaaaaaacgagaccagctggggacagctgcagcaaagcaccctgaggatactaaacaccctcagtatttagctaggatggcctaaaagagctaatctgaaagaattcat

SEQ ID NO: 34434 - DNA, 120 bp, synthetic construct
  source 1..120: mol_type = other DNA
agtagtatgaacatagcttcaccacacagcctcctaaaaatctatggatactttcctgaaagtacccctgaaggcattcctcctggattctgtgaagtaaattagccctcaaggtgtacc

SEQ ID NO: 34435 - DNA, 120 bp, synthetic construct
  source 1..120: mol_type = other DNA
ctacctcatgaatctccaagttcctttctctcctgtccctggagcatagatgaatcagaatccctgcttgccaccccattggacaccttgaaaagagacccttggaatggctatgacaac

SEQ ID NO: 34436 - DNA, 120 bp, synthetic construct; identical to SEQ ID NO: 9533
  source 1..120: mol_type = other DNA

SEQ ID NO: 34437 - DNA, 120 bp, synthetic construct
  source 1..120: mol_type = other DNA
tttttaatttctgcactatgtccttcccaatcggcttgggacaattgttgcctccccttcatacataaacaggctgcaacaggccaggctacttgtatcttcaaggtaaatcagtaggga

SEQ ID NO: 34438 - DNA, 120 bp, synthetic construct
  source 1..120: mol_type = other DNA
ttcctaggagttgcctgaaagagtagtggcaaatggggagatccacagtgtttctgggctctctaccagggctggatctggagggacacagaccagtatttgactttatctcttccccat

SEQ ID NO: 34439 - DNA, 120 bp, synthetic construct
  source 1..120: mol_type = other DNA
actatctaatgcagaattgtgaagaagatgaaccaagaacttgaaacaaaatggcaaatatacttaagataatagaagataccagcaacataaagcaaaaccagtaactcacaaaaacaa

SEQ ID NO: 34440 - DNA, 120 bp, synthetic construct; identical to SEQ ID NO: 9534
  source 1..120: mol_type = other DNA

SEQ ID NO: 34441 - DNA, 120 bp, synthetic construct
  source 1..120: mol_type = other DNA
ttcaaaggatacttaacaggagcttcagaaaaatccacacctatgctcgttatattgagacaaataaatatttttaaaacttagaaagaagagtttatcaactgggcacagtggctcacg

SEQ ID NO: 34442 - DNA, 120 bp, synthetic construct
  source 1..120: mol_type = other DNA
ttagccccgcctggtggcgtgtgcctgtagtcccagctactcgggaggctgaggcaaacccgggaggtggaggttccagtgggtgacagagtgataccctatcagaaaaaaaaaaaaaaa

SEQ ID NO: 34443 - DNA, 120 bp, synthetic construct
  source 1..120: mol_type = other DNA
aactttatatgtatcaaaattgctattcaagtgagatggcataacaaatttattatcatgcaaagaatccaaaggctcatatttaaaacactcttggacgtggtaaaaaaaaaaaaaaaa

SEQ ID NO: 34444 - DNA, 120 bp, synthetic construct; identical to SEQ ID NO: 9535
  source 1..120: mol_type = other DNA

SEQ ID NO: 34445 - DNA, 120 bp, synthetic construct
  source 1..120: mol_type = other DNA
aaaagggaagaaacattgtacaataaaaacagaatgtgaaatgagttgcaaaagtaaatctttacttcagcagttaccaataaaagaacaaaggctctaataatggaggaaaaagggaac

SEQ ID NO: 34446 - DNA, 120 bp, synthetic construct
  source 1..120: mol_type = other DNA
tacccaggtattaagcctagtatacattagttatttttcctgatcctctccctcctcccacctccaccctccaataggcccatgtgtgcagttcccctctgtgtgtccatgtgttttcac

SEQ ID NO: 34447 - DNA, 120 bp, synthetic construct
  source 1..120: mol_type = other DNA
cttatttatatctgcatagtattccatggtgtatgtgtatcacgttttctttatccagtctatcattagtgggcatttaggttgattccaagtctttgatattgtgaatagtgctacagt

SEQ ID NO: 34448 - DNA, 120 bp, synthetic construct; identical to SEQ ID NO: 9536
  source 1..120: mol_type = other DNA

SEQ ID NO: 34449 - DNA, 120 bp, synthetic construct
  source 1..120: mol_type = other DNA
atgtcctttgcccactttttaatggtttttttttcttgtaaatttatttaagatccttatagatgctggatattatacctttgttggatgcatagtttgcaaaattttctcccattctgt

SEQ ID NO: 34450 - DNA, 120 bp, synthetic construct
  source 1..120: mol_type = other DNA
tctttgccagtatatcctgaatggtattgcctaggttgtcttccaggatttttataattttgagttttatatttaagtctttaatccatcttgagttaaggtggatggtgtaaggaaggg

SEQ ID NO: 34451 - DNA, 120 bp, synthetic construct
  source 1..120: mol_type = other DNA
gtagttttatttctgtgttctttattctgttccattggtctatgtgtctgttcttgtaccagtgccatgttgttttggttactatagccctgtatagtttgaagttgggtagtgtgatac

SEQ ID NO: 34452 - DNA, 120 bp, synthetic construct
  source 1..120: mol_type = other DNA
ccaccactttgggaggccgaggcagggggaatcacttgaggccaggagtttgagaccagcctggccaacatggcgaaaccatgtctctactaaaaatacaaaattagctgggcatggtgg

SEQ ID NO: 34453 - DNA, 120 bp, synthetic construct; identical to SEQ ID NO: 9537
  source 1..120: mol_type = other DNA

SEQ ID NO: 34454 - DNA, 120 bp, synthetic construct
  source 1..120: mol_type = other DNA
tccccagttagctatattcctaggtattttattttttttgtgacaattgtgaacgggagttcattcctgatttggctctcagcttgactgttgtttggtgtataggaatactagtaattt

SEQ ID NO: 34455 - DNA, 120 bp, synthetic construct
  source 1..120: mol_type = other DNA
tttatctttctctcttcctatttggacgtctttatttgtttcttttgcccaattgccccagccaggacttccaacgctatgttgagtaggagtggtgagagagggcatccttgtcttgtg

SEQ ID NO: 34456 - DNA, 120 bp, synthetic construct
  source 1..120: mol_type = other DNA
agtttttaatatgaatgcatatggcaaatcctcttaaagcagaaagatatgtaaagattgaaatttaaaaacagggaaaaaagatttacctggtggcaaatatgacacaaaagaaagttg

SEQ ID NO: 34457 - DNA, 120 bp, synthetic construct
  source 1..120: mol_type = other DNA
ctcctgggttcaagtgattcgcctgtctcagcctcccgagtagctgggattacaggtgtgccaccatgcccagctaattttttgtatttttagtagaaacagggtttcaccatgctagcc

SEQ ID NO: 34458 - DNA, 120 bp, synthetic construct; identical to SEQ ID NO: 9538
  source 1..120: mol_type = other DNA

SEQ ID NO: 34459 - DNA, 120 bp, synthetic construct
  source 1..120: mol_type = other DNA
atccacctgcctcagcctcccaaagtgctaagattacaagcgtgagccacgacgtccagcctgcactttatttttaaccttaaattctattttgggccaggtgcagtggttcatgcctgt

SEQ ID NO: 34460 - DNA, 120 bp, synthetic construct
  source 1..120: mol_type = other DNA
tggtggcacgcacctgtaatcccagctactcgggaggctgaggcagaagaatcgcttgaacctgggagatggaggttgcagtgagccaagactgtgccactgcactccagcctgggcaat

SEQ ID NO: 34461 - DNA, 120 bp, synthetic construct
  source 1..120: mol_type = other DNA
atataaactcaacaatacagcctcacaatttataaagcaacaagtgaaagaactacagttagaagttgagttttttaaaaatacatttgatgatttttacaaaccctctctcaaaaactg

SEQ ID NO: 34462 - DNA, 120 bp, synthetic construct; identical to SEQ ID NO: 9539
  source 1..120: mol_type = other DNA

SEQ ID NO: 34463 - DNA, 120 bp, synthetic construct
  source 1..120: mol_type = other DNA
atgtaagagaacagccttgttcttaggaaatacattgaaatatttagcaggaaaggggcatgtgtgtatgtaactccagacttcctaaccattttagagtaaaccattttttctctctaa

SEQ ID NO: 34464 - DNA, 120 bp, synthetic construct
  source 1..120: mol_type = other DNA
aatgttgcaaatcattgaatttggacaagtgtacgtaagaattctttgtactactcttctaaaattacttcaaaataaaaagtttttaaatgtcacaagtaacctgtgagttaaaagaaa

SEQ ID NO: 34465 - DNA, 120 bp, synthetic construct
  source 1..120: mol_type = other DNA
cacaaaaaaagaccaaaatcaataagctgagtgttcaactcaaacgctaggtaaagaggaagagaatacacccaaaggaggaaggaaatagtaaagatagtcataaatgaaatagagaac

SEQ ID NO: 34466 - DNA, 120 bp, synthetic construct; identical to SEQ ID NO: 9540
  source 1..120: mol_type = other DNA

SEQ ID NO: 34467 - DNA, 120 bp, synthetic construct
  source 1..120: mol_type = other DNA
aattctgataaactattttttaaatgtaaaaaaccatttatgtttaaaaaataaacttttagaaaaccaggaataaaaggaaacctactaatttagtaaaggttgacagcaaagacttct

SEQ ID NO: 34468 - DNA, 120 bp, synthetic construct
  source 1..120: mol_type = other DNA
agaacagctagaatctcaggatctgaggaatgacatactagtgagttccctgggctttctttttgccacatatatgctgggcttggagctgaagaaagtgacaatttggaaagaccaact

SEQ ID NO: 34469 - DNA, 120 bp, synthetic construct
  source 1..120: mol_type = other DNA
gttcagttctaggcaaataccatagcaataactgtgactctactgccattcacaccagaaagaccaagtgggagacctaaactttcaccctcttgaagctgtaacaaggtgctccaacat

SEQ ID NO: 34470 - DNA, 120 bp, synthetic construct; identical to SEQ ID NO: 9541
  source 1..120: mol_type = other DNA

SEQ ID NO: 34471 - DNA, 120 bp, synthetic construct
  source 1..120: mol_type = other DNA
aaatgtatgtagaggaaacatttaagacaatcgtattttcagtgaggaggataaagggatgggacataaattaggaaggtaagatttttattatttactcaaaatggtaaatgatgactc

SEQ ID NO: 34472 - DNA, 120 bp, synthetic construct
  source 1..120: mol_type = other DNA
gtaagccacagaaagtcagaaaagagtaaacagagatgaaaactggagagaacaaacaaaataaatgaaaaacaattaagcccttcatgttactacaggttggattgtgtcccacagaat

SEQ ID NO: 34473 - DNA, 120 bp, synthetic construct
  source 1..120: mol_type = other DNA
aggaagagaaaccagggtatgctctcttgctctttctccctcccagccttcctctctctttctctctcactctgcccccagaagatggcaactctctctataagccaggaagagccctta

SEQ ID NO: 34474 - DNA, 120 bp, synthetic construct; identical to SEQ ID NO: 9542
  source 1..120: mol_type = other DNA

SEQ ID NO: 34475 - DNA, 120 bp, synthetic construct
  source 1..120: mol_type = other DNA
aggcatggtggcttacacctgtaaacccagcactctacaaaaaaaaacaaacaaacaaaaaacaaaaacaaaaacaaaaaaaaacccagttcaaatataacaatataggccaggctcagt

SEQ ID NO: 34476 - DNA, 120 bp, synthetic construct
  source 1..120: mol_type = other DNA
catggtggtgtgcacctgtggtcccagctactcaggaggctgaggcaggagaatcgcttgaccctggaagacagaggttgccgtgagcagagattgtgccgctgcactccagcctaggtg

SEQ ID NO: 34477 - DNA, 120 bp, synthetic construct
  source 1..120: mol_type = other DNA
tccttaattagaggaatacaggagtgagtgtactactctcagataaggtaaacttcagagccaaaacaaaaaaaattaccagagaaagataaggacgttttataataatagaagggtcag

SEQ ID NO: 34478 - DNA, 120 bp, synthetic construct; identical to SEQ ID NO: 9543
  source 1..120: mol_type = other DNA

SEQ ID NO: 34479 - DNA, 120 bp, synthetic construct
  source 1..120: mol_type = other DNA
ggcgtgaacctggggacggagctttcagtgagctgagatcctgccactgcactccagcagcctgggggacagagcaagactctgtctcaaaaaaaataaaaataaaaaaataaaaactag

SEQ ID NO: 34480 - DNA, 120 bp, synthetic construct
  source 1..120: mol_type = other DNA
tttttcttttccggttttactaggtgcaaggggtacatatgcaggtttgttacatgggtaaattgcgtgtcacaagggtttggtgtacagataattttaaaagaatttaaattatacaaa

SEQ ID NO: 34481 - DNA, 120 bp, synthetic construct
  source 1..120: mol_type = other DNA
accctcaaataggccccagtgtctatttttcccatctttgtgtccatgtgtatgcaattagctggttttttgctcctgcggtaatttgtttaggattatggcctccagttccatctatgt

SEQ ID NO: 34482 - DNA, 120 bp, synthetic construct; identical to SEQ ID NO: 9544
  source 1..120: mol_type = other DNA

SEQ ID NO: 34483 - DNA, 120 bp, synthetic construct
  source 1..120: mol_type = other DNA
tgttgtttttgactttttaacaatagccattctgactggggtgagatggtgtctcatcattgttttgatttgcatttccctaatgattagttatactgagcatttttttcacatgcttgt

SEQ ID NO: 34484 - DNA, 120 bp, synthetic construct
  source 1..120: mol_type = other DNA
gttctctgactacattggaatcaaactagaaataaataacagaaagatgacagaggaaagtcaagaaactaagcgaaaacttttaaatactctacgagtcaaaaaataaatctcaaagga

SEQ ID NO: 34485 - DNA, 120 bp, synthetic construct
  source 1..120: mol_type = other DNA
taactagaatatataaggagttcagacaactctataggaaaaaagagttcaatagtccaaacaaaaaatgagctgatctgaatagacatttctcaaaagaagacatacaaatggcaatca

SEQ ID NO: 34486 - DNA, 120 bp, synthetic construct
  source 1..120: mol_type = other DNA
cctgtaatcccagcactgagggaggccgaggcgggcagatcacctgaggtcaggagttcaagaccagcctggccaatatggtgaaaccctgtctctactaaaaatacaaaaattagctgg

SEQ ID NO: 34487 - DNA, 120 bp, synthetic construct; identical to SEQ ID NO: 9545
  source 1..120: mol_type = other DNA

SEQ ID NO: 34488 - DNA, 120 bp, synthetic construct
  source 1..120: mol_type = other DNA
gatatctgcactcctatgttaattgcagcattgtttacaatagctaagacttcggagcaacctaagtgtctatcgacagatgaatggataaagaaaatgtggtacatacatacaatggag

SEQ ID NO: 34489 - DNA, 120 bp, synthetic construct
  source 1..120: mol_type = other DNA
tttatttgtgggatctaaaaatcaaaacaattgaactaatggacatagtgagtagaaggatggttaccagagcctgagaaaagtagtggatagctgagcggggaggtggggatggttaat

SEQ ID NO: 34490 - DNA, 120 bp, synthetic construct
  source 1..120: mol_type = other DNA
gtttgtaactcaaaggataaatgcttgagggaatggctaccccattctccatgatttggttatttcacattccaggcgtgtatcaaaacatctcatgtaccccataaacatatacaccta

SEQ ID NO: 34491 - DNA, 120 bp, synthetic construct; identical to SEQ ID NO: 9546
  source 1..120: mol_type = other DNA

SEQ ID NO: 34492 - DNA, 120 bp, synthetic construct
  source 1..120: mol_type = other DNA
tcacttgagctcaggagttagagaccagcctgcccaacatggtgaatctctgcttctactaaaattacaaaaaattagccaaatgtggtggcaggcgcttgtagtcccagctacctggaa

SEQ ID NO: 34493 - DNA, 120 bp, synthetic construct
  source 1..120: mol_type = other DNA
tcagtcaactgatgaacctctagcagactacactgacaaagaagaaagaaagaatatagaaatgtccacagggaatatccctacacaccctgcagacatcggaaaaacataaatggtgct

SEQ ID NO: 34494 - DNA, 120 bp, synthetic construct
  source 1..120: mol_type = other DNA
ggaacaattgaacattcaagggccataggaggagagaaagacaacaaggaggaaaagaaggaggagcagcagtttaatctaagactcataccttctgcaaaaattgactcaatatggatt

SEQ ID NO: 34495 - DNA, 120 bp, synthetic construct
  source 1..120: mol_type = other DNA
atgaaaaaatggatatattagacctgattaaaactaaaaactgttgctctgtgaaagacttgtaaaggaatgaaaaggcaagctacataatggaagaaaatatttgcaaatcatgtatcc

SEQ ID NO: 34496 - DNA, 120 bp, synthetic construct; identical to SEQ ID NO: 9547
  source 1..120: mol_type = other DNA

SEQ ID NO: 34497 - DNA, 120 bp, synthetic construct
  source 1..120: mol_type = other DNA
catttcattaaaaggatatacagatggcaaataagcacatgaaaagatgttcgatatcattagccattaaggaaacgcaaattaaaaccacaataagatctcactacacacatattagaa

SEQ ID NO: 34498 - DNA, 120 bp, synthetic construct
  source 1..120: mol_type = other DNA
aggcggatcatgaggacaggagattgagaccatcctggctaacatggtgaaaccccatctctactaaaaatacaaaaaattagccgggcgtggtggcgggcgcctatagtcccagctact

SEQ ID NO: 34499 - DNA, 120 bp, synthetic construct
  source 1..120: mol_type = other DNA
aaaaatagtgacaataccaaatgcctgtgaggatgcagtaaaacaatcactcgcacattgctggtgcaaccactctggaaaacactttgacagtttatttaaaaaactaaaaatgcaacc

SEQ ID NO: 34500 - DNA, 120 bp, synthetic construct; identical to SEQ ID NO: 9548
  source 1..120: mol_type = other DNA

SEQ ID NO: 34501 - DNA, 120 bp, synthetic construct
  source 1..120: mol_type = other DNA
tagacattaaggagggtatgggatggtagggaagtgggtgtgtctagaaaagggcaaggtgaagaatccttgtgatcatagaagtgttctgtattgtggctgtatccatgtatcctaatt

SEQ ID NO: 34502 - DNA, 120 bp, synthetic construct
  source 1..120: mol_type = other DNA
tatacttaatggagaatatttaggtttatttcctttaagagtaatgctcattatcaccctactgtttgacacagcattgaagatcctagtcaacaacatgaaaaataaaacactaaggat

SEQ ID NO: 34503 - DNA, 120 bp, synthetic construct
  source 1..120: mol_type = other DNA
accaataagaggatcgagcaaggttgtcccatataagatcaacttacaaaaattattaatttctaatatttgaaaatcatatatcagtatttgaatatcatatatccaataaagggttaa

SEQ ID NO: 34504 - DNA, 120 bp, synthetic construct; identical to SEQ ID NO: 9549
  source 1..120: mol_type = other DNA

SEQ ID NO: 34505 - DNA, 120 bp, synthetic construct
  source 1..120: mol_type = other DNA
aggaaggaaggaaggaagggagagagggagggaagaaataagtgttggtgaggatgtagagacattagaacctttatatgcaatgttcgtgggattgtaaaatgtgtaactgctatggga

SEQ ID NO: 34506 - DNA, 120 bp, synthetic construct
  source 1..120: mol_type = other DNA
attcatagcagcactattctcgatagccaagaggtggaagcaacaaagatgtccatagacagatgaatgggcaaacaaaatatggcatatacatacagtagcttattattcagcctaaaa

SEQ ID NO: 34507 - DNA, 120 bp, synthetic construct
  source 1..120: mol_type = other DNA
agtagtcagattcatagaaacagaatgtagagtgatagtagccaggggctagaggaagagagaaatgaggagttgttgtttaatgggtgtagagttctggttttgcaaggtgaaaaggag

SEQ ID NO: 34508 - DNA, 120 bp, synthetic construct; identical to SEQ ID NO: 9550
  source 1..120: mol_type = other DNA

SEQ ID NO: 34509 - DNA, 120 bp, synthetic construct
  source 1..120: mol_type = other DNA
taaattcagtataaccacaatcaaaattcaagtggggaagacagaactagaagtgagtgtcctcccaaactccccagtaggaaactacaaacttagtttctgttgctactatgcgcttgt

SEQ ID NO: 34510 - DNA, 120 bp, synthetic construct
  source 1..120: mol_type = other DNA
tctcaatacttctgcacctggggtctgcctcaggtgctgacctgcatgacattgaatggctcccatgctccctggcttcttcttgcttccagcatcagcctaagagcagagggaagaggg

SEQ ID NO: 34511 - DNA, 120 bp, synthetic construct
  source 1..120: mol_type = other DNA
ccttctgagtcctgataaccccttctgtccccggcctctttggaccttggggtagtaacagctatcctccacccagttctttgtaaatactttgctaataaataaactttccttgaaatg

SEQ ID NO: 34512 - DNA, 120 bp, synthetic construct; identical to SEQ ID NO: 9551
  source 1..120: mol_type = other DNA

SEQ ID NO: 34513 - DNA, 120 bp, synthetic construct
  source 1..120: mol_type = other DNA
agggctcttgggaatgacagacactcaagccaaaaaaaaaaaaggatttgaggatggggttgaactccaccctcgtttttcatctgatttgcccaattttactttggaaagagaaaaact

SEQ ID NO: 34514 - DNA, 120 bp, synthetic construct
  source 1..120: mol_type = other DNA
gaacatgctctccctcagggaaaaaaaaaatgccaaggataccacctcccgtggtgtatttgagatttattctcattgtctttaatggtcaaaagaagaagctcaaatgtgggctcaacg

SEQ ID NO: 34515 - DNA, 120 bp, synthetic construct
  source 1..120: mol_type = other DNA
aaaccaattctagctccaagttcagcttttaaaacaacaagacattgaagggcgaaaacaattctttgtgcagcttggattatgtataacccgaaagtccagctctctctctcttccccc

SEQ ID NO: 34516 - DNA, 120 bp, synthetic construct; identical to SEQ ID NO: 9552
  source 1..120: mol_type = other DNA

SEQ ID NO: 34517 - DNA, 120 bp, synthetic construct
  source 1..120: mol_type = other DNA
atatacttttccctattccttacctgaaaggggacagcctttcctataaaacaaaaaacctacaaagttagggcagagaaaagcctgcactgggaatctctagaaaaggaactggaagcc

SEQ ID NO: 34518 - DNA, 120 bp, synthetic construct
  source 1..120: mol_type = other DNA
cctagtgcggtggctcacgcctgtaatcccagcactttgggaggctgaggcaggtggatcacttgaggtcaggagatcgagaccagcctgaccaacatggtgaaaccccatccctactaa

SEQ ID NO: 34519 - DNA, 120 bp, synthetic construct
  source 1..120: mol_type = other DNA
cattgcactccagcctgggcaacaagagcaaaactctgtctcgaaaaaaaataaataaataaaataaaaataataaataaaactgcccagatatagacaaggcccaaagccccccattcc

SEQ ID NO: 34520 - DNA, 120 bp, synthetic construct; identical to SEQ ID NO: 9553
  source 1..120: mol_type = other DNA

SEQ ID NO: 34521 - DNA, 120 bp, synthetic construct
  source 1..120: mol_type = other DNA
ggtggagtccattcccccaaagggctctccttggtcttggggtagaagggaatggaacggtggctctgaagagatgtgtgctcaccagcatgagggtcttcagaataaagtaatctgcta

SEQ ID NO: 34522 - DNA, 120 bp, synthetic construct
  source 1..120: mol_type = other DNA
ttgtgtggttattgtgagaagagaatgagctacaaatataaaggtctgagaccagtgcctaagacataataatcactcaagctatgttcccttctgcattcagggtatggaagaaataac

SEQ ID NO: 34523 - DNA, 120 bp, synthetic construct
  source 1..120: mol_type = other DNA
ggatcaaagcacctggtacaatgcctggccagaaagttgaataatcgaatatagctaacgtcactattgcaggctggctatgtgcctggcggtgttcttagccatttacaagtatgaact

SEQ ID NO: 34524 - DNA, 120 bp, synthetic construct; identical to SEQ ID NO: 9554
  source 1..120: mol_type = other DNA

SEQ ID NO: 34525 - DNA, 120 bp, synthetic construct
  source 1..120: mol_type = other DNA
gcacactgagagccccaggagggtctttaactcccttcctcagattatattcatcccagaaatatagccttggacaataatttggttacagcatagtcccaggaatgaggtcccccaagt

SEQ ID NO: 34526 - DNA, 120 bp, synthetic construct
  source 1..120: mol_type = other DNA
gaatctccttctcacttggagtggaagttgtaggattctgcctctaggaaatgtgccatcctacagaataaataaaagggagataatgaggcttcaacccaacttgcccccatcgtttgt

SEQ ID NO: 34527 - DNA, 120 bp, synthetic construct
  source 1..120: mol_type = other DNA
gatgctccttcctgctcttaatcctagcaatggcagcttaaatcatgcccttgcctagatcctcatggaagctcacccatataataatcaagattagttgaacccaacactgacccctct

SEQ ID NO: 34528 - DNA, 120 bp, synthetic construct; identical to SEQ ID NO: 9555
  source 1..120: mol_type = other DNA

SEQ ID NO: 34529 - DNA, 120 bp, synthetic construct
  source 1..120: mol_type = other DNA
aggtgctgcaaaaaatagaaacttacttgacccagtttctgttgctcacccccagggcaattccatttattgcagccacctctcagtgggttaaaaggtcctttatcccagctccaaggg

SEQ ID NO: 34530 - DNA, 120 bp, synthetic construct
  source 1..120: mol_type = other DNA
aagcctggggaacccatctccccagaattagcatcctggcttccaggtcctctctaatacagtggggcctctcaaggcatcctctttccttcctttaccccaaagccacccttatcagga

SEQ ID NO: 34531 - DNA, 120 bp, synthetic construct
  source 1..120: mol_type = other DNA
ctattacactgtcttaccacatgtcttaacctccagtggatccatcctgtgagttatcctactacttgtgtacctcctacatctagatctcccatgtgtcctttcagagcttgtctccat

SEQ ID NO: 34532 - DNA, 120 bp, synthetic construct; identical to SEQ ID NO: 9556
  source 1..120: mol_type = other DNA

SEQ ID NO: 34533 - DNA, 120 bp, synthetic construct
  source 1..120: mol_type = other DNA
tttaactactcccgacactgagttcaaacagtgtttgaactgtaagtaattctttatccactggcccctgagcatgcatgccaaatggtctgccagccgtggctttactactcccgtatg

SEQ ID NO: 34534 - DNA, 120 bp, synthetic construct
  source 1..120: mol_type = other DNA
ggctagaatagtgtattacaatttggggttctgaaaatatgattgccaaatttacagcctcatttcaaagcaagcacgctcccctctcaccctcaaacatagacgcagcaacatcagcca

SEQ ID NO: 34535 - DNA, 120 bp, synthetic construct
  source 1..120: mol_type = other DNA
catttctttatcccatttccccattctggtcctaagccccccgtaagttcctccagactcagtccccattttcagcacttcgctgtctaccatgtaccatgtatcgatccacatctcatt

SEQ ID NO: 34536 - DNA, 120 bp, synthetic construct; identical to SEQ ID NO: 9557
  source 1..120: mol_type = other DNA

SEQ ID NO: 34537 - DNA, 120 bp, synthetic construct
  source 1..120: mol_type = other DNA
tccctcgtgttaaaaggagtggttttggctacttgcacagatggtggccctgcataggagaaaaaaacatgtttaggaaggagggtgacattctggctgcttcctcaacctggtttcttc

SEQ ID NO: 34538 - DNA, 120 bp, synthetic construct
  source 1..120: mol_type = other DNA
gttagaatgtattcctgcattactctttcttctctcccattccttcattgcccctttctttctttcctcctccagaattatgtttgattacaattagtaaaagccagatctgaactgcaa

SEQ ID NO: 34539 - DNA, 120 bp, synthetic construct
  source 1..120: mol_type = other DNA
tctccaaatcttgtttaatacgttcttttgctagttaaagctttttctcctcacatagttcaaggaaacaagcctaacttaggactcactcttaaatttggaatgaatgtagtcaaacta

SEQ ID NO: 34540 - DNA, 120 bp, synthetic construct
  source 1..120: mol_type = other DNA
caaacacaatcttaaataaaaatccaaggaattatgttaaaatgcagatttcctaggctgtatccccagatactttctttcaacagatctggagtggtactaaggggcttgcatctttaa

SEQ ID NO: 34541 - DNA, 120 bp, synthetic construct; identical to SEQ ID NO: 9558
  source 1..120: mol_type = other DNA

SEQ ID NO: 34542 - DNA, 120 bp, synthetic construct
  source 1..120: mol_type = other DNA
ctttactcctgttccactcacgtcagccaccttgttccccttgaggttcaatcctccgtctttctacatttcagatccacacattttctcttatttgctgctcaaatctcaaacccctgg

SEQ ID NO: 34543 - DNA, 120 bp, synthetic construct
  source 1..120: mol_type = other DNA
gcacaattctgaagcccattgcgcaagcgctgcatcagggtgtctttttggttgaggtgctgtgagaggacattcgccaagctattcagcaccccaaattcgcaaggggccatcttattc

SEQ ID NO: 34544 - DNA, 120 bp, synthetic construct
  source 1..120: mol_type = other DNA
agaggagccagggaagggagaacaggtcaatgtcttctactggcctggcaataaataaataaatatataaataataaatatacacaaataataaatatataaaacatacagacgtatatt

SEQ ID NO: 34545 - DNA, 120 bp, synthetic construct; identical to SEQ ID NO: 9559
  source 1..120: mol_type = other DNA

SEQ ID NO: 34546 - DNA, 120 bp, synthetic construct
  source 1..120: mol_type = other DNA
cctgtgattgggacccttccagatctggtatctcttcatctggatgttcctttgtatgctttaaaatatcctttgttaaaggatgcaaaattatgatctagtgttctataccactgtggg

SEQ ID NO: 34547 - DNA, 120 bp, synthetic construct
  source 1..120: mol_type = other DNA
acatgtactaaaacatcattatccaccccatgaatatttataattattattatcaattaaaatatcctttgtaaaaaatctacaataataagtaaacttttcctgagttccataagccac

SEQ ID NO: 34548 - DNA, 120 bp, synthetic construct
  source 1..120: mol_type = other DNA
cagtcttatgggactgagtctttaacctttggtgtctatgttaactctagttaatgtcacaatggaattgaattataggatatccagctaatataggagaattggttggtatgagtaaaa

SEQ ID NO: 34549 - DNA, 120 bp, synthetic construct; identical to SEQ ID NO: 9560
  source 1..120: mol_type = other DNA

SEQ ID NO: 34550 - DNA, 120 bp, synthetic construct
  source 1..120: mol_type = other DNA
cacagaccttcagtaaggcaaattattgagagagaaaaagggtcaagagaaagagtcagccttgtattgtgctggaaatattaaatattcacttcgcacatatttatgaagcacttgctg

SEQ ID NO: 34551 - DNA, 120 bp, synthetic construct
  source 1..120: mol_type = other DNA
aaattgctacaaagtacaaagtgctataggaatgtataccagggagacaaactatctggggtgtcaaatgcaattacaaaacggaacacccttaccctgaaacaggagcaggggaaggga

SEQ ID NO: 34552 - DNA, 120 bp, synthetic construct
  source 1..120: mol_type = other DNA
ccagctcttccagggtccgtgggtcctcgcctgtcccagaagccccagcctgggtagatgatctccagacactgagcagaatactatattgcccgggtcccttgaccccccaaatgagtg

SEQ ID NO: 34553 - DNA, 120 bp, synthetic construct; identical to SEQ ID NO: 9561
  source 1..120: mol_type = other DNA

SEQ ID NO: 34554 - DNA, 120 bp, synthetic construct
  source 1..120: mol_type = other DNA
gctctcccaaaagaccaggaccagataacctctcctattccttacagggaggttacccaagaagataattacaaaaacccttgtctgtcctgagatgagaggacccagagcccttctggg

SEQ ID NO: 34555 - DNA, 120 bp, synthetic construct
  source 1..120: mol_type = other DNA
ggggcctggaaaatccctccatgggcctccattgttgcttctgttctagccagtcaagcttcatttcctcctcagttataatagctgctttccggagctagtaaaccatatcctcctaca

SEQ ID NO: 34556 - DNA, 120 bp, synthetic construct
  source 1..120: mol_type = other DNA
tgtgtttcccctactataccctgttccctgggggcaggtccctgcattatgaagccactaggaaaatgagataaagctttcctacttttcttcccctgaaaagacagattttgtttttta

SEQ ID NO: 34557 - DNA, 120 bp, synthetic construct; identical to SEQ ID NO: 9562
  source 1..120: mol_type = other DNA

SEQ ID NO: 34558 - DNA, 120 bp, synthetic construct
  source 1..120: mol_type = other DNA
atgatgctgcaaaagacgtgatctcgtccttttttgtctgtggagtattccatggtgtatatgtaccacattttctttatacagtctactgttggtgggcatttaggctgattccatgtc

SEQ ID NO: 34559 - DNA, 120 bp, synthetic construct
  source 1..120: mol_type = other DNA
gttttaaggttcttgagaaattgccaaactgctttcctcaatggctgaactaatttatgttcccaccagcagtgtataagccttccgttttctctgcaacctctccaacatttgttattt

SEQ ID NO: 34560 - DNA, 120 bp, synthetic construct
  source 1..120: mol_type = other DNA
tagtaatgttgaacattttttcatatgcttcttggtcacgtgtgtgtcttgaaaaggcagattttatgtatttgcgtatttatttttttcacaggttttttttttgaaagtctcactctg

SEQ ID NO: 34561 - DNA, 120 bp, synthetic construct
  source 1..120: mol_type = other DNA
agccacttgagtagctggggttacagtcatgtgccaccactcctggttagtttttgtcttttttttttttttggtagagacagggtttcatcatgttggccaggctgttcttgaactcct

SEQ ID NO: 34562 - DNA, 120 bp, synthetic construct; identical to SEQ ID NO: 3813
  source 1..120: mol_type = other DNA

SEQ ID NO: 34563 - DNA, 120 bp, synthetic construct
  source 1..120: mol_type = other DNA
ccccttgacaccacacttacctgccctccctcaaagtccctgatctcaggaaaatctaacacctatgaagaaaatggggataaaaaatgcatacaaagattattaccaaaaacgaaagat

SEQ ID NO: 34564 - DNA, 120 bp, synthetic construct
  source 1..120: mol_type = other DNA
ctaactctgctaacgaactgtcaagtgtgttggaatgggcagaatatggggtggggagtgcataatctgtagagcttctacagatacagtgctaggtaggtcctttctataatatctcat

SEQ ID NO: 34565 - DNA, 120 bp, synthetic construct
  source 1..120: mol_type = other DNA
tcacctgaggtcaggagtttgagaccagcctggcaaacatggtgaaaccccgtctctacaaaaaatacaaaaattagctgggtgtggtggcgcgtgcctgtaatcccagctactctggag

SEQ ID NO: 34566 - DNA, 120 bp, synthetic construct
  source 1..120: mol_type = other DNA
aaaacttgttaattgtcctcatttcccaggttggaaaacaggtccaaagattcacacccaaggtctaaaggctgtaactcctcttcttatacagctgttacacatgcacatgtgtacaca

SEQ ID NO: 34567 - DNA, 120 bp, synthetic construct; identical to SEQ ID NO: 9564
  source 1..120: mol_type = other DNA

SEQ ID NO: 34568 - DNA, 120 bp, synthetic construct
  source 1..120: mol_type = other DNA
cactttctcttttgacaagtttcaaaactgaattttcccccacacccccccaatacatttccccctcacattcctccccatcctgcccaggtaagctgttagcctaaccttataggaacc

SEQ ID NO: 34569 - DNA, 120 bp, synthetic construct
  source 1..120: mol_type = other DNA
tccctcttatgtctagatctctgctccggcagtcaaaggagatgtgaaaccttctgtgaggccacaacaggaaatggtaggagaggatttcacttctctattaattcaaacactgaggga

SEQ ID NO: 34570 - DNA, 120 bp, synthetic construct
  source 1..120: mol_type = other DNA
caattcaaaataacatttcagttgctctgtccattgttacttatttgttaattattgatatagcaccgggaccgaagaggtatggagccccaaccaggttcccacatgttgcctttcttt

SEQ ID NO: 34571 - DNA, 120 bp, synthetic construct
  source 1..120: mol_type = other DNA
tgggaaaatacagagtgagaagatatggattctgcccccatatcgctttgcttgtacgtcaattggggagtgagaacaaacactttaaatagtttatattaaagtaagtaagcaataagg

SEQ ID NO: 34572 - DNA, 120 bp, synthetic construct; identical to SEQ ID NO: 9565
  source 1..120: mol_type = other DNA

SEQ ID NO: 34573 - DNA, 120 bp, synthetic construct
  source 1..120: mol_type = other DNA
ttcgcaggttcttggggcagacggttttaactgaagtctccattttataaacacaaaattgctcaaccagttaatcacgcctcatagcataagaccacattcgtgacttcagtgtctttt

SEQ ID NO: 34574 - DNA, 120 bp, synthetic construct
  source 1..120: mol_type = other DNA
cctgtcaggattcactgctctagaccctgacctttggattatagtttctgtagtcagttcaccatccttccaacctacagtcaaattatttgaactactagggatagtctatctgatttg

SEQ ID NO: 34575 - DNA, 120 bp, synthetic construct
  source 1..120: mol_type = other DNA
aaaatggaggcagagggaggttaagtggttgcccagatttacccagatactaagtaataaaaccattacttgaactcaggatttattactttaaatcctgtattgccaataatcaattgg

SEQ ID NO: 34576 - DNA, 120 bp, synthetic construct; identical to SEQ ID NO: 9566
  source 1..120: mol_type = other DNA

SEQ ID NO: 34577 - DNA, 120 bp, synthetic construct
  source 1..120: mol_type = other DNA
ttctactaaatagtaacacatattaaaaagccaaaataatcaaacaatatgatactgattagtaatgagagaaaagcaaattaaaacaacaaaataccactctacacccaccatgttgcc

SEQ ID NO: 34578 - DNA, 120 bp, synthetic construct
  source 1..120: mol_type = other DNA
agttgggcgaaaaaattaacataggaaataaagcggcatatcccaatccttaggttgagtgctttaagtcttggaagatttcaataaagagaaattaggggcaggttcatggaataagtt

SEQ ID NO: 34579 - DNA, 120 bp, synthetic construct
  source 1..120: mol_type = other DNA
cctcaaggaagagtgaggaaaaaagatttattcaagaatagcattcctgctgggaatagtgagtaatattttttattagaaaaggggcaccagactagagaggatactgagtgcttctag

SEQ ID NO: 34580 - DNA, 120 bp, synthetic construct; identical to SEQ ID NO: 9567
  source 1..120: mol_type = other DNA

SEQ ID NO: 34581 - DNA, 120 bp, synthetic construct
  source 1..120: mol_type = other DNA
gtctacgaggcaactaagttctcctctgaagatcaagaccaataatgataaggttaggttattcagcacattttctatgtgccaaacactattttaagcattctgtaggtattaacttat

SEQ ID NO: 34582 - DNA, 120 bp, synthetic construct
  source 1..120: mol_type = other DNA
tcgggcatcataaacagtttacattcccaccaacagaccaagatattacagttcacattttcctttatcctcgctaatacttatttgactttcaaatgttggcaacatggtgggtgtaga

SEQ ID NO: 34583 - DNA, 120 bp, synthetic construct
  source 1..120: mol_type = other DNA
gcagtcaggttccagagcccatgcttcttaaccggtacacatgatgctgttagaaatgagatggttcagagacagtgcaacttctcttagggagaatttaatattttcttttagattaga

SEQ ID NO: 34584 - DNA, 120 bp, synthetic construct
  source 1..120: mol_type = other DNA
ctctagtacaatgccaagaacagaaactccctcaccaaataattgccctctcaactttattgccaccctgtcatccaaagcaactcccagaccctaaggaatgcaagaaagaaagcatat

SEQ ID NO: 34585 - DNA, 120 bp, synthetic construct; identical to SEQ ID NO: 9568
  source 1..120: mol_type = other DNA

SEQ ID NO: 34586 - DNA, 120 bp, synthetic construct
  source 1..120: mol_type = other DNA
acaaaacacacaagcagcttccttaaccattttgtaagcagattattagaaaataactctgccttcgtttctcacatattttgcacaaaccgatagatggaaaaacatcatgtaccgcca

SEQ ID NO: 34587 - DNA, 120 bp, synthetic construct
  source 1..120: mol_type = other DNA
ttaaggcatgctgaatttgaaacgacaacccactcaagttgagatatccagaaacaaataccatgagttaagaaagaagccacactgatataaagaaatgagatttattgccttgtgggg

SEQ ID NO: 34588 - DNA, 120 bp, synthetic construct
  source 1..120: mol_type = other DNA
gaaatctacacacacaccccagggatgtcccagagacttctaccctaagaggagatcctgggcaggatgtgagaaatctgagcatcctctgtttggatggccgaagctgctggcatcaaa

SEQ ID NO: 34589 - DNA, 120 bp, synthetic construct; identical to SEQ ID NO: 9569
  source 1..120: mol_type = other DNA

SEQ ID NO: 34590 - DNA, 120 bp, synthetic construct
  source 1..120: mol_type = other DNA
atgcacgcatgcaccactgtatctggctcccacaggctcacccgccccctccagatgacataccacctgagcaaggcttccggaagtagatgatgagaacaatgcccacgatgatgccca

SEQ ID NO: 34591 - DNA, 120 bp, synthetic construct
  source 1..120: mol_type = other DNA
cacccagggaaatgacgtgggtgtctgggatgacatgggagactgggatgggcttagggtaggaatggactaaacaaggtaccagtggagaaagaagcctcctcccatggatctatccct

SEQ ID NO: 34592 - DNA, 120 bp, synthetic construct
  source 1..120: mol_type = other DNA
agtcacaatgcaggagaaaatgtcagaaggttctggtgtgaagtttaagtaagaaaaggcctggaagctgagtccatcgacagctgagacaaaagtaggcccaaatccttccacagggac

SEQ ID NO: 34593 - DNA, 120 bp, synthetic construct; identical to SEQ ID NO: 9570
  source 1..120: mol_type = other DNA

SEQ ID NO: 34594 - DNA, 120 bp, synthetic construct
  source 1..120: mol_type = other DNA
ttccttcagcacttcctgtctagagctcacattgatgtctaaccatgcactgtcttctcactaagacatagtcacgtcatcagatatttccactcttcccatccatcttgctgggcatag

SEQ ID NO: 34595 - DNA, 120 bp, synthetic construct
  source 1..120: mol_type = other DNA
gtgcagaccaaggctggtggaaaaattaaggtgatgaagagaaccagaaagtatttgagatggggagctggtatcaaggggaattattcagtgtacagatcaatgaggttaatgcagccc

SEQ ID NO: 34596 - DNA, 120 bp, synthetic construct
  source 1..120: mol_type = other DNA
gcatctccctgttcctgagcccagtcagcaaattcgggcaggcgaggcacccgagtgttctgggaaaagtcgaagaagaaaagctggtcctcgtcgtaggcctcagagagtcccacactg

SEQ ID NO: 34597 - DNA, 120 bp, synthetic construct; identical to SEQ ID NO: 9571
  source 1..120: mol_type = other DNA

SEQ ID NO: 34598 - DNA, 120 bp, synthetic construct
  source 1..120: mol_type = other DNA
tgccgggagctaagattaagccactgcactccagcctgggtgacagagtgagactctgtctcaaaacaaaacaacaaaaacaagcaaggcctgcttaaggagcgtgggctgaggtgagac

SEQ ID NO: 34599 - DNA, 120 bp, synthetic construct
  source 1..120: mol_type = other DNA
tttctaaagtgacagattcaggccaggcatggtggctcatgcctgtaatcccagcactttgggaggctgaggcaggcagattgcttgagcccaggagttcaagaccaacctgggcaacac

SEQ ID NO: 34600 - DNA, 120 bp, synthetic construct
  source 1..120: mol_type = other DNA
ctgcagtgagccatgattgtgccactggactccagcccaggtgacagaatgagcccgtctcaaaaaatatatatataaaggccgggcgcggtggctcaagcttgtaatcccagcactttg

SEQ ID NO: 34601 - DNA, 120 bp, synthetic construct; identical to SEQ ID NO: 9572
  source 1..120: mol_type = other DNA

SEQ ID NO: 34602 - DNA, 120 bp, synthetic construct
  source 1..120: mol_type = other DNA
gaagcaagtgaaagcctgcattctgctcaccatgccatacatcctggcatagggctgtatcctcccaaaggggattcctttgtctaattcataccaggccactgtattgactagagaagg

SEQ ID NO: 34603 - DNA, 120 bp, synthetic construct
  source 1..120: mol_type = other DNA
atccagacatttcttcagccacttcattggcaccaagcgtctctcaaaatgtcttctgttccttaacctaccaggcctcccaaagacagcaatgggagaagtgaccccataactgcataa

SEQ ID NO: 34604 - DNA, 120 bp, synthetic construct
  source 1..120: mol_type = other DNA
tctgccccatcctctacagagaaggaaactaagacacttttcaagaatcacaagataagttaatgatagaaagcagagtagaatcttgagtggaggagtgaaaataacattcactttgtt

SEQ ID NO: 34605 - DNA, 120 bp, synthetic construct; identical to SEQ ID NO: 9573
  source 1..120: mol_type = other DNA

SEQ ID NO: 34606 - DNA, 120 bp, synthetic construct
  source 1..120: mol_type = other DNA
gcagctccttggttctgttcatgacccataccttcttgccacacagtaggtaggagctaccaacccagccaacccagcttccccaactccctccccgagagggtggccttagatcatgtt

SEQ ID NO: 34607 - DNA, 120 bp, synthetic construct
  source 1..120: mol_type = other DNA
ggctgtttgaccagggcagagtatggcatgtaactgggctgggaagcccagtggaggaatgttgcttcctggtggagttccctctttggtttcaagctgtcagcctcagtctgtaagcga

SEQ ID NO: 34608 - DNA, 120 bp, synthetic construct
  source 1..120: mol_type = other DNA
cctctttctcaaaaaaacttattctccttcaggcattagctctaattcatttggcagacatatattgaaaatacaagaaattctgggtgttgggcccagggctagaaatacaaagatgaa

SEQ ID NO: 34609 - DNA, 120 bp, synthetic construct; identical to SEQ ID NO: 9574
  source 1..120: mol_type = other DNA

SEQ ID NO: 34610 - DNA, 120 bp, synthetic construct
  source 1..120: mol_type = other DNA
agaaggatgttgtgataagctacaaattctggcaagggccagatcacgtgggccctgctacgccacaaggaggagcttgcttttacttagcagatgatagagatattaaaactggggaat

SEQ ID NO: 34611 - DNA, 120 bp, synthetic construct
  source 1..120: mol_type = other DNA
agttgcacatatacacaccactcctgtagcaatacagcaataatttaaatgacagataataagagcctgaattaagtcataataagaggaggcggaggagatagaatatcaagataatta

SEQ ID NO: 34612 - DNA, 120 bp, synthetic construct
  source 1..120: mol_type = other DNA
ttgaagcagaaaagaatgccatgggagcaggtttacagagagaaagagcttgattttgtacatgttgaatttgaaatgccagtggaacagccagctgaaactgcatgggagcgcagtgag

SEQ ID NO: 34613 - DNA, 120 bp, synthetic construct; identical to SEQ ID NO: 9575
  source 1..120: mol_type = other DNA

SEQ ID NO: 34614 - DNA, 120 bp, synthetic construct
  source 1..120: mol_type = other DNA
cctgagctggaatctgtaaatctactcattgccttgtgagagacactgtcatagtcagttccaatctactagaaaggtgccacctccttcaaggctagaatccttgagaaggtacttctg

SEQ ID NO: 34615 - DNA, 120 bp, synthetic construct
  source 1..120: mol_type = other DNA
tctcttgccttctgatctcccatcagtgcctcctactggcagaatcaaaaaggaagccagatgtccaggaaggctgggaaatacacacctggctgactcctaagctaagcagttcaaaac

SEQ ID NO: 34616 - DNA, 120 bp, synthetic construct
  source 1..120: mol_type = other DNA
tagaagcagatcagagaaataaaaaagaggtgtgccatgaaggagggcaaggtcagcatttttaaatgctactcaaaagtcaagaaaggattgaaaagtgtccttagatttggtgattat

SEQ ID NO: 34617 - DNA, 120 bp, synthetic construct; identical to SEQ ID NO: 9576
  source 1..120: mol_type = other DNA

SEQ ID NO: 34618 - DNA, 120 bp, synthetic construct
  source 1..120: mol_type = other DNA
ccagtcttgaacccccgagttcaagcgatcctcccgcctcagtagctggggactataggcacatgccactgtgcctggcttcatatcctcttttgataaacaagtaatagcagcagtaat

SEQ ID NO: 34619 - DNA, 120 bp, synthetic construct
  source 1..120: mol_type = other DNA
atggtaaccctccagaaaacaaaagaacatttcccagtatcccaacatttatgcactaacccatcagcggttctggcagtggggagattcaggcccctggacagtagaaaagaagtttat

SEQ ID NO: 34620 - DNA, 120 bp, synthetic construct
  source 1..120: mol_type = other DNA
ctctgtcatgagtactcaactgtggcacgaaagcctccatgcacaatatgtaaatgaaggagagtggctgtgttcctagtttcctcctagcttttcctcccacttcttgagcatctcctt

SEQ ID NO: 34621 - DNA, 120 bp, synthetic construct; identical to SEQ ID NO: 9577
  source 1..120: mol_type = other DNA

SEQ ID NO: 34622 - DNA, 120 bp, synthetic construct
  source 1..120: mol_type = other DNA
gaacctcagtccccttattattggattggcaatcagttaacaaacactttgtgccagttacaccagtctatttggaaggagatctggggaagaacaggagaaactagactgggtggaagg

SEQ ID NO: 34623 - DNA, 120 bp, synthetic construct
  source 1..120: mol_type = other DNA
catccctcaccaagactgtggtgaggggtggttaactccattctccccttctataatctcagtttaaatggtaacaagttcaaacacttataactactcttccctccatgtaatccttcc

SEQ ID NO: 34624 - DNA, 120 bp, synthetic construct
  source 1..120: mol_type = other DNA
tcactgtctactttgtcattagctatgaatgcctctgaaaataatggcacagcaccggtaaatccaggaggctctggctttctaacactcagctctgccatccctttctagcatttaaaa

SEQ ID NO: 34625 - DNA, 120 bp, synthetic construct; identical to SEQ ID NO: 9578
  source 1..120: mol_type = other DNA

SEQ ID NO: 34626 - DNA, 120 bp, synthetic construct
  source 1..120: mol_type = other DNA
tggaaaagtcatgggcaactgtggccccgctcccattcttgccatttaatcttttaactctcaacaatgcaattgttcaccaatacttttgtgttgccaaatcaaatgaactagtctctg

SEQ ID NO: 34627 - DNA, 120 bp, synthetic construct
  source 1..120: mol_type = other DNA
gccatttaatcttttaactctcaacaatgcaattgttcaccaatacttttgtgttgccaaatcaaatgaactagtctctgcaacatctgacactgttggccataccccatctcctaaatt

SEQ ID NO: 34628 - DNA, 120 bp, synthetic construct
  source 1..120: mol_type = other DNA
tccctggagttttgtcctcaacctttactcttcttagactatacacttgccctggatggtcctctcatttactcccacatgccttctgttaccacccatttgctaatgtcttccaagctt

SEQ ID NO: 34629 - DNA, 120 bp, synthetic construct
  source 1..120: mol_type = other DNA
ggaacgcttcatgaatttgcatgttcttaaactgtattcttcacaatagcgttcctcaagaaataaaaaaagtaagtttgatgatagcaatcatttatttttgaatttatttccacatag

SEQ ID NO: 34630 - DNA, 120 bp, synthetic construct; identical to SEQ ID NO: 9579
  source 1..120: mol_type = other DNA

SEQ ID NO: 34631 - DNA, 120 bp, synthetic construct
  source 1..120: mol_type = other DNA
ttgtattaggtgtgtaccactggattcattggttgtggccaggtacagtattacctctatggattagagctattcctagagaagggagaatcatatgaaaagtaaccacctcaatacagc

SEQ ID NO: 34632 - DNA, 120 bp, synthetic construct
  source 1..120: mol_type = other DNA
ctcaaacagcatttcctaactactcaggtgacatatgtcatctgcttgatgatctctggtcggtcacttgtcttatcacatattcaaattacatttatcatgtgattcaatattgattta

SEQ ID NO: 34633 - DNA, 120 bp, synthetic construct
  source 1..120: mol_type = other DNA
ccaagcacacacagaagagaagaatctaataaactccaatgtactctcatgaatgtcaacaattttcaacatttaacattcttccattcttgtttcatctattgttctgcattttttgga

SEQ ID NO: 34634 - DNA, 120 bp, synthetic construct
  source 1..120: mol_type = other DNA
aaaattacttaacttcatttgacccaatctgttcatttctcctagttatctcaaaaatgtgtaagagaatgaagttttaaatgaaaagcagtgtcttataattttcaaaccgtgccatta

SEQ ID NO: 34635 - DNA, 120 bp, synthetic construct; identical to SEQ ID NO: 9580
  source 1..120: mol_type = other DNA

SEQ ID NO: 34636 - DNA, 120 bp, synthetic construct
  source 1..120: mol_type = other DNA
cttcctttcttttccttccattcctactggtccaggccttcaatggttggttttcactgattattgcaactttctttataattggtctctctctctccaatcttattattttccacagtg

SEQ ID NO: 34637 - DNA, 120 bp, synthetic construct
  source 1..120: mol_type = other DNA
tactttccttgtcatgacccataatgacctgaagtctacttacctacttctatatgtcttttcaggtgaaatctcactcctctcaggaagccttccttgaacccagagttgagattaata

SEQ ID NO: 34638 - DNA, 120 bp, synthetic construct
  source 1..120: mol_type = other DNA
tctgtttcatagtcacctcatctctactgcaaggtccttaggggagggtgtactatatatatatatatctccaccaagaggcccactaagtgacctttcactcgatgaacaaatgggcta

SEQ ID NO: 34639 - DNA, 120 bp, synthetic construct
  source 1..120: mol_type = other DNA
tttcaaaggtaaatcttatcaggtttatctataagccattcttttttttttttttttgagatggagtttcactctgttgccaaggctggagtgcagtggtacggtgtccgctcactgcaa

SEQ ID NO: 34640 - DNA, 120 bp, synthetic construct; identical to SEQ ID NO: 9581
  source 1..120: mol_type = other DNA

SEQ ID NO: 34641 - DNA, 120 bp, synthetic construct
  source 1..120: mol_type = other DNA
gagcaaacctagccatccagctcccacatttactcttatttctacctcagtacatttctccatacccatattcatcctcccttttagtgacattactatgatgcagcaatccttacaact

SEQ ID NO: 34642 - DNA, 120 bp, synthetic construct
  source 1..120: mol_type = other DNA
atcagatacctgccatcatcacacttaaagtctaatgaaaataaagagacattaaacaagaaaacatacaaatttataaactaaaaggtccacacacacacacacacaaaatctcttaga

SEQ ID NO: 34643 - DNA, 120 bp, synthetic construct
  source 1..120: mol_type = other DNA
agctacaacccctccccccaccaaaaaaacaaaatagaatacctagaataaaccaaggaggtgaaagatctctacaaggaaaactatgagacactgaggaaaaaaactgaagaggtcaca

SEQ ID NO: 34644 - DNA, 120 bp, synthetic construct; identical to SEQ ID NO: 9582
  source 1..120: mol_type = other DNA

SEQ ID NO: 34645 - DNA, 120 bp, synthetic construct
  source 1..120: mol_type = other DNA
acaaaggtaccaagatattcaatgggaaaaggacacactcttcattaaatggtgctgggaacactgaataacaatatgcagaaaaatacaactacacccccatctctcatcaaatacaaa

SEQ ID NO: 34646 - DNA, 120 bp, synthetic construct
  source 1..120: mol_type = other DNA
aaaggagaggcaatgaaagcaaaaatacacaaatgggattacatcaagctaaaaggcttctgccacagcaaaggaaacaatcaacagagtgaagagacaaccttcagaatgggaaaaaat

SEQ ID NO: 34647 - DNA, 120 bp, synthetic construct
  source 1..120: mol_type = other DNA
tttctcaaaagacatacaaatggccaacaggcatatgaaaaaattctcaacgttactaaccatcagggatatgcaaatcaaaaccacaatgagatatcatctgaatctaattaaaatggc

SEQ ID NO: 34648 - DNA, 120 bp, synthetic construct; identical to SEQ ID NO: 9583
  source 1..120: mol_type = other DNA

SEQ ID NO: 34649 - DNA, 120 bp, synthetic construct
  source 1..120: mol_type = other DNA
gtcatttccagcaacatggatggaactggaagtcattatgttaatgaaataagtcagacacagaaaaaaaaatatcacgttctcataagtgggagctaaaaaagttgatcttatggaggt

SEQ ID NO: 34650 - DNA, 120 bp, synthetic construct
  source 1..120: mol_type = other DNA
tgatagcacagctgggtgactacagttaacattaatttactgtatattccaaaatagctagtagatttgaagtgctcccaacagaaggaaataataaatgtttgaggtgatggatatcct

SEQ ID NO: 34651 - DNA, 120 bp, synthetic construct
  source 1..120: mol_type = other DNA
taaacttggatggaataaaaaaaagtcaactttattttcaaaaaactctcactgaaatctaattttatgaatgtagaaaataaatctttgtagtaccagccagcagctgtaacactgtca

SEQ ID NO: 34652 - DNA, 120 bp, synthetic construct; identical to SEQ ID NO: 9584
  source 1..120: mol_type = other DNA

SEQ ID NO: 34653 - DNA, 120 bp, synthetic construct
  source 1..120: mol_type = other DNA
catacacaaagtatcttattgtacttattttcagaccaggttgaccttgggtaactgaaatcacagaaattgaaactgcagttaaggggggaccactgtattttgataactatagtttat

SEQ ID NO: 34654 - DNA, 120 bp, synthetic construct
  source 1..120: mol_type = other DNA
aaaaagcttaaggagtcctgatttaatcagtcattcaatgaacatgacatccttcctggaaccatctcctgttctagcttcctcacattatgttgctctgcttctccttgagatcttcca

SEQ ID NO: 34655 - DNA, 120 bp, synthetic construct
  source 1..120: mol_type = other DNA
aaacatcacctcaaaggtgactctcaaatctgcttttcctaatcttttttctctaacttcaatcttggatcttaaactccctgctgtgcctagtaaacagaataatatgccacccagagt

SEQ ID NO: 34656 - DNA, 120 bp, synthetic construct; identical to SEQ ID NO: 9585
  source 1..120: mol_type = other DNA

SEQ ID NO: 34657 - DNA, 120 bp, synthetic construct
  source 1..120: mol_type = other DNA
aaaaaattagccaggcttggtggcgggcacctgtagtcctagctacttgggaggctgaggcaggagaatggtgtgaacccgggaggaggagcttgcagtgagccaagattgcactactgc

SEQ ID NO: 34658 - DNA, 120 bp, synthetic construct
  source 1..120: mol_type = other DNA
atgcagcacaaggctctcaccagatgccaatgccatgctcttggacttccaagcaactggaactgagccaaataaactactgtttataaattacccagtctgtggtattctgtgatagca

SEQ ID NO: 34659 - DNA, 120 bp, synthetic construct
  source 1..120: mol_type = other DNA
gcagtacctgacacattttaactactcaataaatgttttgtatcaccaatcacatctccttccaaccccgacattttaatttgatgtttattaacatggacggtgccagccactggaaga

SEQ ID NO: 34660 - DNA, 120 bp, synthetic construct; identical to SEQ ID NO: 9586
  source 1..120: mol_type = other DNA

SEQ ID NO: 34661 - DNA, 120 bp, synthetic construct
  source 1..120: mol_type = other DNA
acatttcaatcttacctaagtcacatacttacttacacatcaattcacctccatatttgctcaatttgtgagaacctaatattggccagatactgtgctaggacctagggatattaaaaa

SEQ ID NO: 34662 - DNA, 120 bp, synthetic construct
  source 1..120: mol_type = other DNA
taaggggaagggacaccaaagaatgagcagttagctcaacttgaacagtaacattaagcttttcagagatgttatttgggcgtacatagattggggaaaagtctactccatatagaaagt

SEQ ID NO: 34663 - DNA, 120 bp, synthetic construct
  source 1..120: mol_type = other DNA
agaggaagtggttagacatgaggctggaaagctaggcagactgttttggcaaacataggaatttggactttatcacatagccaataaggaataacacagagttttaaaaagagctatggc

SEQ ID NO: 34664 - DNA, 120 bp, synthetic construct; identical to SEQ ID NO: 9587
  source 1..120: mol_type = other DNA

SEQ ID NO: 34665 - DNA, 120 bp, synthetic construct
  source 1..120: mol_type = other DNA
gcaagactccgtatcagggaaagaaaaaaacaacttcttgcaatgacacaaatgttcaataatctgtgctttcccatatgacagccactagtcacatgtggctattgagaacttaaaatg

SEQ ID NO: 34666 - DNA, 120 bp, synthetic construct
  source 1..120: mol_type = other DNA
agactgttggtatagctcaggtgatagaattaggacagaagggtgagttgatggatagttaagaggcaaaattatgagtctgtaagggtgtgagaaaaggaaatcaagaacaggctccca

SEQ ID NO: 34667 - DNA, 120 bp, synthetic construct
  source 1..120: mol_type = other DNA
ttcatcaattttgaacatactggtgtctgagagttatcccagtgggaatatttagtagaaagtttagcttagagagctgtctgaactaaagattcagacttcagaggctttgagccatgg

SEQ ID NO: 34668 - DNA, 120 bp, synthetic construct; identical to SEQ ID NO: 9588
  source 1..120: mol_type = other DNA

SEQ ID NO: 34669 - DNA, 120 bp, synthetic construct
  source 1..120: mol_type = other DNA
ttgagatagtaaggataatttcaatttcaggtcttggctgtgcaaggaagccgagagacatgagtctctaagagggcacgatattgagagggttgttatctttctgtcagcggggaaacc

SEQ ID NO: 34670 - DNA, 120 bp, synthetic construct
  source 1..120: mol_type = other DNA
gtaaaggatttcctcaaaccgaagggaggacctctagtgaaatgagaaaggaatacacaattgacccagtttgcaggtgggaaatgggaagccagttctgcaaattggcctttctgttct

SEQ ID NO: 34671 - DNA, 120 bp, synthetic construct
  source 1..120: mol_type = other DNA
ctggcaactgaatcaccataacattttatgttaccagttccaaaattttggggggaattcactcaagcttgggagaggagagatcataactttaagagtataagaggtttaaacggtcca

SEQ ID NO: 34672 - DNA, 120 bp, synthetic construct; identical to SEQ ID NO: 9589
  source 1..120: mol_type = other DNA

SEQ ID NO: 34673 - DNA, 120 bp, synthetic construct
  source 1..120: mol_type = other DNA
agccgcaccttacacccaccgaggaggaaacaagcctggccacccgaggctaccccgctaggccgcgggtagtgggggagggggcgctgaggcaggaggtcagcacccgggcgcgggctc

SEQ ID NO: 34674 - DNA, 120 bp, synthetic construct
  source 1..120: mol_type = other DNA
ggcgcacccttgcgcctgcgctgtgtgtgttcctggtctgcggcagccatgctgaactcgtatggagaggcgagtgggggggacagagtccaggactgcgggataggaagctggggatat

SEQ ID NO: 34675 - DNA, 120 bp, synthetic construct
  source 1..120: mol_type = other DNA
gaaaggcggggggtgggggggaagcgggcacgtgaccccggtcagccaatctgggtgctgctgacgtggccgcgcggccccgatgctctccccacccccccagcccgttcgggaagggag

SEQ ID NO: 34676 - DNA, 120 bp, synthetic construct; identical to SEQ ID NO: 9590
  source 1..120: mol_type = other DNA

SEQ ID NO: 34677 - DNA, 120 bp, synthetic construct
  source 1..120: mol_type = other DNA
gttagggggcggtgtggccccccctattccattcgtcccctgggggtacagcagccgggagccaggtgagaagggatccatcggcggccgagggaggggtgacctggcggtgggctgagg

SEQ ID NO: 34678 - DNA, 120 bp, synthetic construct
  source 1..120: mol_type = other DNA
attgctgtgcgccctttgtgtccgcggtaggggagctccagtcgtcacaccgcaggctggaggttacgcttcgagtcgcttaccgaatttgtgtgcattcacgtggacacggcctgtggg

SEQ ID NO: 34679 - DNA, 120 bp, synthetic construct
  source 1..120: mol_type = other DNA
tagggggtctagacagcatggtctgagatgcgagggaggctcgggacctggaatgatttcacagctcccaaggtttcgggtttctccagggtggcctcttccatcgcctccctcatcccc

SEQ ID NO: 34680 - DNA, 120 bp, synthetic construct; identical to SEQ ID NO: 9591
  source 1..120: mol_type = other DNA

SEQ ID NO: 34681 - DNA, 120 bp, synthetic construct
  source 1..120: mol_type = other DNA
tgccctccatgctgcagccacccaaacggggccgcttgtacttttgggggccagggcctgatccctggctgggggaaggggactctgctctcctgacgctcattttcccccgccctcccg

SEQ ID NO: 34682 - DNA, 120 bp, synthetic construct
  source 1..120: mol_type = other DNA
ggacctaggcccttacgagcccttccggggcgagggggaatcttaccgtatatttgttcacctacgttgattatttttcccagatacgtacacaagtttgttttctccctggtagcgaag

SEQ ID NO: 34683 - DNA, 120 bp, synthetic construct
  source 1..120: mol_type = other DNA
tctgggctctggttgattcacagagtctgcacccttatttagataaccaagttaggaggaagacttaagagtaagttggggggagggggcgaaactgagctcccaaaatggctcctgccc

SEQ ID NO: 34684 - DNA, 120 bp, synthetic construct; identical to SEQ ID NO: 9592
  source 1..120: mol_type = other DNA

SEQ ID NO: 34685 - DNA, 120 bp, synthetic construct
  source 1..120: mol_type = other DNA
ttgcattgtatagggtagatggatgcgtttggagattttaatcccacttttagggttgccgaggatttttcgaacgagcagaaatgtattggtaactgtaggtgtgagtggggagggatt

SEQ ID NO: 34686 - DNA, 120 bp, synthetic construct
  source 1..120: mol_type = other DNA
ggagtattataagactctggcaacactgttttagactgtggggcatgggaacgttagatcccctcatcgccgttctgaagcccgtagctgttcgccatagaggagcaggccgcggcttct

SEQ ID NO: 34687 - DNA, 120 bp, synthetic construct
  source 1..120: mol_type = other DNA
gcgacccctcccgtttccctgctttggccaatggaggagctacgaatggcacgacctgctcgagcttggcagtctccagttgggctgtgcatggaagcttgggaagactttgttggaagg

SEQ ID NO: 34688 - DNA, 120 bp, synthetic construct; identical to SEQ ID NO: 9593
  source 1..120: mol_type = other DNA

SEQ ID NO: 34689 - DNA, 120 bp, synthetic construct
  source 1..120: mol_type = other DNA
atataaagggctggcgcggggctcggcggcgccatttcgtgctggagtggagcagcctctagaacgagctggaggattctgcctaccgatacagagccttcgagtcgtccggggccgcca

SEQ ID NO: 34690 - DNA, 120 bp, synthetic construct
  source 1..120: mol_type = other DNA
ctcggagtctgtccaccccctctactccgccctcaagaggatttcaaagatggaggcggcggctccctaaaccacttttcgtgttcatccgcctccatccgagatcgaaacgggacctcg

SEQ ID NO: 34691 - DNA, 120 bp, synthetic construct
  source 1..120: mol_type = other DNA
cgcctcagctgaggccgccgccattttcttgctgtccgccgtctgcagagcgcgccaagctgcccggagctctccgagaggccccaaagagactgctttcgtgccggccaggcagggggt

SEQ ID NO: 34692 - DNA, 120 bp, synthetic construct; identical to SEQ ID NO: 9594
  source 1..120: mol_type = other DNA

SEQ ID NO: 34693 - DNA, 120 bp, synthetic construct
  source 1..120: mol_type = other DNA
aggttgtcaatttatacgctattaatgccgccgtggcccagtcttaaccgagtcaggcagagctagtttgacggtggagtggagtgaggttgaacagcaggtttggcgtttggtgggtct

SEQ ID NO: 34694 - DNA, 120 bp, synthetic construct
  source 1..120: mol_type = other DNA
gtaaagggatcactctcccgtgtgtgcaggttcctaatgcccagggtatgtcattaaatcttttgctttctttgggtgggtgggttgtgtgtggtgtttgttggtgcagggattgttttt

SEQ ID NO: 34695 - DNA, 120 bp, synthetic construct
  source 1..120: mol_type = other DNA
ctaaggttcctagttcagctctgcgatgtaaacaatgagattcccatatgatgttttaattcttaggtggtaggaaagactgatcggaggagcaccagagggactgtaaatgaaccactg

SEQ ID NO: 34696 - DNA, 120 bp, synthetic construct
  source 1..120: mol_type = other DNA
gacttccttggagtgaggagactctgatttggtgcgaataattttgagggcctggaagttacgggctgtgaagtctgacaaattcttccttgtctgaatttgtttttaagttgatatggt

SEQ ID NO: 34697 - DNA, 120 bp, synthetic construct; identical to SEQ ID NO: 9595
  source 1..120: mol_type = other DNA

SEQ ID NO: 34698 - DNA, 120 bp, synthetic construct
  source 1..120: mol_type = other DNA
aaaaagaacagatagagcctatcagacttaagaaggtgggatctagatagtatactaaaaatattaataaaaggaaggcggggccagcaataaaagctccacagattgtttggatattgt

SEQ ID NO: 34699 - DNA, 120 bp, synthetic construct
  source 1..120: mol_type = other DNA
gcactttttcctcatttggacgatattgccctaattttgttcccatctttacaggctccctggggaagggaatgcagggttgctggggctgggcccagaagcagcagcaccagggaagag

SEQ ID NO: 34700 - DNA, 120 bp, synthetic construct
  source 1..120: mol_type = other DNA
aggacgagttaccaaccagctgcaatacctacacaaggtagtgatgaaggctctgtggaaacatcagttcgcatggccattccggcagcctgtggatgctgtcaaactgggtctaccggt

SEQ ID NO: 34701 - DNA, 120 bp, synthetic construct; identical to SEQ ID NO: 9596
  source 1..120: mol_type = other DNA

SEQ ID NO: 34702 - DNA, 120 bp, synthetic construct
  source 1..120: mol_type = other DNA
agcccatggatagccagccccagaggtaatgtcacaggatgggaagtttccagagtgggtgggaggtgggtggttagagaaaggcagcaggggcctccctgtggatgtcaagaatctttt

SEQ ID NO: 34703 - DNA, 120 bp, synthetic construct
  source 1..120: mol_type = other DNA
gtctccctataagcatttatttttctgtggttctgacctaacatttttttatttaggattatcacaaaattataaaacagcctatggacatgggtactattaagaggagacttgaaaaca

SEQ ID NO: 34704 - DNA, 120 bp, synthetic construct
  source 1..120: mol_type = other DNA
cttctattattgctggatatgttgtctacataaagtttaaatcctttgctactgaaggtgttatccaggtagggtagtcggagtcttaaaaacctgactctagatggtactattgaacac

SEQ ID NO: 34705 - DNA, 120 bp, synthetic construct; identical to SEQ ID NO: 9597
  source 1..120: mol_type = other DNA

SEQ ID NO: 34706 - DNA, 120 bp, synthetic construct
  source 1..120: mol_type = other DNA
tattgctgtctgtgttctcatagcccactgatgatattgtcctaatggcacaaacgctggaaaagatattcctacagaaggttgcatcaatgccacaagaagaacaagagctggtagtga

SEQ ID NO: 34707 - DNA, 120 bp, synthetic construct
  source 1..120: mol_type = other DNA
agcgctccagggcagtgttaccagtgcccatcaggtgcctgccgtctcttctgtgtcacacacagccctgtatactcctccacctgagatacctaccactgtcctcaacattccccaccc

SEQ ID NO: 34708 - DNA, 120 bp, synthetic construct
  source 1..120: mol_type = other DNA
ggcagcagggaggcaagggtcttaagtaaagtgggcttggagtgacaggttccctatcttgtttctttctgcagaaaaaaggcgtaaagcggaaagcagatactaccacccctacaccta

SEQ ID NO: 34709 - DNA, 120 bp, synthetic construct; identical to SEQ ID NO: 9598
  source 1..120: mol_type = other DNA

SEQ ID NO: 34710 - DNA, 120 bp, synthetic construct
  source 1..120: mol_type = other DNA
aggcagtgatgggagcctaggtgcaaaacaataagtctccttatgtgggcacacagcagtctttggttcttggcattttacttttataaaataatagtggaacagaaggtctggtgtttt

SEQ ID NO: 34711 - DNA, 120 bp, synthetic construct
  source 1..120: mol_type = other DNA
aaaacaggcataggccacctctctgtcacttagaaatgatttctttttctagacataaatatttcttcaacccacccaaattcctttgacttcaaacttgaaccccagggcacagatcct

SEQ ID NO: 34712 - DNA, 120 bp, synthetic construct
  source 1..120: mol_type = other DNA
atggagaaccgtgattaccgggatgcacaggagtttgctgctgatgtacggcttatgttctccaactgctataagtacaatcccccagatcacgatgttgtggcaatggcacgaaagcta

SEQ ID NO: 34713 - DNA, 120 bp, synthetic construct; identical to SEQ ID NO: 9599
  source 1..120: mol_type = other DNA

SEQ ID NO: 34714 - DNA, 120 bp, synthetic construct
  source 1..120: mol_type = other DNA
gacgaggaggaagaagagagtgaaagctcagactcagaggaagaaagggctcatcgcttagcagaactacaggaacaggtattttgtcactcttgaaagtttttattgggtaagaggttc

SEQ ID NO: 34715 - DNA, 120 bp, synthetic construct
  source 1..120: mol_type = other DNA
tcgggcagtacatgaacaactggctgctctgtcccagggtccaatatccaagcccaagaggaaaagagagaaaaaagagaaaaagaagaaacggaaggcagagaagcatcgaggccgagc

SEQ ID NO: 34716 - DNA, 120 bp, synthetic construct
  source 1..120: mol_type = other DNA
ttctggaggaagtggcaccaagtgagttagagtaggaagcagagactagtttggctatttctgtctctctgggggatgccatctctctttgcaaagataattctaaatggccagttaaca

SEQ ID NO: 34717 - DNA, 120 bp, synthetic construct; identical to SEQ ID NO: 9600
  source 1..120: mol_type = other DNA

SEQ ID NO: 34718 - DNA, 120 bp, synthetic construct
  source 1..120: mol_type = other DNA
tctgacagtgaactcaaagtagccataaactagaaacatgaagatggctgtgttccaaaaagactttatttgcaaagacacgtggcgatcagatttgttctctgggccatatagtttgcc

SEQ ID NO: 34719 - DNA, 120 bp, synthetic construct
  source 1..120: mol_type = other DNA
agactccaggctggagtgcagtggcgtgatctcggcttactgcaacctccacttctcgggttcaagcgattctcctgcctcagcctcccaagtagccaggattacaggcatgcgccacca

SEQ ID NO: 34720 - DNA, 120 bp, synthetic construct
  source 1..120: mol_type = other DNA
ttggcctcccaaagtgctgggattacaaatctgagccactgcagctggcccatggtgtagtttggtagtgtttaagggagcagaaagacccatgtcagtatacctaaacaggtatacctt

SEQ ID NO: 34721 - DNA, 120 bp, synthetic construct; identical to SEQ ID NO: 9601
  source 1..120: mol_type = other DNA

SEQ ID NO: 34722 - DNA, 120 bp, synthetic construct
  source 1..120: mol_type = other DNA
gggaacatactggaagaggttaatgaagcttcttttgctgacaactctttttgcccttaggctccccaaaaaggccacaaagacagccccacctgccctgcctacaggttatgattcaga

SEQ ID NO: 34723 - DNA, 120 bp, synthetic construct
  source 1..120: mol_type = other DNA
ctctttacgtgattcaaacccagaagagattgagattgattttgaaacactcaagccatccacacttagagagcttgagcgctatgtcctttcctgcctacgtaagaaaccccggaagcc

SEQ ID NO: 34724 - DNA, 120 bp, synthetic construct
  source 1..120: mol_type = other DNA
gctgacgttcaagaagggaacttgggaaccttaggggcccataataagatgcttggggcaatcttaatgtatcctgataaatttctttcattagccattaagaagcctgtgggaaagaca

SEQ ID NO: 34725 - DNA, 120 bp, synthetic construct; identical to SEQ ID NO: 9602
  source 1..120: mol_type = other DNA

SEQ ID NO: 34726 - DNA, 120 bp, synthetic construct
  source 1..120: mol_type = other DNA
ccagatggggcaggaaggctccgcaggaccggacccctagaccaccctgccccacctgccccttccccctttgctgtgacacttcttcatctcacccccccccgcccccctctaggagag

SEQ ID NO: 34727 - DNA, 120 bp, synthetic construct
  source 1..120: mol_type = other DNA
aatggggcagggcaagggtgggagtgtgcaaagccctgatctggagttacctgaggccacagctgccctattcacttctaagggccctgttttgagattgtttgttctaatttattttaa

SEQ ID NO: 34728 - DNA, 120 bp, synthetic construct
  source 1..120: mol_type = other DNA
ttccgctccatttggggccctgggggtttcagtcatctccccatttggtcccctggactgtctttgttgattctaacttgtaaataaagaaaatattattcaagttttgagttaccttaa

SEQ ID NO: 34729 - DNA, 120 bp, synthetic construct; identical to SEQ ID NO: 9603
  source 1..120: mol_type = other DNA

SEQ ID NO: 34730 - DNA, 120 bp, synthetic construct
  source 1..120: mol_type = other DNA
aggctttaggtttttccctgtggcactggatgtgtgaattttctcctgagcagacttaaaatatgagaaaagggtgggaggtagccgaacataagtactttatgcattgagtttattgcc

SEQ ID NO: 34731 - DNA, 120 bp, synthetic construct
  source 1..120: mol_type = other DNA
aggtggcgggtacctgtagtcccagctactcgggaggctgaggcagcagaatggcgtgaactcgggaggcggggttcagtgagccgagatcgcgccactgcactccagcctgggtggtag

SEQ ID NO: 34732 - DNA, 120 bp, synthetic construct
  source 1..120: mol_type = other DNA
tccaacgattaaatcacaaaactgtgctttctgcatacccccttgtcttgctaaggggagagaagggttgtataaaaagtttagggggttgggatgtgtgcattctggaatttggggctt

SEQ ID NO: 34733 - DNA, 120 bp, synthetic construct; identical to SEQ ID NO: 9604
  source 1..120: mol_type = other DNA

SEQ ID NO: 34734 - DNA, 120 bp, synthetic construct
  source 1..120: mol_type = other DNA
gaaagctcttgagctccctttgagctctggttcccttttgagaataacagatgttgaggattcgtaagtacttaatagacacgcgttgggcaataggtgatgagatacaaattaaagttc

SEQ ID NO: 34735 - DNA, 120 bp, synthetic construct
  source 1..120: mol_type = other DNA
gtctgactgcagccccttctgctcatgtacttttaaggtttgttttctgtagttcggaaaaataaaagtttcaacctgacattggaggcccctgagtacttaattccctgtaaatggaac

SEQ ID NO: 34736 - DNA, 120 bp, synthetic construct
  source 1..120: mol_type = other DNA
gtctcacttagggattgtaattgtttcaggagtttggttgagttccatcttggttgccaaaggactttattccaaaatagcagtctccagcacaactcaaaggactagtggagtcctgtg

SEQ ID NO: 34737 - DNA, 120 bp, synthetic construct; identical to SEQ ID NO: 9605
  source 1..120: mol_type = other DNA

SEQ ID NO: 34738 - DNA, 120 bp, synthetic construct
  source 1..120: mol_type = other DNA
tggtgtggtaattatactgattgaatccaagatataggcatgacttggtcttcacagaccatccttattgtgcacccatatgtggaccccagttccagcctgcctgtaaccttccccaaa

SEQ ID NO: 34739 - DNA, 120 bp, synthetic construct
  source 1..120: mol_type = other DNA
tgcaagactggaggaagattttcctgagcaattagagagtggctgtaatggagagctgggaaggagatgtgggaatggtagcatggaactaatgtgttgtcaccatgatttcattttttc

SEQ ID NO: 34740 - DNA, 120 bp, synthetic construct
  source 1..120: mol_type = other DNA
caatttatattctaggatcggggaaaggggcagcattagacaactagtcacacgatttttaacaaaaataagtaattctaacaggacaatgtgcagaggtctagcaagaatttagaaaag

SEQ ID NO: 34741 - DNA, 120 bp, synthetic construct
  source 1..120: mol_type = other DNA
tgggagcagggagtagtgaacattgccagcagaagaaacagcaactgagaaggtaactaggtgatgctgaagcagcaaggatgaaggtgagtgctttgagatgctttgaatttacatctc

SEQ ID NO: 34742 - DNA, 120 bp, synthetic construct; identical to SEQ ID NO: 9606
  source 1..120: mol_type = other DNA

SEQ ID NO: 34743 - DNA, 120 bp, synthetic construct
  source 1..120: mol_type = other DNA
tagggacaatcatgttagggttggtggggtgttgagagtggatagtttagaaagcaattgcagcagttaatcccagccagtgagaatagtggtgtagaagagaaaggcagcaatgtagat

SEQ ID NO: 34744 - DNA, 120 bp, synthetic construct
  source 1..120: mol_type = other DNA
cgttaaaggaacagcagagcacacgtgcacttgcagacatacagctctcagagtccctagcacagagctttccaatagtggaagcttgatattttgttgactaaaggagtgccacctggc

SEQ ID NO: 34745 - DNA, 120 bp, synthetic construct
  source 1..120: mol_type = other DNA
gattgcctcctgaatctattgtcatttttgtgtcctgcccccgaggttaggtggttcttcccttcttactttcctaaacttcaactcttaaaatgtgagccttcatttttatgacccaga

SEQ ID NO: 34746 - DNA, 120 bp, synthetic construct
  source 1..120: mol_type = other DNA
attttattttatattgatttatttatttatttttaagaaagaggatttctgtcacccaggctggagtgcagtggtgtgatcatagctcactgtagcttcgaccttctgggctcaagtaat

SEQ ID NO: 34747 - DNA, 120 bp, synthetic construct; identical to SEQ ID NO: 9607
  source 1..120: mol_type = other DNA

SEQ ID NO: 34748 - DNA, 120 bp, synthetic construct
  source 1..120: mol_type = other DNA
tagaccttgtattagtccattctcacatggctatgaggaaatacctgagactaggtgatttataaaggaaagaggtttaattgactcacagttctgcatggctggggaggcctcaggaaa

SEQ ID NO: 34749 - DNA, 120 bp, synthetic construct
  source 1..120: mol_type = other DNA
gcatgggggaaactgcccccatatcaaaccttgagtcaaagttccaagtgcctaatgcaatgcctaatggcaaggtcccataagcttgtgcacacatttttagaaaagattctacctttt

SEQ ID NO: 34750 - DNA, 120 bp, synthetic construct
  source 1..120: mol_type = other DNA
agacaacttttctatggatggaggcggggagaatggtttccagatcaaactgttctacttcagatcaccaggcattagattctcaaaaggagtttgcaaccttccctcgcatgctcagtt

SEQ ID NO: 34751 - DNA, 120 bp, synthetic construct; identical to SEQ ID NO: 9608
  source 1..120: mol_type = other DNA

SEQ ID NO: 34752 - DNA, 120 bp, synthetic construct
  source 1..120: mol_type = other DNA
ttgagccttcctctgtcccttctctcagtgcccctcatcagcctggactctcacacgactctgtcactagtccatgtctttcagctatactgtgttgtttcagggcccatcactcacctc

SEQ ID NO: 34753 - DNA, 120 bp, synthetic construct
  source 1..120: mol_type = other DNA
cctctcatgtgagtaagaggaactcatcatccttgccaagctttccaaccaaccccaaacttcaagtatttttgtgtccttgtacagtaagtgaatatttctacataataaaatatttct

SEQ ID NO: 34754 - DNA, 120 bp, synthetic construct
  source 1..120: mol_type = other DNA
aaacaaaaaaagagcagttcttctattagctgccactgtcagacctcatggagtcagttgctattctaattgctgagactatgagaaggtaacactggttaattgatgaatactttcccc

SEQ ID NO: 34755 - DNA, 120 bp, synthetic construct; identical to SEQ ID NO: 9609
  source 1..120: mol_type = other DNA

SEQ ID NO: 34756 - DNA, 120 bp, synthetic construct
  source 1..120: mol_type = other DNA
ataatttttgtatgtttagtagagatggggtttccccatgttggccagtctggtctcgaacttctgatctcaagtgatccgatccacccgcaactgcctccccaaatgctgggattacag

SEQ ID NO: 34757 - DNA, 120 bp, synthetic construct
  source 1..120: mol_type = other DNA
acaaaatgatagttacaagggccaagcagtcctgcatccctgtcagagtgaaacttcattctctctgatgcaaaataaaatgatgcttgttcttccagatccatggttaccatgacatat

SEQ ID NO: 34758 - DNA, 120 bp, synthetic construct
  source 1..120: mol_type = other DNA
cccaattccctgatgtctggtctgtgacctggtgttgaaactggctatgacactgtgcttagacttcctcttaaaattctgcattctgttctggacctgtttccaaccacaataacacaa

SEQ ID NO: 34759 - DNA, 120 bp, synthetic construct; identical to SEQ ID NO: 9610
  source 1..120: mol_type = other DNA

SEQ ID NO: 34760 - DNA, 120 bp, synthetic construct
  source 1..120: mol_type = other DNA
gagagaaggagaaagccaaggaaagggaactgacactcactgagccgttgctatctgccaggtgtatattgatgggcacttttcatagtcatcttttttggtccacatgacgttcctacc

SEQ ID NO: 34761 - DNA, 120 bp, synthetic construct
  source 1..120: mol_type = other DNA
catttctagttatattctagatataagcaaacaaggaattcagaagtaaaacttagcaaaaacttccagatattgttaactccaccaacctgagctaaagaatgaggctagagatgaaca

SEQ ID NO: 34762 - DNA, 120 bp, synthetic construct
  source 1..120: mol_type = other DNA
ctctgtcgcctaggctggagtgcagtggcacgatctcggctcactgcaacctccacctcctgggttcaagcaattctcctgcttcagcctcccaagtagctgggattacaggcacctgcc

SEQ ID NO: 34763 - DNA, 120 bp, synthetic construct; identical to SEQ ID NO: 9611
  source 1..120: mol_type = other DNA

SEQ ID NO: 34764 - DNA, 120 bp, synthetic construct
  source 1..120: mol_type = other DNA
gcatacccatagcttagctcctacttacaagtgagtgttaaattaggtttagcctaaagctgcttccttacatgttttaagttcagcctaaaggtttctccatacatagtaaactgaaac

SEQ ID NO: 34765 - DNA, 120 bp, synthetic construct
  source 1..120: mol_type = other DNA
atcctgctgtttctgtacctcatgtctgttttctgtacatcactttactttttctgttcataaatattccaccacttggctgttctggagtctctcagcctactctggctcagaaggctc

SEQ ID NO: 34766 - DNA, 120 bp, synthetic construct
  source 1..120: mol_type = other DNA
ttaggaaaatggtccagttccatccaagttgctggaaaatatattatttcattcttttttatggatgagtacgatttcatggtatatacacatcacattttcttatccactcatcagttt

SEQ ID NO: 34767 - DNA, 120 bp, synthetic construct; identical to SEQ ID NO: 9612
  source 1..120: mol_type = other DNA

SEQ ID NO: 34768 - DNA, 120 bp, synthetic construct
  source 1..120: mol_type = other DNA
gctgaggtgggagttcaagaccagcctgaccaacatggagaaaccccatctctactaaaaatacaaaattagctgggcatggtggcgcatgcctgtaatcccagctactcgggaggctga

SEQ ID NO: 34769 - DNA, 120 bp, synthetic construct
  source 1..120: mol_type = other DNA
atttccctgatgatagtgatgttgaacatttttacatatgtttctggacatttgtatatcttcttttgagaaatgtctgtcaatgtcgtttgctcactttttaatgggattatttatttg

SEQ ID NO: 34770 - DNA, 120 bp, synthetic construct
  source 1..120: mol_type = other DNA
tctgctgtgcagaagctttttagtttaattaggtaggtcctatttatttatttttgcttctgttggatttgtttttgaggtcctattcataaattctttgcctaggccaatattcataag

SEQ ID NO: 34771 - DNA, 120 bp, synthetic construct
  source 1..120: mol_type = other DNA
tttttatttttatttttttttgagatggagtcttgtttgtcacccaggctagagtgcaatggtacggtctcggctcactgcaacctccacctcctgggttcaagtgattctcctgcctca

SEQ ID NO: 34772 - DNA, 120 bp, synthetic construct; identical to SEQ ID NO: 9613
  source 1..120: mol_type = other DNA

SEQ ID NO: 34773 - DNA, 120 bp, synthetic construct
  source 1..120: mol_type = other DNA
ggtaccatgctgttttggttactctagccttgtagtgtaatttgaagttgggtaatgtgatgcctccagatttattctttttgtttaggattgctttggctatccaggctttttttgttg

SEQ ID NO: 34774 - DNA, 120 bp, synthetic construct
  source 1..120: mol_type = other DNA
gattcttccaatctatgagcatggcatggttttccatttgtttgtgtcatctatgatttctttcatcagtgttttgtagttctcattagggagatctttcacctccttggttaagtatat

SEQ ID NO: 34775 - DNA, 120 bp, synthetic construct
  source 1..120: mol_type = other DNA
taacctgagactttactgaattcatttatcaaatctaagagtcttttggaggagtctttagcgttttctaggtataagattatgttattggcaaacagagataatttgacttcctctttt

SEQ ID NO: 34776 - DNA, 120 bp, synthetic construct; identical to SEQ ID NO: 9614
  source 1..120: mol_type = other DNA

SEQ ID NO: 34777 - DNA, 120 bp, synthetic construct
  source 1..120: mol_type = other DNA
ccagactggtgtcgaactcctgacctcaggtgaattgcccaccttggcctcccaaactgctggcattataggcgtgagccactgtgcccggccggctttcaactttcatccattcagtat

SEQ ID NO: 34778 - DNA, 120 bp, synthetic construct
  source 1..120: mol_type = other DNA
tgcattgattgaaatgatcatatgacttcgttttaaattctgtttatgtggtgaatcacatttattgacttgcatatgttgaaccatccttgcctccctatgatgaaacccacttgatca

SEQ ID NO: 34779 - DNA, 120 bp, synthetic construct
  source 1..120: mol_type = other DNA
ctggctttggcatcaggtaacactggcttcacagaatgagttggggaggattctctctttcttaatcttttggaatagtttcaataggattggtaccagttcttctttgaacatctggta

SEQ ID NO: 34780 - DNA, 120 bp, synthetic construct; identical to SEQ ID NO: 9615
  source 1..120: mol_type = other DNA

SEQ ID NO: 34781 - DNA, 120 bp, synthetic construct
  source 1..120: mol_type = other DNA
gattcctgcatactgtagaaaattttatttttttcaccaagcccaattaatttagcttagctggagaactattaagaagtgtgaagacacaaataagaaacgaacgacttcattccataa

SEQ ID NO: 34782 - DNA, 120 bp, synthetic construct
  source 1..120: mol_type = other DNA
tagactgcgtaatttctaaatggtaactattcatacctaccattcatcctaaccataccttcaggcttggcttagacactgggacctttgtgaaggaagagaggcctgagggaactggat

SEQ ID NO: 34783 - DNA, 120 bp, synthetic construct
  source 1..120: mol_type = other DNA
tagtaccttcttcatttttactttttttttttttggtttttttttttttttttttttttgaaatggagtctcgctttgtcgcccaggctggagtgcagtggcgggatctcagctcactgc

SEQ ID NO: 34784 - DNA, 120 bp, synthetic construct
  source 1..120: mol_type = other DNA
ccgtgttagccaggatggtctcgatctcctgacctcgtgatccgcccgcctcggcctcccaaagtgctgggattacaggcgtgaaccactgcgcccggcccatttttactattttttatt

SEQ ID NO: 34785 - DNA, 120 bp, synthetic construct; identical to SEQ ID NO: 9616
  source 1..120: mol_type = other DNA

SEQ ID NO: 34786 - DNA, 120 bp, synthetic construct
  source 1..120: mol_type = other DNA
gagaaatctgctggggaaatggtcaaattttatgtctgtatttaatagccatgtagtggaacaaaaatttaaaggcattacatcatgtttattttattttaattaaaacaaaagaacaac

SEQ ID NO: 34787 - DNA, 120 bp, synthetic construct
  source 1..120: mol_type = other DNA
tcgagaccagcctggccaacctggtgaaaccctgcctctactaaaaatacaaaaattagttgggcgtggtcgtgggcgcctgtaatcccagctactcgggagactgaggcaggagaatca

SEQ ID NO: 34788 - DNA, 120 bp, synthetic construct
  source 1..120: mol_type = other DNA
tcaacttgtgagttcaggaatctagtgctctctcctttaatttcctgctattttcaagtataataaagcattacacacacacacacacacacacacacacacacacacacctctttaatt

SEQ ID NO: 34789 - DNA, 120 bp, synthetic construct; identical to SEQ ID NO: 9617
  source 1..120: mol_type = other DNA

SEQ ID NO: 34790 - DNA, 120 bp, synthetic construct
  source 1..120: mol_type = other DNA
tttaaaatacgattaggtcatctcttaaagagatgggcagagccctcataaagggcttaatgccatcatctctagagtggattagttatctcatctcaggagtgaattcctgatgaaagg

SEQ ID NO: 34791 - DNA, 120 bp, synthetic construct
  source 1..120: mol_type = other DNA
gcctccagaactgtgagaaacaaatttctttcttttctttttttttttttttttttttttttttggtaaattacctagtctgtggtattctgttatggcaacacaaaatggactaagaca

SEQ ID NO: 34792 - DNA, 120 bp, synthetic construct
  source 1..120: mol_type = other DNA
tagcataaagatgacttgatacataaccgtggtactgtaatcatactaaacaaaactgaaaacagctctctaatatcatcgattaccagttcatattcaaatttccccatttgtctgaaa

SEQ ID NO: 34793 - DNA, 120 bp, synthetic construct; identical to SEQ ID NO: 9618
  source 1..120: mol_type = other DNA

SEQ ID NO: 34794 - DNA, 120 bp, synthetic construct
  source 1..120: mol_type = other DNA
tcataggtattgctgtgtactttgcatttcatcttattaggaagcatatgcttaatgtcttgtcctattattggtgaggctaaacttgatcactcagtcgaggtgatgacagccatcacc

SEQ ID NO: 34795 - DNA, 120 bp, synthetic construct
  source 1..120: mol_type = other DNA
gccttccctgaatcaatgatcacattaggcttacaaaatgctggttttctaattctgttatttttcccaacatttattcactggtactctgaagggtagaccttttttcatcagtggaac

SEQ ID NO: 34796 - DNA, 120 bp, synthetic construct
  source 1..120: mol_type = other DNA
aatctgtattcgactattaataggaacccatggatttttatatactcaatgtgtttaattatattatagtcatctttttgatgtctgagttgttccagttttggccaatggaagctcctt

SEQ ID NO: 34797 - DNA, 120 bp, synthetic construct; identical to SEQ ID NO: 9619
  source 1..120: mol_type = other DNA

SEQ ID NO: 34798 - DNA, 120 bp, synthetic construct
  source 1..120: mol_type = other DNA
agttcttttttttttttttttttttctttgagatggagtctctccctgttgcccaggctggagtgcaatggtgcaatctccgctgacctcaacctctgcctcccaggttcaaacaattct

SEQ ID NO: 34799 - DNA, 120 bp, synthetic construct
  source 1..120: mol_type = other DNA
ctgaccttgtgatccgcccgccttggcctcccaaaatgttgggattacagggatgagccactgcccccggcctaaaaatcttagttcttaattatattaacataatcactgatttgcttt

SEQ ID NO: 34800 - DNA, 120 bp, synthetic construct
  source 1..120: mol_type = other DNA
ctggggcaacataatgagaccccatttctatttaaaacatgtattttaattaactgggtatggtggcatgttcctgaagtcccagctactgtacttgggagaccgaggtgggaggatcac

SEQ ID NO: 34801 - DNA, 120 bp, synthetic construct; identical to SEQ ID NO: 9620
  source 1..120: mol_type = other DNA

SEQ ID NO: 34802 - DNA, 120 bp, synthetic construct
  source 1..120: mol_type = other DNA
tgtaaattatttatacgtttcaaaggtcaatattcacttctcacttctattctcccttccttcctaaaagtagccatttttattaatttcttgtttatccttccaatgcagcttttttcc

SEQ ID NO: 34803 - DNA, 120 bp, synthetic construct
  source 1..120: mol_type = other DNA
ttaggactacagggggtaccaccatgcctggctaatttttttattttatgtagagacagagtcttgctatgttggccaggctggtgttaaattcctgacctcaagtgatcctcccacttc

SEQ ID NO: 34804 - DNA, 120 bp, synthetic construct
  source 1..120: mol_type = other DNA
cctctttcttaccccaaaggcagtacatagtttaatcattgtattgcactgtgaattttccactctaacctagagattcctccgtattagttcaaagagatctttctcattccttttcgt

SEQ ID NO: 34805 - DNA, 120 bp, synthetic construct
  source 1..120: mol_type = other DNA
tcaccttgagcatttatcatttctatgtgttggcaacatctcaagtcctctcttctagctactttgaaatatactatatatatatatatatatatatatatatatatatatatatatata

SEQ ID NO: 34806 - DNA, 120 bp, synthetic construct; identical to SEQ ID NO: 9621
  source 1..120: mol_type = other DNA

SEQ ID NO: 34807 - DNA, 120 bp, synthetic construct
  source 1..120: mol_type = other DNA
gtcccagctgctcggtaggctgaggcaggagaatcacttgaacccagcaggcggaggttgcagtgagctgagatggcaccactgcactccagcctgggcaacagagcaagactctgtctc

SEQ ID NO: 34808 - DNA, 120 bp, synthetic construct
  source 1..120: mol_type = other DNA
ctctcctaaacacttcggtttcatgcaacaatttaggaaatatctggtgtgcttcttagtgaatgtggagatactggatttgacaaatatcagttggttagactagtgtttggcacattg

SEQ ID NO: 34809 - DNA, 120 bp, synthetic construct
  source 1..120: mol_type = other DNA
gggaatttgagagcagggtgactacattttgttttagtcagctggggctttaaacatttattgagtaaccaccatgtttcaggcattacagtaagaacttgtacctgaagcagatccata

SEQ ID NO: 34810 - DNA, 120 bp, synthetic construct; identical to SEQ ID NO: 9622
  source 1..120: mol_type = other DNA

SEQ ID NO: 34811 - DNA, 120 bp, synthetic construct
  source 1..120: mol_type = other DNA
tgtagagataaatagggtaacatgatagggagagattggagataggtggtttatttagcaaagttggtcaatgaagcttctctgaattggtgccacacgagttgtgaatgggtgatgaat

SEQ ID NO: 34812 - DNA, 120 bp, synthetic construct
  source 1..120: mol_type = other DNA
ttgttgaccaggagggaatttagactaagcaagaaagaaagtctgaactgggggagtgcttcgactgatccaggagggagaagaaaatctcttcagtaattccatccccagtcattcttc

SEQ ID NO: 34813 - DNA, 120 bp, synthetic construct
  source 1..120: mol_type = other DNA
tacacatttcctagtaatgctgatgtctgaccctgttcatcctgcctcatgtctcacaagctggtctccattcgctgctgagtaggacagtgcagtggaaagaacatgggctctagcatc

SEQ ID NO: 34814 - DNA, 120 bp, synthetic construct; identical to SEQ ID NO: 9623
  source 1..120: mol_type = other DNA

SEQ ID NO: 34815 - DNA, 120 bp, synthetic construct
  source 1..120: mol_type = other DNA
aggcacagtggcctgtgggtctgaaagagccctgcttccttgcagcagccaaggcaggtggggaggcctcccagggacggggaagttggccgtatggtgcatctttgcagtcctgctccc

SEQ ID NO: 34816 - DNA, 120 bp, synthetic construct
  source 1..120: mol_type = other DNA
gtctggactggagaagacaacaggggcttctccaaggcctcagcactgtgtcagggcgcagacccttggaacaactgtaagagaccagaagccccaataaagacagattgaacttaaaac

SEQ ID NO: 34817 - DNA, 120 bp, synthetic construct
  source 1..120: mol_type = other DNA
gacatttactattttttgcactctgtgcactatcttattaatcttttggaccaagattcaaatccactacacgtgaaaagcattaaggccaggcacattgcatgtgttgggtaaacggta

SEQ ID NO: 34818 - DNA, 120 bp, synthetic construct; identical to SEQ ID NO: 9624
  source 1..120: mol_type = other DNA

SEQ ID NO: 34819 - DNA, 120 bp, synthetic construct
  source 1..120: mol_type = other DNA
gttggtggaggaaggcaggtccagcacagagaatagtttgtgcaaaggcagggaggagtaaacatgcgacaacagttttctgtgacttaagcattgatcattttcaggaggagctattat

SEQ ID NO: 34820 - DNA, 120 bp, synthetic construct
  source 1..120: mol_type = other DNA
ccggtctctactaaaaataataaaattagccgggcatggtggggggtgcctgtaattccagctactcaggagggtgaggcaggagaattgcttgaacctgggagacagaggttgcagtga

SEQ ID NO: 34821 - DNA, 120 bp, synthetic construct
  source 1..120: mol_type = other DNA
ttcatcttgtaggtaatggagcacctataagaatttaaaggaggaagggaaaaagcagatatcctataagcttctgagagaaaaaaacaacaacgattacgtacaaagtttcatgacaca

SEQ ID NO: 34822 - DNA, 120 bp, synthetic construct; identical to SEQ ID NO: 9625
  source 1..120: mol_type = other DNA

SEQ ID NO: 34823 - DNA, 120 bp, synthetic construct
  source 1..120: mol_type = other DNA
ctcagagtgaccgctgtatcatcaagggcaaggagttaagaatggagcagacagaaggttctgggagagttatatctggtgataaaattgacagaatacctgatgtgtttgattgtactg

SEQ ID NO: 34824 - DNA, 120 bp, synthetic construct
  source 1..120: mol_type = other DNA
ctctatggtttgccattacatggtcatattgatagaaacatagtaaacacagtaacttttactatattgtaaaaattacaatatagtcacattaaaagaaagggcatgggaaagggggca

SEQ ID NO: 34825 - DNA, 120 bp, synthetic construct
  source 1..120: mol_type = other DNA
gaggttaataccaacaaaacatattagaacaattgaaagttattttctgtaagggtgaggatatggtgggagatggggctggaaactggtatttctgtagcaaatattgtagaaatattt

SEQ ID NO: 34826 - DNA, 120 bp, synthetic construct; identical to SEQ ID NO: 9626
  source 1..120: mol_type = other DNA

SEQ ID NO: 34827 - DNA, 120 bp, synthetic construct
  source 1..120: mol_type = other DNA
gactacgtaccttgagactagaaacaaatgtgagtatacacgcaggtgcataaatctaaaagctctggaattactcctagaagttccagtgacttcagggtagtatatgcaacagtaaaa

SEQ ID NO: 34828 - DNA, 120 bp, synthetic construct
  source 1..120: mol_type = other DNA
ttccaatgatgcatcaagttaacgtctaagcaaaagatcagcagagatcagagattgttgggtacacacgtatcttgtgatgtcttctgagaaccaacttattcctctttctctgagaag

SEQ ID NO: 34829 - DNA, 120 bp, synthetic construct
  source 1..120: mol_type = other DNA
atttttccagtaatttaaagctgtgactaggagacacagcctctgtgggttgtgagggttgagatgatataaactcaggagctgtcgggtggacatgttcactgagaaggacagtcagtc

SEQ ID NO: 34830 - DNA, 120 bp, synthetic construct
  source 1..120: mol_type = other DNA
tgggaggcctggctaaaatctacccttgggccctgcactcctccccatggctatattgcaaatatcctatactttgcatgtgatcacacaaagagggtttctgttactggcacacaaaaa

SEQ ID NO: 34831 - DNA, 120 bp, synthetic construct; identical to SEQ ID NO: 9627
  source 1..120: mol_type = other DNA

SEQ ID NO: 34832 - DNA, 120 bp, synthetic construct
  source 1..120: mol_type = other DNA
tggctgcatcagagtcatccagagccggttaaaaatgacagcctcggctgggcacagtggctaatgcctgtaattccagtactttgggagggaaggtgggtggatcacgaggtcaagaga

SEQ ID NO: 34833 - DNA, 120 bp, synthetic construct
  source 1..120: mol_type = other DNA
cttgaactcaggaggtggaggttgcagtgagctgagatcatgccatggcactccagcctggtgacagagtgagaccccatctcagaaaagacagcctccctgttgctgccccctgcactc

SEQ ID NO: 34834 - DNA, 120 bp, synthetic construct
  source 1..120: mol_type = other DNA
gctcactgcagccttgaactcctgggctcaagcactcctccggcctcagcctccccagtggctgggaatacaggtgcgagccaccatgcctggttaatttttaaatctttctttgtagag

SEQ ID NO: 34835 - DNA, 120 bp, synthetic construct; identical to SEQ ID NO: 9628
  source 1..120: mol_type = other DNA

SEQ ID NO: 34836 - DNA, 120 bp, synthetic construct
  source 1..120: mol_type = other DNA
taacatgactgactccactgagggaagtggccaccttatccaagccttgggcctctctttatcatgcatgggactctagggaaaagtagaaaaaggagataacatcatggcaggatacca

SEQ ID NO: 34837 - DNA, 120 bp, synthetic construct
  source 1..120: mol_type = other DNA
ttgttagctgagggggtcgtgaggaacaggataatctgcatccctttcagggtaaacctgaactcaggaggcaaatttcatgaagtccatgtgaaatggctcattcacaaagtaacacac

SEQ ID NO: 34838 - DNA, 120 bp, synthetic construct
  source 1..120: mol_type = other DNA
ccaccaaagcatttagtgctgccagccagagctttgggtagagcaagaatgtgtgtgtgtgttgaatgggaagggaagctagtaggtgtccaacaaaccctgccatgaatactggggcca

SEQ ID NO: 34839 - DNA, 120 bp, synthetic construct; identical to SEQ ID NO: 9629
  source 1..120: mol_type = other DNA

SEQ ID NO: 34840 - DNA, 120 bp, synthetic construct
  source 1..120: mol_type = other DNA
ccccaccccccagactcccggggcctctgcacctggggacactggacacatatgtgcccatgatgatgaggacggtgcccacgaggaagcccaccaggccgatggccaggcccagggcac

SEQ ID NO: 34841 - DNA, 120 bp, synthetic construct
  source 1..120: mol_type = other DNA
tgcatggggagggggctccgtaccccaatgcctgaggagtggcgcatccaggccccagtgctccacctggcagtcatagacgtcctcggctgagggcacgaagggcaggtagtggaactt

SEQ ID NO: 34842 - DNA, 120 bp, synthetic construct
  source 1..120: mol_type = other DNA
gatgaggatgttgggctggcccagctccacccgagacttggggagcacggtcacccgtggaggcactaggaggaacaggccctgagtccacaggctcatccctcaccccagggccttact

SEQ ID NO: 34843 - DNA, 120 bp, synthetic construct; identical to SEQ ID NO: 9630
  source 1..120: mol_type = other DNA

SEQ ID NO: 34844 - DNA, 120 bp, synthetic construct
  source 1..120: mol_type = other DNA
ggtaccgttgatggctctgctgcggttggagcgctccaccaggatgtccagatgggctttgattgcggcgatgccggccagcccgccctgcgggtcaaagcgggcaaagtcaccaaactc

SEQ ID NO: 34845 - DNA, 120 bp, synthetic construct
  source 1..120: mol_type = other DNA
gcccatgtggtcagctgtgtttggcgagttcagggtcaaggagagagaaaaaaatgtgtctgtctcatccacaatatgtgattgttgagtccctgagcctgggccccgtcctgggttctg

SEQ ID NO: 34846 - DNA, 120 bp, synthetic construct
  source 1..120: mol_type = other DNA
gcatatcaggatgggaagaggagggactgcctaaaatcatgcttggggttccagaatttaaatcttggctgtggtcatctgccctggctgtgttgtcaggccctgtgttgtgagctggtg

SEQ ID NO: 34847 - DNA, 120 bp, synthetic construct; identical to SEQ ID NO: 9631
  source 1..120: mol_type = other DNA

SEQ ID NO: 34848 - DNA, 120 bp, synthetic construct
  source 1..120: mol_type = other DNA
tgaagttgtttgagcaacagttattgaggaactagcatgcacccagcacaatggggggccagggaaataaaagaaaaaaaagatgaaccatctgtagacccgcaccccagctcatgtctc

SEQ ID NO: 34849 - DNA, 120 bp, synthetic construct
  source 1..120: mol_type = other DNA
gcatctgttgggtggaggtttgggtctcaggaaggaggaaggaatgaggagaaatctgaacgtcagcaaaggctgactggggcacctgcgcagctgaccgagctgcatcttcatttaggt

SEQ ID NO: 34850 - DNA, 120 bp, synthetic construct
  source 1..120: mol_type = other DNA
ccgtaaatctctgctccccgccgcaccctcctcgccctcgcactcacccttggtggcccctgcctcctgcgggctcaggagggtcatcagggtgtggaaccccaggaccagccctgctct

SEQ ID NO: 34851 - DNA, 120 bp, synthetic construct; identical to SEQ ID NO: 9632
  source 1..120: mol_type = other DNA

SEQ ID NO: 34852 - DNA, 120 bp, synthetic construct
  source 1..120: mol_type = other DNA
gtccatctgcgatgcagggaatcctactttcccaagaagtttccgtggacaaattttgagttagaaagtaaaataaactttaccaataatctttaaaaggaaaacattggctacacaatg

SEQ ID NO: 34853 - DNA, 120 bp, synthetic construct
  source 1..120: mol_type = other DNA
agcaaagtgtaaagagctcccgtggactccccgaggagggcagaggtgctggtcctctctgttggtccctccaggacccgggcacctcctccaggctgacacaggctggaggacggcatc

SEQ ID NO: 34854 - DNA, 120 bp, synthetic construct
  source 1..120: mol_type = other DNA
gtgtaaagagaaatctaaccaaattaggccatgtgtcaaagaccatgaaatcgatgattttcaacttggagggagctaggaaatcatgcgggtctctggttccaaatgagaatcacctgg

SEQ ID NO: 34855 - DNA, 120 bp, synthetic construct; identical to SEQ ID NO: 9633
  source 1..120: mol_type = other DNA

SEQ ID NO: 34856 - DNA, 120 bp, synthetic construct
  source 1..120: mol_type = other DNA
tgtcttcactgctttggtcctgccctggttaggacccttgccaccttcacctccccccaagtgaggtgggagctggagccatgagatgaaagacgggaaagccatgaaaaactcatgata

SEQ ID NO: 34857 - DNA, 120 bp, synthetic construct
  source 1..120: mol_type = other DNA
atcctctatggcttggagtgtggtgaacttctgtaaatatttcacatgggctctaataaatgtgatgcagaattttatacatgtacatgtttattggatcaagcatgtggattttgtcat

SEQ ID NO: 34858 - DNA, 120 bp, synthetic construct
  source 1..120: mol_type = other DNA
gaagtaatcatggctcgctgcagcctcaaacagctgggcttaagcgatcctcctgcctcagcctcccagagtagctgggactataggcatgccccacaattcctggcctatgaatggtat

SEQ ID NO: 34859 - DNA, 120 bp, synthetic construct; identical to SEQ ID NO: 9634
  source 1..120: mol_type = other DNA

SEQ ID NO: 34860 - DNA, 120 bp, synthetic construct
  source 1..120: mol_type = other DNA
caatctgacgatctctgtcttctaacctatgttcaattcatatggtagtcaaagtgagcaaacttgtttctgcaagagacaaacactgaagcctcagtggtttaacaaaacacaggttta

SEQ ID NO: 34861 - DNA, 120 bp, synthetic construct
  source 1..120: mol_type = other DNA
cactttgcatctctattattgaaaagcacttcatgaactcctagctttgcaggtaggagagagaacctgggaaaggcacattgtttccatggttttggaccagaaactatttgccatctc

SEQ ID NO: 34862 - DNA, 120 bp, synthetic construct
  source 1..120: mol_type = other DNA
tgcaggaagatataatggtttggtgagcacatggcactgtctttgctgcattctgattgtgtttattgtgaatattgatgcacttgggcttgtttgtaataccttatttatttcaatatt

SEQ ID NO: 34863 - DNA, 120 bp, synthetic construct
  source 1..120: mol_type = other DNA
cgggttcaagcgattctcctgcctcagcttcccgagtggctgggactacaggtgcatgccaccatgcttggctattttttttttttttttgtattttagtagagacggggtttcaccgtg

SEQ ID NO: 34864 - DNA, 120 bp, synthetic construct; identical to SEQ ID NO: 9635
  source 1..120: mol_type = other DNA

SEQ ID NO: 34865 - DNA, 120 bp, synthetic construct
  source 1..120: mol_type = other DNA
tacttttcatatcttttggcaccttctagaatgcgttctctgattagaattcttcttccaaaaactttcagatgtgggaatttgcatagcaaaccttctaaagtcttgtatgcttgataa

SEQ ID NO: 34866 - DNA, 120 bp, synthetic construct
  source 1..120: mol_type = other DNA
atgtcacagttagaaaatcccatgtcagtctttcatgctggaatcttctagaattttctcattgtctttgatatttttaaattttgctagtgtgtctagagtgggtttttccttctctct

SEQ ID NO: 34867 - DNA, 120 bp, synthetic construct; identical to SEQ ID NO: 3890
  source 1..120: mol_type = other DNA

SEQ ID NO: 34868 - DNA, 120 bp, synthetic construct; identical to SEQ ID NO: 9636
  source 1..120: mol_type = other DNA

SEQ ID NO: 34869 - DNA, 120 bp, synthetic construct
  source 1..120: mol_type = other DNA
cttcaggtcaggacttcagggtgggagcactaggaggcgtagggagcactgatagctggggtggcagaggaggcaatgactagggcagtccccagctcctcccactccagcaggatttca

SEQ ID NO: 34870 - DNA, 120 bp, synthetic construct
  source 1..120: mol_type = other DNA
aaggttccaggaaccttctcatagccacagccagcaagcaacccagttcagaacacctttcagtctcaccagggcttcctcattatttgttttcttggaatgtatatgtatggtccacat

SEQ ID NO: 34871 - DNA, 120 bp, synthetic construct
  source 1..120: mol_type = other DNA
tccctcctagatggaaagggcctgtaagaagggatcatggatgattgaatctttgttacacaatcttccttttccccctaaacgctagcacgttattaaataaataagtcaatgataaca

SEQ ID NO: 34872 - DNA, 120 bp, synthetic construct
  source 1..120: mol_type = other DNA
tgacacaaatccagttgttctaaattgtctaaaatgctgactttgaggtaaagttgtatctgtcatgttctttggagcatgacaagttcaggtaggtgttgggggatattcttcattaaa

SEQ ID NO: 34873 - DNA, 120 bp, synthetic construct; identical to SEQ ID NO: 9637
  source 1..120: mol_type = other DNA

SEQ ID NO: 34874 - DNA, 120 bp, synthetic construct
  source 1..120: mol_type = other DNA
tctcacctgtttcttattgctttttaaatgtagctactagaaaatttgaaattgaattaagaggctcccattatatttctactggacagcgctgctctgggtgctcttggttggctacca

SEQ ID NO: 34875 - DNA, 120 bp, synthetic construct
  source 1..120: mol_type = other DNA
tttccattctggaccttagatctgactgtttgctggtgcatcgctctgttttaatctattttgctttaagtgccgtgctaggctttgggaccacaattatggttcctgccaacaagaatg

SEQ ID NO: 34876 - DNA, 120 bp, synthetic construct
  source 1..120: mol_type = other DNA
attaagcagtttcaagtgcctgtctaattgcaggaattcaaatggctcactgctgtcaccagaatgtctgataattcctggacagagaagtgatgcaaatgtgtgcttacgtatggagtt

SEQ ID NO: 34877 - DNA, 120 bp, synthetic construct; identical to SEQ ID NO: 9638
  source 1..120: mol_type = other DNA

SEQ ID NO: 34878 - DNA, 120 bp, synthetic construct
  source 1..120: mol_type = other DNA
caacaattccaaatgatggtaggaaaaccccaaaattggccatcgaaaggcatagatacagcccttcctgtttaaaagaggtatttttgaaaaacttcaaatgtcttctgggaaaggcac

SEQ ID NO: 34879 - DNA, 120 bp, synthetic construct
  source 1..120: mol_type = other DNA
ttctcttttctgatggttctctgcccccagttccttggcctgtccccatcgctcgccaacatttccgtggctggtctaatctgcgatcgattatccctgacgaaggcagtggggctcagc

SEQ ID NO: 34880 - DNA, 120 bp, synthetic construct
  source 1..120: mol_type = other DNA
agttcaagcctctccatgaccatcctgaacaccaatttactgcacgtcaactcactaaaatcaacccatcaactaatcagaaattaatacatcaaatcatcaattccccaattttatcaa

SEQ ID NO: 34881 - DNA, 120 bp, synthetic construct; identical to SEQ ID NO: 9639
  source 1..120: mol_type = other DNA

SEQ ID NO: 34882 - DNA, 120 bp, synthetic construct
  source 1..120: mol_type = other DNA
gtgggtagatccaagctgtagatccaaggtagatcctgtgggctctagtgccatgtggaggtagcagagggttgagaggagagggttctggtgtttctaagatctcaggaacacagaagt

SEQ ID NO: 34883 - DNA, 120 bp, synthetic construct
  source 1..120: mol_type = other DNA
taatttttaagactatgactttgatatagctgtcaatattctgttttggaatattgtttgcttttggtcttctgtgataaaaatccaaattttcccctgggtgaataggcataaggtcac

SEQ ID NO: 34884 - DNA, 120 bp, synthetic construct
  source 1..120: mol_type = other DNA
cacagaaacatgtaacttctgtctatacaagctttgggtatttcatttataatgaaatggcgcattaacgtgtttttctaaatcaaaagtcaatttcctccttgagattaattacatctc

SEQ ID NO: 34885 - DNA, 120 bp, synthetic construct
  source 1..120: mol_type = other DNA
gttgtgtaatacacaaaagggaattcttaattctgccctaggtaggagaagctagagagaagatgacgtttgaactgtgccttggaggataaatacaagtctactgatgcggagaagagg

SEQ ID NO: 34886 - DNA, 120 bp, synthetic construct; identical to SEQ ID NO: 9640
  source 1..120: mol_type = other DNA

SEQ ID NO: 34887 - DNA, 120 bp, synthetic construct
  source 1..120: mol_type = other DNA
cactccacattcagttctacatagcagcaggaattccttggctcttacttcatcaagaaaattggtcaggcacacccttcatcagcgacattctgaccatttggagaccctggtttctct

SEQ ID NO: 34888 - DNA, 120 bp, synthetic construct
  source 1..120: mol_type = other DNA
ctcccttctatctctctgttaactctaatcagccccctgctgccagatccttcccttcagtttagaatttaggctcaaatcttccttgtccctaatgctcttctcatctccctagcttcc

SEQ ID NO: 34889 - DNA, 120 bp, synthetic construct
  source 1..120: mol_type = other DNA
tgacctcagtgggacagaaattgattgccaaggtcaccaaatctttatctttgtggagttttctgctgctttcatcacagtagatcattccactttcttgaaatctctccttattcagat

SEQ ID NO: 34890 - DNA, 120 bp, synthetic construct; identical to SEQ ID NO: 9641
  source 1..120: mol_type = other DNA

SEQ ID NO: 34891 - DNA, 120 bp, synthetic construct
  source 1..120: mol_type = other DNA
cctcagggccacaattttattcttctagatatctcttctttctctacattaatccacttctttttccatttctgtacactcactttccttctttggctctcttcatctgatcaaaatgaa

SEQ ID NO: 34892 - DNA, 120 bp, synthetic construct
  source 1..120: mol_type = other DNA
aaccaaaaatcagtttttaaaattgctttttacctatatgtggttcttgcttgatgaaaacaagcaactagaaaaaactggtctacttccactcaaacagtgtctccaactatgtggctt

SEQ ID NO: 34893 - DNA, 120 bp, synthetic construct
  source 1..120: mol_type = other DNA
cgagggcatggagagtgttctctatggagaagtaggtgcttacagcagaaatagccttccatgaggttgcgtcggttctgctttcactttcccgtctcatgcaaagtggcccagaaaaca

SEQ ID NO: 34894 - DNA, 120 bp, synthetic construct; identical to SEQ ID NO: 9642
  source 1..120: mol_type = other DNA

SEQ ID NO: 34895 - DNA, 120 bp, synthetic construct
  source 1..120: mol_type = other DNA
accctcagacacaaggaaagaggaactctgtaggggacttagaggcaatctctttaattggaggggctaaatagctttcctctcatggtttgcagctcagtgtaaggccaggcaagctcc

SEQ ID NO: 34896 - DNA, 120 bp, synthetic construct
  source 1..120: mol_type = other DNA
taggaagcattgttgccaccaaactgtacaaatctgagaaacttagtcaaggagggaagggaggactttggggcttagagttaagcagactactgcccagacaggcgatggcaaggacag

SEQ ID NO: 34897 - DNA, 120 bp, synthetic construct
  source 1..120: mol_type = other DNA
gataaacacacacggattctagagaaaaactgtatacacggccagcgtggattagtctcaaagccaaggggaggtttgatgggactgagatgtcttcatgaggccaacccggagtgggac

SEQ ID NO: 34898 - DNA, 120 bp, synthetic construct
  source 1..120: mol_type = other DNA
tgatgctaattgattctgggcctcttgttttctgcctcaaaatagagagctctgggattgaggagggaatcatactagcaccataaatggtttgaaggggaaaatgtgaaaacatttttt

SEQ ID NO: 34899 - DNA, 120 bp, synthetic construct; identical to SEQ ID NO: 9643
  source 1..120: mol_type = other DNA

SEQ ID NO: 34900 - DNA, 120 bp, synthetic construct
  source 1..120: mol_type = other DNA
caataattatcacaaaaggagttgcatttgtaacgtacgtattactttttaatgtgccttttcatctgtcacatcatctggtgcctctggtgtgaccttccaagtccatcctccttcctg

SEQ ID NO: 34901 - DNA, 120 bp, synthetic construct
  source 1..120: mol_type = other DNA
agaagacatagggagatgacaaaactttagaaacaacggaaacaatttagggaatggggtggtcactatgagaggaataaaagatgtccactgtagacagcatatatggtgcaagtctat

SEQ ID NO: 34902 - DNA, 120 bp, synthetic construct
  source 1..120: mol_type = other DNA
cataccaaggctaacaaacctatgggaacctgttagtcccaaaagtgaaatgtgtaaattctcaaaacatgtacatatatatatataatctactcacacacacacaagggtgacagaaac

SEQ ID NO: 34903 - DNA, 120 bp, synthetic construct
  source 1..120: mol_type = other DNA
ctacactttgtccctgatgaaagagagaaaccctatgcttacagcaatatccaccaggagtgattttgcctcacaggggatatttgccaatgtctgtaaacatttttgttctcacactag

SEQ ID NO: 34904 - DNA, 120 bp, synthetic construct; identical to SEQ ID NO: 9644
  source 1..120: mol_type = other DNA

SEQ ID NO: 34905 - DNA, 120 bp, synthetic construct
  source 1..120: mol_type = other DNA
ttaaggtgaaacgaggttatccaggtggggccctaaggccccttataaggactggtgtccttataagaagaggaagagacaccaggagagcaaatgcacagaggccctgtgaggacacag

SEQ ID NO: 34906 - DNA, 120 bp, synthetic construct
  source 1..120: mol_type = other DNA
ctgtggtatcttgttatggtggccctggctaactaatcaccctttctcacttacctttagctcttccttactcaataagtttccactgaaaactagatgctggtgtggtccccctgcccg

SEQ ID NO: 34907 - DNA, 120 bp, synthetic construct
  source 1..120: mol_type = other DNA
tggatcacatgggctgcggtggccggtggatcagggaggagaggcgcggggagcttgctgcaactcctcaccagggcaggagggaagatgccccccacctcctctagttcaccctctgga

SEQ ID NO: 34908 - DNA, 120 bp, synthetic construct; identical to SEQ ID NO: 9645
  source 1..120: mol_type = other DNA

SEQ ID NO: 34909 - DNA, 120 bp, synthetic construct
  source 1..120: mol_type = other DNA
cactatcatgggccaccttgaggctctgctctccacattccatcacagggctcctaggctaccccaggtatggctccaacagatcctggtttagtgagtgctgtgctctgaaaagctgtg

SEQ ID NO: 34910 - DNA, 120 bp, synthetic construct
  source 1..120: mol_type = other DNA
ggccaccatggagagattgcactgcgcaatgcccagtgaagcagtagggtaaggccacccctgaggccctagaccaattgaaccactggtatacaatttcagcctgggagagcctcgggc

SEQ ID NO: 34911 - DNA, 120 bp, synthetic construct
  source 1..120: mol_type = other DNA
agattattctggaaacttgacttgctcaggacctggtacacttttcttctctcccatttcttccttttggaataagaatttctatcctatgcctgtcccatcattatattttggaagcaa

SEQ ID NO: 34912 - DNA, 120 bp, synthetic construct; identical to SEQ ID NO: 9646
  source 1..120: mol_type = other DNA

SEQ ID NO: 34913 - DNA, 120 bp, synthetic construct
  source 1..120: mol_type = other DNA
cttctttttttaaggctgaataatattccactgcatatacatatatatatatatacacaccacattttctttattcatttatctgtcaataaacttttcggttgtttacacccattgtct

SEQ ID NO: 34914 - DNA, 120 bp, synthetic construct
  source 1..120: mol_type = other DNA
aaactttttaggaaatctcatactgttttccatggtggctgcaccatttacattcctaccaacagtgcaccaggattccagttcttgacatcctcgctaacacttgttattttttttgtt

SEQ ID NO: 34915 - DNA, 120 bp, synthetic construct
  source 1..120: mol_type = other DNA
tgtatatattatttgaagaattatctgttcaagtcctttgcccatttttaaaccaggttatttgcttttttaattgacaaagaaaaatcatatatacctatcatgtacaacgtgatgttt

SEQ ID NO: 34916 - DNA, 120 bp, synthetic construct; identical to SEQ ID NO: 9647
  source 1..120: mol_type = other DNA

SEQ ID NO: 34917 - DNA, 120 bp, synthetic construct
  source 1..120: mol_type = other DNA
tccatttttgttgtgagtgacaggatcttactcttttttaaggctcaatagtatgccattgtgtgtatataccacattttcattatccatttatctgttgatacacacttaggttgtttc

SEQ ID NO: 34918 - DNA, 120 bp, synthetic construct
  source 1..120: mol_type = other DNA
gttctatttttaattttttaaggagcctccatactgttttccataatgactatataatttacattcccaccaacagtgtacaagggttcccttttctccacacccttgccagcacttgtt

SEQ ID NO: 34919 - DNA, 120 bp, synthetic construct
  source 1..120: mol_type = other DNA
atgtcaacttttgagaaatgtcttttcaaatcctttgctcattttaaaatcaggctgttttcttgctattgagttgtttggattcctataccccttatcaagcatatggtttgcaaatgt

SEQ ID NO: 34920 - DNA, 120 bp, synthetic construct; identical to SEQ ID NO: 9648
  source 1..120: mol_type = other DNA

SEQ ID NO: 34921 - DNA, 120 bp, synthetic construct
  source 1..120: mol_type = other DNA
ttgaaaatcaattgaccatgaatgtgtggatttgtttctgggctattttgtcaatgcatctgtttttatgtcagtaccatgttgttttgattactatggctttgtagtatattagtatat

SEQ ID NO: 34922 - DNA, 120 bp, synthetic construct
  source 1..120: mol_type = other DNA
aaatgtaaggaaattttgatagggattgcatcaaatctgcagatcactttgggtagtacagacattttaacaatattgattcttataatctataaacacaggatatctttccatttgttt

SEQ ID NO: 34923 - DNA, 120 bp, synthetic construct
  source 1..120: mol_type = other DNA
gttttattggtttcattttcagatagttctttgttagtgtgatgctactgatttttgtatgttgatttttgtatcctgcaactttacaagattcctttatttttttttcagtacaatctg

SEQ ID NO: 34924 - DNA, 120 bp, synthetic construct; identical to SEQ ID NO: 9649
  source 1..120: mol_type = other DNA

SEQ ID NO: 34925 - DNA, 120 bp, synthetic construct
  source 1..120: mol_type = other DNA
attttgtcaaatgctttttcagagtctattgagatattaatatggttagtattcttcattctgttaaagtggtatgtcacatttttagatttgagtatgttgaaacatcttgcatccttg

SEQ ID NO: 34926 - DNA, 120 bp, synthetic construct
  source 1..120: mol_type = other DNA
gaagctccttatatattctggatattaacttcttactgaaaagataatttgcaaatatcttatttcatattgtttttcactctgttgattgttttcattgatgtgcagaaatgtttaagt

SEQ ID NO: 34927 - DNA, 120 bp, synthetic construct
  source 1..120: mol_type = other DNA
tacttttagctcttacatttaggtcttttatccattttgagttaatttttgtatttgcatatggtgtcaggtaagaatccaacttcattattttccatgtggatatccagttttcccaac

SEQ ID NO: 34928 - DNA, 120 bp, synthetic construct; identical to SEQ ID NO: 9650
  source 1..120: mol_type = other DNA

SEQ ID NO: 34929 - DNA, 120 bp, synthetic construct
  source 1..120: mol_type = other DNA
ctcgattttattgagcacttagtggcaggattcagagtaaagacccccctgtaggacttacgtccttcagttatcctcagtttttaatgattcatgtttcatcttagctcctgtaactct

SEQ ID NO: 34930 - DNA, 120 bp, synthetic construct
  source 1..120: mol_type = other DNA
tccatatggtcgttcatttactgtacccatagtgtcccgtatttgcatgggactcaaatatatatgtcttgaatctagacaagggatattgtgttttaagaagttataacaatgaacaaa

SEQ ID NO: 34931 - DNA, 120 bp, synthetic construct
  source 1..120: mol_type = other DNA
agtggcccgatctcggcacactgcaagctccgcctcctgggttcacgccattttcctgcctcagcctctcgagtagctgggactataggcgcccgccaccgcgcccggctaattttttgt

SEQ ID NO: 34932 - DNA, 120 bp, synthetic construct
  source 1..120: mol_type = other DNA
taaatttaagacacaactataagatgggagtggctgaaaaagcagggacttcctaatgccctgaaatcatgtgataactttttatcttctctaagactgtctggcatggttttctcttct

SEQ ID NO: 34933 - DNA, 120 bp, synthetic construct; identical to SEQ ID NO: 9651
  source 1..120: mol_type = other DNA

SEQ ID NO: 34934 - DNA, 120 bp, synthetic construct
  source 1..120: mol_type = other DNA
gaataatgtctccatcattactttcttctcatagtcttttaattccttatacagaggctagtttcaactgcagaagtaacatggggtcctttgtctatcaaacactccccttgtaacatt

SEQ ID NO: 34935 - DNA, 120 bp, synthetic construct
  source 1..120: mol_type = other DNA
aggaagtgggaggatgggagttacagagaatttctgatgtagacaatgagcttcttttctttttcttaagggatttccacaatcctccactttgtggtattggggacagtggtaatgaca

SEQ ID NO: 34936 - DNA, 120 bp, synthetic construct
  source 1..120: mol_type = other DNA
tgatccaggccctgcttatcattattcacaaatttcagtgtctgaaataatccagaaggtggacaatcagacatccacagattaattgatgatttatacttattctccctctctccccac

SEQ ID NO: 34937 - DNA, 120 bp, synthetic construct; identical to SEQ ID NO: 9652
  source 1..120: mol_type = other DNA

SEQ ID NO: 34938 - DNA, 120 bp, synthetic construct
  source 1..120: mol_type = other DNA
ttaattctcattattctgacaacagactctagaatccagccatattctactgtttggagccagccagggactttccaagtattcacagtgaaacactggcttccatgcctgggtctcccc

SEQ ID NO: 34939 - DNA, 120 bp, synthetic construct
  source 1..120: mol_type = other DNA
ccttctcaggggcttagtctgccagaaactagtgacactgcctttcacccactttttattggatagagagaaatgttaccagaatttcccaggaaaagagcttctttgaagtctctacat

SEQ ID NO: 34940 - DNA, 120 bp, synthetic construct
  source 1..120: mol_type = other DNA
agaatttcccaggaaaagagcttctttgaagtctctacatgcattcagataaatcctttcccctgatattttccctccatccccctcctcacagccctgttcagaagcctgaacatgtca

SEQ ID NO: 34941 - DNA, 120 bp, synthetic construct
  source 1..120: mol_type = other DNA
aacacttcctattgctccaggtgccaaagcaggaatgaaaacctgtcccctctgttgaatactcttcttcttcactcctaaaactacacacctgatgttagtcgtcagccctcttcttat

SEQ ID NO: 34942 - DNA, 120 bp, synthetic construct; identical to SEQ ID NO: 9653
  source 1..120: mol_type = other DNA

SEQ ID NO: 34943 - DNA, 120 bp, synthetic construct
  source 1..120: mol_type = other DNA
tagccctacatctagtcttactgtttggagccttataaaaagatctcatgagcagccccctgggaatagcatgtctttgttctctgagaggcaatgatttttatctggaccccacataac

SEQ ID NO: 34944 - DNA, 120 bp, synthetic construct
  source 1..120: mol_type = other DNA
ggtatggagggagacagattgatgattctgtgtatttgggtaaaccaggttcctggctaaaatcacttagtcaaaaatgccaagcatggtcaagggagaagggttagagagtctaaaaga

SEQ ID NO: 34945 - DNA, 120 bp, synthetic construct
  source 1..120: mol_type = other DNA
taactataactacctattgcctcatcttagaataaggataaataatatctatgttgaaacactgctgtgagcattagtgctcaataactattactactgtactaatgcaggttcttgatt

SEQ ID NO: 34946 - DNA, 120 bp, synthetic construct
  source 1..120: mol_type = other DNA
tgacaaaggcaggagttcttcatagttgatattgtatctccgtgcattgaatcaggagacacatgatgttgatttgttctgttatcagtgatgctaattttgactacttgattttagtgg

SEQ ID NO: 34947 - DNA, 120 bp, synthetic construct; identical to SEQ ID NO: 9654
  source 1..120: mol_type = other DNA

SEQ ID NO: 34948 - DNA, 120 bp, synthetic construct
  source 1..120: mol_type = other DNA
tcctttattcccccgtcttttggaatcgcttgtgtaaggttagcaaatgccttcactgaatatttagaagaattcacccaataagatcatctttgcctacagatttctttgtggaaagtt

SEQ ID NO: 34949 - DNA, 120 bp, synthetic construct
  source 1..120: mol_type = other DNA
aaatttgtcagcataaagttatttataatattttctattgtaattttaatgtctacaggacccataatgacagtacctttttcattcctgatattggaatttcatgccttctgtcttgtt

SEQ ID NO: 34950 - DNA, 120 bp, synthetic construct
  source 1..120: mol_type = other DNA
ttcttttatgtatataattcccttacttttacttttcttgggttaaatttgacattctttttctaagtatatgattgattttcagtatttctttctttccaattaattatatgcacttaa

SEQ ID NO: 34951 - DNA, 120 bp, synthetic construct; identical to SEQ ID NO: 9655
  source 1..120: mol_type = other DNA

SEQ ID NO: 34952 - DNA, 120 bp, synthetic construct
  source 1..120: mol_type = other DNA
gctcaagcaatcctcttgccttagcctcccaaagtactgggattacaggcatgagccaccacacccaactgatattttcaattttttattgtcagggatctgataataattagatttaat

SEQ ID NO: 34953 - DNA, 120 bp, synthetic construct
  source 1..120: mol_type = other DNA
aagaacattataaaagataaaatactttgaaatattgtattctttttcattgttttagtagttatgtttttcgagaaatttgtcttttttttttttgacaggttgctatgttgcccaggc

SEQ ID NO: 34954 - DNA, 120 bp, synthetic construct; identical to SEQ ID NO: 3913
  source 1..120: mol_type = other DNA

SEQ ID NO: 34955 - DNA, 120 bp, synthetic construct; identical to SEQ ID NO: 9656
  source 1..120: mol_type = other DNA

SEQ ID NO: 34956 - DNA, 120 bp, synthetic construct
  source 1..120: mol_type = other DNA
cacactgcaacctccccatcccgggttcaaacgattctcctgtctcagcctcccgagtggctggggttataggtgcctgccaccacgccaggctaatttttgtatgtttagtagagatgg

SEQ ID NO: 34957 - DNA, 120 bp, synthetic construct
  source 1..120: mol_type = other DNA
attacagagtgagccaccgcacccggcctcttttctaatttcttaaagtggaaggttgttactgatttgcaatttttcttcttttttaatgtaggtatttacagctataactttctcttt

SEQ ID NO: 34958 - DNA, 120 bp, synthetic construct
  source 1..120: mol_type = other DNA
cagctttcttttggttgctctttacatggtgtatcttttcctgccttgtactttcaacctctttgtaactttgtatctaaggtttgtctccagcagagaatatatagttgcatcattttt

SEQ ID NO: 34959 - DNA, 120 bp, synthetic construct
  source 1..120: mol_type = other DNA
gtctgccatttcattgtttattttctatttttcttatatcttttttgttcctctattcctctattactgctttttgttgtgttaaatagacattttctatgtatcattttaattcactta

SEQ ID NO: 34960 - DNA, 120 bp, synthetic construct; identical to SEQ ID NO: 9657
  source 1..120: mol_type = other DNA

SEQ ID NO: 34961 - DNA, 120 bp, synthetic construct
  source 1..120: mol_type = other DNA
tttggtgtctttatttccttacatggatttgactatattacactatattctagtgtcctttcacttcagcctgaaagtattttagtacagctgtcttgctaatgatgaaatctctgtttc

SEQ ID NO: 34962 - DNA, 120 bp, synthetic construct
  source 1..120: mol_type = other DNA
ctcttccttcctttctttctctctctctctctttctttttatcttcctctgtctctcttttttatgtttttacttttttcttttaaatagggatggagtgttgaactcctacactcaagc

SEQ ID NO: 34963 - DNA, 120 bp, synthetic construct
  source 1..120: mol_type = other DNA
aagatcatctgtcaatcttcttgcttgaatgtgataagtcatttctctcttaatggtttcaagatatctttgtcttcaactttcaacagattgattacaatgtgtgtaggtgtggatctc

SEQ ID NO: 34964 - DNA, 120 bp, synthetic construct; identical to SEQ ID NO: 9658
  source 1..120: mol_type = other DNA

SEQ ID NO: 34965 - DNA, 120 bp, synthetic construct
  source 1..120: mol_type = other DNA
tggttcttttcttatataattcctgttgctgtagtctctattgggtggtgagacatcattcatatgcttgcctttagtaaacatgatttccttccattctttgaatatattttaaatgct

SEQ ID NO: 34966 - DNA, 120 bp, synthetic construct
  source 1..120: mol_type = other DNA
tttgttgaaaactagatattttgtgtaatataatgtggcaacccagataatgagattcttccctcgctttcccttctagggtttgctttcattgtttgttgttgttttattttgtgactt

SEQ ID NO: 34967 - DNA, 120 bp, synthetic construct
  source 1..120: mol_type = other DNA
atatctcctagtctttcctggggagctttttctttgttttgtgttcctataagagaatacctgagatgaagtaatttataaagaaaagaggtttattttactcatggttctgcaggctgg

SEQ ID NO: 34968 - DNA, 120 bp, synthetic construct; identical to SEQ ID NO: 9659
  source 1..120: mol_type = other DNA

SEQ ID NO: 34969 - DNA, 120 bp, synthetic construct
  source 1..120: mol_type = other DNA
tccactttaccctttatttcctccttgtacagagcaccaaggccagtccaagaagaaagcttacaatcttctcaggtctttcctaagtatgcaccccatcctacatatgtacatggcctt

SEQ ID NO: 34970 - DNA, 120 bp, synthetic construct
  source 1..120: mol_type = other DNA
ggcaattcggttgcctttaattgtttccaataaatattttcatggaaaaggatttttgcaccgggcaagttcccaatcaggtcaaatgagaactactttgcaaattgggtattccaggaa

SEQ ID NO: 34971 - DNA, 120 bp, synthetic construct
  source 1..120: mol_type = other DNA
gctgctgattttcaccatgattacagcttgttggttctcaagtctactgcagaacccgagaggacagaatgggaattgtacaagttaaaatgtcacaaaactgttcttattgagattgca

SEQ ID NO: 34972 - DNA, 120 bp, synthetic construct; identical to SEQ ID NO: 9660
  source 1..120: mol_type = other DNA

SEQ ID NO: 34973 - DNA, 120 bp, synthetic construct
  source 1..120: mol_type = other DNA
gatgcacttttcttccagaaggaattagccctatcctctgttaggcatatagagtagaaaatgatccttattttaatctggaatggatctgacttgaagcagagtttaagctttttctgg

SEQ ID NO: 34974 - DNA, 120 bp, synthetic construct
  source 1..120: mol_type = other DNA
cctaaaaataagataatctttaggagtaaagcaactggagaatgttggctcctctcttgttatcttcttttcatgatcttgtcttctcaagctgtcatcaccttgagagttttatgattc

SEQ ID NO: 34975 - DNA, 120 bp, synthetic construct
  source 1..120: mol_type = other DNA
tattcaagcaatcctcctgcctcagattcccaagtagctaggactataggcatgggccaccatgcccagttgattttttatttttatagagtctgggtcttgctatgttgcccaagctgg

SEQ ID NO: 34976 - DNA, 120 bp, synthetic construct; identical to SEQ ID NO: 9661
  source 1..120: mol_type = other DNA

SEQ ID NO: 34977 - DNA, 120 bp, synthetic construct
  source 1..120: mol_type = other DNA
gttatgactaccataatctaccactttgaccagcaaaccatagtcactccttgttgggagaatacaatggatcaaacatacattatgtctgggactagaagaaaaataattttattcctc

SEQ ID NO: 34978 - DNA, 120 bp, synthetic construct
  source 1..120: mol_type = other DNA
tcaatgtcagtatttcaagtaataccagcaagaaattaataataacctgtatagatgtgcttgggcagattcatttgaggctggggagagagaatagccaagtacatcaagtacatggtc

SEQ ID NO: 34979 - DNA, 120 bp, synthetic construct
  source 1..120: mol_type = other DNA
tgatgccttttatttactacttctctgcctctcactgggtagagaggaggtaaacaatatcaaatgttggcaagtaacaatatcttattatggctttacattgaagaatcaaggcctata

SEQ ID NO: 34980 - DNA, 120 bp, synthetic construct; identical to SEQ ID NO: 9662
  source 1..120: mol_type = other DNA

SEQ ID NO: 34981 - DNA, 120 bp, synthetic construct
  source 1..120: mol_type = other DNA
agaaggggtcccgaatattaagtctttttagattaaaggtaagtcagcctctgtataaggacaatttcattcctatacttgctcttattttctttcctttttctctggatttggctctct

SEQ ID NO: 34982 - DNA, 120 bp, synthetic construct
  source 1..120: mol_type = other DNA
aatgtaagttctgaagatttggaatgtataagtgaaaatgtcattatgctttgtttctgtaaaataaaaactaaactacatgtttgggttgggggctttggtttttgtttttagttctaa

SEQ ID NO: 34983 - DNA, 120 bp, synthetic construct
  source 1..120: mol_type = other DNA
ttttatgcattgagtacatttcaagtcctctcttctagtttttttgaaaaatactacacattgttgttaactatagtcaccctactctgctatcaaacactggaatttattctttatatt

SEQ ID NO: 34984 - DNA, 120 bp, synthetic construct; identical to SEQ ID NO: 9663
  source 1..120: mol_type = other DNA

SEQ ID NO: 34985 - DNA, 120 bp, synthetic construct
  source 1..120: mol_type = other DNA
tacattactttcttttccatttggataaatactaattagtgagattgcttgattgtgtagtagttctatttttagttttttgagaaatctccatattattttccatagtggctgtactta

SEQ ID NO: 34986 - DNA, 120 bp, synthetic construct
  source 1..120: mol_type = other DNA
ggggtaaaatgatatctcattgtggttgtttgttttgcttttgtagtgatgggatctcactactttgcttaggctggtctcaaactcctggctcaagcgatcctcccaccttggcctctg

SEQ ID NO: 34987 - DNA, 120 bp, synthetic construct
  source 1..120: mol_type = other DNA
gtcttcttttctttctcttgctctctctcatttttcttttctcaatgaagagaacaaatgcctgtcttcttttgggaaatgtctgttcatgttctttgctcattttaaaaatggggttat

SEQ ID NO: 34988 - DNA, 120 bp, synthetic construct; identical to SEQ ID NO: 9664
  source 1..120: mol_type = other DNA

SEQ ID NO: 34989 - DNA, 120 bp, synthetic construct
  source 1..120: mol_type = other DNA
tggatattcatcccctgttggatgagtagcttgcatatattttctcccatttaagaggttttctcttcaccctgtagattgtttcttttgctgtgcagaagctttttagtttaatatagt

SEQ ID NO: 34990 - DNA, 120 bp, synthetic construct
  source 1..120: mol_type = other DNA
caggtattacatttaagtctttaatctatcttgagttgatttttgtatatggtgagaagtaggggtccagtttcattcttctgcatatggttatccagtgttcccagcaccatttataga

SEQ ID NO: 34991 - DNA, 120 bp, synthetic construct
  source 1..120: mol_type = other DNA
atttctataggttattgggaaacaggtggtgtttggttacatgagtgagttctttagtgaagatttttgagactttggtgcacccatcacccaagcagtatacactgcaaccaatttgta

SEQ ID NO: 34992 - DNA, 120 bp, synthetic construct; identical to SEQ ID NO: 9665
  source 1..120: mol_type = other DNA

SEQ ID NO: 34993 - DNA, 120 bp, synthetic construct
  source 1..120: mol_type = other DNA
tatatattccatcatatatatatatatattccatcatatatatatattccatcatatatatatatattccatcatatatatatatattccatcatatatatatatatatatattccatca

SEQ ID NO: 34994 - DNA, 120 bp, synthetic construct
  source 1..120: mol_type = other DNA
tcgtgctgctataaatatgtgtatgcaagtatcttttttgtataatgacttcttttcctctgggtagatacccagtagtgggattgctggatcaaatggtagttctacttttaggactct

SEQ ID NO: 34995 - DNA, 120 bp, synthetic construct
  source 1..120: mol_type = other DNA
attaaggccattctttcaggagtgaaatggtattgcattgtggttttgatttgcattttcctgattattagtgatgctgagcaatttttcttatgtttgttggccatttgtatgtctttt

SEQ ID NO: 34996 - DNA, 120 bp, synthetic construct
  source 1..120: mol_type = other DNA
ttgtgaagattttctcccactctgtgggttatctgtttactctgctgactgttccttttgccgtgcaaaagctctttagtttaattaaggtctcagctatttatctttgttcttattgca

SEQ ID NO: 34997 - DNA, 120 bp, synthetic construct; identical to SEQ ID NO: 9666
  source 1..120: mol_type = other DNA

SEQ ID NO: 34998 - DNA, 120 bp, synthetic construct
  source 1..120: mol_type = other DNA
atggccttatattatattttgaaatcaggtaatgtgatgcctccagatctgttctttttggttagtcttgctttggctatgtgggctcttttttggttccatatgaaatttagaattgtt

SEQ ID NO: 34999 - DNA, 120 bp, synthetic construct
  source 1..120: mol_type = other DNA
tgtgtttccatttgtttgtgtcatctatgatttctttcagcagtgttttgtagtattcctggtagagatttttagcctccttggttaagtatattccaagcattttttaaatttattttc

SEQ ID NO: 35000 - DNA, 120 bp, synthetic construct; identical to SEQ ID NO: 9667
  source 1..120: mol_type = other DNA

SEQ ID NO: 35001 - DNA, 120 bp, synthetic construct
  source 1..120: mol_type = other DNA
ttagggtacatgtgcacaatgtgcaggttagttacatatgtatacatgtgccatgctggtgtgctgtacccattaacttgtcatttagcattaggtatatctcctaatgctaaccctccc

SEQ ID NO: 35002 - DNA, 120 bp, synthetic construct
  source 1..120: mol_type = other DNA
gcgatagtttactgagaatgatgatttccaatttcatccatgtccctacaaaggacatgaactcatcattttttatggctgcatagtattccatggtgtatatgtgccacattttcttaa

SEQ ID NO: 35003 - DNA, 120 bp, synthetic construct
  source 1..120: mol_type = other DNA
atatacccagtaatgggatggctgggtcaaatggtatttctagttctagatccctgaggaattgccacactgacttccacaatggttgaactagtttacagtcccaccaacagtgtaaaa

SEQ ID NO: 35004 - DNA, 120 bp, synthetic construct; identical to SEQ ID NO: 9668
  source 1..120: mol_type = other DNA

SEQ ID NO: 35005 - DNA, 120 bp, synthetic construct
  source 1..120: mol_type = other DNA
tcaaatgttttttctgtgtcttttgagttgatgatgtgatttttgtatttaactgtgtttatgtgatgtatcacatttattgacttgcatatgttaaaccatccctgcatccctggtatg

SEQ ID NO: 35006 - DNA, 120 bp, synthetic construct
  source 1..120: mol_type = other DNA
ttttctgcctattcccagttttagtgttagggtgatactggcttcatagaatgaattagggaaaattctctctttctctatctttttgaatagtttcagtaagattgataccaattcttc

SEQ ID NO: 35007 - DNA, 120 bp, synthetic construct
  source 1..120: mol_type = other DNA
ttcttcctgatttaatctaggagggttgtatatttccaagaatttgcccatctcctctagactttctagtttgtctgcataaaggtgttcatagtagccttcaatgatcttttgtatttc

SEQ ID NO: 35008 - DNA, 120 bp, synthetic construct; identical to SEQ ID NO: 9669
  source 1..120: mol_type = other DNA

SEQ ID NO: 35009 - DNA, 120 bp, synthetic construct
  source 1..120: mol_type = other DNA
gcaccacttttgctgtctcccagagtttttgtttttgttttgttttgtttttttgagagtttcgctcttgttgcccaggctggagtacagtggcacaatcttggctcactgcaaccacca

SEQ ID NO: 35010 - DNA, 120 bp, synthetic construct
  source 1..120: mol_type = other DNA
ccaggctggtctcgaactcccgacctcaggtaatccacccacctcggcctcccaaagtgccaggattacaggtgtgagccaccgtgcccggccttcctagagtttctgataaattgtgtc

SEQ ID NO: 35011 - DNA, 120 bp, synthetic construct
  source 1..120: mol_type = other DNA
tttggattcaatttccagttttattccactgtagtctgagagggtacatcatataattttgattttcttaaacttattgagacttgttttgtggcctaccataacgtctgtcttggagga

SEQ ID NO: 35012 - DNA, 120 bp, synthetic construct; identical to SEQ ID NO: 9670
  source 1..120: mol_type = other DNA

SEQ ID NO: 35013 - DNA, 120 bp, synthetic construct
  source 1..120: mol_type = other DNA
atgtggaactgtaagtccaattaaacctttatcttttgtaaattgcccagtctcagttatgtctttatcggcagtgtgaaaacagaataatacagtaaattggtaccggtagagtggggc

SEQ ID NO: 35014 - DNA, 120 bp, synthetic construct
  source 1..120: mol_type = other DNA
tagagacttgttgaataatgatatggacaatgaaatccaggctgagatggtttcagatggagatgaggaacttgttgggaactgaagcaaaggtgactcttgttatgttttagcaaagac

SEQ ID NO: 35015 - DNA, 120 bp, synthetic construct
  source 1..120: mol_type = other DNA
gctgttaaaagcattcagttttaaaagggaaacagcataaaagtttgaaaaatttgcagcctgacaatgcgatagaaaataaaatcccattttctgaggagaaattcaagccagctgcag

SEQ ID NO: 35016 - DNA, 120 bp, synthetic construct; identical to SEQ ID NO: 9671
  source 1..120: mol_type = other DNA

SEQ ID NO: 35017 - DNA, 120 bp, synthetic construct
  source 1..120: mol_type = other DNA
atccaagttggaggggcaatgtataatgcctcccatccaccatgattctgtcccctattctgttgtattctattggtctatgtgtctgttttttataccagtactctactcttttggtta

SEQ ID NO: 35018 - DNA, 120 bp, synthetic construct
  source 1..120: mol_type = other DNA
ttttttatatttttgtggaaagtgacattggtatcttgatagggatcacattaaatctgtagattgctttgggccatatggtcattttaatgatattaattcttctgatccattagcatg

SEQ ID NO: 35019 - DNA, 120 bp, synthetic construct
  source 1..120: mol_type = other DNA
tgtagctatcataaatggaattctcttcttcatttctttttcagctatttcattgttggtgaatagaaatgctacttatttctgcatattaattttgtatcctgccaagtctactgaatt

SEQ ID NO: 35020 - DNA, 120 bp, synthetic construct; identical to SEQ ID NO: 9672
  source 1..120: mol_type = other DNA

SEQ ID NO: 35021 - DNA, 120 bp, synthetic construct
  source 1..120: mol_type = other DNA
gcatttattgagatagtcatatggattttggccttcatcatgttgatgtgatgtatcacattcattgatttgtgtatgttgaaatatccttgcatccttgctgtaaatcctacttgatca

SEQ ID NO: 35022 - DNA, 120 bp, synthetic construct
  source 1..120: mol_type = other DNA
gatattcacctgtagttttctttcttggagcatccttgtctgggtttgccattagggtaatgctagcctcacagaatgagtttgggagaattccctcttcttcaactttttggaccagtt

SEQ ID NO: 35023 - DNA, 120 bp, synthetic construct
  source 1..120: mol_type = other DNA
ttagtctgtccagattttctttcttcctgattcaatcttggtaagttgtatgtttccagaaatttatccatttcctcttgtttctccagtttgttaccatatatttgttcataatggttt

SEQ ID NO: 35024 - DNA, 120 bp, synthetic construct; identical to SEQ ID NO: 9673
  source 1..120: mol_type = other DNA

SEQ ID NO: 35025 - DNA, 120 bp, synthetic construct
  source 1..120: mol_type = other DNA
gtcggcaaacaggtcaattgccctctagtggtgtgaacaaatgcgagctttgctggttgatcagggccatagatgcaactctttacagcaccttccttggtgtctgtgtgtggcctggac

SEQ ID NO: 35026 - DNA, 120 bp, synthetic construct
  source 1..120: mol_type = other DNA
gagattgatgaaccccctgaaaatgaaggtgaaaaaggaactgcgcagtcagtgagtaatcagtaagtcattggtacttgcttgggatttccaagttcggggcgggggattgttcaggct

SEQ ID NO: 35027 - DNA, 120 bp, synthetic construct
  source 1..120: mol_type = other DNA
aaactgttgtatcccataacccatggttcccccaagaaggcatgctagacctagagctctgggaacgagtgggaaaaaatcttaagcaacatcatgttcaagggtaacgggtcccagtat

SEQ ID NO: 35028 - DNA, 120 bp, synthetic construct; identical to SEQ ID NO: 9674
  source 1..120: mol_type = other DNA

SEQ ID NO: 35029 - DNA, 120 bp, synthetic construct
  source 1..120: mol_type = other DNA
gagctgctagcccatttatgaaaggaatgattgaggccttggcagaccacttttctatgaccccatgggactgggcaatgctaactaaaacaactttggagcctagccaatacctcctct

SEQ ID NO: 35030 - DNA, 120 bp, synthetic construct
  source 1..120: mol_type = other DNA
attttgattccccaggcctaaaatcaagtgtctttgtgtgctctcagggcttgggactgaattcctgaaagtggagtttagcagggatcttttataaatgttcaacaagggcctcaggag

SEQ ID NO: 35031 - DNA, 120 bp, synthetic construct
  source 1..120: mol_type = other DNA
gttgcaattggcttttgaaaactctcatgtggatcaccagcaggcaatgcaggcaatcagaggaaaggcagccacagtcggggaacttatatgagcatgtcagctggtgggaactgagac

SEQ ID NO: 35032 - DNA, 120 bp, synthetic construct; identical to SEQ ID NO: 9675
  source 1..120: mol_type = other DNA

SEQ ID NO: 35033 - DNA, 120 bp, synthetic construct
  source 1..120: mol_type = other DNA
gtgcaggactggacttactctgccccaacaaatcagtgctgaaagaaggagaagaccctaaaagggctgcatacgggatctggggccagctgcctccagaagcagtgggattagtcctag

SEQ ID NO: 35034 - DNA, 120 bp, synthetic construct
  source 1..120: mol_type = other DNA
caaagatagctcagttactgattttgccatactgggtccccagtgcccacggaaaggaaaggggaaaggaagttttgggagcacaggagccacaggagtatatgggaatcaattaatcac

SEQ ID NO: 35035 - DNA, 120 bp, synthetic construct
  source 1..120: mol_type = other DNA
tcattagtgatcaaaactggctagaaatttggccttgggtcactcagaaataaaaaattgtctgcatcagggaagcacacagagccaagcagagcatgcactccctaacctgttgcaatt

SEQ ID NO: 35036 - DNA, 120 bp, synthetic construct; identical to SEQ ID NO: 9676
  source 1..120: mol_type = other DNA

SEQ ID NO: 35037 - DNA, 120 bp, synthetic construct
  source 1..120: mol_type = other DNA
cctatgggaccccttcaacagggcctcccatcccctgtggcgattcctcgagattggcctataatcattattgacttaaaggactgcttttatatgattcccctagcagaacaggacaga

SEQ ID NO: 35038 - DNA, 120 bp, synthetic construct
  source 1..120: mol_type = other DNA
caagctttgctcccagtagaaaagaatttcctaattgcaagattatttgttttatgaatattttaccagcaaccccaacagagccaatacttttaaatttatatacctctgtcataaaga

SEQ ID NO: 35039 - DNA, 120 bp, synthetic construct
  source 1..120: mol_type = other DNA
actagcaacttacattccttaaatgattatcagaaattactaggtgatatcaactggctctgccccactttaggcattcctacttataagctgcaaaacctgttttctatcttaaagggc

SEQ ID NO: 35040 - DNA, 120 bp, synthetic construct; identical to SEQ ID NO: 9677
  source 1..120: mol_type = other DNA

SEQ ID NO: 35041 - DNA, 120 bp, synthetic construct
  source 1..120: mol_type = other DNA
cagttttgtccctattgttagatctgcaaatagctctctctgattacacaggacaaatagagcatgttcttcctgctgataaattccttcatttcttatctcatactcctgtgatcttgc

SEQ ID NO: 35042 - DNA, 120 bp, synthetic construct
  source 1..120: mol_type = other DNA
ttactagcattcagagaggtgagatcggggccctgatattggccttggaaactttttctactcagccatcaatatagttagtgattctgcctactttatttatttatcgcaaaatcttga

SEQ ID NO: 35043 - DNA, 120 bp, synthetic construct
  source 1..120: mol_type = other DNA
tctgcctggcccattggcttatggcaatgatcaagcagaccttcaggtgatgacatcactgcttgatcaagccacccaatcgcatcaatttttccaccaaaattggagaaacttatctaa

SEQ ID NO: 35044 - DNA, 120 bp, synthetic construct; identical to SEQ ID NO: 9678
  source 1..120: mol_type = other DNA

SEQ ID NO: 35045 - DNA, 120 bp, synthetic construct
  source 1..120: mol_type = other DNA
ccagctcacaatttcaacaattttgtcacacgtggaatatccaacgttccataggcatcccgtataacccccaaggacaggccatagtagaacgtgcccactccagccttaaaaatacgc

SEQ ID NO: 35046 - DNA, 120 bp, synthetic construct
  source 1..120: mol_type = other DNA
ttttgctaaaacctctcaagacataaaacctgcagttttatggaaagatgtaagcagtaatgtatggtgtggtccaaatgaattgttaacttggagaagagggtatgcttgtgtccacac

SEQ ID NO: 35047 - DNA, 120 bp, synthetic construct
  source 1..120: mol_type = other DNA
atgaaggaactaaccctgcaggacccacggtcccggatgatgcagcttccgtggatgacacaaaccctagacattactggggaatgctgaagaggacaactcgggaggctgaatgaaccc

SEQ ID NO: 35048 - DNA, 120 bp, synthetic construct; identical to SEQ ID NO: 9679
  source 1..120: mol_type = other DNA

SEQ ID NO: 35049 - DNA, 120 bp, synthetic construct
  source 1..120: mol_type = other DNA
acctgcccaaacacaattatggctacatcatggcaaaagaaatgcctttaaagtcttagctgcaggtagcttcaaatcaggtaatgcaatcaatgactctttcccaaacattccttcctg

SEQ ID NO: 35050 - DNA, 120 bp, synthetic construct
  source 1..120: mol_type = other DNA
ccattttcagggcatccttactgatgtcctcatccatcatggtgtcaatcacagtttcgtagcctcatcacgttcccctatgatttgggccaataggggggatgggttatcccatacccc

SEQ ID NO: 35051 - DNA, 120 bp, synthetic construct
  source 1..120: mol_type = other DNA
atcacactgatcagtgcctaatttacactacccatacatatattttccttatgggaactgatatttccattacaccccaaaactcctcatttgtgacccaggtgcagaaacaggcttggt

SEQ ID NO: 35052 - DNA, 120 bp, synthetic construct; identical to SEQ ID NO: 9680
  source 1..120: mol_type = other DNA

SEQ ID NO: 35053 - DNA, 120 bp, synthetic construct
  source 1..120: mol_type = other DNA
gcagggtatagagcaaaagattcttgcacgtctgcaagcccttgaggcccttgaggctgccctggaatatatgggggagtaacaagatgcactggtattctaacagcaactaaactgcga

SEQ ID NO: 35054 - DNA, 120 bp, synthetic construct
  source 1..120: mol_type = other DNA
tctggggaacatttcatgacaatttaatagcagatgtaaagcaacttcaaactaaaattttagaatcccttcccactatagatctacacacccaacaaacagccatatggaagggtgtgc

SEQ ID NO: 35055 - DNA, 120 bp, synthetic construct
  source 1..120: mol_type = other DNA
attgtcttatgttatttgctaattctaggatgcaaagccggaatgaaagcgatgactgccttgcctgacagacgtgttgctgcacacatctgtacacttcagtcaacagaagagcgtgtg

SEQ ID NO: 35056 - DNA, 120 bp, synthetic construct; identical to SEQ ID NO: 9681
  source 1..120: mol_type = other DNA

SEQ ID NO: 35057 - DNA, 120 bp, synthetic construct
  source 1..120: mol_type = other DNA
gtaactagaagaaaagtaaagactccggactccagcaccaagcaggttttccttagcaatttacaacctgaagctccaaggaaaaactattttagcatacaccaaaactattcccatgtg

SEQ ID NO: 35058 - DNA, 120 bp, synthetic construct
  source 1..120: mol_type = other DNA
ccttagttttaccttgcctgggtttgcccatttgttattcatatctatttatcaatcccaaaatactaaaaggatccaggcagggcagctttaattggtggctgcacagagtgctacttc

SEQ ID NO: 35059 - DNA, 120 bp, synthetic construct
  source 1..120: mol_type = other DNA
acactctgatacattttcccactatgaaaagaactgttctcttgatagcatgccatacctctcccttctctgcaactcactcaggacaatctcagtacctttattacctggtcacaagtg

SEQ ID NO: 35060 - DNA, 120 bp, synthetic construct
  source 1..120: mol_type = other DNA
tccaaaccttctccatcggcattttactctcactcttagagcttagcttcaaccatcaaacagacagttgagtgttcaacagtccctttatgggacagatttttttagttgactgtgtat

SEQ ID NO: 35061 - DNA, 120 bp, synthetic construct; identical to SEQ ID NO: 9682
  source 1..120: mol_type = other DNA

SEQ ID NO: 35062 - DNA, 120 bp, synthetic construct
  source 1..120: mol_type = other DNA
acgctgctaggagcagatcatcctactcaagacaataaaaaaggaatcatcatgtaccttacatatttagagatacgtgcgtacacttttctcataaataaagcaacacacccctgcctg

SEQ ID NO: 35063 - DNA, 120 bp, synthetic construct
  source 1..120: mol_type = other DNA
cttcaccaaaccaaacttgaccagattctttaatggctccaaaatcacaaccctttgaactattttactcctgttttccattttcctttatacctctgtccaggtggtacagatttttct

SEQ ID NO: 35064 - DNA, 120 bp, synthetic construct
  source 1..120: mol_type = other DNA
gtcccttgacaggtatatcaaactatttggtcttatccagttggtggtcaaccagatagttataagtgagatggagagacaggtcattctcttcccatagccctctcttccttaccctat

SEQ ID NO: 35065 - DNA, 120 bp, synthetic construct
  source 1..120: mol_type = other DNA
atacttaaggcataatcttcagccctttgctcatctctctacactcattctcctgcagatctcagtcaccctcatggcatcaatcatgatgccacagaaaaacccattagtgtatagtct

SEQ ID NO: 35066 - DNA, 120 bp, synthetic construct; identical to SEQ ID NO: 9683
  source 1..120: mol_type = other DNA

SEQ ID NO: 35067 - DNA, 120 bp, synthetic construct
  source 1..120: mol_type = other DNA
taaacaagtgaacaaaggtctctggttttcctaggcagaggaccctgcggccttccgcagtgtttgtgtccctgggtacttgagattagggagtggtgatgactcttaaggagcatgctg

SEQ ID NO: 35068 - DNA, 120 bp, synthetic construct
  source 1..120: mol_type = other DNA
atcccaaggcagaagaatttttcttagtacagaacaaaatgaaaagtctcccatgtctacctctttctacacagacacggcaaccatccgatttctcaatcttttccccacctttccccc

SEQ ID NO: 35069 - DNA, 120 bp, synthetic construct
  source 1..120: mol_type = other DNA
cgggcagaggcgcccctcacttcccggatggggtggctggccgggcggggggctgacccccccacctccctcccggacggggcggctggcggggcagggggctgaccccccacctccctc

SEQ ID NO: 35070 - DNA, 120 bp, synthetic construct
  source 1..120: mol_type = other DNA
ctccctcccggatggggcggctggccgggcgggggactgactcccccacctccctcccggatggggcggctggccgggcagaggggctcctcacttcccagtaggggcggccgggcagag

SEQ ID NO: 35071 - DNA, 120 bp, synthetic construct; identical to SEQ ID NO: 9684
  source 1..120: mol_type = other DNA

SEQ ID NO: 35072 - DNA, 120 bp, synthetic construct
  source 1..120: mol_type = other DNA
agacgctcctcactttccagactgggcagccaggcagaggggctcctcacatcccagacgatgggcggccaggcggagacgctcttcacttcccagacggggtggcggccgggcagaggc

SEQ ID NO: 35073 - DNA, 120 bp, synthetic construct
  source 1..120: mol_type = other DNA
tgtctgcaatcccggcacctcgggaggccgaggctggcggatcactctcggttaggagctggagaccagcccagccaatacagcgaatccccatctccaccaaaaaaatacgaaaaccag

SEQ ID NO: 35074 - DNA, 120 bp, synthetic construct
  source 1..120: mol_type = other DNA
cagagggagactgtggaaagagagggagagggagaccgtggggagagggagagggagagggagagggagaccgtggggagagggagagggagagacactattttttaaaatatggagaga

SEQ ID NO: 35075 - DNA, 120 bp, synthetic construct; identical to SEQ ID NO: 9685
  source 1..120: mol_type = other DNA

SEQ ID NO: 35076 - DNA, 120 bp, synthetic construct
  source 1..120: mol_type = other DNA
ttttgtatttttgcagtagggaacatttcttcactgaattccactttcacattagataatttaatagttttatggagaaagtaaaatgcccgcccccctcccccacccaaaattgaaaat

SEQ ID NO: 35077 - DNA, 120 bp, synthetic construct
  source 1..120: mol_type = other DNA
tgagcaaatgcctttttctgcatccatttacataattacataatttttctttgtattctgttaagatgtggaatcacattgattttttgcatgttaaacatgccttccattcctggcata

SEQ ID NO: 35078 - DNA, 120 bp, synthetic construct
  source 1..120: mol_type = other DNA
atggctatgtttgtgtgtctttagtttccttttcttttaatgtcattgtttgatgttagtatattggacttgtaaattattgggatgtgttttcttctgctcttttgttgaaagagtttg

SEQ ID NO: 35079 - DNA, 120 bp, synthetic construct
  source 1..120: mol_type = other DNA
gacagaatactatggattaatcaatgaagccatctgacctggaaaccatttggccttctctgtgagaaggatttttaaaattacaaacttaatttcttccattgacagagatttcttctt

SEQ ID NO: 35080 - DNA, 120 bp, synthetic construct; identical to SEQ ID NO: 9686
  source 1..120: mol_type = other DNA

SEQ ID NO: 35081 - DNA, 120 bp, synthetic construct
  source 1..120: mol_type = other DNA
tgagactcagctatttattacaacactcttaagttaggctgtagtttgtttgcataacgcagttatgttaagttgggttagtttgctatgtaggaatttaagatatggagaaagctttac

SEQ ID NO: 35082 - DNA, 120 bp, synthetic construct
  source 1..120: mol_type = other DNA
cccacttccatttctgatattggggatttgagtcttatctctttttcttgatccatctacctagagattcatgaatgtattgagccttattgaaaaccagcaattgactttgtttatttt

SEQ ID NO: 35083 - DNA, 120 bp, synthetic construct
  source 1..120: mol_type = other DNA
cttaagatgggaacatagatggttgattttagagtttccctcctttccaattatgtaaagttataaattattctctaattagtgtatcatactaattttgatagtgtgctttcatattca

SEQ ID NO: 35084 - DNA, 120 bp, synthetic construct
  source 1..120: mol_type = other DNA
taggtatttgggactttcaaggtatttttctgttattggtttctaatttaatgctattgtggtccgagaatgtattctgtatgatttcaatagagacatttatttatttagacatttatt

SEQ ID NO: 35085 - DNA, 120 bp, synthetic construct; identical to SEQ ID NO: 9687
  source 1..120: mol_type = other DNA

SEQ ID NO: 35086 - DNA, 120 bp, synthetic construct
  source 1..120: mol_type = other DNA
aataaaatgatccttttatcattatgaactatccttctttctccttggtaatatttctgagtcttatatttctgatattaacacagccaccaatacttccatggttggcattattttcgt

SEQ ID NO: 35087 - DNA, 120 bp, synthetic construct
  source 1..120: mol_type = other DNA
atgcatacattcggtatgtgtcctaatgctctccctccccttgctccccatgccctgacagaccctggtgtgaggtgttcccctccctgtgtccatgtgttctaattgttgaactcccac

SEQ ID NO: 35088 - DNA, 120 bp, synthetic construct
  source 1..120: mol_type = other DNA
tagcattccacggtatacatgtattttcccattcttttactttttacctgtctttgccttcatatttaaagagggcattatgtagagagcatgaagttggcctgtagatttttttgtgca

SEQ ID NO: 35089 - DNA, 120 bp, synthetic construct; identical to SEQ ID NO: 9688
  source 1..120: mol_type = other DNA

SEQ ID NO: 35090 - DNA, 120 bp, synthetic construct
  source 1..120: mol_type = other DNA
tcccttctattctttgtgccattgtcatcatattttacttctgggtatgttataaacccccaaataatttttactttaaacaattccttttttaacttaaaaaaaactagagaacatgtt

SEQ ID NO: 35091 - DNA, 120 bp, synthetic construct
  source 1..120: mol_type = other DNA
ctcaaacctttgaaagctctggtaatcatgatttaagttctcccacatggagtgactatggctggtaaaaattgcaatgaattagggcattttaaaaattttatttcttggctcttagtt

SEQ ID NO: 35092 - DNA, 120 bp, synthetic construct
  source 1..120: mol_type = other DNA
gaatcctaatctgcctgaaatcttgatccagacagaccaaatctcttccctcagagacttcaaacactgcagtcttcaaactacatccaagaaaatcttcatccaagtaaaatttccccc

SEQ ID NO: 35093 - DNA, 120 bp, synthetic construct; identical to SEQ ID NO: 9689
  source 1..120: mol_type = other DNA

SEQ ID NO: 35094 - DNA, 120 bp, synthetic construct
  source 1..120: mol_type = other DNA
tagtgctaccaaagtgtcattaatttctatttgttggaaactttactaaggaatgactgctttgaggtaatggataaggacagagcttgaagggtcagcaattcagtcagccactggagt

SEQ ID NO: 35095 - DNA, 120 bp, synthetic construct
  source 1..120: mol_type = other DNA
ctgttcagatattttgtcacctgcagcaacacacacagttattgtcattcctgggttcagtactgtaagcccggacccatcttccccactccctttgcacccgagcttcccatttctctg

SEQ ID NO: 35096 - DNA, 120 bp, synthetic construct
  source 1..120: mol_type = other DNA
ctgactgtgaggccatcccacatgcttcatgtctccaaaatatacagacaaggggaagggccacattactgagggcagagaagaagcttaaccctggaatgagaattggaagggacaaat

SEQ ID NO: 35097 - DNA, 120 bp, synthetic construct
  source 1..120: mol_type = other DNA
aaccaaggtaaattttctaaaatgacctctgttgaacatctgacagcagtacttcctccttcctgaattctttaattccttggctcatgtgacagcatattctcctaattcttctgcttc

SEQ ID NO: 35098 - DNA, 120 bp, synthetic construct; identical to SEQ ID NO: 9690
  source 1..120: mol_type = other DNA

SEQ ID NO: 35099 - DNA, 120 bp, synthetic construct
  source 1..120: mol_type = other DNA
tacaatgtcatagtaatcaaaatactaggacactggcacaagaagagacaaacagaacagtggaacaagatggaactcagacacaggcccacctataatgggagctttcagtatagcaaa

SEQ ID NO: 35100 - DNA, 120 bp, synthetic construct
  source 1..120: mol_type = other DNA
taaaacatgatccccatcaaacacaaagatgaatcccagatgaattaaagtagtaaatgtgaaatttaaaactgtaggagatgttttaagagtatctttgatatctcagtatagggaaga

SEQ ID NO: 35101 - DNA, 120 bp, synthetic construct
  source 1..120: mol_type = other DNA
aaacatttgcaatgcctaaaactgacaagggactactagcaggactatataaggatcacctgcaaatcaataagaaaatgatggaagcacatagtacaaaaatggacaatgaatgtgaac

SEQ ID NO: 35102 - DNA, 120 bp, synthetic construct; identical to SEQ ID NO: 9691
  source 1..120: mol_type = other DNA

SEQ ID NO: 35103 - DNA, 120 bp, synthetic construct
  source 1..120: mol_type = other DNA
aggcccacatgtatatgcagttccatgtgagatacaagcattgcttgcaatagtagagaaccaggaatgatccaggtatcccaggagcaatgtagatatgtggattaatatgatttggat

SEQ ID NO: 35104 - DNA, 120 bp, synthetic construct
  source 1..120: mol_type = other DNA
atgagtgagttctcactctattagtgcacatgaaacctggttgttaaaaagaggctggcacctctttctatgtctctttctccctctatgaccatgtgatgcactggctccacttgcctt

SEQ ID NO: 35105 - DNA, 120 bp, synthetic construct
  source 1..120: mol_type = other DNA
tcagatattcctttatagcaatgcaaaatggactaatgcatggacatataaagtaaaatactatggaagatttggaagaaacaaactggatgtacaaaattagatctataatttaatgcc

SEQ ID NO: 35106 - DNA, 120 bp, synthetic construct; identical to SEQ ID NO: 9692
  source 1..120: mol_type = other DNA

SEQ ID NO: 35107 - DNA, 120 bp, synthetic construct
  source 1..120: mol_type = other DNA
gttatgataaatagaaacctgtaagatctctggaggggcattttttgtgtgaacattgccatggaatgagtccaagtagagacagtaagtagttacaggcacccaccacactgtgttgta

SEQ ID NO: 35108 - DNA, 120 bp, synthetic construct
  source 1..120: mol_type = other DNA
cagactttctggattggaagctagccctactacttcatagctgtgggaacttgatcaaagtgcttaaagtctctgtgtatgtaaaaagatgtaagtatctctcatgtgaaatagtgaaaa

SEQ ID NO: 35109 - DNA, 120 bp, synthetic construct
  source 1..120: mol_type = other DNA
tggctgaatgcttttaacccattagaagatcaatgaacacttatcagattgaatttttcctcccttccttacattctacaaatcctagggcctcctctttacattcccacctttacagta

SEQ ID NO: 35110 - DNA, 120 bp, synthetic construct; identical to SEQ ID NO: 9693
  source 1..120: mol_type = other DNA

SEQ ID NO: 35111 - DNA, 120 bp, synthetic construct
  source 1..120: mol_type = other DNA
cagttgcataccccagtgcttgaggagcggctggtccaagccccagtgctccaccctgcagtcatagaagtcctctgctgagggcacaaaggtcaggtaatggaacttgtggaagctgta

SEQ ID NO: 35112 - DNA, 120 bp, synthetic construct
  source 1..120: mol_type = other DNA
gggctggcccagctccacaggctccttgggaaacacggtcacctcagggggatctggaaggagacagcaccaggttaggcccctcttctgggatgaatcacaaaggctccacctcttagg

SEQ ID NO: 35113 - DNA, 120 bp, synthetic construct
  source 1..120: mol_type = other DNA
caagcccttgctgtagtgggatcagcccatggccactaggggaagaggatcacacagcagggggcacttaggcttcctagtctgagggtggcagagaggccctctcatcccttccagttg

SEQ ID NO: 35114 - DNA, 120 bp, synthetic construct; identical to SEQ ID NO: 9694
  source 1..120: mol_type = other DNA

SEQ ID NO: 35115 - DNA, 120 bp, synthetic construct
  source 1..120: mol_type = other DNA
cttatgaatataaaaaggaagaaggtaagaggtcaaaggaaggacatatggggaagaagaaggagcaacaccataaaggaaataatacagagcagatgagcagttataaaaagaaaggag

SEQ ID NO: 35116 - DNA, 120 bp, synthetic construct
  source 1..120: mol_type = other DNA
cacttacttgtgccaggcatccttctaaatactttacatatttcactcgctgaattgtcacaataaccctatgaagcaaatacatatcatacattttacaggtaaggaaatgcagggaag

SEQ ID NO: 35117 - DNA, 120 bp, synthetic construct
  source 1..120: mol_type = other DNA
gggggtgggggaatggacattttctttttcttattatagaaaaggtagaaaaaaatacaaaattgagaggaagaagaaaatatccttcaaattttagggctcttgacagttttaaagttt

SEQ ID NO: 35118 - DNA, 120 bp, synthetic construct; identical to SEQ ID NO: 9695
  source 1..120: mol_type = other DNA

SEQ ID NO: 35119 - DNA, 120 bp, synthetic construct
  source 1..120: mol_type = other DNA
attagtttgtaagaattagcaaagataagaggataaaagcaactattatcatgaaagaaaacgatgaatgtgtatgtgaaagtctgggtttagaatgataaatgcatcagagtgagaagg

SEQ ID NO: 35120 - DNA, 120 bp, synthetic construct
  source 1..120: mol_type = other DNA
tgccactgtaattgtaagtgtctagagggtatgacctgtgtcttatttttcactgagaatgactccctgacacagtaagtggccaagcaaagagtggtatttgaaactaaacaaaacaaa

SEQ ID NO: 35121 - DNA, 120 bp, synthetic construct
  source 1..120: mol_type = other DNA
tcatcttcttaatacatgaatgtcccttgtactttttaaaatgctttttaaaaaacactttcacaagttctgcagtccaaagatcagccagctatggaacagattatttttcttcaaaat

SEQ ID NO: 35122 - DNA, 120 bp, synthetic construct; identical to SEQ ID NO: 9696
  source 1..120: mol_type = other DNA

SEQ ID NO: 35123 - DNA, 120 bp, synthetic construct
  source 1..120: mol_type = other DNA
taaggagaaataatacatagatatttgtggattatgggtggtctcaggagaggaatttaggccatagaactgagagtcattagtggcaggtgcaggttaaataagattttccaggaagag

SEQ ID NO: 35124 - DNA, 120 bp, synthetic construct
  source 1..120: mol_type = other DNA
ttcatcagaaagaagtggattatagtgcaaatgttattagtaactcaagtcagaggcactgagaagaacccactgaatttgaccttctgtagaggttcctgatggccaagatgagaggat

SEQ ID NO: 35125 - DNA, 120 bp, synthetic construct
  source 1..120: mol_type = other DNA
cttatgtttttaaggtaaatgacatgtttaaatgttaagagactgggcagggaagccctgaagagacagctgagctcattaggaatttctaccaagaatactaaaaagtatttgcatcta

SEQ ID NO: 35126 - DNA, 120 bp, synthetic construct; identical to SEQ ID NO: 9697
  source 1..120: mol_type = other DNA

SEQ ID NO: 35127 - DNA, 120 bp, synthetic construct
  source 1..120: mol_type = other DNA
tcaagaccatgcaaccctgctgtcttgagagaggaaagcttgtgaccacccacaaagacccaggaagagccctagggtcctagaagagagggaggatacagaaacactctttgcacttcg

SEQ ID NO: 35128 - DNA, 120 bp, synthetic construct; identical to SEQ ID NO: 3957
  source 1..120: mol_type = other DNA

SEQ ID NO: 35129 - DNA, 120 bp, synthetic construct
  source 1..120: mol_type = other DNA
tatgcaggagtctcataaattctggctgttattgctgttattattatgagggccagagggaacatagactatgaggaccagatagatcaatgagcccctaaaatctgtgatccctgaagc

SEQ ID NO: 35130 - DNA, 120 bp, synthetic construct; identical to SEQ ID NO: 9698
  source 1..120: mol_type = other DNA

SEQ ID NO: 35131 - DNA, 120 bp, synthetic construct
  source 1..120: mol_type = other DNA
aggtgctggggaagagatgggagaattttaggtaccagcgtggtcaagagagctccagttcacagttcattttcagagttagagaaagagatgtaaaaagataagttacaccttcttctg

SEQ ID NO: 35132 - DNA, 120 bp, synthetic construct
  source 1..120: mol_type = other DNA
acggcaaatgttttccattatgttccttctcccgagccccacccccatcccagacagtcagatgatctttgatgttttttggtcactatattttaaatcatgttttatgttatgttgtca

SEQ ID NO: 35133 - DNA, 120 bp, synthetic construct
  source 1..120: mol_type = other DNA
tccacctccctgagatacctcctttttatttaatcatttctgcagaagtgttataatttctatttagaggttttaattaacttgaatgaagttgatctttaattgtttatctattcctgg

SEQ ID NO: 35134 - DNA, 120 bp, synthetic construct
  source 1..120: mol_type = other DNA
ttcattttcatataagaatacccaggacagcattacctgtggtaacaatgtgcgcccatattttgatcttgtttttaagaagggtttctctaatgtttttctgttacaggtaatgttaat

SEQ ID NO: 35135 - DNA, 120 bp, synthetic construct; identical to SEQ ID NO: 9699
  source 1..120: mol_type = other DNA

SEQ ID NO: 35136 - DNA, 120 bp, synthetic construct
  source 1..120: mol_type = other DNA
aaatgacaaggagaaaagtcccacccaggcagttactaaaaaaactgagtttttctccacaatcctctcctggccccttaatcctactagacaccttctactacataattattttcttct

SEQ ID NO: 35137 - DNA, 120 bp, synthetic construct
  source 1..120: mol_type = other DNA
ttagaattggtggtccaacaggatcacatttataagtgtctaaagtaagaagtaatgttctttgaaagtttgtaaaaatattcactctaaacaaaatagaatcagatgctttgaaggagg

SEQ ID NO: 35138 - DNA, 120 bp, synthetic construct
  source 1..120: mol_type = other DNA
agcaatttcagacctattgatctcatttgatcttaagagctttgctataaggcaggttatatcatccccatattgaagacaaggaatcgaagtccaagagaggcagtgtcgttaaagctg

SEQ ID NO: 35139 - DNA, 120 bp, synthetic construct; identical to SEQ ID NO: 9700
  source 1..120: mol_type = other DNA

SEQ ID NO: 35140 - DNA, 120 bp, synthetic construct
  source 1..120: mol_type = other DNA
atgggccagcagaatatttgagatcaccttcagagcaaagaaaacgcataatctccccaaacatcatgacttatctgactggttaaaatgagtatcactgtctttcctccgtcatcttaa

SEQ ID NO: 35141 - DNA, 120 bp, synthetic construct
  source 1..120: mol_type = other DNA
cacagaagactacttgggttcatggtctctaatatttcaaacaggagctccctttagcgagtccttcttttcctgactgcagctcttttcattttgccatccttttccagctccatgatg

SEQ ID NO: 35142 - DNA, 120 bp, synthetic construct
  source 1..120: mol_type = other DNA
gggtctggctcagggaacaattcctaggggacgttatctttaagggatcaaattctgagacaggctgcgggggctcctgccctaaggcagtgtcctctcttcccagctagagaaagaggt

SEQ ID NO: 35143 - DNA, 120 bp, synthetic construct; identical to SEQ ID NO: 9701
  source 1..120: mol_type = other DNA

SEQ ID NO: 35144 - DNA, 120 bp, synthetic construct
  source 1..120: mol_type = other DNA
acatcccttggacaattaaggagagaagggagggagggggataggttttagcccctgaaggcattctcattaaaggtacttctcccagcctccccagaacttggttagggtactagagtg

SEQ ID NO: 35145 - DNA, 120 bp, synthetic construct
  source 1..120: mol_type = other DNA
gaagcagtaaccaagtgaaaaatctcttcttcctgctgcctccctgtggctggtgtaatattatggcatctatgatccattgtttttctctcaggatactctcaggatatttctttttat

SEQ ID NO: 35146 - DNA, 120 bp, synthetic construct
  source 1..120: mol_type = other DNA
tcctaatgctatccctcccccctccccccaccccacaacaggccccggtgtatgatgttccccttcctgtgtccatgtgttctcattgttcagttcccacctatgagtgagaacatgtgg

SEQ ID NO: 35147 - DNA, 120 bp, synthetic construct
  source 1..120: mol_type = other DNA
atgtgtgcattttcttaatccagtctatcactgatggacagttgggttggttccaagtctttgctattgtgaatagtgccgcaataaacatatgtgtgcatgtgtctttatagcagcatg

SEQ ID NO: 35148 - DNA, 120 bp, synthetic construct; identical to SEQ ID NO: 9702
  source 1..120: mol_type = other DNA

SEQ ID NO: 35149 - DNA, 120 bp, synthetic construct
  source 1..120: mol_type = other DNA
taggacacacctagaaggtactgacatcatgtcacctcctcatctttcagggtagcaaggttggaatctcctgaatacagcccctcaagccctaaaacctcttatctattaccttgggtt

SEQ ID NO: 35150 - DNA, 120 bp, synthetic construct
  source 1..120: mol_type = other DNA
tggagcagcactggtgacactgaacagtgtcaggaggaagtgacggatgcagcgcccccatcccataggcagagctgtcatgtgggatgagggacagtgttgggagccaccaaggaaacc

SEQ ID NO: 35151 - DNA, 120 bp, synthetic construct
  source 1..120: mol_type = other DNA
cagggactgagggtagattactggagctccctgcgtagaatgaatgttcaatcaaaacctgctggagggagagctggagccataggggagtgggtaaagtgggcagggctgattccacaa

SEQ ID NO: 35152 - DNA, 120 bp, synthetic construct; identical to SEQ ID NO: 9703
  source 1..120: mol_type = other DNA

SEQ ID NO: 35153 - DNA, 120 bp, synthetic construct
  source 1..120: mol_type = other DNA
ttacctaagactgggtaaattaaaaaaattaaatgttgcaaagaaaaaattcaaaattcttattcttgaatgaaaaacgttctcttactggtgattgaggaggagaaacaaagactaaca

SEQ ID NO: 35154 - DNA, 120 bp, synthetic construct
  source 1..120: mol_type = other DNA
ggtctggggcccaaggcaccaggagaagaggcaggtcaggatatctgagtcaagacctgggatcttgccttagcaatgacactggagactaaaggtggactccatggtgcccttgagccc

SEQ ID NO: 35155 - DNA, 120 bp, synthetic construct
  source 1..120: mol_type = other DNA
caccttaatttccccagtgtgcccaagaacagagcaggcctgaagatactcaaacagaaacaaacatgtgccgtgtcactgataattctgtgtagacacacacctgccagacactgctca

SEQ ID NO: 35156 - DNA, 120 bp, synthetic construct; identical to SEQ ID NO: 9704
  source 1..120: mol_type = other DNA

SEQ ID NO: 35157 - DNA, 120 bp, synthetic construct
  source 1..120: mol_type = other DNA
caaaaaaaacatgctgcccagtggcttccagaagtttctggtccacagcctcaaggagctgaaagtgctgctgatgtgcaacaaatcttactgtgctgagatcgctcacaaaatttcctc

SEQ ID NO: 35158 - DNA, 120 bp, synthetic construct
  source 1..120: mol_type = other DNA
agaaaatgagtagaaagttcatgtccacgttttgtgtgtaaataaaaccataaaaactgccaaaaaaaattacatcaatgcctctaaacccaaaggactctacccccacaggtccctggt

SEQ ID NO: 35159 - DNA, 120 bp, synthetic construct
  source 1..120: mol_type = other DNA
aaagttttaagaaatatatttctacatctcctacatgcaaaacaacaggagcaagttgaggaattctcaagaaactggtcgagaagagagagcgcttagctatggaaaagagaaagaagg

SEQ ID NO: 35160 - DNA, 120 bp, synthetic construct
  source 1..120: mol_type = other DNA
ccctgttttttctcccagtgaccccacgtgaaacgtctccgcctcctccagccaccagcagaagggactgccttcccctcagtgctcgcccctccctagtgatcactcagtgcccctgag

SEQ ID NO: 35161 - DNA, 120 bp, synthetic construct; identical to SEQ ID NO: 9705
  source 1..120: mol_type = other DNA

SEQ ID NO: 35162 - DNA, 120 bp, synthetic construct
  source 1..120: mol_type = other DNA
gcttcgacagcgacgtgggggagttccgggcggtgacggagctggggcggcctgctgcggagtactggaacagccagaaggacatcctggaggagaagcgggcagtgccggacaggatgt

SEQ ID NO: 35163 - DNA, 120 bp, synthetic construct
  source 1..120: mol_type = other DNA
ggttggcctaagggaccttagtgccgggcggaaaggggactttgggttggggattcatggggggagcccatctggagcttgtcaggggagcgagcgcggggacctggactgggctgagca

SEQ ID NO: 35164 - DNA, 120 bp, synthetic construct
  source 1..120: mol_type = other DNA
gaggtggagatggcacagcaggccacacagagaagaaacctacagggaggtagctgggtttgaggtgcttgaggggcagatgggtggtctgatgggcaggtagacagaagggtctgcagc

SEQ ID NO: 35165 - DNA, 120 bp, synthetic construct; identical to SEQ ID NO: 9706
  source 1..120: mol_type = other DNA

SEQ ID NO: 35166 - DNA, 120 bp, synthetic construct
  source 1..120: mol_type = other DNA
cggggctgagatggattttacttgtcttgggttccccacggctgtcacagggcagtgtctcagttcattcgtctttttccttcaggaagtctgggtgtaaagggatggagagaggtgagg

SEQ ID NO: 35167 - DNA, 120 bp, synthetic construct
  source 1..120: mol_type = other DNA
tatcaggatgtgggattgagccctggaccttttttctagaaagaggaaaaaaatgaagggaggaggaggaggaagctggggagatcacacctttgattttcttgttcctggaaagtgaaa

SEQ ID NO: 35168 - DNA, 120 bp, synthetic construct
  source 1..120: mol_type = other DNA
caattggcaaaaactgttactaagactttgtagaggcaccaatcagtgacatggcagcattttctttcacagtaatcaactgccagattgcagacagccctgatgccagcctaaggagtg

SEQ ID NO: 35169 - DNA, 120 bp, synthetic construct; identical to SEQ ID NO: 9707
  source 1..120: mol_type = other DNA

SEQ ID NO: 35170 - DNA, 120 bp, synthetic construct
  source 1..120: mol_type = other DNA
cagaggcaagggagaggtggaagggggaggaaagaagtagtgacaattccagggtggatgtccacccaaatctagaagtaattgagcaaatgttttctgggcattagagaaggcaactag

SEQ ID NO: 35171 - DNA, 120 bp, synthetic construct
  source 1..120: mol_type = other DNA
ctgctcctgtcaaagaatattgagcaagatgcctctcgtggaatgttctgggaccttaaaacagatacccaagtattccccctgatttcatggttcccagaagctctatggggaagaaat

SEQ ID NO: 35172 - DNA, 120 bp, synthetic construct
  source 1..120: mol_type = other DNA
gagacacaggtgcccctgaaataaactcacattgagggaagaggctgacaatgtggatcagtctgaaaacaaggcaaaaatacaatagggagtaagggttgtgtgtcagttcaagactgt

SEQ ID NO: 35173 - DNA, 120 bp, synthetic construct; identical to SEQ ID NO: 9708
  source 1..120: mol_type = other DNA

SEQ ID NO: 35174 - DNA, 120 bp, synthetic construct
  source 1..120: mol_type = other DNA
aagtgatcctcctgcctcagcctcccatgtagctagaactacagatacacgtaccaccatgtctggctaatttatttttctttttagagatgggttctcactatgttgcccaggccggtc

SEQ ID NO: 35175 - DNA, 120 bp, synthetic construct
  source 1..120: mol_type = other DNA
cttttctgctttctgaggaggaaaaaggtactggtggcagagatccaaaagaaaagttgccagtggcagtgtggaaattcacctgagaacaacaggacaagctggggcacaaatgcaaag

SEQ ID NO: 35176 - DNA, 120 bp, synthetic construct
  source 1..120: mol_type = other DNA
aggacgggatttctactactcaagcatgtaggagctcaggatattctgtaaatatgaagattttgagtttttgtaggtgaggtaaaaaaatacataggttttttacagaataagacatgt

SEQ ID NO: 35177 - DNA, 120 bp, synthetic construct
  source 1..120: mol_type = other DNA
atcaagatagaactttgaaaaggtaggtaatttcacagttgatcaaatattctttgcccaaattacttttggttaaaatttctcctaaatgtgctacagagtgcaaactctgtctccctg

SEQ ID NO: 35178 - DNA, 120 bp, synthetic construct; identical to SEQ ID NO: 9709
  source 1..120: mol_type = other DNA

SEQ ID NO: 35179 - DNA, 120 bp, synthetic construct
  source 1..120: mol_type = other DNA
aattagccaggtgaagtggcaggcacctataatcccagctattcgggaggctgaggaaggagaattggttgaagcccggaggtggaggttgcagtgagccaatattgcgccactgcattc

SEQ ID NO: 35180 - DNA, 120 bp, synthetic construct
  source 1..120: mol_type = other DNA
ggaaggaaggaaagaaggacaatctcaaattctatttcattatttttcttccacgctcctagtccagcctagggtgaatgtttccccctccaagaaggggcccttgcagcaccacaacct

SEQ ID NO: 35181 - DNA, 120 bp, synthetic construct
  source 1..120: mol_type = other DNA
gggtcgtgtccaccaacctgatccgtaatggagactggaccttccagatcctggtgatgctggaaatgaccccccagcagggagatgtctacacctgccaagtggagcacaccagcctgg

SEQ ID NO: 35182 - DNA, 120 bp, synthetic construct
  source 1..120: mol_type = other DNA
tctggggtccactcatcttatcttctgcatctataccctggggccatgtccaaaccccatctttcttctataccagctcctgagcatagtttgaagccagggaaatggagacttcctgac

SEQ ID NO: 35183 - DNA, 120 bp, synthetic construct; identical to SEQ ID NO: 9710
  source 1..120: mol_type = other DNA

SEQ ID NO: 35184 - DNA, 120 bp, synthetic construct
  source 1..120: mol_type = other DNA
tatgctgcatcaggctccagaatctcagacaggacatgagtagggatgcagctggtggaggtgacactaaacctgggtctgtccttcccagaggcacagtctgattctgcccggagtaag

SEQ ID NO: 35185 - DNA, 120 bp, synthetic construct
  source 1..120: mol_type = other DNA
ctggcatattcacacttattccacgatgaggggtttgacagaaaagaaatgtcagaaagctctagaggccactgatatcagataatcggggaacaaacatgacctatagcgagagaggga

SEQ ID NO: 35186 - DNA, 120 bp, synthetic construct
  source 1..120: mol_type = other DNA
tctgaggtggtttcaatggctgattatataacctttcgtctttcatttcagttcaacgaggatctgcataaacaggtaatattcctgctttgatttccttgtggggtgggttgcaggagg

SEQ ID NO: 35187 - DNA, 120 bp, synthetic construct; identical to SEQ ID NO: 9711
  source 1..120: mol_type = other DNA

SEQ ID NO: 35188 - DNA, 120 bp, synthetic construct
  source 1..120: mol_type = other DNA
gccaagaagttgctctgaagtcagtttctatcattctgctctttgattcaaagcactgtttctctcactgggcctccaaccatgttcccttcttcttagcaccacaaataatcaaaaccc

SEQ ID NO: 35189 - DNA, 120 bp, synthetic construct
  source 1..120: mol_type = other DNA
aagaagagaaccatgaaaatggggatatgttaactattgtataatggggcctgttacacatgacactcttctgaattgactgtatttcagtgagctgcccccaaatcaagtttagtgccc

SEQ ID NO: 35190 - DNA, 120 bp, synthetic construct
  source 1..120: mol_type = other DNA
atggtgagcagactgcaaatctgcctgataggacccatattcccacagcactaattcaacatataccttactgagagcatgttttatcattaccattaagaagttaaatgaacatcagaa

SEQ ID NO: 35191 - DNA, 120 bp, synthetic construct; identical to SEQ ID NO: 9712
  source 1..120: mol_type = other DNA

SEQ ID NO: 35192 - DNA, 120 bp, synthetic construct
  source 1..120: mol_type = other DNA
cttcactcctgatacacacaatcagtgcacagcagctctcttatacatccagttgatgccttcagtctccctggcttcttacaagcatcttctgggccttgtgtgtccctgggcacctgt

SEQ ID NO: 35193 - DNA, 120 bp, synthetic construct
  source 1..120: mol_type = other DNA
ttgggcgtcactggcacagatataagtaaatacagctggagtctgcagagaggctggactgagtcagggagtcaggaaagagaagccacacacaaggacaaccaatcatgtttctcataa

SEQ ID NO: 35194 - DNA, 120 bp, synthetic construct
  source 1..120: mol_type = other DNA
taatttcagctgtcacataataagctaaggaagacagtatatagtaaataaggaccctttatctgtcttattttcccttttggcttcacaggaaacttgtgagaaacctatgcagcataa

SEQ ID NO: 35195 - DNA, 120 bp, synthetic construct; identical to SEQ ID NO: 9713
  source 1..120: mol_type = other DNA

SEQ ID NO: 35196 - DNA, 120 bp, synthetic construct
  source 1..120: mol_type = other DNA
cacagaaagaaggtatcagatgtgtctcactctgacatatgcaggtgtttatgaaactctgggatttctaaggaaggatgcagtgcagagacaggtcccagaggagacaagagctgagag

SEQ ID NO: 35197 - DNA, 120 bp, synthetic construct
  source 1..120: mol_type = other DNA
ggtagaggagtcttgaggtacatcagtcattggagttgaagagcagagattcaaaggaaagttggaactggagctttaaaggagatgtgaagtgggtgactcaacctctgactcagaaaa

SEQ ID NO: 35198 - DNA, 120 bp, synthetic construct
  source 1..120: mol_type = other DNA
gtggtccacccaacagacaacactgcctcagatggttatcaaggggtaccctaagaagaaatcatctcaccctctctttgtccccatttgtcaagtagcagtgaggccgagccaggggat

SEQ ID NO: 35199 - DNA, 120 bp, synthetic construct; identical to SEQ ID NO: 9714
  source 1..120: mol_type = other DNA

SEQ ID NO: 35200 - DNA, 120 bp, synthetic construct
  source 1..120: mol_type = other DNA
caggaagtcaggctgacagtctttctcctgcacatctgctcccagaacctccccagcagaatgaagggaacctaagaatttattcactggcttttaatgatccctcctagaaagaacaca

SEQ ID NO: 35201 - DNA, 120 bp, synthetic construct
  source 1..120: mol_type = other DNA
catttaagaagtacacactaaataaataataaaatacttctacaagagatatttatggaggacctactgtgtaccaggagcaatgctaggcattatggatatcagcagcctttggctcct

SEQ ID NO: 35202 - DNA, 120 bp, synthetic construct
  source 1..120: mol_type = other DNA
gttacatgggtgcttgcggtgataaccattcaacgtacattctattggtttgtgtgtttcttccaaatgtcccctagttcacaatagaaagggcttaaatagagaagtaaaggagaattt

SEQ ID NO: 35203 - DNA, 120 bp, synthetic construct
  source 1..120: mol_type = other DNA
aattaataaacaaaaagccaaactgagaaactgtcccaaggacaatatgatcgagtaaacaatagaaaatgtaaaggacaagtgaagagaaatgaaggatagaaacagacatctgacatc

SEQ ID NO: 35204 - DNA, 120 bp, synthetic construct; identical to SEQ ID NO: 9715
  source 1..120: mol_type = other DNA

SEQ ID NO: 35205 - DNA, 120 bp, synthetic construct
  source 1..120: mol_type = other DNA
acctctggcaagactcctaaggaaaatacaggagattcagaacgaaaagggtaaatgacatttatacacattttaaaatgcaaaatcttacgaccaactctatacatataaatttgaaaa

SEQ ID NO: 35206 - DNA, 120 bp, synthetic construct
  source 1..120: mol_type = other DNA
tccaaagggccctgtcctgatcttattgcagatgagggtgtcctcccacatttccaggagcagatcatgcctcttacacgtgtgattctagaacatagaatggaacagaatttttgagat

SEQ ID NO: 35207 - DNA, 120 bp, synthetic construct
  source 1..120: mol_type = other DNA
gccatgtcactgaatccaacagtacattataaaaacaatacgttttgaccaattttagatttattctaggaatgcaatgattcttcagtgtcagaaaatatataatgtggttaacacatt

SEQ ID NO: 35208 - DNA, 120 bp, synthetic construct; identical to SEQ ID NO: 9716
  source 1..120: mol_type = other DNA

SEQ ID NO: 35209 - DNA, 120 bp, synthetic construct
  source 1..120: mol_type = other DNA
agctgtgtggtcttcacctctcccggtgtctgattcctgctctgtaacatgaaataaataagaaccaacctccagatgtaaataagtgaacacatgagaagcacttagaatagtgcctag

SEQ ID NO: 35210 - DNA, 120 bp, synthetic construct
  source 1..120: mol_type = other DNA
actcttcacccctaacttgttacctcgtcttttccactctgtccctaatacacctataggatgactcataggagcccctggacccggggatgctgtcagatcgcttggtctttgagacaa

SEQ ID NO: 35211 - DNA, 120 bp, synthetic construct
  source 1..120: mol_type = other DNA
ttataaggtacagagagcaggggctggccttggatgtgggaggtgttgggtattcgaaaccatgagatggtgaaatttggataaagtgaccataaaacatgggattgaggaaggcaggtg

SEQ ID NO: 35212 - DNA, 120 bp, synthetic construct; identical to SEQ ID NO: 9717
  source 1..120: mol_type = other DNA

SEQ ID NO: 35213 - DNA, 120 bp, synthetic construct
  source 1..120: mol_type = other DNA
aggggatagaacccaaggagcctactgccattggctgattcttaaaggttccaccaccccaagtcctatattcaccagattaggggccacctctcccaggcccatcctcctgctccccta

SEQ ID NO: 35214 - DNA, 120 bp, synthetic construct
  source 1..120: mol_type = other DNA
acccaagatttctcgctctcagggaaggggctcattcatgagtgggcatcatggcctctagttctatgtgtggcagagaggccctcccatccctccagctggactctagaggaacaggca

SEQ ID NO: 35215 - DNA, 120 bp, synthetic construct
  source 1..120: mol_type = other DNA
agtgccatttgtggcccaagtctgtttggaccattgatccgggtgttcaagtgcttccttgccatgacgatgccagcaatacccctctgagcaccaaagtcaaaggtgtgaataaactct

SEQ ID NO: 35216 - DNA, 120 bp, synthetic construct
  source 1..120: mol_type = other DNA
acatggtctgctgcatgaaggagaagatggagaatgggtgaatacgtaggatgctacacagaatgcaggaagcaaacaggtaacaggaaggttattgggaacatgaaggaataacacaga

SEQ ID NO: 35217 - DNA, 120 bp, synthetic construct; identical to SEQ ID NO: 9718
  source 1..120: mol_type = other DNA

SEQ ID NO: 35218 - DNA, 120 bp, synthetic construct
  source 1..120: mol_type = other DNA
ttactatgtgctaaacttactcattgaatcttcacacccccatgtagaagaacttattttccatagtagggaactgaccccagaggtaaagtaacttgtccaagtcacacaactcctggt

SEQ ID NO: 35219 - DNA, 120 bp, synthetic construct
  source 1..120: mol_type = other DNA
gatatagccataaagcaaggcagggaagtggaaggatggaataaatatttcagagtggaacaaaatcgtgaaggacatgaaaatacctccagagtcttagtgacatttatagacttcaag

SEQ ID NO: 35220 - DNA, 120 bp, synthetic construct
  source 1..120: mol_type = other DNA
gtggagtgtagttttcaagtgtagtttcacctggaaatacaagttgttggcatttgaaagacctatgggatagtatcttagctttacctgatacataagaagcagcaactggttgataac

SEQ ID NO: 35221 - DNA, 120 bp, synthetic construct
  source 1..120: mol_type = other DNA
gctttacctgatacataagaagcagcaactggttgataacaaaaagtgaattattattacagtgaattacagagagtttagggttcggcctggaagaggaagtgaagccaaatgacactg

SEQ ID NO: 35222 - DNA, 120 bp, synthetic construct; identical to SEQ ID NO: 9719
  source 1..120: mol_type = other DNA

SEQ ID NO: 35223 - DNA, 120 bp, synthetic construct
  source 1..120: mol_type = other DNA
tctaggtaataaggatgaaactctaaagatgggaactttgtccttaatctacttgaaattcaagaataaaacagacaaagaaaagatgattgctacatgtgtggtttgatcaccactgag

SEQ ID NO: 35224 - DNA, 120 bp, synthetic construct
  source 1..120: mol_type = other DNA
aaaatacgatttaggaaaggttcctagggacagtgttcacctgcagatagcaaaacagagaaaggggaaatggcatttccagcaggagaagcaggctcaggagcagagaggcatgaagtt

SEQ ID NO: 35225 - DNA, 120 bp, synthetic construct
  source 1..120: mol_type = other DNA
aagttgtgaagtatcttaagcaggagagtaacacggtcagatttgtgtttggatggggcacctgtaggaaggatgggctggaggaggcgggactcaaggcaagaccagtagcacttttaa

SEQ ID NO: 35226 - DNA, 120 bp, synthetic construct; identical to SEQ ID NO: 9720
  source 1..120: mol_type = other DNA

SEQ ID NO: 35227 - DNA, 120 bp, synthetic construct
  source 1..120: mol_type = other DNA
aagttctaattttgggtcaggtcactcaagaaaagtacacaaagtcaggatagcagggatctgagtgtgtgctcctgcatccagacaaacacagacatgaagaaagaggctgaaaagcag

SEQ ID NO: 35228 - DNA, 120 bp, synthetic construct
  source 1..120: mol_type = other DNA
cagaaacagaacagtgaccactggcttgagttgtataaaagtcattagttgccaccctgagaggagcatcagagatgagggaaagaaaaagagagagtacattgggttgaggactgaatg

SEQ ID NO: 35229 - DNA, 120 bp, synthetic construct
  source 1..120: mol_type = other DNA
atagtgagagtccatctctaagaaaacaattttggattccctgccttccatgagcaacacagcaaacataagctctgcagatgtgctcagacttgagcctgactcactgaagagagtgtg

SEQ ID NO: 35230 - DNA, 120 bp, synthetic construct; identical to SEQ ID NO: 9721
  source 1..120: mol_type = other DNA

SEQ ID NO: 35231 - DNA, 120 bp, synthetic construct
  source 1..120: mol_type = other DNA
ccatgtccccactggggaactcgaaaatccagattacaggaaaaggatttaactttacctagacctgaaacagatttagcatgaaatacaaaagtacgccgggcgctgccgctcacacct

SEQ ID NO: 35232 - DNA, 120 bp, synthetic construct
  source 1..120: mol_type = other DNA
tggtggcgggcgcctgtagtgccagctactaggaaggctgaggcaggagaatggcataaacccggaaggcggagcctgcagtgaaccgagatcgcgccactgcactccagcctgggtgac

SEQ ID NO: 35233 - DNA, 120 bp, synthetic construct
  source 1..120: mol_type = other DNA
gactatatctcacaagggccctgggggaaggcagacggcaaaatttggaaggggtcacagtgtgaaaggagcgtccaactgaaatttgttataattctgactgggcacaaatcctctgga

SEQ ID NO: 35234 - DNA, 120 bp, synthetic construct; identical to SEQ ID NO: 9722
  source 1..120: mol_type = other DNA

SEQ ID NO: 35235 - DNA, 120 bp, synthetic construct
  source 1..120: mol_type = other DNA
ccccccgcccgaggagagtctgagctcagacctgcctaaccctgtccacacctgagggcatttctctacccacctggtagccaatcacaaaagacgtaaactcttgggagctttatgaca

SEQ ID NO: 35236 - DNA, 120 bp, synthetic construct
  source 1..120: mol_type = other DNA
caactcaggacattacaacaattcacgacagaataactgctctaagaaaggagaaaacagctaattccactggctgaaaaatcttgactaaccagtggtcttcggtctgttcacatgaca

SEQ ID NO: 35237 - DNA, 120 bp, synthetic construct
  source 1..120: mol_type = other DNA
gatccaaactaagaagaaatctctgaattgctagatagagaattcagaaggttgattttaagctactcaaaaagataccagagaaaggtgaaaaacaacttaaataaattttttaaaaac

SEQ ID NO: 35238 - DNA, 120 bp, synthetic construct; identical to SEQ ID NO: 9723
  source 1..120: mol_type = other DNA

SEQ ID NO: 35239 - DNA, 120 bp, synthetic construct
  source 1..120: mol_type = other DNA
atctacacaaccaaatacaagaagctcaaagaccacctgggaaatttatcacagaaagattatcgcccaggcacatagtcatcaggttatctaaagtcaggacaaaggaaagaatcttaa

SEQ ID NO: 35240 - DNA, 120 bp, synthetic construct
  source 1..120: mol_type = other DNA
ggcaagaattttgtatccagcaaaactaagcgtcataaatgaaggagagataaagtctttttcagacaaacaaatgctgagagacttcaccgctaccaatccagcactacacaaaatgct

SEQ ID NO: 35241 - DNA, 120 bp, synthetic construct
  source 1..120: mol_type = other DNA
gcaacaactagcatgagaaatagaacagtacttcacatctcaatattaacactctccacttaaaagatacagaatggcaggaaggataaaaattcagcaaccaagtatcttcagtcttca

SEQ ID NO: 35242 - DNA, 120 bp, synthetic construct; identical to SEQ ID NO: 9724
  source 1..120: mol_type = other DNA

SEQ ID NO: 35243 - DNA, 120 bp, synthetic construct
  source 1..120: mol_type = other DNA
gaaacaatggacttaagttacactagaagaaataaacttaacagatatttacagaacattctactcaacaactgtagaatatacattcttctcatcagcacatgaaacatcctccaagat

SEQ ID NO: 35244 - DNA, 120 bp, synthetic construct
  source 1..120: mol_type = other DNA
aaactatacaaatacatggaaattaaataatttgctcctgaatgatctttgggtcaacagtgaaatcaagatgcaaaattctctgaactgaatgataatagtgacacaacttgtgaaaac

SEQ ID NO: 35245 - DNA, 120 bp, synthetic construct
  source 1..120: mol_type = other DNA
caagaacaaaccaaacccaaacccagcagaagaaaagaaataacaaagagagcagaagtaaatgaaattgaaacaaaaaaatacaaaagataaatgaaacatgaagctgattctttgaaa

SEQ ID NO: 35246 - DNA, 120 bp, synthetic construct; identical to SEQ ID NO: 9725
  source 1..120: mol_type = other DNA

SEQ ID NO: 35247 - DNA, 120 bp, synthetic construct
  source 1..120: mol_type = other DNA
caatcctactgaaactattccaaaacagagaaggagagaatcctccctaaattattctatgaagccaggatcgccctaataccaaaaccaggaaaggacataataaaaaagaaaactaca

SEQ ID NO: 35248 - DNA, 120 bp, synthetic construct
  source 1..120: mol_type = other DNA
aaggatgatttaatacacacaagtcaataaatgtgatagatcacataaacagatttgaaaacaaaaatcatatgatctcaatagatgcagaaaaagcatttgacaaaatccatcatcgct

SEQ ID NO: 35249 - DNA, 120 bp, synthetic construct
  source 1..120: mol_type = other DNA
ccctgagaactggaacaagataaggatgcccactctcaccacttctattcaacatagtactggaaatcctagccagagcaatcagacaaatcagtaaataggaagtcaaactgtcactgt

SEQ ID NO: 35250 - DNA, 120 bp, synthetic construct; identical to SEQ ID NO: 9726
  source 1..120: mol_type = other DNA

SEQ ID NO: 35251 - DNA, 120 bp, synthetic construct
  source 1..120: mol_type = other DNA
atatcacatgtcagcaggttccatgatgcccacctgagccgcaaaaccagcaagtttttattatggatttcaaaaggggtgggggtctatgaatagggaatgggtcacagggatcacatg

SEQ ID NO: 35252 - DNA, 120 bp, synthetic construct
  source 1..120: mol_type = other DNA
gagcagagaaccagtatgactagaatttgccaggctggaatttcctaatcctagcaagcctgagggcactgcaggagaccagggcatatttcatcccttatcttcaaccatgtaattcag

SEQ ID NO: 35253 - DNA, 120 bp, synthetic construct
  source 1..120: mol_type = other DNA
atatgactctgttctgcctggccctgcaggcagtcagaccttatggttatctcccttgttccctgaaaattgctgttatcctgttcttttcaaggtgcccagttttcatattgttcaaac

SEQ ID NO: 35254 - DNA, 120 bp, synthetic construct; identical to SEQ ID NO: 9727
  source 1..120: mol_type = other DNA

SEQ ID NO: 35255 - DNA, 120 bp, synthetic construct
  source 1..120: mol_type = other DNA
atactgccaaaagcaatctacaaattcaatgcaatccccatcaaaatgccatcatcattctttacagagctagaaaaaaacaatcctaaaattcatatggaactacaaaagagcccacat

SEQ ID NO: 35256 - DNA, 120 bp, synthetic construct
  source 1..120: mol_type = other DNA
gacaaattgaacagaatagaagtcccagaaataaaaccaaatacttacagccaactgatcaaacaaaaacataaagtggggaaaggacagcgtattcaacagatggtactggggaaattg

SEQ ID NO: 35257 - DNA, 120 bp, synthetic construct
  source 1..120: mol_type = other DNA
gaaaaactcttctagacattggcataggcaaagagttcatgaccaagaacccaaaagcaaatgcaaaagaaacaagataaatagatgggacctaattaaactaaaaagtttcttcaaagg

SEQ ID NO: 35258 - DNA, 120 bp, synthetic construct; identical to SEQ ID NO: 9728
  source 1..120: mol_type = other DNA

SEQ ID NO: 35259 - DNA, 120 bp, synthetic construct
  source 1..120: mol_type = other DNA
ctggtgggaaattaaactagtacaacctatggaaaacagtacagcgatgccttaaagaactagaaatagatctaccatttgatccagcaatcccactactggaggaaaaaagccattgta

SEQ ID NO: 35260 - DNA, 120 bp, synthetic construct
  source 1..120: mol_type = other DNA
gtgatatatatatatgtgatctatatatatatagatctatatatatatatatatatatagatcacatatatatatatatgatctatatatagatcacatatgatatatatgtgatctata

SEQ ID NO: 35261 - DNA, 120 bp, synthetic construct
  source 1..120: mol_type = other DNA
gttctcacttataagtgggagctaagctatgaagacacaaaggcataagaattatataatggactttgaggacttccaggtatgagtaggagctgggtaagggataaaagactacacact

SEQ ID NO: 35262 - DNA, 120 bp, synthetic construct; identical to SEQ ID NO: 9729
  source 1..120: mol_type = other DNA

SEQ ID NO: 35263 - DNA, 120 bp, synthetic construct
  source 1..120: mol_type = other DNA
cttgcttctcctctttccaccacctcagccctgtgaccagcatgacttacaggttccagcactgcaggctctctcttctctcccttcagcccccggggcccatgggcagcctaagggaga

SEQ ID NO: 35264 - DNA, 120 bp, synthetic construct
  source 1..120: mol_type = other DNA
aggcttcctctaaatacttctgttcacaaaactctcatgcctgccaaggagatctcagggttccctgcaccccagttctcagtcccacctcagcaaacacaacctctccaaatcctgaag

SEQ ID NO: 35265 - DNA, 120 bp, synthetic construct
  source 1..120: mol_type = other DNA
gcacaggttaagtatccatactccaagtaaatttggagagcatttcccagagatattccaaactcaggcctcataactgccttttgcaaaacatacagttcttgggctcagttatccaag

SEQ ID NO: 35266 - DNA, 120 bp, synthetic construct; identical to SEQ ID NO: 9730
  source 1..120: mol_type = other DNA

SEQ ID NO: 35267 - DNA, 120 bp, synthetic construct
  source 1..120: mol_type = other DNA
atgcagcagcagggtagaaaaggcagccataactgcaaggcaggcagaagatgtagcagagtagacaggaagcagtccaactgacagagaatactggaagatatgagaacaactaaggga

SEQ ID NO: 35268 - DNA, 120 bp, synthetic construct
  source 1..120: mol_type = other DNA
aaacaaactggacaaacaggaagtggctgtacagacaggaagcagccaagaaaagaggatctgggaagtgaaccttcaacaatatggctaccatgacccagagtgaaaagaaaggcacaa

SEQ ID NO: 35269 - DNA, 120 bp, synthetic construct
  source 1..120: mol_type = other DNA
tggaatcagatgagtgaatagatagatgggtggaattgaatacatggttgagtgaacggttggatgtgaagtgagtgggtgaggagatgggtgcatgagtgtattgaaggagagagtggt

SEQ ID NO: 35270 - DNA, 120 bp, synthetic construct; identical to SEQ ID NO: 9731
  source 1..120: mol_type = other DNA

SEQ ID NO: 35271 - DNA, 120 bp, synthetic construct
  source 1..120: mol_type = other DNA
gatagatggagagatgaagactgaaggatagaataagtggctgtggacagtcctgccacataagtggacatctagttattctgcagagatcagcagtcctgaagataggaaatgcaaatc

SEQ ID NO: 35272 - DNA, 120 bp, synthetic construct
  source 1..120: mol_type = other DNA
aagggaccagaagtcactcctttctctgatttttgtggtaacctcaaagactttcttcatctgggatacaggcaccaacaattatcaccccacaggtgtccaacactggactagttcttc

SEQ ID NO: 35273 - DNA, 120 bp, synthetic construct
  source 1..120: mol_type = other DNA
gaagcaggggcgtcaacagggttggagatctgttgatgaaagttgaaaccaatgacgatgagagcagtaatcacaatagctgccatttatcaagtgcttacagtgcaacaaacactgtgc

SEQ ID NO: 35274 - DNA, 120 bp, synthetic construct; identical to SEQ ID NO: 9732
  source 1..120: mol_type = other DNA

SEQ ID NO: 35275 - DNA, 120 bp, synthetic construct
  source 1..120: mol_type = other DNA
agacgggctaagcaggttgaagtcgtccagtctgatcctcatacaggaagctgacaagttggcctggctccaggctcaactgttggacacctgggcactgcagagaatcaggaggggagc

SEQ ID NO: 35276 - DNA, 120 bp, synthetic construct
  source 1..120: mol_type = other DNA
ctggtgtctgattccagaccccaccccattacctccctcaccgtgtcactacacttaggaagaggtagagggtgggtgtgctgagttgggcagtttatgacactcagtagatagacagat

SEQ ID NO: 35277 - DNA, 120 bp, synthetic construct
  source 1..120: mol_type = other DNA
ggaataaatgggggactttgtctcagaagggagtgcaacttgcacttgtggtcacagagggctgctaagaactcctcaacaggacagttcagttatggaaactgggaaggggtaagacta

SEQ ID NO: 35278 - DNA, 120 bp, synthetic construct; identical to SEQ ID NO: 9733
  source 1..120: mol_type = other DNA

SEQ ID NO: 35279 - DNA, 120 bp, synthetic construct
  source 1..120: mol_type = other DNA
ccctctctggtcctccaggtgaacagaacttagcattcaaggagttccctaaagtcaattaatttcacccccaaaccccagctgactttgagggcatccgcatgcatcatgtcgccaaca

SEQ ID NO: 35280 - DNA, 120 bp, synthetic construct
  source 1..120: mol_type = other DNA
caaaaccaaggtaagatttctgaaatgacttctgttgaacttctgactccactctacttcctccttcctggaaatctttacctccttggcttatgtgccagtatattctactaattcttc

SEQ ID NO: 35281 - DNA, 120 bp, synthetic construct
  source 1..120: mol_type = other DNA
tgagttcttttggtatcctcctaaattttgcacctaaggtaagtgcatccctagtcccagcctggctttccacactgtctcttaatatctaacattctctatttatttcattcatttcat

SEQ ID NO: 35282 - DNA, 120 bp, synthetic construct; identical to SEQ ID NO: 9734
  source 1..120: mol_type = other DNA

SEQ ID NO: 35283 - DNA, 120 bp, synthetic construct
  source 1..120: mol_type = other DNA
gaaaacagggcagaagccacttctcacacaggaggaagcaggttcaaaagtgtgggcccagtgtggcaatgacatatctgaagaacttcagctgcttcagtatgaatggagccagctttg

SEQ ID NO: 35284 - DNA, 120 bp, synthetic construct
  source 1..120: mol_type = other DNA
gagtggctactctgtcctggaagtcataaggaatcattgaaggattttaagcaggagagtgatggcgcatttgcaatttaggaagatcactacggcaacagtgggcagcatgagtgaaag

SEQ ID NO: 35285 - DNA, 120 bp, synthetic construct
  source 1..120: mol_type = other DNA
aggacttaatttgattgacattaaagggattattggtgagtgatgtcggtggcatccgacttagaaaactcccagataactcttattcctagactggccaatgcaatcatctcttttgtg

SEQ ID NO: 35286 - DNA, 120 bp, synthetic construct; identical to SEQ ID NO: 9735
  source 1..120: mol_type = other DNA

SEQ ID NO: 35287 - DNA, 120 bp, synthetic construct
  source 1..120: mol_type = other DNA
ttccattcattaaaaagggtaatgagagaagacagcctgactgagagaagagactgagttcagtgtggggctattgcacttagaatgtctaaaagttatctaaggaaaaataatatgtaa

SEQ ID NO: 35288 - DNA, 120 bp, synthetic construct
  source 1..120: mol_type = other DNA
gggatctcagggtatgatgagagaacataataattaagaggagatttcaaaggatgataaggaggattcagtaaataggagaaaaataaggacagagtagctcattagaaagaagtggat

SEQ ID NO: 35289 - DNA, 120 bp, synthetic construct
  source 1..120: mol_type = other DNA
caaaagtcagaagcttagctccaagtgtgaggacacagagagagtgtctctagggtaggatgcagactgaaggcaaggttgttttttattagttggttcatggttatgttgcttttttcc

SEQ ID NO: 35290 - DNA, 120 bp, synthetic construct; identical to SEQ ID NO: 9736
  source 1..120: mol_type = other DNA

SEQ ID NO: 35291 - DNA, 120 bp, synthetic construct
  source 1..120: mol_type = other DNA
catttgggttggttccatgatttgtgattgtgaattgtgctgctataaacacgtatgtgcaaatatctttttcatataatgacttattttcctctgggtagatgcccagtagtgggattg

SEQ ID NO: 35292 - DNA, 120 bp, synthetic construct
  source 1..120: mol_type = other DNA
cacaccaatatctactgtttttttatttttttatcatggccattcttgcaggagtaaggtggtatcacattgtggttttgatttgcatttccctgatcattagtgatgttgagcattttc

SEQ ID NO: 35293 - DNA, 120 bp, synthetic construct
  source 1..120: mol_type = other DNA
tggatattagtcctttgtcagatgtatagattgtgactactctgtgggttgtctgtttattctgctgatggttccttttgccgtgcaaaagctctttagtttaattaagtctcaactatt

SEQ ID NO: 35294 - DNA, 120 bp, synthetic construct
  source 1..120: mol_type = other DNA
gtttaagtccttaatccatcttgagttgatttttgtataaggtgagagatgaggacccggtttcattctcctacatgtggatagccaattatcccagcaccatttgttgaaaagggtgtc

SEQ ID NO: 35295 - DNA, 120 bp, synthetic construct; identical to SEQ ID NO: 9737
  source 1..120: mol_type = other DNA

SEQ ID NO: 35296 - DNA, 120 bp, synthetic construct
  source 1..120: mol_type = other DNA
taggtctttaaattaaggagtaatattctttgaaagtttatgaaactattcagtataaacaccacagaatcagatgttttggaaaatgtagggtcttttatgacattttttcatttcttc

SEQ ID NO: 35297 - DNA, 120 bp, synthetic construct
  source 1..120: mol_type = other DNA
gctgtaaaggcaggtcatatcatccccatactgaagacaaagaactgaagtccaagacaggcagtgtccttcaagctgcatacttccatggtagtgtaggtggtgtgtccatgctcccag

SEQ ID NO: 35298 - DNA, 120 bp, synthetic construct
  source 1..120: mol_type = other DNA
taatctgaagcacggccttgaacaaaggcaaaacagactccaggcctcattttcagttctgggatggatactctaatctctctaaatcatgccactgaatgaccttttacacattgagat

SEQ ID NO: 35299 - DNA, 120 bp, synthetic construct
  source 1..120: mol_type = other DNA
acacatcatctccccaaaactcatgactctgactggttaaaatgagtgtcagtgttctccatctgtcctcgtaacagcatcactggctctatattgtcagatctttaatactaactttct

SEQ ID NO: 35300 - DNA, 120 bp, synthetic construct; identical to SEQ ID NO: 9738
  source 1..120: mol_type = other DNA

SEQ ID NO: 35301 - DNA, 120 bp, synthetic construct
  source 1..120: mol_type = other DNA
ggctcagggaacaattcctaggggactttctctttatggaaccagactctgagacagcatgtggggctcctgccacggcctagtgtccttctatcacagctggagaatcaaactcacctc

SEQ ID NO: 35302 - DNA, 120 bp, synthetic construct
  source 1..120: mol_type = other DNA
caggataaccttggacagacaaggtttcagagagagaggttggcaagtgcagactcctgggtgtgctcacatctgcatccaaccttgaggggactcaggcagagagcccttagctggtgt

SEQ ID NO: 35303 - DNA, 120 bp, synthetic construct
  source 1..120: mol_type = other DNA
ggttcgagcccctaaaggcactcttgttgaaggtatttctcccagcctccccagaacttggttagagtattaggatgggttgaaacctgtcagaagaatgagataaggatgtgtgagtac

SEQ ID NO: 35304 - DNA, 120 bp, synthetic construct; identical to SEQ ID NO: 9739
  source 1..120: mol_type = other DNA

SEQ ID NO: 35305 - DNA, 120 bp, synthetic construct
  source 1..120: mol_type = other DNA
agtgctgttctcatgtcacctcctcattttccagggtaacagtattcgaatctcctgaggacagcccctcaaaccccaaagcccctcacctattacctcaggttcattgtccgggaaagg

SEQ ID NO: 35306 - DNA, 120 bp, synthetic construct
  source 1..120: mol_type = other DNA
actgaacagtgtccagcaggaggtccatagcaacagtgtccataggcagagttgtttgtaggatgaggggtggtgttgggaaacgccatggaaaccctcaaggtgcggggtagcagaaag

SEQ ID NO: 35307 - DNA, 120 bp, synthetic construct
  source 1..120: mol_type = other DNA
taccagagctccccgtgtagaatgaatgtccaatcaaaacctgctggagggagagctggagccataggggagtgggtagagtgggcagggccaattccacaattccctgcatgctcttcc

SEQ ID NO: 35308 - DNA, 120 bp, synthetic construct; identical to SEQ ID NO: 9740
  source 1..120: mol_type = other DNA

SEQ ID NO: 35309 - DNA, 120 bp, synthetic construct
  source 1..120: mol_type = other DNA
gggtactcactcttctgttaatctaactcctcaaataaaatccctagcacaaaagagaggggggaagatccagtcagcaaacagccaacaaacacttttcaaccattaagatctggtgcc

SEQ ID NO: 35310 - DNA, 120 bp, synthetic construct
  source 1..120: mol_type = other DNA
aactaagatagattgagcagtaacagatacaatactatgtatttgacatatgtgagctcatttggttctcacagcagttttgcaaggtaaatagtattattactattttgcctttcaaga

SEQ ID NO: 35311 - DNA, 120 bp, synthetic construct
  source 1..120: mol_type = other DNA
tttctgcaattatattttaatataacctattctgagtgagagatgaattcactcagatcattggttttcaaattgtgctctgggtaactcaattgtcaaagattccgcaaacaggataaa

SEQ ID NO: 35312 - DNA, 120 bp, synthetic construct; identical to SEQ ID NO: 9741
  source 1..120: mol_type = other DNA

SEQ ID NO: 35313 - DNA, 120 bp, synthetic construct
  source 1..120: mol_type = other DNA
actacaggccgagtctacggtgccgctgtgcccagccccaccccttctctactgtcctctgccaccagctgtgcatcttctatgaggggtgaggttaataaacgtgagttgctaatttgt

SEQ ID NO: 35314 - DNA, 120 bp, synthetic construct
  source 1..120: mol_type = other DNA
tcattgctacttctgtatacacatgcacctgccggacactgcccatggtgctccctaggaagaactgcaggtggaaaaggctgccacatttctttatgtaaaaatgacaccatcaatgcc

SEQ ID NO: 35315 - DNA, 120 bp, synthetic construct
  source 1..120: mol_type = other DNA
ttgagatcaagtctttctacagccatgtttgaaagtgaaaattaactttcaggctatatagtctttcttatggcaaacttcaagaagttttaagaaatgcatttctggccaagtgcggtg

SEQ ID NO: 35316 - DNA, 120 bp, synthetic construct
  source 1..120: mol_type = other DNA
tctgggcgtggtggcgcacacctgtaatcccagctactcaggaggctgaggcaggaaaactgcttgaaccctggaggcggaggttgcagtgagctgagattgcaccactggactccagcc

SEQ ID NO: 35317 - DNA, 120 bp, synthetic construct; identical to SEQ ID NO: 9742
  source 1..120: mol_type = other DNA

SEQ ID NO: 35318 - DNA, 120 bp, synthetic construct
  source 1..120: mol_type = other DNA
cccaactcctcctatccctactgtttctctgcctgagggaccctccccctgatgagattctgctcctccctgagacgtgaaatgtctccccctcctcctccagccgccagcagaaagggc

SEQ ID NO: 35319 - DNA, 120 bp, synthetic construct
  source 1..120: mol_type = other DNA
gacctgcctaggaccacagaactcggtagtaggaaaaatcgtatttttaaatccagtcctgagtgggaagatttgaggaaatagctaatattgaggaggggggtgttgttgggagtggca

SEQ ID NO: 35320 - DNA, 120 bp, synthetic construct
  source 1..120: mol_type = other DNA
cgtgcattttgacagcgcagtgggggagttcctagcagtgatggagctggggcggcccataggcgagtacttcaatagccagaaggactttatggaacggaagcgagccgaggtggacaa

SEQ ID NO: 35321 - DNA, 120 bp, synthetic construct; identical to SEQ ID NO: 9743
  source 1..120: mol_type = other DNA

SEQ ID NO: 35322 - DNA, 120 bp, synthetic construct
  source 1..120: mol_type = other DNA
gcctggcagctgactgcatgtggggtgaggggaaacgaggccacaggacatcgtgcaggggtgcggtgtggagatgaaggtggagatggcacagcaggccacgcagagaagaaacctgca

SEQ ID NO: 35323 - DNA, 120 bp, synthetic construct
  source 1..120: mol_type = other DNA
gaggggcctggcctacatgagaccacccagggagaggggacccatcgggaggagcataggactggatcctgggaactggacattgtgattttgtaacggctccattgtctggggtatata

SEQ ID NO: 35324 - DNA, 120 bp, synthetic construct
  source 1..120: mol_type = other DNA
gaaaagaaaagagagaaaaaatccttcctcatgctgagaaagtgggttgcccaaaagagggtctgcggtttgtggtggaatgcagtcggttttgtacagaggttgaggaggcggtgattg

SEQ ID NO: 35325 - DNA, 120 bp, synthetic construct
  source 1..120: mol_type = other DNA
gtcttttattattcaaatacggtctccaactggtggtggacaggatacctgtacatgtggttttacctggaggctgccatgacacctgtaaacgtggtgacaaggaaaagagagtgggaa

SEQ ID NO: 35326 - DNA, 120 bp, synthetic construct; identical to SEQ ID NO: 9744
  source 1..120: mol_type = other DNA

SEQ ID NO: 35327 - DNA, 120 bp, synthetic construct
  source 1..120: mol_type = other DNA
ggcatgtccatgtgtggctttgtttgcagcaccatttgaagtttgattgcttctaggcaaaaagagataaattttacaagaaggtttaaaatatagggttaccatatgagtattaagatt

SEQ ID NO: 35328 - DNA, 120 bp, synthetic construct
  source 1..120: mol_type = other DNA
atcatttcctttgagaaaacatgtttcccccttgacttgctattagggcataatttttggtttaggccattctttataacttatgatatgattgggagaaaaacgttattgggtggctaa

SEQ ID NO: 35329 - DNA, 120 bp, synthetic construct
  source 1..120: mol_type = other DNA
taaacaaccagtcatttccttttaggacaagaatttactatacaagatcctttcttatataaaatccctttatttgtaaccttctttccatagcttagagtgcaccatttaccaatcttc

SEQ ID NO: 35330 - DNA, 120 bp, synthetic construct; identical to SEQ ID NO: 9745
  source 1..120: mol_type = other DNA

SEQ ID NO: 35331 - DNA, 120 bp, synthetic construct
  source 1..120: mol_type = other DNA
tctgcaaatatgcattaaaaaaaagttctaatactgagcagtgaattttgagaggaaaggtagaaatgataaagagtacctggtgaggtaggattggcgctaaggcgagtagccctcact

SEQ ID NO: 35332 - DNA, 120 bp, synthetic construct
  source 1..120: mol_type = other DNA
gtgatatattcagaggttgatacttgtaacttttactgctgggggggttgaaagaagaattgtgtagggcccttcccagcctggcttagggaaggagagagagatgagttttcaccaata

SEQ ID NO: 35333 - DNA, 120 bp, synthetic construct
  source 1..120: mol_type = other DNA
caatctctgagcacactgatgataagttttatcctttcctatgtgaaaaagcttggtgaaggattttaaggactttccattgactggaggccagtaaatggagtttgtcatcctcagggc

SEQ ID NO: 35334 - DNA, 120 bp, synthetic construct; identical to SEQ ID NO: 9746
  source 1..120: mol_type = other DNA

SEQ ID NO: 35335 - DNA, 120 bp, synthetic construct
  source 1..120: mol_type = other DNA
aaatgttagctatctttcccctgcttaatttaagtgcacttgcaagaactattagttcagctaattgagtgcttgtgtctggggagagacattagagtgactattgcttgtcctgcctta

SEQ ID NO: 35336 - DNA, 120 bp, synthetic construct
  source 1..120: mol_type = other DNA
aaacagttaaattatttcctagggttaatttggaggcttttttgactagtagagccaccgtggcaatggcttggaagcatgtgtaaacaataggtcctcctaactgcaattaggaggttg

SEQ ID NO: 35337 - DNA, 120 bp, synthetic construct
  source 1..120: mol_type = other DNA
ggagaaaagagagagagactggctcgagtgtttagaaggaggtctagtttccttccttcaatttccagaatcacctggtggctcccgtgctgtaatggcagtttgagccactggagctgg

SEQ ID NO: 35338 - DNA, 120 bp, synthetic construct
  source 1..120: mol_type = other DNA
ggttgaggtggcttcctcttgctgtttgggcactcctttttaaaatgccctggcttgccacactgatagcaactagcggatgcacctcagaaatcttggactttgcaagcttgcaaagct

SEQ ID NO: 35339 - DNA, 120 bp, synthetic construct; identical to SEQ ID NO: 9747
  source 1..120: mol_type = other DNA

SEQ ID NO: 35340 - DNA, 120 bp, synthetic construct
  source 1..120: mol_type = other DNA
gtctatcatagacagttgagaggaattaagaggtcaggccttagttcttcatagaccctctaatatgcatattttaaaaatgcttccatttctattcatttgcagagctactggggtccc

SEQ ID NO: 35341 - DNA, 120 bp, synthetic construct
  source 1..120: mol_type = other DNA
tctccaaaattatctgctgcctgcagagctgcctgcttttcaactgcggttagagtttggtttaggagcagcataacatccttccatgtgaggtgaaacacctgagttaaattctggaca

SEQ ID NO: 35342 - DNA, 120 bp, synthetic construct
  source 1..120: mol_type = other DNA
gtatttctcatcaggtgggacgagagactgagaaaagaaataagacacagagacaaagtatagagaaagaacagtgggcccaagggaccagtgctcagcatacagaggacctgtgccggc

SEQ ID NO: 35343 - DNA, 120 bp, synthetic construct; identical to SEQ ID NO: 9748
  source 1..120: mol_type = other DNA

SEQ ID NO: 35344 - DNA, 120 bp, synthetic construct
  source 1..120: mol_type = other DNA
ttatctcaactgcaaagaggccttcctctttcactaatcctcctcagcacagaccctttatgggaatcagccttggggacggtcaggtcaggtcccttcccacaaggccatgtctcaggc

SEQ ID NO: 35345 - DNA, 120 bp, synthetic construct
  source 1..120: mol_type = other DNA
ttcaccaagcatactgcctacaaacacatttttaacaaagcacaccctgcacagccctaaatccattaaaccttgagtcaatacagcacaggttttctgcgagcacagggttggggctag

SEQ ID NO: 35346 - DNA, 120 bp, synthetic construct
  source 1..120: mol_type = other DNA
ccccatattggcaaccctaaataaggggaattctcagatggttcccttggaaattgcctttctaattctgggggattattttctataggcctacctgatatgcctatttaaaaagctggg

SEQ ID NO: 35347 - DNA, 120 bp, synthetic construct; identical to SEQ ID NO: 9749
  source 1..120: mol_type = other DNA

SEQ ID NO: 35348 - DNA, 120 bp, synthetic construct
  source 1..120: mol_type = other DNA
gtcctccaagccgtggaactggataaactaagtgatgggattaaccatactttacccacacaaccttagcttatccaccttatgtgatcccctttgacgtcctaaatttgtgtgatctgc

SEQ ID NO: 35349 - DNA, 120 bp, synthetic construct
  source 1..120: mol_type = other DNA
tgcctgccattacggcccatgctaagacatttacccttagcaaaatggctctggttaacttccgaacctaaaatccccttgctaattaagtactatcctaattggagacggaaatgaacg

SEQ ID NO: 35350 - DNA, 120 bp, synthetic construct
  source 1..120: mol_type = other DNA
actgttgaagacagtgctttctcgttcacagaagaggcttttctagcggcacgaaagaatttggaagcggcagtgttacggtaaaaaaccgacaaggtgcctgatgaagaggatttttat

SEQ ID NO: 35351 - DNA, 120 bp, synthetic construct; identical to SEQ ID NO: 9750
  source 1..120: mol_type = other DNA

SEQ ID NO: 35352 - DNA, 120 bp, synthetic construct
  source 1..120: mol_type = other DNA
gaaaggaaactggtatgaagagattcttgagattaaagaacagatttgacgtttgctctatactcaccactccgatgtttctatcttccattctgatttggatcccggatgagctcccaa

SEQ ID NO: 35353 - DNA, 120 bp, synthetic construct
  source 1..120: mol_type = other DNA
gagtgagaggaaaagcttcctaatgctgataaggcaggtcacccaagagagggtctcctgtttctggtggaaagcaattggttttgtacagaggcttgaggaggcagtgattgatttaca

SEQ ID NO: 35354 - DNA, 120 bp, synthetic construct
  source 1..120: mol_type = other DNA
cctgtacacgtgctttaacctggaggctgccttgacacctgtaaacgtagaagggaaagagggtgagaatagccatattgaattacctgacttccaggaacagctgccagcatttacata

SEQ ID NO: 35355 - DNA, 120 bp, synthetic construct; identical to SEQ ID NO: 9751
  source 1..120: mol_type = other DNA

SEQ ID NO: 35356 - DNA, 120 bp, synthetic construct
  source 1..120: mol_type = other DNA
aaggatgaggagagtgacatgggtttaggaaagttgctggcgtaattggttgagagaggtgtccaaataaaagtaatacaatttgcaaaatctgtcactaagacttcatagaggcccaaa

SEQ ID NO: 35357 - DNA, 120 bp, synthetic construct
  source 1..120: mol_type = other DNA
atttgcaaaatctgtcactaagacttcatagaggcccaaatcagcgacatggcagcattttctttcatggtaatcagctgccagattgcagagaccccctgatgccagactaaggagtgt

SEQ ID NO: 35358 - DNA, 120 bp, synthetic construct
  source 1..120: mol_type = other DNA
gggaggtctggagatctgtgtttttaatcagctcccaagtgattcccatgtaaccagataagtgtcagaacactgaagatttttgaaaatcttcagaaatcttaaaatgacaaggctgga

SEQ ID NO: 35359 - DNA, 120 bp, synthetic construct
  source 1..120: mol_type = other DNA
gaccatcctggctaacaaggtgaaaccccgtctctactaaaaatacaaaaaattagccgggcgcggtggcgggcgcctgtagtcccagctactcgggaggctgaggcaggagaatggcgt

SEQ ID NO: 35360 - DNA, 120 bp, synthetic construct; identical to SEQ ID NO: 9752
  source 1..120: mol_type = other DNA

SEQ ID NO: 35361 - DNA, 120 bp, synthetic construct
  source 1..120: mol_type = other DNA
tgcccacccaaatctagaattaactgagcaaaggcaactagaacaaacaggaatccttgccttggtgaaatatatttgaactgggtcagaaatgaggccactgggtatcaagccttagct

SEQ ID NO: 35362 - DNA, 120 bp, synthetic construct
  source 1..120: mol_type = other DNA
gaatgttctgggaccttaaaacagacaaccatatatcccatgactttcatgcttcccaggacacctatggggaagaagttccacttaatctacagttgggattcagacatgggctgacca

SEQ ID NO: 35363 - DNA, 120 bp, synthetic construct
  source 1..120: mol_type = other DNA
aatgccatagggagtaagggttgggggttagttaaagactgttcatttacctggcccaggcccatgtcagtgtatttgtgttctcaagaacagagtaaataaggacctagaagctctgat

SEQ ID NO: 35364 - DNA, 120 bp, synthetic construct
  source 1..120: mol_type = other DNA
ggctgaggtccaaaggaaaagctgcaggtggtagcgtggaaattgatctgtaagcggcagaaaaagagggggcaaaaatagagaggtgccaaggcacagccaacacctggttatctgaga

SEQ ID NO: 35365 - DNA, 120 bp, synthetic construct; identical to SEQ ID NO: 9753
  source 1..120: mol_type = other DNA

SEQ ID NO: 35366 - DNA, 120 bp, synthetic construct
  source 1..120: mol_type = other DNA
agtgtcgctgctgattaaatattctttgtccaaaggctgttaatcagtggctgatagataagatttcttttaaatgtgctacaaactggtaagtttgtgtgcctcctattcttctcaata

SEQ ID NO: 35367 - DNA, 120 bp, synthetic construct
  source 1..120: mol_type = other DNA
tgcaatggtgggatcttagctcatgcaacctctgcctccggggttcaagcgattctcctgcctcagcctcctgagtagctgggattacaggcatgcaccaccacacccagctaattttgt

SEQ ID NO: 35368 - DNA, 120 bp, synthetic construct
  source 1..120: mol_type = other DNA
ttcaacatctagaaatcaattccataatgagcatgtctaagaaataataatctcaaatgctattccacttttccacttcgccactcctagtccagcctagggtgaacatctcccctccaa

SEQ ID NO: 35369 - DNA, 120 bp, synthetic construct; identical to SEQ ID NO: 9754
  source 1..120: mol_type = other DNA

SEQ ID NO: 35370 - DNA, 120 bp, synthetic construct
  source 1..120: mol_type = other DNA
cctctgaagagcaggggactctctggctctggggtccactcatctggttttatgtgtctataccctgggaccatgtccgaccccatttttcttctatagaagacactgagtgtagtttta

SEQ ID NO: 35371 - DNA, 120 bp, synthetic construct
  source 1..120: mol_type = other DNA
gaactgttgtcttccttcagccttttagcttattctaagttattttgagaggcaactaattgaatctgaatttgtctgttgttgaggtcacaccctctgttctagaattgagagagtgac

SEQ ID NO: 35372 - DNA, 120 bp, synthetic construct
  source 1..120: mol_type = other DNA
tctgaacctgagcctgttcttcctagaggcacagtctgattctgtgcagagcaagatgctgacaggagccaggggcttcatgctggggctcatcatctgtggagtggacatcttcacgca

SEQ ID NO: 35373 - DNA, 120 bp, synthetic construct; identical to SEQ ID NO: 9755
  source 1..120: mol_type = other DNA

SEQ ID NO: 35374 - DNA, 120 bp, synthetic construct
  source 1..120: mol_type = other DNA
ggcaatattcctgctttgatttccttgttgggggagttacaggaggacataagtcctttctgtacattgtgacactgaggctcctctaggaagagagtctcaggcctgaacccctgtttc

SEQ ID NO: 35375 - DNA, 120 bp, synthetic construct
  source 1..120: mol_type = other DNA
ctgggacttaaaggaagggggccagcaacctgggattactgttttttacctccacagggttgctgaccttgcctaaaagactaatgtaccttggaacaagcattttctgtttctttagtc

SEQ ID NO: 35376 - DNA, 120 bp, synthetic construct
  source 1..120: mol_type = other DNA
ggcctccaaccaagttcctttctccttagtgccatgagtaatcaaaacccaacatgattgttttctgttaagaatatacaccaagtcatgtctcatcacttttttttcttgagggtttta

SEQ ID NO: 35377 - DNA, 120 bp, synthetic construct; identical to SEQ ID NO: 9756
  source 1..120: mol_type = other DNA

SEQ ID NO: 35378 - DNA, 120 bp, synthetic construct
  source 1..120: mol_type = other DNA
cactttctttgcatgccatcacaaatactccttaaccaaatgttgcttggccttttgaatgcatcaagtagacgacatttatcctctaagtctgcattcattcaccagcctagacctcct

SEQ ID NO: 35379 - DNA, 120 bp, synthetic construct
  source 1..120: mol_type = other DNA
atttcatattaagttactgtaaatcaaggtagaagacatgtttggtctaagctttccttttcgtgtagaggatggattcttaactcctgatacacataatgagcactcagtggctctctg

SEQ ID NO: 35380 - DNA, 120 bp, synthetic construct
  source 1..120: mol_type = other DNA
ccaatcagagtcatctccttccatttttgtcccctggacgcatgctgtaggtgtcagccgtacccagagtggagtgaacaatctgcagactaactcttgcaggatgcaaaactgaggtat

SEQ ID NO: 35381 - DNA, 120 bp, synthetic construct; identical to SEQ ID NO: 9757
  source 1..120: mol_type = other DNA

SEQ ID NO: 35382 - DNA, 120 bp, synthetic construct
  source 1..120: mol_type = other DNA
agagattcaaaagaaagttaggcctggagatttaaaggagaccgaagctggtgacttccttatgtcaacttctgactgagaaagtttgacacctggagtagaataaacacactggggtta

SEQ ID NO: 35383 - DNA, 120 bp, synthetic construct
  source 1..120: mol_type = other DNA
cacaaataactgctcatcttcatcagattcaaacatatactccccagagggtctgtgtgtctgcacaaactctgcatacgttgacacatggtctgctgcttgaaggggaagaagactgca

SEQ ID NO: 35384 - DNA, 120 bp, synthetic construct
  source 1..120: mol_type = other DNA
aggaatggggataaacaatgatagaaatgactcatagaagatttcagttgtttccctggtctctgaagacttacacaaccctcacatcattccaataatgataacactgaacacaatcag

SEQ ID NO: 35385 - DNA, 120 bp, synthetic construct
  source 1..120: mol_type = other DNA
gtggcaggtgcctgtagtcccagctactcaggaggctgaggcaggagaatggcgtgaacccgggaggtggaacttgcagtgagctgagatcgcgccactgcactccagtctgggagatag

SEQ ID NO: 35386 - DNA, 120 bp, synthetic construct; identical to SEQ ID NO: 9758
  source 1..120: mol_type = other DNA

SEQ ID NO: 35387 - DNA, 120 bp, synthetic construct
  source 1..120: mol_type = other DNA
aaaaagaaaaaaagaaaaacttcagctgaattcaatataaaagagtcaaattgagcaatgaacgattcgtgaatcaggcagcctcccgaggcagagtaggctcagagactccattgcagg

SEQ ID NO: 35388 - DNA, 120 bp, synthetic construct
  source 1..120: mol_type = other DNA
gttggctacatatgattggccgaaacttggtgattgacacaagtgtaggctgtttacacctccacttgttatagttcacgatgtacagagaaacctttaggccaaacttaaaatatgtaa

SEQ ID NO: 35389 - DNA, 120 bp, synthetic construct
  source 1..120: mol_type = other DNA
atttggtcttgaaaccccctgggaaatagcagaacaatgagttttgtaagggggaacaaggatttcaggttattttattttattttaattttatttttgtaagggttacctccttttgtt

SEQ ID NO: 35390 - DNA, 120 bp, synthetic construct; identical to SEQ ID NO: 9759
  source 1..120: mol_type = other DNA

SEQ ID NO: 35391 - DNA, 120 bp, synthetic construct
  source 1..120: mol_type = other DNA
tagttgaagagagacaatttgacattctagagatggctgcatgcaaacatttaaaactttcgagagaatacagtgcaccaggtagactactattatgactatcaggaggataataccaag

SEQ ID NO: 35392 - DNA, 120 bp, synthetic construct
  source 1..120: mol_type = other DNA
acaactgaatctctgtacacctgacgtgatgtatttctccataggccacaagtgccagcagctgcacagatacttctctgtttagccagtaagtaatctacagcaatcctactattaagc

SEQ ID NO: 35393 - DNA, 120 bp, synthetic construct
  source 1..120: mol_type = other DNA
gtaaaaaggacctaaggaaaaatgcccttctagaagactgaaggcctcctggcaatgttctctttaacccatgatgtggaataggggagtgaatcaatgttctgtttctgactgattatg

SEQ ID NO: 35394 - DNA, 120 bp, synthetic construct; identical to SEQ ID NO: 9760
  source 1..120: mol_type = other DNA

SEQ ID NO: 35395 - DNA, 120 bp, synthetic construct
  source 1..120: mol_type = other DNA
tctcagttgtgagatcatgaagccaaagttcacggttctgatgtttactgcagtgtggatggcaagggcagtctttctctgatgttctcagaagatccaatcttcaggttctagattgtg

SEQ ID NO: 35396 - DNA, 120 bp, synthetic construct
  source 1..120: mol_type = other DNA
acaaccagaaaacatgcattgaaaatgacaattgactgaaatctcttcataaatgtttaaatggctcatgaggtagcagaatgtacctgaagctttgattgtcttcccaggaatatgggt

SEQ ID NO: 35397 - DNA, 120 bp, synthetic construct
  source 1..120: mol_type = other DNA
attataaaagctttaaaagctcaggaaggataaggcagccaccttggttctccatgagtccatgcttgacacggttgtttctccaattgaggtgcatagcactgataactgatgggttat

SEQ ID NO: 35398 - DNA, 120 bp, synthetic construct; identical to SEQ ID NO: 9761
  source 1..120: mol_type = other DNA

SEQ ID NO: 35399 - DNA, 120 bp, synthetic construct
  source 1..120: mol_type = other DNA
ggggtcctttccatcctttcaggaacctcctaaaagacaccatattctagaattgtgcctacttgtgaagttttcagaaattgcaccagcattaagcaattaactgtggaaatgaccttc

SEQ ID NO: 35400 - DNA, 120 bp, synthetic construct
  source 1..120: mol_type = other DNA
gctcactgcaactccgccttccaggctcaagcaattctcatgcctcagactctccagtagctggaactgcaggtgtgcagcactgcaccaggctaatttttgtatttttagtagagactg

SEQ ID NO: 35401 - DNA, 120 bp, synthetic construct
  source 1..120: mol_type = other DNA
gtagtgcctcctctgtttttcccaaggagtcccaggctgttagaagttaccttaggtcctctcatgtgtgcaacaaaagtggcaagaagacaaaatggagaaaaacaattcagttggcta

SEQ ID NO: 35402 - DNA, 120 bp, synthetic construct; identical to SEQ ID NO: 9762
  source 1..120: mol_type = other DNA

SEQ ID NO: 35403 - DNA, 120 bp, synthetic construct
  source 1..120: mol_type = other DNA
tcaaactcctgacttcaggtgatccatcctccttggcctcccaaagcgctgggattgcaggcatggaccactgcgcccagcctaaaataatcattttaaatctcttattacttgacttta

SEQ ID NO: 35404 - DNA, 120 bp, synthetic construct
  source 1..120: mol_type = other DNA
aaggtagcaagcaatttttacaaactctagaatttccaaacgtagctcagagaaaggaaaattcaagacgagagtcagaagttgttcatgaggggaagagaatcagcaaatagcaaagat

SEQ ID NO: 35405 - DNA, 120 bp, synthetic construct
  source 1..120: mol_type = other DNA
cctcccagaaggaggagcctaagagcagccaattttcagcttgcaaaggcttttaactgctcaagataatttttagagctaactatgacatgaactccaaaattcctgtcctccagaggg

SEQ ID NO: 35406 - DNA, 120 bp, synthetic construct; identical to SEQ ID NO: 9763
  source 1..120: mol_type = other DNA

SEQ ID NO: 35407 - DNA, 120 bp, synthetic construct
  source 1..120: mol_type = other DNA
tgcaagttccacctcccgggttcacgccattctcctgcctcagcctcccgagtagctgggactacaggcgcccgccacctcgcccggctaattttttgtatttttagtagagactgggtt

SEQ ID NO: 35408 - DNA, 120 bp, synthetic construct
  source 1..120: mol_type = other DNA
cattaattaaaactttgcagaggagacagtgatttttactactcctacaaccgtttccacacagagagaggccagaagcctgactgctaagaaattcttacccttttgccagcatgccag

SEQ ID NO: 35409 - DNA, 120 bp, synthetic construct
  source 1..120: mol_type = other DNA
agcctctcaattttgtaagatgctgcccaagagattgcatgagggaactgaattaacattttcccttccagccacagcaaaatacatgtgacaaaacatagacattagccactctgctta

SEQ ID NO: 35410 - DNA, 120 bp, synthetic construct; identical to SEQ ID NO: 9764
  source 1..120: mol_type = other DNA

SEQ ID NO: 35411 - DNA, 120 bp, synthetic construct
  source 1..120: mol_type = other DNA
cctcggaggcagagcttgcagtgagccgagatcgcaccactgcactccaggctgggtgacatagcaagactccgtttcaaaaaaaaaaaaaaaagaaagatagaaaaaggaaagaagaga

SEQ ID NO: 35412 - DNA, 120 bp, synthetic construct
  source 1..120: mol_type = other DNA
gctcatgcctttaatcacagcactttgggaggccaaggtgggcggatcacctgaagtcaggagttcgagaccagcctgaccaacatggtgaaaccctgtctctactaaacacaaaaaatt

SEQ ID NO: 35413 - DNA, 120 bp, synthetic construct
  source 1..120: mol_type = other DNA
ctgggagacagagtgagactccgtttcaaaaaaaaaaaaagttcaggcagctgcttgtcagtcatgaaggatcttttccagccatctcatcagctctcaagtttcctgctttggggagaa

SEQ ID NO: 35414 - DNA, 120 bp, synthetic construct; identical to SEQ ID NO: 9765
  source 1..120: mol_type = other DNA

SEQ ID NO: 35415 - DNA, 120 bp, synthetic construct
  source 1..120: mol_type = other DNA
tctcagctcatggcagcctccacctcctgggttcaagtgattcttgtgcctcagcctcccgagtagctggaattacaggcacatgccaccatgcctggctaatttttttttttaattttt

SEQ ID NO: 35416 - DNA, 120 bp, synthetic construct
  source 1..120: mol_type = other DNA
aatttctgtaaggcgttgctccttccagggcctaatacttatgcatgtataatccagaaggaactcagttcttcagaaattcagtatcacattttttacctcaaatactggctttgctct

SEQ ID NO: 35417 - DNA, 120 bp, synthetic construct
  source 1..120: mol_type = other DNA
atattgccatttaatactggtttctttctgatccagttagatgtaagaggtctctaaccggatccaagccagttaattactggagccaatccgatcctggactcagttcaatttctttcg

SEQ ID NO: 35418 - DNA, 120 bp, synthetic construct; identical to SEQ ID NO: 9766
  source 1..120: mol_type = other DNA

SEQ ID NO: 35419 - DNA, 120 bp, synthetic construct
  source 1..120: mol_type = other DNA
ggacagaaaaagaaaagtaacatacagaaaacagaagtgaggtacagaaacagccagattggttacagctcaatgtttgcctaacttgaacacagttcaaacagttagctacatatgatt

SEQ ID NO: 35420 - DNA, 120 bp, synthetic construct
  source 1..120: mol_type = other DNA
ttaggctaaacttgatttaacagaggaaattattttacatattggggaactgaccacagaagtaaagtaactcacccaagtcacacaactcctggtagaaacaaaattgcgtagtccccc

SEQ ID NO: 35421 - DNA, 120 bp, synthetic construct
  source 1..120: mol_type = other DNA
aatgaaggacatgaaaagacctccagagtaagtcttagtgctatttatagacttcaagttatgttcttacttttagaataaaaatggtaccttatataattttatcaaaacactttcatt

SEQ ID NO: 35422 - DNA, 120 bp, synthetic construct; identical to SEQ ID NO: 9767
  source 1..120: mol_type = other DNA

SEQ ID NO: 35423 - DNA, 120 bp, synthetic construct
  source 1..120: mol_type = other DNA
agtgtcacacacggatgttgagggtcctccactgagtttatgggctagagaattactcacctacagaaacgaagcccaaagaaaaaacagatgaaaaacatgatatacaagctgtgctac

SEQ ID NO: 35424 - DNA, 120 bp, synthetic construct
  source 1..120: mol_type = other DNA
aataaacactcattgtgaattttcactctttaggcactaaggatgtaactcagaagacctgggccttgtcctcaagctgcttgaaatccaaaatccaaagagacaaagaaaagaagattg

SEQ ID NO: 35425 - DNA, 120 bp, synthetic construct
  source 1..120: mol_type = other DNA
tacactggagccactcaggagcataaagagggcatttttgaaaaatgagatttaggaaaggttcctagggatagtgtttacctgaggttagcaaaacagagaaaggggaaatgacatgtc

SEQ ID NO: 35426 - DNA, 120 bp, synthetic construct; identical to SEQ ID NO: 9768
  source 1..120: mol_type = other DNA

SEQ ID NO: 35427 - DNA, 120 bp, synthetic construct
  source 1..120: mol_type = other DNA
caataatgaaacgaaaagccacaggaatcactaaatcatgtgccagaagtagggatatgaaggagtccagaatacccaacgtggagaactggggcatcagtgactgcaaaggtaatgaaa

SEQ ID NO: 35428 - DNA, 120 bp, synthetic construct
  source 1..120: mol_type = other DNA
ctaggttagtgacacagactggaaggaagctcattataagtgaagttctaaatttggatcaggtcactcaagaaaagtacataaagtcagaatagcaagggtctgagtgtgtgctcctgc

SEQ ID NO: 35429 - DNA, 120 bp, synthetic construct
  source 1..120: mol_type = other DNA
ttcataaaagacaacagacaggagaaaacatccaggaaagaggagcggacgcatcacaaacacactcatgacacacaagagatagagacagagaagtgatcactggtttgggttgtataa

SEQ ID NO: 35430 - DNA, 120 bp, synthetic construct; identical to SEQ ID NO: 9769
  source 1..120: mol_type = other DNA

SEQ ID NO: 35431 - DNA, 120 bp, synthetic construct
  source 1..120: mol_type = other DNA
gattgcactccagcctgggcaacagagcaggaccctgtcgagagagagagaggagagagagagagaaaagaagaagaagaaaaagaagaagaagaggaggagggggagggagaaaaggaa

SEQ ID NO: 35432 - DNA, 120 bp, synthetic construct
  source 1..120: mol_type = other DNA
agaggaggttgccaagccctggctcttctctcttcagcgagaggacgtgggggaaaggagacatttatgaatctctttgagtctcagtcttttcatttctaaaattgtgttaataaaagc

SEQ ID NO: 35433 - DNA, 120 bp, synthetic construct
  source 1..120: mol_type = other DNA
agaatgagagaaagcaaaagagagcctcaggcaaaacagtaaagaacagagaaaacagaacaggaaagaaaacagcatctgtgggctccagaagcgcccagagcccccaccctccctcgc

SEQ ID NO: 35434 - DNA, 120 bp, synthetic construct; identical to SEQ ID NO: 9770
  source 1..120: mol_type = other DNA

SEQ ID NO: 35435 - DNA, 120 bp, synthetic construct
  source 1..120: mol_type = other DNA
agcccctgactactgcagagtgtaggggtaagtgaagaaaacgaaaattaggacatcataatcgccttcttcttaatgaggaaatacattacgcaagttgggattttttatttgtagtta

SEQ ID NO: 35436 - DNA, 120 bp, synthetic construct
  source 1..120: mol_type = other DNA
aaatctttgatgttttcaaacatataaggagaaggaaataatatttaattatttaattagtaattattattttatttcttcttcatataaaaatgtggtgaggctgggcgcacagctgaa

SEQ ID NO: 35437 - DNA, 120 bp, synthetic construct
  source 1..120: mol_type = other DNA
gaaaccccatctctactaaaaatacaaaaattagctgggcatggtggcacgtgcctgtaatcccagatactcgaggggctgaggcaggagaattacttgaacccaggaggtggaggttgc

SEQ ID NO: 35438 - DNA, 120 bp, synthetic construct; identical to SEQ ID NO: 9771
  source 1..120: mol_type = other DNA

SEQ ID NO: 35439 - DNA, 120 bp, synthetic construct
  source 1..120: mol_type = other DNA
atgttaattcatgtacttcctctttcccaagttctctagtttatagcatgtcctttcctgaggaacataaatcacatgttattgtctgcctttcatcctgagaggaaggagataatcaca

SEQ ID NO: 35440 - DNA, 120 bp, synthetic construct
  source 1..120: mol_type = other DNA
caatgaagagcctcaggatgagtcagtgtggttttacccaggcatggagaaattaacttcttgatgatgatcaagtcttcttattaaataggagtgcaactgatagaggatcttcttaca

SEQ ID NO: 35441 - DNA, 120 bp, synthetic construct
  source 1..120: mol_type = other DNA
cagatggaacagacaccaagcctggctttgccactgaacacaatacaggactgataaaggtcagttcttaggaatatgcttcccaaatgtagaaatcaacataagatcccaattttaaat

SEQ ID NO: 35442 - DNA, 120 bp, synthetic construct
  source 1..120: mol_type = other DNA
ggttcaggcgatcctcccatctcagtctctagagtacctgagagctaattttttgtttttggtagagatgaggttttaccatgttggccaggctggtcttggactcctgagctcaagtaa

SEQ ID NO: 35443 - DNA, 120 bp, synthetic construct; identical to SEQ ID NO: 9772
  source 1..120: mol_type = other DNA

SEQ ID NO: 35444 - DNA, 120 bp, synthetic construct
  source 1..120: mol_type = other DNA
tcaggaggctgggcacagtggctcacgcctgtaatcccagcactttgggaggccaaggcaggcagatcacctgaggtcgggagttcaagaccagcctgaccaatatggtgaaatcctgtc

SEQ ID NO: 35445 - DNA, 120 bp, synthetic construct
  source 1..120: mol_type = other DNA
accacaccattgcactccagcctgggcaacaagagcaaaactccatcccccactcccaaaaaaaaaaaaaaagttatcaggaaaacttatagttgctacaatattattagattaatacga

SEQ ID NO: 35446 - DNA, 120 bp, synthetic construct
  source 1..120: mol_type = other DNA
aattttgatgaaatatggtcataaattatgatgacaagttagttttgggggattttatatattaccagataccaatgccagaggaagagctatgttaggggtcctcagagccaccccagg

SEQ ID NO: 35447 - DNA, 120 bp, synthetic construct; identical to SEQ ID NO: 9773
  source 1..120: mol_type = other DNA

SEQ ID NO: 35448 - DNA, 120 bp, synthetic construct
  source 1..120: mol_type = other DNA
ttcagagaaacagaatttattggatatatataggtagatagatgagtggggatttatgctggggattcactccctcaactatggaggctgaggagttccacgttaggccttctgcaagct

SEQ ID NO: 35449 - DNA, 120 bp, synthetic construct
  source 1..120: mol_type = other DNA
agtccaagaccaaaaacctggggggctgctggtgcaagtccctgagtgtgaaggccagagaacctggagatctgatgtccaaggggaggagaatataggactccctactccaaaacagag

SEQ ID NO: 35450 - DNA, 120 bp, synthetic construct
  source 1..120: mol_type = other DNA
acaccactgcacttcagcctgggcaacagagtgagactctgtctccaaaaaaaagaaaaagaaagtcatatattggtacagaagatactcttaaatcctacttttctggaaatattggtt

SEQ ID NO: 35451 - DNA, 120 bp, synthetic construct
  source 1..120: mol_type = other DNA
gggattcagatgagtgttctgtgaaatttttaatttttgcagaacaccatgagaaattacacattttctattctatatttcttgtaggaaatagaggctgcccatctctcagtgccacat

SEQ ID NO: 35452 - DNA, 120 bp, synthetic construct; identical to SEQ ID NO: 9774
  source 1..120: mol_type = other DNA

SEQ ID NO: 35453 - DNA, 120 bp, synthetic construct
  source 1..120: mol_type = other DNA
cccagagaattttacatgcaaggaatttgactatgaataagcctccattgcttaagagagacttcactatttgggattttaagaaagaaatacacaaacaagcaaatctcatcagcagag

SEQ ID NO: 35454 - DNA, 120 bp, synthetic construct
  source 1..120: mol_type = other DNA
aagtcatttcgattgatcgccaactcagagtcctcaacatttcaccttttgctttatgaaaagaactagtagattaatttagagtttgacaaggagaagcaggtctcccttgattttctg

SEQ ID NO: 35455 - DNA, 120 bp, synthetic construct
  source 1..120: mol_type = other DNA
gagtcaagccgtgaagccagctgtcttgggggtaaggatttccatacagaaacactgtaagtaaataatttagcacttgtttcctattcctttttattggataactacagagaattaaaa

SEQ ID NO: 35456 - DNA, 120 bp, synthetic construct; identical to SEQ ID NO: 9775
  source 1..120: mol_type = other DNA

SEQ ID NO: 35457 - DNA, 120 bp, synthetic construct
  source 1..120: mol_type = other DNA
tgctagattgccaaacaaacctaattacattttttgtttggttttttgtttttttcaaaacctcctaacctctgtgacctaattatgtttttaatgagttgattgtaaaaactaacatca

SEQ ID NO: 35458 - DNA, 120 bp, synthetic construct
  source 1..120: mol_type = other DNA
agtgttctcacccaacacaaaaaatatgtaaggtaatgcacatattaattagcttgatttagccattaaacaatgtgtgtgtgtgtgtatatatatatatatatatatatatataaacat

SEQ ID NO: 35459 - DNA, 120 bp, synthetic construct
  source 1..120: mol_type = other DNA
aagttacaaactgagggaaagccttcgacatcgtatttgcaagaaagaaagtgtacatagttagacagtcctagtatctgtaaagtgggtgtgatcatcggagagcaatcccttgagcag

SEQ ID NO: 35460 - DNA, 120 bp, synthetic construct; identical to SEQ ID NO: 9776
  source 1..120: mol_type = other DNA

SEQ ID NO: 35461 - DNA, 120 bp, synthetic construct
  source 1..120: mol_type = other DNA
agaagctgcaaatttagcagtagttttggcaaaccctcaattcatgtaatttaacagtgctagggaccaaaccgaaggggaatgccaagacaaaaagcttataaacgttaagagctcatt

SEQ ID NO: 35462 - DNA, 120 bp, synthetic construct
  source 1..120: mol_type = other DNA
ccctccagatctgttccaacctgtgtctggagacactctgcactcacgttaaaacagtttagacaaaggacaatgtttaggaattccagaaactttgggatataacatcaatggcaactt

SEQ ID NO: 35463 - DNA, 120 bp, synthetic construct
  source 1..120: mol_type = other DNA
gttatgaaacattaatgggagatacagagaaccaagaaagcttctatggtgatttctcctgcccctgggcatgttatctgaacttacgattgcaactgtgggagctggaaaagctcttaa

SEQ ID NO: 35464 - DNA, 120 bp, synthetic construct; identical to SEQ ID NO: 9777
  source 1..120: mol_type = other DNA

SEQ ID NO: 35465 - DNA, 120 bp, synthetic construct
  source 1..120: mol_type = other DNA
gaagatcttgctaaatcaacccttgattagcattcatgcatcaatctggctgatgtatccttttcaatcccaataaattatattcaccaacagtctgccttcacttggcagccccaacct

SEQ ID NO: 35466 - DNA, 120 bp, synthetic construct
  source 1..120: mol_type = other DNA
caggagtgacttgaaaaaagctgtgtccatgaggaaactttttggggtaatagaaatattatcttcattgtagtagtagttacacaatgaatatgtttgtcaaactcataaacaactgta

SEQ ID NO: 35467 - DNA, 120 bp, synthetic construct
  source 1..120: mol_type = other DNA
aggctggagtgcagtggcgcaatcttagctcactgcaacctccccctcccaggttcaagcaattctcctgccttagccccaagtagctgggattatagatgcgcaccaccatatccagct

SEQ ID NO: 35468 - DNA, 120 bp, synthetic construct; identical to SEQ ID NO: 9778
  source 1..120: mol_type = other DNA

SEQ ID NO: 35469 - DNA, 120 bp, synthetic construct
  source 1..120: mol_type = other DNA
ccacatctgtattaaacttgggtctcttcattgaattatgtgggtccttaaaagagcctcagagctgtgctgtctaatatggtagcactagctagctacctgtggccatttaaattaaat

SEQ ID NO: 35470 - DNA, 120 bp, synthetic construct
  source 1..120: mol_type = other DNA
catcacagaaagtgctcacagacttagaggccaaactgtcttagaggccaaacaggtatatagaccactggagtttaatgacttaagtattgaatacaaaattaggtggcatatgtctct

SEQ ID NO: 35471 - DNA, 120 bp, synthetic construct
  source 1..120: mol_type = other DNA
aggaattcgagaccagcctggccaacgtggcaaaaccctgtctctactaaaaacacaaaaaaattagctgggcatgtatctggggaacccacccctaatatttcaatgcaggttctttct

SEQ ID NO: 35472 - DNA, 120 bp, synthetic construct; identical to SEQ ID NO: 9779
  source 1..120: mol_type = other DNA

SEQ ID NO: 35473 - DNA, 120 bp, synthetic construct
  source 1..120: mol_type = other DNA
ccggtctgacctcaaattcaccagggtggggtttttccccaccctagtgagcctgagggtactgcaggagaccagggcgtatttcagtccttatctcaaccgcataagacagacactccc

SEQ ID NO: 35474 - DNA, 120 bp, synthetic construct
  source 1..120: mol_type = other DNA
ataggctctctgcaagaagaaaaatatggctcttttagcccaaccccacaggcagtcagaccttatggttgtctttccttgttccctaaaatcgctgttattctgttcattttcaaggtg

SEQ ID NO: 35475 - DNA, 120 bp, synthetic construct
  source 1..120: mol_type = other DNA
ggcataagaaattataagagtattacttgggaactgataaatgtccatgaaatcttcacaatttatgttcagagattgaagtaaagacaggcgtaagaaattataagagcattattaggg

SEQ ID NO: 35476 - DNA, 120 bp, synthetic construct
  source 1..120: mol_type = other DNA
tgtaatcctagctacttgggaggctgaggcagaagaatggcttgaacctgggaggcagaggttgcagtgagctgagattgtgccactgcactccaacctgggcgacagagaaagactcca

SEQ ID NO: 35477 - DNA, 120 bp, synthetic construct; identical to SEQ ID NO: 9780
  source 1..120: mol_type = other DNA

SEQ ID NO: 35478 - DNA, 120 bp, synthetic construct
  source 1..120: mol_type = other DNA
gaccaacgtggtgaaactccatctctactaaaaatacaaaaattagccaggcatggtggcacatgcctgtaatcccagctactcaggaggctgaggcaggagaatcgctagaacctgggg

SEQ ID NO: 35479 - DNA, 120 bp, synthetic construct
  source 1..120: mol_type = other DNA
tcccctttctccttcagctgactggaacacaaacatgaaagctggaattcaagcagtcatattggacctgagagagaagagctatgttgaggctggtggaagaaaaagatagatagaagg

SEQ ID NO: 35480 - DNA, 120 bp, synthetic construct
  source 1..120: mol_type = other DNA
agctaatcctaaccaagcagaacaagcacaaagtcatcaaaacataaactggagtttgcaaagcacatgtcacttccaagcatcagatacagtaaaatgatgagatgtttttcccaagcc

SEQ ID NO: 35481 - DNA, 120 bp, synthetic construct; identical to SEQ ID NO: 9781
  source 1..120: mol_type = other DNA

SEQ ID NO: 35482 - DNA, 120 bp, synthetic construct
  source 1..120: mol_type = other DNA
ccacactgcatctatagcttccaggtacaagtcttagtatcttcaaagcatttgcaatagccataaaatggctctttcatgacagcaaagtggtggcaggcatttctacagctaaggggt

SEQ ID NO: 35483 - DNA, 120 bp, synthetic construct
  source 1..120: mol_type = other DNA
aacattgtaggagggtggagtgtaaacatatgaagagtctggaaccctgatggcatcattaaatgctcaaaccaatgctggaagctgtcatcctcagatttcttatgagaaaaatgaatt

SEQ ID NO: 35484 - DNA, 120 bp, synthetic construct
  source 1..120: mol_type = other DNA
ctctgtgcctttgcttatttcttttttttttttttttttttttttttttttgacagagtttcactcttgttgcccaggctggagtgcaatgccgtgatcttggctcaccgcaacctctgc

SEQ ID NO: 35485 - DNA, 120 bp, synthetic construct; identical to SEQ ID NO: 9782
  source 1..120: mol_type = other DNA

SEQ ID NO: 35486 - DNA, 120 bp, synthetic construct
  source 1..120: mol_type = other DNA
agcctccccagtagctgggattacagacacgtgccaccacacctggcgaattttttgtatttttagtagagacaaggttacaccatgttgaacaggctgatctcgaactcctgacctcaa

SEQ ID NO: 35487 - DNA, 120 bp, synthetic construct
  source 1..120: mol_type = other DNA
actttggaattgcctggggaaattttacacaagtccctttgctcacgccccaaatgggttgaatccagatctctaagggtgagcacaggtgggcatgactatttttaacagttcttctag

SEQ ID NO: 35488 - DNA, 120 bp, synthetic construct
  source 1..120: mol_type = other DNA
tgaaaacactgaaaagctttacttacaatattgttattgatatttactgtattcaaaattagaactgaaaaagatttttaacatgtattaattctttttaagatagcaataacaggcaag

SEQ ID NO: 35489 - DNA, 120 bp, synthetic construct; identical to SEQ ID NO: 9783
  source 1..120: mol_type = other DNA

SEQ ID NO: 35490 - DNA, 120 bp, synthetic construct
  source 1..120: mol_type = other DNA
aatttgtccataataaaagtaaacaaaaaggactttaaataaattacggaaaatgtagatctttaaagaattagaagaccatcagctttatttggatcatgagtcaaacacacacacaca

SEQ ID NO: 35491 - DNA, 120 bp, synthetic construct
  source 1..120: mol_type = other DNA
ttaaaattgtggtaacagaattgtgattacattttaagagtaaaccagtaaaatctttaacaaagacacaaggagggcccatggatccattatgtacagtagccacagtgcctagggccc

SEQ ID NO: 35492 - DNA, 120 bp, synthetic construct
  source 1..120: mol_type = other DNA
tgatttcaaatttattgtttagaaaagtgcatagggcccgcagaagtcacaatgcagccctggatataacggccatgaaagtttatgtgctgaatcacaaagtggcaaaatatgaactgg

SEQ ID NO: 35493 - DNA, 120 bp, synthetic construct; identical to SEQ ID NO: 9784
  source 1..120: mol_type = other DNA

SEQ ID NO: 35494 - DNA, 120 bp, synthetic construct
  source 1..120: mol_type = other DNA
ctcagggacagagataacccaagctaagccaatcagattgtctctccatgactttgaaccatggggcccagagacacagaggtcaagagcagctctgctgagcggtgagtatccacactc

SEQ ID NO: 35495 - DNA, 120 bp, synthetic construct
  source 1..120: mol_type = other DNA
cttaagctattctgaatcagattttgcgatttgtaacaagaaaataataatagtaagtatagagttttaacagcactaaaatcaaaagtggaaaagggacagcagcatgccccagacacc

SEQ ID NO: 35496 - DNA, 120 bp, synthetic construct
  source 1..120: mol_type = other DNA
gctgtcagtaaagggggaattattcctttacagagcaagtattatcccactttgcaggtgaagaaactgatgctgaggttaagtgtgcaactcagaagcaaagcatccctgacaagctaa

SEQ ID NO: 35497 - DNA, 120 bp, synthetic construct
  source 1..120: mol_type = other DNA
tttgtctgagtccctctctccccagggccccaatcaaacagggtgctatttctcatcttctccctaaccctaatgtctctgaaacatgtttgttgggtttggggtttgtttgtttctata

SEQ ID NO: 35498 - DNA, 120 bp, synthetic construct; identical to SEQ ID NO: 9785
  source 1..120: mol_type = other DNA

SEQ ID NO: 35499 - DNA, 120 bp, synthetic construct
  source 1..120: mol_type = other DNA
gacctttacatgagctgctgtacagccagtgtggcttttatctgttgtactttgggaaatcatccatgcctcaggaaccaaaagtccttcaacctagagtaaggcgtttttaatagaaag

SEQ ID NO: 35500 - DNA, 120 bp, synthetic construct
  source 1..120: mol_type = other DNA
cgtctctactaaaaataaaaaaaaatagccgggcgtggtggcgggcacctgtagtcccagcttctcaggaatctgaggcaggagaatcgcttgaacccgggaggcggaggttgcagtgag

SEQ ID NO: 35501 - DNA, 120 bp, synthetic construct
  source 1..120: mol_type = other DNA
cccaggagtttgagaccagcctcggcaacatggagaaaccacgtctctactaaaaatacaaaaaattagctgggcatggtggcactcgcctgtagtcccagctactcaggaggctgaggg

SEQ ID NO: 35502 - DNA, 120 bp, synthetic construct; identical to SEQ ID NO: 9786
  source 1..120: mol_type = other DNA

SEQ ID NO: 35503 - DNA, 120 bp, synthetic construct
  source 1..120: mol_type = other DNA
cctactgagatggcagtctgctgtcagtgccagttcccatgaaactactctgaagatgaaagaaaagataacagaaggccagttataagcacttaaggtgacttctgcttactctaggtt

SEQ ID NO: 35504 - DNA, 120 bp, synthetic construct
  source 1..120: mol_type = other DNA
ccctgatgctccctgctgaccacaccacacttgcaggaaaatgggctaaacaaccacaaaacaaggtggccaccagctactacacagaaacttatttctgaggcagctggagccctttgt

SEQ ID NO: 35505 - DNA, 120 bp, synthetic construct
  source 1..120: mol_type = other DNA
ctcctgagtagctgcaactacaggcacatgccaccatgcccagctaatttttaaattatttttttgtagagaaaaagggccgtgcgtgatggctcatacctgtaatctcagcactttggg

SEQ ID NO: 35506 - DNA, 120 bp, synthetic construct; identical to SEQ ID NO: 9787
  source 1..120: mol_type = other DNA

SEQ ID NO: 35507 - DNA, 120 bp, synthetic construct
  source 1..120: mol_type = other DNA
agcatgcaagacagccaagggagggcaagaacagctctgtgtagcccatggccttctaggatatgtggtgctcccaggtacagtgatataagtggtctgtaagttatttttattttattt

SEQ ID NO: 35508 - DNA, 120 bp, synthetic construct
  source 1..120: mol_type = other DNA
cacaagttattttttaaccataagttacagatgctaaaaatataagcccaaagctgaaaagcagctccaagggtgtgacaggccagaggacccaccccacagccctccctctatacatga

SEQ ID NO: 35509 - DNA, 120 bp, synthetic construct
  source 1..120: mol_type = other DNA
aatacaaaaattagccaggcgtggcagtgcacacctgtagtcccagctatccgggaggctgaggcaggagaattgcttgaacctgggaggcaggggctgcagtgagccgagatggcgcca

SEQ ID NO: 35510 - DNA, 120 bp, synthetic construct
  source 1..120: mol_type = other DNA
ccatcatatcacttgccttttcaaacaccatctatgactcttagtttttgggttcaagttcaactccttccataagcagtcaatacttttcagaatttggcccctccaacaagagtttat

SEQ ID NO: 35511 - DNA, 120 bp, synthetic construct; identical to SEQ ID NO: 9788
  source 1..120: mol_type = other DNA

SEQ ID NO: 35512 - DNA, 120 bp, synthetic construct
  source 1..120: mol_type = other DNA
attaaataggcttttgtggattggcctggggacttagccgccgtatataaatgttattcgagtgactgtacagcattgtttccatgcagaaaagccctcggaactcagagcatctgacca

SEQ ID NO: 35513 - DNA, 120 bp, synthetic construct
  source 1..120: mol_type = other DNA
gcgggagaaacagatggggggcacctatttagatctgatcttctcttaatgtgaccctgagagggagggaagggggtgtctgaagcccctgggccttggatattgagatggagagcatgg

SEQ ID NO: 35514 - DNA, 120 bp, synthetic construct
  source 1..120: mol_type = other DNA
accgggattattcagctgacccggtgcggggccgcgttctcagcgcgggcactagggggcggcagaggcggaggcgccagcgccgaggagaggcttccaccctcgagaagtttttccgcg

SEQ ID NO: 35515 - DNA, 120 bp, synthetic construct; identical to SEQ ID NO: 9789
  source 1..120: mol_type = other DNA

SEQ ID NO: 35516 - DNA, 120 bp, synthetic construct
  source 1..120: mol_type = other DNA
cccatgggcaccagctagggggtcccggctgcgcggccagccttggaagagaggacttcttggacacctaacccggagggagcagagcttctgagtgcccaggagagggaggctagggaa

SEQ ID NO: 35517 - DNA, 120 bp, synthetic construct
  source 1..120: mol_type = other DNA
tcttcatgacagcacagcacaaggctgatggggagggataaggtgaccagaggtacagatgcagtaaatgtcttggaagtgggcctcagcctccccatttacagagattagactgggcta

SEQ ID NO: 35518 - DNA, 120 bp, synthetic construct
  source 1..120: mol_type = other DNA
cacccaggctttgtaaactctgggccctgacaccccagctggacagggcttgcagggtatctggattaagccatacaattctggtaaccacttagctgggaagaggaagcatcagatggg

SEQ ID NO: 35519 - DNA, 120 bp, synthetic construct; identical to SEQ ID NO: 9790
  source 1..120: mol_type = other DNA

SEQ ID NO: 35520 - DNA, 120 bp, synthetic construct
  source 1..120: mol_type = other DNA
acccagaccaagtggaagagacagtgggcacatgggccaggcagccaacacctgtgggttagagagccccaccctggcagagtcagagccctgaggccagggagaccacatattccaact

SEQ ID NO: 35521 - DNA, 120 bp, synthetic construct
  source 1..120: mol_type = other DNA
gcccacccccgagacccctgtcttcaacatctgctgatttttgttggcgtttctcttttttgttattttgctttccacactttaaataattaatacaattacttttaaatacaaaatacg

SEQ ID NO: 35522 - DNA, 120 bp, synthetic construct
  source 1..120: mol_type = other DNA
cactcctcccgtggggtgtccaggcaaccacttcacccctcccctggcctgccccgactgagggctctccacgccctggcccagggctccctagatagtgaggagccctcttgggaggtg

SEQ ID NO: 35523 - DNA, 120 bp, synthetic construct; identical to SEQ ID NO: 9791
  source 1..120: mol_type = other DNA

SEQ ID NO: 35524 - DNA, 120 bp, synthetic construct
  source 1..120: mol_type = other DNA
cgtgtgtgtttgcttctcccccaccgtgtgcctctgctgggcagccatgtgccagtctgtgtacacgtctgcattaacctgtgtgacgctggtgtttgtacccaagtgaacctcacccga

SEQ ID NO: 35525 - DNA, 120 bp, synthetic construct
  source 1..120: mol_type = other DNA
cctccttcctccagcctgagtctgagatcagcccccaacccagctcttcctgttcccacctggcagccatctctgaattctttgacataggggctagtctccgggctcagctcatcctca

SEQ ID NO: 35526 - DNA, 120 bp, synthetic construct
  source 1..120: mol_type = other DNA
gagccctctgagtccacgtaagagaactggaaggagagagagggctggcctcagagggggagagagagggctggcctcagagggagacagagacgggcctcaggagcatctacggcacca

SEQ ID NO: 35527 - DNA, 120 bp, synthetic construct; identical to SEQ ID NO: 9792
  source 1..120: mol_type = other DNA

SEQ ID NO: 35528 - DNA, 120 bp, synthetic construct
  source 1..120: mol_type = other DNA
cgagcacagccctggttggggtcgacccagtactctcctgttgggtgagggagaggggaggtcagggccacctaggtccaggctccaagatgctctttgcccccacattccctcttccct

SEQ ID NO: 35529 - DNA, 120 bp, synthetic construct
  source 1..120: mol_type = other DNA
tgacacctctgcccccaacagtaaccccaggccctctgactggaggaggtccgagtatggacagcctcatactgggacaacatgtggttgcaggcgctcacacagattcatctgttcagg

SEQ ID NO: 35530 - DNA, 120 bp, synthetic construct
  source 1..120: mol_type = other DNA
cagatcagttgctaaagtattgggatacttctgacctggttagtaaatagctgcagttcccagcccctcagccctcacccttaacccaacaccttcaccaagactcccccagcatccatt

SEQ ID NO: 35531 - DNA, 120 bp, synthetic construct; identical to SEQ ID NO: 9793
  source 1..120: mol_type = other DNA

SEQ ID NO: 35532 - DNA, 120 bp, synthetic construct
  source 1..120: mol_type = other DNA
gacaaggttggtgtgagggtgaagtgtggcagcagtggagcagaggggtacggccctgggagcagccctgactcctcactcaccgggtgtcctggagggccctgcacacccttctctccc

SEQ ID NO: 35533 - DNA, 120 bp, synthetic construct
  source 1..120: mol_type = other DNA
ggggggagtctatttgtcctggagagacatcatcaagtccagagggggtggagcaaaggtcagagctgaagggggtcactcactgtggctcctttggctcctttggggccagcaggtccc

SEQ ID NO: 35534 - DNA, 120 bp, synthetic construct
  source 1..120: mol_type = other DNA
tgggaatactaggacattcagagccctggaagtatggggaggaggtactggtggtgacaggacaaatgggggaccctgaggactatgcttgttaggctggtagttccatggaagtcgttg

SEQ ID NO: 35535 - DNA, 120 bp, synthetic construct; identical to SEQ ID NO: 9794
  source 1..120: mol_type = other DNA

SEQ ID NO: 35536 - DNA, 120 bp, synthetic construct
  source 1..120: mol_type = other DNA
ccaatgagacctgggtggccctagagaagggtgcaggcagtcaagagaatgcaaagaggagtcatgtggatgggggagaagggccaagaggacatggagagggagccgggcacagggtcc

SEQ ID NO: 35537 - DNA, 120 bp, synthetic construct
  source 1..120: mol_type = other DNA
cacgtgtctgtctgtcactcaccttctctcccttggctccagcatcgccccggagaccaggcagccctgggggtccctgtggagagatgggaagtcattctcttaagggagaggtgggac

SEQ ID NO: 35538 - DNA, 120 bp, synthetic construct
  source 1..120: mol_type = other DNA
gcctgtagctccaggtcggccttgctgaccctgaagatttgagggggccacaggggtcaggaggagcatccccacactgcacccctcccatggcccctcactcccaccccagcccagccc

SEQ ID NO: 35539 - DNA, 120 bp, synthetic construct; identical to SEQ ID NO: 9795
  source 1..120: mol_type = other DNA

SEQ ID NO: 35540 - DNA, 120 bp, synthetic construct
  source 1..120: mol_type = other DNA
tgctccagcactagggcagcctgtccctcaccttggctcccttccctccttgtcgcccctcggaaccaggcgagccagcaggaccctgcaggtggagtgggaaggaagagcacatgaggc

SEQ ID NO: 35541 - DNA, 120 bp, synthetic construct
  source 1..120: mol_type = other DNA
gatacagctgtgacagttgtgaaaatactgggtagtctgtacatttggtgaagggccacttgcccacaccctacctggtggcccgtctcctgccccagaaactaaaaaggttcacccctg

SEQ ID NO: 35542 - DNA, 120 bp, synthetic construct
  source 1..120: mol_type = other DNA
tacacaccagaacccaggaacaaacatgcccgagataccgcacacccatcaacccaccagctcctgcacacacactcgcccagtgcaatgagataccgcatacccttaaacccaccagct

SEQ ID NO: 35543 - DNA, 120 bp, synthetic construct; identical to SEQ ID NO: 9796
  source 1..120: mol_type = other DNA

SEQ ID NO: 35544 - DNA, 120 bp, synthetic construct
  source 1..120: mol_type = other DNA
gggtcaccaggcactcacaggctgtcctggctcaccatcctcgcctcggtcacccttagcaccatcctggccctgcagaagtgaagcaaggtcagaggtgggcccccaacctggctggca

SEQ ID NO: 35545 - DNA, 120 bp, synthetic construct
  source 1..120: mol_type = other DNA
cccttcccttctctgagtaagactcacccgagggccaccttctccaggggggccagggtcaccaggaaaaccaacaggaccctgatccagatggagaataagagtcagggtcacagctcc

SEQ ID NO: 35546 - DNA, 120 bp, synthetic construct
  source 1..120: mol_type = other DNA
gttgtctaattcctcaaggtattaactgcagggcatctctcactttctctccggatcctagaccccaggcatccctctggatgccccattcccagagcatcccccaaactcccgggctcc

SEQ ID NO: 35547 - DNA, 120 bp, synthetic construct; identical to SEQ ID NO: 9797
  source 1..120: mol_type = other DNA

SEQ ID NO: 35548 - DNA, 120 bp, synthetic construct
  source 1..120: mol_type = other DNA
ttcccttcaagaaaggggaagaagggctcactcagaccagggatcaggcctcatagaggatggcagggagcagagactcttgctgcagaggagttccagctcaaggaggtcacaggaaaa

SEQ ID NO: 35549 - DNA, 120 bp, synthetic construct
  source 1..120: mol_type = other DNA
caaagagattagagtcaaaaacctcctctccttccccagccaaaaaattctgatattccccacatctcattctcttttgtctccccacccaaaattggcagaaatccaactcccatcccc

SEQ ID NO: 35550 - DNA, 120 bp, synthetic construct
  source 1..120: mol_type = other DNA
ttgcttaggatggaggtgccatttcaggggcaaagtcccagatgagcagcccaaggttacagcagtgaggcagtggaggcctcccgggagtaagggcttctcttggcccctgagacgata

SEQ ID NO: 35551 - DNA, 120 bp, synthetic construct; identical to SEQ ID NO: 9798
  source 1..120: mol_type = other DNA

SEQ ID NO: 35552 - DNA, 120 bp, synthetic construct
  source 1..120: mol_type = other DNA
accctgtgcaagtatacaaaacatgggcccaggtgacgaccccacccaaagcacagccctaggcagataggccccacagtcccctcccctcagactccgcaggccctccagtctgcatcg

SEQ ID NO: 35553 - DNA, 120 bp, synthetic construct
  source 1..120: mol_type = other DNA
ttgttccttcatcacctttggctccaaagtgtccctggggtccccgagctccgggctccccatctgctccctgcagggttgagggaaagcagagacaaggacacagggatgggtcatggg

SEQ ID NO: 35554 - DNA, 120 bp, synthetic construct
  source 1..120: mol_type = other DNA
tcggtgggggtggaggggtcactcaccgctgctccaggctgccccacaggaccaatgggtccagggggtccaggagggccctgggtaagagaagagagtcagagacaccaaaacagggag

SEQ ID NO: 35555 - DNA, 120 bp, synthetic construct; identical to SEQ ID NO: 9799
  source 1..120: mol_type = other DNA

SEQ ID NO: 35556 - DNA, 120 bp, synthetic construct
  source 1..120: mol_type = other DNA
tctcaccctgtgggacaggaggaaggagtcatggcctggaggtgaccctcaccctcaaacaccccacaggaaacttgtcatagcccatcaaccctaggctcacagacccctccccagtac

SEQ ID NO: 35557 - DNA, 120 bp, synthetic construct
  source 1..120: mol_type = other DNA
ccccaggggagccctgagaaagcagatggtcagacccccaggaaggagacaccagcccgcccataccagagaacctcagaccacaattcccaaaagctcccaaaatcagatgcattctgg

SEQ ID NO: 35558 - DNA, 120 bp, synthetic construct
  source 1..120: mol_type = other DNA
actgcagggccaggggggccagacggaccttcattccccttcaaaccaggtccaccctatgaaccagacatttggggaagatgagacttcacgaaaagagaagggtgagagctggagagg

SEQ ID NO: 35559 - DNA, 120 bp, synthetic construct; identical to SEQ ID NO: 9800
  source 1..120: mol_type = other DNA

SEQ ID NO: 35560 - DNA, 120 bp, synthetic construct
  source 1..120: mol_type = other DNA
acctttgttccttcttttccagctgtcccaggtagtccctgctctccagggggccccggggggcctgggtgacctctctcccccatagggccggtttctcctgctgctccctagacaaaa

SEQ ID NO: 35561 - DNA, 120 bp, synthetic construct
  source 1..120: mol_type = other DNA
tccccggcattcctgggccactgctgggttttctcctgccccatgtggagtaactacaccaccttgtgtctctgttggggaactgcctctcctgggggacaagacgatgagaatgcgccc

SEQ ID NO: 35562 - DNA, 120 bp, synthetic construct
  source 1..120: mol_type = other DNA
gacagactaatgctagggtcaggggtccattctctcctagggacaaacctacctgaggtcccaccactcctggaggaccaggggggccggtcttcccttggaaaccctaggcgaggaaga

SEQ ID NO: 35563 - DNA, 120 bp, synthetic construct; identical to SEQ ID NO: 4068
  source 1..120: mol_type = other DNA

SEQ ID NO: 35564 - DNA, 120 bp, synthetic construct
  source 1..120: mol_type = other DNA
tagggaagaaggactcagagaagcgaggtgggtcagagctcggggtcaacttaccgggggtcctttcggtccaggaaacccgttgggaccctgaggtccagggaggccctagagacagag

SEQ ID NO: 35565 - DNA, 120 bp, synthetic construct
  source 1..120: mol_type = other DNA
gatccacactcaccctctctccagggggcccatgggggccatcaccaccagatgttccctgtggggggaaacagagtcaaggagtgggaagagctgctttccagctgtccccgaggtcag

SEQ ID NO: 35566 - DNA, 120 bp, synthetic construct
  source 1..120: mol_type = other DNA
tacagagggaagaggagttgtcagagaaacccaaatgcccccctctggaccttgagccacctgtttctctcccctgcactcaccgtggggccccgttctccccgaggccctgacttcccc

SEQ ID NO: 35567 - DNA, 120 bp, synthetic construct; identical to SEQ ID NO: 9802
  source 1..120: mol_type = other DNA

SEQ ID NO: 35568 - DNA, 120 bp, synthetic construct
  source 1..120: mol_type = other DNA
agctaaattccctctggggtcccccactgccctgcatctgtgctttctggaatcagggatcagggaagcgaagaggaggagggaagaggaggaggggcacgtatggggcatggcatcacc

SEQ ID NO: 35569 - DNA, 120 bp, synthetic construct
  source 1..120: mol_type = other DNA
caaccctcacatataacagccagcccccacccagcaacacaccccacacaccccagcctctagcccctcattgcttgccccacagctgcctgacttttgttgtctctccttcccgtgagt

SEQ ID NO: 35570 - DNA, 120 bp, synthetic construct
  source 1..120: mol_type = other DNA
catgagggaggtgggatctaccccagcacccactcctgcttcaccaagaccaatccccctgcaggccctttgcccaccacaccccgactcccgtgcatgcccccttccccagaggctcca

SEQ ID NO: 35571 - DNA, 120 bp, synthetic construct; identical to SEQ ID NO: 9803
  source 1..120: mol_type = other DNA

SEQ ID NO: 35572 - DNA, 120 bp, synthetic construct
  source 1..120: mol_type = other DNA
ttcgtgtcagggacttttccctgacttcttatatatcccctctgcccatcagcagctgagagatgccatttacacagacagaagtatgactaatgcatggccatcttcaactgactggct

SEQ ID NO: 35573 - DNA, 120 bp, synthetic construct
  source 1..120: mol_type = other DNA
ccagtcggtccagtgcgtccctttggcccctcaggaccatcctctcccctggaaccagggactccaacttcgccctgtgtgagagggaaggacaggtgagtgctggggactggaggtggg

SEQ ID NO: 35574 - DNA, 120 bp, synthetic construct
  source 1..120: mol_type = other DNA
atgacacagaccatggggctatcatcctgtaggggtcaggctcccaagggaacacagcactggaactgtggagtctggagactcaggagaataaaccggtgcttggcgtctccagagtgg

SEQ ID NO: 35575 - DNA, 120 bp, synthetic construct; identical to SEQ ID NO: 9804
  source 1..120: mol_type = other DNA

SEQ ID NO: 35576 - DNA, 120 bp, synthetic construct
  source 1..120: mol_type = other DNA
tagactgatcaggggatggaggtgggttggaaggaccaagctcctaagaccccatatagctcccctgaccacagccctttgtctcccagcctggtggtcagttaccttgacccctcgagg

SEQ ID NO: 35577 - DNA, 120 bp, synthetic construct
  source 1..120: mol_type = other DNA
aacaacattgctgtctgggtagggttacggggcacaggaattgagaatgtggcagagccatatgaataatgagacaagggaatcccaaggactttgaggctctagagtctgagtggagac

SEQ ID NO: 35578 - DNA, 120 bp, synthetic construct
  source 1..120: mol_type = other DNA
ccctctctgcacccctccctacacttcttccaacccaaatttcctgtgacctagtgaagccaactgtccatggacaagcaccaccagtgacctttcagtgcaagggtcactaaaggagct

SEQ ID NO: 35579 - DNA, 120 bp, synthetic construct; identical to SEQ ID NO: 9805
  source 1..120: mol_type = other DNA

SEQ ID NO: 35580 - DNA, 120 bp, synthetic construct
  source 1..120: mol_type = other DNA
attcaaagcatgagcaacaagggcctgaaacccttaatttcctgtatccttccagggtctcacccattgtggaagcccaagggaagtcatgaaaattggggaacggagtaggggcaccgc

SEQ ID NO: 35581 - DNA, 120 bp, synthetic construct
  source 1..120: mol_type = other DNA
gagctgagtcccagcagcgatagccaagaaggcaagagcaggaagcaggcaggggtcaaaatggcggccaacaggatgctggcagggacctcgggggataagaatgggggtgggatctcc

SEQ ID NO: 35582 - DNA, 120 bp, synthetic construct
  source 1..120: mol_type = other DNA
aggcccggccattcccgagggtgtgacggtcagacctccaatccatcccaaacccaagcaaacacagctggcccaggcctgcagtgtgtgggactgtggatctgtgggcttgtgggcttt

SEQ ID NO: 35583 - DNA, 120 bp, synthetic construct; identical to SEQ ID NO: 9806
  source 1..120: mol_type = other DNA

SEQ ID NO: 35584 - DNA, 120 bp, synthetic construct
  source 1..120: mol_type = other DNA
atgtccccctcctggcttccccagagccccctcccccagcaccagcccttggacactcaccgactctccaggcagccctcgaggcccaatctccccgtcatctccctggaggaggaggac

SEQ ID NO: 35585 - DNA, 120 bp, synthetic construct
  source 1..120: mol_type = other DNA
cctgcaaaatgggggaactcataagaggggcttcagagcccccaacacaggcagacaccgaacctctgcacttagcccatccattactttcactgagctcctgccaagcctccagcctcc

SEQ ID NO: 35586 - DNA, 120 bp, synthetic construct
  source 1..120: mol_type = other DNA
tcaccctaggaggaggaaggatagccagagtgaggacacgaccctgtccaagcccacccctccctactgcaccctgagctgggggggtgctgatcctggggaagcctggagaactaggtc

SEQ ID NO: 35587 - DNA, 120 bp, synthetic construct; identical to SEQ ID NO: 9807
  source 1..120: mol_type = other DNA

SEQ ID NO: 35588 - DNA, 120 bp, synthetic construct
  source 1..120: mol_type = other DNA
gtgcagtggaggaaagtggtcacctgaggtcctaagtctccagactctcctttcaggccagggctcccaggttggccctgggagagagaagagaggatggccgtaaggaaggacacagcc

SEQ ID NO: 35589 - DNA, 120 bp, synthetic construct
  source 1..120: mol_type = other DNA
ctgtgtatcccatggggccagggggtccacggagcgccagctaggggagcagggggacagcagagctgagggacaggcagtgggaacccccagccccagcactctccaaattcacccttc

SEQ ID NO: 35590 - DNA, 120 bp, synthetic construct
  source 1..120: mol_type = other DNA
cttccctttccagggaagcagccccactcaccctcgcctgctgcaggatcgcctgggcctgagcctcctgggccgccaccacagggcccttgtcacccccaccactgccaaaccggaact

SEQ ID NO: 35591 - DNA, 120 bp, synthetic construct; identical to SEQ ID NO: 9808
  source 1..120: mol_type = other DNA

SEQ ID NO: 35592 - DNA, 120 bp, synthetic construct
  source 1..120: mol_type = other DNA
tttggagtgatgatctttgatgatctttagagactcctccatatctttcctgcccatctggttcttggtaacatgacacaattccttgtcttccccatcagcatgttccaaaacccaaga

SEQ ID NO: 35593 - DNA, 120 bp, synthetic construct
  source 1..120: mol_type = other DNA
agataaggggacatcaagatcttagcatgattttgaaatatcctcttcaacagaataagtgtagattgctctagctctttcctgagtctcccacccccatggggaaaattgagggtgaga

SEQ ID NO: 35594 - DNA, 120 bp, synthetic construct
  source 1..120: mol_type = other DNA
ccgcttggataccactagctcccccgaagctcccccgtcacatggaggacacccccttaccctctctccagggtctccaactgggcctgggttcccctggatgccagggggaccaatcaa

SEQ ID NO: 35595 - DNA, 120 bp, synthetic construct; identical to SEQ ID NO: 9809
  source 1..120: mol_type = other DNA

SEQ ID NO: 35596 - DNA, 120 bp, synthetic construct
  source 1..120: mol_type = other DNA
gccctgtgaccagcataacttacaggttccaacactgcaggctctcctttctctcccttcagccctcggggtccatgggcagcctgaaggagacacacatgtagcccccagtggggcccg

SEQ ID NO: 35597 - DNA, 120 bp, synthetic construct
  source 1..120: mol_type = other DNA
acaaacctttcaagcctgccaaggagacctcagggttccctgcccccccagttcccagccccacctcagcaaacacaacctctccatctccctgagagcctctttcaggaaggtccccag

SEQ ID NO: 35598 - DNA, 120 bp, synthetic construct
  source 1..120: mol_type = other DNA
aggttcaagtgattctcctgcctcagcctcccaagtagctgggattacactgggattacagatgtgcaccaccatgcccggctaatttttgtatttttattagagatggggtttcaccgt

SEQ ID NO: 35599 - DNA, 120 bp, synthetic construct; identical to SEQ ID NO: 9810
  source 1..120: mol_type = other DNA

SEQ ID NO: 35600 - DNA, 120 bp, synthetic construct
  source 1..120: mol_type = other DNA
gcagatcacctgaggtcaggagtttgagaccagcctgaccaacatggtgcaaccccgtctctaataaaaatacaaaattagctgggtgtggtggcacatgcctgtaatcccagctacttg

SEQ ID NO: 35601 - DNA, 120 bp, synthetic construct
  source 1..120: mol_type = other DNA
aatctgatgaaagctgtgagtctttctccagaaatgaaaaagtatatgctattatgcacagaattttatttaggatttcaaagggttcacaagtttaaatatgccccaaaggttaagcat

SEQ ID NO: 35602 - DNA, 120 bp, synthetic construct
  source 1..120: mol_type = other DNA
atgtgaaaccccgtctctactaaaaatacaaaaaatagccgggcgcagtggcacatgcctgtaaccccagctactcgggaggctgaggcaggaggatcgcttgaacccaggaggcagagg

SEQ ID NO: 35603 - DNA, 120 bp, synthetic construct; identical to SEQ ID NO: 9811
  source 1..120: mol_type = other DNA

SEQ ID NO: 35604 - DNA, 120 bp, synthetic construct
  source 1..120: mol_type = other DNA
ccaccttcattctgaccaaacagcaatgatccgtttcaaaattctctgaaatcccatatcaaccccaaatacccagagagcagcataaaggaaaggcagtagaagctcaagggaggcaag

SEQ ID NO: 35605 - DNA, 120 bp, synthetic construct
  source 1..120: mol_type = other DNA
gagaacaactaagggacacagaacaaaatgacaaacacttggaagcaagaatgatgccagggccgaagaaaattaaacatggccaacatggctagaaaacaaactggacaaacaggaagt

SEQ ID NO: 35606 - DNA, 120 bp, synthetic construct
  source 1..120: mol_type = other DNA
agagaaaagaaaggcacaaaacaggtagaatgtgactcctgcaaagggaatcatgacagtgaagggtaattcttccagaaaacacaaacatcaaggctaggacacacaggaagtagccat

SEQ ID NO: 35607 - DNA, 120 bp, synthetic construct
  source 1..120: mol_type = other DNA
aattgtcacaagatagcatgaaaaactagagccagaacagaaataataaatcctttgcagtccaacctgacacagttaccaagatggatgccacagctggagaaggcaggaagggacaga

SEQ ID NO: 35608 - DNA, 120 bp, synthetic construct; identical to SEQ ID NO: 9812
  source 1..120: mol_type = other DNA

SEQ ID NO: 35609 - DNA, 120 bp, synthetic construct
  source 1..120: mol_type = other DNA
aaaggaaggcaggtagtaatcttttcaagcaacatatacatcatatgtgaacagaaaatgacaagtcacagatgggaaatagctcacagccaacagccaaggatcgaaaccaacaagaag

SEQ ID NO: 35610 - DNA, 120 bp, synthetic construct
  source 1..120: mol_type = other DNA
atccccatagccataggtgtaatcgtagggcccttcaggggggtctgtgccaccctccccatattcctctgcctggaacctgtcggctgtgggggggacctggagatctgtctgctcctt

SEQ ID NO: 35611 - DNA, 120 bp, synthetic construct
  source 1..120: mol_type = other DNA
tttttctcccaagaatagccatgggagtggttgtatataaatggaagggccatcaaaggccaaaaatggggagagatgtccagaaagtgggtccagtgggaagaagtggtggataaaatg

SEQ ID NO: 35612 - DNA, 120 bp, synthetic construct; identical to SEQ ID NO: 9813
  source 1..120: mol_type = other DNA

SEQ ID NO: 35613 - DNA, 120 bp, synthetic construct
  source 1..120: mol_type = other DNA
tgaggggagtgagtcacaggtgcccactgcccccagatggggtgagggtggggcatagagttacctcctcaaggggtggcaagaggctcgactccaggatttcttcctcttcacctgggg

SEQ ID NO: 35614 - DNA, 120 bp, synthetic construct
  source 1..120: mol_type = other DNA
gggggatgggggaaatctcagatcttgcagcccctttggagggggatagtttggggagagtgaacctccaaggtcatagaggtttgggggcagagatctggatgccccggctctacctgc

SEQ ID NO: 35615 - DNA, 120 bp, synthetic construct
  source 1..120: mol_type = other DNA
ggcctccggcctggtgagggggacgcctgccaggtcattgacctcttggcaggtggggtaggctttcagggaggggtccgatgccccctaggggaagggggaggcctgtggtgggggctc

SEQ ID NO: 35616 - DNA, 120 bp, synthetic construct; identical to SEQ ID NO: 9814
  source 1..120: mol_type = other DNA

SEQ ID NO: 35617 - DNA, 120 bp, synthetic construct
  source 1..120: mol_type = other DNA
ggaggtgtggagttgggaaacagagagttgaagatgaaaggagaggttgagggtcaggagggaggtggggagaggtggaacagagggaaggggttccacatgtggggcagaagcagacat

SEQ ID NO: 35618 - DNA, 120 bp, synthetic construct
  source 1..120: mol_type = other DNA
ctacctccccttttcctgcccctccaggtaggtgggggccagagactgggttccccactcccacacttctgcagacccacccctcctttgatattccctccatccctactccttcccatt

SEQ ID NO: 35619 - DNA, 120 bp, synthetic construct
  source 1..120: mol_type = other DNA
gggaaaacccagggacacagttccaggaagactggaagaggagacgcagagcagggaacacagctcccagccacaaattcttcataacaactctttttatttttagatgaaaataaaaag

SEQ ID NO: 35620 - DNA, 120 bp, synthetic construct; identical to SEQ ID NO: 9815
  source 1..120: mol_type = other DNA

SEQ ID NO: 35621 - DNA, 120 bp, synthetic construct
  source 1..120: mol_type = other DNA
gagattcagagagaggcagagggtatcatccgggagaaagagtataggaggccaatcctaggtaaaaccctaagatgggagaaggtcactgtcagtcctccatatgcatagcccttttca

SEQ ID NO: 35622 - DNA, 120 bp, synthetic construct
  source 1..120: mol_type = other DNA
gccccaaggtcacccagagtggcagaatcaggaccagatcccaggccttccagaattctttgcctcccctctgcgctttgtggcaatgcatgagcccttccacagtggcttccagagaca

SEQ ID NO: 35623 - DNA, 120 bp, synthetic construct
  source 1..120: mol_type = other DNA
acatggtgcttagcatactctccattgcaccgtaatttagggatgttgtctcatttccagagcccacctgggagctcttgggggtgatagagactttatattctcttctttgttctcctt

SEQ ID NO: 35624 - DNA, 120 bp, synthetic construct; identical to SEQ ID NO: 9816
  source 1..120: mol_type = other DNA

SEQ ID NO: 35625 - DNA, 120 bp, synthetic construct
  source 1..120: mol_type = other DNA
gaatggatgcatgcatccttgtgtgcatgggtagatggggagggtgggtgggtgagtgaatagctggatggaggagttgaagaggatagatgggtggaagcatagatgggtggtttgaag

SEQ ID NO: 35626 - DNA, 120 bp, synthetic construct
  source 1..120: mol_type = other DNA
tgcataggttggctgaggagtgagtgaattgatgggtgggtgaggagagagaggggttgaaaggatggatggatgagggaactgatgaagactgaaggacagagtaagtggctgtggaca

SEQ ID NO: 35627 - DNA, 120 bp, synthetic construct
  source 1..120: mol_type = other DNA
tgctggggccagaagggtagtgggcacaagataggggaccagaagtcaatcctgcctctgattgctctggttacctcaaagacttcttcatccagaatacgggcaccaaagatgatcact

SEQ ID NO: 35628 - DNA, 120 bp, synthetic construct; identical to SEQ ID NO: 9817
  source 1..120: mol_type = other DNA

SEQ ID NO: 35629 - DNA, 120 bp, synthetic construct
  source 1..120: mol_type = other DNA
tgcccaaggtacaggctagttcaacatgcagagaaggctgtacactctaaagcccaaactctggactagaagtgactgaagtttgggcagtgggtaggtgtggtgtggcccaaagggtct

SEQ ID NO: 35630 - DNA, 120 bp, synthetic construct
  source 1..120: mol_type = other DNA
acaaacttacttgccatctgctaggctgaggcctcggaagactggctgagagggaggttgaggccgcccagtctggtcttcatacaggaagcggacaggtcggcccagctccaggcccag

SEQ ID NO: 35631 - DNA, 120 bp, synthetic construct
  source 1..120: mol_type = other DNA
cacacagagtgagaggcaaagggagccgccacaacccctttcctcctggtgtctgatcctaggccccatcccattacctccccccaggcctaccccaccatgtcacccatacctgggaaa

SEQ ID NO: 35632 - DNA, 120 bp, synthetic construct; identical to SEQ ID NO: 9818
  source 1..120: mol_type = other DNA

SEQ ID NO: 35633 - DNA, 120 bp, synthetic construct
  source 1..120: mol_type = other DNA
tcctgcccctgtctctcctagcatctgcctctcttacgctctctctttgtcttttagcttatgaatctgtctctctctgtactctctgaatacttctctcaactcttcatctgtctcctg

SEQ ID NO: 35634 - DNA, 120 bp, synthetic construct
  source 1..120: mol_type = other DNA
ctttccatatctctcactctctgggtctctggcatctgtcccgtctccagcacaaacaacatctgggcaatcgatcatcctggacacaggaggtgcaggggggccacgaggaagagatca

SEQ ID NO: 35635 - DNA, 120 bp, synthetic construct
  source 1..120: mol_type = other DNA
tgcctcctggtttaggagatgagttggggaggggtggaggaatggggggcaggggctgaagctgccacgaggagccggaacaggtccagggccctgagccacacatctgtggatcccatc

SEQ ID NO: 35636 - DNA, 120 bp, synthetic construct; identical to SEQ ID NO: 9819
  source 1..120: mol_type = other DNA

SEQ ID NO: 35637 - DNA, 120 bp, synthetic construct
  source 1..120: mol_type = other DNA
gggtgggtgaggtggggcgggcaggcagagaaaaggccctttgagtccaggagccgggaaaccacggccttcccccccaacccccacctaagcctggcccctgcgcgtgtggcagctccg

SEQ ID NO: 35638 - DNA, 120 bp, synthetic construct
  source 1..120: mol_type = other DNA
ccaaggagacctcggaggtccccaccctccaccaaatcccaagggagtacaattcgatcatatggacaacctacccacaggtccgcccaccatcttcccacaccaggccacatacttgcc

SEQ ID NO: 35639 - DNA, 120 bp, synthetic construct
  source 1..120: mol_type = other DNA
caaatgccttattctctaaccttaggaattctacagtaactcatttccctaaagtcccatctctacccactcagcccctgaaataagaaacagtcatcttagccatccccctgcctccat

SEQ ID NO: 35640 - DNA, 120 bp, synthetic construct
  source 1..120: mol_type = other DNA
taatctaaatcttttgtgctgccattctgaccattttctctctaaagcagagaagaattgaatagtcaagttaaatataaatcagccctcagtgtctccagaaatgggctttttccagcc

SEQ ID NO: 35641 - DNA, 120 bp, synthetic construct; identical to SEQ ID NO: 9820
  source 1..120: mol_type = other DNA

SEQ ID NO: 35642 - DNA, 120 bp, synthetic construct
  source 1..120: mol_type = other DNA
aggtagtcaaggcttcctttctttctgggcttactgggctctgctctgaatcacaggtgctcaccccttatcccagagatatcgacagaaaggccataagacacacacgcctcacccatc

SEQ ID NO: 35643 - DNA, 120 bp, synthetic construct
  source 1..120: mol_type = other DNA
caagacaagcatccatccccattcagggtctctaaagtggtcctccacctttcagccctatctgccctcccccagtcacttcaaggacaaagagattcctaccctgatgccaaggaacac

SEQ ID NO: 35644 - DNA, 120 bp, synthetic construct
  source 1..120: mol_type = other DNA
ccgaggacccaggcatcaggactcctcttacctgcccagcctggggccgcgctcagccccagcaccagaggtaggaggaggaggaggcgatggcagcggctgcaccgctccatggctgag

SEQ ID NO: 35645 - DNA, 120 bp, synthetic construct; identical to SEQ ID NO: 9821
  source 1..120: mol_type = other DNA

SEQ ID NO: 35646 - DNA, 120 bp, synthetic construct
  source 1..120: mol_type = other DNA
ctctatcgctcgctctctcctgccccttgtaggtctcaacggcctgtaccctaagattctcttttcgggaaccccaatatcttccctagccccttccttttctaggacccaaacgtccag

SEQ ID NO: 35647 - DNA, 120 bp, synthetic construct
  source 1..120: mol_type = other DNA
ccaccccacccataatcaggtctccataattacttccctcaccccgccccgtgtaattacagagccgggccggggcgggggtatttatagacaaggctatagatagcgacgaactggggc

SEQ ID NO: 35648 - DNA, 120 bp, synthetic construct
  source 1..120: mol_type = other DNA
gagccgaggtagagggggagcagtggtaagatgagcgagcagtcgactctggttggaagggtccagggaaatggggtcactcggggacgtgggccgcctccgggcgggcaacgcctgaga

SEQ ID NO: 35649 - DNA, 120 bp, synthetic construct; identical to SEQ ID NO: 9822
  source 1..120: mol_type = other DNA

SEQ ID NO: 35650 - DNA, 120 bp, synthetic construct
  source 1..120: mol_type = other DNA
tcctcatacagtcacctcagtccagaaaacagcgattttaatttgaaagcgattttatgtatgagaggggaaaggagccccaaagagaagggacgcagggcaaaaatcatgcagccccag

SEQ ID NO: 35651 - DNA, 120 bp, synthetic construct
  source 1..120: mol_type = other DNA
gggctggaggagagctgtaaagggaaggcctccgggactacactcgtgaaaccatcccctgtgggggccctgtcctcacagcccaggccccttccccaagttagacaggaagagataggg

SEQ ID NO: 35652 - DNA, 120 bp, synthetic construct
  source 1..120: mol_type = other DNA
gtacagtacttctttgagtctaactgcaagtctctatcctcacaggaaattaaaaatagcagatcggttcctacatctccaccagccccttcaccaccaccaccaccttttttatatttc

SEQ ID NO: 35653 - DNA, 120 bp, synthetic construct; identical to SEQ ID NO: 9823
  source 1..120: mol_type = other DNA

SEQ ID NO: 35654 - DNA, 120 bp, synthetic construct
  source 1..120: mol_type = other DNA
ttcagagactcaaggccaccgaagagagacaaccagtcctcacaggtatctggggtcccttccaacttgggatatcaagcagatcccttggagggtttatgttcttggttctgccctgta

SEQ ID NO: 35655 - DNA, 120 bp, synthetic construct
  source 1..120: mol_type = other DNA
cagttgatggggagcctcaagcatctccatgaggaaggtgtcgatgggggtgtcaccaatgagcttgaagaaaaacagatgctctagacacttaaggccaatggaccggagggcaggaag

SEQ ID NO: 35656 - DNA, 120 bp, synthetic construct
  source 1..120: mol_type = other DNA
ccccagccccatctcaccgtccctgctgctcagggtacttctgtttgcagtaggtctccagtgatgcatacactttctcccgcaggacctccacctcactagggttggagaggcccttgg

SEQ ID NO: 35657 - DNA, 120 bp, synthetic construct; identical to SEQ ID NO: 9824
  source 1..120: mol_type = other DNA

SEQ ID NO: 35658 - DNA, 120 bp, synthetic construct
  source 1..120: mol_type = other DNA
ttaaacagaatgattgccctcaggcagccaagctctgtcttgtccatcctcatgtcacgcattttggacactagctctgtcagcaccctggagagggacctgcaggtcactcaaaggtca

SEQ ID NO: 35659 - DNA, 120 bp, synthetic construct
  source 1..120: mol_type = other DNA
gttgcggtgcacgtgaagacctgtggcaaggaggatgccatctcgaacatcaatggatcggtgtgagaaggaggcaatgaggagttcattccagcctgggtggggcagcaagggtcagga

SEQ ID NO: 35660 - DNA, 120 bp, synthetic construct
  source 1..120: mol_type = other DNA
atcgggaagtcaaagaggggtcaaatgtcaagaagtcaaagggatccaaggtcactgacctgcccgcagcaatatgacctgatcatccagaggcaaggaggaaaagtgtgggatcctctt

SEQ ID NO: 35661 - DNA, 120 bp, synthetic construct; identical to SEQ ID NO: 9825
  source 1..120: mol_type = other DNA

SEQ ID NO: 35662 - DNA, 120 bp, synthetic construct
  source 1..120: mol_type = other DNA
ttaggaaggttatgaggggaaaggagggggaggggatgtagaacagacctagactgcctcccccaacccccatcacgaaggagagtggattgaccccaacactcacgctgctgccgctac

SEQ ID NO: 35663 - DNA, 120 bp, synthetic construct
  source 1..120: mol_type = other DNA
catccttgtcctttccccgctgacgctcctcctgtaccgctgcagggggaagggggagagaaaaaatggaaagtcagcagccagccatgaaggggttccacaaatatccttacggcctca

SEQ ID NO: 35664 - DNA, 120 bp, synthetic construct
  source 1..120: mol_type = other DNA
ggaagggttataaaagggcaggtaagtcagtcgggaagggtgaggtaggtaaaagaattagggaggaatttaaatggagagcctactacatggttaaaaaaaacatgccaagattcaacc

SEQ ID NO: 35665 - DNA, 120 bp, synthetic construct; identical to SEQ ID NO: 9826
  source 1..120: mol_type = other DNA

SEQ ID NO: 35666 - DNA, 120 bp, synthetic construct
  source 1..120: mol_type = other DNA
taaagtgggtgttttgaccaagatatgctctaaagtgtctctcagaatcctaggaatctgacttaagaagataagatggagacacagaagaaggaagggaagccctgaggtcttcagtaa

SEQ ID NO: 35667 - DNA, 120 bp, synthetic construct
  source 1..120: mol_type = other DNA
gagacagcccatcatggctaaggaaaagttatcctatcctaggatcagtctagggaggggtcatatgtgcaggccacagaggcctaaccattaagaaggaaactcaagggccagaacagg

SEQ ID NO: 35668 - DNA, 120 bp, synthetic construct
  source 1..120: mol_type = other DNA
tggtctaagacgcctgggcagggcgggtccttaccctccctcttcatgccagtggccaggcacttctgatagcggcagtactgacagcggttccgctggcgcttgtccactgtgcagtct

SEQ ID NO: 35669 - DNA, 120 bp, synthetic construct; identical to SEQ ID NO: 9827
  source 1..120: mol_type = other DNA

SEQ ID NO: 35670 - DNA, 120 bp, synthetic construct
  source 1..120: mol_type = other DNA
ggtcacttgctctgaccaaactccataagccctgggaatcccacaggtgatgatacatggcccagactctccctctctgttcatcctctgagccacatacctgagcttctgtccccgcag

SEQ ID NO: 35671 - DNA, 120 bp, synthetic construct
  source 1..120: mol_type = other DNA
gacactgttgagttaatctgggatgggggaaatagggaagtcacaggaagacttattgggaagcagaatgtcacagaagtgatggaaatcattccctaccactaagcaaggccctgcaat

SEQ ID NO: 35672 - DNA, 120 bp, synthetic construct
  source 1..120: mol_type = other DNA
caggtgtcttgggaaagcagatgggatcaaaagggcagaaaatcagatagatgaaaaggacatcaagaatatcagaattagccgggcgtggtggtaggcacctgtaatcccagctactca

SEQ ID NO: 35673 - DNA, 120 bp, synthetic construct; identical to SEQ ID NO: 9828
  source 1..120: mol_type = other DNA

SEQ ID NO: 35674 - DNA, 120 bp, synthetic construct
  source 1..120: mol_type = other DNA
cctgggggctgctgacaggcccggagaatcctgggggagctggagggggcagaccaggggaccccatggaagaactgatgactggaaagggagagcccagtgggggtggtggcatcgggg

SEQ ID NO: 35675 - DNA, 120 bp, synthetic construct
  source 1..120: mol_type = other DNA
ttcgggagtctgagggaggggtatgtacaggcacacagacacacaagagacagaagagacaaaaaaagaaaatgagtcttcaaacatccaactagagactttaattctctaataccccac

SEQ ID NO: 35676 - DNA, 120 bp, synthetic construct
  source 1..120: mol_type = other DNA
cactaaaattggtatacaacctcccactgctatatttgactggctaaaaaaacccaaaaacagcgtaactcctcattgtggtgagaggagggagttgacaaggagaggaggatagttcag

SEQ ID NO: 35677 - DNA, 120 bp, synthetic construct; identical to SEQ ID NO: 9829
  source 1..120: mol_type = other DNA

SEQ ID NO: 35678 - DNA, 120 bp, synthetic construct
  source 1..120: mol_type = other DNA
gtttacaaacaagggggcgggagcgcaaggaaaagagcaccgggggagggtgtgggggaggggtcgcagataaagcggtcactggctcgcctgcccttctgctggggcactcaccccgcc

SEQ ID NO: 35679 - DNA, 120 bp, synthetic construct
  source 1..120: mol_type = other DNA
gccgccgccgctgcgggatccagccagggccgtcgccgccgccaccgggacgcgaccccacaatgcatttcttttcgcacccccaccggcccacactgccctgcggcatgccgctgaggg

SEQ ID NO: 35680 - DNA, 120 bp, synthetic construct
  source 1..120: mol_type = other DNA
attgatcggaggattagctgagcacgaggaagcccctgagagaaagactctggcctggattgggtcgaattaagcccgtcgctctgctcagtaccaaaatgacagcgccaatgtggcagc

SEQ ID NO: 35681 - DNA, 120 bp, synthetic construct; identical to SEQ ID NO: 9830
  source 1..120: mol_type = other DNA

SEQ ID NO: 35682 - DNA, 120 bp, synthetic construct
  source 1..120: mol_type = other DNA
gagggcccagagagtctgtaaagtggctggtgaaagattagtgtcccagggccctacatccgggaggtggttcgggataaagagaactagtcttgggaacaatgtaggtgggaacttaag

SEQ ID NO: 35683 - DNA, 120 bp, synthetic construct
  source 1..120: mol_type = other DNA
ggccagaggcctgggggccccccactgggtggccgtgggactgctgacctgggcgaccttggggcttctggtggctggactcgggggtcatgacgacctgcacgacgatctgcaagagga

SEQ ID NO: 35684 - DNA, 120 bp, synthetic construct
  source 1..120: mol_type = other DNA
tggacattcacatgaggatttacaccatggccatagccatggctactcccatgagagcctctaccacagaggacatggacatgaccatgagcatagccatggaggctatggggagtctgg

SEQ ID NO: 35685 - DNA, 120 bp, synthetic construct; identical to SEQ ID NO: 9831
  source 1..120: mol_type = other DNA

SEQ ID NO: 35686 - DNA, 120 bp, synthetic construct
  source 1..120: mol_type = other DNA
aaagggttctttctcctttatgatccctgacctttcgatattcccccaaatacacactcattgtgtcagatattccctcatctggttttccccccttcttccagaacctcattctcacca

SEQ ID NO: 35687 - DNA, 120 bp, synthetic construct
  source 1..120: mol_type = other DNA
gaggaggagtctggaatgcacatctcccttaatgtctcaatgcctccattcccaggccagggccccattctgtctgtgggactgtgggttctcagtggaattgttgcctttcttgtcgtg

SEQ ID NO: 35688 - DNA, 120 bp, synthetic construct
  source 1..120: mol_type = other DNA
cctgaaagctgacttgcctgcctcagaatctcctcatcttatggccctcaggagggagaggacatgttggaagatctgttctccactctgaccaactcttttcttccctcagagcgttct

SEQ ID NO: 35689 - DNA, 120 bp, synthetic construct; identical to SEQ ID NO: 9832
  source 1..120: mol_type = other DNA

SEQ ID NO: 35690 - DNA, 120 bp, synthetic construct
  source 1..120: mol_type = other DNA
acctgaatctggctgctgacttggcacacaacttcactgatggtctggccattggggcttcctttcgagggggccggggactagggatcctgaccacaatgactgtcctgctacatgaag

SEQ ID NO: 35691 - DNA, 120 bp, synthetic construct
  source 1..120: mol_type = other DNA
acccaaacagcctcttattagttccaaacaattcatactgtcattgacaagtcctctagaaatgagggggaagaagttctggttactttgtcctttagctcagtatttcttaaactggtc

SEQ ID NO: 35692 - DNA, 120 bp, synthetic construct
  source 1..120: mol_type = other DNA
ccctcttctctttttattttgatgtttagtttccaaatccatgtcccctatacctataccccaccagccacttctaaaccactgataatctttagctattggtgagtgcctttttctctt

SEQ ID NO: 35693 - DNA, 120 bp, synthetic construct; identical to SEQ ID NO: 9833
  source 1..120: mol_type = other DNA

SEQ ID NO: 35694 - DNA, 120 bp, synthetic construct
  source 1..120: mol_type = other DNA
ctggccagggacatctgccaaaggaaggaactgtagcctgggagaatggttactttggcattagggccttcaagggctggcagtcttacagaggctggagcggtgagaatgagaggccag

SEQ ID NO: 35695 - DNA, 120 bp, synthetic construct
  source 1..120: mol_type = other DNA
tgttctcggagaaccaagttgctacacaggaagttctccaaggtccagtttcctttctcccaccagttggtggaggcttcagggaagaccagagtcctggacagagagggtaacaggagg

SEQ ID NO: 35696 - DNA, 120 bp, synthetic construct
  source 1..120: mol_type = other DNA
ggtattctcatggcctgattttttttgtttctattccttttatatcactgtgtttgaatcgagggggaggggtggtaaccggaaataaagacctccgatcttccgccccacatgcagtct

SEQ ID NO: 35697 - DNA, 120 bp, synthetic construct; identical to SEQ ID NO: 9834
  source 1..120: mol_type = other DNA

SEQ ID NO: 35698 - DNA, 120 bp, synthetic construct
  source 1..120: mol_type = other DNA
ggccccttacccacattttactttctgccctgtgacctctgatccctgccctctcctccccgtgcccggtccggcgtgttctgtcctacctcaggtgcggggagcggcatcggccgagcg

SEQ ID NO: 35699 - DNA, 120 bp, synthetic construct
  source 1..120: mol_type = other DNA
gggaaccatgctgccttccaggctgacgtgtctgaggccagggccgccaggtgcctgctggaacaagtgcaggtgaacgctaggccactttccccctctaaagctctgatattgcctcca

SEQ ID NO: 35700 - DNA, 120 bp, synthetic construct
  source 1..120: mol_type = other DNA
tgcacatgtctgaggatgactgggacaaagtcatagctgtcaacctcaaggtggcgatctctgaacctgcgacgtttggcccccttagcctggggagggagttggaggagggctgtcacc

SEQ ID NO: 35701 - DNA, 120 bp, synthetic construct; identical to SEQ ID NO: 9835
  source 1..120: mol_type = other DNA

SEQ ID NO: 35702 - DNA, 120 bp, synthetic construct
  source 1..120: mol_type = other DNA
ctgagggaggtaccagcattcagccctctccagaatcggcagccactctccttcccacagacatgggatccgctgtaactctgtcctcccagggttcattgcaacacccatgacacagaa

SEQ ID NO: 35703 - DNA, 120 bp, synthetic construct
  source 1..120: mol_type = other DNA
acagttcctggcaaacattaaatattcaatgaatgtatgagaaatgaagacaaaaaagggtcacagactcagtcttcaaaaaaatccataaaagaagctttcacccacatgagtatttcc

SEQ ID NO: 35704 - DNA, 120 bp, synthetic construct
  source 1..120: mol_type = other DNA
tctaggggactggtggttggtgtctgtggagaggtttgtggggagggatgtctttggtgggagattatggctgttttgggtctatgggagtgagcagaattctgccctctccccaccatt

SEQ ID NO: 35705 - DNA, 120 bp, synthetic construct; identical to SEQ ID NO: 9836
  source 1..120: mol_type = other DNA

SEQ ID NO: 35706 - DNA, 120 bp, synthetic construct
  source 1..120: mol_type = other DNA
ttcccaggatacaaaaggggtggcagtgtatggttcaggaatgctgaatatgggaagcaggggtgcttgtgaccctaataaattccaagtcctcttccctgccacctccggctcttcttg

SEQ ID NO: 35707 - DNA, 120 bp, synthetic construct
  source 1..120: mol_type = other DNA
tgtgtcactgtgtatgcgtgacactccgggtctttttgaagggaggggttcgtgcgtcacccctttccactggttctgcagcaccagtcccctccccccaactccctgggttcttatggt

SEQ ID NO: 35708 - DNA, 120 bp, synthetic construct
  source 1..120: mol_type = other DNA
tctccaccttacaatagctgcagccggcctggggtcggatgggggggattaggggagggggccaggattaggggaatgaaccagccgatgaaaggggctggagagagcaggagggagggg

SEQ ID NO: 35709 - DNA, 120 bp, synthetic construct; identical to SEQ ID NO: 9837
  source 1..120: mol_type = other DNA

SEQ ID NO: 35710 - DNA, 120 bp, synthetic construct
  source 1..120: mol_type = other DNA
ccacttcccactccagacattctgcccctgtgtaccccacccacacgcgcacccccccttcccaatgggagctccatcttgtgtatgtccctgtttccgcgtggtgtctccattccccct

SEQ ID NO: 35711 - DNA, 120 bp, synthetic construct
  source 1..120: mol_type = other DNA
cccaaacctcgagcgggagagcgggtcggagggtctagggagagccaaagcagagggtggagggagtccccagggtggtaaggggaatcccgggcacatcgggacctaggtgtgttctca

SEQ ID NO: 35712 - DNA, 120 bp, synthetic construct
  source 1..120: mol_type = other DNA
aggtagcccttttcacgagccctctgtcccctcctggggtcccagatattccaggccccggccccccggagctgaggccccgcgtgggggcctctggaagggaaccgaggctaaggttgt

SEQ ID NO: 35713 - DNA, 120 bp, synthetic construct; identical to SEQ ID NO: 9838
  source 1..120: mol_type = other DNA

SEQ ID NO: 35714 - DNA, 120 bp, synthetic construct
  source 1..120: mol_type = other DNA
aggggcagtgccggcgcgggggcgggagcgggggcggagaggggcgcttctggaggggcggggtctacgcgaggggcggcccccctgacgccctcctccccttccccccacccccagcct

SEQ ID NO: 35715 - DNA, 120 bp, synthetic construct
  source 1..120: mol_type = other DNA
ccggaccccgcaggtgacaggcattctccctttcaggcttaccccctcccccaaacccttatatccacagaccgcatcacacagcttcttttccgtaatttgctctattctgccttgcct

SEQ ID NO: 35716 - DNA, 120 bp, synthetic construct
  source 1..120: mol_type = other DNA
caaacacaaaaattaccttccctgttcctcattcagtgtcataagtcagtgcacataagactcactttgggagtttattaaaagcagagcttcatgccccccaacattctgattcagtag

SEQ ID NO: 35717 - DNA, 120 bp, synthetic construct; identical to SEQ ID NO: 9839
  source 1..120: mol_type = other DNA

SEQ ID NO: 35718 - DNA, 120 bp, synthetic construct
  source 1..120: mol_type = other DNA
ctcactgtatttctcaaaattcttattttatgggctgctgtttctaaaacccctttccctctaacccacaccacctttctactcactgatgccttcaggaagccataatggatggcacag

SEQ ID NO: 35719 - DNA, 120 bp, synthetic construct
  source 1..120: mol_type = other DNA
accaaggagtgcctccacagattctgctctgactgcattgtcacagccctacggagcgggtaataggagagacatgtttgagatgagatgaaggggtacaaagttagggccctctcactg

SEQ ID NO: 35720 - DNA, 120 bp, synthetic construct
  source 1..120: mol_type = other DNA
ggccagaccccaactttgatgccctgatctctaagatctatcctagccgggaggaatacgaggcccatcaagaccgagtgcttatccgcctgagccgcctgcacaaccagcaggcattga

SEQ ID NO: 35721 - DNA, 120 bp, synthetic construct; identical to SEQ ID NO: 9840
  source 1..120: mol_type = other DNA

SEQ ID NO: 35722 - DNA, 120 bp, synthetic construct
  source 1..120: mol_type = other DNA
acatttagctgggcatggtggcacatgcctgtagtcctaccttcttgggaggctgaggtaataggatcacttgagcctgggaagaaagtggatgttgcagtgaaccatgatcacaccact

SEQ ID NO: 35723 - DNA, 120 bp, synthetic construct
  source 1..120: mol_type = other DNA
ataagccccggattcatactgctggaagttaaatcacctcctaggccagcatctctcagtctttcatgtgtatccagattacctgtagatcttcagatgcaaactgtgattcagtaggtc

SEQ ID NO: 35724 - DNA, 120 bp, synthetic construct
  source 1..120: mol_type = other DNA
gtttcctcagccataaaatagaggtaatataattacctgtgtcataggattcattgtattaggtaaggggattggtgcaaaacacttagtatactgagtgcttagcacattgtgtttaat

SEQ ID NO: 35725 - DNA, 120 bp, synthetic construct; identical to SEQ ID NO: 9841
  source 1..120: mol_type = other DNA

SEQ ID NO: 35726 - DNA, 120 bp, synthetic construct
  source 1..120: mol_type = other DNA
ggagggactctgggagggggaacgctgggccccccaagccctcctggggcccccagccccccagagccaggtggagaaattgagctcgtgttccggccccaccccctgctcgtggagaag

SEQ ID NO: 35727 - DNA, 120 bp, synthetic construct
  source 1..120: mol_type = other DNA
agaatccattttggaaagcccctacctccagtcctcatctgaggcgctctggctctaagcctgtcctccctcccattccaggtatgtgaagacaactgggaatgccacagtggaccacct

SEQ ID NO: 35728 - DNA, 120 bp, synthetic construct
  source 1..120: mol_type = other DNA
gggtgggggtgccggaggaggtgacggtcctgaggagcctgctttgcccagcctggagggcgtcagtgaaaagcagtacaccatctacatcgcacctggaggcggggcgttcacggtgag

SEQ ID NO: 35729 - DNA, 120 bp, synthetic construct; identical to SEQ ID NO: 9842
  source 1..120: mol_type = other DNA

SEQ ID NO: 35730 - DNA, 120 bp, synthetic construct
  source 1..120: mol_type = other DNA
ccctcctcagacgttgaatggctcgctgaccctggagctggtgaatgagaaattctggaaggtgtcccggccactggagctgtgctatgctcccaccaaggatccaaagtgaccccacca

SEQ ID NO: 35731 - DNA, 120 bp, synthetic construct
  source 1..120: mol_type = other DNA
gtggcttttatacaaagtatctatatgagattcttctatattgtacagagtggggcaaaacacgcccccatctgctgccttttctattgccctgcaacgtcccatctatacgaggtgttg

SEQ ID NO: 35732 - DNA, 120 bp, synthetic construct
  source 1..120: mol_type = other DNA
aaatagattggggagggaggcctagaaataatgtaaaatcagccttggaaatggggagaaaatgtcgggttattcgagatatgtcgtcggaaactccaaattagcaaatatgtatgaaaa

SEQ ID NO: 35733 - DNA, 120 bp, synthetic construct; identical to SEQ ID NO: 9843
  source 1..120: mol_type = other DNA

SEQ ID NO: 35734 - DNA, 120 bp, synthetic construct
  source 1..120: mol_type = other DNA
gctgagcggagggagggtcgcctgggaacactagttctgtgctcgtccaggcagcggctgagagcagaggagtgggggcatcaaggaaagccgcggctgccttactggcctcgagttccg

SEQ ID NO: 35735 - DNA, 120 bp, synthetic construct
  source 1..120: mol_type = other DNA
tccttccaccacccgtaacctctctgcccctcacttcctgtttcctctgctctgggtacccccagcccctctggccccaaattcctcccccatgctcagttctctgtctcactggcagag

SEQ ID NO: 35736 - DNA, 120 bp, synthetic construct
  source 1..120: mol_type = other DNA
tctccggtaccctcaatcccgtagatgcaggtgggcatcctccagccccagcaagtactgcggaccagttgggctggctggcccctttcctgcagaagcagacaacacccacttctaccc

SEQ ID NO: 35737 - DNA, 120 bp, synthetic construct; identical to SEQ ID NO: 9844
  source 1..120: mol_type = other DNA

SEQ ID NO: 35738 - DNA, 120 bp, synthetic construct
  source 1..120: mol_type = other DNA
agtcctcacctttgccccacacgcccccctctctatttatcacatttcctttcgtgtccccctaaccccatcgcttggtgcgagtgctctcttgccctcctctccccatgactgaacctc

SEQ ID NO: 35739 - DNA, 120 bp, synthetic construct
  source 1..120: mol_type = other DNA
gttactgggtcaggcaaggtgagagatataaagtatgcaaaagaaaacgttactattttgttgaggaacaagatacatgtggaatagttgacaatgcagaggaacagggtagaggaagga

SEQ ID NO: 35740 - DNA, 120 bp, synthetic construct
  source 1..120: mol_type = other DNA
ggagagtaacaggttgccctgagaattgagagataatacaagtaaagttacacgcctaacagatcagtggctctcccagtgtggatcccagactagcagcatcagcatcgcctgggaact

SEQ ID NO: 35741 - DNA, 120 bp, synthetic construct; identical to SEQ ID NO: 9845
  source 1..120: mol_type = other DNA

SEQ ID NO: 35742 - DNA, 120 bp, synthetic construct
  source 1..120: mol_type = other DNA
acccagcacgattttacctctcaggcttctcagtctccaaagcagagcagaccatgtatctgaacgcggaagctgagctctggagcccagagcctcagggccctgagggaaggttccccc

SEQ ID NO: 35743 - DNA, 120 bp, synthetic construct
  source 1..120: mol_type = other DNA
cacctcagcgaggagggaggtgccgctgaaaccgccaaccacttcttcagttgggtgtggggcttagcctctcctctcccacctctgtctcctctgcttcctcctcccccatgctgctct

SEQ ID NO: 35744 - DNA, 120 bp, synthetic construct
  source 1..120: mol_type = other DNA
cttccccaactcccctacccgggacccccatctccacccacaaatccactcaaatttcctgcctggaatgtggagtctcttcccactgctctcacctctctcagcacagcctgggcaagg

SEQ ID NO: 35745 - DNA, 120 bp, synthetic construct; identical to SEQ ID NO: 9846
  source 1..120: mol_type = other DNA

SEQ ID NO: 35746 - DNA, 120 bp, synthetic construct
  source 1..120: mol_type = other DNA
gtgaccagtgaggcaagggctatggacattgctcagggctggtgcagcaccagcaagtctgcagaagcaaaggctgcaggcatggtttctgatacagccccaggctggtgcagcatcacc

SEQ ID NO: 35747 - DNA, 120 bp, synthetic construct
  source 1..120: mol_type = other DNA
aggcagggaatcagagcccctgtggctgcatcaccgcccccaatctgcagcgctctatgagggtggcagggcagcctcagagacagacttcctccacctgtgggaggcataacagagcag

SEQ ID NO: 35748 - DNA, 120 bp, synthetic construct
  source 1..120: mol_type = other DNA
ccaagtcctaagggagctcccaagccaggaacttttctctggagaagaatccatacttctcagggtcttaaaaaattttgttttttatataaataagaggtcctggggcacttttccatc

SEQ ID NO: 35749 - DNA, 120 bp, synthetic construct
  source 1..120: mol_type = other DNA
ttttttatataaataagaggtcctggggcacttttccatctcctgtcctccatcggagaaatttcactaggctgtctcagacgtgctgttgtcgtggatggattagactccttgggactt

SEQ ID NO: 35750 - DNA, 120 bp, synthetic construct; identical to SEQ ID NO: 9847
  source 1..120: mol_type = other DNA

SEQ ID NO: 35751 - DNA, 120 bp, synthetic construct
  source 1..120: mol_type = other DNA
aaaataaaaacagaaaaaaaatagataacttaatttccagagatctccaggacaaccccctaccatcaaatcctagtcccccaactaatcccacccaacccccagaggctactgggttct

SEQ ID NO: 35752 - DNA, 120 bp, synthetic construct
  source 1..120: mol_type = other DNA
gggtaagtgagaccttattcttgtattaacttgccccagagtatactctttggaactcggcaatatttctccctatgatgtaccaaggaggttgattactgacacatgctagaagaaatt

SEQ ID NO: 35753 - DNA, 120 bp, synthetic construct
  source 1..120: mol_type = other DNA
atgtggcatagcccctgccttcgaaggatttgatgtaggggcggtttagaatgagcatctcaatattgaatccagcacctagtcctatccattttatctgctctaatatatctcaagtct

SEQ ID NO: 35754 - DNA, 120 bp, synthetic construct; identical to SEQ ID NO: 9848
  source 1..120: mol_type = other DNA

SEQ ID NO: 35755 - DNA, 120 bp, synthetic construct
  source 1..120: mol_type = other DNA
ccaccacaccccctcactcgtgtgctccagttgctgtccaccttgtgcttcctcctgcacagagtctccagggaggctggaccctctgtggaacggctccttcctctgttcctctcctct

SEQ ID NO: 35756 - DNA, 120 bp, synthetic construct
  source 1..120: mol_type = other DNA
ctcctgttatgagcgctcacactaaggtgtacctttcctcagaggcacttggccctgttggagttctacatttgttgatgattatgtacagactgatgtctgtctgccccattgaatgta

SEQ ID NO: 35757 - DNA, 120 bp, synthetic construct
  source 1..120: mol_type = other DNA
aggctagatatttcaggatttcagaggtgatgaattaaggccatgattctccctcctgtagctgcagcccaagaatcccatgtgctattacctaacactgttacttcctccttaattcct

SEQ ID NO: 35758 - DNA, 120 bp, synthetic construct; identical to SEQ ID NO: 9849
  source 1..120: mol_type = other DNA

SEQ ID NO: 35759 - DNA, 120 bp, synthetic construct
  source 1..120: mol_type = other DNA
gtgctatgatggtttgctgcacctgtcaacccatcacctaggtattaaacccggtatccattagctattcttcctgatgctctccctcctgccacttccccttctgacagacttcagtgg

SEQ ID NO: 35760 - DNA, 120 bp, synthetic construct
  source 1..120: mol_type = other DNA
tccagttccatccacatccctgtaaaggacatgatctcattcccttttatggctgcatagtattccatggtgtacgcatactacattttcttttttcttttttttaaggtggtgtcttgc

SEQ ID NO: 35761 - DNA, 120 bp, synthetic construct
  source 1..120: mol_type = other DNA
ccacaccctgttaatttttgtatttttagtagagacaggatttcaccatgttggccaggctggtcgtgaacttctgaccttgtgatctgcccacctcggcctcccaaagttctgggatta

SEQ ID NO: 35762 - DNA, 120 bp, synthetic construct; identical to SEQ ID NO: 9850
  source 1..120: mol_type = other DNA

SEQ ID NO: 35763 - DNA, 120 bp, synthetic construct
  source 1..120: mol_type = other DNA
aggcatttgggttgacgccatgtctttgctattgtgaatagtgctgtagtgaactacaaaatatttaaaaattagccaggtgtggtggcttgtgcctgtagtcccagctacttgggaggc

SEQ ID NO: 35764 - DNA, 120 bp, synthetic construct
  source 1..120: mol_type = other DNA
ctaactaggaatagaaagtaacttccaaagtcaagacaaggataccagtttttactgtttctattcacctttctgccaagaagtctgaagtgacacaagaagaaaaagaagaaataaagc

SEQ ID NO: 35765 - DNA, 120 bp, synthetic construct
  source 1..120: mol_type = other DNA
catcaatatccttacaccacagcaataaacagataaaagatttcattttaggccaggcatcgtggctcacgcctgtaatcccagctcttccggaggccaaggcaggcggatcatgaggtc

SEQ ID NO: 35766 - DNA, 120 bp, synthetic construct
  source 1..120: mol_type = other DNA
agaatggcgtgaactcagtaggcggagcttgcagtgagccgagattgcgccactgcactccagcctgggcgacagagcgagactccgtctcaaaaaaaaaaaaaaagaaaagaaaatacc

SEQ ID NO: 35767 - DNA, 120 bp, synthetic construct; identical to SEQ ID NO: 9851
  source 1..120: mol_type = other DNA

SEQ ID NO: 35768 - DNA, 120 bp, synthetic construct
  source 1..120: mol_type = other DNA
ctggctcagcctcctgagtagctgggactacaggtgcgcaccaccacgcccggctaatttttttgtatttttagtacagacggggtttcaccatgttggtcaggctggtcttgaattcct

SEQ ID NO: 35769 - DNA, 120 bp, synthetic construct
  source 1..120: mol_type = other DNA
cagaagaatatgagatcccttgcctaaccatatgtcacaagtttactggttgaaacttagagtgattaaaacagtctagtcctggtatatgcacacataaatagaccacagtacagaaca

SEQ ID NO: 35770 - DNA, 120 bp, synthetic construct
  source 1..120: mol_type = other DNA
tttgttggagatggggtctggtgggaggtgattggatcatggaaatggatttcccactgggtgcagttctcatgatagtaagttatcatgagacccggttgtttaaaagtgtgtggaggc

SEQ ID NO: 35771 - DNA, 120 bp, synthetic construct; identical to SEQ ID NO: 9852
  source 1..120: mol_type = other DNA

SEQ ID NO: 35772 - DNA, 120 bp, synthetic construct
  source 1..120: mol_type = other DNA
ttcaccttccaccatgattgtaagtttcctgaggcctccccagccatgcttcctatacagcctgtggaactatgagccaattaaactttataaattacctgatttcaggtatttatctat

SEQ ID NO: 35773 - DNA, 120 bp, synthetic construct
  source 1..120: mol_type = other DNA
cacaaaaaataaattctacattacatcctacccagaagtaaatttcaggtagctagagtaaaaagcaaaactgaaaactattcaaagaaaatataagatcacatattgatgatatcagaa

SEQ ID NO: 35774 - DNA, 120 bp, synthetic construct
  source 1..120: mol_type = other DNA
cctttcatgatacaaattcttagcaaattaggtatagaaaaagtgtatctcaacacaataaagcccatatatgacaaacccacagctaacatcatacataatcatgaaaagttaaaagat

SEQ ID NO: 35775 - DNA, 120 bp, synthetic construct; identical to SEQ ID NO: 9853
  source 1..120: mol_type = other DNA

SEQ ID NO: 35776 - DNA, 120 bp, synthetic construct
  source 1..120: mol_type = other DNA
agcattactgtatactaataatgcaccaaccaaaaaagaaatcaagaaagcaatcacatttataatagcatcaaaaatatatacttaggaataaatttaatcaaagaggtgagaaatctg

SEQ ID NO: 35777 - DNA, 120 bp, synthetic construct
  source 1..120: mol_type = other DNA
gtagattccatccaacctctatcaaaattccaatgacattttcacagaaatagaaaaaaaatcctaagattcatatggaaccacaaaagacaaggaccaaaatggccaaagcaatcttga

SEQ ID NO: 35778 - DNA, 120 bp, synthetic construct
  source 1..120: mol_type = other DNA
caaaaataaatccacacattttatggccaactgatcctttacaaatatgccaagaacatacaatggggaaaggacagtctcctcaataaacagtcctggggaaactggatatccacatgt

SEQ ID NO: 35779 - DNA, 120 bp, synthetic construct; identical to SEQ ID NO: 9854
  source 1..120: mol_type = other DNA

SEQ ID NO: 35780 - DNA, 120 bp, synthetic construct
  source 1..120: mol_type = other DNA
acttaaacataagatctgaaatggcggggtgcggtggcttacacctataatcccagcactttgggaggccaaggcaggtggatcataagatcaagagattgagaccatcctggccaacat

SEQ ID NO: 35781 - DNA, 120 bp, synthetic construct
  source 1..120: mol_type = other DNA
agtatttttacaatttcagatcttttttttgagatggagtctcgctctgttgctgggctggagtgcagtggcatgatcttggcttcttgacattggtctgggcaataatttttttggaca

SEQ ID NO: 35782 - DNA, 120 bp, synthetic construct
  source 1..120: mol_type = other DNA
gaaacttaatagcaagagttgttgaaaaccaaaaatctgattttttttctttaagttggggtctcaccctgttgctcaggctggaatacagtgccgcaataataactcactgcagccttc

SEQ ID NO: 35783 - DNA, 120 bp, synthetic construct; identical to SEQ ID NO: 9855
  source 1..120: mol_type = other DNA

SEQ ID NO: 35784 - DNA, 120 bp, synthetic construct
  source 1..120: mol_type = other DNA
cacctcatacctgctaagatggctctgataaaaaaaataaaaataaaccaagagattacaagtggtggcaaggatgtggagaaaaaggaaccctcacaaactgttggtaggaatgtaaat

SEQ ID NO: 35785 - DNA, 120 bp, synthetic construct
  source 1..120: mol_type = other DNA
tatctgtattcccaagttcactgcaccattattcacaatagccaagacatggaaacaacctaagtgtccatcaatgaataaatagagagattatggaacatatacacaatggaatactat

SEQ ID NO: 35786 - DNA, 120 bp, synthetic construct
  source 1..120: mol_type = other DNA
tggaacctaaagagtcaaactcagccaggcatggtggcacgtgcctgtagtcccaactactcgggaggctgaggcaggaggatctcttgaatccaagagtttgaggctgcagtgagctgt

SEQ ID NO: 35787 - DNA, 120 bp, synthetic construct; identical to SEQ ID NO: 9856
  source 1..120: mol_type = other DNA

SEQ ID NO: 35788 - DNA, 120 bp, synthetic construct
  source 1..120: mol_type = other DNA
gggcaacatggtgagaccccatctctaaaaaaaatagaaaaattagctgggcgcagtggctcatgcctgtaatcctagcatttcgggatgccgattgcttgattgcttgaccccaagaat

SEQ ID NO: 35789 - DNA, 120 bp, synthetic construct
  source 1..120: mol_type = other DNA
acttgagcctgggaggtccaggctgcagtgagctataatcttgccactgcactctagcctgggcgacagagcaagatcctgtctcaaaaaaaaaataaaaataaaaataattgctaggag

SEQ ID NO: 35790 - DNA, 120 bp, synthetic construct
  source 1..120: mol_type = other DNA
accatagatacaatttttatttgtcgactataaataaatgcacaagcaataaaggaaaatattgatacatatgaccacgttaaaacatttttaagcttttataagaaatcacataggccg

SEQ ID NO: 35791 - DNA, 120 bp, synthetic construct
  source 1..120: mol_type = other DNA
caaaaaaattagctggacgtggtagtgggtgcctgtagtcccagctactcgggaggcttaggtaggagaatggcgtgaacccatgaggcggagcttgcagcgagccgagattgtgccact

SEQ ID NO: 35792 - DNA, 120 bp, synthetic construct; identical to SEQ ID NO: 9857
  source 1..120: mol_type = other DNA

SEQ ID NO: 35793 - DNA, 120 bp, synthetic construct
  source 1..120: mol_type = other DNA
gggacaataggaatgcatatattttgtgttgaagtgtaaacagatacaacaaatttgaagagaattttggcaccagttaatgctgaaaatgaatattccctatgacccagcaatcttgct

SEQ ID NO: 35794 - DNA, 120 bp, synthetic construct
  source 1..120: mol_type = other DNA
taaaatggataaataaagtatggtttgttcttataatgggatactatacagcagttaaatgaattatagacatatttagcaatgtaatgagtaagaaacttgcaaaaatggatgttgtat

SEQ ID NO: 35795 - DNA, 120 bp, synthetic construct
  source 1..120: mol_type = other DNA
tactacaaggaaggagagaaatgggatgggcgttaaccgaatttgtaatccattttttttatttttaattttaaagaaaagtgatacaaagcaggcgatgcaaaggtgaggatttgctta

SEQ ID NO: 35796 - DNA, 120 bp, synthetic construct; identical to SEQ ID NO: 9858
  source 1..120: mol_type = other DNA

SEQ ID NO: 35797 - DNA, 120 bp, synthetic construct
  source 1..120: mol_type = other DNA
ctcccagattaaagcgattctcctgcctcagcctcctgaatagctgggatcacaggcagccgccaccatgtccagctaatttttgtatttttagtagagacggggtttcaccatgttggt

SEQ ID NO: 35798 - DNA, 120 bp, synthetic construct
  source 1..120: mol_type = other DNA
gcccggctgatataaatcttaacagctacatgccccaatttcctcacctacaaaatgtgtgtattcaaagtgctacctaatagcattgtcgtgagagtaaataagttgtgtgaagtgctt

SEQ ID NO: 35799 - DNA, 120 bp, synthetic construct
  source 1..120: mol_type = other DNA
tatcacctccagctgcatataaactcttttttaatctcaacttctaaaaatctcataagaaccttacttggcaacgaaagtgccccaaaactgagaagacccagactcttccttcaatga

SEQ ID NO: 35800 - DNA, 120 bp, synthetic construct
  source 1..120: mol_type = other DNA
gtccagcgttgccgcataggaattcagagctggcactgccgtgataaattgaaaatctcaatttttctgtaaaatcactctttttatttttcctttttttttttggcaggatctcacgtt

SEQ ID NO: 35801 - DNA, 120 bp, synthetic construct; identical to SEQ ID NO: 9859
  source 1..120: mol_type = other DNA

SEQ ID NO: 35802 - DNA, 120 bp, synthetic construct
  source 1..120: mol_type = other DNA
ttttagtttttgtagagagatggtctcactatgttgtccaggctggtctcaaatttctgagctcgagtgatcctcccacctcagcctcccaaagtgctggaatctcagccatgagacacg

SEQ ID NO: 35803 - DNA, 120 bp, synthetic construct
  source 1..120: mol_type = other DNA
acacctgaaatcccagtgttttgggaggtcaaggtgggcagactgcttgagcccagtgttttgagacccccctgggcaacatggtgaaatgccatctctacaaaaaatagaaaacttagc

SEQ ID NO: 35804 - DNA, 120 bp, synthetic construct
  source 1..120: mol_type = other DNA
gtgacagagtgagaccctgtctcaaaaaaatatatacatatttattaatttttattatgtattgctatggcataaatgtttgtgcccccctaaaattcataaattgaaacctaatcccca

SEQ ID NO: 35805 - DNA, 120 bp, synthetic construct; identical to SEQ ID NO: 9860
  source 1..120: mol_type = other DNA

SEQ ID NO: 35806 - DNA, 120 bp, synthetic construct
  source 1..120: mol_type = other DNA
cacagcgagaccctgtcttaaaaaaaagaggcccaaaggagcttgtttgccccttccacccgtgaagatgcagcaagaaggcgccatctatgaagcaaagtgtgccctcactggctacca

SEQ ID NO: 35807 - DNA, 120 bp, synthetic construct
  source 1..120: mol_type = other DNA
tagttttataaaaattaaactacagttggcattttgtatctgtaggtccacacctatggattcaaccaactgaagaataaaaatatttttaaaatatatatggccagtccgggcgcggtg

SEQ ID NO: 35808 - DNA, 120 bp, synthetic construct
  source 1..120: mol_type = other DNA
tagccgggcatggtggcgggcacctgtaatcccagctacttggaaggctgaggtaggagaatggcgtgaacctgggaggcagagtttgcagtgagctgatatcctgccatagcactccag

SEQ ID NO: 35809 - DNA, 120 bp, synthetic construct; identical to SEQ ID NO: 9861
  source 1..120: mol_type = other DNA

SEQ ID NO: 35810 - DNA, 120 bp, synthetic construct
  source 1..120: mol_type = other DNA
tacttcacaagagttatatctagacctacatgtattcaatttttttttcaataggcttttggggaacaggtggtgttcagttacatgaataagttatttagtggtgatttctgagatttt

SEQ ID NO: 35811 - DNA, 120 bp, synthetic construct
  source 1..120: mol_type = other DNA
ttcctcagctatcctttgcaactgttgtaaatgcagcacaacatacatccatacctctaaaacaaagagaaacaagaaaaaccacactcaacactattgggaaatgatactttgtcatgc

SEQ ID NO: 35812 - DNA, 120 bp, synthetic construct
  source 1..120: mol_type = other DNA
ctcagattttcacagaattggctatagtcatcttttgtttccaggatacagggcaagagattacagaagtcaccattccccagggcttgaacggcgttgattacaagagcagatgtgtaa

SEQ ID NO: 35813 - DNA, 120 bp, synthetic construct; identical to SEQ ID NO: 9862
  source 1..120: mol_type = other DNA

SEQ ID NO: 35814 - DNA, 120 bp, synthetic construct
  source 1..120: mol_type = other DNA
tctctactgaaaatacaaaaagtttgccgggtgtcgtggcggatgcctgtaatcccagctactccggaggctgaggtaggagaatcacttgaacccaggaggcggaggttgcagtgagcc

SEQ ID NO: 35815 - DNA, 120 bp, synthetic construct
  source 1..120: mol_type = other DNA
gaaggtggtcaaatctggagatttgaggcaagagataaatttgagagtaaccagctgatgggaactgaagccacaggacaggtgtgatcccctagaaggaaagggtagcataagaagagg

SEQ ID NO: 35816 - DNA, 120 bp, synthetic construct
  source 1..120: mol_type = other DNA
agaggccaaatcctggaggccaaaaaacgacagtgtttcaagaaagaactggccagcaacgtcagctactagtggcagttcaagtaagaagaaaacgaaacaatggacttaatgacataa

SEQ ID NO: 35817 - DNA, 120 bp, synthetic construct
  source 1..120: mol_type = other DNA
caagtaagaagaaaacgaaacaatggacttaatgacataaagttcattgcaaaaaaacatttgagtagcagcaaggtagagataaacaccagcctgaaagggtcgagcagtgagtggaag

SEQ ID NO: 35818 - DNA, 120 bp, synthetic construct; identical to SEQ ID NO: 9863
  source 1..120: mol_type = other DNA

SEQ ID NO: 35819 - DNA, 120 bp, synthetic construct
  source 1..120: mol_type = other DNA
tttaaattttttgtagagacaaggtatcgccttgttgcccagctggtctcaaactggactcaggtgatcctcttgctttggcctcccaaagttctgggattacagacatgagccacagtg

SEQ ID NO: 35820 - DNA, 120 bp, synthetic construct
  source 1..120: mol_type = other DNA
tactgggttcaagcaattctcctgcctcagactcccgagtagctgtgattacaggcatgcgccaccacgccaagctaattttgtatttttactatagatggggtttctccatgttggtca

SEQ ID NO: 35821 - DNA, 120 bp, synthetic construct
  source 1..120: mol_type = other DNA
ttgttgagtgactactaaaacattcttggaccatatgaaaatataggaaagcatgtgcttcacacctaagtacctcagcatgcatctcccaaaaataaggagattccataaccacaatac

SEQ ID NO: 35822 - DNA, 120 bp, synthetic construct
  source 1..120: mol_type = other DNA
ccaatatggtgaaaccccgtctctactaaaaatacaaaaattagccgggcgtggtggtgcatacctataatcccagctacttgggaggctgaggcaggagaattgcttgaacccagtagg

SEQ ID NO: 35823 - DNA, 120 bp, synthetic construct; identical to SEQ ID NO: 9864
  source 1..120: mol_type = other DNA

SEQ ID NO: 35824 - DNA, 120 bp, synthetic construct
  source 1..120: mol_type = other DNA
ccacctcccaggctcaagtgatcctcccacctcagcctcctaagtagctggaactactatttaggtgtgacccaccacacctgactaatttttgtatttttttttttttgtagagacagg

SEQ ID NO: 35825 - DNA, 120 bp, synthetic construct
  source 1..120: mol_type = other DNA
tgcatatatttcaaatcaggatcaaatcaaggtacatgcgctgcatgcattgtgttcctcttggaggggtgtggatctggtgacagatggttgagggagctcacctctgatgactttcat

SEQ ID NO: 35826 - DNA, 120 bp, synthetic construct
  source 1..120: mol_type = other DNA
gaggtttaacgtagccattgaccagagtgatgtggttgggccactaaacaattctgggagcctccttagagttcatgatcatgagtgaggagtgggaaccatttcctgattgtgtgattt

SEQ ID NO: 35827 - DNA, 120 bp, synthetic construct; identical to SEQ ID NO: 9865
  source 1..120: mol_type = other DNA

SEQ ID NO: 35828 - DNA, 120 bp, synthetic construct
  source 1..120: mol_type = other DNA
gactgattctcaaggaggggctctttcaggtgataaggtccagggtatgacaatgagaatgtgtggccgagttggagaggagaagattcttggggattaagtggccaggttattgagagg

SEQ ID NO: 35829 - DNA, 120 bp, synthetic construct
  source 1..120: mol_type = other DNA
cagtagcagtgagaaaggaagaggaaagtttagcctaattgcagtgcctggaaggccgcgggttattttaaactagagttgggggctgggggaggagtagtccggaggcagcaatctgaa

SEQ ID NO: 35830 - DNA, 120 bp, synthetic construct
  source 1..120: mol_type = other DNA
agagttaaatttcacttaacgccaggaagtggagggaatgctccaaggagaagctaagggtatgaggggggctacagtttattagagggcacaggcaggttagggagggggaaagtggag

SEQ ID NO: 35831 - DNA, 120 bp, synthetic construct; identical to SEQ ID NO: 9866
  source 1..120: mol_type = other DNA

SEQ ID NO: 35832 - DNA, 120 bp, synthetic construct
  source 1..120: mol_type = other DNA
gaggcaggagaattgcttgaacccgggaggcggaggttccagtgagccaagatcacgccactgcaccactccagcctgggggacagagcaagactcgtctcattaaaaaaaaaaaaaaaa

SEQ ID NO: 35833 - DNA, 120 bp, synthetic construct
  source 1..120: mol_type = other DNA
tacaaacattagccaggtgtggtggtatgcacctgtaatcccagctacttgggaagcttaggtaggaggatgacttgagcccagaaggtggaggttgcagtgagccaagatggtgccacc

SEQ ID NO: 35834 - DNA, 120 bp, synthetic construct
  source 1..120: mol_type = other DNA
gaaataaagaaagaaaggcaggcaagaaagtggcttctaaagcagaactggctgcattccaattccagctttgtcatgcactaactgtcctgtctataaccttggcaaggtctctgggca

SEQ ID NO: 35835 - DNA, 120 bp, synthetic construct; identical to SEQ ID NO: 9867
  source 1..120: mol_type = other DNA

SEQ ID NO: 35836 - DNA, 120 bp, synthetic construct
  source 1..120: mol_type = other DNA
cagaaggcaagcagatgccagcatcatgcttcctgtagagcccacagaaccatgagccaattaaacctctttttttttttgagatagggtcttgctctgtcgcccaggcagtggcgcaat

SEQ ID NO: 35837 - DNA, 120 bp, synthetic construct
  source 1..120: mol_type = other DNA
gacgggtttttgccatgttgcccaggctggtctcaaactcttgagctcaagtgattaaccctccggcctcagcctcccaaagtgctgctaggattacaagcatgagccactgtgcccagc

SEQ ID NO: 35838 - DNA, 120 bp, synthetic construct
  source 1..120: mol_type = other DNA
gcttcagcctcccaagtagctgggattacaggtgctggccaccatgcccggctaatttttgtattcttagtagaaacggggtttcaccatattggccaggctggtctcaaactcctgacc

SEQ ID NO: 35839 - DNA, 120 bp, synthetic construct; identical to SEQ ID NO: 9868
  source 1..120: mol_type = other DNA

SEQ ID NO: 35840 - DNA, 120 bp, synthetic construct
  source 1..120: mol_type = other DNA
atgataatgatgacttgatgagcagttgtgaatgcataaattatatggagacactaaggactgcaacagacaagaagatctcagtgacaaacgggttatttagggcagcagccaactgac

SEQ ID NO: 35841 - DNA, 120 bp, synthetic construct
  source 1..120: mol_type = other DNA
aatgtacaaaatgtcaatgctaggaatgcagaatttctgcaaagaaaaccccccaaacccactgatcctaaaaacaggggagataaaagaaaaatggaatgaggataatttcatgttgaa

SEQ ID NO: 35842 - DNA, 120 bp, synthetic construct
  source 1..120: mol_type = other DNA
aagatgatcaaagaaatcttaaaggagatgcgctttgctgttacttgaagagggaatctgtgggccttccattaaagcttttggatgaaaatgaaattagaggctgtaggccaggtgcag

SEQ ID NO: 35843 - DNA, 120 bp, synthetic construct
  source 1..120: mol_type = other DNA
gccaacatggcaaaacaccgtccctattaaaaatacaaacattagccgggcatggtggtgcatacctgtagttccagctactcaggaggctgaggcagcagaatcgcttgaaccctggag

SEQ ID NO: 35844 - DNA, 120 bp, synthetic construct; identical to SEQ ID NO: 9869
  source 1..120: mol_type = other DNA

SEQ ID NO: 35845 - DNA, 120 bp, synthetic construct
  source 1..120: mol_type = other DNA
acaggtgtacaccaccattcctggctaatttttttaaaaaaatttttgtaggccgggcatggtggctcacacctgtaatcccagcactttgggaggctgaggcgggtagatcacgaggtc

SEQ ID NO: 35846 - DNA, 120 bp, synthetic construct
  source 1..120: mol_type = other DNA
gtcgcttgaaccctggaggcggaggttgcagcgagccgagattgcaccactgcactccagcctgggcgacagagtgagattccgtctcaaaaaaaaaaatttttttttgtagagaaggtg

SEQ ID NO: 35847 - DNA, 120 bp, synthetic construct
  source 1..120: mol_type = other DNA
aaggatgatgagttggtgctaaatgagctcagagaactttcagtgctcaacattgagaccaatgaggaatgttttgtttgacagactcatggatggtgtggactctgtgttctggaggaa

SEQ ID NO: 35848 - DNA, 120 bp, synthetic construct; identical to SEQ ID NO: 9870
  source 1..120: mol_type = other DNA

SEQ ID NO: 35849 - DNA, 120 bp, synthetic construct
  source 1..120: mol_type = other DNA
caagtcacagacacttctcagatgccaaacccaaaaggcgtggctgaattcatttgcatcaactcaggcaatgaatttgggaggagagttcgcttgtcagaacgtaagaacgtcacattt

SEQ ID NO: 35850 - DNA, 120 bp, synthetic construct
  source 1..120: mol_type = other DNA
cggatgtaattaaagtcacaaattggtttatcttgaggtaatccaaagggagactgtgcaggagaggtctgactcaatcacatccaaagccttcagtggtggctggagaggagaaaacac

SEQ ID NO: 35851 - DNA, 120 bp, synthetic construct
  source 1..120: mol_type = other DNA
aggaataaaaatggagacagtgacacttccaagtaaaactactagaagtcttcagaaagtaaggcaagaaaaggaaacttgaggaccagagaagctgccaggccagttcattaagccttg

SEQ ID NO: 35852 - DNA, 120 bp, synthetic construct; identical to SEQ ID NO: 9871
  source 1..120: mol_type = other DNA

SEQ ID NO: 35853 - DNA, 120 bp, synthetic construct
  source 1..120: mol_type = other DNA
tgtgtgtgtgtaaactggaaatggttaaactcccctgtgtgcagtggcataccaagcagggtggagtggggggaggaggctacactgcaaggggtattttgtcactaacatttttttata

SEQ ID NO: 35854 - DNA, 120 bp, synthetic construct
  source 1..120: mol_type = other DNA
accagcctggccaacgtggtaaaaccccgtctctactaaaaacacaaaaattagcctggcgtggtggtgtgtgcctgtaatgccagctacctgggaggctgaggcaggagaatcactgga

SEQ ID NO: 35855 - DNA, 120 bp, synthetic construct
  source 1..120: mol_type = other DNA
taaattctccacagacaatacaccttcttattacctgcacctggaacaaccatccccactccctgcccatggtaagctgcagcctgtgtgtcctatgtgggtaaacagtccagctctacc

SEQ ID NO: 35856 - DNA, 120 bp, synthetic construct; identical to SEQ ID NO: 9872
  source 1..120: mol_type = other DNA

SEQ ID NO: 35857 - DNA, 120 bp, synthetic construct
  source 1..120: mol_type = other DNA
ccccatctctactaaatatacaaaaaaatagctgggcatggtggtggatgcctgcaatcccacctacttgggaggctgaggcaggagaatcacttgaacccgggaggcagaggttgcagt

SEQ ID NO: 35858 - DNA, 120 bp, synthetic construct
  source 1..120: mol_type = other DNA
caaaacaggaaatgacagcatcattagagatttaaggtttcttaactttttacgtctaggacaggttttggaagtctggtgaagtctgtggagtgtcagaataatcttcaactgcataaa

SEQ ID NO: 35859 - DNA, 120 bp, synthetic construct
  source 1..120: mol_type = other DNA
aaccgtgagcatacatgacattttgaaatttctgcaactactggaagatgacacaaatgtgtaaattctattaacaacagtcacatgtactacaaataccggtgtaggtttattgcctac

SEQ ID NO: 35860 - DNA, 120 bp, synthetic construct; identical to SEQ ID NO: 9873
  source 1..120: mol_type = other DNA

SEQ ID NO: 35861 - DNA, 120 bp, synthetic construct
  source 1..120: mol_type = other DNA
ggaaagaaggaaagaaggaaggaaggaaagaaggaaagaaggaaagaaaagaatgaaaggccaggcacggcagcttactcctgtaatcccagcactttgggaggccaaggcaggtggatc

SEQ ID NO: 35862 - DNA, 120 bp, synthetic construct
  source 1..120: mol_type = other DNA
gaggcacgagaattgcttggcccagggaggtggcagttgtggtgagctgagatcgtgccgttgcactctagcctgggcaacaagagtgaaactccgtctcaaaaaaaaaaagaaagaaag

SEQ ID NO: 35863 - DNA, 120 bp, synthetic construct
  source 1..120: mol_type = other DNA
agaaagaaagaaagaaggaaaatagctctgcatgagagccagtgatgtctcagagtgggaaggaagccaggtcaacatgttgcccctaccaacaagcccttaggttgacaggaggtgcct

SEQ ID NO: 35864 - DNA, 120 bp, synthetic construct
  source 1..120: mol_type = other DNA
caactctccacatgcctgcatgcttccatctgaaccaatgttgaaggctcttctactattcaaagcccctaaggatgtaacatttggagaaaatatgctaaaaagacctggtactcagag

SEQ ID NO: 35865 - DNA, 120 bp, synthetic construct; identical to SEQ ID NO: 9874
  source 1..120: mol_type = other DNA

SEQ ID NO: 35866 - DNA, 120 bp, synthetic construct
  source 1..120: mol_type = other DNA
ggcactggccctggaattcccttcatgtcacacagggacagagaggaaactaacattttctaaggacttattccataccaggggctgcacattctgtgtcttatatctattacaaactgt

SEQ ID NO: 35867 - DNA, 120 bp, synthetic construct
  source 1..120: mol_type = other DNA
actgcaacctctgcctccccaagcaatcctcctgcctctcagcctccggagtagctgggattactggcatgcaccaccacacccagctaatttttgtatttttggtagagacagagtttc

SEQ ID NO: 35868 - DNA, 120 bp, synthetic construct; identical to SEQ ID NO: 9875
  source 1..120: mol_type = other DNA

SEQ ID NO: 35869 - DNA, 120 bp, synthetic construct
  source 1..120: mol_type = other DNA
cccctgagttcaagcaattctcctgcctcagcctcccaagtagttgggattacaggcacctgccaccatgcctggctaatttttgtatttttagtagggacagggttttgccatgttggc

SEQ ID NO: 35870 - DNA, 120 bp, synthetic construct
  source 1..120: mol_type = other DNA
ccatgcctggctaatttttttatttttagtagagacacggttttgccatgttggccaggctggtctcaaattcctgacctcaggtgatccacctgcctcagcctcccaaagtgttaggat

SEQ ID NO: 35871 - DNA, 120 bp, synthetic construct
  source 1..120: mol_type = other DNA
ctcaccacaacctcctctgggttagggcaattctcctgcctcagcctctcgagtagctgagattacaggtatgtgccaccatgcctagctgattttttatatttttagtagagatggggt

SEQ ID NO: 35872 - DNA, 120 bp, synthetic construct; identical to SEQ ID NO: 9876
  source 1..120: mol_type = other DNA

SEQ ID NO: 35873 - DNA, 120 bp, synthetic construct
  source 1..120: mol_type = other DNA
tgaggtgggaggattgcttaaatccatgaggtcgaggctgcagtaaactgtgatcatgccactgcattccagcctgggtaactgagcaagactctgtctcaaaaaactaaaaactaggca

SEQ ID NO: 35874 - DNA, 120 bp, synthetic construct
  source 1..120: mol_type = other DNA
tgaaaatacaaaaattagctggatgtggtggtgcgtgccagtaatcccagctactcagtaggctaagccaggggaatcgcttgaacccgggaggcagaggttgcagtgagccgagatggt

SEQ ID NO: 35875 - DNA, 120 bp, synthetic construct
  source 1..120: mol_type = other DNA
caatagcaaaggcttgaccttgctccaaaatcacaggttttttttaagctgtgttcttataaacttccaaatgagatgaagataaacttctgctgagaggggcatggtcatgacttacag

SEQ ID NO: 35876 - DNA, 120 bp, synthetic construct; identical to SEQ ID NO: 9877
  source 1..120: mol_type = other DNA

SEQ ID NO: 35877 - DNA, 120 bp, synthetic construct
  source 1..120: mol_type = other DNA
cagaggattgcatggctattagtgatggagtcgggatttgggcacgtgtacatttgttggattttgcagcctggcatctatatcccatttgtctggtggcaagatcccatttttgcgttg

SEQ ID NO: 35878 - DNA, 120 bp, synthetic construct
  source 1..120: mol_type = other DNA
tccaaagtagaagcactgaccattggtgtctgctgcctggatgctggaactatcctggcttctgtcctttccaaagaccgcctgttcagcttttccttcagttctgtaaatattttttca

SEQ ID NO: 35879 - DNA, 120 bp, synthetic construct
  source 1..120: mol_type = other DNA
ctgagtgcctatatggttttgaactcattatttgaaattcaagctcattacctgaaacaggaagaacacctcctcataaggctggtatgtgaattcaattagatgaaatatgtgctctcc

SEQ ID NO: 35880 - DNA, 120 bp, synthetic construct; identical to SEQ ID NO: 9878
  source 1..120: mol_type = other DNA

SEQ ID NO: 35881 - DNA, 120 bp, synthetic construct
  source 1..120: mol_type = other DNA
tcctgcctcagcctcacaactagctgggaccacaggcatgggccaccatgcttggctttttgcttttttttttttttttttttggtagagatgggtctccctatgttgcccaggctagtc

SEQ ID NO: 35882 - DNA, 120 bp, synthetic construct
  source 1..120: mol_type = other DNA
tattattattattattatttttgagacagagtctcactgtcacccaggctggagtgcagtggccatctcggctcattacaacctccgcctcccaggttcaagcgactctcctgactcagc

SEQ ID NO: 35883 - DNA, 120 bp, synthetic construct
  source 1..120: mol_type = other DNA
tcttcccgcctcggcttcccaaagttctgggatcccaggtgtcagccacctcgccaggctgcttgatatcttaaaatcagaaaagccacccatcttaagtggagggtgggtgggtccata

SEQ ID NO: 35884 - DNA, 120 bp, synthetic construct; identical to SEQ ID NO: 9879
  source 1..120: mol_type = other DNA

SEQ ID NO: 35885 - DNA, 120 bp, synthetic construct
  source 1..120: mol_type = other DNA
ggggaaagaggatattgccacagttctgtccttcgaaatgactccagatgcttctgagtctgtgaggcccctgtgtccgtcatcagcaaaacaagtgagggagaagtttgaggagtgatg

SEQ ID NO: 35886 - DNA, 120 bp, synthetic construct
  source 1..120: mol_type = other DNA
gggggtggaacctcgccgccttccgaagcaggagtaagctgcagaggctgcgcgggggtttgagcggagcgagaacagctccttcccttgatcatgctgccctccggaggtcagtttagg

SEQ ID NO: 35887 - DNA, 120 bp, synthetic construct
  source 1..120: mol_type = other DNA
aaaactgcgtgctccagtatcacttgaatgcccaccgggttccggaatcacgagtctccagagctgtcccttcgccccacggctcacattccaggtctgcccctcagtgacttctgcaac

SEQ ID NO: 35888 - DNA, 120 bp, synthetic construct; identical to SEQ ID NO: 9880
  source 1..120: mol_type = other DNA

SEQ ID NO: 35889 - DNA, 120 bp, synthetic construct
  source 1..120: mol_type = other DNA
agtggaggagcagaggattcccggggccggcgtctggggtgagctcgcggcccctcagagcctggcacatcgccgcctggcatccggcaggcgtgagggaacgcatagcgcagcgagtca

SEQ ID NO: 35890 - DNA, 120 bp, synthetic construct
  source 1..120: mol_type = other DNA
caagcctctcctcctgcgctcgccctcttctgcacttcggtctcaggcgcaaacacgttcaaagtcgctaggccaaagcgctgagatacggtttcccaagccaattagagagcggctctc

SEQ ID NO: 35891 - DNA, 120 bp, synthetic construct
  source 1..120: mol_type = other DNA
ccaattaggagagcccggagccggatccactctcagcctcaggaagcagcagcctccgctccgcggcgggtgtgctcggcagtcacagacccactcaggacacctcccgttgccgacggg

SEQ ID NO: 35892 - DNA, 120 bp, synthetic construct; identical to SEQ ID NO: 9881
  source 1..120: mol_type = other DNA

SEQ ID NO: 35893 - DNA, 120 bp, synthetic construct
  source 1..120: mol_type = other DNA
ggagggattccagagtcagcttgggcttgtcccaagggagcccttgggacagtgtctggggctgcgcggcctggttctcatcccttgcagcatctgctattttagccaggggccaccttc

SEQ ID NO: 35894 - DNA, 120 bp, synthetic construct
  source 1..120: mol_type = other DNA
ggaggaaggagaaaggaaatgggataagtgtcatgtcatactaaatatttattttctgcagactgacttcggagtaattcttgagccaggaggggagaggttagtgttcaaattgctgag

SEQ ID NO: 35895 - DNA, 120 bp, synthetic construct
  source 1..120: mol_type = other DNA
ctagttgagtgaaccagagattgaggcagtggtttttacaggggaagaaacaagccttgggtgtatgggagcaggaaaggagggtgacagactggagaaatgataaaggccattttggaa

SEQ ID NO: 35896 - DNA, 120 bp, synthetic construct; identical to SEQ ID NO: 9882
  source 1..120: mol_type = other DNA

SEQ ID NO: 35897 - DNA, 120 bp, synthetic construct
  source 1..120: mol_type = other DNA
cggctgggacagcacccggtggaagcgatgatagagctggatcagctgggtcagcgctccctggtcaaagaaagtcattgagggatcaaaccgtaaaatggtgctaatagtgatgattaa

SEQ ID NO: 35898 - DNA, 120 bp, synthetic construct
  source 1..120: mol_type = other DNA
cccatctctactacaaatacgaaaattagctggttgtggtggcaggcacctgtaatcccagctacttgggaggctgaggcaggaaaatcacttgaacctgggaggcagaggttgcagtga

SEQ ID NO: 35899 - DNA, 120 bp, synthetic construct
  source 1..120: mol_type = other DNA
gctagtaactgaagaccaagggtcacttagatgatgctgagcccagcaaaaagatggggaaaataattaatgatgggggatctgagtggggcctgggacttgcaggtcacctgaatgata

SEQ ID NO: 35900 - DNA, 120 bp, synthetic construct; identical to SEQ ID NO: 9883
  source 1..120: mol_type = other DNA

SEQ ID NO: 35901 - DNA, 120 bp, synthetic construct
  source 1..120: mol_type = other DNA
tccacgctcaatcaaagcctcagcctccttcacaaatgccactaaacccccaaaagggggagacagcaactcttcaatgaattcctggaaagacacaaacacatatacacaggtgtcctg

SEQ ID NO: 35902 - DNA, 120 bp, synthetic construct
  source 1..120: mol_type = other DNA
attttggcccatacagttcccctggttaagatcaaacaatgaactcaaagatcactagacacaaaagaagggcagctaccaagagagtcagcagacacaataagcaatagctgctgacct

SEQ ID NO: 35903 - DNA, 120 bp, synthetic construct
  source 1..120: mol_type = other DNA
cacctgaggtcaggagttcaagaccagcctggccaacatgatgaaaccccatctctactaaaaatacaaaaattagctgggcatgatggtggatgcctataatcccagctactcgggaga

SEQ ID NO: 35904 - DNA, 120 bp, synthetic construct; identical to SEQ ID NO: 9884
  source 1..120: mol_type = other DNA

SEQ ID NO: 35905 - DNA, 120 bp, synthetic construct
  source 1..120: mol_type = other DNA
tggctactaacatcacaaagagagccaagaagacattatgtgcttcctgatggaaatacataccactacctctcaaatatccctgtagaaaaaaaaaaactaatttaaatctgaccaagc

SEQ ID NO: 35906 - DNA, 120 bp, synthetic construct
  source 1..120: mol_type = other DNA
actcagtttcttccaaaaataaattgcagaggagatggaagggaaatctatagactaaaaaaagacacatatatggactttatatggatcctgatttgaaccataaaaatcatttatgaa

SEQ ID NO: 35907 - DNA, 120 bp, synthetic construct
  source 1..120: mol_type = other DNA
aaaaatacaaaaattagctgggcgtggtggtgggtgtctataatcccagctactcaggagactgaggcaggagaattgcttgaacccgggaggcagatgttggagtgtgccaagatcggg

SEQ ID NO: 35908 - DNA, 120 bp, synthetic construct; identical to SEQ ID NO: 9885
  source 1..120: mol_type = other DNA

SEQ ID NO: 35909 - DNA, 120 bp, synthetic construct
  source 1..120: mol_type = other DNA
tcatctgtatatgtataagatttaattcaaagtaactgggggacacagaaggaggataagcaataggtgttggtatagatgaaacaaaactgtccgtgaactgctatacaccgaatatca

SEQ ID NO: 35910 - DNA, 120 bp, synthetic construct
  source 1..120: mol_type = other DNA
acaacccagacagaaagatctggtaagaagaaagtgaaattattattccatttaaaaataaattattaatactaaaattagccaggtgtggtggtgcatgcctgtaaccccagctactca

SEQ ID NO: 35911 - DNA, 120 bp, synthetic construct
  source 1..120: mol_type = other DNA
taaataaataaataaaaattgtatcttttctattcttccctcaaaatattcacttatatccactgagggtgtcaaataactaatatgctgcaaggaaggatctttctataatcaaggcat

SEQ ID NO: 35912 - DNA, 120 bp, synthetic construct; identical to SEQ ID NO: 9886
  source 1..120: mol_type = other DNA

SEQ ID NO: 35913 - DNA, 120 bp, synthetic construct
  source 1..120: mol_type = other DNA
gctcagtgattatcccacctcagcctcctgagtagctgggactaacaggcatgtgccaacatgtcccactcattttttttttattttttgtagagatggggtttcaccatgttgtccagg

SEQ ID NO: 35914 - DNA, 120 bp, synthetic construct
  source 1..120: mol_type = other DNA
atattttggatgtagtggtttaaaaaattatttcatctgtttctccttactttttaatgtagcttctagaaaatttaaaattatttaagtggctcacatttgtggcatgcattatattcc

SEQ ID NO: 35915 - DNA, 120 bp, synthetic construct
  source 1..120: mol_type = other DNA
acgtagtatgaagcagcagctgaccaaaaaggaccagaagcattgatggcagctggcgagtctctatacctggcaaatccagtgacaaatcccagctgctctcagcagaaacaactggtt

SEQ ID NO: 35916 - DNA, 120 bp, synthetic construct; identical to SEQ ID NO: 9887
  source 1..120: mol_type = other DNA

SEQ ID NO: 35917 - DNA, 120 bp, synthetic construct
  source 1..120: mol_type = other DNA
gcttgcagtgagctgagattgcaccactgcaccactccagcctgggagacagagggagactctgtctaaaaaaaaaaaaaaaaaaaagaaatggagtctcactatgttgcccaggcagat

SEQ ID NO: 35918 - DNA, 120 bp, synthetic construct
  source 1..120: mol_type = other DNA
aaagggttctcactatcacctttctgttcaacttctaaacatcatcctgggagtgttagccagtagaataagaaatcaaaaacataagatgttaaagacaaaaaactagaaaagatttat

SEQ ID NO: 35919 - DNA, 120 bp, synthetic construct
  source 1..120: mol_type = other DNA
aaaattggaggaggaggccaggtggagtggctcacatctgtaatcccagtttagtgagacactacaaaaaattaaatttttaaattttgtattctctacagaaaaaaaaaagccaagtgt

SEQ ID NO: 35920 - DNA, 120 bp, synthetic construct; identical to SEQ ID NO: 9888
  source 1..120: mol_type = other DNA

SEQ ID NO: 35921 - DNA, 120 bp, synthetic construct
  source 1..120: mol_type = other DNA
aaaattagctgggtgtggtggcacatgcctgtaatcctagctactcaggaggctgaggcaggagaatcacttgaacccaggaggcagaggttgcagtgcgctgagattgtggccctgcac

SEQ ID NO: 35922 - DNA, 120 bp, synthetic construct
  source 1..120: mol_type = other DNA
aaatagatccctacctcacatcacacacaaaaattaattccaagtaaatttgagacttaaaggtaacaaaaaaattctctctatatatttgtttattctttaattttattattatttttt

SEQ ID NO: 35923 - DNA, 120 bp, synthetic construct
  source 1..120: mol_type = other DNA
tacaggtgtgtgccactatgcttggctaatatatttttttaattttttgtagagatgaggtctcactatactgcctaggctggtctcaaactcctggcttcaagcaatcttcctgccttg

SEQ ID NO: 35924 - DNA, 120 bp, synthetic construct
  source 1..120: mol_type = other DNA
tttttttttttaaacggagtctcactctatcaccagtctggagtgcagtggcacgatcttggctcactgcatcctccacctccctggttcaagtgattctcctgcctcagcctcatgagt

SEQ ID NO: 35925 - DNA, 120 bp, synthetic construct; identical to SEQ ID NO: 9889
  source 1..120: mol_type = other DNA

SEQ ID NO: 35926 - DNA, 120 bp, synthetic construct
  source 1..120: mol_type = other DNA
acctgtagtcctagttacttgggaggctgagggaggagggttgcctgagcccaggaggttgaggctacagtgagccatgatcacactactgcattccagcttgggtgacagagcaagact

SEQ ID NO: 35927 - DNA, 120 bp, synthetic construct
  source 1..120: mol_type = other DNA
ctgtaatcccagcattttgggaggctgaggcggatggatcacctgaggtcaggcgttcaagactggcctggccaacatggcaaaacccatctctactaaatatacaaaaattagccgggc

SEQ ID NO: 35928 - DNA, 120 bp, synthetic construct
  source 1..120: mol_type = other DNA
atgagtgaaactccatctcaaaaaaaaaaaaaaaaaggtgcaaggatttcttgagcccaggagcctgggcaacacagaaagaccctcatctcaccaaaaaaaaaaaaaaaagtaaaaaga

SEQ ID NO: 35929 - DNA, 120 bp, synthetic construct; identical to SEQ ID NO: 9890
  source 1..120: mol_type = other DNA

SEQ ID NO: 35930 - DNA, 120 bp, synthetic construct
  source 1..120: mol_type = other DNA
gtacaccctgcccagccacaagccgatttttaaaaggtcaaatgctatgacagccattttacaggaaaaaaaaaaattgtatagttgtggtgacgctcctcacacagagcaccagcttca

SEQ ID NO: 35931 - DNA, 120 bp, synthetic construct
  source 1..120: mol_type = other DNA
gagtactgtaaacagttgcaatggcggccctgaccagctagtgagactcgcatttattcagtaaagattaattgacaaagacttgagtcaacaccactacggggtaactgacattgtgga

SEQ ID NO: 35932 - DNA, 120 bp, synthetic construct
  source 1..120: mol_type = other DNA
ttaactaaaggtaaagatcaggtcgccttcaaccatatctattactgaagttatgcaaactcttaggccttccaagagggtttgtggctatcatcactaatatttttcccaccagcctga

SEQ ID NO: 35933 - DNA, 120 bp, synthetic construct; identical to SEQ ID NO: 9891
  source 1..120: mol_type = other DNA

SEQ ID NO: 35934 - DNA, 120 bp, synthetic construct
  source 1..120: mol_type = other DNA
taccacatgttggagaaaatgtggctcagtaggaattcttacatattgctggtgagaaggaactacttaggaaaacaatttatcattgtctcataaagactaatactgcatatcttatta

SEQ ID NO: 35935 - DNA, 120 bp, synthetic construct
  source 1..120: mol_type = other DNA
atgattattcataaaacaatgctcacagaagcaagaaactggaaacaatccatttatagaatatgtttaatcacacaagtcatatatggcagtgaaaaggaatgagctatagccatatgc

SEQ ID NO: 35936 - DNA, 120 bp, synthetic construct
  source 1..120: mol_type = other DNA
tcatgatcatggctcgctgtaatctcgaactcctggatttcaaagtggtcctctcgcctttgtctcccaaatagctagaactacaggtgcataccaccatgcctggcttttttttttttc

SEQ ID NO: 35937 - DNA, 120 bp, synthetic construct; identical to SEQ ID NO: 9892
  source 1..120: mol_type = other DNA

SEQ ID NO: 35938 - DNA, 120 bp, synthetic construct
  source 1..120: mol_type = other DNA
agtgactcatgcctataatcccagcactttgggaggctgaggcgggtgaatcacctgaggtcaggagttttaagaccagctgggccaacatggtgaaaccccatctctactaaaaataca

SEQ ID NO: 35939 - DNA, 120 bp, synthetic construct
  source 1..120: mol_type = other DNA
cagtgtgggagtcagagtgagactccgtctttaaaaaaaaaaaagaatcataagatttttcacttgagggcagtaattcaagaccagcccaggcaacagttgtcttttgtaaagacaact

SEQ ID NO: 35940 - DNA, 120 bp, synthetic construct
  source 1..120: mol_type = other DNA
ctgtaatcccagcacttgggaggcccaggtgggaggatcacttgaagtcaggagttcaagacaagcctggctaacatggtgaaatcccgtctctactaaaaacacaaaaactagcccggc

SEQ ID NO: 35941 - DNA, 120 bp, synthetic construct; identical to SEQ ID NO: 9893
  source 1..120: mol_type = other DNA

SEQ ID NO: 35942 - DNA, 120 bp, synthetic construct
  source 1..120: mol_type = other DNA
accccacaagcacaggcaaccaaagcaaaaatggccaaatgggatcacgtcaagttacaaagcttctgcacagctgggcacggtggctcacgcctgtaatcccagcactttgggagacag

SEQ ID NO: 35943 - DNA, 120 bp, synthetic construct
  source 1..120: mol_type = other DNA
tactcaggaggctgaggcaggaaaattgcttgaacctgggaggcggaggttgcggtgagctgagatcgcaccatcgcactccagcctggacaacaagaacaaaactccatctcaaaaaaa

SEQ ID NO: 35944 - DNA, 120 bp, synthetic construct
  source 1..120: mol_type = other DNA
aactctacatgacagtctaataatcctattaaaaaatgggcaaaagatttgaatagatatttttcaaaagaatacaaatggcaaacagacatatatgaaaaggggctcaccatcactatt

SEQ ID NO: 35945 - DNA, 120 bp, synthetic construct; identical to SEQ ID NO: 9894
  source 1..120: mol_type = other DNA

SEQ ID NO: 35946 - DNA, 120 bp, synthetic construct
  source 1..120: mol_type = other DNA
agaaaatgtgggatatatacacaatggagtactactcagccataaaaaagaatgagactcagtcatttgcaacaacatgcatagaattggaaattattatattaagtgaaataagccagg

SEQ ID NO: 35947 - DNA, 120 bp, synthetic construct
  source 1..120: mol_type = other DNA
tagtggaaggctggggagaaggtggggatgattaatgggtacaaacaaaaataggaagaataaataagacctactatttgacagcacaacagggtgactatagtcaattataacttaatt

SEQ ID NO: 35948 - DNA, 120 bp, synthetic construct
  source 1..120: mol_type = other DNA
gtggctcgcacctgtggtcccagctacccagggggctaaggtagaaggatcacttaagcccaggctgttgaggctgcagtgagccatgttcatgccactgcactccagcctgggtgacag

SEQ ID NO: 35949 - DNA, 120 bp, synthetic construct; identical to SEQ ID NO: 9895
  source 1..120: mol_type = other DNA

SEQ ID NO: 35950 - DNA, 120 bp, synthetic construct
  source 1..120: mol_type = other DNA
gtccccttcattccacacttattgtactaagctggacactgtgccagactccaagagtaaaacactgaacaagacaggcatcatctctgccctcacagagctaacagcagtgggggaaac

SEQ ID NO: 35951 - DNA, 120 bp, synthetic construct
  source 1..120: mol_type = other DNA
gccactcggaggacaaaattctccacctccacctgaaaaggcagagaggaagaggtgacaccagaaagcaaggtcatctgggccccatctggctcctcctcagactccacccactggaag

SEQ ID NO: 35952 - DNA, 120 bp, synthetic construct
  source 1..120: mol_type = other DNA
catagcggcgtgtgatctaggagagagtgggaaggaaaatcacacccacctcctggcccaaccaacacaacctcccaacttccttagccaacccacctccatgtgatgtgactctacctt

SEQ ID NO: 35953 - DNA, 120 bp, synthetic construct; identical to SEQ ID NO: 9896
  source 1..120: mol_type = other DNA

SEQ ID NO: 35954 - DNA, 120 bp, synthetic construct
  source 1..120: mol_type = other DNA
tcattcagtttaatggtcaatagctagttgtgggggttggggggcagtggttggagaaaggtgagtcaaaaagcagcactactgcctccggagcaaatgaatgggaataaaggttgatga

SEQ ID NO: 35955 - DNA, 120 bp, synthetic construct
  source 1..120: mol_type = other DNA
tgctgcaatgttacggaaccggagaacaatgtggatacagagaaaaacagcaatggcatcgtagcagtcagctagataagaatccaggtgtttctgtgtgattggggaacaaacagagga

SEQ ID NO: 35956 - DNA, 120 bp, synthetic construct
  source 1..120: mol_type = other DNA
tcctgtccaggatctatgtttttggctttttttttgttttttgagatagagtttcactcttgccacccaagctggaatgcagtggcacaatctcggctcactgcaacctccgcctgcctc

SEQ ID NO: 35957 - DNA, 120 bp, synthetic construct; identical to SEQ ID NO: 9897
  source 1..120: mol_type = other DNA

SEQ ID NO: 35958 - DNA, 120 bp, synthetic construct
  source 1..120: mol_type = other DNA
ggttaagtttatttttaaattttttgtagagacaaggtcttgccgcattgcccaggctggtctcgaactcctggcctcaagcaaccttcctgccttggtctcccaaagtactgggattgc

SEQ ID NO: 35959 - DNA, 120 bp, synthetic construct
  source 1..120: mol_type = other DNA
tcacgtgctattgcctgattgtgggtcagcagtaggggtagtctcagggaccctacgcactgaggatttcatgggggagtaacactgtgacaagtctaagtaacaagttttttttttgag

SEQ ID NO: 35960 - DNA, 120 bp, synthetic construct
  source 1..120: mol_type = other DNA
aggccgcgcacacctggctaatttttgtactgttagtagagacagggtttcatcatgttggtcaggctggtctcaaactcctgaccttgtgatcctcccgcctcagcctcccaaagtgct

SEQ ID NO: 35961 - DNA, 120 bp, synthetic construct; identical to SEQ ID NO: 9898
  source 1..120: mol_type = other DNA

SEQ ID NO: 35962 - DNA, 120 bp, synthetic construct
  source 1..120: mol_type = other DNA
gaccccactatgctgctgatgaagactggggacaaaggtgttgaatggtacaggaaacaggagtcttaccagggtcatgctgagtgtacggcccatgacagcatggaacaggtcgtgtgc

SEQ ID NO: 35963 - DNA, 120 bp, synthetic construct
  source 1..120: mol_type = other DNA
taaagaagaaaaacagaagggatggaccccaacactgacttcccatggatatggctggaaaatcagtaaacctgagtaataagagctaggcagacccttcgcatctatctaggtccgggc

SEQ ID NO: 35964 - DNA, 120 bp, synthetic construct
  source 1..120: mol_type = other DNA
attcccctcatccagtctctcccctctgcatgcccttaagtcaatggttcccagctcttttcacatcacagcaggctggagtgattggagaaggccactcccaagtctaaggggattaag

SEQ ID NO: 35965 - DNA, 120 bp, synthetic construct; identical to SEQ ID NO: 9899
  source 1..120: mol_type = other DNA

SEQ ID NO: 35966 - DNA, 120 bp, synthetic construct
  source 1..120: mol_type = other DNA
gtgctgacatctgtgaatgggcttcagggtgtctctccctcccttgcaatcatatgcaaaactatgtgtcaaaataatgtgtgcatctttctggggagggaggctatagctttcatcaca

SEQ ID NO: 35967 - DNA, 120 bp, synthetic construct
  source 1..120: mol_type = other DNA
ttgctgtatcttccacacccattagatcatctttctcagcgacttcctcatactaaggaaagagaaaagagaactgataaccgtctcttcccacaacacaataaaatattccttgcccag

SEQ ID NO: 35968 - DNA, 120 bp, synthetic construct
  source 1..120: mol_type = other DNA
ggtaagagcggtagtaagacaggtaaatcttgctcagcgtctccacatattcatccctgatctcctttgctgttgctcgttcattgcccagcagaaactgatagaagaacctagggggtc

SEQ ID NO: 35969 - DNA, 120 bp, synthetic construct; identical to SEQ ID NO: 9900
  source 1..120: mol_type = other DNA

SEQ ID NO: 35970 - DNA, 120 bp, synthetic construct
  source 1..120: mol_type = other DNA
tttctcaagattttcagggaaacccagagagacaagaatggggctgcccagaaaaggcagggtgaagtccctggagacaggctacagtgagctctgccaaggaaatccatagtgaagatc

SEQ ID NO: 35971 - DNA, 120 bp, synthetic construct
  source 1..120: mol_type = other DNA
tctgactgcggctgccttggcatccagctcctgtagctgctccaagaacctgggctctgtcactggagcctccagaattgccctggttagcagggaggggtgggatgagttacaagggag

SEQ ID NO: 35972 - DNA, 120 bp, synthetic construct
  source 1..120: mol_type = other DNA
ctccccactatacacctgatcttacatcattcttaatcttaatctttgatgcctaatgcatacctaaagaaatggtggttaacctggctactaatttctaaaaagcacttaacctggagc

SEQ ID NO: 35973 - DNA, 120 bp, synthetic construct; identical to SEQ ID NO: 9901
  source 1..120: mol_type = other DNA

SEQ ID NO: 35974 - DNA, 120 bp, synthetic construct
  source 1..120: mol_type = other DNA
ttgagggtggcagatgatgagacaccccagattatcaggaaataacattaaatatggcagtaataacaaaaaaggctcctgaagtcatcttgaaaatgaccctaacctgtccccatcttg

SEQ ID NO: 35975 - DNA, 120 bp, synthetic construct
  source 1..120: mol_type = other DNA
gagatgctatattctcactctcttgaatatctgatccacaaaaagtcaaggggcctcatggtgaagatgggagatcctcagatttgtagtacctctccaatttctctttgaagtgataga

SEQ ID NO: 35976 - DNA, 120 bp, synthetic construct
  source 1..120: mol_type = other DNA
ctctgctggaggatacaatcccgaatggatttctgttcaatctgctgtagctccagctcaacttgctttgaatagtgacggagatctacaccctgggagaacataaagatgacaggtcag

SEQ ID NO: 35977 - DNA, 120 bp, synthetic construct
  source 1..120: mol_type = other DNA
caagagactgttgtttttccttttggggtagaatagatagaagggcagattagtacaggggaaagcctcaccgttttaagagcttcctttactaactcatcctccagatttgcctgaatg

SEQ ID NO: 35978 - DNA, 120 bp, synthetic construct; identical to SEQ ID NO: 9902
  source 1..120: mol_type = other DNA

SEQ ID NO: 35979 - DNA, 120 bp, synthetic construct
  source 1..120: mol_type = other DNA
gagaaggagctgcttttactgggagccacaggtactgctttgaaaaattctaagagtctcacgttgtacccactctcctattttgtgctgatgggtaaggaatacgacaaggagtgagac

SEQ ID NO: 35980 - DNA, 120 bp, synthetic construct
  source 1..120: mol_type = other DNA
aacacagggaaacccgtctaaagaaaacaaaaaaaggtaaaagacaagacagtgcagtggaggccggacgcagtggctcacgcctgtaatcccagcactttgggaggccgaggtgggaag

SEQ ID NO: 35981 - DNA, 120 bp, synthetic construct
  source 1..120: mol_type = other DNA
ggttgaggcaggagaatggcgtgaacccggaaggtggagcttgcagtgagccaagatcgcgccactgcactccagcctgggcgacagagcaagactccgtctcaaaaaaaaaaaaaaaaa

SEQ ID NO: 35982 - DNA, 120 bp, synthetic construct; identical to SEQ ID NO: 9903
  source 1..120: mol_type = other DNA

SEQ ID NO: 35983 - DNA, 120 bp, synthetic construct
  source 1..120: mol_type = other DNA
agatagaactcaggcagtctggcttcagaggccatgttcttaacctttacactatactacttcgtgactctaccccaaaatgtggagtgaagttgaaattttgtgccccagaacatgagt

SEQ ID NO: 35984 - DNA, 120 bp, synthetic construct
  source 1..120: mol_type = other DNA
gtctttctgaagctaggagcaccggaactacggaggagaaacagctccgcgctctcaccagcgggccctcttcctcctccatatctgaggtcccagcccgcaacaccagttcccgggccg

SEQ ID NO: 35985 - DNA, 120 bp, synthetic construct
  source 1..120: mol_type = other DNA
aatcgttcccagatatttgagttaagttgtttgactccagctgtcccctttcagctctaaccacttcacccaactgcaaatggaaatatggaagtctgaaacacaaactagccccggaac

SEQ ID NO: 35986 - DNA, 120 bp, synthetic construct; identical to SEQ ID NO: 9904
  source 1..120: mol_type = other DNA

SEQ ID NO: 35987 - DNA, 120 bp, synthetic construct
  source 1..120: mol_type = other DNA
gtccctggaaagggacaccaaagatttccaattccggagagcgggcccgaggaagggtcactgctcgggcgcacgaaagctgtctaaggcttgggcgtatatggggaactctggcttttg

SEQ ID NO: 35988 - DNA, 120 bp, synthetic construct
  source 1..120: mol_type = other DNA
aaacctaaggaatggggggcgggtgtcttgccacttgtgtgacaggcttaacctttttgtatgaagttcgtttgccttatcggccttactgtttgatagtttactgtgtctgatttcttc

SEQ ID NO: 35989 - DNA, 120 bp, synthetic construct
  source 1..120: mol_type = other DNA
gggcggcggaaaatagcctttgccatcactgccattaaggtaagtgaagtagggtaaggaatagggaatgtaaatgagaattgggttgtgaagacataagcaaaaatgaagcaaggctgg

SEQ ID NO: 35990 - DNA, 120 bp, synthetic construct; identical to SEQ ID NO: 9905
  source 1..120: mol_type = other DNA

SEQ ID NO: 35991 - DNA, 120 bp, synthetic construct
  source 1..120: mol_type = other DNA
cttgagggataagtagaaataccaacagataaaaagtgtgaagaagcctgtagatggagggtggaagaagtctgagtgggacatttactcagatgagccataattgacactcctttcctg

SEQ ID NO: 35992 - DNA, 120 bp, synthetic construct
  source 1..120: mol_type = other DNA
agatacataacgttctttttttttcccttaagtcagaatgtgtagttagttgtggaaatagcctaccagtatgtgtccatgcgtgcagggctaggcctgtcttcttggcttctgttgcat

SEQ ID NO: 35993 - DNA, 120 bp, synthetic construct
  source 1..120: mol_type = other DNA
tccttctgttgggtgctctgtgaaactaataaggcagtgtgaaatactgtacttatttcagagaccggctgtgaggcttaagtagaggtgcagcattcataagtgtaatagagaataacc

SEQ ID NO: 35994 - DNA, 120 bp, synthetic construct; identical to SEQ ID NO: 9906
  source 1..120: mol_type = other DNA

SEQ ID NO: 35995 - DNA, 120 bp, synthetic construct
  source 1..120: mol_type = other DNA
cccaagtagctgagattacaggcacacgcccagctaatttttgtatttttagaagagatggggtttcaccatgttggtcaaactggtcttaaacttctgacctcaggtgatccacccacc

SEQ ID NO: 35996 - DNA, 120 bp, synthetic construct
  source 1..120: mol_type = other DNA
agggctcaagtcaatcctcctacctcaactttccaagtagttggggctacaggtgtgcaccaccacatctggctaatctggatcttgctgtgttgtccaggctggtcttgaactcctggg

SEQ ID NO: 35997 - DNA, 120 bp, synthetic construct
  source 1..120: mol_type = other DNA
tgatctctttcttgcagataggaactgccatttgttttagtttcctggagcctactgtaacaagttcatataaactaagcagaaaattactcttggcgctggaggcacttaagaatccta

SEQ ID NO: 35998 - DNA, 120 bp, synthetic construct; identical to SEQ ID NO: 9907
  source 1..120: mol_type = other DNA

SEQ ID NO: 35999 - DNA, 120 bp, synthetic construct
  source 1..120: mol_type = other DNA
ggtgttgatgtgatgctaccaatgtaagcattagtttctttttataataacttgggcagtcagttctgggcactgacaaaattgagtttgtgatcttggaatactttgattatggggata

SEQ ID NO: 36000 - DNA, 120 bp, synthetic construct
  source 1..120: mol_type = other DNA
ccccttgttctcctaaatgcaagaatcagaaggcacttagtgacaactacatatgctgagcaatgggggaaaaaaaagatactgcctgctttcaaagggttgtctgtaatactaaattct

SEQ ID NO: 36001 - DNA, 120 bp, synthetic construct
  source 1..120: mol_type = other DNA
tcctaggttcaagctattctgctgcagcctcccaagtagctgggattacaggcacctgccaccatgctcagcaacttttcttgtatttttagtagagacagggtttcaccatgttggcca

SEQ ID NO: 36002 - DNA, 120 bp, synthetic construct; identical to SEQ ID NO: 9908
  source 1..120: mol_type = other DNA

SEQ ID NO: 36003 - DNA, 120 bp, synthetic construct
  source 1..120: mol_type = other DNA
ctcaccaagagggcgggagaactcactgaggatgaggtgaggacaaggaagggggctgggggtggggtcagcctcagaaaggggtccatctagatctgaccttggtctgcctgccaggtg

SEQ ID NO: 36004 - DNA, 120 bp, synthetic construct
  source 1..120: mol_type = other DNA
ggatggaaaatacagccaggtgtgtactgaaatgagggcaggattagaggaagggtggagggtcctaacagaattgggcataggaggtcaggggataaaacatcccttgccccctcctct

SEQ ID NO: 36005 - DNA, 120 bp, synthetic construct
  source 1..120: mol_type = other DNA
ccctgcctacctcgactcagcattcctcctactcgctcttctttttccccaaccttttgtttctgctgtgcatgacctgtgactcttctctttttacctgcagccttcgtgtccgaggcc

SEQ ID NO: 36006 - DNA, 120 bp, synthetic construct
  source 1..120: mol_type = other DNA
ataaatagtttatatacctatggcttcctgtcctttctgtccattctaatagggaatgttaaagtgctgggtcctttttccatttagagctgccctactcagttgcccacacagtgctat

SEQ ID NO: 36007 - DNA, 120 bp, synthetic construct; identical to SEQ ID NO: 9909
  source 1..120: mol_type = other DNA

SEQ ID NO: 36008 - DNA, 120 bp, synthetic construct
  source 1..120: mol_type = other DNA
tggagtacgtcggtgggttgggatggggagcggctggacagaccggtctcactccgtttggtgccactccacccgcccgggtttccgcgccctgccgcgctgctccgacgccgcttccgg

SEQ ID NO: 36009 - DNA, 120 bp, synthetic construct
  source 1..120: mol_type = other DNA
cgcggcgacaaggtagccacccccgcagcatgcctcgaccgcggtccgcagctgcaccgcctctccccgccccccagggtgcgctggtcccggtcgcgcgctcagacctccgcatcccgg

SEQ ID NO: 36010 - DNA, 120 bp, synthetic construct
  source 1..120: mol_type = other DNA
ttctcgccgctttgctgctggtgatcgtctggaccctcttcgggccttcggggttgggggaggagctgctgagcctctcactagcctccctgctcccagcccccgcctcaccggggccgc

SEQ ID NO: 36011 - DNA, 120 bp, synthetic construct; identical to SEQ ID NO: 9910
  source 1..120: mol_type = other DNA

SEQ ID NO: 36012 - DNA, 120 bp, synthetic construct
  source 1..120: mol_type = other DNA
acgtcctcaagacggacgatgatgtgtatgtcaacgtccctgaactggtatcagagctggtcttgcgagggggccgttgggggcaatgggagagaagcacggaaccccagagagaggctg

SEQ ID NO: 36013 - DNA, 120 bp, synthetic construct
  source 1..120: mol_type = other DNA
agtggcctcacacctggggcccctttccaccctatgcctcaggcacggggtatgtgctgtcagcgtctgctgtgcagctcattctcaaggtggccagccgggcaccccttctcccattag

SEQ ID NO: 36014 - DNA, 120 bp, synthetic construct
  source 1..120: mol_type = other DNA
cgtcccacaggctggacccctggaagatgcaggaagcctggaagctggtgggtggctctgacggggaaaggactgcgcccttttgctcctggttccagggagtcctgggcatcctgcggt

SEQ ID NO: 36015 - DNA, 120 bp, synthetic construct; identical to SEQ ID NO: 9911
  source 1..120: mol_type = other DNA

SEQ ID NO: 36016 - DNA, 120 bp, synthetic construct
  source 1..120: mol_type = other DNA
gctgccagaccctgctgcatgggaaggacatctccagggacatgggagagaggacagcctctctgaggaggaaggcccctaaaaggcaaagctaaggccacagcagccacaaggtatggg

SEQ ID NO: 36017 - DNA, 120 bp, synthetic construct
  source 1..120: mol_type = other DNA
aagatgatccagacacattatccaaaaaatcgctttcctctttaataccaacccaccccaggagacagctgtccacccccagttggggaaggggccacactgcccccacctccttgttcc

SEQ ID NO: 36018 - DNA, 120 bp, synthetic construct
  source 1..120: mol_type = other DNA
ttcgcctccttatgatgctgctgctgaaggctctgccggaccttgtcctggggaccggagacggggaggacacaggcacagagtgagaagtggcaggctgacaagggcagaggcacaagc

SEQ ID NO: 36019 - DNA, 120 bp, synthetic construct; identical to SEQ ID NO: 9912
  source 1..120: mol_type = other DNA

SEQ ID NO: 36020 - DNA, 120 bp, synthetic construct
  source 1..120: mol_type = other DNA
catccacctcggccagggctcgtgggtccagacaaataagctctgcaggtacctgggggtgtcacagagggacaggactcagcaaggagccacaggagggtagcaccaaaaagagaagcc

SEQ ID NO: 36021 - DNA, 120 bp, synthetic construct
  source 1..120: mol_type = other DNA
gggaacctcacctccaacaggggcaatctcaccctctccagcaggggggaacctgaccctctccaggagagggaatttcaccctctccagcagagggaaacctgaccctctccagcaggg

SEQ ID NO: 36022 - DNA, 120 bp, synthetic construct
  source 1..120: mol_type = other DNA
agtggggaacctgaccttctccagcaggggggaacctgaccttctccaggaaggaggaacctcaccctctccaggacgggggaacctgaccctctccagcaatgggggggatctcaccct

SEQ ID NO: 36023 - DNA, 120 bp, synthetic construct; identical to SEQ ID NO: 9913
  source 1..120: mol_type = other DNA

SEQ ID NO: 36024 - DNA, 120 bp, synthetic construct
  source 1..120: mol_type = other DNA
ccggtgggtgaggtagggctgttcaagggagggtgggctggccttgccctgccctgcccagatgttgacaacgtcacccattcccgccaccagcagtcccctctgggagaaggccaggtg

SEQ ID NO: 36025 - DNA, 120 bp, synthetic construct
  source 1..120: mol_type = other DNA
aattaatatgtcagtaaatgggtttaccaagcaagctgtggccaagtccaggcatcaagtctggctggggagaaaaagattaatagtaataaccactgccatcaccctgaacactccaca

SEQ ID NO: 36026 - DNA, 120 bp, synthetic construct
  source 1..120: mol_type = other DNA
agcatctgcctctaacctgctaacaccacacagccctctcaagacacgggcgtcaaaaggaacgcccacacgacaggctgcacccaaatgtgatgtccccctgtacacacatgcagcaca

SEQ ID NO: 36027 - DNA, 120 bp, synthetic construct; identical to SEQ ID NO: 9914
  source 1..120: mol_type = other DNA

SEQ ID NO: 36028 - DNA, 120 bp, synthetic construct
  source 1..120: mol_type = other DNA
ttgccctgcccctctgtgtgctttccctggaaggaaggagggaaggttggtgaccaaatcctctccaggaatcatgtactgcataagttgtttactttcagaagttggagttccttttct

SEQ ID NO: 36029 - DNA, 120 bp, synthetic construct
  source 1..120: mol_type = other DNA
ggattacaggcatgcgccaccaccgctaatttttagtagagccagggtttcgccatgttgaccacgctggtcttgaactcctggcctcaaatgacctgcccaccttggcctcccagagtg

SEQ ID NO: 36030 - DNA, 120 bp, synthetic construct
  source 1..120: mol_type = other DNA
tgccttggctgtgaacccaggagaagggaactgaagagttcttatgagcagagacttgcacagtgatggagcccaagagaggaccagctggatacttccgacaagataatcagcgccctg

SEQ ID NO: 36031 - DNA, 120 bp, synthetic construct; identical to SEQ ID NO: 9915
  source 1..120: mol_type = other DNA

SEQ ID NO: 36032 - DNA, 120 bp, synthetic construct
  source 1..120: mol_type = other DNA
agctgtttagcctcaaggtgttgattaaacttcaggcctcagcgaactagtgattaagccctaagcacaggagtggctgacccaggtagcccacggagggcaagctacagctttggccca

SEQ ID NO: 36033 - DNA, 120 bp, synthetic construct
  source 1..120: mol_type = other DNA
aaggccagacacggtggctcacgcctataatcccagcactttgggaggacaggcgggtggatcacaaggtcaggagttcaagaccagcctggccaacatggtgaaattccatctgtacta

SEQ ID NO: 36034 - DNA, 120 bp, synthetic construct
  source 1..120: mol_type = other DNA
cattgcactccagcctgggtgacagagtgagactccgtctcaaaaaaaaaagatacaattatgcaaaaacagggagcgggtggtggggggggtggtcccagcatcctggagactttgaat

SEQ ID NO: 36035 - DNA, 120 bp, synthetic construct; identical to SEQ ID NO: 9916
  source 1..120: mol_type = other DNA

SEQ ID NO: 36036 - DNA, 120 bp, synthetic construct
  source 1..120: mol_type = other DNA
ccagcactttgggaggccgaggtgggtggatcacctgaggtcaggagtttgagaccagccaagccaacatggcaaaaccccatctctactaaaaatacaaaaattagcgcatgcagtggc

SEQ ID NO: 36037 - DNA, 120 bp, synthetic construct
  source 1..120: mol_type = other DNA
actccgtctcgaaaaatagtaataaaataaataaatgcatcacctggccaatcattctcaaaaaccatagccatggccgggtgcagtggctcacgcctgtaatcccaacacttgcacttt

SEQ ID NO: 36038 - DNA, 120 bp, synthetic construct
  source 1..120: mol_type = other DNA
aatcccagctactcaggaggctgaggcaggagaatcgcttgaaccccggggggcagaggttgtggtgagctgagattgtgccactgcactccagcctgggtgacagatcaagactctgtc

SEQ ID NO: 36039 - DNA, 120 bp, synthetic construct; identical to SEQ ID NO: 9917
  source 1..120: mol_type = other DNA

SEQ ID NO: 36040 - DNA, 120 bp, synthetic construct
  source 1..120: mol_type = other DNA
ttaatgtctacaacagcttatatgagggctttaaaccaaggcttggtaaactactgcccatgggccaaacctggcccatcatctagttctgtatagcccacaagccaagaatggttttta

SEQ ID NO: 36041 - DNA, 120 bp, synthetic construct
  source 1..120: mol_type = other DNA
taatactgtggctgcttttgctctacaacacacagccgagtggtcacgacagcgactacagcatcctgatttgcactgctgctttgtacactacaagtcacagtgacacagtcgtaagtg

SEQ ID NO: 36042 - DNA, 120 bp, synthetic construct
  source 1..120: mol_type = other DNA
atctctacagatcagcatgaacatgaatatctacagtcaaatttgaccatctggaacactaactttgtacatcaattaggcaaaatgttaacctcaaaaagagaaattcagttcttccca

SEQ ID NO: 36043 - DNA, 120 bp, synthetic construct; identical to SEQ ID NO: 9918
  source 1..120: mol_type = other DNA

SEQ ID NO: 36044 - DNA, 120 bp, synthetic construct
  source 1..120: mol_type = other DNA
tttgtttgtttttgagacggagttttgctcttgttgcccaggttggagtgcaatggcacagtcttggctcactgcaacccctgcctcccaggttcaagcaattctcctgcctcagcctcc

SEQ ID NO: 36045 - DNA, 120 bp, synthetic construct
  source 1..120: mol_type = other DNA
acccgccttggcctccaaagtgctgggattacaggcgtgagccaccgcacctggccatattacgtttaattttataacctaaaaatgtgtgggccaggcgcagtggctcacgcctgtaat

SEQ ID NO: 36046 - DNA, 120 bp, synthetic construct
  source 1..120: mol_type = other DNA
gcaggtgcctgtaatcccagctacttgggagactgaggcaggagaatcgcttgaatctgggaggcggaggttgcagtgagccgagatcacgccactgcactccaacctgggagacagagc

SEQ ID NO: 36047 - DNA, 120 bp, synthetic construct; identical to SEQ ID NO: 9919
  source 1..120: mol_type = other DNA

SEQ ID NO: 36048 - DNA, 120 bp, synthetic construct
  source 1..120: mol_type = other DNA
aatgcctacatggtaccctttgattttacctcttatcagcaaatcataaaatatttactatctgactctttacagaaaaagtttgtggacccttgaaatggacactcatatttccatttt

SEQ ID NO: 36049 - DNA, 120 bp, synthetic construct
  source 1..120: mol_type = other DNA
gcacactgccttccacacctttctgcccacctatgactcctaacacctcaccccaccagtgacttacgtgcctgtagaatctactgccacagcccggaccccaccacgatgacagagaat

SEQ ID NO: 36050 - DNA, 120 bp, synthetic construct
  source 1..120: mol_type = other DNA
actcaagaccaagagataacaaaaaagggaaataaaagggtaactttaagggactcatgaagtacaaatatagaagaaaagcaagtcaggatggtcagagtcaaaactaagccaggtact

SEQ ID NO: 36051 - DNA, 120 bp, synthetic construct; identical to SEQ ID NO: 9920
  source 1..120: mol_type = other DNA

SEQ ID NO: 36052 - DNA, 120 bp, synthetic construct
  source 1..120: mol_type = other DNA
atagatgtggagccagcggttctgagcaacagcaagcagtgcctcagaatggagaaacctgggggagaggaagagtggttcaattgggaaatgaggtcacaggctatcattcaatcagga

SEQ ID NO: 36053 - DNA, 120 bp, synthetic construct
  source 1..120: mol_type = other DNA
atgacctcggcgccctccaaaagccaggtgtctgttggaggtgaggggcaggcagggtgttaaggcaggggaccaccgactcagacaacttgaggtctgccccacgccagccccatctct

SEQ ID NO: 36054 - DNA, 120 bp, synthetic construct
  source 1..120: mol_type = other DNA
acatcttagttcaagagtcactagaattcaaccttaccttccagttcgagagtagtttagtctgtagggtccaaactgccgcagattcaagtcaaagtgctgggaaagagaagagtgaaa

SEQ ID NO: 36055 - DNA, 120 bp, synthetic construct; identical to SEQ ID NO: 9921
  source 1..120: mol_type = other DNA

SEQ ID NO: 36056 - DNA, 120 bp, synthetic construct
  source 1..120: mol_type = other DNA
cagcaagcagcagctcagaacgagcagctttgatacttgtttcctcttcctcagcttcagccacctcaagtcggcttcgagttttggctttagaatgtggtagctgtaacattgttggtg

SEQ ID NO: 36057 - DNA, 120 bp, synthetic construct
  source 1..120: mol_type = other DNA
cctcacctttcgggatttgtcaatgcgacagaacttctggaccacttccacagggacgggggcggggcctgggaatggatcttgggtctaggggaaaggaggacgcaattagcagacagc

SEQ ID NO: 36058 - DNA, 120 bp, synthetic construct
  source 1..120: mol_type = other DNA
gtttcttcgggacctgaggcttcttagagatccgagacttctttaagatgtaagcattttttggtctctgaggacggagctcccgattcttcttgttacgaggaggccctggagaggctc

SEQ ID NO: 36059 - DNA, 120 bp, synthetic construct; identical to SEQ ID NO: 9922
  source 1..120: mol_type = other DNA

SEQ ID NO: 36060 - DNA, 120 bp, synthetic construct
  source 1..120: mol_type = other DNA
gctctctaggtgccatcttgagtgagggcacgctctccttagaggggcggaacagtttttggcaccttatcgcgagcggcagcttatgcaagagtgatttaaaaaagaaaggcaggtccg

SEQ ID NO: 36061 - DNA, 120 bp, synthetic construct
  source 1..120: mol_type = other DNA
tttttagcagaactccactccctaaacatgtcagaactacacttcccatcaagggtcagaaagaaacttccggcacagtcttttcccagcattccttgtttacttccgggtttattacta

SEQ ID NO: 36062 - DNA, 120 bp, synthetic construct
  source 1..120: mol_type = other DNA
gcccctcagggctacctctcaagagtgctatcatttccgcaggccagatcagaaaagggagctcaggtaccttccagagagtgagacccagcgcccttgtctcgcacccagtaggctttc

SEQ ID NO: 36063 - DNA, 120 bp, synthetic construct; identical to SEQ ID NO: 9923
  source 1..120: mol_type = other DNA

SEQ ID NO: 36064 - DNA, 120 bp, synthetic construct
  source 1..120: mol_type = other DNA
ccccagacttaagtaaatccatgtcggggaggcagaaacttgaagcacaactaacagaaaataatatcgtgaaagaggtgagggactgggatttgtggggcgaggagggacctgtactag

SEQ ID NO: 36065 - DNA, 120 bp, synthetic construct
  source 1..120: mol_type = other DNA
gggccacagtagggaagaggctggactatatcacagctgaaatgtgagtttttattccaccaccgtgtgctgcaccctgtgatgcaagtgaaccattggagtagaggtgttgaaccattg

SEQ ID NO: 36066 - DNA, 120 bp, synthetic construct
  source 1..120: mol_type = other DNA
tttagcactctccatagtgagtcctactaatttctccctttctgcttgtctcccttgtctctccttagtaagcgatacgaatcccagcttcgggatcttgagcggcagtcagagcaacag

SEQ ID NO: 36067 - DNA, 120 bp, synthetic construct; identical to SEQ ID NO: 9924
  source 1..120: mol_type = other DNA

SEQ ID NO: 36068 - DNA, 120 bp, synthetic construct
  source 1..120: mol_type = other DNA
cctcatcttggttggcatgattcttttggaagggcatttgcaacataccatattgctaggaatgtcggtttaattgaaaaagaatacacagttctctaacctgaggccccaggatgaaat

SEQ ID NO: 36069 - DNA, 120 bp, synthetic construct
  source 1..120: mol_type = other DNA
atggtattataagtcctcccaagtttatatgttgtccataaagttgttctgccatttccttgtcctaaaattgttttatacacatttgcagcaagggaccagtggtagagaggttactgg

SEQ ID NO: 36070 - DNA, 120 bp, synthetic construct
  source 1..120: mol_type = other DNA
ccccactcatagcagccagttcatatgtactgcaaggacaggggagtagaattcaggtagtgttttggtttattatcttagtgttgtcacagtgatagaaacccccagagtgggaagaag

SEQ ID NO: 36071 - DNA, 120 bp, synthetic construct; identical to SEQ ID NO: 9925
  source 1..120: mol_type = other DNA

SEQ ID NO: 36072 - DNA, 120 bp, synthetic construct
  source 1..120: mol_type = other DNA
tctgtctcaatgtgatataattgccaccattcaggatggctacccacatctggtatgaacaccatgacttctgtaagccaacggggcttcctcctcagaacagtgcccgtgcaatcttcc

SEQ ID NO: 36073 - DNA, 120 bp, synthetic construct
  source 1..120: mol_type = other DNA
ggaggaaatcgtgtgaagctccatccatggcgtagaatacattagccgaggctgggatagtcagctctgaaggttcaggggatggatgtaaagcacacacacagttgttccccccacagc

SEQ ID NO: 36074 - DNA, 120 bp, synthetic construct
  source 1..120: mol_type = other DNA
attgtttttcttaaggacacgactgatgacacttggagccttgtcctggcttgtcacctggcagaacaggagaccaaaagagcaatcaatcagccatgatttcccatccttctaccctca

SEQ ID NO: 36075 - DNA, 120 bp, synthetic construct; identical to SEQ ID NO: 9926
  source 1..120: mol_type = other DNA

SEQ ID NO: 36076 - DNA, 120 bp, synthetic construct
  source 1..120: mol_type = other DNA
aactgccaaaaccaaaggtcaaaattaaaactacattcaattccatttggctgcccaaacctcagacaacatttatagtccaacaagacaccatccttcaccccaactccatcccaaggc

SEQ ID NO: 36077 - DNA, 120 bp, synthetic construct
  source 1..120: mol_type = other DNA
ccctggcccagatccctctcccccatatccagtccccccggaggcctcttctgcacccccactcagcggggagccacaggaggctgagcggcggtgacctcgagaaggcctaggggagga

SEQ ID NO: 36078 - DNA, 120 bp, synthetic construct
  source 1..120: mol_type = other DNA
ctggcatgaaggcagggaggtttaaggaagaaacatttacagagtgagggtcagcgtcaaggtcagagtcaggagcagagctcacctgggccagccgagtcagcagaggagcaggagttg

SEQ ID NO: 36079 - DNA, 120 bp, synthetic construct
  source 1..120: mol_type = other DNA
cccaagaaaccaccccccagccagtgaatctctcactctgtccactgcgagatgaccaatgttggccgaagcacccgtggggcaggagggtcactggaaccaggtggctccacctcacag

SEQ ID NO: 36080 - DNA, 120 bp, synthetic construct; identical to SEQ ID NO: 9927
  source 1..120: mol_type = other DNA

SEQ ID NO: 36081 - DNA, 120 bp, synthetic construct
  source 1..120: mol_type = other DNA
caaaattgatgtatccattctgcgaggaaaatggggatggggtgaaagttccaaccctaccttccggccacagagagagaatatcccctctcttaaacacacacagccacatccaactca

SEQ ID NO: 36082 - DNA, 120 bp, synthetic construct
  source 1..120: mol_type = other DNA
cttgaccctttaaattgaatttctcaggtagacaacgagtctgctttgcagatgagaggactggatagtatccaattcgacaggattccttatccagagaggataaggaacttgtccaag

SEQ ID NO: 36083 - DNA, 120 bp, synthetic construct
  source 1..120: mol_type = other DNA
gcacgttctaagcacttgacaaatacaaattcatttaacccttataacagatcaatgtagatgctatttctagtttcccatttacagatcactgaggcgacttggcacagaaacagatct

SEQ ID NO: 36084 - DNA, 120 bp, synthetic construct
  source 1..120: mol_type = other DNA
ttgttacatcattgcaatgacacacacacacaccactgacctccaactcatccttggaggctgcatccagcatcacaaggtccttcaggaaggtgccaaggtatgggaccacaccctgaa

SEQ ID NO: 36085 - DNA, 120 bp, synthetic construct; identical to SEQ ID NO: 9928
  source 1..120: mol_type = other DNA

SEQ ID NO: 36086 - DNA, 120 bp, synthetic construct
  source 1..120: mol_type = other DNA
aacaaggagaggtgggaatgccacaaaccaggctctcacctgcacgagcagctcccgactctgggaataattatcctcctcggagaaaatctggcagaggctggaaaagactctgaggct

SEQ ID NO: 36087 - DNA, 120 bp, synthetic construct
  source 1..120: mol_type = other DNA
tccccccaggctgcccgaagcctgtggatggggctggactgcagggctgacaccacggcataaactgaagagaagtttcggagcagccggcactcctgtgggggtcaaagaagagagcta

SEQ ID NO: 36088 - DNA, 120 bp, synthetic construct
  source 1..120: mol_type = other DNA
tatggtcacctccccaggtccctctccagtggaagtagcccccaggacagaactaaccactgcccctgccaccttgttaaactgtgtgacagtagctcggacagatgggcagaggtgaga

SEQ ID NO: 36089 - DNA, 120 bp, synthetic construct; identical to SEQ ID NO: 9929
  source 1..120: mol_type = other DNA

SEQ ID NO: 36090 - DNA, 120 bp, synthetic construct
  source 1..120: mol_type = other DNA
gttcggccaagtggtcagcgaggaacaccaggacatccgtggggtcagcagggggatcgccggggagggccaggggcttaggaaggtcgggggcctgggggtccacccgggaccggagat

SEQ ID NO: 36091 - DNA, 120 bp, synthetic construct
  source 1..120: mol_type = other DNA
gagaggccagccaggttgacagtacagagatggctaccctgggagaagggaatcagccaagggtgagaggtaaagctgcagcctgggcagaggggactgtgagattaagaaccaggggtc

SEQ ID NO: 36092 - DNA, 120 bp, synthetic construct
  source 1..120: mol_type = other DNA
tggtgggatgttgcggctttaggaaatccgggcagatactccactaccctgcgtcccttatgactctgacctgtcagccataagccctagcaaggcaggcgtggaggtgaaggcccggtg

SEQ ID NO: 36093 - DNA, 120 bp, synthetic construct; identical to SEQ ID NO: 9930
  source 1..120: mol_type = other DNA

SEQ ID NO: 36094 - DNA, 120 bp, synthetic construct
  source 1..120: mol_type = other DNA
gagaagctaaagtcatgatctcaccaagggatcaagaggtcgatattggcggcttgtgacggtaaacacggcaccatcctcctcctcatcccagacggacacaggggcctggaggagcaa

SEQ ID NO: 36095 - DNA, 120 bp, synthetic construct
  source 1..120: mol_type = other DNA
ggaagggttgggggagctggtgaccccaggtctcccccactggggcccagacagccccaccccagccgcctcagggccccggtggagtcgaaggggctgcagtggaggcgtggatggagt

SEQ ID NO: 36096 - DNA, 120 bp, synthetic construct
  source 1..120: mol_type = other DNA
agcgactaggggtagctgaaacctcagtccaggcactgccgcatgccccgcccctcccggccaaggactataccagcccagagaattagtctttttcaggacccctttcaccctggtccc

SEQ ID NO: 36097 - DNA, 120 bp, synthetic construct; identical to SEQ ID NO: 9931
  source 1..120: mol_type = other DNA

SEQ ID NO: 36098 - DNA, 120 bp, synthetic construct
  source 1..120: mol_type = other DNA
cccggcctctacccaggaccggggcggggcgggggggcggggggaagggggagagagggaaggaggggtcacgaaatctgagggttccctccccaatcccagagtcagaggagctggtta

SEQ ID NO: 36099 - DNA, 120 bp, synthetic construct
  source 1..120: mol_type = other DNA
gggacaggacagccagccagaagttccaggcaggaacagggcaggttcctgcgggcaggtcctgagtcacactgacagagaaccacggagacgccaggactccccgcagcagagaaacgg

SEQ ID NO: 36100 - DNA, 120 bp, synthetic construct
  source 1..120: mol_type = other DNA
gtctcacctcttcttcttcctcctcctcttcctcctgccccccgcccacgaccaggccacctgggcccccaccctcttcggggtcccggcttcggaagctgctcagtacgactcccccgg

SEQ ID NO: 36101 - DNA, 120 bp, synthetic construct; identical to SEQ ID NO: 9932
  source 1..120: mol_type = other DNA

SEQ ID NO: 36102 - DNA, 120 bp, synthetic construct
  source 1..120: mol_type = other DNA
gccccggaccgagtcccctccccggcttttccgtacccccttgaacccccccgccgggctcctgggccctcccgccctttccgctcccccccgcgtccgcccgctccgagagcaggagcc

SEQ ID NO: 36103 - DNA, 120 bp, synthetic construct
  source 1..120: mol_type = other DNA
gggattctggagaccacgtcgacccgcaatgaactggaataaagattccagtctccagcccctgggggaaggcaggagcagaatttgacattcccttccccaacaataacacggctaaaa

SEQ ID NO: 36104 - DNA, 120 bp, synthetic construct
  source 1..120: mol_type = other DNA
aatgtagctgaccgaaatcccggccgggttttccgaagggccctcgattcccgccccctcggcagggggcggggcaggaagcagccacatccggttccagattcggctctcagaggcttc

SEQ ID NO: 36105 - DNA, 120 bp, synthetic construct; identical to SEQ ID NO: 9933
  source 1..120: mol_type = other DNA

SEQ ID NO: 36106 - DNA, 120 bp, synthetic construct
  source 1..120: mol_type = other DNA
ttaggtccctatgccggcgcggggttacagcagtggacagacaggccagtccctgtcctcgaggagcccatgatccgcggggagacaggcatttaacgacgactcacacgatcacttaaa

SEQ ID NO: 36107 - DNA, 120 bp, synthetic construct
  source 1..120: mol_type = other DNA
gagggcaagggtggaccaggcaaagggaacagaggactgggacctggaggtgggcgggaggcgtttggttcattggaggaaaggaatagccctgtgtgtgatgagcattgagaggaggtc

SEQ ID NO: 36108 - DNA, 120 bp, synthetic construct
  source 1..120: mol_type = other DNA
gaagaatggatttggccctagagtacgggttctccaaatgtaacctcggccctacagatctctgagactatgtcagggggtttgtgagattttataacaaaattaagatgttagtacaat

SEQ ID NO: 36109 - DNA, 120 bp, synthetic construct
  source 1..120: mol_type = other DNA
cgtctctactaaaaacacaaaaagttagccgggcgtggtggcgggcccctgtagtcccagctactcgggaagctgaggcaggagaatggcgtgaacccgggaggcggagcgtgccgtgag

SEQ ID NO: 36110 - DNA, 120 bp, synthetic construct; identical to SEQ ID NO: 9934
  source 1..120: mol_type = other DNA

SEQ ID NO: 36111 - DNA, 120 bp, synthetic construct
  source 1..120: mol_type = other DNA
tgcactccagcctgggcgacagagcgagactccgtctcaaaaaaaaaaaaaaaaaagttttttgccttcttcattctataagtgtacagtggagtttttcagaagctacatgatatgtat

SEQ ID NO: 36112 - DNA, 120 bp, synthetic construct
  source 1..120: mol_type = other DNA
gctttttggggtccttgatgatttttaagaggtcctgagagaaaaaaattttgagaaccactgtcctagagctccaagaaggtgaatgccataagatgtgtgttttttaaaaaagcattt

SEQ ID NO: 36113 - DNA, 120 bp, synthetic construct
  source 1..120: mol_type = other DNA
attcaagaccagcctggccaacatggtgaaaccccgtctctactaaaaatacaaaaattcactgggtgtggtggcatgtgcctgtaatcccagctactccggaggctgaagccacagaat

SEQ ID NO: 36114 - DNA, 120 bp, synthetic construct
  source 1..120: mol_type = other DNA
taagtgaaagaaaaaaaaaaaagcattccagccactcagtggagagagattggagggattaggagcagatgatagggtattattttagggagctactacagaagcttgggccagagatga

SEQ ID NO: 36115 - DNA, 120 bp, synthetic construct; identical to SEQ ID NO: 9935
  source 1..120: mol_type = other DNA

SEQ ID NO: 36116 - DNA, 120 bp, synthetic construct
  source 1..120: mol_type = other DNA
acctgtgtttgaatacttaaggtgagaaaagggctgcaatttattttcttttctttctttttttttttttttttttgagacagggtctcactttgtcacccaggctggagtacagtggga

SEQ ID NO: 36117 - DNA, 120 bp, synthetic construct
  source 1..120: mol_type = other DNA
tttgttttgttttttgagacagagcctcactctgttgcccaggctggagtgcagtggtgcgatctcggctcactgcaacctccacctcccaggttcaagcaattctcctgcctcagcctc

SEQ ID NO: 36118 - DNA, 120 bp, synthetic construct
  source 1..120: mol_type = other DNA
ccgccctcctcagcctcccaaagtgctaggattacaggcgtgaaccaacgcacctggccaagactgtaatttctttttcttttttttttgttgttgagacgaagttttccttttgtcacc

SEQ ID NO: 36119 - DNA, 120 bp, synthetic construct
  source 1..120: mol_type = other DNA
attttttgtatttttagtagagatggggtttcatcatgttggctaagctggtcttgaactcctgacctcaggtgatcctcccgcctcggcctcccaaagtgcagggattacaggcatgag

SEQ ID NO: 36120 - DNA, 120 bp, synthetic construct; identical to SEQ ID NO: 9936
  source 1..120: mol_type = other DNA

SEQ ID NO: 36121 - DNA, 120 bp, synthetic construct
  source 1..120: mol_type = other DNA
gggtgcctgtaatcccaactactcgggaggctaaggcaggagaatcgcttgaacctgggaggtggaggttgcagtgagccgagatcgcaccattgcaccccagcctgggcgacagagact

SEQ ID NO: 36122 - DNA, 120 bp, synthetic construct
  source 1..120: mol_type = other DNA
aaatattccaaagtctgaaaaaatccaacatccaaaaacacttctgacccaagcatttcagataagggaccagaattattagattaaataaggtatattattaagttaattttacctgtt

SEQ ID NO: 36123 - DNA, 120 bp, synthetic construct
  source 1..120: mol_type = other DNA
atatagattaagtagcatgctcaaagagtcctacagttaggatatagtgccaggttttaacccagatcagtgtgaattccaagcctaggttctgcctaccacaccagcagcctccctcca

SEQ ID NO: 36124 - DNA, 120 bp, synthetic construct; identical to SEQ ID NO: 9937
  source 1..120: mol_type = other DNA

SEQ ID NO: 36125 - DNA, 120 bp, synthetic construct
  source 1..120: mol_type = other DNA
ctgtcttcctgggtgctggctcagattccgcagagctcccagctcttacctgctacctccagggtgacctcagcgctgcgccccgaggcaggcaggctgggatggtgaattcgacaggca

SEQ ID NO: 36126 - DNA, 120 bp, synthetic construct
  source 1..120: mol_type = other DNA
gagcggccccctgggccaccccggagttcccactccacctccaggcccccagaagggtagaagtgggacacaaggcagagcaattccgggggtgcctcccctggggcggcccgtgcaagg

SEQ ID NO: 36127 - DNA, 120 bp, synthetic construct
  source 1..120: mol_type = other DNA
actaaagaaggttaggtttcttctcctgaaatagggaacccactgtctctccattggtgcgtcacagaaatacccatgtcaaagcccctcaaatttccaggaaacttctagcctcccatt

SEQ ID NO: 36128 - DNA, 120 bp, synthetic construct; identical to SEQ ID NO: 9938
  source 1..120: mol_type = other DNA

SEQ ID NO: 36129 - DNA, 120 bp, synthetic construct
  source 1..120: mol_type = other DNA
gcagatgtcccttacccaggtgctggcgtcgccactctagcccaaagggagggggacccggagccagagatgaggcggcctcggaggtggggggcatgtaggcaaagctcaagtccagca

SEQ ID NO: 36130 - DNA, 120 bp, synthetic construct
  source 1..120: mol_type = other DNA
aaaatagagaaatgcagttattggggagggctaaactgcagtttacccacccctcagaggacaccttttctgatactcaccatttcctagccctccctgcaaactccttttgctctgcga

SEQ ID NO: 36131 - DNA, 120 bp, synthetic construct
  source 1..120: mol_type = other DNA
gactgcagaatccgaggccacttctgacacaacctgaaccactctatctccaagcaccacccttgaggaaccaggcctttcttgattacaggcgaagacaatgattgagccatgactgtc

SEQ ID NO: 36132 - DNA, 120 bp, synthetic construct; identical to SEQ ID NO: 9939
  source 1..120: mol_type = other DNA

SEQ ID NO: 36133 - DNA, 120 bp, synthetic construct
  source 1..120: mol_type = other DNA
acagagacacctacccatgaagggtgcttacaacactgtctggaacacagtaagtctacacgtgtttgctatagttacacctaacttagcataccccaagtcaacagcatctctgcaaca

SEQ ID NO: 36134 - DNA, 120 bp, synthetic construct
  source 1..120: mol_type = other DNA
ttggagttactcagactcatttattcattcagcaactattgagcactgaagatgttcaaggtatcctggtagaagacagaatggtgaacaagacaagcagtccctgctctcaaattgcct

SEQ ID NO: 36135 - DNA, 120 bp, synthetic construct
  source 1..120: mol_type = other DNA
ctgtttccaatttaggttctcatcaatgtacgtttagacaattacaacagccctcctgtctggtctccctattctcagtctctccttcaactccttcttcacactgtagccaaacaaagt

SEQ ID NO: 36136 - DNA, 120 bp, synthetic construct; identical to SEQ ID NO: 9940
  source 1..120: mol_type = other DNA

SEQ ID NO: 36137 - DNA, 120 bp, synthetic construct
  source 1..120: mol_type = other DNA
ccaggcgtggtggctcacacctgtaatcccaacactttggtagcctgaggcgggtggattacctgaggtcaggagttcaagaccagcctggccaacatggcaaaaccctgtctctactaa

SEQ ID NO: 36138 - DNA, 120 bp, synthetic construct
  source 1..120: mol_type = other DNA
actacactccagcctgggcaacagagtgagactccgtctcaaaactaaataaataaataaaataaaaatcccaaatacctaggaagtcagctgataaaggcataggctgaagctatatgg

SEQ ID NO: 36139 - DNA, 120 bp, synthetic construct
  source 1..120: mol_type = other DNA
gcctcccaggttcaagtgagtctcctgcctcagcctcctgagtagctgggattacaggcgtccacaaccgtgcccagctaatttttgtatttttggtagagatggggtttcaccatgttg

SEQ ID NO: 36140 - DNA, 120 bp, synthetic construct; identical to SEQ ID NO: 9941
  source 1..120: mol_type = other DNA

SEQ ID NO: 36141 - DNA, 120 bp, synthetic construct
  source 1..120: mol_type = other DNA
tcatggacttgctggttaacttggaaaaatcatttaacctgtattttcctcactagtccaaagatctgacctttgcctatcttttaaaagaatcaagtaaaataacaggctttttccggg

SEQ ID NO: 36142 - DNA, 120 bp, synthetic construct
  source 1..120: mol_type = other DNA
gcctggccaacatggtgaaaccccatctctactaaaaatacaaaaaaaaaaaaaaaaaaaattagcggggcgtggttgtgggtgcctgtgatcccatcaacttgggaggctgaggcagga

SEQ ID NO: 36143 - DNA, 120 bp, synthetic construct
  source 1..120: mol_type = other DNA
ggctttttagaataacacgccctccaaaagaacttctgatggttcgctctcacctacagaacaaagcccagctttcaaggtatttgaacattcagcccctaacccacccttccaggcttc

SEQ ID NO: 36144 - DNA, 120 bp, synthetic construct
  source 1..120: mol_type = other DNA
gtgcctagtagaagtggtcatcattggtcatctctttgctttggtcatgaggtcccttcagtttacattgtctttcccattttctcccaaacatctatcaagcttgtccaacctccagcc

SEQ ID NO: 36145 - DNA, 120 bp, synthetic construct; identical to SEQ ID NO: 9942
  source 1..120: mol_type = other DNA

SEQ ID NO: 36146 - DNA, 120 bp, synthetic construct
  source 1..120: mol_type = other DNA
tcatggaattgttcagtagagtaaaaacagtatgcaatttcacttagtttgtcaaaatccagaaacatacttttgaattgttaaaaaaaaaaaaaaagatccacaggctgggcacagtgg

SEQ ID NO: 36147 - DNA, 120 bp, synthetic construct
  source 1..120: mol_type = other DNA
ggtggcacacgcctgtaatcacagctgcttgggaagctgaggcaggagaatcacttgaacctgggaggcggaggttgtggtgagccgagatcatgccattgccctccagactgggcaaca

SEQ ID NO: 36148 - DNA, 120 bp, synthetic construct
  source 1..120: mol_type = other DNA
gaacccagcagtttgagaccagcctgggcaacatagcaagaccccatctctatttaaaagaaaaaatttaaaaaaataataaacaagacctaaaggttttacagtttaactctttttttt

SEQ ID NO: 36149 - DNA, 120 bp, synthetic construct
  source 1..120: mol_type = other DNA
ttttttttttttttttgagacagtttcacgcttgttgcccaggctggagtgcagtggcatgatcttggctcactgcaacctccgcctcccaggttcaagcaattctcttgcctcagcctt

SEQ ID NO: 36150 - DNA, 120 bp, synthetic construct; identical to SEQ ID NO: 9943
  source 1..120: mol_type = other DNA

SEQ ID NO: 36151 - DNA, 120 bp, synthetic construct
  source 1..120: mol_type = other DNA
atattaagaaagtataggcctggcgtggtggctcacgcctgtaatcccagcaatttgggaggctgaggtgggtggatcacctgaggtcaggagttcaagaccagcctggctaacatgacc

SEQ ID NO: 36152 - DNA, 120 bp, synthetic construct
  source 1..120: mol_type = other DNA
atgagcagagatcacaccattgcactccagcctgggcaacagggtgagactctgtctcaaaaaaaaaaaaaaaaaaaaaaaagtatatttggggccaggcagctcacacgtgtaatccca

SEQ ID NO: 36153 - DNA, 120 bp, synthetic construct
  source 1..120: mol_type = other DNA
acatgcctgtggtctcagctactcaggagactgaggcacgaggatcacttgagccacggaggtggaggttgcagtgagctgagatcatgccactgctctccagcctgcactgcactccag

SEQ ID NO: 36154 - DNA, 120 bp, synthetic construct; identical to SEQ ID NO: 9944
  source 1..120: mol_type = other DNA

SEQ ID NO: 36155 - DNA, 120 bp, synthetic construct
  source 1..120: mol_type = other DNA
taggtgggcgtggtggcacaagcctgtaatcccagctactggggaggctaaggcacaagaattgcttgaacatgggagacggaggttgcagtgagccaagatcatgccactgcaactgca

SEQ ID NO: 36156 - DNA, 120 bp, synthetic construct
  source 1..120: mol_type = other DNA
cacctgaagttgggagttcgagaccagccttaccaacatggagaaacctcatctctactaaaaatacaaaattagctgggtgtggtggcaggcacctgtaatcccagctactcgggaggc

SEQ ID NO: 36157 - DNA, 120 bp, synthetic construct
  source 1..120: mol_type = other DNA
aaaataaaaataaataaatagcacagcaccttgctttgaccccagttgtttgtgaaatacagacaatcttaccacccgggcacttccagggctccctgtctgcatgtccttcactttcta

SEQ ID NO: 36158 - DNA, 120 bp, synthetic construct; identical to SEQ ID NO: 9945
  source 1..120: mol_type = other DNA

SEQ ID NO: 36159 - DNA, 120 bp, synthetic construct
  source 1..120: mol_type = other DNA
gttggaaaaacaaactcagaaagcaaagaccattctcatcatcacctcggtggagccagtagccctaggaaatattccaccccaccagagagagctactgtctacacaagagcagtgttc

SEQ ID NO: 36160 - DNA, 120 bp, synthetic construct
  source 1..120: mol_type = other DNA
agggaagggagggtgcagggattggttggggttgccctgtccatcgggctgtgtcgctgacataaaatccagatagaaaagctaagaactctaccggtattctaccccggaataccccgc

SEQ ID NO: 36161 - DNA, 120 bp, synthetic construct
  source 1..120: mol_type = other DNA
ctgcaatgcacctttcagtgcaataggagctatccaatctccagccgcgtccatccgcccactcgagcccacctgtttgcggaccacagagcggcagcacatccctacacggggctgtca

SEQ ID NO: 36162 - DNA, 120 bp, synthetic construct; identical to SEQ ID NO: 9946
  source 1..120: mol_type = other DNA

SEQ ID NO: 36163 - DNA, 120 bp, synthetic construct
  source 1..120: mol_type = other DNA
aaggagcggtagagattgattcattctagccaaaccacctctcttaacaaaaaaaggaaactgaaccccgattggcgaaatgtcttgctcaagtccataaagcgagaccaccggctgatc

SEQ ID NO: 36164 - DNA, 120 bp, synthetic construct
  source 1..120: mol_type = other DNA
ctgaggctctggctgtggtcgcaagaggctggagaggctgaggactgggctggatatgctgaccatcagccaagccccatccagggcccgcgggcagttctgcgcgggggtcaggccgct

SEQ ID NO: 36165 - DNA, 120 bp, synthetic construct
  source 1..120: mol_type = other DNA
agaaggaagttgcagctgtagagtcaccgccgggaaaggggctggaagggcagcgttcggggaacttcaaatgcacagactaccccgtagtgagactcactttacaaaggggaagctgag

SEQ ID NO: 36166 - DNA, 120 bp, synthetic construct; identical to SEQ ID NO: 9947
  source 1..120: mol_type = other DNA

SEQ ID NO: 36167 - DNA, 120 bp, synthetic construct
  source 1..120: mol_type = other DNA
tctagttcttgggcgatgagtcgcggggttcgctcacccaaagccacagcgaggagcagagacagggacttcatggcgctgcgacctcctcagccatgaagcctcctcttcctcctttca

SEQ ID NO: 36168 - DNA, 120 bp, synthetic construct
  source 1..120: mol_type = other DNA
tgtttccccactggccaggcagggacccgggtagatcctctccagttctcaccaggacaccccagccttaccgcgccctcctggactacccagcagccccgagttcgagccctccccaac

SEQ ID NO: 36169 - DNA, 120 bp, synthetic construct
  source 1..120: mol_type = other DNA
cctatctgtgccgcgtccccagcaaacacacgggttatcgggaagccaagtaaatgaccaataaatattttaatcactgttaaaaaaaataaaaaccttgtactcctacgacttactccc

SEQ ID NO: 36170 - DNA, 120 bp, synthetic construct
  source 1..120: mol_type = other DNA
tagaaataaagagcgcatccttgagagggggtaggttctaggacaagggtggggctcaaaggccttgtctccacgacaacacaaacacagacttcaggcacagactacaaccacctgacc

SEQ ID NO: 36171 - DNA, 120 bp, synthetic construct; identical to SEQ ID NO: 9948
  source 1..120: mol_type = other DNA

SEQ ID NO: 36172 - DNA, 120 bp, synthetic construct
  source 1..120: mol_type = other DNA
caccttgtggactctgggtggggaccagacacgtctgctggacgggggcgtggccgcactcgcttcgtcgccgctgcccccgcccactccgggagactctctcttggacggcaaggatgg

SEQ ID NO: 36173 - DNA, 120 bp, synthetic construct
  source 1..120: mol_type = other DNA
gcactcgtagggcttgagacctgtgtgcgtcttcatgtgctcagtcagatggtgcttcatcttgaactttttgttgcacacggggcagtcaaacggccgcagattgaggtgcatgttcac

SEQ ID NO: 36174 - DNA, 120 bp, synthetic construct
  source 1..120: mol_type = other DNA
gctccccaccgacgtgccccccacggtcactgccccgtgttctgcttggttccctggtggttggccaggagcctgtgaggatgaggatgaagacgacgacgggaagaccaggatctggtt

SEQ ID NO: 36175 - DNA, 120 bp, synthetic construct; identical to SEQ ID NO: 9949
  source 1..120: mol_type = other DNA

SEQ ID NO: 36176 - DNA, 120 bp, synthetic construct
  source 1..120: mol_type = other DNA
acctcgcttcacgtatacccagtgtttctgtggcatgatgctagggggtgtgtaggtgggtctccggagcccagccccaggaaccactgcccccctcccatccccaccatcatcgcacag

SEQ ID NO: 36177 - DNA, 120 bp, synthetic construct
  source 1..120: mol_type = other DNA
ctcttgggaggaagatgagaaatcagtggactccctggggctgaagtagttgctgctgctgggagattgattctcactggcccggctggaggcatgggagcgcgcagagcccatggtagc

SEQ ID NO: 36178 - DNA, 120 bp, synthetic construct
  source 1..120: mol_type = other DNA
gcacttgtccacaatgtgccacatttggagcacagaccccactgtaaggaagttgacaatgtcagcagcagccatgctgaggcggccagtgtaagcggaggctaggacagtctcaaaggc

SEQ ID NO: 36179 - DNA, 120 bp, synthetic construct; identical to SEQ ID NO: 9950
  source 1..120: mol_type = other DNA

SEQ ID NO: 36180 - DNA, 120 bp, synthetic construct
  source 1..120: mol_type = other DNA
gggcggccgggggggtctctgggaagaaaaagagaaaagaataatgataacatctcataacgacacagcccgttacaactcaaaaatatgttcacgctcattatctgtgtaactccccac

SEQ ID NO: 36181 - DNA, 120 bp, synthetic construct
  source 1..120: mol_type = other DNA
tgacaaatcttgtgccctttccttggaggttagagaaataaggtgctcttaggggctggagtggcttccttcggaattataccctatttccgacttacctgagagcctgacattccaaaa

SEQ ID NO: 36182 - DNA, 120 bp, synthetic construct
  source 1..120: mol_type = other DNA
cgccccctttcgccccagcttctctagccccgcccctttccaggcccacccccccgtgccccgcccactatcgggcctttcgaccccgccccttgtctacctccgcccacaacggacccc

SEQ ID NO: 36183 - DNA, 120 bp, synthetic construct; identical to SEQ ID NO: 9951
  source 1..120: mol_type = other DNA

SEQ ID NO: 36184 - DNA, 120 bp, synthetic construct
  source 1..120: mol_type = other DNA
ccgaagcatttattcccctttaaagctataagcctgccttttcccattggcgatgggtccaggtatcgttccccaggctccgcctctgagctgtgaccattagctggttggtgggatcta

SEQ ID NO: 36185 - DNA, 120 bp, synthetic construct
  source 1..120: mol_type = other DNA
agtcggcccctcattggctttctcactcctactgcacgaagtgaaaaagtaaagtgcgttaaggcggctgaagcacttaaaaaaaaaaaaaagtactgcctgaacaacgtggcgaaaccc

SEQ ID NO: 36186 - DNA, 120 bp, synthetic construct
  source 1..120: mol_type = other DNA
tgcagtgagctgtgatctcaccactgcaccctggcctgggcgacacagcgagacaaaaaaaaaaaaaaaaaaaaaaaggccaggctagaaaggacagagcgggactaccccggggatact

SEQ ID NO: 36187 - DNA, 120 bp, synthetic construct; identical to SEQ ID NO: 9952
  source 1..120: mol_type = other DNA

SEQ ID NO: 36188 - DNA, 120 bp, synthetic construct
  source 1..120: mol_type = other DNA
ggagaaaagaaacaggaggatttagaggataaaatgggtgggaaaaaggaagagacaggatgtggcacgtggaatattcagacagagcagctgaaacagccaatgaaagagaacaaattg

SEQ ID NO: 36189 - DNA, 120 bp, synthetic construct
  source 1..120: mol_type = other DNA
ggaaaaaggaagagacaggatgtggcacgtggaatattcagacagagcagctgaaacagccaatgaaagagaacaaattgtcagaggaaacacgccctccccttcttaccttgcaagtac

SEQ ID NO: 36190 - DNA, 120 bp, synthetic construct
  source 1..120: mol_type = other DNA
gggccaaggaagccaagggggaaggtgggctgggcagggtacatatctttttcccattcttctcatgcactgacctttgcctttccacatagctagaaacagaaacataaatatgtggag

SEQ ID NO: 36191 - DNA, 120 bp, synthetic construct
  source 1..120: mol_type = other DNA
tcttgttattacctgtttcctaatggccctgatcctgtttgcttcttctccttccgagattttttgcaggggggaccagaatctccccagttgtgaggagagacgcctccattgaaggaa

SEQ ID NO: 36192 - DNA, 120 bp, synthetic construct; identical to SEQ ID NO: 9953
  source 1..120: mol_type = other DNA

SEQ ID NO: 36193 - DNA, 120 bp, synthetic construct
  source 1..120: mol_type = other DNA
tctttacctggaaaagaagaaaaggggagagggtagcctgagaatgagggggaaaaaatactgctgagaggacactaggaggaggaagggaaaggtttcaaacaggtggctcatgcctaa

SEQ ID NO: 36194 - DNA, 120 bp, synthetic construct
  source 1..120: mol_type = other DNA
tcttcagaatctgtggcctcctcctcttcttcttcctcctcctcctcctcttcctcatcactctcctcatcgtcttcgtcatctgtctcagctctggaggcagaagggcacccctgggat

SEQ ID NO: 36195 - DNA, 120 bp, synthetic construct
  source 1..120: mol_type = other DNA
gccagtgcaggggaaggacaatgtctctctgaaggctgtaccccatccacacctcaccagaatccaaggaggcttcgggggtgtctgcagagtgggaagaggtgccttggagccgagctc

SEQ ID NO: 36196 - DNA, 120 bp, synthetic construct; identical to SEQ ID NO: 9954
  source 1..120: mol_type = other DNA

SEQ ID NO: 36197 - DNA, 120 bp, synthetic construct
  source 1..120: mol_type = other DNA
tgatgcccacatctcggaaggcatcctgagccatgagctggagctgctgtcgggggaggccaaggctgtgtcgggcagctgccttctctacagcccgaagcacatccccatagtcaggga

SEQ ID NO: 36198 - DNA, 120 bp, synthetic construct
  source 1..120: mol_type = other DNA
tcagctcacatagtcgcccaaagaggcggatcagcttacgcttcaaccgtgcctcctgcaggtatgcggagtctgggtcatccaattctgagagatccaactccttttcctgcagccgcc

SEQ ID NO: 36199 - DNA, 120 bp, synthetic construct
  source 1..120: mol_type = other DNA
gtgtgggagggttattcccagagggctcattggaggtggtggcggcaggggccaagttcagcttctttttggctgagtgggccttgagaacagtgcagagctcattgatgtagacataga

SEQ ID NO: 36200 - DNA, 120 bp, synthetic construct; identical to SEQ ID NO: 9955
  source 1..120: mol_type = other DNA

SEQ ID NO: 36201 - DNA, 120 bp, synthetic construct
  source 1..120: mol_type = other DNA
gaactactgcttcctctggccccatgaggctcagaggagctaggggcttctgccccaggtgaggccgcattggggagtgggtgggagggccctggctgagcagctgcttcatcttcgtca

SEQ ID NO: 36202 - DNA, 120 bp, synthetic construct
  source 1..120: mol_type = other DNA
cctccagcatagccccatcccttcacctcacacattttctgaactccttgggtttcagtaacatccagccctgaccaacactgtcttcaccacctgatttcaataaccattagttctata

SEQ ID NO: 36203 - DNA, 120 bp, synthetic construct
  source 1..120: mol_type = other DNA
ctcacgtcgatttccggtctttctgttgcatttcccccctatttcttagagttggcaagttgattcttcctcccacactgcaccccaaatcgtcctgacacccccttgcacagacaacac

SEQ ID NO: 36204 - DNA, 120 bp, synthetic construct; identical to SEQ ID NO: 9956
  source 1..120: mol_type = other DNA

SEQ ID NO: 36205 - DNA, 120 bp, synthetic construct
  source 1..120: mol_type = other DNA
atgcgcttcccgccaaatccccctcccccagttcagcccccggccgctccactccctttcagggacaggaaggtaccacagctttcccctcagactcagcgcccagctctccccaatacc

SEQ ID NO: 36206 - DNA, 120 bp, synthetic construct
  source 1..120: mol_type = other DNA
ttccttcccactcccaccgcaggccccactacggaccggaagtcacagagtttccgccttcatgcaactaagcgccgccatattgtcgtacggaacacaggcttcctgtggccggaggtg

SEQ ID NO: 36207 - DNA, 120 bp, synthetic construct
  source 1..120: mol_type = other DNA
cgtacggcactggctacgcccggactccggtgcgcagccagtggagctcttttcacccggtgcttctacgactccgccaatcagaaacttcctgcctggggcccaaccgccggagagtag

SEQ ID NO: 36208 - DNA, 120 bp, synthetic construct; identical to SEQ ID NO: 9957
  source 1..120: mol_type = other DNA

SEQ ID NO: 36209 - DNA, 120 bp, synthetic construct
  source 1..120: mol_type = other DNA
caaatgagcacaacgcgccataaaagtgttattgttattactattgttgctgatttgcttttcaagcttcaccacagaactaatgaccagccagaccgttgggacctgaatggttcttct

SEQ ID NO: 36210 - DNA, 120 bp, synthetic construct
  source 1..120: mol_type = other DNA
tgccgctgcgagggctgctgtgaggcgaaatgaggctcataaaatactttgggtctcctcctcctcctcttcggggagaggggaaaaaagaatgaaggatgaagaaacagatttgatacc

SEQ ID NO: 36211 - DNA, 120 bp, synthetic construct
  source 1..120: mol_type = other DNA
aagattaacagggtcccaatcgctaagattcccatttccacaagtggtgggcatcttgccacttaactagggtcacagagcttattagatccctaacgctgagtcctagaatcgcaaaca

SEQ ID NO: 36212 - DNA, 120 bp, synthetic construct
  source 1..120: mol_type = other DNA
tcaaagtctacagctttcaaaatggggaacataaaaactctccgcgaggactgggacttggaagatgtaagggatttaatttcaagaacctcaactttcccaaaattggtcttcctaagg

SEQ ID NO: 36213 - DNA, 120 bp, synthetic construct; identical to SEQ ID NO: 9958
  source 1..120: mol_type = other DNA

SEQ ID NO: 36214 - DNA, 120 bp, synthetic construct
  source 1..120: mol_type = other DNA
tccgaggtgggcgtatcatggggtcaagagatcgagaccatcctggccaacatggtgaaaccccgtctctactaaaaatacaaaaaaattagctgggcgtggtggcaggcgcctgtagct

SEQ ID NO: 36215 - DNA, 120 bp, synthetic construct
  source 1..120: mol_type = other DNA
aaaaaaaaaaaaaaaaaaaaaaaaaggaaaaaaaaagggtcttgttctatcacccaggctggaatgcggtggtacggtcatagctcactgtaacctcaaattcctgggctcaagccatcc

SEQ ID NO: 36216 - DNA, 120 bp, synthetic construct
  source 1..120: mol_type = other DNA
aggccgaggcgggcggatcacctgaggtcggaagtttgagaccagcctggccaacatggtgaaaccccgtctctactaaaaacacaaaaattatctgggcttggtggcacgcgcctgtag

SEQ ID NO: 36217 - DNA, 120 bp, synthetic construct; identical to SEQ ID NO: 9959
  source 1..120: mol_type = other DNA

SEQ ID NO: 36218 - DNA, 120 bp, synthetic construct
  source 1..120: mol_type = other DNA
gaggcaggaggatcacgagggcaggaaatcgagaccaccctggctaacacggtgaaaccctgtctctactaaaaataccaaaaaaaaaaaaaaaaaaaaattagctgggcgtggtggtgg

SEQ ID NO: 36219 - DNA, 120 bp, synthetic construct
  source 1..120: mol_type = other DNA
agatcgcgccactgccctccagcctgggcgacagagcgagactccgtcttaaaaaaaaaaaaaaaagtgtacgatcacatgtttataagaacattctgttcttataataattgtaacagt

SEQ ID NO: 36220 - DNA, 120 bp, synthetic construct
  source 1..120: mol_type = other DNA
tcaagtataaaagcataaagtttgtggggaagtggagtagtagtaggagctcaaggaaaaaagaggtgatgaaagaaaaaaggaatgattcccaactggtaagaactaatttatactttt

SEQ ID NO: 36221 - DNA, 120 bp, synthetic construct; identical to SEQ ID NO: 9960
  source 1..120: mol_type = other DNA

SEQ ID NO: 36222 - DNA, 120 bp, synthetic construct
  source 1..120: mol_type = other DNA
tattttaaaatgtggggccaggcatggtgactcatgcctgtaatcctaccactttgggaggccgaggcgggcagatcacttgaggtcaggagttcgagaccagcctgaccaacatgagga

SEQ ID NO: 36223 - DNA, 120 bp, synthetic construct
  source 1..120: mol_type = other DNA
gagccaagatcacgccactgcactccagcctgggcgatagagcaagactctgtctcaaaaaataaaaaaataggccgggcgtggtggctcaaacctgtaatcccagcactttgggaggcc

SEQ ID NO: 36224 - DNA, 120 bp, synthetic construct
  source 1..120: mol_type = other DNA
cagctatttgggaggctgaggcaggagaatcgcttgaacccgggaggcagaggttgccggaagccaagatcgcaccactacactccagcatgggcaacacagagagactgtgtctcaaaa

SEQ ID NO: 36225 - DNA, 120 bp, synthetic construct
  source 1..120: mol_type = other DNA
cccgtctctactaaaaatacaaaaattagctgggcgtggtggctcgcgcctttagtcccagctacttgggaagctgaggcagaagaatcgcttgaacccaggaggcggagatttcagtga

SEQ ID NO: 36226 - DNA, 120 bp, synthetic construct; identical to SEQ ID NO: 9961
  source 1..120: mol_type = other DNA

SEQ ID NO: 36227 - DNA, 120 bp, synthetic construct
  source 1..120: mol_type = other DNA
cacacacctgtagtcccagctatttgggggcctgaggcaggagaatcgctagaatctgggaagtggaggcaggctgcagtgagcagagatcactgccactgcactccagcctgggcaaca

SEQ ID NO: 36228 - DNA, 120 bp, synthetic construct
  source 1..120: mol_type = other DNA
cccagctactcaggaggctgtggcaggagaattgcttgaaccccagaggcagaggttgcagtgagccgagattgcaccactgcactgcagcctgggcgacagagcaagactccatctcaa

SEQ ID NO: 36229 - DNA, 120 bp, synthetic construct
  source 1..120: mol_type = other DNA
ggaaggagtctcgctctgtcacccaggccggagtgcaatggtgcgatctcggctcactgcaactgcctcccgggttcaagcaattctcctgcctcagcctctgagtagctgaggcagaga

SEQ ID NO: 36230 - DNA, 120 bp, synthetic construct; identical to SEQ ID NO: 9962
  source 1..120: mol_type = other DNA

SEQ ID NO: 36231 - DNA, 120 bp, synthetic construct
  source 1..120: mol_type = other DNA
acctgcctgactaacatggagaaaccttgtctctactaaaaatacaaaattagcagggggcggtggcgcatgcctgtaatcccagctactcaggaggctgaggcaggagaatcccttgaa

SEQ ID NO: 36232 - DNA, 120 bp, synthetic construct
  source 1..120: mol_type = other DNA
tccaagcatctcctccatagcccccaacactcccatttccctcctgtctcccctctcacctccttggtggggaaagaagatgtttataggaaaggtggtcacaattccagctcctcctcc

SEQ ID NO: 36233 - DNA, 120 bp, synthetic construct
  source 1..120: mol_type = other DNA
ttgtccaaggcacgtcgcacgggacccctgggaggggagggaccctgggcaaatgccaggaacacatccgcctcgtccacatcaccttcctctgccatcctgactcacagtcagacagct

SEQ ID NO: 36234 - DNA, 120 bp, synthetic construct; identical to SEQ ID NO: 9963
  source 1..120: mol_type = other DNA

SEQ ID NO: 36235 - DNA, 120 bp, synthetic construct
  source 1..120: mol_type = other DNA
tgtcactctgggtctcaagtctcaaagactcaaggctcaaaatcttgggccccaactgatagagagtgaggaaatggacctaccatgcatctgtgagccatggtcagtcaaggatctaaa

SEQ ID NO: 36236 - DNA, 120 bp, synthetic construct
  source 1..120: mol_type = other DNA
taagtttgagatggtataacccagaacactctcttcctaacttttggtctctgcagtaccaagggaggattatcattgactgcatgagcccaaggggaggcttataaaaagacaaagacc

SEQ ID NO: 36237 - DNA, 120 bp, synthetic construct
  source 1..120: mol_type = other DNA
gcagtggcacgatttcggctcactgcaacctctgtctcctgggttcaagaaattctccttcctcaacctcccaagtagctgggactacaggcatgtgccaccatgtccggctaatttttt

SEQ ID NO: 36238 - DNA, 120 bp, synthetic construct; identical to SEQ ID NO: 9964
  source 1..120: mol_type = other DNA

SEQ ID NO: 36239 - DNA, 120 bp, synthetic construct
  source 1..120: mol_type = other DNA
tccagcactttgggagcccgaggcggatggatcaattgaggtcaggagatcaagaccagcctggccaacatggtgaaacactgtttctacctaaaatacaaaaattatccgggagtggtg

SEQ ID NO: 36240 - DNA, 120 bp, synthetic construct
  source 1..120: mol_type = other DNA
ctaagatcatgccactgcaactgcactccaacctgggtgacagagtgagactccgtctcaaaaaaataaaaataaaaaaagaagatgttttattgaccctgttccccaggcattggcctg

SEQ ID NO: 36241 - DNA, 120 bp, synthetic construct
  source 1..120: mol_type = other DNA
tggaggaagcagtgtgtgtagtagtgaaccttatactgggaacctttggagcctcctacctaaactatttcattttcattttcacctcaataggaagatcttgttccttttttttttttt

SEQ ID NO: 36242 - DNA, 120 bp, synthetic construct
  source 1..120: mol_type = other DNA
ctcagcctcccaagtcgctggaattacaggtacgtgccaccacgcctggctaattttttgtacctttagtagagacggggtttcacagtgtaggccaggctggtctcgaactcctgacct

SEQ ID NO: 36243 - DNA, 120 bp, synthetic construct; identical to SEQ ID NO: 9965
  source 1..120: mol_type = other DNA

SEQ ID NO: 36244 - DNA, 120 bp, synthetic construct
  source 1..120: mol_type = other DNA
acaagcataagccaccatgcctaagaataccttctttacttgggaagtcaggtcaccccccaaaagagcagaaatgatgttataatgttgttttgagggctgggcgcggtggctcacgcc

SEQ ID NO: 36245 - DNA, 120 bp, synthetic construct
  source 1..120: mol_type = other DNA
gcggtggctcacgcctgtaatcccagcactttgggaggccgaggcggacagatcacgaggtcaggagatcgagaccatcctggctaacacggtgaaaccccgtctctactaaaaatacaa

SEQ ID NO: 36246 - DNA, 120 bp, synthetic construct
  source 1..120: mol_type = other DNA
tccagattgggcgatacagtgagactccgtctcaaaaaaaaaaaaaaaatacaaaaaattagccggctgtggtggcgggagcctgtagtcctaactactcgggaggctgaggcaggagaa

SEQ ID NO: 36247 - DNA, 120 bp, synthetic construct; identical to SEQ ID NO: 9966
  source 1..120: mol_type = other DNA

SEQ ID NO: 36248 - DNA, 120 bp, synthetic construct
  source 1..120: mol_type = other DNA
aacatattaatctgataccctcacttacatcccaggcaagtgtgcaataaggccacacaaacacctttattgtctctttacatggtaggttcagcaccaacatcttgtgtaataaataaa

SEQ ID NO: 36249 - DNA, 120 bp, synthetic construct
  source 1..120: mol_type = other DNA
tggcatgtacctctttcactcagattttccatttgtcaacacttggctgtatttgttccatctcgctctcaaccccagtataaccatgtgttacaggttgaattgtgtctcctaaaaatt

SEQ ID NO: 36250 - DNA, 120 bp, synthetic construct
  source 1..120: mol_type = other DNA
atcctggttaacacactgaaagcccatctctactaaaaatacaaaaaactagccgggtgtggtggtgggcgcctgtagtcctagctactcaggaggctgaggcaggggaatggcttgaac

SEQ ID NO: 36251 - DNA, 120 bp, synthetic construct
  source 1..120: mol_type = other DNA
tatgcctgtaatcccagaactttgagaggccaaggtgggcagatcacaaggtcaggagtttgagactagcctggccaacatggcaaaaacccatatctactaaaaatacaaaaattagct

SEQ ID NO: 36252 - DNA, 120 bp, synthetic construct; identical to SEQ ID NO: 9967
  source 1..120: mol_type = other DNA

SEQ ID NO: 36253 - DNA, 120 bp, synthetic construct
  source 1..120: mol_type = other DNA
gcacacgtttacctatgtaacaaacctacacatcgcacacatgtacccctgaacttaaaataaaagtcgaaggaaaaaaataaaatttatataatgaagtcctaactcccagttcctcag

SEQ ID NO: 36254 - DNA, 120 bp, synthetic construct
  source 1..120: mol_type = other DNA
gatagagagaatgacatgtgaccatgaaggcagagatcaggttgatatgtcaaagattgccagcaggccaggcaccatggcttatgcctgtaatcccagcactttgggaggccaacacag

SEQ ID NO: 36255 - DNA, 120 bp, synthetic construct
  source 1..120: mol_type = other DNA
tgggaggctgaggcgggcagatcacgaggtcaggagttcaagaccagcctggtcaacatggtgaaaccctgcctctactaaaaatacaaaaattggcagggcatggtcatgggcacctgt

SEQ ID NO: 36256 - DNA, 120 bp, synthetic construct; identical to SEQ ID NO: 9968
  source 1..120: mol_type = other DNA

SEQ ID NO: 36257 - DNA, 120 bp, synthetic construct
  source 1..120: mol_type = other DNA
agaaaggcctggaacagattctcccttacacccctcagaaagaaccaaccctgcctacaccttgatctcagacttccagcctccagaactgtaaggcaatacatttctgctgtttaagtc

SEQ ID NO: 36258 - DNA, 120 bp, synthetic construct
  source 1..120: mol_type = other DNA
atgaccgcctcttcttttttaaattatcttttttttttttttttttttggagacaggtctgtcacccaggctggagtgcagtggtgcgatctcggtgcactacaacctccaccttccggg

SEQ ID NO: 36259 - DNA, 120 bp, synthetic construct
  source 1..120: mol_type = other DNA
tcttgaactcctgagctcaggcaatccacccgcctaggcctcccaaagtgcaattatcttttcttttaacagctgtttttttctttttctttttttttttttttgagatgaggtctcact

SEQ ID NO: 36260 - DNA, 120 bp, synthetic construct; identical to SEQ ID NO: 9969
  source 1..120: mol_type = other DNA

SEQ ID NO: 36261 - DNA, 120 bp, synthetic construct
  source 1..120: mol_type = other DNA
ctgcagcctcaaattcctcggctcaagcaatcctcccacctcagcattctgagtagctgcggctacaggtgtgtgccagcacatccggggaatttaaacattatttgtaggctgggcaca

SEQ ID NO: 36262 - DNA, 120 bp, synthetic construct
  source 1..120: mol_type = other DNA
ccagcgtggtgaaaccccatctctactaaaactccaaaaaattagccaggcatggtggcacatgcctgtaatcccagctagctacacaggaggctgaggcaggagaattgcgtgaaaccg

SEQ ID NO: 36263 - DNA, 120 bp, synthetic construct
  source 1..120: mol_type = other DNA
tattgctggctttgatgatgtaagatgccatattggagaaacccacatggcaagaaactaggtgtggtctccaaacactaaccaacagggaactgagaccctcagtcaaaaaacccttta

SEQ ID NO: 36264 - DNA, 120 bp, synthetic construct; identical to SEQ ID NO: 9970
  source 1..120: mol_type = other DNA

SEQ ID NO: 36265 - DNA, 120 bp, synthetic construct
  source 1..120: mol_type = other DNA
atgagccactgagcccggccctgagctttcagatgagatcacaggcaactcatagactgcagtcttatgagagcctccgaagcagaggatccagctaagctgttcccagatttctccccc

SEQ ID NO: 36266 - DNA, 120 bp, synthetic construct
  source 1..120: mol_type = other DNA
tacactgtgctagaattgagcaccagatcttcagtaacagatacacccatatattccttccaaatttattcttttaacatttatgatatgtggggccttctgaaatgtggggctccaggc

SEQ ID NO: 36267 - DNA, 120 bp, synthetic construct; identical to SEQ ID NO: 9971
  source 1..120: mol_type = other DNA

SEQ ID NO: 36268 - DNA, 120 bp, synthetic construct
  source 1..120: mol_type = other DNA
gggcatggtggcgtatgcctgtaatcccagctactcgggaggctgaagcacaagaattgcttgaacctgggaggcggtggttgcagtgagccgatatcataccactgcattccagcctgg

SEQ ID NO: 36269 - DNA, 120 bp, synthetic construct
  source 1..120: mol_type = other DNA
ttctagcactttgggaggccgaggcaggcggatcacgaggtcaagggatcgagaccagcctggccaacatggtgaaaccccatctctactaaaaatacaaaaattagctgggcgtggtgg

SEQ ID NO: 36270 - DNA, 120 bp, synthetic construct
  source 1..120: mol_type = other DNA
aaactccatctcaaaaaaacaaaaacaggctgggtgcggtggctcacgcttgtaatcacagcactatgggaggccgagacaggcggatcacgaggtcaggagatcgagacaatcctgact

SEQ ID NO: 36271 - DNA, 120 bp, synthetic construct; identical to SEQ ID NO: 9972
  source 1..120: mol_type = other DNA

SEQ ID NO: 36272 - DNA, 120 bp, synthetic construct
  source 1..120: mol_type = other DNA
caaaaattagccaggcatggtggcacatgcctgtaatcccagctactcccgggttcaagcaattcttgtgcctcagcctcccaagtagatgggattacaggtgtgcaccaccacacacct

SEQ ID NO: 36273 - DNA, 120 bp, synthetic construct
  source 1..120: mol_type = other DNA
catgagccaccacacctggccacaaaataaataaggaaataaataaatatatatatgtaaaatatatatatgtaatatatgtaaaatatatatgttatatatgtaaatatatatatatat

SEQ ID NO: 36274 - DNA, 120 bp, synthetic construct
  source 1..120: mol_type = other DNA
gcctcagcctcctgagtagctgggaatacaggcatgcaccaccacgcctggataattttttatttttagtagagattgggtttctccatattggtcaggctggtctcgaactcctgacct

SEQ ID NO: 36275 - DNA, 120 bp, synthetic construct; identical to SEQ ID NO: 9973
  source 1..120: mol_type = other DNA

SEQ ID NO: 36276 - DNA, 120 bp, synthetic construct
  source 1..120: mol_type = other DNA
ttcaacatgattgatcagaacagagatggtttcatcaacaaagaagatttgcatgatatgcttgtttccctagggaagaatcccaccgatgcataccttgatgccataatgaatgaggca

SEQ ID NO: 36277 - DNA, 120 bp, synthetic construct
  source 1..120: mol_type = other DNA
gtgagaagttaaatggcacagatcctgaagatgtcattggaaatgcttttgcttgctttgatgaagaagcaacaggcattattcaggaagattacctgagagagctgctgataaccatgt

SEQ ID NO: 36278 - DNA, 120 bp, synthetic construct
  source 1..120: mol_type = other DNA
gagttcacatgcatcctgaaacatggagcaaaagacaaagacgactgaaaagaactttagctaaaaccttccaactacattgtcttactctgttttatttctcagacacttcccccatcc

SEQ ID NO: 36279 - DNA, 120 bp, synthetic construct
  source 1..120: mol_type = other DNA
gggtgtaaattgtattgaaaaagagatcatggccgggcgcagtggctcacgcctgtaatcccagcaacttgggaggccgaggcgggtggataacctgaggtcaggcgttcaagaccacgc

SEQ ID NO: 36280 - DNA, 120 bp, synthetic construct; identical to SEQ ID NO: 9974
  source 1..120: mol_type = other DNA

SEQ ID NO: 36281 - DNA, 120 bp, synthetic construct
  source 1..120: mol_type = other DNA
ttagtcaggcatggtggtgggctcctgttgtcccagctactcgggaggctgaggcaggagaatggcatgaagccaggaggcagagcttgcagtgagccgagattgagccactgcactccg

SEQ ID NO: 36282 - DNA, 120 bp, synthetic construct
  source 1..120: mol_type = other DNA
aggaaagagacagaagaggaaaacttcatataaactataataaatttccacactgatgagagaaaatgagtatcagaagaagaagaagagttgtaagatcaacaggatatgagaaatgaa

SEQ ID NO: 36283 - DNA, 120 bp, synthetic construct
  source 1..120: mol_type = other DNA
tctactaaaaacacgaaaattagtcgggtgtggtcatgggtgcctgtaatcccagctatgcaggaggctgaggcaggagaatcgcttgagcctgggaggcggtggttgcagtgagccgag

SEQ ID NO: 36284 - DNA, 120 bp, synthetic construct; identical to SEQ ID NO: 9975
  source 1..120: mol_type = other DNA

SEQ ID NO: 36285 - DNA, 120 bp, synthetic construct
  source 1..120: mol_type = other DNA
tctactaaaaatacaaaaaaaaattagcggggcatggtggctcgcacctgtaatcccagctacttgggaggctgagacaggggaattatttgaacccagcaggtggaagttgcagtgagc

SEQ ID NO: 36286 - DNA, 120 bp, synthetic construct
  source 1..120: mol_type = other DNA
atcccaaggtgggcagatcacttgaggttaggaattcgagaccagcctgaccaacatgatgaaaccccgtccctactaaaaatacaaaaaaattagctgggtgtggtggtgcatgcctgt

SEQ ID NO: 36287 - DNA, 120 bp, synthetic construct
  source 1..120: mol_type = other DNA
aaaaaagaaatccatggccgggcgcagtggctcacgcctgtaatcccagcactttgggaggccgagatgggtggatcacgaggtcaggagatctagaccatcccggctaacatggtgaaa

SEQ ID NO: 36288 - DNA, 120 bp, synthetic construct; identical to SEQ ID NO: 9976
  source 1..120: mol_type = other DNA

SEQ ID NO: 36289 - DNA, 120 bp, synthetic construct
  source 1..120: mol_type = other DNA
tgaactctgtctctactaaaaatacaaaattagcctgatgtagtggcacatgcctctagtcccagctactcaggaggctgagacaggagaatcacttgacaggaggcagaggttctggtg

SEQ ID NO: 36290 - DNA, 120 bp, synthetic construct
  source 1..120: mol_type = other DNA
attcaggaggctgaggcaggaggatcatctgacctggaggtcaaggctgcagtgagccatgatcacaccactgcactccagcttgggcaacatagtgagactctgtcacgaagcctgcag

SEQ ID NO: 36291 - DNA, 120 bp, synthetic construct
  source 1..120: mol_type = other DNA
gaatttttttagtagagacagtgttttgccatgttggccaggctggtctgtacctaattttgtatttatacttttggttttttttttttttttgagacggagtctcgttctgttgccctg

SEQ ID NO: 36292 - DNA, 120 bp, synthetic construct; identical to SEQ ID NO: 9977
  source 1..120: mol_type = other DNA

SEQ ID NO: 36293 - DNA, 120 bp, synthetic construct
  source 1..120: mol_type = other DNA
tgtatatgtataaatgtatacatacatataaatacatgatcactactcttttccttgcttttcctcacttaataccttgaaatcaaacagagaggtgcttccttctttttttttttcgga

SEQ ID NO: 36294 - DNA, 120 bp, synthetic construct
  source 1..120: mol_type = other DNA
caggcgcacaccaccatgcctggctaatttttgtatttttagtagagatggggtttcaccatattggccaggctggtctcgaactcctgacctcatgatccttctgacttggcctcccaa

SEQ ID NO: 36295 - DNA, 120 bp, synthetic construct
  source 1..120: mol_type = other DNA
gggctcaagtgatccacctaccttggcctcccaaagtgctgggattataggagtgagccaccgcacccgaccccttgtttgttatagtgctcccttgactctcaaaaatgtccagtgtag

SEQ ID NO: 36296 - DNA, 120 bp, synthetic construct; identical to SEQ ID NO: 9978
  source 1..120: mol_type = other DNA

SEQ ID NO: 36297 - DNA, 120 bp, synthetic construct
  source 1..120: mol_type = other DNA
gatatttttaaaatgctttctgtagaagccgcaccagtgtaccttccttcctgtcggcaatgtgtgacagtaccagtttcctttccccaccccatcagctgagtgtgttatcaaactttt

SEQ ID NO: 36298 - DNA, 120 bp, synthetic construct
  source 1..120: mol_type = other DNA
aatagctgtgattacaggtgcatgccaccaccggctgatttctgtatttttagtagagacagggttttgccatgtttttttgtttgttttgagacaggatctttctctgttgcccaggct

SEQ ID NO: 36299 - DNA, 120 bp, synthetic construct
  source 1..120: mol_type = other DNA
taaactctaccttttggtgagagtgactagccaccaaggcacactgtaaaggcctcagataacaggaagtggtagagaactgcagccaatctaacacctagacaaattcaaggtgggacc

SEQ ID NO: 36300 - DNA, 120 bp, synthetic construct; identical to SEQ ID NO: 9979
  source 1..120: mol_type = other DNA

SEQ ID NO: 36301 - DNA, 120 bp, synthetic construct
  source 1..120: mol_type = other DNA
aaggcaagaaagaaattcttgaggaagccagccactctgccagtttcacactggcagcttcccatgtcaaaccactcagtcggagctggccgagagaaaaaacgtaattcagaatgatgc

SEQ ID NO: 36302 - DNA, 120 bp, synthetic construct
  source 1..120: mol_type = other DNA
acttgagtgtggggggtgcacagcaacatattcaagcttatgtacatggcatctgaggtcggggcatggaagaatactgaggcactgtgtgtatgttatttgtgcgtgagaatgaaattc

SEQ ID NO: 36303 - DNA, 120 bp, synthetic construct
  source 1..120: mol_type = other DNA
ctcaaaaagccatctagtggatgtttgtggtttaacaagcactttcaataaatacttggcagacggatgctggggcgggttctcttagaagaaatgccccccccattcccccggccccac

SEQ ID NO: 36304 - DNA, 120 bp, synthetic construct; identical to SEQ ID NO: 9980
  source 1..120: mol_type = other DNA

SEQ ID NO: 36305 - DNA, 120 bp, synthetic construct
  source 1..120: mol_type = other DNA
gggattacaggtgcacgtcaccccacaacaggacttaattaaccttgccttcaaggtgtacaataatagagaaaagttacaattacttgcctctgctgtgagacaaaacccagctgcacc

SEQ ID NO: 36306 - DNA, 120 bp, synthetic construct
  source 1..120: mol_type = other DNA
ggccaagaaatgcccacagcccgggattcctcctaagccgtgtcccatctgtgcaggaccccactgaaaatcagactgtcccactcgcctcgcagtcactcccagagctctgggatctct

SEQ ID NO: 36307 - DNA, 120 bp, synthetic construct
  source 1..120: mol_type = other DNA
cagtggagggtaagtcacccttcttaatcaatatggaggctaccaactccacattaccttcttttcaaaggcctatttcctttgcctccataactgttgtgggtattcatggccaggctt

SEQ ID NO: 36308 - DNA, 120 bp, synthetic construct; identical to SEQ ID NO: 9981
  source 1..120: mol_type = other DNA

SEQ ID NO: 36309 - DNA, 120 bp, synthetic construct
  source 1..120: mol_type = other DNA
gccagtatcccatcccacagcatgctttaaaaggattaaatcctgttatcactcacctgttacagcatggccttttaaagcctataaactctccttacaattcccccattttacctgtcc

SEQ ID NO: 36310 - DNA, 120 bp, synthetic construct
  source 1..120: mol_type = other DNA
caacccattattctgttctagataaacctagctgaccccatagatcctaaatcctttctcctctcccctttccattccttaaaacacagctcccacactagctctccatgactcatcccg

SEQ ID NO: 36311 - DNA, 120 bp, synthetic construct
  source 1..120: mol_type = other DNA
ccatcatgtctccgtgcagtggctgccactgccctaatacttttacaggccctcaaaatcacaaactatgctcaactcactctctacagttctcataaatctattttcttcctcacatct

SEQ ID NO: 36312 - DNA, 120 bp, synthetic construct; identical to SEQ ID NO: 9982
  source 1..120: mol_type = other DNA

SEQ ID NO: 36313 - DNA, 120 bp, synthetic construct
  source 1..120: mol_type = other DNA
aactcgagccctcacttttgcaaagggactacatgtcaatatttatacaactctaaatatgccttccatatcctgcaccaccatattgttatatgggcaaaaagaggtttcctcactacg

SEQ ID NO: 36314 - DNA, 120 bp, synthetic construct
  source 1..120: mol_type = other DNA
cagggcaatgcttttgctgataaggtagctaaagaagcagctagcattccaaattctgtccctcacggccaatttttctcattctcatgggtcactcccacctactctcctgctgaaact

SEQ ID NO: 36315 - DNA, 120 bp, synthetic construct
  source 1..120: mol_type = other DNA
ttctattctgctgtcatttcataacctcttccatgtaagttacaagctgctagcccacctcttagaacctctcatttcctttccatcgtggaaatctatcctcaaggaaatcacttctta

SEQ ID NO: 36316 - DNA, 120 bp, synthetic construct; identical to SEQ ID NO: 9983
  source 1..120: mol_type = other DNA

SEQ ID NO: 36317 - DNA, 120 bp, synthetic construct
  source 1..120: mol_type = other DNA
ccatcctcaatcttcagaaaaagtaaaacagactaatagtcttttaaagacacacctcaccaagctcagcctccaacttaaaaagactggacagtacttttaccacttgcccttctcaga

SEQ ID NO: 36318 - DNA, 120 bp, synthetic construct
  source 1..120: mol_type = other DNA
aaacttgtcatcccttctatcttctgtctagtcatactcctattcaccattctcaactactcataaatgccctgctcttgtttacactgccggtttacactgtttctccaagccgtcaca

SEQ ID NO: 36319 - DNA, 120 bp, synthetic construct
  source 1..120: mol_type = other DNA
acttttatactcactcctattcttgttcccatttttatgccaccctctacctctccccagctagctccaccacactatcaatctcattcactctctcctagccgtttctaatccctcatc

SEQ ID NO: 36320 - DNA, 120 bp, synthetic construct; identical to SEQ ID NO: 9984
  source 1..120: mol_type = other DNA

SEQ ID NO: 36321 - DNA, 120 bp, synthetic construct
  source 1..120: mol_type = other DNA
accttctcgatgttcctttactcttcatctccgaagcccaactacacacatcactgaaacaattggagcctcccagctctgtattacagataagccctctatcaatactggcaaacttaa

SEQ ID NO: 36322 - DNA, 120 bp, synthetic construct
  source 1..120: mol_type = other DNA
cagccccgtaaataacagtgaaaggttgctcgtagacactcaaagttttctcatacaccatgaaaatcaaacctccccctctacgtagttaccccatcagtccccattacaacctctgac

SEQ ID NO: 36323 - DNA, 120 bp, synthetic construct
  source 1..120: mol_type = other DNA
tggatcctctacctacatgtgtctacctgctaattggacaggcacatgcacactagttttccttactcccaaaatcaatttgcaaatgggactgaacatcttcctgttcccctcatgaca

SEQ ID NO: 36324 - DNA, 120 bp, synthetic construct; identical to SEQ ID NO: 9985
  source 1..120: mol_type = other DNA

SEQ ID NO: 36325 - DNA, 120 bp, synthetic construct
  source 1..120: mol_type = other DNA
ctcgccaaccaagcaagtaattactctgaacccccttgggcactctctaattggatgtcctgggtgctcccaattcttagtcctttaatacctgtttttctccttcccttattcggacct

SEQ ID NO: 36326 - DNA, 120 bp, synthetic construct
  source 1..120: mol_type = other DNA
ttttttcctaaagatgataaccattcttttccagctgtcttttcttttttttttttttttttttgagacagagtctcactctgtcacccaggctggagtgcagtggcgcgatctcagctc

SEQ ID NO: 36327 - DNA, 120 bp, synthetic construct
  source 1..120: mol_type = other DNA
gatggggtttcaccatgtcagctaggctggtcttgaactcctgaccttaggtgatccgcccgcctcagcctcccaaagtgctgggattataggcgtcagccaccacaccgggcaacaaat

SEQ ID NO: 36328 - DNA, 120 bp, synthetic construct; identical to SEQ ID NO: 9986
  source 1..120: mol_type = other DNA

SEQ ID NO: 36329 - DNA, 120 bp, synthetic construct
  source 1..120: mol_type = other DNA
cctaactgataaatatattctcccccacccttacgaaggtactttgtaatattctcccctgcccttaagaatgtagtttgtatgcctatcccaaacctataagaactaatgataatccca

SEQ ID NO: 36330 - DNA, 120 bp, synthetic construct
  source 1..120: mol_type = other DNA
tttcctaagccgtctggctagtagcccctaattgttcagctattcctctaacagcatctctagtgtagttaataaatcgctattggttgtaatagacgtagtttacccaatctacacttt

SEQ ID NO: 36331 - DNA, 120 bp, synthetic construct
  source 1..120: mol_type = other DNA
aaagacccataaagggcttctcttgctttatgatacttatttttccttcctctcgttgatgaaataacagggtgaaagggatagccaattggaataaagcacaagtgccattccagttat

SEQ ID NO: 36332 - DNA, 120 bp, synthetic construct; identical to SEQ ID NO: 9987
  source 1..120: mol_type = other DNA

SEQ ID NO: 36333 - DNA, 120 bp, synthetic construct
  source 1..120: mol_type = other DNA
ctggcctgccatgtgcacaagcataacaattgcttttgtttaatgtggacggaatatttgatccattccaaccaggcatttgcatcttggtatcctgtgttaattgccaaaatgtttttt

SEQ ID NO: 36334 - DNA, 120 bp, synthetic construct
  source 1..120: mol_type = other DNA
ggcataaaagctctacattgggggtcaagaatcctggttgacattgggatctttatcgaaatccccccggattcagtggtcctaatttactaatgcccagtgtgaggagagtcaggaggg

SEQ ID NO: 36335 - DNA, 120 bp, synthetic construct
  source 1..120: mol_type = other DNA
tagatggtcagcaatagagcgaggaaaggagaaagagtaatagaatagatgaaagagttaaatttttcttagctttaatttggtagggtttccccctgggactatggcccacaactctgg

SEQ ID NO: 36336 - DNA, 120 bp, synthetic construct; identical to SEQ ID NO: 9988
  source 1..120: mol_type = other DNA

SEQ ID NO: 36337 - DNA, 120 bp, synthetic construct
  source 1..120: mol_type = other DNA
ccttcttactgagaaatttcctttagcacttatttttattagtttttttagaccaaagaacgccaaacaccattttatatttgacagtgcttcctgtatgatttttataccagataagct

SEQ ID NO: 36338 - DNA, 120 bp, synthetic construct
  source 1..120: mol_type = other DNA
ttcaagcagttctcctgcctcagcctcccaagtagctgggactacaggcacacgctgccacgcccggctaatttttttgtattttagtagagacggggtttcaccttgttgcccaggctg

SEQ ID NO: 36339 - DNA, 120 bp, synthetic construct; identical to SEQ ID NO: 9989
  source 1..120: mol_type = other DNA

SEQ ID NO: 36340 - DNA, 120 bp, synthetic construct
  source 1..120: mol_type = other DNA
cccaccaccacgcctggctaattttttgtatttttagtagagacagggttttacttgttagccagggtggtctctatctcctgacctcatgatccacccacctcggcctcccatagtgct

SEQ ID NO: 36341 - DNA, 120 bp, synthetic construct
  source 1..120: mol_type = other DNA
aatcttggctcactgcaatctctgcctcccgggttcaaggaattctcctgtctcagcctcccaagtagctgggattacaggcatgcaccaccacacccagctaattttggatttttagca

SEQ ID NO: 36342 - DNA, 120 bp, synthetic construct
  source 1..120: mol_type = other DNA
ttttaactttttataatttttgttaaacagcgggttagtgctttaagaaaaacccgttgtgtttttattttaatgctcagttcacagaaaaactgggtgatacccttttaaccttagcca

SEQ ID NO: 36343 - DNA, 120 bp, synthetic construct; identical to SEQ ID NO: 9990
  source 1..120: mol_type = other DNA

SEQ ID NO: 36344 - DNA, 120 bp, synthetic construct
  source 1..120: mol_type = other DNA
caccatgcctggccacaaaatttttttttaaccttttaatgtaggtaaaaatccacattcttatgcctccttataatccttttactaaaagtatattttactttccttatacatcttgca

SEQ ID NO: 36345 - DNA, 120 bp, synthetic construct
  source 1..120: mol_type = other DNA
ttcaaagaaaatgctaaaccatcacatctgtagttcattagcttgatacatcgcttcctttcaacccccacatcctcaccccctgtttgtttgatcaccaataaatagtgtgggcttcca

SEQ ID NO: 36346 - DNA, 120 bp, synthetic construct
  source 1..120: mol_type = other DNA
ttgggtctgatcaccccaaaaggttgatggccttttttttttttcctgcattgctgagagcttgggttattccttgcactgggtaggtcttgatttttcacgcctgaggccgccacaata

SEQ ID NO: 36347 - DNA, 120 bp, synthetic construct; identical to SEQ ID NO: 9991
  source 1..120: mol_type = other DNA

SEQ ID NO: 36348 - DNA, 120 bp, synthetic construct
  source 1..120: mol_type = other DNA
gcgggagtcagggcagagcaggtggcaggtgatcaaaatgagttagggtggagcaggagatcagaatgagtcagggtggagtaggtaatcaaaaaagattgctttacgaggaagttaagt

SEQ ID NO: 36349 - DNA, 120 bp, synthetic construct
  source 1..120: mol_type = other DNA
aggtagctctagctttcttgctgcccacagaggcctggagcaggagagatgctaagatgccatggagtgcccatttggccactggcagtctgggcaggttgcccctttctgggtttgtgg

SEQ ID NO: 36350 - DNA, 120 bp, synthetic construct
  source 1..120: mol_type = other DNA
ggcctgctgcttgctgtgctgctgcttttcctacttctgcccttccctgccacccctcacatgtctcagttgacaagcaattccttgtctcccctggccccctagggaaagggctaagaa

SEQ ID NO: 36351 - DNA, 120 bp, synthetic construct; identical to SEQ ID NO: 9992
  source 1..120: mol_type = other DNA

SEQ ID NO: 36352 - DNA, 120 bp, synthetic construct
  source 1..120: mol_type = other DNA
ccgtctctaaattagcccgctgtggtggcgggcgcctgtagtcccagctactcgggaggctgaggcaggagaatgctgggagtggtggcatgcgcctgtagttccagctactctggaggt

SEQ ID NO: 36353 - DNA, 120 bp, synthetic construct
  source 1..120: mol_type = other DNA
aaggaagaaagtagtcatctttatagagtcctctccatgtagtgttagcacaatcgctcaagaggcacccaatgtagagaaacgacggtgaggttagcagtaccaaggagcagggtttga

SEQ ID NO: 36354 - DNA, 120 bp, synthetic construct
  source 1..120: mol_type = other DNA
gtcagcagataaacacgtgaacaaaggtctctggttttcctaggcagaagtccctgcggccctcggcagtgtttgtgtccctgggtatttgagattagggagtggtgatgactcttaagc

SEQ ID NO: 36355 - DNA, 120 bp, synthetic construct
  source 1..120: mol_type = other DNA
aacagcatcccaaggcagaagaatttttcttagtatagaacaaaatggtgtctcctatgtctacttctttctatgcagacacagtaacaatctgatctctctttcttttccccacatttc

SEQ ID NO: 36356 - DNA, 120 bp, synthetic construct; identical to SEQ ID NO: 9993
  source 1..120: mol_type = other DNA

SEQ ID NO: 36357 - DNA, 120 bp, synthetic construct
  source 1..120: mol_type = other DNA
cctgggcaacataatgagatcccaatctctgcaaaaaaatttaaaaattatctgggcatggtagcacacgcctgcagttccagctactcaggaggctgaggtgggaggatcacttgagcc

SEQ ID NO: 36358 - DNA, 120 bp, synthetic construct
  source 1..120: mol_type = other DNA
ggattgctttaagaagaaatgagataatgtacacaaaagtacatcacatatcgcttagcatgtggctgagactcagaaaaaatcctggctttgttttcctgcattgggagtttattgttg

SEQ ID NO: 36359 - DNA, 120 bp, synthetic construct
  source 1..120: mol_type = other DNA
cctctcttccctccctattgccactgacttagatcctggagatgtaaggttttaaaaacagcagcctattatcttttatttttggtaatccttgtaacctggttccctatcttaatgaaa

SEQ ID NO: 36360 - DNA, 120 bp, synthetic construct; identical to SEQ ID NO: 9994
  source 1..120: mol_type = other DNA

SEQ ID NO: 36361 - DNA, 120 bp, synthetic construct
  source 1..120: mol_type = other DNA
gcatgagaatcccttgaacccgggaggcagaggttgcaatgagctcactgcactccagcctgggcgacagagcaagactctgtctcaaaaaaaaaaaagaaaagaaaagaaaaaaagaga

SEQ ID NO: 36362 - DNA, 120 bp, synthetic construct
  source 1..120: mol_type = other DNA
cagactttgcaatagggaagtcaggtggaagcagggagctagaatggataatgtatgaagaaactattaatgtgttttttccttttatactcttttgccttcagcaagtaaatgacctct

SEQ ID NO: 36363 - DNA, 120 bp, synthetic construct
  source 1..120: mol_type = other DNA
agacaatggacttgaaaactggactatgagaaagaaattgttttctgcattcatttagctcccatttaacataatcaagagccagatctagaatcaagtttctaccaaaggaggaggtaa

SEQ ID NO: 36364 - DNA, 120 bp, synthetic construct; identical to SEQ ID NO: 9995
  source 1..120: mol_type = other DNA

SEQ ID NO: 36365 - DNA, 120 bp, synthetic construct
  source 1..120: mol_type = other DNA
aaaattttgcccattgtagataagtgggcaaatcaggatgcactggcagggagacagggtctgttttgtgttaccagcccttttccagtgatgggtattgaattgagagccatgggcctg

SEQ ID NO: 36366 - DNA, 120 bp, synthetic construct
  source 1..120: mol_type = other DNA
agagccacagggaggttgagtcagccagaaagcaccagtgagatcagatccagccaagagatccacgagaaactctaaatgttgactttagccaaaggcccccaggatgaatgtgaccaa

SEQ ID NO: 36367 - DNA, 120 bp, synthetic construct
  source 1..120: mol_type = other DNA
cccaggagattgcttaagccactctatttattttcatgctcatgggtttgtgagttgtctgtggtttgtctaatcaggctgggcttgacagggcttggtaggactcctttagtcctggtc

SEQ ID NO: 36368 - DNA, 120 bp, synthetic construct; identical to SEQ ID NO: 9996
  source 1..120: mol_type = other DNA

SEQ ID NO: 36369 - DNA, 120 bp, synthetic construct
  source 1..120: mol_type = other DNA
ccagcacgccaaggatgatggagcaggatgaagagaccctgggtcttagataatatcgttagggggcttactggctgctgacctccggacatttttgaaatatgaaacaattaaatgtct

SEQ ID NO: 36370 - DNA, 120 bp, synthetic construct
  source 1..120: mol_type = other DNA
ttttatttatttatttatttttgagatggagtttcactcttgtcgcccaggctggagtgcaatggtgccatcttggctcactgcaacctccacctcccgagttcaagtgattctcccacc

SEQ ID NO: 36371 - DNA, 120 bp, synthetic construct
  source 1..120: mol_type = other DNA
ccacctcgacctcccaaagtgctgggattacaggcttgagccaccacgcccagccttgttgcaggactcttattaaccctatttgtccatgagacccagagacataaaggcgggagtttg

SEQ ID NO: 36372 - DNA, 120 bp, synthetic construct; identical to SEQ ID NO: 9997
  source 1..120: mol_type = other DNA

SEQ ID NO: 36373 - DNA, 120 bp, synthetic construct
  source 1..120: mol_type = other DNA
tcagagaggaatgttgtagtgaaggtgactccatccaacaatttagtcaaacctgcttgcttgaatcaggccctctcaagtacctcctcccttcattactctattctcctttgagatact

SEQ ID NO: 36374 - DNA, 120 bp, synthetic construct
  source 1..120: mol_type = other DNA
catggtctgcccccaggaggtgctcagtcaggatttactaataaacaaacaaaccatcatctagtattaaggactgatgattgtcactaggatccagcgataacttgacttaaagttcta

SEQ ID NO: 36375 - DNA, 120 bp, synthetic construct
  source 1..120: mol_type = other DNA
ctagaatacctgggacattgatttttccagtgagtagtgaattcttgttcctcagcctaaggcacttcctggtactaaggtgcagatgcagactaaacaagatgattacccaacatgagc

SEQ ID NO: 36376 - DNA, 120 bp, synthetic construct
  source 1..120: mol_type = other DNA
gacgcctgtaatcccagcactttgggaggccgaggcgggtagatcacgaggtcaggaaatcgagaccatcctggctaacacgctgaaaccccgtctctactaaaaaatacaaaaaattag

SEQ ID NO: 36377 - DNA, 120 bp, synthetic construct; identical to SEQ ID NO: 9998
  source 1..120: mol_type = other DNA

SEQ ID NO: 36378 - DNA, 120 bp, synthetic construct
  source 1..120: mol_type = other DNA
agtgttcagggccacctctgctgcatctgccagaactcccaagcttcactgacctcctatgatgatggggcccctggtgctgacacagctcagcctctttatgagaggctcctgcacaga

SEQ ID NO: 36379 - DNA, 120 bp, synthetic construct
  source 1..120: mol_type = other DNA
cagtttgccgtgtttctttcactcattccgccaaacatatttattggtggccaattttgtgacatcaatgtgctaagcactggggtagtggtgaacaaaagttaggtccctgtccatgta

SEQ ID NO: 36380 - DNA, 120 bp, synthetic construct
  source 1..120: mol_type = other DNA
taatctagtgggagagaaagcaaagccctttctaacaatgtgaagtttatgatgagaactggagaatgagtagaaattagccccgtaaaagaatgggggcgaagaggcttactgttttat

SEQ ID NO: 36381 - DNA, 120 bp, synthetic construct
  source 1..120: mol_type = other DNA
cactttaggaggccgatgtgggcagatcacgaggtcaggaattcgagaccagcctggggaagccaacatggagaaaccttgtctctactaaaaatacaaaaattaaccgggcgtggtggt

SEQ ID NO: 36382 - DNA, 120 bp, synthetic construct; identical to SEQ ID NO: 9999
  source 1..120: mol_type = other DNA

SEQ ID NO: 36383 - DNA, 120 bp, synthetic construct
  source 1..120: mol_type = other DNA
aggagttcgagaccagcctggccaacatggcaaaaccccatctctactaaaaatttaaaaacatttttttaaaaaattaggcgaccatggtggcacatgcctgtaatcccagctattcgg

SEQ ID NO: 36384 - DNA, 120 bp, synthetic construct
  source 1..120: mol_type = other DNA
atataacctctataacaatattagacaaagacagtgaaagaaaggaaagctataggctaatctcactgacaaacatacctggaaaaatcctaaataaaagttttgcaaatgaaaccaagc

SEQ ID NO: 36385 - DNA, 120 bp, synthetic construct
  source 1..120: mol_type = other DNA
atttcacttagcataatgtttttgaggttcctcaccgttgtagcatataatgtatcactaccacattcctttttttttttctttccttgagacagggtcttaccattgcccaggctggag

SEQ ID NO: 36386 - DNA, 120 bp, synthetic construct; identical to SEQ ID NO: 10000
  source 1..120: mol_type = other DNA

SEQ ID NO: 36387 - DNA, 120 bp, synthetic construct
  source 1..120: mol_type = other DNA
cccagtgtggggaaacagctgagggaaggcccccctcaaaaggctccacctcctcaccagcactcctgcccagggacagggagcccacagcagcaaggggacccccggggccatggccac

SEQ ID NO: 36388 - DNA, 120 bp, synthetic construct
  source 1..120: mol_type = other DNA
ccaaagtggggctagtgagtgaggtcctgagtgagtgggtcagtggctgggcctctttctccagctgcctgtagcccctccaatactgctgccaggggggcccgcctccagggaaatggg

SEQ ID NO: 36389 - DNA, 120 bp, synthetic construct
  source 1..120: mol_type = other DNA
ggtggggacaggggctcgaccagctcagacccaagatggtgccatgcttacttgctgagtcccccatgagctggggtactgcactggggccagcgactagttagacaggaggcagcagct

SEQ ID NO: 36390 - DNA, 120 bp, synthetic construct; identical to SEQ ID NO: 10001
  source 1..120: mol_type = other DNA

SEQ ID NO: 36391 - DNA, 120 bp, synthetic construct
  source 1..120: mol_type = other DNA
catgctcaatcaaggccttgatgttctctgctgccttcttgatgccagcctcgtcctctggggcatctggactcagccccatcaggtcaaaccaggagggcatcaccatcttcatgttga

SEQ ID NO: 36392 - DNA, 120 bp, synthetic construct
  source 1..120: mol_type = other DNA
cggccgtttcccgctcagctccagacacggtggcagcatcgttgagcaggggcacagacatggtgttaccacacatacaccacacggctccatggcaggggcctccactccctgggactt

SEQ ID NO: 36393 - DNA, 120 bp, synthetic construct
  source 1..120: mol_type = other DNA
tatgttacttacctagcctggtctcaaactcctaggctccagggatcctcttgcctcagcctcccaaagtgctgggattaccacgctcagcccatcactccctgtgttcctttcatttat

SEQ ID NO: 36394 - DNA, 120 bp, synthetic construct; identical to SEQ ID NO: 10002
  source 1..120: mol_type = other DNA

SEQ ID NO: 36395 - DNA, 120 bp, synthetic construct
  source 1..120: mol_type = other DNA
agctaaagtggtaaggacaggacaggcacagaggctcacgcctgtaatcccagcgctttgggaggccgaggcaggcggatcacttgaggcaaggaattcgagaccagcctgaccaacatg

SEQ ID NO: 36396 - DNA, 120 bp, synthetic construct
  source 1..120: mol_type = other DNA
cagtaaaccaagattgtgccattgcactccagcctaggccacatagcaagtctccgtctcaaaataataaataaataaataaataaataaataaataaagtggtaagaacagattttaat

SEQ ID NO: 36397 - DNA, 120 bp, synthetic construct
  source 1..120: mol_type = other DNA
tcaatgacgtcagagaagtgacagattacaaaaagtgggaagggggttggtctgtgttaagcccacctggccttgttagctggggcttatcattaggctcctacactctcacagcagctg

SEQ ID NO: 36398 - DNA, 120 bp, synthetic construct; identical to SEQ ID NO: 10003
  source 1..120: mol_type = other DNA

SEQ ID NO: 36399 - DNA, 120 bp, synthetic construct
  source 1..120: mol_type = other DNA
aattgcttgaacccgagaggtggaggttgcagtgagctaagaacgggccattgcactccagcctgggggcaacaagagtgaaactctgtctcaaaaaaaaaaaaaaatcctggttttttt

SEQ ID NO: 36400 - DNA, 120 bp, synthetic construct
  source 1..120: mol_type = other DNA
ctcagcctcccaggtagctgggactacaggcgcctgccaacacaccccgctaattttttgtatttttagtagaggtggggtttcactgtgttagccaggatggtctcgatctcctgacct

SEQ ID NO: 36401 - DNA, 120 bp, synthetic construct
  source 1..120: mol_type = other DNA
cattaaattaataataaaagccatgccatagcagactacatcatatataggtatataaccaataaagaattactgtctagaatttacaaagaactccacaaatcgatatgaaaaagacaa

SEQ ID NO: 36402 - DNA, 120 bp, synthetic construct
  source 1..120: mol_type = other DNA
agggctgggttcagtggctcacgcctgtaatcccagcgctttgggaggctgaggagggtggatcatgaggtcaggagttcaagaccagcctggccaagatggtgaaaccccatctctact

SEQ ID NO: 36403 - DNA, 120 bp, synthetic construct; identical to SEQ ID NO: 10004
  source 1..120: mol_type = other DNA

SEQ ID NO: 36404 - DNA, 120 bp, synthetic construct
  source 1..120: mol_type = other DNA
ttctagtggatgggagcgtaaaccagaaaaaccactgtggagaccatttggcaatatctagtagagttgataatacaactctacttatgagcttatacccagcctctcccacatttgctc

SEQ ID NO: 36405 - DNA, 120 bp, synthetic construct
  source 1..120: mol_type = other DNA
tataattgaatattaaagagctgcgttatcccacatggtagcaatgagccacatgaggctatttaaacttaaatttaaataattaaaattacgtctatgtttcacattttaaaaatttaa

SEQ ID NO: 36406 - DNA, 120 bp, synthetic construct
  source 1..120: mol_type = other DNA
ctactaaaaatacacaaattagctgggtgtggtggcacatgcctatagtcccagctactcaggaggctgaggcaagagaatcgctcgaaccctggaggtggaggttgcagtgagctgaga

SEQ ID NO: 36407 - DNA, 120 bp, synthetic construct; identical to SEQ ID NO: 10005
  source 1..120: mol_type = other DNA

SEQ ID NO: 36408 - DNA, 120 bp, synthetic construct
  source 1..120: mol_type = other DNA
aatgtattgtaggcgcggtggctcacacctgtaatcccagcactttgcaaggctgaggagggcagatcacctgaggtcaggagttcgagaccagcctggccaatatggtgaaaccccatt

SEQ ID NO: 36409 - DNA, 120 bp, synthetic construct
  source 1..120: mol_type = other DNA
atcacaccattgtacctcagcctgggcgtcatagcaagactccctctcaaaacaaacaaagcaaaacaggccaggcatggtggctcacgcctgtaatcccagcactttgggaggccgagg

SEQ ID NO: 36410 - DNA, 120 bp, synthetic construct
  source 1..120: mol_type = other DNA
acttgggaggctgaggcagaagaatggcatgaacccaggaggcggagcttgcagtgagccgagatcgcgccactgcacttcagcctgggtgacagagcgaaactccgtctcaagaaaaag

SEQ ID NO: 36411 - DNA, 120 bp, synthetic construct; identical to SEQ ID NO: 10006
  source 1..120: mol_type = other DNA

SEQ ID NO: 36412 - DNA, 120 bp, synthetic construct
  source 1..120: mol_type = other DNA
ataggctgaggtgggaggatcactggagcccaggtgtttgagactgcagtgagccttgactgtggcagtgcaccccagcctgggagacttgtctcaagaaaatactgaaaataaaaataa

SEQ ID NO: 36413 - DNA, 120 bp, synthetic construct
  source 1..120: mol_type = other DNA
ctctatcaaaaaatacaaaaattaactggacatggtggtgcatgcttgtagtcccagctactctggaggctgaggcatgagaatctcttgaatccaggaggttgaatttgcagtgagcca

SEQ ID NO: 36414 - DNA, 120 bp, synthetic construct
  source 1..120: mol_type = other DNA
gataaatatgtaaaatttatctgtcagtttaaaaataataggctgggcacattggctcatgcctgtaatcccagcactttggaaggccaaggcaagtggatcacctgaggtcaggagttt

SEQ ID NO: 36415 - DNA, 120 bp, synthetic construct; identical to SEQ ID NO: 10007
  source 1..120: mol_type = other DNA

SEQ ID NO: 36416 - DNA, 120 bp, synthetic construct
  source 1..120: mol_type = other DNA
tgatctgcccatctcggcctcccaaagtactgagattacaggcgtgagccaccacacctggcctctaagaactcttttttttttttccgagacggagtcttgctctgtcacccaggctgg

SEQ ID NO: 36417 - DNA, 120 bp, synthetic construct
  source 1..120: mol_type = other DNA
ggagaccagcctggccaacatagcaaaacactgtctctactaaaaatacaaaaagtagccaggcgtggtggaaggtgcctgtaatctctgctactcagaaggctgaggctggataatccc

SEQ ID NO: 36418 - DNA, 120 bp, synthetic construct
  source 1..120: mol_type = other DNA
actgacacttggaggtgctgggagggtggtgcccagatgggccatggaagcgccaagcctcttcctcccaaaagctcaccctatgcatcttttaaatccagctattcatctatatcttta

SEQ ID NO: 36419 - DNA, 120 bp, synthetic construct; identical to SEQ ID NO: 10008
  source 1..120: mol_type = other DNA

SEQ ID NO: 36420 - DNA, 120 bp, synthetic construct
  source 1..120: mol_type = other DNA
gtgtgtggagaaaaagtcccatacatctggtcacaagtgttttgtgttgtgtgagcagacagggagggtcttcagggattacagaaatttaatcaccctgagcaattggcttgttttaca

SEQ ID NO: 36421 - DNA, 120 bp, synthetic construct
  source 1..120: mol_type = other DNA
gaccccagaaacttgtagataaacctgagtgaaagttcctcattaccatgctgaaatctccatcctgggaggagctgtggcttcattctcatagcatgtgacctgtgtgcgggcgtgagg

SEQ ID NO: 36422 - DNA, 120 bp, synthetic construct
  source 1..120: mol_type = other DNA
tcctcccagtgctctccttacttgtaattaaactcctgttgattaaaacctgccttgtggagagtcatttgttatttgccaggcaaacaaaccctgttttttttcaggtaacaagagtat

SEQ ID NO: 36423 - DNA, 120 bp, synthetic construct; identical to SEQ ID NO: 10009
  source 1..120: mol_type = other DNA

SEQ ID NO: 36424 - DNA, 120 bp, synthetic construct
  source 1..120: mol_type = other DNA
ggaggtggaggttgcagtgagccgagatcctgccattgcactccagcctgggtgacagatcgacacttagtctccaaaaaaaaaaaaaaagaggccaggcacagtggctcacacctgtaa

SEQ ID NO: 36425 - DNA, 120 bp, synthetic construct
  source 1..120: mol_type = other DNA
ggcacgggcctgtaatcccagctacttgggagactgaggcaagaattgtttgacccgggaggtagaggttgctgtgagttgagatcgtgccaatgcactccagcctgggtgacagggtgg

SEQ ID NO: 36426 - DNA, 120 bp, synthetic construct
  source 1..120: mol_type = other DNA
gaactgaagaagaaacttcaaggtttctctgacctctcttctcaaccagctctcccacaggcaggatgagttattctctgaagttcctttatctgcttcaagtccagacataccacaaag

SEQ ID NO: 36427 - DNA, 120 bp, synthetic construct
  source 1..120: mol_type = other DNA
aagttcctttatctgcttcaagtccagacataccacaaagaataattgttttctcttcccctccctgtaagatcaggaatggaatcacacctgagcaggtcctttcccaaaagagtctgt

SEQ ID NO: 36428 - DNA, 120 bp, synthetic construct; identical to SEQ ID NO: 10010
  source 1..120: mol_type = other DNA

SEQ ID NO: 36429 - DNA, 120 bp, synthetic construct
  source 1..120: mol_type = other DNA
tctcctgtctcagcttcccgagtagctgggattacaagcacacgccactgtgcccagctaatttttatattttcaccatgtttccaggctggttttgaactcctgacctcaggtgatcca

SEQ ID NO: 36430 - DNA, 120 bp, synthetic construct
  source 1..120: mol_type = other DNA
ttggcccatacaggttcattatagctattctatgtagttttctacttaagtatgtcataatttcaaaagagaaaaagagaagggagaaaattgttctaagctttcaatgtgaaggcctgg

SEQ ID NO: 36431 - DNA, 120 bp, synthetic construct
  source 1..120: mol_type = other DNA
gcagactgggcagatgcttatactgattagctagatttagctaatgggcagagccgtcacaatgcactggttgaaatggtgcaaaaaaataatgtaaggcttttttttttttggtacagg

SEQ ID NO: 36432 - DNA, 120 bp, synthetic construct; identical to SEQ ID NO: 10011
  source 1..120: mol_type = other DNA

SEQ ID NO: 36433 - DNA, 120 bp, synthetic construct
  source 1..120: mol_type = other DNA
ttgtttttgttgttgttgttttgttctgttttttgagatggagtctctctctgtcacccaggctggagtgcaatggcaaaatcttggctcactgcaacctccacctcccaggttcaagtg

SEQ ID NO: 36434 - DNA, 120 bp, synthetic construct
  source 1..120: mol_type = other DNA
cctcaggtgatccacctgcctcagcctcccaaagtgctgggattagaggcacgagccacctcgcccagcctggggagcagagtttttaaggacaacttggtgggtcaggggaagccagtg

SEQ ID NO: 36435 - DNA, 120 bp, synthetic construct
  source 1..120: mol_type = other DNA
gtaccggctgatccatcaagtgcagggtcgacaaaatgtctcaagcactgatcttaggagatgtttagggagggtcagaatcttgtagccttcacctgcatgactcctaaaccgtaattt

SEQ ID NO: 36436 - DNA, 120 bp, synthetic construct
  source 1..120: mol_type = other DNA
ttctcctgtctcagcctcctgagtagctgggattacaggcacatgccaccacgcccagctactttttgtatttttagtagagataggggttcatgatattggtcaggctggtctcgaact

SEQ ID NO: 36437 - DNA, 120 bp, synthetic construct; identical to SEQ ID NO: 10012
  source 1..120: mol_type = other DNA

SEQ ID NO: 36438 - DNA, 120 bp, synthetic construct
  source 1..120: mol_type = other DNA
ctgcgctcaagcaattcacccacctcggcctcccaaagtgttgggattacaggcatgagcaaccatgcccaacctgtaaggcctttttaaaaaaatataaaatcagatatgaagttttct

SEQ ID NO: 36439 - DNA, 120 bp, synthetic construct
  source 1..120: mol_type = other DNA
ttcgagaccagcctggccaacatggtgaaatctcatctttactaaaaataaaaataaaaactatccagccgtggtgatgggcgcctgtaatcccagctactcaggaggctgaggcaggag

SEQ ID NO: 36440 - DNA, 120 bp, synthetic construct
  source 1..120: mol_type = other DNA
aagaattgttgccagaaagtggtcatgatccaaaccccaagagagagttcttggatctcatgcaacaaagaattcaaggcaaatccataaagtgaaagcaagtttattagagaagttaag

SEQ ID NO: 36441 - DNA, 120 bp, synthetic construct; identical to SEQ ID NO: 10013
  source 1..120: mol_type = other DNA

SEQ ID NO: 36442 - DNA, 120 bp, synthetic construct
  source 1..120: mol_type = other DNA
ccagtacgtttcagcctcattttatccaacccctattcaagatggagttgctctggttcaaatgtctctgacagaatggaagtcccctttctatttgtttgttttaaaaaataaagtcag

SEQ ID NO: 36443 - DNA, 120 bp, synthetic construct
  source 1..120: mol_type = other DNA
atggtgtgaacccgggaggcggagcttgcagttagccaagatcgcaccactgcactccatccagcctgggcgacagagcgagactccgtctcaaaataaataaataaataaataaataaa

SEQ ID NO: 36444 - DNA, 120 bp, synthetic construct
  source 1..120: mol_type = other DNA
gaaatcctacagtcttgaactcctggactcaagggatcctcctgcttcagcctccagcgtagctgggactacaggcacgcaccaccacatcaggctcagaagatcacttttaattagcaa

SEQ ID NO: 36445 - DNA, 120 bp, synthetic construct; identical to SEQ ID NO: 10014
  source 1..120: mol_type = other DNA

SEQ ID NO: 36446 - DNA, 120 bp, synthetic construct
  source 1..120: mol_type = other DNA
tctatggctaggtatggtggcatacgcctgtagtcccaactactcctcagactgaggcgagagaatcgcttgaacctgggaggcagaggttgcagtgagctgagatcgtgccactgcact

SEQ ID NO: 36447 - DNA, 120 bp, synthetic construct
  source 1..120: mol_type = other DNA
agattgagatcatcctgcccaacctggtgaaaccccgtctttactaaaaatacaaaaattagcagggcattgtggttcgcacccgtggtcccagctactcagaaggctgaggcaggagaa

SEQ ID NO: 36448 - DNA, 120 bp, synthetic construct
  source 1..120: mol_type = other DNA
gggaggccaaggcaggtggatcacgagatcaagagttcgagaccagcctgaccaacttggcaaaaccccatcacaaaaaacaaacaaacaaaaaaactctcggcaaaacagagcaaggct

SEQ ID NO: 36449 - DNA, 120 bp, synthetic construct; identical to SEQ ID NO: 10015
  source 1..120: mol_type = other DNA

SEQ ID NO: 36450 - DNA, 120 bp, synthetic construct
  source 1..120: mol_type = other DNA
gtgaaaccccatctctacaaaaatacaaaaattagccgggcatgatagtgggtgcctgtaatcccagctatttgggaggctgaggcaggaaaatcgcttgaacccgggaggcggaggctg

SEQ ID NO: 36451 - DNA, 120 bp, synthetic construct
  source 1..120: mol_type = other DNA
ttttgagacagagtctcactctgtcgcccaggctggagtgcagaggtgtgatctcggctcactgcaacctccacctcccgggttcaagtgattctcctgcctcagcctcctgagtagctg

SEQ ID NO: 36452 - DNA, 120 bp, synthetic construct
  source 1..120: mol_type = other DNA
ctcccaaagtgctgggattacaggtgtggcgctcatgtattttgtaatatattttcttttcttctttctttttttttttttgtgtgtgtctgtgtgtgtgtgtgtagaggcatggtctaa

SEQ ID NO: 36453 - DNA, 120 bp, synthetic construct; identical to SEQ ID NO: 10016
  source 1..120: mol_type = other DNA

SEQ ID NO: 36454 - DNA, 120 bp, synthetic construct
  source 1..120: mol_type = other DNA
tctgcctgttaagaaccttccacatctctgacctctctgcatcttcacaactacacttttgttcaggtcctcttgcctcttgcctggatgactacagtggtgtcctaactatctttcctc

SEQ ID NO: 36455 - DNA, 120 bp, synthetic construct
  source 1..120: mol_type = other DNA
taaagtcccatgatctgatatgttcccttatcaactaacaagggccctacagttaagaaaaccaaagttacttctggctgggagtggtggctcatgcctgtaatcccagcactttgggag

SEQ ID NO: 36456 - DNA, 120 bp, synthetic construct
  source 1..120: mol_type = other DNA
cagctactcaggaggctgaggcagagaattgcttaaacctgggaggcggaggttgcagtgagccgagatcgcaccactgcactccagcctgggcgacagagggagactccatctcaaaaa

SEQ ID NO: 36457 - DNA, 120 bp, synthetic construct; identical to SEQ ID NO: 10017
  source 1..120: mol_type = other DNA

SEQ ID NO: 36458 - DNA, 120 bp, synthetic construct
  source 1..120: mol_type = other DNA
cctcagcctcctgaatagctgggactacaggtgtgccaccatgcccggccaattttttttgtattttcagtagagatggggtttcaccatgttggtcaggctgttcttgaactcctgacc

SEQ ID NO: 36459 - DNA, 120 bp, synthetic construct
  source 1..120: mol_type = other DNA
ccagtagggtggataggtgagcggcctgtaggtggaatgagaagggcagtccctttcttttccttctttttttagtagagaagtggtctcactatgttgcccaggctgatgctgaattcc

SEQ ID NO: 36460 - DNA, 120 bp, synthetic construct
  source 1..120: mol_type = other DNA
ctaacctgggagagcagaaggtcagcacatcaattgaagagaagagaggacattaatgggaagagcctgttgggttgtggaacaaccttcctgaaagctttgagaggagataggcagagc

SEQ ID NO: 36461 - DNA, 120 bp, synthetic construct; identical to SEQ ID NO: 10018
  source 1..120: mol_type = other DNA

SEQ ID NO: 36462 - DNA, 120 bp, synthetic construct
  source 1..120: mol_type = other DNA
tggcacaggctggcccttggctctgtagagtgacttaggaaatttcaaggaagatactccaaagtgcagagtcccttcaaacacagggtccgaggcagggcccaggccactcaggctact

SEQ ID NO: 36463 - DNA, 120 bp, synthetic construct
  source 1..120: mol_type = other DNA
aataacagtggcttaaacaagagacaagtgaatttttcctgtaagcaaattctgagataaccagtccaggactggtgcagaacttccaagattaccaggaaggcaagacatttctaattt

SEQ ID NO: 36464 - DNA, 120 bp, synthetic construct
  source 1..120: mol_type = other DNA
tcttggctcactgcaaacttcccctcccgggttcaagcgattctcctgcctcagcctcccaactcccaagtagctgggattacaggcacatgccaccacgcccagctaatttttgtattt

SEQ ID NO: 36465 - DNA, 120 bp, synthetic construct; identical to SEQ ID NO: 10019
  source 1..120: mol_type = other DNA

SEQ ID NO: 36466 - DNA, 120 bp, synthetic construct
  source 1..120: mol_type = other DNA
aaaaaaaaatctagggtttattaacacgaaaagattggagaaacaatactggggggaaactaacagcctctatcaaaggctcagtgtcagtatcagtattatgctcagctgtgagaggct

SEQ ID NO: 36467 - DNA, 120 bp, synthetic construct
  source 1..120: mol_type = other DNA
tggtggcaaactgcatgatgcagaagaaaaggagtgtttactctttttccccatgttgcccaggctggtcttgaattcctgggctcactccagcacagactttgcccctgtaaaccttca

SEQ ID NO: 36468 - DNA, 120 bp, synthetic construct
  source 1..120: mol_type = other DNA
cagctccccagactgttccgtgctgcagcccttctcagttctgcacacttgatgagcccggctctggcctgtcgtgccctgctgctgctgctcagggatacgtacaattgtacagactgt

SEQ ID NO: 36469 - DNA, 120 bp, synthetic construct; identical to SEQ ID NO: 10020
  source 1..120: mol_type = other DNA

SEQ ID NO: 36470 - DNA, 120 bp, synthetic construct
  source 1..120: mol_type = other DNA
ccaccacgcccaactaatttttatatttttagtagaaacgcggtttcaccatgttggtcaggctggtctcgaactcctgacctcatgatccgcctgcctcaccctcccaaagtgctggga

SEQ ID NO: 36471 - DNA, 120 bp, synthetic construct
  source 1..120: mol_type = other DNA
aatttttcttaaggagcagtgatcagggaaaggaagatgtttccctagaactcctctagagggcatatcttccctggatctttgacattgattttcggagcggtaatggatcttacacaa

SEQ ID NO: 36472 - DNA, 120 bp, synthetic construct
  source 1..120: mol_type = other DNA
ggatctggaagaaggggaatgtgtgtgcacagactgccccctgcccttttttttttttctttgaagacaggatctcactctgtcacccaggctgaagtacagtggtgtgatcattactca

SEQ ID NO: 36473 - DNA, 120 bp, synthetic construct; identical to SEQ ID NO: 10021
  source 1..120: mol_type = other DNA

SEQ ID NO: 36474 - DNA, 120 bp, synthetic construct
  source 1..120: mol_type = other DNA
tgggattacaggcatgcaccaccacgtctgggtagttttgtatttttagtagagatagggtttctccatgctggtcaggctggtctcaactccccacctcaggtgatctgccagcctcag

SEQ ID NO: 36475 - DNA, 120 bp, synthetic construct
  source 1..120: mol_type = other DNA
tgcaacctccgcctcctgggttcaagcaattctcctgcctcagcctcccaagtagctgggattacaggcacccaccaccacgcccagccaatttttgtatttttagtagagatggtgttt

SEQ ID NO: 36476 - DNA, 120 bp, synthetic construct
  source 1..120: mol_type = other DNA
tttaacgtcttccatttcttatcagagaaatgataataaaatatagaaaagcacaattctttattttaaccccacctctcgctcacttaaatgaccagttatttccaagtctggatctga

SEQ ID NO: 36477 - DNA, 120 bp, synthetic construct; identical to SEQ ID NO: 10022
  source 1..120: mol_type = other DNA

SEQ ID NO: 36478 - DNA, 120 bp, synthetic construct
  source 1..120: mol_type = other DNA
tactgaggtcaggagttcgagaccagcctggccaacatggcaaaaccctgtctctacaaaaaatacaaaatttagctgggcatggggtgcaggcttgcagtcccagctatttgcgggggg

SEQ ID NO: 36479 - DNA, 120 bp, synthetic construct
  source 1..120: mol_type = other DNA
cacaaaaatatatcattatgcatttctgaaagcaaatgtgctataatactgctttgatctgaatgtcccccaaaattcatatgttgacatttaatctcaactttggtggtattaagaggt

SEQ ID NO: 36480 - DNA, 120 bp, synthetic construct
  source 1..120: mol_type = other DNA
gtgaggacacagcattcatctcctccggaggatgcaacaacaaggctctatgtgaagaaggaaccaggtccctcaccagacactgtacctgccggcaccttgatctttcacttcccagcc

SEQ ID NO: 36481 - DNA, 120 bp, synthetic construct; identical to SEQ ID NO: 10023
  source 1..120: mol_type = other DNA

SEQ ID NO: 36482 - DNA, 120 bp, synthetic construct
  source 1..120: mol_type = other DNA
agtagccaattactgccaggcatagtggctcaaacctgtaatcccagcactttgggaggccaaggtgggaggactgcatgagcccaggagtttgagaccagcctgagcaacatggtgaga

SEQ ID NO: 36483 - DNA, 120 bp, synthetic construct
  source 1..120: mol_type = other DNA
cagaccagcctagccaacatggtgaaaccccctctctactaaaaatacaaaaattagcctggcatggtggtgcacacctgtaatcccagccacttgggagactgagtcagagtcgtttga

SEQ ID NO: 36484 - DNA, 120 bp, synthetic construct
  source 1..120: mol_type = other DNA
atctcagaggctacgcgactttattacagttttaaaaatggaatggtaggccaggtgcggtggctcacacctataatcccagcactttgggaggctaaggcgggcagatcacgaggtcag

SEQ ID NO: 36485 - DNA, 120 bp, synthetic construct; identical to SEQ ID NO: 10024
  source 1..120: mol_type = other DNA

SEQ ID NO: 36486 - DNA, 120 bp, synthetic construct
  source 1..120: mol_type = other DNA
cgggcgcctgtagtcccagctacttgggaggctgaggcaggagaatggcatgaaccccggaggcagagcttgcagcaagccgagattgcgccagagccagactctgtctcaaaaaaaaaa

SEQ ID NO: 36487 - DNA, 120 bp, synthetic construct
  source 1..120: mol_type = other DNA
caaatgttggttcattgtgatttggagtctaccattactataactgtatctgtacctataccaatatctgtacctgtacctatacctacatatgtacttatacctataccatctgtcctc

SEQ ID NO: 36488 - DNA, 120 bp, synthetic construct
  source 1..120: mol_type = other DNA
tcaaggctgagttacagccttttaaatttttgaataatttttttttttttttgagatggagtattgccctcgttgcccaggctggagtgtggtggcacaatctcggctcaccaaaacatc

SEQ ID NO: 36489 - DNA, 120 bp, synthetic construct; identical to SEQ ID NO: 10025
  source 1..120: mol_type = other DNA

SEQ ID NO: 36490 - DNA, 120 bp, synthetic construct
  source 1..120: mol_type = other DNA
tcgactcactgcaacctccaccttccaggttcaagcagttctctgcctcagcctcccaagtagctgggattacaggtgcccgccaccacacccggcttttttgtatttttagtagagacg

SEQ ID NO: 36491 - DNA, 120 bp, synthetic construct
  source 1..120: mol_type = other DNA
attagtttaaatccttgaagggtacagcatcactcggattctgtgtccaatagccttagtgggaagattgcttcagaatttggcacgaatcatgtcactgtttccgtgggcctgcctcag

SEQ ID NO: 36492 - DNA, 120 bp, synthetic construct
  source 1..120: mol_type = other DNA
tggcgcgatctccgctcactgcaagctccgcctgccgggttcacgccattctcctgcctcagcctcctgagtagctgggactacaggcgcccgccaccacgcccggctaattttttttgt

SEQ ID NO: 36493 - DNA, 120 bp, synthetic construct; identical to SEQ ID NO: 10026
  source 1..120: mol_type = other DNA

SEQ ID NO: 36494 - DNA, 120 bp, synthetic construct
  source 1..120: mol_type = other DNA
ggatgctgcacatgcaataatttcatctgcgaatattaacattaatgtttcttgtagtccttatatatttgttgcttattggactggctacaacttccattgttttattgatgaggatta

SEQ ID NO: 36495 - DNA, 120 bp, synthetic construct
  source 1..120: mol_type = other DNA
cgaaatttttgaagatgtcctttatcagcttctggagttttaaaaaaaatatcaacgggtgttgaatattttgagtgactttgctgcatcaattgagatgaatacattttccccctttaa

SEQ ID NO: 36496 - DNA, 120 bp, synthetic construct
  source 1..120: mol_type = other DNA
gttggttttctctagtttcttccttttctttttactgtgttctcttcaagctcttgctttttggagttttcccaggatatcaaaggttggggggatggcaacatggttttcagacagtgt

SEQ ID NO: 36497 - DNA, 120 bp, synthetic construct
  source 1..120: mol_type = other DNA
catatgcttgaggcccctgcctttcggtttcataaataaaaccctgtcctgactacctccaggattggatggaaactcggatgagtaaatatggtagaacgactttgcaaactagcaccc

SEQ ID NO: 36498 - DNA, 120 bp, synthetic construct; identical to SEQ ID NO: 10027
  source 1..120: mol_type = other DNA

SEQ ID NO: 36499 - DNA, 120 bp, synthetic construct
  source 1..120: mol_type = other DNA
tataaagaaaagttctttcctgagctttgaatccccactgtcaggcttcaatggagcgcaaaaattcctaaatttggtgagaaatggcaacattaccagggaatgaacagaccaggccac

SEQ ID NO: 36500 - DNA, 120 bp, synthetic construct
  source 1..120: mol_type = other DNA
cacgtcgacggaaaacaagtgcgctccctactgcagtcaccaggaggcgctagtcccgcctgtctcccggcacgggtcctcgtttgcgcacgcgtcatttctttcctccagcgtccccgc

SEQ ID NO: 36501 - DNA, 120 bp, synthetic construct
  source 1..120: mol_type = other DNA
cgctagaggaggggaggggtgagaagcataagtggcaccggaagtggaattaatccgcctacctctcctgcgcctgcgaaacagaaaagacaaggcgcctgtcgggcggggtgtggcttc

SEQ ID NO: 36502 - DNA, 120 bp, synthetic construct; identical to SEQ ID NO: 10028
  source 1..120: mol_type = other DNA

SEQ ID NO: 36503 - DNA, 120 bp, synthetic construct
  source 1..120: mol_type = other DNA
gaccgctccgatgctgtcgcgcccccggctcccggtcggcctttgtcatgtctaccgggagagcgaaggtccgtgcgcccccgcacaagtggaaaggggcggaggcaggagtggagacgg

SEQ ID NO: 36504 - DNA, 120 bp, synthetic construct
  source 1..120: mol_type = other DNA
ttcatgtctccgagatttctcatttcgaattctcaggctcgtctgacacatttccacttctttattcctactcagggtgtgattgcagtgtgtaagaagggagagttctgatatgacttc

SEQ ID NO: 36505 - DNA, 120 bp, synthetic construct
  source 1..120: mol_type = other DNA
cttcggagtgtaggaaagggagaaggagagtagggtaatctgggccaaaagacttctcattctctctctcctttcccaaattgtgcagattcctgcccaatgaaactgattgatttagtt

SEQ ID NO: 36506 - DNA, 120 bp, synthetic construct; identical to SEQ ID NO: 10029
  source 1..120: mol_type = other DNA

SEQ ID NO: 36507 - DNA, 120 bp, synthetic construct
  source 1..120: mol_type = other DNA
tcgtggagctgccattctatggggatacagacaataaatgtaataaatgaattatataactgccagaaggccgtaagtgctgtggagaaaaggagaaattcaaggttgaggacatagggg

SEQ ID NO: 36508 - DNA, 120 bp, synthetic construct
  source 1..120: mol_type = other DNA
acatttcaggcagagggaatctgctagagcagagtccctaaagagttgtaaggagggaagtgtggctggaatgaagtgagcaaggggaaaagttgtgggaaaggaagtcaggtaatgggt

SEQ ID NO: 36509 - DNA, 120 bp, synthetic construct; identical to SEQ ID NO: 4312
  source 1..120: mol_type = other DNA

SEQ ID NO: 36510 - DNA, 120 bp, synthetic construct; identical to SEQ ID NO: 10030
  source 1..120: mol_type = other DNA

SEQ ID NO: 36511 - DNA, 120 bp, synthetic construct
  source 1..120: mol_type = other DNA
gcggtctcggctcactgcaacctccgcctcccgggttcaggcgattctcctgcctcagcctcccgagtagctgggactacaggcgcctgccaccacgcccggctaattttttgtattttt

SEQ ID NO: 36512 - DNA, 120 bp, synthetic construct
  source 1..120: mol_type = other DNA
cattttttattgtcgtgactaggtggggggttgctactggcatctagtgggtagagggcagggatgctgctaggcatctgacagtgtacaggactgcattggacattgtcaaatgtcacc

SEQ ID NO: 36513 - DNA, 120 bp, synthetic construct
  source 1..120: mol_type = other DNA
ggatatattttgaaggtacaatcagccatgctttgctgacagattagatgtggtatgtaggagaaagagaggactctgggtttttggcttgagcaactgaaagatggagttatatcaatt

SEQ ID NO: 36514 - DNA, 120 bp, synthetic construct; identical to SEQ ID NO: 10031
  source 1..120: mol_type = other DNA

SEQ ID NO: 36515 - DNA, 120 bp, synthetic construct
  source 1..120: mol_type = other DNA
caccactcccagccttaaatagcgatgttgacgatgcagttcagtataggtgcaggatcgaggtctgagctggacatataaatttggaaactgtcagcatatcaatgatatttaaaggca

SEQ ID NO: 36516 - DNA, 120 bp, synthetic construct
  source 1..120: mol_type = other DNA
gaaaagggagtaatcagttgtatcagatgctgtttgatgggtcaagaaaatgaagataaagaattgacttagcaacatgaagttacttgtgatcttgaggatagcaatttcgatggaatg

SEQ ID NO: 36517 - DNA, 120 bp, synthetic construct
  source 1..120: mol_type = other DNA
tagggaaagcagagttcagattcttttagtttcgaagaaataatagagtttgtggtatgccaattggagtgatgccatagagtacaaagctgatggtgcagaggtgagaagggaggattg

SEQ ID NO: 36518 - DNA, 120 bp, synthetic construct; identical to SEQ ID NO: 10032
  source 1..120: mol_type = other DNA

SEQ ID NO: 36519 - DNA, 120 bp, synthetic construct
  source 1..120: mol_type = other DNA
tccaaggaggtaggtctgtagcagatccactacggtagtgtagagaggaggaagggcacaggttatttttaaaaattagtgtttgactttggaatacttaaagaaaaatttggtttccat

SEQ ID NO: 36520 - DNA, 120 bp, synthetic construct
  source 1..120: mol_type = other DNA
tatcacagtttaagtattgccccactgatgaacattcaatttcattccttcaaaaactgtagagtcctaccatgtagcagacattgtactaggccctctggttatatagttatgaacaaa

SEQ ID NO: 36521 - DNA, 120 bp, synthetic construct
  source 1..120: mol_type = other DNA
ttgagtaaatctcactgtatcacgggtagctcaaactcactttcccaaaattgaacttagcatccatgaaaccaatcctgctgggtccagtggcatgtgcttgttgtcctaggcacttaa

SEQ ID NO: 36522 - DNA, 120 bp, synthetic construct; identical to SEQ ID NO: 10033
  source 1..120: mol_type = other DNA

SEQ ID NO: 36523 - DNA, 120 bp, synthetic construct
  source 1..120: mol_type = other DNA
tagcccctttcaactaggttccatgagaattaatttcttttttttttttttgagaccggagtctcgctctgtcacccaggctggagtgcagtggcacaatcttggctcactgcaagctcc

SEQ ID NO: 36524 - DNA, 120 bp, synthetic construct
  source 1..120: mol_type = other DNA
tagctaggatggtcttgatctcctgaccttgtgatctgcccgcctcggcctcccaaagtgctgggattataggcataagccaccgcgcctggccaagttctttttttttttttttttttt

SEQ ID NO: 36525 - DNA, 120 bp, synthetic construct
  source 1..120: mol_type = other DNA
ggcacatgccaccatgcctgggtaatttttgtagaaacagggtttcaccatgttggtcaggctggtcttgaactcctgacctcaagtaatctgcccgcctcagcctcccaaaatgctgga

SEQ ID NO: 36526 - DNA, 120 bp, synthetic construct
  source 1..120: mol_type = other DNA
gctcaccgcaacctctgcctcccaggttcaggcgattctcctgactcagcctcccgagtagctgggattgcaggcatgtgccaccacacccagctaatttttgtatttttagtagagacg

SEQ ID NO: 36527 - DNA, 120 bp, synthetic construct; identical to SEQ ID NO: 10034
  source 1..120: mol_type = other DNA

SEQ ID NO: 36528 - DNA, 120 bp, synthetic construct
  source 1..120: mol_type = other DNA
ttaaagttagtcaagtccagcttttcccctagaggttattcccacttttaggttatgtcctcacttctgttcatgctgtctggcacataattcagcttttggcacaagtggtgctcagtg

SEQ ID NO: 36529 - DNA, 120 bp, synthetic construct
  source 1..120: mol_type = other DNA
aggaagttcttgggacatttgggctcctgggtattgtcttaagggtctcttttcccaacagaggtcccccctattggaagtaaaggggaacatagaactgaagagacctctgattaaggc

SEQ ID NO: 36530 - DNA, 120 bp, synthetic construct
  source 1..120: mol_type = other DNA
tgtgtgtgtgaaagaaaggagagagagagtataaaccattagggagggtgactatggaccttgtctttatctttccccagaaacggacaagaggcctgggtgcaacgaccaaaattacca

SEQ ID NO: 36531 - DNA, 120 bp, synthetic construct
  source 1..120: mol_type = other DNA
tgtttcttttctttcaattttattttattttttttgagacagagtctcgctctatcgcccaggctggagtgcagtggctcaatctcactcactgcaacctcctcctcccaggttcaaacg

SEQ ID NO: 36532 - DNA, 120 bp, synthetic construct; identical to SEQ ID NO: 10035
  source 1..120: mol_type = other DNA

SEQ ID NO: 36533 - DNA, 120 bp, synthetic construct
  source 1..120: mol_type = other DNA
agtaagactatactcccccaccttttttacataaatggtggcatactttagacatggtcctgcttttacttatcttaatccaaattgctttttggcatatggagtacagttggccctctg

SEQ ID NO: 36534 - DNA, 120 bp, synthetic construct
  source 1..120: mol_type = other DNA
acctgaggtccggagttccagaccagcctggccaatatggttgaaaccctgtctctactaaaaatataaaattagccagacgtgatggcccgtgcctgtaatcccagctactctggaggc

SEQ ID NO: 36535 - DNA, 120 bp, synthetic construct
  source 1..120: mol_type = other DNA
aataaaaaataaaaccaaaaaatacagtataacagttatggtcatgtgtcacttggcaatgcagatacattatcagaaatgcattattgtggaaacatcatagaatgtacttactgaaac

SEQ ID NO: 36536 - DNA, 120 bp, synthetic construct; identical to SEQ ID NO: 10036
  source 1..120: mol_type = other DNA

SEQ ID NO: 36537 - DNA, 120 bp, synthetic construct
  source 1..120: mol_type = other DNA
aatagttcttttataataaattaaccttagtttactataactattttactttataaacttaacattttttttcccacttgccaaggctgatgtaacattttaatctttttttaacttttt

SEQ ID NO: 36538 - DNA, 120 bp, synthetic construct
  source 1..120: mol_type = other DNA
aacattacagcccatagactgggcagtccccggaatctctttaatggttccagagagttctctggctaaggatcggtgccgcatctgtcgagcaatgttgacgatctcatcaaaagtgat

SEQ ID NO: 36539 - DNA, 120 bp, synthetic construct
  source 1..120: mol_type = other DNA
cagaaggcaccacctcaatctgggcctgtctgttctcaatggtcagtttcactgtaatcctcaggcccttccagtcacccgttgccttggcaatgtcatcaccaaccttttttggagaca

SEQ ID NO: 36540 - DNA, 120 bp, synthetic construct; identical to SEQ ID NO: 10037
  source 1..120: mol_type = other DNA

SEQ ID NO: 36541 - DNA, 120 bp, synthetic construct
  source 1..120: mol_type = other DNA
ggctaattttgtttttttgtatttttaatagagacagggtttcaccatgttagccaggatggtctcgatctcctgacctcgtgatctgcctgcctcagcttcccaaagtgttgggattac

SEQ ID NO: 36542 - DNA, 120 bp, synthetic construct
  source 1..120: mol_type = other DNA
tttctatctaaattttgttttgggcggggagcatatattcagggcaatatgaatctctgtctcctggcttgaaaataaaatttttgttttttgttttttgtttttgagacagagtctcgc

SEQ ID NO: 36543 - DNA, 120 bp, synthetic construct
  source 1..120: mol_type = other DNA
tcatacccagctaattttttgtatttttagtagagatggggtttcaccgtattagtcaggatggtctcgatctcctgacctcgtgatccgcccgcctcagcctcccaaagtgctgggatt

SEQ ID NO: 36544 - DNA, 120 bp, synthetic construct; identical to SEQ ID NO: 10038
  source 1..120: mol_type = other DNA

SEQ ID NO: 36545 - DNA, 120 bp, synthetic construct
  source 1..120: mol_type = other DNA
ctcggctcactgcaagctccgtctcctgggttcacaccattctcctgcctcagcctccggagtagctgggactacaggtgcccgccaccacgcctggttaattttgtttttgtattttta

SEQ ID NO: 36546 - DNA, 120 bp, synthetic construct
  source 1..120: mol_type = other DNA
aatgccttttgaatgacatgcctgaggctgttttatagttaactgtttttgcaaatagaaggagtataccctaaaataacaataaaaagtacagtacggtaaatatataaactagtaaca

SEQ ID NO: 36547 - DNA, 120 bp, synthetic construct
  source 1..120: mol_type = other DNA
tatgacattaccatggctataatgtcactaggcaataggaatttttagctccattataatgttacggggctactgttgtatatgcagtctgtcattgaccgaaatgtcattatgggcaca

SEQ ID NO: 36548 - DNA, 120 bp, synthetic construct; identical to SEQ ID NO: 10039
  source 1..120: mol_type = other DNA

SEQ ID NO: 36549 - DNA, 120 bp, synthetic construct
  source 1..120: mol_type = other DNA
ctcaaaaaaaaaacaaaatggaggccaaggcaggcagatcaccagaggtcaggagtttgaggccagcctaatcaacatggtgaaaccccgtctttactaaaaatacaaaattagttgggc

SEQ ID NO: 36550 - DNA, 120 bp, synthetic construct
  source 1..120: mol_type = other DNA
caagtgaaactctgtctcagtcaatcaataaataaagtatatgggagcgtgtgcatagactatatttaatactatatacctatttatgtaagggacttgggcatccttggattttggtat

SEQ ID NO: 36551 - DNA, 120 bp, synthetic construct
  source 1..120: mol_type = other DNA
atttctaattctgagaaaagcacttcttctgcccctgtcctagcaagtgtacatgccatcttaagaatgatcattctacctttgctctctcccatctcctgggcagctcaaaaagtttcc

SEQ ID NO: 36552 - DNA, 120 bp, synthetic construct; identical to SEQ ID NO: 10040
  source 1..120: mol_type = other DNA

SEQ ID NO: 36553 - DNA, 120 bp, synthetic construct
  source 1..120: mol_type = other DNA
ctagacttcactgacctttgtcctttctgtgttcatcttagcatcaggtgttcctcccatggcaggagggaagaaacccagcaaacgtccagcctgggacttaaagggtcagttatgtga

SEQ ID NO: 36554 - DNA, 120 bp, synthetic construct
  source 1..120: mol_type = other DNA
cacaacactggaggggcatttagccaaggtacaggcccaggctgagcagggccaacaggagctgaagaacttgcgtgcttgtgtcctggagctggaagagcggctgagcacgcaggaggg

SEQ ID NO: 36555 - DNA, 120 bp, synthetic construct
  source 1..120: mol_type = other DNA
cctggcagaggtcatgcctcccctcccttccaggtacccctcaagtctgggctgagaactcctgagcacctatctttagcagtataggtgctgctgaagatacctctctcttgacctgtc

SEQ ID NO: 36556 - DNA, 120 bp, synthetic construct; identical to SEQ ID NO: 10041
  source 1..120: mol_type = other DNA

SEQ ID NO: 36557 - DNA, 120 bp, synthetic construct
  source 1..120: mol_type = other DNA
tgctcctctttgtgcttggacatacccatagcactccctgtcttagtaccatgattccttattttctcatctttctttgtttaccagactttgaggtccttttgagcagggacctcactt

SEQ ID NO: 36558 - DNA, 120 bp, synthetic construct
  source 1..120: mol_type = other DNA
agccaagcagaggtggcatctctgcggcaggagactgtggcccaggcagccttactgactgagcgggaagaacgtcttcatgggctagaaatggagcgccggcgactgcacaaccagctg

SEQ ID NO: 36559 - DNA, 120 bp, synthetic construct
  source 1..120: mol_type = other DNA
ccaacccgccttagcctctcccggtctgacgagcggcgtgggaccctgagtggggcaccagctcccccaactcgccatgatttttcctttgaccgggtattcccaccaggaagtggacag

SEQ ID NO: 36560 - DNA, 120 bp, synthetic construct; identical to SEQ ID NO: 10042
  source 1..120: mol_type = other DNA

SEQ ID NO: 36561 - DNA, 120 bp, synthetic construct
  source 1..120: mol_type = other DNA
gtccctgtctcctgtgagaaagaagtgaggacccatgggcactggaactgggaaatggggaggagtgggcagggtgccacgagatggaggtagagggagaaaggagcaagagagaattga

SEQ ID NO: 36562 - DNA, 120 bp, synthetic construct
  source 1..120: mol_type = other DNA
gtcactacatctcatgtctcatcttcttgctcagctcatcctagccatgctggcctcctggctgttcctcaaccagctagtcgtgctccccatctcagggcctttgcctggatgctcttt

SEQ ID NO: 36563 - DNA, 120 bp, synthetic construct
  source 1..120: mol_type = other DNA
cattttcagacatactgtgcatcttattttgtttcttgacaggctagaaagcttcaagagggtgggggtgggctcttattcatttccatacatattactatgtactgacttctgcctgcc

SEQ ID NO: 36564 - DNA, 120 bp, synthetic construct; identical to SEQ ID NO: 10043
  source 1..120: mol_type = other DNA

SEQ ID NO: 36565 - DNA, 120 bp, synthetic construct
  source 1..120: mol_type = other DNA
gttggggttggctgtgcagaaccctgcctattcctaaacatctgtccccacctcaatcatctaggagtcccacgtgccttaccggaacagcaaactgacctacctgctgcagaactctct

SEQ ID NO: 36566 - DNA, 120 bp, synthetic construct
  source 1..120: mol_type = other DNA
atgctggggttgggcacattgtcttttcataggctcatgtttgtgaacatttctccactggaagagaacgtctccgagtccctcaactctctacgctttgcctccaaggtgcgattacca

SEQ ID NO: 36567 - DNA, 120 bp, synthetic construct
  source 1..120: mol_type = other DNA
cacctggttccatttttaattattagcttttgagttaagttttttaaaaaacgggtgattaatttaacctgagaaagctgattaaaaaaaaaagaaaaggtgactaaaaggtctaaactg

SEQ ID NO: 36568 - DNA, 120 bp, synthetic construct; identical to SEQ ID NO: 10044
  source 1..120: mol_type = other DNA

SEQ ID NO: 36569 - DNA, 120 bp, synthetic construct
  source 1..120: mol_type = other DNA
tccactatgtagctgcaccaaaatttatccaccagttccctctactggacacttggattgtttccacacttttttagtcacaaacaaggccacgttgactaactttgtacatacatcatt

SEQ ID NO: 36570 - DNA, 120 bp, synthetic construct
  source 1..120: mol_type = other DNA
agggtcagccagtggctatatgaattctcactaatgagaattccttccactagaatctccttccactagtgttaagcaagtcagaaagtttccttactgtctgcctccacagtaattttt

SEQ ID NO: 36571 - DNA, 120 bp, synthetic construct
  source 1..120: mol_type = other DNA
gctgtggagtagccagcacctgcaccctgatctggtattctactttgatgagggtttccctcactatcttgcaagttcaattttagagggtggtgatgttttttctaactttttattaat

SEQ ID NO: 36572 - DNA, 120 bp, synthetic construct; identical to SEQ ID NO: 10045
  source 1..120: mol_type = other DNA

SEQ ID NO: 36573 - DNA, 120 bp, synthetic construct
  source 1..120: mol_type = other DNA
ccagcagtgaccatacctggatctttatttcattaaggggtttctaaatggggatttttctaatcttagttgttctgcattggttagtcacgattcttttatgaagacatttgccttgcc

SEQ ID NO: 36574 - DNA, 120 bp, synthetic construct
  source 1..120: mol_type = other DNA
tttatctgagggttatttttatttttattttttttgagacagggacttgctctgttgcccagactggaattcagtggctcaatcatagctcattgtagccaccaaaagtgttgggattat

SEQ ID NO: 36575 - DNA, 120 bp, synthetic construct
  source 1..120: mol_type = other DNA
tttgggaggctgaggtgggtggatcacgaggtcaggagatcgagaccatcctaacacggtgaaaccccgtctctactaaaaatacaaaaaattcaccgggcgtggtggcgggcgcctgta

SEQ ID NO: 36576 - DNA, 120 bp, synthetic construct; identical to SEQ ID NO: 10046
  source 1..120: mol_type = other DNA

SEQ ID NO: 36577 - DNA, 120 bp, synthetic construct
  source 1..120: mol_type = other DNA
ggtctctagtacagggtattgctggaaatgaaagcctcctttctctgctcctgtattttcttctggggcttccatctcttctcaagccttttcacctcctccaaacctagtgtgcagagg

SEQ ID NO: 36578 - DNA, 120 bp, synthetic construct
  source 1..120: mol_type = other DNA
gctgcaaacttttatcctgtctaaccccctgcccccaggtgaaccagtgtgttattggtactgctcaggccaacaggaagtgaagacggatccagatctgtgtgtgtgtgtgtgtgtgtg

SEQ ID NO: 36579 - DNA, 120 bp, synthetic construct
  source 1..120: mol_type = other DNA
aatagtttggttttttttttaaataaaggttttattagcatttgcccaagaaggcagatactttcatatctgtaaaagtgggagctgtgatctgtaccctctgccaaacgtttacgtggg

SEQ ID NO: 36580 - DNA, 120 bp, synthetic construct; identical to SEQ ID NO: 10047
  source 1..120: mol_type = other DNA

SEQ ID NO: 36581 - DNA, 120 bp, synthetic construct
  source 1..120: mol_type = other DNA
ctgcccattggctggctctcggtggcgtcaccgccttgggtcctcgcgcccttcgtctgcgccagccctggaagcacggggcgggacgtccacgggaagcggcgcgcacgcccgccgact

SEQ ID NO: 36582 - DNA, 120 bp, synthetic construct
  source 1..120: mol_type = other DNA
cggggagggcggggcgcgcgagggaggagggcgtggtgggggcatcgagaagggtgaatggagggcggggctgtgaactggggccggggggcgggacttggagtgaccatggggggtggg

SEQ ID NO: 36583 - DNA, 120 bp, synthetic construct
  source 1..120: mol_type = other DNA
tctcccaccgggtccgactcttcgctccccaagccgcggagggccagcctcttcttcggcgccctccaggcctgttggaggtgagggaggtggggtgaggtggtgcccgcccccccctcc

SEQ ID NO: 36584 - DNA, 120 bp, synthetic construct; identical to SEQ ID NO: 10048
  source 1..120: mol_type = other DNA

SEQ ID NO: 36585 - DNA, 120 bp, synthetic construct
  source 1..120: mol_type = other DNA
ctcgccgccttggcctcgggtccgggctgggccgacacaagtcccttctcggacttgccgtcctggggagtagagaccgggactgggacacgcccccctcccggggcactcagagaagtt

SEQ ID NO: 36586 - DNA, 120 bp, synthetic construct
  source 1..120: mol_type = other DNA
catctccagaaaaggtcccaaaacacgtctctgggcaacaggacaccctaattatgatacctctaaactgagtagcctttgcttctacaaccataatttctcctaaaatttcaaggccag

SEQ ID NO: 36587 - DNA, 120 bp, synthetic construct
  source 1..120: mol_type = other DNA
gagaggagagccagtcactagagttggaagaggactcaaaaagctggtgatgggtgcccagtggtttcctatcaaggtgtctcagggatttggagatgggggcacagatacttcattctt

SEQ ID NO: 36588 - DNA, 120 bp, synthetic construct; identical to SEQ ID NO: 10049
  source 1..120: mol_type = other DNA

SEQ ID NO: 36589 - DNA, 120 bp, synthetic construct
  source 1..120: mol_type = other DNA
gcattcataaccttctcctccccatttcttttctggctaggcccccccaggatgcaatggcgcagcccccccggctgagccgctctggtgcctcctcactttgggacccagcttctcctg

SEQ ID NO: 36590 - DNA, 120 bp, synthetic construct
  source 1..120: mol_type = other DNA
ggtaccatcaaaaaggtaagaccttctacctctgaccttcttcctagttcccttatctaattctggttcccatttcatcctgtttgctcacccattccaggtggacagtgctagggaggt

SEQ ID NO: 36591 - DNA, 120 bp, synthetic construct
  source 1..120: mol_type = other DNA
ggcagaaagagacttaaaggcaggccctgtgacactgtgttctctcacagctgccctccctggagaggaactcctctgttgtgtctgtcgctctgagactgtggtccctgggaaccggct

SEQ ID NO: 36592 - DNA, 120 bp, synthetic construct; identical to SEQ ID NO: 10050
  source 1..120: mol_type = other DNA

SEQ ID NO: 36593 - DNA, 120 bp, synthetic construct
  source 1..120: mol_type = other DNA
ctcatcaagaccatggtcagggattaaatgagatgggtaaagactattcctgtcccaataccaagcacacacaggtatgcaataagtggtctactattatcactgcagcttatcaccagg

SEQ ID NO: 36594 - DNA, 120 bp, synthetic construct
  source 1..120: mol_type = other DNA
ggagcctcccatccacagcctctcccaagccttttcctctccccacccctctgaagccacccacctgtcctgtctctgcagaggggaggtgccctgaagaagggcccctatgcccgggcc

SEQ ID NO: 36595 - DNA, 120 bp, synthetic construct
  source 1..120: mol_type = other DNA
agaggggagcagactgtggaatgaatgatgtggtggtggatcccaggaaatgaaggaaaaagaacaggatgagggtagcactcagggggataggaggtaagtttagggtttgggacagtt

SEQ ID NO: 36596 - DNA, 120 bp, synthetic construct
  source 1..120: mol_type = other DNA
gcctgcagtggttccatgaggcctgcacccagtgtctgagcaagcccctcctctatggggacaggtgagaccaaggcagactctctaggagccaaggatgccctctttcttcgtgttcca

SEQ ID NO: 36597 - DNA, 120 bp, synthetic construct; identical to SEQ ID NO: 10051
  source 1..120: mol_type = other DNA

SEQ ID NO: 36598 - DNA, 120 bp, synthetic construct
  source 1..120: mol_type = other DNA
atgcctctgtggtcttgaaaactttgtttttccagggtggatgtggcccatcttgtcctgtatcacctcagtgtttgctgtaagaagaaatactttgattttgatcgtgagatcctcccc

SEQ ID NO: 36599 - DNA, 120 bp, synthetic construct
  source 1..120: mol_type = other DNA
agatgtagcggaaaggggaagagaagaaatcactgctcccctggccccatttttcttcatttctcccagctttcagacacccccaaaggagaacgttcttccaggctcctctctgctctt

SEQ ID NO: 36600 - DNA, 120 bp, synthetic construct
  source 1..120: mol_type = other DNA
aaaaggattgaggaatggcgtaaggaggaaccgttttttacagcactgaccctatatcatttctcttcttgccccagtttcatttcagggagagagattaagaagaggaaatgtttgttt

SEQ ID NO: 36601 - DNA, 120 bp, synthetic construct; identical to SEQ ID NO: 10052
  source 1..120: mol_type = other DNA

SEQ ID NO: 36602 - DNA, 120 bp, synthetic construct
  source 1..120: mol_type = other DNA
tgcagagggcactgcaggtactggagcagggggaacccgatggagcaaatggtggggtgtgggaaggagtcaaggattatctctcagtcctttgccccctcttctaggcctcagtgtctc

SEQ ID NO: 36603 - DNA, 120 bp, synthetic construct
  source 1..120: mol_type = other DNA
ccaattattcacatcttctggactttatcacccagaattcttttccctctcccccttggctacccacttcttggcctagaccgacttctagaactagtgtctggtagccagtattctggg

SEQ ID NO: 36604 - DNA, 120 bp, synthetic construct
  source 1..120: mol_type = other DNA
actttccccactccaaccccagcagccccatccggatgtttgcttccttccacccttctgccagcaccgcagggacctctggggacagtggacccccagacaggtgagattctgtcttct

SEQ ID NO: 36605 - DNA, 120 bp, synthetic construct; identical to SEQ ID NO: 10053
  source 1..120: mol_type = other DNA

SEQ ID NO: 36606 - DNA, 120 bp, synthetic construct
  source 1..120: mol_type = other DNA
aggggaccctgtccgggtccttgctcggagagtacggcctgatggctctgtgcagtacctggttgagtggggaggagggggcatcttctgaacagcctgcctctgcccagctccccattc

SEQ ID NO: 36607 - DNA, 120 bp, synthetic construct
  source 1..120: mol_type = other DNA
aagaggccctcttctctaccctccttcatgattcctgacccctcccatccttcccatttcctttgatgttattttgttacagctttttaaatattttttaaaattatttaacccctgggg

SEQ ID NO: 36608 - DNA, 120 bp, synthetic construct
  source 1..120: mol_type = other DNA
ctctgagtcattctgaaagatgtagagaatacagggactagaagcacttatattctcccaacaaatttgcatacatgacaaaaaacaggcaaaaggcagagagacccaaagacgggattt

SEQ ID NO: 36609 - DNA, 120 bp, synthetic construct; identical to SEQ ID NO: 10054
  source 1..120: mol_type = other DNA

SEQ ID NO: 36610 - DNA, 120 bp, synthetic construct
  source 1..120: mol_type = other DNA
atctgtcaaagctgggaccaaggaactttgggttttaatcatctaagggacaaagataaacatggttgaatcaaggagtgggattgagttcagtttctcagaagaggggtaagggctaaa

SEQ ID NO: 36611 - DNA, 120 bp, synthetic construct
  source 1..120: mol_type = other DNA
tggggagcaaagaatttcccccaggaaagaggttcccagtcagctcctacagttaggttaaccccccaactcctatgactcacatggatgtaatctgagggatgaggttgacgcaggctg

SEQ ID NO: 36612 - DNA, 120 bp, synthetic construct
  source 1..120: mol_type = other DNA
gcagcactcttctgccccacccccaactgtcccttcatgatcatcctttctcgctgcacatcgaggtccctacctggcgatctccttggcgaccttctcgttggggcaagtaacaaaggc

SEQ ID NO: 36613 - DNA, 120 bp, synthetic construct; identical to SEQ ID NO: 10055
  source 1..120: mol_type = other DNA

SEQ ID NO: 36614 - DNA, 120 bp, synthetic construct
  source 1..120: mol_type = other DNA
tgggatttagggtgcgggtagcggtcgaggcttcgaggaccggaaggggcggggcggggccggtcactcaccactccgccgagcaggaccgcgggagcccgccccccactcatgcggcct

SEQ ID NO: 36615 - DNA, 120 bp, synthetic construct
  source 1..120: mol_type = other DNA
tgacagtagaagaaggaccacctgcgcctccagagccagccaatcccgaccctatcatggcgcggtttgcccacctcctgatgaaggaggagccatgggagacttgaccaatcgactacc

SEQ ID NO: 36616 - DNA, 120 bp, synthetic construct
  source 1..120: mol_type = other DNA
ctgcggcgttccactgtcacgtgagggggccggtcctcttcggcggcggcactcagtgagtgacgccaagtggccaatcacaggccagcctcgcaggccacgtgaggcgagagctggttc

SEQ ID NO: 36617 - DNA, 120 bp, synthetic construct; identical to SEQ ID NO: 10056
  source 1..120: mol_type = other DNA

SEQ ID NO: 36618 - DNA, 120 bp, synthetic construct
  source 1..120: mol_type = other DNA
tggggcctagccatcttaattgaaaacccaaagcttgagacagactactgaatcagagggaaggagaacgagggctgcaggatggggacagtggtgatggtccttctgtcccctcttccc

SEQ ID NO: 36619 - DNA, 120 bp, synthetic construct
  source 1..120: mol_type = other DNA
tgacccaaaaatggagagaggggccaatgagaggcagagaggtgggaggaggtgcagagaaaaaagctcttgccactgcccccacccaatatttcccctcccttcaaggtctgaggtcat

SEQ ID NO: 36620 - DNA, 120 bp, synthetic construct
  source 1..120: mol_type = other DNA
ggagtttgtctctgagacagatttcggaggggtctttcagtatttgtgtggagatctttcttaggattgagtttccttttatgcttctggtttggggggtttctatgtttcagggtctgt

SEQ ID NO: 36621 - DNA, 120 bp, synthetic construct; identical to SEQ ID NO: 10057
  source 1..120: mol_type = other DNA

SEQ ID NO: 36622 - DNA, 120 bp, synthetic construct
  source 1..120: mol_type = other DNA
gggtcgttttttcctcaaatcaggagtctcttttcctctagattttggccctgtgtctcaaattaccccacagtggggggtggtgaagtatctttctctgtgggtctagggtctctctgt

SEQ ID NO: 36623 - DNA, 120 bp, synthetic construct
  source 1..120: mol_type = other DNA
ctctccctcctcctcctcctcctgctctcttcgctctcgctcgctcccccgccccccctctctctcggctgccgctgctgccgttggctcttattctcctcctcctcctcctctctcctc

SEQ ID NO: 36624 - DNA, 120 bp, synthetic construct
  source 1..120: mol_type = other DNA
ccctccccccaggcctgatgagcaggtctcgagcctccatccatcgggggagcatccccgcgatgtcctatgcccccttcagaggtacgtggtggggggagggggagggccatatggggg

SEQ ID NO: 36625 - DNA, 120 bp, synthetic construct; identical to SEQ ID NO: 10058
  source 1..120: mol_type = other DNA

SEQ ID NO: 36626 - DNA, 120 bp, synthetic construct
  source 1..120: mol_type = other DNA
aacataggggtgaaaagagaagccaagaagatgtggggggataatttggtgggggactcagagtatggtaaggggcggaaaaagagaggaggatggagggagagaaggggccagatggag

SEQ ID NO: 36627 - DNA, 120 bp, synthetic construct
  source 1..120: mol_type = other DNA
gggggggtggcagtacaagtaagatgaaatgatgggagtaggggacaggttaggatcctgccccagactctgaccctcttaaaggctcttgaccagtaaaatgtaacctctggggtctta

SEQ ID NO: 36628 - DNA, 120 bp, synthetic construct
  source 1..120: mol_type = other DNA
cttatatgagtcccccttctgtccttcccctatatcagtcccctctctggtgttcattgcctctctcttatctcttttctatgtggtcgctcccttatatctctatcacttctttactag

SEQ ID NO: 36629 - DNA, 120 bp, synthetic construct; identical to SEQ ID NO: 10059
  source 1..120: mol_type = other DNA

SEQ ID NO: 36630 - DNA, 120 bp, synthetic construct
  source 1..120: mol_type = other DNA
cagccatgttgctctgcctcttgcatctgcctcccagaatcattcttcaccaagtccagacagtatgtgtgtgtgtgtttctagagttgttcctaagttccctgctgccaggagaaagat

SEQ ID NO: 36631 - DNA, 120 bp, synthetic construct
  source 1..120: mol_type = other DNA
tgttgcctgcaatgtctgtagtttcagaggctaggtattggtgatctctgtatctagagaacattagttagtctctgagatgggttgagatagagtttcaaagtatgtggtttctaaatg

SEQ ID NO: 36632 - DNA, 120 bp, synthetic construct
  source 1..120: mol_type = other DNA
gaatgaagctcaaagaccagttctcctgcagtatactcatggttatcccataaaggtgacagagtttgatcttttttccatctaaaatctgataccttaagcctaatttctagctctttg

SEQ ID NO: 36633 - DNA, 120 bp, synthetic construct; identical to SEQ ID NO: 10060
  source 1..120: mol_type = other DNA

SEQ ID NO: 36634 - DNA, 120 bp, synthetic construct
  source 1..120: mol_type = other DNA
agtgttgaatctctgggcactgaatgggagaagagataaatttggtctctacttgtccaaacaagggcatatttcccaccttctgccctggggcctccacagccagatgccgacaaaagc

SEQ ID NO: 36635 - DNA, 120 bp, synthetic construct
  source 1..120: mol_type = other DNA
ctgtgaacaggtaagctccccgacttcttcttttctagatatttagccctcagaatctcatgatcccaatgttcctacacacacaccccatccttctttcccacagccatgtagctttcc

SEQ ID NO: 36636 - DNA, 120 bp, synthetic construct
  source 1..120: mol_type = other DNA
atatctgacaccaacttctctgtttttctcctgccaattttgcggcacctctaccttattttcctgaagtagatggagagctccttcatctttctctgcccccaaacgtgtaccttctct

SEQ ID NO: 36637 - DNA, 120 bp, synthetic construct; identical to SEQ ID NO: 10061
  source 1..120: mol_type = other DNA

SEQ ID NO: 36638 - DNA, 120 bp, synthetic construct
  source 1..120: mol_type = other DNA
atcgtcctggttggaaccctcggttctgcatcatctcggggaaccagctgctcatgctggatgaggatgaggtgagtgtggtgagaaggctgggaaaacgcatgtgggagaatggggaga

SEQ ID NO: 36639 - DNA, 120 bp, synthetic construct
  source 1..120: mol_type = other DNA
tctcatcttgggcagggagtctttgagggttatgagctgtgttggggaggagatgtggttctgaagatttcgggggtggggaggctcctgttttcacactgtccatattgtaggataggt

SEQ ID NO: 36640 - DNA, 120 bp, synthetic construct
  source 1..120: mol_type = other DNA
tttctccatcagggggcagagtgcaagaagagaaattgcaggacgcagagaaaaggcaggggatagaggaggttttaggtagctggaggatactgggaaagaagactgaggtcagtggat

SEQ ID NO: 36641 - DNA, 120 bp, synthetic construct; identical to SEQ ID NO: 10062
  source 1..120: mol_type = other DNA

SEQ ID NO: 36642 - DNA, 120 bp, synthetic construct
  source 1..120: mol_type = other DNA
ttgggggacaagctttaaaaaatggtagggtagcctggaaaaccaaacgtggtgagagatggaccctgaaagttattgggaatggtgtgatgaggaagggttagaatttgagtcagggct

SEQ ID NO: 36643 - DNA, 120 bp, synthetic construct
  source 1..120: mol_type = other DNA
aaagtagaggtgttaaggagaggatatggtgactttgaaaggagaggtggcttggggagtctaagttttggacaccattgggagacatttgagtgactgtggtcaaacccctagatcaag

SEQ ID NO: 36644 - DNA, 120 bp, synthetic construct
  source 1..120: mol_type = other DNA
aagggaccagtggccagcaagttgaggggcaataggaatggccggtctggagcaggaagggcgtgtgtgtgggaggaggagtagatagaattgggaaaatgagcagcctgaacagacgca

SEQ ID NO: 36645 - DNA, 120 bp, synthetic construct; identical to SEQ ID NO: 10063
  source 1..120: mol_type = other DNA

SEQ ID NO: 36646 - DNA, 120 bp, synthetic construct
  source 1..120: mol_type = other DNA
gagggagagaagggggtaagggaggtgggaggttgggaggaaagcagggagaatggaggaactgaaggtcaagggaaaactggattcaggaagtagctaacttctgaggagttgcagaag

SEQ ID NO: 36647 - DNA, 120 bp, synthetic construct
  source 1..120: mol_type = other DNA
tcaccaagtgtggaggggccggggcagaaaaagtgggcaggcttagggggaaaaggaggcccgcccttcctgggaggaggcggaggggggaagagggaggggaggggcggcgtgggccag

SEQ ID NO: 36648 - DNA, 120 bp, synthetic construct
  source 1..120: mol_type = other DNA
ccccacggcgagcatggtacggcggccgagcaggctctcatgacccggacaggcgcggggagagggctgaagatggaccgggctggcggggcgggggcgtcggggagcggcgggagctgg

SEQ ID NO: 36649 - DNA, 120 bp, synthetic construct; identical to SEQ ID NO: 10064
  source 1..120: mol_type = other DNA

SEQ ID NO: 36650 - DNA, 120 bp, synthetic construct
  source 1..120: mol_type = other DNA
ccctgttttctcctctcatcagctgcttctattttctgcaattgtatcaccctttctctttcctccctgatttctcttattttctgtacccctcttgattaccccgtccctcccctctgc

SEQ ID NO: 36651 - DNA, 120 bp, synthetic construct
  source 1..120: mol_type = other DNA
tctgcccccccaaccccctctttagtcatttaaaaaaagatttttgtcttcctgagaagttcgcttaaaaggtttccatgggaacagtgaggggagatgaaggcagagaacagagatctg

SEQ ID NO: 36652 - DNA, 120 bp, synthetic construct
  source 1..120: mol_type = other DNA
gacccctttttcccaccagctccccctcccttcaggaattcaagctaccagtttctctcccttagagagccagtgacctgtccccatcctttggctccttccagccttctgataggtcca

SEQ ID NO: 36653 - DNA, 120 bp, synthetic construct; identical to SEQ ID NO: 10065
  source 1..120: mol_type = other DNA

SEQ ID NO: 36654 - DNA, 120 bp, synthetic construct
  source 1..120: mol_type = other DNA
cacatgctcacagagcatgtttatcatgtgtcctgtggttggcagatctgcccacttattccccatctttctccttatcctgagtcctcagggtctaggggtctctggcgggggtctccc

SEQ ID NO: 36655 - DNA, 120 bp, synthetic construct
  source 1..120: mol_type = other DNA
cttagtgaaagttgatgggggtgaacgtttagggtcttcaggcagacatggaatgtgtaaagggcatggaggatgtgcagtggacataggggtcgttgggaccttggggacttggcaatg

SEQ ID NO: 36656 - DNA, 120 bp, synthetic construct
  source 1..120: mol_type = other DNA
gcggttttgtgtgtgtgggggggtcctgctcaggaggggatggtgggtggcctggtttgttttgggggtccccttgcccccctcccccgtctctctcgcgctgtctccgggcgacagggc

SEQ ID NO: 36657 - DNA, 120 bp, synthetic construct; identical to SEQ ID NO: 10066
  source 1..120: mol_type = other DNA

SEQ ID NO: 36658 - DNA, 120 bp, synthetic construct
  source 1..120: mol_type = other DNA
gcgtgggcgcggggaggggggtggggaagccgcggtggcggcggcggcggcggcagctgctccctccgcatgttctcgctgcatcttccgagtggggggagttatggtaaccggaggggg

SEQ ID NO: 36659 - DNA, 120 bp, synthetic construct
  source 1..120: mol_type = other DNA
cgtgtgtgttcgtgcccatgctcgtgtctcctgtgtgtcggtgccatgtgcacacgggggcccagttcctcgtgcacacatgtgcagccatccttgtgcaagtgtgtcctgtcttatctt

SEQ ID NO: 36660 - DNA, 120 bp, synthetic construct
  source 1..120: mol_type = other DNA
cacctcctgtcaggcttctgtgtgtgggaatgtgtggccctatgagcaggattttctgtgtccctggtggcaggtgtgtgtctttgcatgtgtgttccagcactggcctgagtatctgtg

SEQ ID NO: 36661 - DNA, 120 bp, synthetic construct; identical to SEQ ID NO: 10067
  source 1..120: mol_type = other DNA

SEQ ID NO: 36662 - DNA, 120 bp, synthetic construct
  source 1..120: mol_type = other DNA
gaacaggggataagagcttaagatggggaactggatagagatggtgggagaagaaggggtctgggagctggggaggcagtggggaggagagagtcaggccttctggtaaagtgatctctg

SEQ ID NO: 36663 - DNA, 120 bp, synthetic construct
  source 1..120: mol_type = other DNA
gtcatagcagggactgtcattagaggttcatatccccagcacagagctctgtctcccatttctctgctctgtgtccaaccctgttcttcgcccttctctggcaacctccctcctctggct

SEQ ID NO: 36664 - DNA, 120 bp, synthetic construct
  source 1..120: mol_type = other DNA
gagtccaagcccttgctgtgtgtgtgtgagtgccattgtgtgtgtacacagggtgtgtacatgtgtgggtgtgtgcacaatgcctgtgttacgggtttgtgtaggtggctgttatgtgtg

SEQ ID NO: 36665 - DNA, 120 bp, synthetic construct; identical to SEQ ID NO: 10068
  source 1..120: mol_type = other DNA

SEQ ID NO: 36666 - DNA, 120 bp, synthetic construct
  source 1..120: mol_type = other DNA
aatgctttagttccaaagcggaattttaatgcatttaaagttagactttatgcctttattagatgagcttgcacatgaaaataatggctgagctcggttccctgaaatgagagtgaggca

SEQ ID NO: 36667 - DNA, 120 bp, synthetic construct
  source 1..120: mol_type = other DNA
agatatcctgaaccattggatgcattgcttagtgtgtaccagaaggataattaacacatttgctcctggtttttctttactctggtggcaatctcggatgcctgtgttagagtgagagaa

SEQ ID NO: 36668 - DNA, 120 bp, synthetic construct
  source 1..120: mol_type = other DNA
ggtgtactcaagcatgtatttcaggggttaaactggaattcccctgcatggggatatgtgtgtcttagggttataggtccatttctgtagtgtgctgtccacatgattgcccaagagact

SEQ ID NO: 36669 - DNA, 120 bp, synthetic construct; identical to SEQ ID NO: 10069
  source 1..120: mol_type = other DNA

SEQ ID NO: 36670 - DNA, 120 bp, synthetic construct
  source 1..120: mol_type = other DNA
tgaggactgattctagggcagtttgcaggcaatttgcaattctggaagcagacagtgaaaatataattgtggtcctcccttgttctgttctggaacctagagggttaacaggcagctctt

SEQ ID NO: 36671 - DNA, 120 bp, synthetic construct
  source 1..120: mol_type = other DNA
gcccaggcctgggcagccattctggagctggagccggagcttggcatccccccacttacattctcttccagcccctcggcccctctaaattcccttgcagccgagcctcagcttcctttt

SEQ ID NO: 36672 - DNA, 120 bp, synthetic construct
  source 1..120: mol_type = other DNA
ctgctccctgcccattcccctgcattctttgcttttcccctccccccaccaaccttctgagcccctgccactgcagtgcacgtggaaccggctccttctcccttccccccacctgcccct

SEQ ID NO: 36673 - DNA, 120 bp, synthetic construct; identical to SEQ ID NO: 10070
  source 1..120: mol_type = other DNA

SEQ ID NO: 36674 - DNA, 120 bp, synthetic construct
  source 1..120: mol_type = other DNA
caccccatccccctcagggggctcctgctcaggttccttgccccctccttcccgctgccagcctctccgccgtcgctgctcttcctgctgctttccggggggtaggtgaggccggagctg

SEQ ID NO: 36675 - DNA, 120 bp, synthetic construct
  source 1..120: mol_type = other DNA
cttgggtcgctcgaggaggaagagtgtcccaggggggaagcagtacagcatggagggtgcccctgctgcgcccttccggccctcggtgagtggtgcctaccagatgtggctcagttgggc

SEQ ID NO: 36676 - DNA, 120 bp, synthetic construct
  source 1..120: mol_type = other DNA
tttcccccttcttggctctgcccccctgcttctgagaccagccctcccaccttctccaagctgtgtgtgtgtgtatatgtgtgtgtgtgtgtgcttgcactgtacccgtgggagcaagga

SEQ ID NO: 36677 - DNA, 120 bp, synthetic construct; identical to SEQ ID NO: 10071
  source 1..120: mol_type = other DNA

SEQ ID NO: 36678 - DNA, 120 bp, synthetic construct
  source 1..120: mol_type = other DNA
tgtgcaaaggttgaaggattcaactcaagttggttgggggatgtcatggcacaggggacagaacagaaaagaactagaatagggatctgtgagcagcaggagaggggtagggtggcagag

SEQ ID NO: 36679 - DNA, 120 bp, synthetic construct
  source 1..120: mol_type = other DNA
agagtgaccctggaggaatgtttaaggaatgcagggaaggggttggtaggtgagtgagcaataggctgtaggtggaagggtgtcagggaaggtcaggaaatacaggggcagcaggttgga

SEQ ID NO: 36680 - DNA, 120 bp, synthetic construct
  source 1..120: mol_type = other DNA
acagaatgggaagcaacccatggactgaggcatgaagaagcagccagcggagaagtccagaaggcactgtccctgagaccaggctgaaggagacctccactgtttgcctttgttgcctgc

SEQ ID NO: 36681 - DNA, 120 bp, synthetic construct; identical to SEQ ID NO: 10072
  source 1..120: mol_type = other DNA

SEQ ID NO: 36682 - DNA, 120 bp, synthetic construct
  source 1..120: mol_type = other DNA
ctgcccatctccataccgcttttgtattgctatcctacccctcattattccatgcccctagccccctttatcttctgccctcctgcagtgatttttttgcattccatcccctcttagccc

SEQ ID NO: 36683 - DNA, 120 bp, synthetic construct
  source 1..120: mol_type = other DNA
ctagtccgtgtattctgtcttttatcctctttgagctcttttctgcccacagctttctcctatttcttatgcttttccctcactctttcccctgcttctgctaaaacttgtcctcttatg

SEQ ID NO: 36684 - DNA, 120 bp, synthetic construct
  source 1..120: mol_type = other DNA
ctctgtgccttcacttctttacttccactttttcctttatactgaggctctggtttctggggttacctggaggtactacctagaagtgccccaggcccactttgttctctcctttttttt

SEQ ID NO: 36685 - DNA, 120 bp, synthetic construct; identical to SEQ ID NO: 10073
  source 1..120: mol_type = other DNA

SEQ ID NO: 36686 - DNA, 120 bp, synthetic construct
  source 1..120: mol_type = other DNA
catcctggaacagactgatgatgcagggtacctatgtgtctaagaagagtaggggggccgggcgcggtggctcatgcctgtaatcccagcactttgggaggctgaatcacttgaggtcag

SEQ ID NO: 36687 - DNA, 120 bp, synthetic construct
  source 1..120: mol_type = other DNA
gcagaagttgcagcaagccgagatcacaccactgtactccagcctgggcgacagagcaagactgtctcaaaaaaaaaaaaaaaaaaaaaaaaggaagagtgggaagccctgatcccttcc

SEQ ID NO: 36688 - DNA, 120 bp, synthetic construct
  source 1..120: mol_type = other DNA
agattccattatcaagccagtgcacagctccatcctgggccaggagttctgttttgaggtactgggtctggtgggctggggagggccaaaggacaggggtgatggaaggtggggggcaga

SEQ ID NO: 36689 - DNA, 120 bp, synthetic construct; identical to SEQ ID NO: 10074
  source 1..120: mol_type = other DNA

SEQ ID NO: 36690 - DNA, 120 bp, synthetic construct
  source 1..120: mol_type = other DNA
ggattgaggtacagtgtatctggacaagcagggggagacccccattattctgagtcccccatttcttttcgctttctgtactgctaccctgccttacgatctctttccctgccatagaag

SEQ ID NO: 36691 - DNA, 120 bp, synthetic construct
  source 1..120: mol_type = other DNA
cttggtttcctctctaagacagagggaactggtggcaatgggttggattaaatgatctctaaggtccctttggcacataaattctatgagtctgttcttcccaaaacttcatgcttccag

SEQ ID NO: 36692 - DNA, 120 bp, synthetic construct
  source 1..120: mol_type = other DNA
cttgatgtccttaaagaactcaacccaagatgctgacatgatctgacctatgcagagtacaaacaccatgttccctttcaacacactgcaatatcacctgagccttaccattagcttgtg

SEQ ID NO: 36693 - DNA, 120 bp, synthetic construct
  source 1..120: mol_type = other DNA
tcctgggtttaagcaattcctgtgcctcagcctccccagtagctgggattacaggcatgcaccaccacacccgactaatttttgtatttttagtagagacgaggtttcaccatgttggcc

SEQ ID NO: 36694 - DNA, 120 bp, synthetic construct; identical to SEQ ID NO: 10075
  source 1..120: mol_type = other DNA

SEQ ID NO: 36695 - DNA, 120 bp, synthetic construct
  source 1..120: mol_type = other DNA
aacaaactgctacaaactgggtcacgtaaaacaacagaaatttattctctcacagttcaggaggctggaagtccaaaagcaaggtatcagcagggccacgctctctttgatgctgtagca

SEQ ID NO: 36696 - DNA, 120 bp, synthetic construct
  source 1..120: mol_type = other DNA
gtgtgtctctgtatcctgtatctctgtgtctccaaatctccctctccatataaagacaccagtttttataaggtgggttaagggtccactctaattcagtatggcctcttttttttgaga

SEQ ID NO: 36697 - DNA, 120 bp, synthetic construct
  source 1..120: mol_type = other DNA
caggcacgtgccactatgcccagctaatttgtttttgtatttttattagagacggggtttcactatgttggccaggctggctcgaactcctgacctcaggcaatccacccacctcggcct

SEQ ID NO: 36698 - DNA, 120 bp, synthetic construct; identical to SEQ ID NO: 10076
  source 1..120: mol_type = other DNA

SEQ ID NO: 36699 - DNA, 120 bp, synthetic construct
  source 1..120: mol_type = other DNA
acatgctgtatgcacgcaccacctccaagccccgctctgcctctggggacaccgtcttctggggcgagcacttcgagtttaacaacctgccggctgtccgtgccctgcggctgcatctgt

SEQ ID NO: 36700 - DNA, 120 bp, synthetic construct
  source 1..120: mol_type = other DNA
caacaggcagtgggggatctgggggcatgggttcgggagggggagggggctcggggggtggctcagggggcaagggcaaaggaggttgcccggctgtgcggctgaaagcacgttaccaga

SEQ ID NO: 36701 - DNA, 120 bp, synthetic construct
  source 1..120: mol_type = other DNA
ccagtgcactagttcacatcctgcagagtacaggcaaggccaaggtgagtgttgtgccctcagggaaaggtgacttgggaatgggcacttgcttgggggttagtgaggacagggcaaatt

SEQ ID NO: 36702 - DNA, 120 bp, synthetic construct; identical to SEQ ID NO: 10077
  source 1..120: mol_type = other DNA

SEQ ID NO: 36703 - DNA, 120 bp, synthetic construct
  source 1..120: mol_type = other DNA
tgcccttggaaagtgtgaccacaccctcttgtgcccccaccccccaggagaattcatccgtgctctgtatgaatctgaggaaaactgcgaggtagaccctatcaagtgcacagcatccag

SEQ ID NO: 36704 - DNA, 120 bp, synthetic construct
  source 1..120: mol_type = other DNA
tgttcatctgttcatctatctgtccatcctcaaagaggactgagcaccatttatgggcaaagcattgttctaggcgctatagagcaaacaggtgaaagaggcctggtccctgccctcaga

SEQ ID NO: 36705 - DNA, 120 bp, synthetic construct
  source 1..120: mol_type = other DNA
aggcagagctttgagataagtggggaagaggtgcccccttgggtaggctttgaagactggtttaggttctgatatatggacatagttggcaagaaagacatttcagaagaaggctgtgag

SEQ ID NO: 36706 - DNA, 120 bp, synthetic construct; identical to SEQ ID NO: 10078
  source 1..120: mol_type = other DNA

SEQ ID NO: 36707 - DNA, 120 bp, synthetic construct
  source 1..120: mol_type = other DNA
ctaaaaatacaaaattagccagatgtggtggcacatgcctgtaatcccagctattcgggaggctaaggcaggagaatcacttgaatctgggaggtggaggttgtagtgagccgagatcac

SEQ ID NO: 36708 - DNA, 120 bp, synthetic construct
  source 1..120: mol_type = other DNA
gagccagctgggggctcggaggcatgaaagtcagatcctgaatcagaacagtgacagaagttaggaaggagctactggaaggaccctctcgggaaaggatcagtaggaattgtcagctta

SEQ ID NO: 36709 - DNA, 120 bp, synthetic construct
  source 1..120: mol_type = other DNA
gaggtgtgggggcgatggtgagctctgctttacaccagccgagtttaaggtgtcagtgggacattgaagtggaactgggaggtgcggggagtgagctctgagccattccagggactgggg

SEQ ID NO: 36710 - DNA, 120 bp, synthetic construct; identical to SEQ ID NO: 10079
  source 1..120: mol_type = other DNA

SEQ ID NO: 36711 - DNA, 120 bp, synthetic construct
  source 1..120: mol_type = other DNA
gaagctgagggtctctggggctcagtcccggtctctctctttctctctctctctctctgtctccccgacccttccccccagcgtgttcccgagggagctgaaggaggtgtttgcttcgtg

SEQ ID NO: 36712 - DNA, 120 bp, synthetic construct
  source 1..120: mol_type = other DNA
ggagtacccagatgagcagacctcacgaaccctcaccctcattgccaaggtcatccagaacctggccaacttttccaagtgagggaagcttcaggagtgggcagggcagggagtggcagg

SEQ ID NO: 36713 - DNA, 120 bp, synthetic construct
  source 1..120: mol_type = other DNA
tgtgtgtgtgtgtatgtgacctttatcttctgcattcttggctaggtttacctcaaaggaggactttctgggcttcatgaatgagtttctggagctggaatggggttccatgcagcagtt

SEQ ID NO: 36714 - DNA, 120 bp, synthetic construct; identical to SEQ ID NO: 10080
  source 1..120: mol_type = other DNA

SEQ ID NO: 36715 - DNA, 120 bp, synthetic construct
  source 1..120: mol_type = other DNA
ccccggctcctcaacgacatcagcacagctctgaggaaccccaacatccaaaggcagccaagccgccagagtgagcggccccggcctcagcctgtggtactgcgggggccatcggctgag

SEQ ID NO: 36716 - DNA, 120 bp, synthetic construct
  source 1..120: mol_type = other DNA
agggcttgaaagaagggaggaaaaagcaccaagttctcaggggagacgataaggagacaggtacagtcagtggtaggctgagagccctttacagcctgagggagtgagagatttggagct

SEQ ID NO: 36717 - DNA, 120 bp, synthetic construct
  source 1..120: mol_type = other DNA
agccagcatgtcatgtcagccatgtgtcaaaatgttcaaacatctcagtaatagctagtgaataagcacttcccccagcccccgaccacaaccccacagacctccccatgatccagcact

SEQ ID NO: 36718 - DNA, 120 bp, synthetic construct; identical to SEQ ID NO: 10081
  source 1..120: mol_type = other DNA

SEQ ID NO: 36719 - DNA, 120 bp, synthetic construct
  source 1..120: mol_type = other DNA
cctactcctctcctctcctcctccatggacctcatctcctccatatgtgcccagccctgcccccatcccttctcttgctgcccccatctcccctcctctaggcctcacccccttcccgga

SEQ ID NO: 36720 - DNA, 120 bp, synthetic construct
  source 1..120: mol_type = other DNA
ctgtgccagaccacagcaaggttcaattgctaggagccctgaccttaccttctgcttgtgtgcccccttcccttctgacagctctatggacatggctcgcctcccctccccaaccaagga

SEQ ID NO: 36721 - DNA, 120 bp, synthetic construct
  source 1..120: mol_type = other DNA
gaagatgctgagtgtcaacaagagtgtgtccatgctggacttacagggtgatgggcctggtggccgcctcaacagcagcagtgtttcgaacctggcggccgtaggggacctgctgcactc

SEQ ID NO: 36722 - DNA, 120 bp, synthetic construct; identical to SEQ ID NO: 10082
  source 1..120: mol_type = other DNA

SEQ ID NO: 36723 - DNA, 120 bp, synthetic construct
  source 1..120: mol_type = other DNA
ccccaagccccctgctgcctccatccttcatagccacagctacagtgatgagtttggaccctctggcactgacttcacccgtcggcagctttcactccaggacaacctgcagcacatgct

SEQ ID NO: 36724 - DNA, 120 bp, synthetic construct
  source 1..120: mol_type = other DNA
gtctcagcagttgacagtcagcgcagcccagaaaccccggccatccagcgggaatctattgcagtccccagagccaagttatggccccgcccgtccacggcaacagagcctcagcaagga

SEQ ID NO: 36725 - DNA, 120 bp, synthetic construct
  source 1..120: mol_type = other DNA
agaaggagatggggggtggggttgaaacagagtctgtggcctgaagttacaatcttcttgcctccttttggccattaaacaaatgtgtatagagggcctgctatgtgccatgtgctatgc

SEQ ID NO: 36726 - DNA, 120 bp, synthetic construct; identical to SEQ ID NO: 10083
  source 1..120: mol_type = other DNA

SEQ ID NO: 36727 - DNA, 120 bp, synthetic construct
  source 1..120: mol_type = other DNA
tgagcggacagtggcctgggtctccaacatgcctcacctgtcggctgacatcgagagtgcccacatcgagcgggaagagtacaagctcaaggagtactcaaaatcgatggatgagagccg

SEQ ID NO: 36728 - DNA, 120 bp, synthetic construct
  source 1..120: mol_type = other DNA
ggcaaagacctgatcacctcttgagaagccttccgtccatctggggagaccagatacacacagttgttaaaagtcactttcaactctattttgtaggttatatatatcatagactatctg

SEQ ID NO: 36729 - DNA, 120 bp, synthetic construct
  source 1..120: mol_type = other DNA
ggaaatgttactttactggcagtaggagctaataaattggatggggatggagggggttgcagctatattacaagtgatgtctggcctacccagtcactgtcccatgggcataagtgacag

SEQ ID NO: 36730 - DNA, 120 bp, synthetic construct; identical to SEQ ID NO: 10084
  source 1..120: mol_type = other DNA

SEQ ID NO: 36731 - DNA, 120 bp, synthetic construct
  source 1..120: mol_type = other DNA
caaggcagccaccgtaggaagttaattcacatctctcctctgcatgtagaagggttggtgatatatgtatgtatcctcttcagagaatgaggaaatagtcttttgaatcatttttttttc

SEQ ID NO: 36732 - DNA, 120 bp, synthetic construct
  source 1..120: mol_type = other DNA
caggaactgaatttttagatctatttaattttaattttgtaatttttttgagacagggtcttgctctgtcacccaggctggagtgcagtggtgcaaacatggctcgaggcaacctccgcc

SEQ ID NO: 36733 - DNA, 120 bp, synthetic construct
  source 1..120: mol_type = other DNA
ttttttcttttcttttttttttttttttttttttgtagagacggggttttgccatgttgcccaggctggtctagaacttgtgagctcaagtgatctacctgcctcagccttccaaagtgc

SEQ ID NO: 36734 - DNA, 120 bp, synthetic construct
  source 1..120: mol_type = other DNA
agcacagctgtagactctagagccaatagggcagataaaatgactcttctgagctcttccagctctggaattcctagattctcagcctagaattcacttgtagacctcctatccttggca

SEQ ID NO: 36735 - DNA, 120 bp, synthetic construct; identical to SEQ ID NO: 10085
  source 1..120: mol_type = other DNA

SEQ ID NO: 36736 - DNA, 120 bp, synthetic construct
  source 1..120: mol_type = other DNA
tgtgcttggcagacagggatggaggctgggtggtgggcttggggtggggcgcccctcatagtgcggggtcgtgtgcccggcgggcaggtgaaggagtacgaggaggagattcactcactg

SEQ ID NO: 36737 - DNA, 120 bp, synthetic construct
  source 1..120: mol_type = other DNA
aagaggctaaggcagcagcaggcagagaaggattcccagatcaagagcatcattggcaggtgaggggcggcctggggagggggttgtgagggagagcctgaggctggagagagcaagtgg

SEQ ID NO: 36738 - DNA, 120 bp, synthetic construct
  source 1..120: mol_type = other DNA
ttagtgcattaaatatctctttaccaaaccctgacctctcttctgatagagtagcttcggaagcccttggaaaatgtacctgttcctgtccaaccatcactgcatttgcatttaccctag

SEQ ID NO: 36739 - DNA, 120 bp, synthetic construct; identical to SEQ ID NO: 10086
  source 1..120: mol_type = other DNA

SEQ ID NO: 36740 - DNA, 120 bp, synthetic construct
  source 1..120: mol_type = other DNA
gatttaattagaagaaaagggcttcttgaaatattttttgaaaaccactgctctaattgatatcctttatgataaatcacctcgaggatcttcacagtgaggtgacatgggggatgcaga

SEQ ID NO: 36741 - DNA, 120 bp, synthetic construct
  source 1..120: mol_type = other DNA
gggaggtgtaagggttcctgggaggaaggtggagagcatgatcctgaggaacagggagtcttgcatcacggcaatggagggactctgattctaagggataaggatgcctgaggtttttcc

SEQ ID NO: 36742 - DNA, 120 bp, synthetic construct
  source 1..120: mol_type = other DNA
ggctgagccgctgccagaacccaagaagaggctgctcgacgctcaggtggaaattacaatgtcatttatcttctccgtgtcccatccccatccatcccactgtctttcgtgcactcacta

SEQ ID NO: 36743 - DNA, 120 bp, synthetic construct; identical to SEQ ID NO: 10087
  source 1..120: mol_type = other DNA

SEQ ID NO: 36744 - DNA, 120 bp, synthetic construct
  source 1..120: mol_type = other DNA
tgtagtttctccaggccctggccggtaccctgaaaacttggggacccatcacctctgttctcttggctccctaattttcctgtctccttggcagctcctgcatagcttcctcttcctgac

SEQ ID NO: 36745 - DNA, 120 bp, synthetic construct
  source 1..120: mol_type = other DNA
agcctctcttctcacaagccagcttctaggacctcccttctgcacccttaccccttgctttcccaaaattctgctcattttcctacccatactcctctttgctctgactgctaggctccc

SEQ ID NO: 36746 - DNA, 120 bp, synthetic construct
  source 1..120: mol_type = other DNA
ggtgactccggaccactgcaggttggtcgtgaagcccactccctccaacacctccggagcctctcccctctcactgctgccctccacacccagagaacctccacagactccagccctccg

SEQ ID NO: 36747 - DNA, 120 bp, synthetic construct; identical to SEQ ID NO: 10088
  source 1..120: mol_type = other DNA

SEQ ID NO: 36748 - DNA, 120 bp, synthetic construct
  source 1..120: mol_type = other DNA
ctgactgcagcaggtaggttgggtttccctcttccttccctaatcttggttctctaccctcctttccactcctcacctgattctctctcttcctcctccttatatctgtgaggcagaagg

SEQ ID NO: 36749 - DNA, 120 bp, synthetic construct
  source 1..120: mol_type = other DNA
aaaaatgctattgagatgtcctgacattaggcagggtggatggaacaagaaggagcaagaaaggaacctcaggcagatgttaggacatggacttgatcatgtggcctgggagtttagaaa

SEQ ID NO: 36750 - DNA, 120 bp, synthetic construct
  source 1..120: mol_type = other DNA
ctgatgccactcactccccctctcctgccatcgagtggccttgccggacacatcaccctacctaaaaagccagtaaatgagaacctgtcagctatagccatcatttctgagatgcgattt

SEQ ID NO: 36751 - DNA, 120 bp, synthetic construct
  source 1..120: mol_type = other DNA
gtagctggtgatctataaagatgctaaaaggcaccaggggactttgccatttaaaggactcctgcagtgaattcttttgtaaaatgaataatggcaccctaatttatccactttctaaat

SEQ ID NO: 36752 - DNA, 120 bp, synthetic construct; identical to SEQ ID NO: 10089
  source 1..120: mol_type = other DNA

SEQ ID NO: 36753 - DNA, 120 bp, synthetic construct
  source 1..120: mol_type = other DNA
acttggaaggttttgtatcctaaggtcagacatagctatattaccaagcctaaatgccatgtggcccaggaaataatttggacatttgttctaaaccacttgtggtaggtattggtctct

SEQ ID NO: 36754 - DNA, 120 bp, synthetic construct
  source 1..120: mol_type = other DNA
acacacggacatgtacagtacaaaccccagataattacaacagccaaagagagaaggaagtgaatttcccaaccagaagcgtagggaaattcagatggctttcttttctcccagcagagg

SEQ ID NO: 36755 - DNA, 120 bp, synthetic construct
  source 1..120: mol_type = other DNA
gggagaaggactgaaaagaagatgggagtggaaaagaataaagccagtttctgcttcccagggatgcagagattggggcatgctgtgtctgcagaagctcctagtcatttccgccataat

SEQ ID NO: 36756 - DNA, 120 bp, synthetic construct; identical to SEQ ID NO: 10090
  source 1..120: mol_type = other DNA

SEQ ID NO: 36757 - DNA, 120 bp, synthetic construct
  source 1..120: mol_type = other DNA
aatgcaagctcagtttttcttcagattatgaagaaattccaaatccacaggggtttggattaatgaggttttgctgtactgcctccccttattcctcaacatgaagttcccacctcggat

SEQ ID NO: 36758 - DNA, 120 bp, synthetic construct
  source 1..120: mol_type = other DNA
tttcctggtgtgacactctgggttaaaggcttgaaggcccctgttaggagtctaggggtgagattctcttctctctgatcccagaggacgttaacttctactgcaggtgagaaacaaaat

SEQ ID NO: 36759 - DNA, 120 bp, synthetic construct
  source 1..120: mol_type = other DNA
aagtccgcgctctcctttttggtgtcttgcaggagaggcagcttccccccttgggtccaacaaacccgcgtgtgacgctggccccaccgtggaatggcctggcccccccagccccaccac

SEQ ID NO: 36760 - DNA, 120 bp, synthetic construct; identical to SEQ ID NO: 10091
  source 1..120: mol_type = other DNA

SEQ ID NO: 36761 - DNA, 120 bp, synthetic construct
  source 1..120: mol_type = other DNA
cctctgcctcatcgttcccctgagcactgggggacagaccctcacccccaccctgggggtgtggcacctccaaactttcaacttcagggtgatttttttagcagtaaccagagctgacaa

SEQ ID NO: 36762 - DNA, 120 bp, synthetic construct
  source 1..120: mol_type = other DNA
cacgcacaaactccttctccttctaccactcttaaatttactccctccccacccagaacccagatggggtggagggggccaccggggcagggagggggcggcaaggggggaatgggagtt

SEQ ID NO: 36763 - DNA, 120 bp, synthetic construct
  source 1..120: mol_type = other DNA
tcagggtttaggagggtgtgtatgttgggaggacaggctagttgatctgtcctactctgacacacagtcccctctgccccttccttctctcttcttggtctctactcccagggggagggg

SEQ ID NO: 36764 - DNA, 120 bp, synthetic construct; identical to SEQ ID NO: 10092
  source 1..120: mol_type = other DNA

SEQ ID NO: 36765 - DNA, 120 bp, synthetic construct
  source 1..120: mol_type = other DNA
agactctcctagactctactcctctttcttttgtatggacagttccccttcagtcccatccccctacacatacacccagccggggccaaatttatacttatataaaagttgtaaatatgt

SEQ ID NO: 36766 - DNA, 120 bp, synthetic construct
  source 1..120: mol_type = other DNA
tgttgtaattatctggggtttgtactgtacatatccggggtgtgtgtgtgtgggctgggggcaacccttctgtacagagcttcctggccccctccccccccgcccctctgcttccctccc

SEQ ID NO: 36767 - DNA, 120 bp, synthetic construct
  source 1..120: mol_type = other DNA
ccagccttatctatcccccctcactgtccccttttctccactcccagccccatttcctttttttctggagtgtgtggtgaaacagaaaaaaacatgtttaataaacggagattgttcttt

SEQ ID NO: 36768 - DNA, 120 bp, synthetic construct
  source 1..120: mol_type = other DNA
tctcctcatagaatgtcactctcccctcccaatgagattttttatattttagagcaggagttttgcaccggccaaacttctccaatctaactctcccctcaccactgtgtcacttagtcc

SEQ ID NO: 36769 - DNA, 120 bp, synthetic construct; identical to SEQ ID NO: 10093
  source 1..120: mol_type = other DNA

SEQ ID NO: 36770 - DNA, 120 bp, synthetic construct
  source 1..120: mol_type = other DNA
tctcgcccctctcaggacctaccgggggcgggtgctacacttaatcaccgggaaacgcagctttccggggcggctgacggcccaccccctccgaccgggctgttctctcccgggccctgc

SEQ ID NO: 36771 - DNA, 120 bp, synthetic construct
  source 1..120: mol_type = other DNA
acgaggcttgtaggctgccgttcctcgattggctacggctctagctccgcccgccgcacttggcgacggtgtccggcggggaggcggcggcttccggtctgggacggagctgtagcggca

SEQ ID NO: 36772 - DNA, 120 bp, synthetic construct
  source 1..120: mol_type = other DNA
gcactgtgaggcggaacggagcggcggggcaggagctgttctgggcaggtgaaggcaggctggtggctgaaggacctccttcttatcttccacaggggctggaagttaaaacccctgttg

SEQ ID NO: 36773 - DNA, 120 bp, synthetic construct; identical to SEQ ID NO: 10094
  source 1..120: mol_type = other DNA

SEQ ID NO: 36774 - DNA, 120 bp, synthetic construct
  source 1..120: mol_type = other DNA
atctctgaaccgccacaggctagagggaaagttctgtgatgtgtccctcctggtgcagggccgggaacttagggctcataaagcagtgttagctgctgcctctccttacttccatgacaa

SEQ ID NO: 36775 - DNA, 120 bp, synthetic construct
  source 1..120: mol_type = other DNA
tgctcatctccttgtggccagtggccttcaaatgtggcaggtagtagatcagtgctcagaaattcttagagaattagaaacttcaggtggtggaatttcagcccgtggaggaaactccta

SEQ ID NO: 36776 - DNA, 120 bp, synthetic construct
  source 1..120: mol_type = other DNA
gggaggggagggaagtgaactgggagaagtgctgcaaattcaggtggaagaagaagaggaggaggaggaagatgatgatgatgaggaccaggggtcagccacactctctcagactcctca

SEQ ID NO: 36777 - DNA, 120 bp, synthetic construct; identical to SEQ ID NO: 10095
  source 1..120: mol_type = other DNA

SEQ ID NO: 36778 - DNA, 120 bp, synthetic construct
  source 1..120: mol_type = other DNA
ggaaaccagtggatcttcatgggaatgaaatcctgtcagggggtggaggacctgggggagcaggccaggccgtgcatgggcctgtgaagctaggggggacaccccctgcagatggaaaac

SEQ ID NO: 36779 - DNA, 120 bp, synthetic construct
  source 1..120: mol_type = other DNA
ccttttggctgtggcatctgcaacaagcgcttcaagctgaagcaccatctgacagagcacatgaagacccatgctggagccctgcatgcctgtccccactgtggccgtcggttccgagtc

SEQ ID NO: 36780 - DNA, 120 bp, synthetic construct
  source 1..120: mol_type = other DNA
gaggctatacactagcttctagaacaagataaccactgctgctgatggatacttttccctcactgccatggcacaccagtcatggatcttgtaatcatgccaagagaatagatacattat

SEQ ID NO: 36781 - DNA, 120 bp, synthetic construct
  source 1..120: mol_type = other DNA
ctagccaaccctgcaggaaagtggtttataggccattcatacttaagttgatcacttgcccatggtggacatttttgtggtggtgatgtccattaaggaaaccagattttcaattattta

SEQ ID NO: 36782 - DNA, 120 bp, synthetic construct; identical to SEQ ID NO: 10096
  source 1..120: mol_type = other DNA

SEQ ID NO: 36783 - DNA, 120 bp, synthetic construct
  source 1..120: mol_type = other DNA
tctttaatagagggtcttccctcaacagcctgtgcctctggtctacctttgaccaccactgataactaatatattggtcacaatgactggaatgtgactagtgatctcaggagatggcac

SEQ ID NO: 36784 - DNA, 120 bp, synthetic construct
  source 1..120: mol_type = other DNA
tacctcttcctttcccatcccacccacatatgatagacagcccctctgttgagatatggaggggacagatactggaatcgggggtgggacttgcagttacttaaaattttttaataaact

SEQ ID NO: 36785 - DNA, 120 bp, synthetic construct
  source 1..120: mol_type = other DNA
aaggaatgggatggtatcacacccattccttggatggtgccaagaacactcttctggacttaggccctgacctgctacttaataaccttcagtaggttgccttactgttttgttttgttt

SEQ ID NO: 36786 - DNA, 120 bp, synthetic construct
  source 1..120: mol_type = other DNA
ctcccgggtccaagtgattctcctgcctcagcctcctgagtagctggggttatcaggcatccgccaccatgcctggctaagttttttgtatttttagtagagacggggtttcaccgtgtt

SEQ ID NO: 36787 - DNA, 120 bp, synthetic construct; identical to SEQ ID NO: 10097
  source 1..120: mol_type = other DNA

SEQ ID NO: 36788 - DNA, 120 bp, synthetic construct
  source 1..120: mol_type = other DNA
aagcctcccaagtagctgggactacaggtgtgtgccaccacgcctggctaattttgtatttttaggagagatggggttttagcatgttggccagtctggtcttgaactcctgacctcagg

SEQ ID NO: 36789 - DNA, 120 bp, synthetic construct
  source 1..120: mol_type = other DNA
aagctcaagtgatacttctgcctcagccgcccaaagtgctgggattccaggcatgagccaccgcacctggctggttcacatgatctttataatattccccaacttcctgtgttctctgtg

SEQ ID NO: 36790 - DNA, 120 bp, synthetic construct
  source 1..120: mol_type = other DNA
aggtattaccaaagatagacaagccattacaacgtgataggataagttgatgatagtgggcagtacaaaccacttgaatggcacaaagaaagctaagtaaagaccttctctaggtcagca

SEQ ID NO: 36791 - DNA, 120 bp, synthetic construct; identical to SEQ ID NO: 10098
  source 1..120: mol_type = other DNA

SEQ ID NO: 36792 - DNA, 120 bp, synthetic construct
  source 1..120: mol_type = other DNA
gctataatcccatccatcagctattcttgacacatattctatgggtggctatatccattggccaagatcctttggcttcaagcactggaagctggctctggctaacctcaccagacaagg

SEQ ID NO: 36793 - DNA, 120 bp, synthetic construct
  source 1..120: mol_type = other DNA
cagtttgggatgatgactcattcttgtttcttgtgtcactcatctcaagataaaatttcccagggaaagaactctaagcctcatgaccaccctctggtcagagcaccttgatcatatagt

SEQ ID NO: 36794 - DNA, 120 bp, synthetic construct
  source 1..120: mol_type = other DNA
tgttacacattttgggatcccaaagcctcaggtatacttgctacttagtgggtgttcaagatacgctgaagctgcccaacttccacctctgcccgctggacttaaggcagaattgtttct

SEQ ID NO: 36795 - DNA, 120 bp, synthetic construct; identical to SEQ ID NO: 10099
  source 1..120: mol_type = other DNA

SEQ ID NO: 36796 - DNA, 120 bp, synthetic construct
  source 1..120: mol_type = other DNA
ttgcatgcagtagtcactcaataagtgttagctgttatcatgagtgagaccagtagtcatcggttccccacccctttactgcgatcagttctcccagagagagatcacactcataataaa

SEQ ID NO: 36797 - DNA, 120 bp, synthetic construct
  source 1..120: mol_type = other DNA
caaatcaaaaccacaatgagataccatctcacaccagttagaatggcaatcattaaaaagtcaggaaacaacaggtgctggagaggatgtggagaaataggaacacttttacactgttgg

SEQ ID NO: 36798 - DNA, 120 bp, synthetic construct
  source 1..120: mol_type = other DNA
taagtcatgctgctataaagacacatgcacacgtatgtttattgcggcactattcacgatagcaaagacttggaaccaatccaaatgtccaacaactgtagattggattaagaaaatgtg

SEQ ID NO: 36799 - DNA, 120 bp, synthetic construct; identical to SEQ ID NO: 10100
  source 1..120: mol_type = other DNA

SEQ ID NO: 36800 - DNA, 120 bp, synthetic construct
  source 1..120: mol_type = other DNA
ataataataaaatttttaaaaaaaaggaaattgcaagatagggggaaataagagctatcagagcacatagcagaggtcttagcctggcctaataattgggagatttctagatgaaatgga

SEQ ID NO: 36801 - DNA, 120 bp, synthetic construct
  source 1..120: mol_type = other DNA
gggccctttatgccctcttccaaatttacacactccggggtgattttttttccccacgcagaactcatgttaaaattcctgggtgactttatccactcttctgagttgaaccatttaaat

SEQ ID NO: 36802 - DNA, 120 bp, synthetic construct
  source 1..120: mol_type = other DNA
cttccacctcctggattcaagtgattctcctgcctcagcctcccgaatagctgggattataggcacttgccaccatgcccagctaatttttgtatttttagtagagacagagtttcacca

SEQ ID NO: 36803 - DNA, 120 bp, synthetic construct; identical to SEQ ID NO: 10101
  source 1..120: mol_type = other DNA

SEQ ID NO: 36804 - DNA, 120 bp, synthetic construct
  source 1..120: mol_type = other DNA
gtttggtaatggttccatcatcaacccaaatgcccaaggttgaaacctgggagggttccttgccagcagctctctcacctcccatacctgtcctaccaaagctatctcctaaatatttca

SEQ ID NO: 36805 - DNA, 120 bp, synthetic construct
  source 1..120: mol_type = other DNA
ttcaccctatgcactatgaccagagtaatctttctaaagcaaaaattaatgtttcaccactctccagcttaaacctttcattggcttcctcttgctctttcatgaggtccaagtgatctg

SEQ ID NO: 36806 - DNA, 120 bp, synthetic construct
  source 1..120: mol_type = other DNA
atctagaaatcttgaccatggggccagggtaggacctctgctatgtgctctgatagctcttaattccccatatttttcaatttcctttattcaataagtacttgcatttggaagggggcg

SEQ ID NO: 36807 - DNA, 120 bp, synthetic construct; identical to SEQ ID NO: 10102
  source 1..120: mol_type = other DNA

SEQ ID NO: 36808 - DNA, 120 bp, synthetic construct
  source 1..120: mol_type = other DNA
ccaggttcaagtgattcttctgcctcagcctcctgagtagctgggattacaggcatgtgccaccatgcccagctaattttcgtatttttagtagagacagggtttcaccattttggccag

SEQ ID NO: 36809 - DNA, 120 bp, synthetic construct
  source 1..120: mol_type = other DNA
ctgccatgctccccaggctgttctcgaactcctgggctcctcaggcaatctgcctgctttggcatcccaaagtgctgggattataaacgtgagccactatgcctgggcagtgcctattct

SEQ ID NO: 36810 - DNA, 120 bp, synthetic construct
  source 1..120: mol_type = other DNA
tgcaaagaaaaaggagaagatggtttactgaagtgtttaacagatgcccaagccaagaaagagaaaaagaatggtttgcttaacaaggagaccagtggacctagagctacagggaaagag

SEQ ID NO: 36811 - DNA, 120 bp, synthetic construct
  source 1..120: mol_type = other DNA
ttaataatcttttaacattttagagagattccttctagctagagtgaatattggctcattagggggcaagagtggaagtggggagaccaatcagaccattttagtagtgcagacaagaga

SEQ ID NO: 36812 - DNA, 120 bp, synthetic construct; identical to SEQ ID NO: 10103
  source 1..120: mol_type = other DNA

SEQ ID NO: 36813 - DNA, 120 bp, synthetic construct
  source 1..120: mol_type = other DNA
agctgggtgtggtggtgggtgcctgtaatcccagctactcgggaggctgaggcaggagaatcacttgaacccaggaggtgggggttgcagtgagccacgcaccactgcactccagcctgg

SEQ ID NO: 36814 - DNA, 120 bp, synthetic construct
  source 1..120: mol_type = other DNA
gatcaaatagtaaagtttaggctttgcatgccaagaaacaaaattaaggatattatataagtactttaaaaataaaacaaatttgcataaattgtcattgacaaatttgttttataaaga

SEQ ID NO: 36815 - DNA, 120 bp, synthetic construct
  source 1..120: mol_type = other DNA
atggtgagaagggtgagtatgctttggcaaaataaaaaataataataattgaatgcaatttttttgtaatacagatttgctgattaattggggttcaaatttagtgttccccatcatcaa

SEQ ID NO: 36816 - DNA, 120 bp, synthetic construct
  source 1..120: mol_type = other DNA
tcaagagattctcctgtctcagcctcctgagtagctgggactacaggcgcatgccaccacgcctggctaatttttgtatttatattagagatggggttttgccattttggccaggctggt

SEQ ID NO: 36817 - DNA, 120 bp, synthetic construct; identical to SEQ ID NO: 10104
  source 1..120: mol_type = other DNA

SEQ ID NO: 36818 - DNA, 120 bp, synthetic construct
  source 1..120: mol_type = other DNA
gccagtctttcccgtgctattctcatgatagtgaataagtctcacaagatctgatgggtttatcaggggtttctgcttttgcttattcctcattttctcttgccaccaccatgtaagaag

SEQ ID NO: 36819 - DNA, 120 bp, synthetic construct
  source 1..120: mol_type = other DNA
taatatagtaaatcggtaacagtagagtgagatgctgctgaaaagatacccgaaaatgtggaagtgactttggaactggataacaggcagaggttggaacagtttggagggctcagaaga

SEQ ID NO: 36820 - DNA, 120 bp, synthetic construct
  source 1..120: mol_type = other DNA
ggaacttgttgggaactggagcaaaggttattcttgttatgttttagcaaagagactggtggcattttgcccctgccccagagatttgtggaactttaaacttgagagagatgatttagg

SEQ ID NO: 36821 - DNA, 120 bp, synthetic construct; identical to SEQ ID NO: 10105
  source 1..120: mol_type = other DNA

SEQ ID NO: 36822 - DNA, 120 bp, synthetic construct
  source 1..120: mol_type = other DNA
cctgtgtcccagcaactccagccatgactgaaaggggccaatgtacagcttgggctgtggcttcagagggtggaagccccaagccttggtagcttccatgtggtgttgagcctgcagata

SEQ ID NO: 36823 - DNA, 120 bp, synthetic construct
  source 1..120: mol_type = other DNA
ctagggtaatgcggaagggaaatgtggggtcagagcccccacacaaagtccctagtggggcattgcctagtggagctgtgagaagagggcactgtcctccaaactccagaatggtagatt

SEQ ID NO: 36824 - DNA, 120 bp, synthetic construct
  source 1..120: mol_type = other DNA
ggaacccacctcatgcatcagcgtgacctggatgtgagacctggagtcaaaggagatcattttggagctttaaaatttcactgtcctgctggatttctgacttgcatgggccctgtaacc

SEQ ID NO: 36825 - DNA, 120 bp, synthetic construct
  source 1..120: mol_type = other DNA
acttgccttgtctcagatgagactttggactgtggacttatgggttaatgctaaaatgagttaagactgggggactgttgggaaggcataattggttttgaaatacgaggacatgagatt

SEQ ID NO: 36826 - DNA, 120 bp, synthetic construct; identical to SEQ ID NO: 10106
  source 1..120: mol_type = other DNA

SEQ ID NO: 36827 - DNA, 120 bp, synthetic construct
  source 1..120: mol_type = other DNA
gaaaacagactaatacacatacttttcttgatctttgccttttagcatgtcattacattgtaggttaatcacctccaattgaaggttaggtagaagttcctcaattgcacagttaaatga

SEQ ID NO: 36828 - DNA, 120 bp, synthetic construct
  source 1..120: mol_type = other DNA
tgcagcctcgaccacctgagttcaaggaatcctcttgcctcagcctcccaagtagctgggactgtaggtatgtgccaccacccacagctaagttttgtattttttgtagagacagggttt

SEQ ID NO: 36829 - DNA, 120 bp, synthetic construct
  source 1..120: mol_type = other DNA
ttataggcatgagcccccaagcactgcctgaaatatagaaatttccttgcacttgcactgaggaccaaaaaacctgctagaactgtagtttgagctcagaaaatataactgctgcaaatt

SEQ ID NO: 36830 - DNA, 120 bp, synthetic construct; identical to SEQ ID NO: 10107
  source 1..120: mol_type = other DNA

SEQ ID NO: 36831 - DNA, 120 bp, synthetic construct
  source 1..120: mol_type = other DNA
atttcatgaacctgggaggtggaggttgtagtgagctgagattgcaccactgtactccagcgtgggcaacagagagagacaccgtctgccaaaaaaaaaaaaaaaagatccatgcagcaa

SEQ ID NO: 36832 - DNA, 120 bp, synthetic construct
  source 1..120: mol_type = other DNA
agtgggagctaaacaatgagaacacatataccaagaggggaacaacagacactgaggcctacttgaatgtggagggtgggaggaaggagaggatcagaaaaaatacctagcaggtactac

SEQ ID NO: 36833 - DNA, 120 bp, synthetic construct
  source 1..120: mol_type = other DNA
tgtacccctaaacctaaaataaaagtttttaaaaaagatttattttaaggaattggctcacacaactgtgggggctgacaagtctgaaatttgtagggcaggtcagcaggatggaaactc

SEQ ID NO: 36834 - DNA, 120 bp, synthetic construct
  source 1..120: mol_type = other DNA
ctactttacttagagtcagttgattataagtgttaattatatctacaagatacccttacagcaatgtctagactagtgtttgaacaaagaaccggacaccatagcctatccaagatgaca

SEQ ID NO: 36835 - DNA, 120 bp, synthetic construct; identical to SEQ ID NO: 10108
  source 1..120: mol_type = other DNA

SEQ ID NO: 36836 - DNA, 120 bp, synthetic construct
  source 1..120: mol_type = other DNA
tgtgtctcttcttataatgatactaatctcattcgcaaagctccaccctcatgacctaattacttcccaaaggccacaccaccaaataccatcatattgggattaggggttagcatatga

SEQ ID NO: 36837 - DNA, 120 bp, synthetic construct
  source 1..120: mol_type = other DNA
acagtgtacctactgatggttaatacagtgaataaccacaggctttaaacaccttacattttcatatgctttgtgaatatgcctcactacaccgtttcctttaccaccatcagttgtagt

SEQ ID NO: 36838 - DNA, 120 bp, synthetic construct
  source 1..120: mol_type = other DNA
tccaaacttcacatcaactccttgaataaataacagctaagcagtgtcagtagcatctgtcccctcatcaagagccaagggaaaatcacatttaatcattggccttgttttttagttgat

SEQ ID NO: 36839 - DNA, 120 bp, synthetic construct; identical to SEQ ID NO: 10109
  source 1..120: mol_type = other DNA

SEQ ID NO: 36840 - DNA, 120 bp, synthetic construct
  source 1..120: mol_type = other DNA
taatgtcaatgtatatattctatttttttttgagacggagtctcgctctgtcgcctaggctggagtacagtgatgctatctcagctcactgcaagctctgcctcctgggttcacgccatt

SEQ ID NO: 36841 - DNA, 120 bp, synthetic construct
  source 1..120: mol_type = other DNA
cctgacctcatgatctgcctaagtcagcctcccaaagtgctgggattacaggtgtgagccaccgcgcccagccatgtcaatgtatatattcttattcttttagcacaactatagtttcat

SEQ ID NO: 36842 - DNA, 120 bp, synthetic construct
  source 1..120: mol_type = other DNA
cctcagcctcccaagtagctgggattacaggcacatgccaccgcacctggctaatttttgtatttttagtagagacaaggtttcaccatgttggccaggctggtctcaaactcctgacct

SEQ ID NO: 36843 - DNA, 120 bp, synthetic construct; identical to SEQ ID NO: 10110
  source 1..120: mol_type = other DNA

SEQ ID NO: 36844 - DNA, 120 bp, synthetic construct
  source 1..120: mol_type = other DNA
gtgagttgtgatcaggccactgcactgcagcctgggcagagagagaatccgtctcaaaaaacaaaaacaaaccaataaaaaaaccactaaagaaaccaataaaaaaaccactaaagaact

SEQ ID NO: 36845 - DNA, 120 bp, synthetic construct
  source 1..120: mol_type = other DNA
ggcagggaaacacattaaatcacaccaaagtggtacaatcaacaaaatcgagactgtaagaaactctaaaggacaaacaaccatttcttcacacacacacaaaaaattgcaagggaaaaa

SEQ ID NO: 36846 - DNA, 120 bp, synthetic construct
  source 1..120: mol_type = other DNA
tgtaaaagaggcctggcacagtggctcactcttgtaatcccaacactttaggaggataagcaagaggatgacttgagcccaggagttcgaggctacagtgagttatgatagcaccactgc

SEQ ID NO: 36847 - DNA, 120 bp, synthetic construct; identical to SEQ ID NO: 10111
  source 1..120: mol_type = other DNA

SEQ ID NO: 36848 - DNA, 120 bp, synthetic construct
  source 1..120: mol_type = other DNA
cccgagtagctgggattataggcatgcaccaccatgcccggccaatttttatatttttagtagagatggggtttctgcatgttggtcaggctggtttcgaactcccgacctcaggtgatc

SEQ ID NO: 36849 - DNA, 120 bp, synthetic construct
  source 1..120: mol_type = other DNA
ggctcacgcctgtaatcccagcactttgggaggctgaggcgggcggatcacaaggtcaggagatcgagaccatcctggctaacacagtgaaaccccgtctctactaaaaatacaaaaatt

SEQ ID NO: 36850 - DNA, 120 bp, synthetic construct
  source 1..120: mol_type = other DNA
ctgggtgacagagcgagactccgtctcaaaaaaaaaaaaaaaaatttcagttgtgggctgggcgcggcagctcacgcctgtaatcccagcactttgggaggctgaggcgggaggatcacg

SEQ ID NO: 36851 - DNA, 120 bp, synthetic construct; identical to SEQ ID NO: 10112
  source 1..120: mol_type = other DNA

SEQ ID NO: 36852 - DNA, 120 bp, synthetic construct
  source 1..120: mol_type = other DNA
aaaaaggcggggggtgggcttgtcttttgacggcattggctatttatagataataaaaaattcatggttatgggttgaataaaatgttaaatgcatacatatacatgctctagataagtg

SEQ ID NO: 36853 - DNA, 120 bp, synthetic construct
  source 1..120: mol_type = other DNA
tctggtccaagttaataaataaaactattcttatttgcttaaccttaaaataatcagaggctccacatattgatgtaaaggatctccagtatatattgttgagtgaaaaaagtaaagtgc

SEQ ID NO: 36854 - DNA, 120 bp, synthetic construct
  source 1..120: mol_type = other DNA
aaaaacgggagaggagttgaggaggtaaaaacagaagcaagactccatgtgctttgagactgctccttgtatactttgagtcaggtaatgccattacctaaccccaaaataaaagaggcc

SEQ ID NO: 36855 - DNA, 120 bp, synthetic construct; identical to SEQ ID NO: 10113
  source 1..120: mol_type = other DNA

SEQ ID NO: 36856 - DNA, 120 bp, synthetic construct
  source 1..120: mol_type = other DNA
tggcgcaatctcggctcactataacctctgcctcccatgttcaagcaattctcctgcctcagcctcctgagtagctgggactacaggcatgtgccaccacacctagctaatacttgtatt

SEQ ID NO: 36857 - DNA, 120 bp, synthetic construct
  source 1..120: mol_type = other DNA
caataggatgcattttaaggataaaaaagctgaaactaaaattttaaactttagacccttacatattaaactctcctaaattttaaactctctcagaagtaatattgtttgtagtattat

SEQ ID NO: 36858 - DNA, 120 bp, synthetic construct
  source 1..120: mol_type = other DNA
gtttgtttgttttttgtttttgttttgttttgttttttgagacggagtctccttgtcacccaggctggagtgcagtggtgcgatcttggctcactgcaaactccgccttctgggttcaag

SEQ ID NO: 36859 - DNA, 120 bp, synthetic construct; identical to SEQ ID NO: 10114
  source 1..120: mol_type = other DNA

SEQ ID NO: 36860 - DNA, 120 bp, synthetic construct
  source 1..120: mol_type = other DNA
ccagcattttgggaggccgaggtgggcagatcatgaggtcaggaaatcaagaccatcctggctaacatggtgaaaccctatctctactaaaaatacaaaaacaaaattagccgggtgtgg

SEQ ID NO: 36861 - DNA, 120 bp, synthetic construct
  source 1..120: mol_type = other DNA
gcgagactctgtctcaaaaacacagcaacaacaacaacaaaatatatatatatattttttctggccaggagctgtggctcacgcctataattccagcactttgggaggctaagcgaggca

SEQ ID NO: 36862 - DNA, 120 bp, synthetic construct
  source 1..120: mol_type = other DNA
ctgggaggctgaggtaggaggcgtgaacccaggaagttgaggctgcagtgaaccaagatcacactaccacactccagcctaggagacagagtgagaccttgtctcaaaaaatatataaaa

SEQ ID NO: 36863 - DNA, 120 bp, synthetic construct; identical to SEQ ID NO: 10115
  source 1..120: mol_type = other DNA

SEQ ID NO: 36864 - DNA, 120 bp, synthetic construct
  source 1..120: mol_type = other DNA
aacatggtgaaaccccatctctactaaaaattcaaaaaacctagccaggtgtggtggtgcgcacctgtagtccccagctactcggaaggctgaggcaggagaatcgcttggacccgggag

SEQ ID NO: 36865 - DNA, 120 bp, synthetic construct
  source 1..120: mol_type = other DNA
ataatgtcacgtcaaaacgactcaggagcatatgtgaaggtgtccccactgaacaatgttgtgacaattggacaactaaaagtataatgataattttggattgaatatactgaatcaatg

SEQ ID NO: 36866 - DNA, 120 bp, synthetic construct
  source 1..120: mol_type = other DNA
tttaggccgggtgcagtgactcatgcctgtaatcgcagcactttgcgagccctagacaggcagattgcttgagctcaggagttcgagaccagactgggcaacatggctaaaccccatgtg

SEQ ID NO: 36867 - DNA, 120 bp, synthetic construct; identical to SEQ ID NO: 10116
  source 1..120: mol_type = other DNA

SEQ ID NO: 36868 - DNA, 120 bp, synthetic construct
  source 1..120: mol_type = other DNA
gatctcagctcactgcaacctccgcctcccaggctcaagtgattcttgtgcctcaacttcctgagtagctgggattacagaagtgcgccaccacacctggccaatctgttttgtattttt

SEQ ID NO: 36869 - DNA, 120 bp, synthetic construct
  source 1..120: mol_type = other DNA
ttttttacttttttaaacttaagtggatgtgtacacatctagttaatacatgtgaatgaaataaaagaaatataattttacaaactccaataaattcgtgattcaggtaaggattatcat

SEQ ID NO: 36870 - DNA, 120 bp, synthetic construct
  source 1..120: mol_type = other DNA
atgtcaccaccctaatctaggtaggggtcaactttagcataactaatggtcgatcatatttgccttctaatggaatataacctaaaatacacatcaatatggtgactgtatgacttcatc

SEQ ID NO: 36871 - DNA, 120 bp, synthetic construct; identical to SEQ ID NO: 10117
  source 1..120: mol_type = other DNA

SEQ ID NO: 36872 - DNA, 120 bp, synthetic construct
  source 1..120: mol_type = other DNA
taacacttagcaataataaaatgaagcaagttttttgacttgcttttaaaagcaagttggttagtgaagagtgaagtgagtgaggtttagagatgagaagggatatgtagatatggaggc

SEQ ID NO: 36873 - DNA, 120 bp, synthetic construct
  source 1..120: mol_type = other DNA
ggggttcatccatattcagatccaagaagctgacggacagtctgtttttctttcttggcaatggagtcttcagaagtggatgattgttaattatcttctgaaagtattgacaaagcatca

SEQ ID NO: 36874 - DNA, 120 bp, synthetic construct
  source 1..120: mol_type = other DNA
tgcatttttgaatgtgatttttgtcctcttgctgtgatcataatctctctctctctctttttttcttttttgaggcagagtctagctctgtcacccaggctggagtgcagtggcatcagc

SEQ ID NO: 36875 - DNA, 120 bp, synthetic construct
  source 1..120: mol_type = other DNA
agtagagacggggtttcactgtgttggccaggctggtcttgaactcctgacctcgtgatctgcctgcctcagcctcccaaagtgctgggattacaagcgtgagccaccacacccagctga

SEQ ID NO: 36876 - DNA, 120 bp, synthetic construct; identical to SEQ ID NO: 10118
  source 1..120: mol_type = other DNA

SEQ ID NO: 36877 - DNA, 120 bp, synthetic construct
  source 1..120: mol_type = other DNA
ctggagtgcagtggtgtgatctcggctgactgcaacctcggtgttcaagcgattctcctgcctcagcctcctgagtagctgggaatacaggctcccgccaccacgcccagctaatttttt

SEQ ID NO: 36878 - DNA, 120 bp, synthetic construct
  source 1..120: mol_type = other DNA
ccagcttattctttcttataaggactccggttctattgcattagggtctgtctcatccttatgtcctcatttaacctgagtcacctttttaaaggttgtacctctaaaatcagtcacatt

SEQ ID NO: 36879 - DNA, 120 bp, synthetic construct
  source 1..120: mol_type = other DNA
ttgaaaggaacacagtaagctagaaggtggtgatgattgcacagctttccagatccacaattattttaataatttgtctttattttctcacacgcagaaaataaggtatgcacaggagat

SEQ ID NO: 36880 - DNA, 120 bp, synthetic construct; identical to SEQ ID NO: 10119
  source 1..120: mol_type = other DNA

SEQ ID NO: 36881 - DNA, 120 bp, synthetic construct
  source 1..120: mol_type = other DNA
tgaatcaattccatttgtttgtttatatttatttttagagatttcagaagtgatatctttataatattgcattttcccattcatgtggtatagcctttcatttatttaagtccttactat

SEQ ID NO: 36882 - DNA, 120 bp, synthetic construct
  source 1..120: mol_type = other DNA
tttcgcctcctgagttcaagtgattctcctgcctcagcctcctgagtagctgggattacaggcacgtgccaccatgcgtggctaatagcaattatttttaaaaataaattttattgtgta

SEQ ID NO: 36883 - DNA, 120 bp, synthetic construct; identical to SEQ ID NO: 10120
  source 1..120: mol_type = other DNA

SEQ ID NO: 36884 - DNA, 80 bp, synthetic construct; identical to SEQ ID NO: 10121
  source 1..80: mol_type = other DNA

SEQ ID NO: 36885 - DNA, 80 bp, synthetic construct
  source 1..80: mol_type = other DNA
tataattgctcacagttcttgatggcatccaatccagaacagaacttcaattccttgaactcgtctccaaatcacgtaac

SEQ ID NO: 36886 - DNA, 80 bp, synthetic construct
  source 1..80: mol_type = other DNA
aagtgtgctcctggtggtctttaagtctttgggaaggtcttagttctcaaatctggaaataattatcctgatattctaag

SEQ ID NO: 36887 - DNA, 80 bp, synthetic construct
  source 1..80: mol_type = other DNA
cttccaaaagagttgaaacgtgagttcttaccaggatactgagctgccaagcctcaataggcggccacattgacaaacag

SEQ ID NO: 36888 - DNA, 80 bp, synthetic construct
  source 1..80: mol_type = other DNA
tttgtggactttttcaaaacactcgaagacccttcatgtaatatcttgaaattctaagaactgaagggatctttccaagt

SEQ ID NO: 36889 - DNA, 80 bp, synthetic construct; identical to SEQ ID NO: 10122
  source 1..80: mol_type = other DNA

SEQ ID NO: 36890 - DNA, 80 bp, synthetic construct
  source 1..80: mol_type = other DNA
gagaaaggcgggtacctaactagggctccaccctcgggcctgtgcctacggacctacatgaggacaggcactcctgcctt

SEQ ID NO: 36891 - DNA, 80 bp, synthetic construct
  source 1..80: mol_type = other DNA
agccctcacagcctttgctcgctctccgcgcctcctcggccttggcgcccactctggtcgcgcttaagaggcccttcagc

SEQ ID NO: 36892 - DNA, 80 bp, synthetic construct
  source 1..80: mol_type = other DNA
gccccgcactcggagcggccagccggccccgggcactgaggagcttagcaccaaggccagcagctgctgtgctcgacttc

SEQ ID NO: 36893 - DNA, 80 bp, synthetic construct; identical to SEQ ID NO: 10123
  source 1..80: mol_type = other DNA

SEQ ID NO: 36894 - DNA, 80 bp, synthetic construct
  source 1..80: mol_type = other DNA
tctgtatctagctgctctggtggggacatggagaacctttgtgtggacactctgtatctagctaatctagtggggaagtg

SEQ ID NO: 36895 - DNA, 80 bp, synthetic construct
  source 1..80: mol_type = other DNA
gggtccccttccacactgtgggagctttgttctttcgctctttgcaataagtcttgctgctgctcattcttggggtccac

SEQ ID NO: 36896 - DNA, 80 bp, synthetic construct
  source 1..80: mol_type = other DNA
ctgcagcttcactcttgagccagcaagaccacaaacccgccagaaggaacaaactctgaacacatccgaacatcagaagg

SEQ ID NO: 36897 - DNA, 80 bp, synthetic construct; identical to SEQ ID NO: 10124
  source 1..80: mol_type = other DNA

SEQ ID NO: 36898 - DNA, 80 bp, synthetic construct
  source 1..80: mol_type = other DNA
ctcctagacactgccttaaggttggagctccacaatctgctagtttgtatgctccccctctgctcccgtacaggtttgag

SEQ ID NO: 36899 - DNA, 80 bp, synthetic construct
  source 1..80: mol_type = other DNA
ataaaatagcacagagcggaaaaacttttctacccacaagcatgccaagaataaaaggcatacagaacctggaacaaaag

SEQ ID NO: 36900 - DNA, 80 bp, synthetic construct
  source 1..80: mol_type = other DNA
agtggggcaagaaactctttatcatcttctgagtctgttaccacgacacaaggccacagcttctccttcattatccttgg

SEQ ID NO: 36901 - DNA, 80 bp, synthetic construct; identical to SEQ ID NO: 10125
  source 1..80: mol_type = other DNA

SEQ ID NO: 36902 - DNA, 80 bp, synthetic construct
  source 1..80: mol_type = other DNA
agttttcagttctgctctagtttgcttacatctgtttgaagaagacagaataccctagaacacagcttttaattcacaag

SEQ ID NO: 36903 - DNA, 80 bp, synthetic construct
  source 1..80: mol_type = other DNA
atatgaatccagtaacagagattaaagctcaaagcttcaggtgtggagacctgcatgagtatcaaccggaagcattttag

SEQ ID NO: 36904 - DNA, 80 bp, synthetic construct
  source 1..80: mol_type = other DNA
aaaggaactaacaaaagatatataattggcatatggccaccactgaggctgcttttgaataaattcatctgattttaaag

SEQ ID NO: 36905 - DNA, 80 bp, synthetic construct; identical to SEQ ID NO: 10126
  source 1..80: mol_type = other DNA

SEQ ID NO: 36906 - DNA, 80 bp, synthetic construct
  source 1..80: mol_type = other DNA
ttgcgacttcatgcctcatttgttgggatccacagcgctactccaagttatggaccagcatgaaggggacaggctctagg

SEQ ID NO: 36907 - DNA, 80 bp, synthetic construct
  source 1..80: mol_type = other DNA
gagacagtggatttagggagagcctgctaaggatagcaatgtcaggatttgtgaagaagggctgggaatgcagatcttgt

SEQ ID NO: 36908 - DNA, 80 bp, synthetic construct
  source 1..80: mol_type = other DNA
ggaggcctggaactgctggaacatggctaggagttttagacgactctgaggtccccaggatttcagccccttttgagccc

SEQ ID NO: 36909 - DNA, 80 bp, synthetic construct; identical to SEQ ID NO: 10127
  source 1..80: mol_type = other DNA

SEQ ID NO: 36910 - DNA, 80 bp, synthetic construct
  source 1..80: mol_type = other DNA
cacacattcccaagttctttacccttctcctgcttttagctcaaaaaaatggctgaaactttgactacgaggctataaag

SEQ ID NO: 36911 - DNA, 80 bp, synthetic construct
  source 1..80: mol_type = other DNA
agcacttaccacatggcctgacaatggtaaacaactagaactgtattcacatagtttcatgtatgagaaaactgaagctc

SEQ ID NO: 36912 - DNA, 80 bp, synthetic construct
  source 1..80: mol_type = other DNA
agtaatgagcccttgagaggtaaggagacatttcattatggacctcatcagtaggtcaaatggcctaaaaccccaacttc

SEQ ID NO: 36913 - DNA, 80 bp, synthetic construct; identical to SEQ ID NO: 10128
  source 1..80: mol_type = other DNA

SEQ ID NO: 36914 - DNA, 80 bp, synthetic construct
  source 1..80: mol_type = other DNA
tacacttttagtttgaaattctcccatgaagcactcaaggtcctttctgatttgacatcggccagatttccctgatgtaa

SEQ ID NO: 36915 - DNA, 80 bp, synthetic construct
  source 1..80: mol_type = other DNA
tggatatagctttatcaaacaagacttctgaggtaactttctgagacttgagtcacaaatcagggttctggtgagcttga

SEQ ID NO: 36916 - DNA, 80 bp, synthetic construct
  source 1..80: mol_type = other DNA
aatcagtagagtccaagatggcattattttctctagtatctttgaaacattattggttcacttattttagtttttaattt

SEQ ID NO: 36917 - DNA, 80 bp, synthetic construct; identical to SEQ ID NO: 10129
  source 1..80: mol_type = other DNA

SEQ ID NO: 36918 - DNA, 80 bp, synthetic construct
  source 1..80: mol_type = other DNA
cgccaagtggagctttttcttaggttctgaagttcatttcccctgctttggaaagtcaaaacatttgcatgtctaccaag

SEQ ID NO: 36919 - DNA, 80 bp, synthetic construct
  source 1..80: mol_type = other DNA
ctctgtcacccaggctggagtgcagtggtgtgatctcagctaacttgtaacctttgactccaaggctcaagccatcctcc

SEQ ID NO: 36920 - DNA, 80 bp, synthetic construct
  source 1..80: mol_type = other DNA
attacaggcatgagccatccaacccagccctgctaaatattttaatatcagctttgattgcagaaccaatacaggcaatg

SEQ ID NO: 36921 - DNA, 80 bp, synthetic construct; identical to SEQ ID NO: 10130
  source 1..80: mol_type = other DNA

SEQ ID NO: 36922 - DNA, 80 bp, synthetic construct
  source 1..80: mol_type = other DNA
ggttgttgccactgtttgaagactataaaatttcttgtttcccagtagcaagtgcagcagaaggcaggtaatgaattttc

SEQ ID NO: 36923 - DNA, 80 bp, synthetic construct
  source 1..80: mol_type = other DNA
tttttttctcttctacactttttaccctttgccacctctcattactttctccttttctctctcctcattgtgtacgagaa

SEQ ID NO: 36924 - DNA, 80 bp, synthetic construct
  source 1..80: mol_type = other DNA
acagtgtgacttttaaagattaagtaagaatttatatctggaaatgcctggcatacacagtaacaactcaataaatgctg

SEQ ID NO: 36925 - DNA, 80 bp, synthetic construct
  source 1..80: mol_type = other DNA
atctgctctattccttttctatccatcagttaaagaaggtcccaaccttgaagctcccagcttgttaggttttaattcaa

SEQ ID NO: 36926 - DNA, 80 bp, synthetic construct; identical to SEQ ID NO: 10131
  source 1..80: mol_type = other DNA

SEQ ID NO: 36927 - DNA, 80 bp, synthetic construct
  source 1..80: mol_type = other DNA
ttgccacaggctgagggattgcagagcgagaaaggagaagccaaattgtctcagcctttaatttgttctaaatcagattc

SEQ ID NO: 36928 - DNA, 80 bp, synthetic construct
  source 1..80: mol_type = other DNA
ttgattgttactcgtgtttcccagtcttctaggagtaagaattggtcagataagtgccaatgatgagaatctctgaaaag

SEQ ID NO: 36929 - DNA, 80 bp, synthetic construct
  source 1..80: mol_type = other DNA
ttctattgagttgttggtgatggtctgcagtgtgtgctggtgatgtgaggcatatttattctttcttggggagcagtaag

SEQ ID NO: 36930 - DNA, 80 bp, synthetic construct; identical to SEQ ID NO: 10132
  source 1..80: mol_type = other DNA

SEQ ID NO: 36931 - DNA, 80 bp, synthetic construct
  source 1..80: mol_type = other DNA
atgtttggggaagatcagaaagttaagaacacgtgagaatgaaaattaaatgccaaaggacatttagtgatctctctaga

SEQ ID NO: 36932 - DNA, 80 bp, synthetic construct
  source 1..80: mol_type = other DNA
cgaatttgagctgaagatgcccatgctacctctgtaactggctgattgtgagggctaaatgaaattatggatgtgaaaga

SEQ ID NO: 36933 - DNA, 80 bp, synthetic construct
  source 1..80: mol_type = other DNA
gaaaatagtcaagtaaaaccaaagggtggacagagttctctaagttagacttgggtggtttcagaggctatggtttgaat

SEQ ID NO: 36934 - DNA, 80 bp, synthetic construct; identical to SEQ ID NO: 10133
  source 1..80: mol_type = other DNA

SEQ ID NO: 36935 - DNA, 80 bp, synthetic construct
  source 1..80: mol_type = other DNA
tatagcttaatttaggcctggattggcttttcagccttaatctatggctcaggctacaaacattttcacctaaaatcttg

SEQ ID NO: 36936 - DNA, 80 bp, synthetic construct
  source 1..80: mol_type = other DNA
gacacctgtaattccagctactcaggaggctgaggcaggagaatctcttgaacccgggaggcagaggttgcagtgagccg

SEQ ID NO: 36937 - DNA, 80 bp, synthetic construct
  source 1..80: mol_type = other DNA
aatgtatataatttggaccaggggaggtgggatctcaatgttctcagcaccattgacctccaaggtcaaaaatctaaatc

SEQ ID NO: 36938 - DNA, 80 bp, synthetic construct; identical to SEQ ID NO: 10134
  source 1..80: mol_type = other DNA

SEQ ID NO: 36939 - DNA, 80 bp, synthetic construct
  source 1..80: mol_type = other DNA
gctgagcatgagctccctgaacagagatcttgcctccagggaaactgaaacaatggaacaaggggcttgagaaggccatt

SEQ ID NO: 36940 - DNA, 80 bp, synthetic construct
  source 1..80: mol_type = other DNA
attttctatttgagcacctgtttgttcatctgttgaattaactctgggtgtttttcttgggctgggtccagtggtaagtt

SEQ ID NO: 36941 - DNA, 80 bp, synthetic construct
  source 1..80: mol_type = other DNA
actgtgatagaggggagacgggcaggcgagtcagcatctggggccaggaggtaccacaaagcaggaaacctgaagggctt

SEQ ID NO: 36942 - DNA, 80 bp, synthetic construct; identical to SEQ ID NO: 10135
  source 1..80: mol_type = other DNA

SEQ ID NO: 36943 - DNA, 80 bp, synthetic construct
  source 1..80: mol_type = other DNA
agggaaacaaccctgagccttttcactaatccacagatttttcagcatttctttatctcattagagcccattaagttcct

SEQ ID NO: 36944 - DNA, 80 bp, synthetic construct
  source 1..80: mol_type = other DNA
atccctgcacagcctaatgacgacaaatgccataaatttaagagtataattcaaccctttgaaactcaggtccaaatagg

SEQ ID NO: 36945 - DNA, 80 bp, synthetic construct
  source 1..80: mol_type = other DNA
tagtgaggggaaggaaagtggagtttgggaagcaaaggatataaataataaataaaacaagagaggggacttgcaaggac

SEQ ID NO: 36946 - DNA, 80 bp, synthetic construct; identical to SEQ ID NO: 10136
  source 1..80: mol_type = other DNA

SEQ ID NO: 36947 - DNA, 80 bp, synthetic construct
  source 1..80: mol_type = other DNA
aacctaaatgcccaccaataatagactagataaaatatggtacatatgcaccatggaatactatgcagtcataaaaaaaa

SEQ ID NO: 36948 - DNA, 80 bp, synthetic construct
  source 1..80: mol_type = other DNA
gggcctattagagggtggagggtggaaggagggaggggatcaggaaaaataactactgggcactaggcttaatacctggg

SEQ ID NO: 36949 - DNA, 80 bp, synthetic construct
  source 1..80: mol_type = other DNA
cttttttaaagcactgcattcagaatgtcagattattgtccagaaagttggcaacattagtattcgccattcccccaccc

SEQ ID NO: 36950 - DNA, 80 bp, synthetic construct
  source 1..80: mol_type = other DNA
gtggaatgtgtcttttcgtatttatacttctttgattattggtgagagagaacactgtatcctaccacagatgccatttg

SEQ ID NO: 36951 - DNA, 80 bp, synthetic construct; identical to SEQ ID NO: 10137
  source 1..80: mol_type = other DNA

SEQ ID NO: 36952 - DNA, 80 bp, synthetic construct
  source 1..80: mol_type = other DNA
ttataattttcccagaacttatgagtcccaggtcctcattgcagtggtaagcgctgagtgctcacgggggtgtgtgtggg

SEQ ID NO: 36953 - DNA, 80 bp, synthetic construct
  source 1..80: mol_type = other DNA
tacaaacactagtcatgactacacagttaagggtcgtccatctgcttccccttctcctagcctgctttgtgcaaacaagt

SEQ ID NO: 36954 - DNA, 80 bp, synthetic construct
  source 1..80: mol_type = other DNA
ttgaatcttcttcattcctatggatgggtattccttgcgttgaatatgactagggaagaaagggtctccatatgactagg

SEQ ID NO: 36955 - DNA, 80 bp, synthetic construct; identical to SEQ ID NO: 10138
  source 1..80: mol_type = other DNA

SEQ ID NO: 36956 - DNA, 80 bp, synthetic construct
  source 1..80: mol_type = other DNA
gataagacacatgtgtctggcagcagaaggggcagtttaggaaaggataataatgaatgcgataacttggaggcagaaaa

SEQ ID NO: 36957 - DNA, 80 bp, synthetic construct
  source 1..80: mol_type = other DNA
acaaaatgcagttctaataacatctccccatccctcgcctctaaaattaactagataacatcctgggtgaacttctattt

SEQ ID NO: 36958 - DNA, 80 bp, synthetic construct
  source 1..80: mol_type = other DNA
ggactaaaggaagtcttcaaattgagagtctctctaagcttttgcatactggtacccaacatgactgtgagtgattgtca

SEQ ID NO: 36959 - DNA, 80 bp, synthetic construct; identical to SEQ ID NO: 10139
  source 1..80: mol_type = other DNA

SEQ ID NO: 36960 - DNA, 80 bp, synthetic construct
  source 1..80: mol_type = other DNA
caggaagtctagtttaatcctagtttgtctggacattccttatcaaataatgcccttctctcttttctccagccagttcc

SEQ ID NO: 36961 - DNA, 80 bp, synthetic construct
  source 1..80: mol_type = other DNA
gtactgcatgaacactgtaagggtagagacagaggaggagtaagatgagacctgccttgtagaggaatttaataaaagaa

SEQ ID NO: 36962 - DNA, 80 bp, synthetic construct
  source 1..80: mol_type = other DNA
aatggaatatgaaagtggatattagacacctagagcacaatgggctgatgagctgggtgatgctgcccaacagatttcag

SEQ ID NO: 36963 - DNA, 80 bp, synthetic construct
  source 1..80: mol_type = other DNA
aaacatggaagcccacttggagttctagtaagaatctagataaatatcttcattttactcatggggaaactgaaggccag

SEQ ID NO: 36964 - DNA, 80 bp, synthetic construct; identical to SEQ ID NO: 10140
  source 1..80: mol_type = other DNA

SEQ ID NO: 36965 - DNA, 80 bp, synthetic construct
  source 1..80: mol_type = other DNA
tttccattatccgtgtatttcctggtatctcacagctttcaaaataataggaaacttgattcttatgtgtgtgtgtggag

SEQ ID NO: 36966 - DNA, 80 bp, synthetic construct
  source 1..80: mol_type = other DNA
tggtacaagagatgttttgatacagacatgcaatgtgttataatcacattatggaaaatggggtatccatcccctcaagg

SEQ ID NO: 36967 - DNA, 80 bp, synthetic construct
  source 1..80: mol_type = other DNA
tctttctaactatcttttttttttctcattaatcatcccaacctcccttccaccctcctagtatctttcccagcctctgg

SEQ ID NO: 36968 - DNA, 80 bp, synthetic construct
  source 1..80: mol_type = other DNA
acactttagacaactcttatttgttttctagatcttggttagaacataactattctttgacttctttgaaagattacaca

SEQ ID NO: 36969 - DNA, 80 bp, synthetic construct; identical to SEQ ID NO: 10141
  source 1..80: mol_type = other DNA

SEQ ID NO: 36970 - DNA, 80 bp, synthetic construct
  source 1..80: mol_type = other DNA
caaagttttattggaatgcagccgtccccgttcatttacacatcacctatggctgctttcatgctgtaaaatagaggtta

SEQ ID NO: 36971 - DNA, 80 bp, synthetic construct
  source 1..80: mol_type = other DNA
cctgagatttccaggggaatcaatatatacttgagaactaggagcctctcagaagattccagaagtcttcttgataaata

SEQ ID NO: 36972 - DNA, 80 bp, synthetic construct
  source 1..80: mol_type = other DNA
cctttttaggatgtagtttttcctccctttttgtacattattcagggaagaattttctcatattttagggcatgtggttt

SEQ ID NO: 36973 - DNA, 80 bp, synthetic construct; identical to SEQ ID NO: 10142
  source 1..80: mol_type = other DNA

SEQ ID NO: 36974 - DNA, 80 bp, synthetic construct
  source 1..80: mol_type = other DNA
aatcgatttattcagtttccaccctgcaaataacagataacagaaggacatagggaggggtactgaggaaccctgtgaaa

SEQ ID NO: 36975 - DNA, 80 bp, synthetic construct
  source 1..80: mol_type = other DNA
tggaaaacttcctggtagtggacgaaggcagctgaagcttgtttttcagcatattactgaggatttttagtaagaatgca

SEQ ID NO: 36976 - DNA, 80 bp, synthetic construct
  source 1..80: mol_type = other DNA
ctctactaaaaatacagaaatattagctgggcatggtagcaagtgcctgtagtcccagctactcgggagtctaaggcagg

SEQ ID NO: 36977 - DNA, 80 bp, synthetic construct; identical to SEQ ID NO: 10143
  source 1..80: mol_type = other DNA

SEQ ID NO: 36978 - DNA, 80 bp, synthetic construct
  source 1..80: mol_type = other DNA
aacagcccttctgatgcagagctgtttccctccctgggcctctgtttccttctctgtaaaatgggtaaccccagggaatc

SEQ ID NO: 36979 - DNA, 80 bp, synthetic construct
  source 1..80: mol_type = other DNA
aaccaatttggaaagcaagaaccaggagataacaaagagattcttcctgggctcaagtacgtgtcttcttgaaatccaat

SEQ ID NO: 36980 - DNA, 80 bp, synthetic construct
  source 1..80: mol_type = other DNA
ctggctgagacttggatggactatggaggacagaagggatggaggaaaagagacaagtcatgggatagagagaaataaag

SEQ ID NO: 36981 - DNA, 80 bp, synthetic construct
  source 1..80: mol_type = other DNA
ggtatgtccgtccagggggaggatttgtacctagtttccagctttttgagaaaggggatgtgaatggtgaaaaagaacag

SEQ ID NO: 36982 - DNA, 80 bp, synthetic construct; identical to SEQ ID NO: 10144
  source 1..80: mol_type = other DNA

SEQ ID NO: 36983 - DNA, 80 bp, synthetic construct
  source 1..80: mol_type = other DNA
aagatgaataaggcatagtctgtactcttgatgagtttataatggagagagagttagaaaccattagctatgtagctggg

SEQ ID NO: 36984 - DNA, 80 bp, synthetic construct
  source 1..80: mol_type = other DNA
caaatcaaaaaattagctgggtgtggtggcacgtacctgtagtctcaactactcgggaggctgaggccagaggattgctt

SEQ ID NO: 36985 - DNA, 80 bp, synthetic construct
  source 1..80: mol_type = other DNA
ttagacatagagaatgccagagctgaaacaaccctaaagattaccaaagtgaattgttcctaaatgctggactgtgaacc

SEQ ID NO: 36986 - DNA, 80 bp, synthetic construct; identical to SEQ ID NO: 10145
  source 1..80: mol_type = other DNA

SEQ ID NO: 36987 - DNA, 80 bp, synthetic construct
  source 1..80: mol_type = other DNA
gaaaccaaaagcataaaaggtaacatgtcttatccatggcagcaaaattttgttatggggctatggggagaaaccgaaag

SEQ ID NO: 36988 - DNA, 80 bp, synthetic construct
  source 1..80: mol_type = other DNA
ggattacctgtgggtaaaaatagcctggatcatccaggagcagaaataacattgtttctcttttccatctctctggttta

SEQ ID NO: 36989 - DNA, 80 bp, synthetic construct
  source 1..80: mol_type = other DNA
gtcaagacagacatcctggcgtacttgaagcaattcaaaaccaaataggaaggtggagttaagggcaggagcaaccctac

SEQ ID NO: 36990 - DNA, 80 bp, synthetic construct; identical to SEQ ID NO: 10146
  source 1..80: mol_type = other DNA

SEQ ID NO: 36991 - DNA, 80 bp, synthetic construct
  source 1..80: mol_type = other DNA
tgtagaaatagcaatggggtcacagtcacacaatttaggttccacttcataacattttttgtctcctaggacaaacgtgt

SEQ ID NO: 36992 - DNA, 80 bp, synthetic construct
  source 1..80: mol_type = other DNA
attgtctgatctttagtgcattcaggttatggcacctggagaggaatgccctttatcttttgaaggatgggatttcccat

SEQ ID NO: 36993 - DNA, 80 bp, synthetic construct
  source 1..80: mol_type = other DNA
ttatctccctcctccttcttactctgtcacaaatgatgtattgcccacatgacctgagccccccagacagaaagatttat

SEQ ID NO: 36994 - DNA, 80 bp, synthetic construct; identical to SEQ ID NO: 10147
  source 1..80: mol_type = other DNA

SEQ ID NO: 36995 - DNA, 80 bp, synthetic construct
  source 1..80: mol_type = other DNA
agatactaagaggagatttttgaagctgaattattcaccgtctggttgatgatgagaagatgggtggagcacaaacaact

SEQ ID NO: 36996 - DNA, 80 bp, synthetic construct
  source 1..80: mol_type = other DNA
gaatggtaattataacgtaatagaattggatggtcgttgccagaggaaattgatgttttggagagagataattaaagact

SEQ ID NO: 36997 - DNA, 80 bp, synthetic construct
  source 1..80: mol_type = other DNA
ttccagctgtcacggtggttcacttctgtaatcccagcacttttggaggcagaggcgggaggatctcttgggtccaggag

SEQ ID NO: 36998 - DNA, 80 bp, synthetic construct; identical to SEQ ID NO: 10148
  source 1..80: mol_type = other DNA

SEQ ID NO: 36999 - DNA, 80 bp, synthetic construct
  source 1..80: mol_type = other DNA
aaagttagataaggagacttcactgatatgggagcgctctccctgaatacagaatttttacactctgtcaagaaaccaac

SEQ ID NO: 37000 - DNA, 80 bp, synthetic construct
  source 1..80: mol_type = other DNA
actagataactgtacatcacaggaaggccaaaggacattcagtttgaaaaaacaaaaaaggaatgtgctggtgagagggg

SEQ ID NO: 37001 - DNA, 80 bp, synthetic construct
  source 1..80: mol_type = other DNA
tactgtttttctgcatttacttagcctgcgttgcatctatacgtcgaaaacagtgatttttgtaaaggaaatattcgctc

SEQ ID NO: 37002 - DNA, 80 bp, synthetic construct; identical to SEQ ID NO: 10149
  source 1..80: mol_type = other DNA

SEQ ID NO: 37003 - DNA, 80 bp, synthetic construct
  source 1..80: mol_type = other DNA
ttcaaatgtttttaaattattgtctgactttagagaagccgtgggaaaatctgagcagaaattcaaggtaccggtgacgt

SEQ ID NO: 37004 - DNA, 80 bp, synthetic construct
  source 1..80: mol_type = other DNA
ttaaagagttcatcgtcaatctgtaagagcatcttctcttatacctttccaaatccttattatttctgtggctccagtgg

SEQ ID NO: 37005 - DNA, 80 bp, synthetic construct
  source 1..80: mol_type = other DNA
atgtactcagatttagactgcactcagaaccctcgcgtgatttgacttaaaattccctggttaaggtcatgggtgataaa

SEQ ID NO: 37006 - DNA, 80 bp, synthetic construct; identical to SEQ ID NO: 10150
  source 1..80: mol_type = other DNA

SEQ ID NO: 37007 - DNA, 80 bp, synthetic construct
  source 1..80: mol_type = other DNA
acaaggacgatcttaggtttttaaaatcactgtattagtgggaattttcttgtctctgaatctgctttccctacctcagt

SEQ ID NO: 37008 - DNA, 80 bp, synthetic construct
  source 1..80: mol_type = other DNA
ggaattttcttgtctctgaatctgctttccctacctcagtttcttcattcctctgggattcttaatgagcctatgatgtc

SEQ ID NO: 37009 - DNA, 80 bp, synthetic construct
  source 1..80: mol_type = other DNA
acagatttatgactgcccatgtgcaaatgctcagcactacctgttcttttctagctgctgctgcattttgaaatgtttac

SEQ ID NO: 37010 - DNA, 80 bp, synthetic construct
  source 1..80: mol_type = other DNA
accgtgttgtttgataataaattaacaattgattaacagctgcaagttcctcccatccctgtatgcatatccctctgtaa

SEQ ID NO: 37011 - DNA, 80 bp, synthetic construct; identical to SEQ ID NO: 10151
  source 1..80: mol_type = other DNA

SEQ ID NO: 37012 - DNA, 80 bp, synthetic construct
  source 1..80: mol_type = other DNA
tgtgatttgctttgaccaacagaattctgtgaaatgatgtagaaatggtggtgtaggagttctaaaattaggcctcaaga

SEQ ID NO: 37013 - DNA, 80 bp, synthetic construct
  source 1..80: mol_type = other DNA
atcttggaccatccaatctcagtcaagctgccagatgactacagtcatatgagtgacccaagacaaaatcaacaaaagaa

SEQ ID NO: 37014 - DNA, 80 bp, synthetic construct
  source 1..80: mol_type = other DNA
aagcactaagcacagttctgagcacaaagtaagagcctagggtaagttaggagtttatgacttttggggatcttctcatt

SEQ ID NO: 37015 - DNA, 80 bp, synthetic construct
  source 1..80: mol_type = other DNA
gatctctagagtgagttgaggtatgaatggatagaggtgtcctacagtccttgcctgattttgtaaactaaactgcagag

SEQ ID NO: 37016 - DNA, 80 bp, synthetic construct; identical to SEQ ID NO: 10152
  source 1..80: mol_type = other DNA

SEQ ID NO: 37017 - DNA, 80 bp, synthetic construct
  source 1..80: mol_type = other DNA
acagttctgttttccagaaattcctgagtagcttcccaccaggcaagataccagaatcaggcaaaaaaaattttcttttt

SEQ ID NO: 37018 - DNA, 80 bp, synthetic construct
  source 1..80: mol_type = other DNA
atcaaaactgagtatgttataaagccatttgtagacagagtcaccctctcagaaaattcctagaggttattctccatcaa

SEQ ID NO: 37019 - DNA, 80 bp, synthetic construct
  source 1..80: mol_type = other DNA
aaccagtccagattgaagcagggatacaaaggctccagagaggagaccactaaggaaaatattaaaattgataggttctt

SEQ ID NO: 37020 - DNA, 80 bp, synthetic construct; identical to SEQ ID NO: 10153
  source 1..80: mol_type = other DNA

SEQ ID NO: 37021 - DNA, 80 bp, synthetic construct
  source 1..80: mol_type = other DNA
gccgtagtagctcacgcctgtaatcccagcactttgggaggctgaggcgggtggatcacgaggtcaggagttcgaagcga

SEQ ID NO: 37022 - DNA, 80 bp, synthetic construct
  source 1..80: mol_type = other DNA
atactgtatgatcccactcacatgaaattctgaaaactatgaacatgtaatgatggaaagcatatctggttgtaagaggg

SEQ ID NO: 37023 - DNA, 80 bp, synthetic construct
  source 1..80: mol_type = other DNA
tgggaattatgcctcaataaaactgtttagagtacattgtctggaaaaatatcatgaagccattctgcaagtatagttgt

SEQ ID NO: 37024 - DNA, 80 bp, synthetic construct
  source 1..80: mol_type = other DNA
gttcaagcgattctcctgcctcagcctccccagtagctgagattacaggcgcccgccaccacgtccagctagctaatttt

SEQ ID NO: 37025 - DNA, 80 bp, synthetic construct; identical to SEQ ID NO: 10154
  source 1..80: mol_type = other DNA

SEQ ID NO: 37026 - DNA, 80 bp, synthetic construct
  source 1..80: mol_type = other DNA
gcttcctcttcttcaagatcttttcctggctcgcctcttctcctgttttcaggtctctgttaacaccttggttcctcaga

SEQ ID NO: 37027 - DNA, 80 bp, synthetic construct
  source 1..80: mol_type = other DNA
atatttaaactgacctcaaaaagacaaggctctcaagttacactcttttgtgtgtctgcgagtcaaacttgtagcgccta

SEQ ID NO: 37028 - DNA, 80 bp, synthetic construct
  source 1..80: mol_type = other DNA
accagggctcacgctttctccatcccaccccggactccaggcacctgtgtgccagcctggccaagcgtttcctccaaagt

SEQ ID NO: 37029 - DNA, 80 bp, synthetic construct; identical to SEQ ID NO: 10155
  source 1..80: mol_type = other DNA

SEQ ID NO: 37030 - DNA, 80 bp, synthetic construct
  source 1..80: mol_type = other DNA
gacatgatttctgttgttaacctaatttcaaagatagtgtaaattatacaaaagctaaataacttgccagtgtcacacaa

SEQ ID NO: 37031 - DNA, 80 bp, synthetic construct
  source 1..80: mol_type = other DNA
ctctataatcactactacacatgatcagtttgcattcagcattgagaccctctggaaataaatgaaaatcaccaggtgaa

SEQ ID NO: 37032 - DNA, 80 bp, synthetic construct
  source 1..80: mol_type = other DNA
gccctgctgaatagtctctagtgagacgtttgttaaaagcccaagagtatagcgggcacttagagaataatgtagaaaat

SEQ ID NO: 37033 - DNA, 80 bp, synthetic construct; identical to SEQ ID NO: 10156
  source 1..80: mol_type = other DNA

SEQ ID NO: 37034 - DNA, 80 bp, synthetic construct
  source 1..80: mol_type = other DNA
tacacagatttttcatattccagaagggctggagaaacatatatttactgaaaagctcttctattcagcaactgcatcct

SEQ ID NO: 37035 - DNA, 80 bp, synthetic construct
  source 1..80: mol_type = other DNA
ataagaaagaattagtttcaaaagaaaaaaagtgcagaaagaggctgcacgttgtggctcacgcccgtaatcccaacact

SEQ ID NO: 37036 - DNA, 80 bp, synthetic construct
  source 1..80: mol_type = other DNA
tctctcttctctcttaaaaaaaaaaaagccaaatagatgatccagcagatggatcagtatgtgcaatggtataaaaaatt

SEQ ID NO: 37037 - DNA, 80 bp, synthetic construct; identical to SEQ ID NO: 10157
  source 1..80: mol_type = other DNA

SEQ ID NO: 37038 - DNA, 80 bp, synthetic construct
  source 1..80: mol_type = other DNA
ccaaaagcaggatgtcaatttaacgtgagaagaacagtgttatgattcagtacattaagaaattaaaggaaaaaaataag

SEQ ID NO: 37039 - DNA, 80 bp, synthetic construct
  source 1..80: mol_type = other DNA
actttacttgagattgggactacaagtggtataccaggaattgcgacttccattccttcccagacaaaaggaaagttaaa

SEQ ID NO: 37040 - DNA, 80 bp, synthetic construct
  source 1..80: mol_type = other DNA
ttaacacattttcccttgatagctgtaacaatttatgaaagcaatgacatgcaatgcagaaaaacctagaagtcacagga

SEQ ID NO: 37041 - DNA, 80 bp, synthetic construct; identical to SEQ ID NO: 10158
  source 1..80: mol_type = other DNA

SEQ ID NO: 37042 - DNA, 80 bp, synthetic construct
  source 1..80: mol_type = other DNA
agaatgtatctttgaactcccacccagatcttctgtttcaatgtattgccactgtttccatcaaataagatcccagaact

SEQ ID NO: 37043 - DNA, 80 bp, synthetic construct
  source 1..80: mol_type = other DNA
aggattatataataaatactctcttatgcctggcttcttttatgcaggaatatgtgaaattcatccatgttgttgcattt

SEQ ID NO: 37044 - DNA, 80 bp, synthetic construct
  source 1..80: mol_type = other DNA
tataaaccgtacctgtaggaaaactcttggacttgctttttttttttggcatatatgtgcacaagttttactgggtatta

SEQ ID NO: 37045 - DNA, 80 bp, synthetic construct; identical to SEQ ID NO: 10159
  source 1..80: mol_type = other DNA

SEQ ID NO: 37046 - DNA, 80 bp, synthetic construct
  source 1..80: mol_type = other DNA
tggggtatttagggttttctatatataagatcatgtatacaaaaatcaactcaagatgaatcaaaagcttaactctaaga

SEQ ID NO: 37047 - DNA, 80 bp, synthetic construct
  source 1..80: mol_type = other DNA
taaaataaactaaaaagcttctgcacagcaagataagtaatcagcagagtaaaccaacaacccatagagtgggagaaaat

SEQ ID NO: 37048 - DNA, 80 bp, synthetic construct
  source 1..80: mol_type = other DNA
aaatgctcagcatcactggtaatcagggaaatgcaaatcaaaaccacaatgtgataccaccttactgctacaagaatggc

SEQ ID NO: 37049 - DNA, 80 bp, synthetic construct; identical to SEQ ID NO: 10160
  source 1..80: mol_type = other DNA

SEQ ID NO: 37050 - DNA, 80 bp, synthetic construct
  source 1..80: mol_type = other DNA
gaccattattctaagtgaagtaactcaggaatggaaaaccaaacatcatgtgttgtcacttataagtgggagctaagtgg

SEQ ID NO: 37051 - DNA, 80 bp, synthetic construct
  source 1..80: mol_type = other DNA
caaaatctcagaaatcatcactaaagaacttatccatgtaaccaaagaccatctgttccccaaaaacctattgaaataaa

SEQ ID NO: 37052 - DNA, 80 bp, synthetic construct
  source 1..80: mol_type = other DNA
gttagaggaaaatcaggttttcactattgagtttgttagctctgggcttatcttatatagcctttgttattgtgaggtac

SEQ ID NO: 37053 - DNA, 80 bp, synthetic construct; identical to SEQ ID NO: 10161
  source 1..80: mol_type = other DNA

SEQ ID NO: 37054 - DNA, 80 bp, synthetic construct
  source 1..80: mol_type = other DNA
taccagttctttaaatgtttggtaggattcagcagtgcagccataaggtcttgggattttctgtgttgggaggttttgat

SEQ ID NO: 37055 - DNA, 80 bp, synthetic construct
  source 1..80: mol_type = other DNA
tttgtcagtggaaaaaaaacacactcaaagtgttgtttttttctattctctcacccagcagcctcaacaccaaccaacgt

SEQ ID NO: 37056 - DNA, 80 bp, synthetic construct
  source 1..80: mol_type = other DNA
ctggaaatagtttcacatcccacaggttgagagctcagtttcacaaaactgcccccacttcagacacaagccacaagtct

SEQ ID NO: 37057 - DNA, 80 bp, synthetic construct; identical to SEQ ID NO: 10162
  source 1..80: mol_type = other DNA

SEQ ID NO: 37058 - DNA, 80 bp, synthetic construct
  source 1..80: mol_type = other DNA
ctccagccatggctctggagggcacaatggtaaacctcggtgatgtctacatgttgctgattctgcagacatgcatagta

SEQ ID NO: 37059 - DNA, 80 bp, synthetic construct
  source 1..80: mol_type = other DNA
tgggatcaggactgcctccaaaaccctagaggtgtagagcaaccagcatgtaactccagcctgggagagcttcaagcatg

SEQ ID NO: 37060 - DNA, 80 bp, synthetic construct
  source 1..80: mol_type = other DNA
tcaaggaaaagaattctggagctttaatacttaatgtgctcttcctgttgggttttaggcttacttggcattagttattc

SEQ ID NO: 37061 - DNA, 80 bp, synthetic construct; identical to SEQ ID NO: 10163
  source 1..80: mol_type = other DNA

SEQ ID NO: 37062 - DNA, 80 bp, synthetic construct
  source 1..80: mol_type = other DNA
ctcatgaatgaatgagtgtcattatcacaggagtaggctcattattccaagagtgggctcattatggtgagagtaaattt

SEQ ID NO: 37063 - DNA, 80 bp, synthetic construct
  source 1..80: mol_type = other DNA
cacaatggcccatgccagatgtggcaccctcaatcttggatttaccagttgccagaattgtaagaaaaaaaatttctttt

SEQ ID NO: 37064 - DNA, 80 bp, synthetic construct
  source 1..80: mol_type = other DNA
gttctgtcattgtattcttcagctgcagtatttctgttaggttccttttcatggtttctagttattaaacttctcctttt

SEQ ID NO: 37065 - DNA, 80 bp, synthetic construct; identical to SEQ ID NO: 10164
  source 1..80: mol_type = other DNA

SEQ ID NO: 37066 - DNA, 80 bp, synthetic construct
  source 1..80: mol_type = other DNA
tgcgatgcattttctcttaccataatgtaatggaattataaatcaatggcagggaaaaaatgtgcaaaacacaaaaatat

SEQ ID NO: 37067 - DNA, 80 bp, synthetic construct
  source 1..80: mol_type = other DNA
cagataaggcagtgcttggaagaaaatttatagctgtaaatgcctgtatcaaaaaagaagaaagatgtcaaatcagtgac

SEQ ID NO: 37068 - DNA, 80 bp, synthetic construct
  source 1..80: mol_type = other DNA
gaactgctgaatatggttgcctttaaaagagtggccctagagagacatgctgtggatttagggaagaataagcaagtgtt

SEQ ID NO: 37069 - DNA, 80 bp, synthetic construct; identical to SEQ ID NO: 10165
  source 1..80: mol_type = other DNA

SEQ ID NO: 37070 - DNA, 80 bp, synthetic construct
  source 1..80: mol_type = other DNA
gaaaaaatttctgacacaaggagataagacaaagagaaggaagaggaagaacagttgcagttctaaggcacaaggtgtcc

SEQ ID NO: 37071 - DNA, 80 bp, synthetic construct
  source 1..80: mol_type = other DNA
tcacctatgtggattcctgtctcatctttgggagctttacagaaactccaatgttcaaaagtgaaattgaaaataagtga

SEQ ID NO: 37072 - DNA, 80 bp, synthetic construct
  source 1..80: mol_type = other DNA
taatcaagacagtgtggtattggtaaaagaatagacacgtagaacaatagaatagagactccagaaatagacccccacaa

SEQ ID NO: 37073 - DNA, 80 bp, synthetic construct
  source 1..80: mol_type = other DNA
cttcaaaaactggaagcatataagatgtccttcaatgggcaaatatatttacaagatgtagtacattcatacattggaat

SEQ ID NO: 37074 - DNA, 80 bp, synthetic construct; identical to SEQ ID NO: 10166
  source 1..80: mol_type = other DNA

SEQ ID NO: 37075 - DNA, 80 bp, synthetic construct
  source 1..80: mol_type = other DNA
agaaaaggacacagagggacagtgagagcgatgactggagccagagtgcaagggagagaagaaggagaaggcggggagct

SEQ ID NO: 37076 - DNA, 80 bp, synthetic construct
  source 1..80: mol_type = other DNA
tggaggtggaccctgaaaacatttctatttggcaaaatggtaatgtttaagctgtgctaggggagtacactgcaagagga

SEQ ID NO: 37077 - DNA, 80 bp, synthetic construct
  source 1..80: mol_type = other DNA
agaacttaaccctcaccggcgaccttgtagataacgtctataagtcaccatggtaacggtcgcttcagttgtttttcagg

SEQ ID NO: 37078 - DNA, 80 bp, synthetic construct; identical to SEQ ID NO: 10167
  source 1..80: mol_type = other DNA

SEQ ID NO: 37079 - DNA, 80 bp, synthetic construct
  source 1..80: mol_type = other DNA
gaataaatcttttctcttttgcacaaactgcttatcacagtgattgattttctgtgcgtgggcagaacaaaccaggtcaa

SEQ ID NO: 37080 - DNA, 80 bp, synthetic construct
  source 1..80: mol_type = other DNA
ccagagagctcattccacactctcataatgggtgattgcctgcatgccagctccagcctctggcacagagaacttttcag

SEQ ID NO: 37081 - DNA, 80 bp, synthetic construct
  source 1..80: mol_type = other DNA
gccatgcggtttctgccttctgactagatcttaactgattaaattaagtagtggataacagagaaggaagctgggagaaa

SEQ ID NO: 37082 - DNA, 80 bp, synthetic construct
  source 1..80: mol_type = other DNA
tctttcagcctccttctgagaatacagccacagtgtgtgaatctgagttatcttagttcagctccttaactttacaaagg

SEQ ID NO: 37083 - DNA, 80 bp, synthetic construct; identical to SEQ ID NO: 10168
  source 1..80: mol_type = other DNA

SEQ ID NO: 37084 - DNA, 80 bp, synthetic construct
  source 1..80: mol_type = other DNA
tcaggaaccgaggcttacctgagacatagaaagtgaggtgatgtggttgcttagatttatcttttcatttgtgctgctcc

SEQ ID NO: 37085 - DNA, 80 bp, synthetic construct
  source 1..80: mol_type = other DNA
aaattcaaagggaaataatctattacaatctcttcctctcttacatatcaaagggtactatattgagtccaaagggaaat

SEQ ID NO: 37086 - DNA, 80 bp, synthetic construct
  source 1..80: mol_type = other DNA
tttttttttctttgagatggagtctcgctctgtcatccaggctagagtgtagtggcacgataccagctcactgcaatctc

SEQ ID NO: 37087 - DNA, 80 bp, synthetic construct; identical to SEQ ID NO: 10169
  source 1..80: mol_type = other DNA

SEQ ID NO: 37088 - DNA, 80 bp, synthetic construct
  source 1..80: mol_type = other DNA
atagtttacaatttttttaaatgtaaaacaatattcagtaacatgtcttcctctcacccccatcccaatgcccttgccag

SEQ ID NO: 37089 - DNA, 80 bp, synthetic construct
  source 1..80: mol_type = other DNA
tcctgggttcttaagacctcagttgactagtatcaggttcaggtgtctccttacagggcaatttttggcatataaattca

SEQ ID NO: 37090 - DNA, 80 bp, synthetic construct
  source 1..80: mol_type = other DNA
gggtgaagtgaatgatatatttcctgccttcgtggagctgatattctagtggagaagacacaataaataaatcagataaa

SEQ ID NO: 37091 - DNA, 80 bp, synthetic construct
  source 1..80: mol_type = other DNA
aataaagactgaaaaaaatagaggagccagccatgaagatatctaagaaaagggaattctaggcagagggaagaaaagtg

SEQ ID NO: 37092 - DNA, 80 bp, synthetic construct; identical to SEQ ID NO: 10170
  source 1..80: mol_type = other DNA

SEQ ID NO: 37093 - DNA, 80 bp, synthetic construct
  source 1..80: mol_type = other DNA
cccaaatgaggtacaggatatgactgaatattatcaatggcctatcttagaagacaatttttaaaatactgctggctagg

SEQ ID NO: 37094 - DNA, 80 bp, synthetic construct
  source 1..80: mol_type = other DNA
ggctactcaggaggctgaggcaggagaatcactttaatcctggaagaggaggttgcagtgatccgagatcgcgccactgc

SEQ ID NO: 37095 - DNA, 80 bp, synthetic construct
  source 1..80: mol_type = other DNA
gtctctactaaaaaaaaaaaaaaaaaaaaaaaaaaaaaaaaaaaaattagccgcgcttggtggcgggcgtttgtagtccc

SEQ ID NO: 37096 - DNA, 80 bp, synthetic construct; identical to SEQ ID NO: 10171
  source 1..80: mol_type = other DNA

SEQ ID NO: 37097 - DNA, 80 bp, synthetic construct
  source 1..80: mol_type = other DNA
ccaacatactccaggggaaaaatgtttgaaaagaaatcatggcattttagttaatgagtggagccttggttacaggcatg

SEQ ID NO: 37098 - DNA, 80 bp, synthetic construct
  source 1..80: mol_type = other DNA
actgggctagtgcagtcactgtggaaattcagtcaacaaaatctattgttgatatgtgtcttggatgaggagtagaagaa

SEQ ID NO: 37099 - DNA, 80 bp, synthetic construct
  source 1..80: mol_type = other DNA
cactactcctggctttgaactgccctccccacttccgggtcctcatgtcttgctactcaatgcatggtttgcggaaaata

SEQ ID NO: 37100 - DNA, 80 bp, synthetic construct
  source 1..80: mol_type = other DNA
atcactgcccaaaaacagtggttctcacattttgatgtgtgctatggtttgaatgttggcattcccacaaaattcatata

SEQ ID NO: 37101 - DNA, 80 bp, synthetic construct; identical to SEQ ID NO: 10172
  source 1..80: mol_type = other DNA

SEQ ID NO: 37102 - DNA, 80 bp, synthetic construct
  source 1..80: mol_type = other DNA
agaattacctggagggcttttaaaaacaaatattgcagtttctgattcattaggtcctggggtggggcccaagaatttgt

SEQ ID NO: 37103 - DNA, 80 bp, synthetic construct
  source 1..80: mol_type = other DNA
gcaaagacaaggatttctgagaaggggcattcattccaccagtattacttaaatttttttaatccacaggatatcactag

SEQ ID NO: 37104 - DNA, 80 bp, synthetic construct
  source 1..80: mol_type = other DNA
attcctggttttcagtattggaatattaggaagtatttgttttctgctctctccttccctttgcacataacgaggcaagc

SEQ ID NO: 37105 - DNA, 80 bp, synthetic construct
  source 1..80: mol_type = other DNA
taaagtgatcctcagtggattccaagtatccttgcttccctccttttccttttttcctttttttttttaaatgccatctt

SEQ ID NO: 37106 - DNA, 80 bp, synthetic construct; identical to SEQ ID NO: 10173
  source 1..80: mol_type = other DNA

SEQ ID NO: 37107 - DNA, 80 bp, synthetic construct
  source 1..80: mol_type = other DNA
cactgtaatgttttcatttctactactccactgaaaccactttgaattgaacagagtaatcaatgacctctgtttttacc

SEQ ID NO: 37108 - DNA, 80 bp, synthetic construct
  source 1..80: mol_type = other DNA
tgacaattgaaacctggaactctagtgatgtcaagggctttctattatatctacttccttctgcaagttggctttactct

SEQ ID NO: 37109 - DNA, 80 bp, synthetic construct
  source 1..80: mol_type = other DNA
gcctagcttatatcagctgtgcaacatgaaacaatcaattctggtcaggtcggtggatttgtgtaagatcaaggtacttg

SEQ ID NO: 37110 - DNA, 80 bp, synthetic construct; identical to SEQ ID NO: 10174
  source 1..80: mol_type = other DNA

SEQ ID NO: 37111 - DNA, 80 bp, synthetic construct
  source 1..80: mol_type = other DNA
tattcagtttcatgctaaccaaaaattttcaccctagctccaaactcatgatgtagactgattggagacctgaatttccc

SEQ ID NO: 37112 - DNA, 80 bp, synthetic construct
  source 1..80: mol_type = other DNA
ccgggttcaagcaattccagtcctctgcctcaacctcccgagtagctaggattataggcgcccaccaaacacgcctggct

SEQ ID NO: 37113 - DNA, 80 bp, synthetic construct
  source 1..80: mol_type = other DNA
ccttgttctctgatcccaaatcagtgaaatagcaactataactgcactgaggtaaaatataggccatcataaggacgagg

SEQ ID NO: 37114 - DNA, 80 bp, synthetic construct; identical to SEQ ID NO: 10175
  source 1..80: mol_type = other DNA

SEQ ID NO: 37115 - DNA, 80 bp, synthetic construct
  source 1..80: mol_type = other DNA
acaaacagtttcctgtgataaaacattttactaacaaatactgaaggcaattaatattaaaatctttaaattttacataa

SEQ ID NO: 37116 - DNA, 80 bp, synthetic construct
  source 1..80: mol_type = other DNA
ataacaaagagtgtttttataaatgactgttttttcaaaagcacttgagtcaacaatcatctttcactttcaagattttt

SEQ ID NO: 37117 - DNA, 80 bp, synthetic construct
  source 1..80: mol_type = other DNA
aggttcaagcaattctcctgcctcagcctcctaagtagctggaactacaggcatacaacaccacacccagctaaatattg

SEQ ID NO: 37118 - DNA, 80 bp, synthetic construct; identical to SEQ ID NO: 10176
  source 1..80: mol_type = other DNA

SEQ ID NO: 37119 - DNA, 80 bp, synthetic construct
  source 1..80: mol_type = other DNA
tatgaaagaaacactacttgagtaagcagttcctctaaagttggcctgtctagatggtttccttctctgtcttagactaa

SEQ ID NO: 37120 - DNA, 80 bp, synthetic construct
  source 1..80: mol_type = other DNA
agaaaatgtttgccctcatatttatcaatgttgacagacactgagggttgccaacccgagagctattttctactcttctt

SEQ ID NO: 37121 - DNA, 80 bp, synthetic construct
  source 1..80: mol_type = other DNA
tgtgaggcaattaaggctacttagctgaagggggaatctgctagagatttttaaaaaagacttttcctaattgatggaag

SEQ ID NO: 37122 - DNA, 80 bp, synthetic construct
  source 1..80: mol_type = other DNA
aaaacactctgtccctgctgacatacatttctcggccattgaaataatgttcagaccactttatcttgtgacataaaata

SEQ ID NO: 37123 - DNA, 80 bp, synthetic construct; identical to SEQ ID NO: 10177
  source 1..80: mol_type = other DNA

SEQ ID NO: 37124 - DNA, 80 bp, synthetic construct
  source 1..80: mol_type = other DNA
tgaacatccttgttccccccactcatgttaagaaacaatatgaccttagtggctctgccaaaatcacaatccctcccttc

SEQ ID NO: 37125 - DNA, 80 bp, synthetic construct
  source 1..80: mol_type = other DNA
caatatttgtgattcttctgcaacttggttttctttctcaatattgtattgttaaatttaatccatgttgatgcatgtaa

SEQ ID NO: 37126 - DNA, 80 bp, synthetic construct
  source 1..80: mol_type = other DNA
actacttaatcaagatatagtccacttcattaccccccaagattctcagtaagcattcatttttgctactgtattctagt

SEQ ID NO: 37127 - DNA, 80 bp, synthetic construct; identical to SEQ ID NO: 10178
  source 1..80: mol_type = other DNA

SEQ ID NO: 37128 - DNA, 80 bp, synthetic construct
  source 1..80: mol_type = other DNA
tttgaatatctttttattttttgagatagagtcttactctgttgcccaggatcactgcaacctccacctcctgggttcaa

SEQ ID NO: 37129 - DNA, 80 bp, synthetic construct
  source 1..80: mol_type = other DNA
tgggattataggcatgtgccgccacacccaacctggtttcaaatatatttttatatgtctgttgggcatacagacttttt

SEQ ID NO: 37130 - DNA, 80 bp, synthetic construct
  source 1..80: mol_type = other DNA
atacactccagttttgattaatggtttcacatttgatggtgtcttatggtaggcagaagttaatcattttaatacagcta

SEQ ID NO: 37131 - DNA, 80 bp, synthetic construct; identical to SEQ ID NO: 10179
  source 1..80: mol_type = other DNA

SEQ ID NO: 37132 - DNA, 80 bp, synthetic construct
  source 1..80: mol_type = other DNA
gctcttattctagacacagttgtagcatagtatgaaacctctattggtgtatttgaggaaagagagcattttccttggat

SEQ ID NO: 37133 - DNA, 80 bp, synthetic construct
  source 1..80: mol_type = other DNA
ttccagacattgtatggagaagcattgtgaaactttctgttctgttctgctagccctcaccactgatgcatatagccctc

SEQ ID NO: 37134 - DNA, 80 bp, synthetic construct
  source 1..80: mol_type = other DNA
taaatccggtgtctgagaggttttgtctgcgacccatcctactacatatttattttatctttaaaatatttttaatttaa

SEQ ID NO: 37135 - DNA, 80 bp, synthetic construct; identical to SEQ ID NO: 10180
  source 1..80: mol_type = other DNA

SEQ ID NO: 37136 - DNA, 80 bp, synthetic construct
  source 1..80: mol_type = other DNA
catgatcgattgagcaagcagagggtacgtgactgggggctgcctgcaccggtaattagaacagaacagaacagcacagg

SEQ ID NO: 37137 - DNA, 80 bp, synthetic construct
  source 1..80: mol_type = other DNA
gcagaaattgggcataggacaatatgaggggtggtctcctcccttacatccactttcttgaatccctactcccatttatt

SEQ ID NO: 37138 - DNA, 80 bp, synthetic construct
  source 1..80: mol_type = other DNA
agtgcccccaagattatggctaaactcctcaacttggttcatctttatgaaccagcttctgttctggccatctttttcca

SEQ ID NO: 37139 - DNA, 80 bp, synthetic construct; identical to SEQ ID NO: 10181
  source 1..80: mol_type = other DNA

SEQ ID NO: 37140 - DNA, 80 bp, synthetic construct
  source 1..80: mol_type = other DNA
aggctgaggcaagagaatcacttgaacccgggagatggaggttgcagtgagccgagaacatgccattgcactccagcctg

SEQ ID NO: 37141 - DNA, 80 bp, synthetic construct
  source 1..80: mol_type = other DNA
aaattgatcataaattcaatttaacacacatatgtcagaatacaaagcacacagtatgttctttgaaccagtaaataaat

SEQ ID NO: 37142 - DNA, 80 bp, synthetic construct
  source 1..80: mol_type = other DNA
aaagtacacagccatatatcagagaagggacactttctaacagggatccttttagaacctgactcaagattcttttgtct

SEQ ID NO: 37143 - DNA, 80 bp, synthetic construct; identical to SEQ ID NO: 10182
  source 1..80: mol_type = other DNA

SEQ ID NO: 37144 - DNA, 80 bp, synthetic construct
  source 1..80: mol_type = other DNA
tgtaatttgccctctaagccccagaattcaagctttctcattctttcatggggaccatgtgagaattctccaagatattt

SEQ ID NO: 37145 - DNA, 80 bp, synthetic construct
  source 1..80: mol_type = other DNA
ttcctgaatgtgacactagccgagaggtcagaattaattacattccttggtgtcacctgacccacaggaaacttgcgtat

SEQ ID NO: 37146 - DNA, 80 bp, synthetic construct
  source 1..80: mol_type = other DNA
tttgctgcctaaattaacacccaatctggaaataaaatacaagtctttccttcctgaaggcatcttcaatcactaccagt

SEQ ID NO: 37147 - DNA, 80 bp, synthetic construct
  source 1..80: mol_type = other DNA
attgtcagatttctttaaaaagtgaagtacttagcgttcccttgacccatctttgactcctccctagttgctgttctttg

SEQ ID NO: 37148 - DNA, 80 bp, synthetic construct; identical to SEQ ID NO: 10183
  source 1..80: mol_type = other DNA

SEQ ID NO: 37149 - DNA, 80 bp, synthetic construct
  source 1..80: mol_type = other DNA
ctcctggcactgaatcatttgcagaaaaaaataaaaatagttgttcaagtatatgagaaggctttgtaccaatctcagac

SEQ ID NO: 37150 - DNA, 80 bp, synthetic construct
  source 1..80: mol_type = other DNA
tatagaaataaatataaaatcaccacattgccttttgaaattaaaaatgggaaacacaatactttattcaatcaataaaa

SEQ ID NO: 37151 - DNA, 80 bp, synthetic construct
  source 1..80: mol_type = other DNA
acacaataaaacataatccaattaaggtttcaggactaaatatgaacctttcctctactttcaaaggtttggaggatcct

SEQ ID NO: 37152 - DNA, 80 bp, synthetic construct; identical to SEQ ID NO: 10184
  source 1..80: mol_type = other DNA

SEQ ID NO: 37153 - DNA, 80 bp, synthetic construct
  source 1..80: mol_type = other DNA
aatctagaaaccacctaacataaacttgtcagtatggcccaatcgcccatccttatgaaatcagaatttatcggccgggc

SEQ ID NO: 37154 - DNA, 80 bp, synthetic construct
  source 1..80: mol_type = other DNA
gttactcggaagactgaggcaagagaatcacttgaacccaggaggtacaggttgcagtgagcagagattgcaccaatgca

SEQ ID NO: 37155 - DNA, 80 bp, synthetic construct
  source 1..80: mol_type = other DNA
taaccactctggatcagtttaacaaacttcataccctactgacctgtcccctgcatttgaattctaagcctacccctttg

SEQ ID NO: 37156 - DNA, 80 bp, synthetic construct; identical to SEQ ID NO: 10185
  source 1..80: mol_type = other DNA

SEQ ID NO: 37157 - DNA, 80 bp, synthetic construct
  source 1..80: mol_type = other DNA
taagtgagcttgcttcttgcttgttaatttgtctaatctaggttggattgatgacaatgctaccctcaggggataatgta

SEQ ID NO: 37158 - DNA, 80 bp, synthetic construct
  source 1..80: mol_type = other DNA
tgtattttcaaaactgattttcaatccttcgtcggtagccagcttcaacaacttatcctgtagagttacagttaaattta

SEQ ID NO: 37159 - DNA, 80 bp, synthetic construct
  source 1..80: mol_type = other DNA
attgataattgttgttaaattatgaaacatgtcataacaatctgtagaaattctgtttttccaagcttctaacttctgtt

SEQ ID NO: 37160 - DNA, 80 bp, synthetic construct; identical to SEQ ID NO: 10186
  source 1..80: mol_type = other DNA

SEQ ID NO: 37161 - DNA, 80 bp, synthetic construct
  source 1..80: mol_type = other DNA
tcgatgaatgaagcaatgtgttgttttacattctggcgcaagttccttaatctgggttaccacttcagaatgttttcctg

SEQ ID NO: 37162 - DNA, 80 bp, synthetic construct
  source 1..80: mol_type = other DNA
aagaggctgaaaaaaagaactcttcctttatatcatcatcatgttcaaacctcacatagactaaaagaattatcatgtta

SEQ ID NO: 37163 - DNA, 80 bp, synthetic construct
  source 1..80: mol_type = other DNA
ccaacatttccaagcaaacttctttgatgcagtctttcactagtgtctcagcaattgtgtatggtgttttagacttggca

SEQ ID NO: 37164 - DNA, 80 bp, synthetic construct; identical to SEQ ID NO: 10187
  source 1..80: mol_type = other DNA

SEQ ID NO: 37165 - DNA, 80 bp, synthetic construct
  source 1..80: mol_type = other DNA
ctactactgtgttcagaaaaggcatgtcttttcttgacaaaaaagtccagtgaagcttgtttcgccatctgaaattagga

SEQ ID NO: 37166 - DNA, 80 bp, synthetic construct
  source 1..80: mol_type = other DNA
tatggctgataaacgaaacataaagtatcacaggttgtaatggggacctattgtgtttgactagtgtgtaactgccacca

SEQ ID NO: 37167 - DNA, 80 bp, synthetic construct
  source 1..80: mol_type = other DNA
ctggagtttttataccagtactgctctactgatcacatgttgcgtaccactagtttaagtcataagtaacctccatattt

SEQ ID NO: 37168 - DNA, 80 bp, synthetic construct
  source 1..80: mol_type = other DNA
aaactgaagtctttcccaacacaaacccatatcttccaagcaaatttatcatcccctacccctacaaatacttcttcact

SEQ ID NO: 37169 - DNA, 80 bp, synthetic construct; identical to SEQ ID NO: 10188
  source 1..80: mol_type = other DNA

SEQ ID NO: 37170 - DNA, 80 bp, synthetic construct
  source 1..80: mol_type = other DNA
ctttttcacaaactacacaggataaaaatcttagtctgctctcaggagggcttttttcagccaccttaggagtgacagaa

SEQ ID NO: 37171 - DNA, 80 bp, synthetic construct
  source 1..80: mol_type = other DNA
gtttagcttcagagctaaatgcactttcacatggagtctgttgcatgcttctgtgatagggctgattttgggacatctga

SEQ ID NO: 37172 - DNA, 80 bp, synthetic construct
  source 1..80: mol_type = other DNA
ccatggacaattttcaattctggccaaatattactgagttcactgacaacctggcttgaaaattccctcccattgtcaga

SEQ ID NO: 37173 - DNA, 80 bp, synthetic construct; identical to SEQ ID NO: 10189
  source 1..80: mol_type = other DNA

SEQ ID NO: 37174 - DNA, 80 bp, synthetic construct
  source 1..80: mol_type = other DNA
atgtgtattatgcagaatgtcaaataagtcctcactgtgtaagtaataccgtattttatctgtttccccatttacagcct

SEQ ID NO: 37175 - DNA, 80 bp, synthetic construct
  source 1..80: mol_type = other DNA
ttccagtaaccttgctaagcttctgaagaacttttctctcatgttttctggttcaatttctgcttcattagtatctaagc

SEQ ID NO: 37176 - DNA, 80 bp, synthetic construct
  source 1..80: mol_type = other DNA
ccaaaggagccagtagtgcttgaggtagaagtagggaatatggacacacaaaaggggataccattttctttcttttttga

SEQ ID NO: 37177 - DNA, 80 bp, synthetic construct
  source 1..80: mol_type = other DNA
caggtgcgcaccatgacacttgactaatgtttttatttttagtagagatggggtttcaccatgttggccagactggtctt

SEQ ID NO: 37178 - DNA, 80 bp, synthetic construct; identical to SEQ ID NO: 10190
  source 1..80: mol_type = other DNA

SEQ ID NO: 37179 - DNA, 80 bp, synthetic construct
  source 1..80: mol_type = other DNA
gacctcatgatccacctgccttggcctcctaaaatgctgggattacaggcgtgagccaccacacccggtctcagactttt

SEQ ID NO: 37180 - DNA, 80 bp, synthetic construct
  source 1..80: mol_type = other DNA
tacaaactcaatacaaatagcttcattactaattttaataagagtactggatgagtcaaaatcagtgaaaaatttctgac

SEQ ID NO: 37181 - DNA, 80 bp, synthetic construct
  source 1..80: mol_type = other DNA
gcttggaaaaatactttcactcaagtcaacatcatttatactatcaatttgcataccaaatagtgagacagagcagggac

SEQ ID NO: 37182 - DNA, 80 bp, synthetic construct; identical to SEQ ID NO: 10191
  source 1..80: mol_type = other DNA

SEQ ID NO: 37183 - DNA, 80 bp, synthetic construct
  source 1..80: mol_type = other DNA
cagacaaagctttgcctccttaaccaattgcaaatcaaaaaatctttgaatctacctatgacctgtaagccccttctctg

SEQ ID NO: 37184 - DNA, 80 bp, synthetic construct
  source 1..80: mol_type = other DNA
ttgacactctgcaaataaatgccctcttttctcctgttgatgtggatgtttggctttcctgtgccaggcaagtgaacccg

SEQ ID NO: 37185 - DNA, 80 bp, synthetic construct
  source 1..80: mol_type = other DNA
acagtgagttttcctttcctgaaaatcattatctatttataacacaagttagcactatcgcagttttttctttaactgtt

SEQ ID NO: 37186 - DNA, 80 bp, synthetic construct; identical to SEQ ID NO: 10192
  source 1..80: mol_type = other DNA

SEQ ID NO: 37187 - DNA, 80 bp, synthetic construct
  source 1..80: mol_type = other DNA
taatcctttttaaatggaaaagatagctgttccagaaccaggccagactccacctctactatacattataccaataacag

SEQ ID NO: 37188 - DNA, 80 bp, synthetic construct
  source 1..80: mol_type = other DNA
gcaatgggacccatgactacactgacaagtgctcagtatttacatacagaggtatctgatttatccacaggtacttacta

SEQ ID NO: 37189 - DNA, 80 bp, synthetic construct
  source 1..80: mol_type = other DNA
ctattaatacattcagtagaagctgaaatggaatgaggtttgataactttcaatactagacccttcattctcccaagtct

SEQ ID NO: 37190 - DNA, 80 bp, synthetic construct; identical to SEQ ID NO: 10193
  source 1..80: mol_type = other DNA

SEQ ID NO: 37191 - DNA, 80 bp, synthetic construct
  source 1..80: mol_type = other DNA
gcatccctttggtttctgtttctgggaataacaatgaaagcacgttaaagaaatatctcctaaaccgtgatgactgaaaa

SEQ ID NO: 37192 - DNA, 80 bp, synthetic construct
  source 1..80: mol_type = other DNA
ctactattaataatgcagattcaccaggcctaagaaaatgtacaaattgttaaaggattacagagttattaatggttaca

SEQ ID NO: 37193 - DNA, 80 bp, synthetic construct
  source 1..80: mol_type = other DNA
ttagaatatcatgttgggatttaagattctgtgtcatgctcctttcctccaacttggataccacataataaatttattct

SEQ ID NO: 37194 - DNA, 80 bp, synthetic construct
  source 1..80: mol_type = other DNA
cccatctctactaaaaacacaaaaattagccagacgaggtggtgcacgcctgtagtcccagctactcaggaggctgaggc

SEQ ID NO: 37195 - DNA, 80 bp, synthetic construct; identical to SEQ ID NO: 10194
  source 1..80: mol_type = other DNA

SEQ ID NO: 37196 - DNA, 80 bp, synthetic construct
  source 1..80: mol_type = other DNA
ccagcttttggagcaactaagaaacaaaatatggatatggttcattgtgctgaattattcactgactctcccccaccccc

SEQ ID NO: 37197 - DNA, 80 bp, synthetic construct
  source 1..80: mol_type = other DNA
taccacagaagtttgaagagtaccttgggtagtggtaataaattacaaaactgaagttacttcaaactggtcatgacagt

SEQ ID NO: 37198 - DNA, 80 bp, synthetic construct
  source 1..80: mol_type = other DNA
aacctcatcactgcccaaaatacaaaaaattagccaggcatggtagcacatatctgtggtcccagctactcaggaggctg

SEQ ID NO: 37199 - DNA, 80 bp, synthetic construct
  source 1..80: mol_type = other DNA
ctgtgttcattagaaatgcacatatttccaataaattcgaacatctaacttacagtggcacaaacaaataggggtttatt

SEQ ID NO: 37200 - DNA, 80 bp, synthetic construct; identical to SEQ ID NO: 10195
  source 1..80: mol_type = other DNA

SEQ ID NO: 37201 - DNA, 80 bp, synthetic construct
  source 1..80: mol_type = other DNA
aacaaggaagcctggaaaagaatttaattagatatattgccagtatgaacaaaaccaacattttgtcgggaggaaagaag

SEQ ID NO: 37202 - DNA, 80 bp, synthetic construct
  source 1..80: mol_type = other DNA
atcaaacatgatcagcgtataacctgaacaatacccaaggaactgaccaaacaccaagtcctaccagaagctacattttt

SEQ ID NO: 37203 - DNA, 80 bp, synthetic construct
  source 1..80: mol_type = other DNA
aatcgttagtgttagtgtattttagtgtggcccaagacaattattcttccaatatggcccagggaagccaaaagattgga

SEQ ID NO: 37204 - DNA, 80 bp, synthetic construct; identical to SEQ ID NO: 10196
  source 1..80: mol_type = other DNA

SEQ ID NO: 37205 - DNA, 80 bp, synthetic construct
  source 1..80: mol_type = other DNA
aaaatacaaaaattagctgggcgtggtggcgcttgcctgtaaatcccagctacttaggaggctgaggcaggagaatcgct

SEQ ID NO: 37206 - DNA, 80 bp, synthetic construct
  source 1..80: mol_type = other DNA
actttaagtataggattttaccttagaaaggtgatgttatcttgttagaaacaagtgtgaggaaagggggggcaagggtg

SEQ ID NO: 37207 - DNA, 80 bp, synthetic construct
  source 1..80: mol_type = other DNA
gggcgtggtggcgggcgcctgtagtcccagctactcgggaggctgaggcaggagaatgactgaaccccggaggcagagct

SEQ ID NO: 37208 - DNA, 80 bp, synthetic construct; identical to SEQ ID NO: 10197
  source 1..80: mol_type = other DNA

SEQ ID NO: 37209 - DNA, 80 bp, synthetic construct
  source 1..80: mol_type = other DNA
ttctctatcatacttgaagcagaagataactgagaagtgaaaagctcttgggaggcagcttgtagcttgtggaactgcat

SEQ ID NO: 37210 - DNA, 80 bp, synthetic construct
  source 1..80: mol_type = other DNA
ttttggggagatcttctgaaggctcaaaggctttggaatcataaattaaatcagggagaattgtatatcacaccccgtgc

SEQ ID NO: 37211 - DNA, 80 bp, synthetic construct
  source 1..80: mol_type = other DNA
ttgcaatcacaccatgattaaggggctgcagtaaagaagttgtattgggaggtaaaatgagaactgtgatatttgaggaa

SEQ ID NO: 37212 - DNA, 80 bp, synthetic construct; identical to SEQ ID NO: 10198
  source 1..80: mol_type = other DNA

SEQ ID NO: 37213 - DNA, 80 bp, synthetic construct
  source 1..80: mol_type = other DNA
aatgcatccaaattctccacatatccccttgagggcatctgcttccaatagagactggtttcataaaaagtaaaaatctg

SEQ ID NO: 37214 - DNA, 80 bp, synthetic construct
  source 1..80: mol_type = other DNA
agtagttcttgaagatactaaaccagccactacttccactaaatgaaggcacttctgcgggacttccatctttttttctt

SEQ ID NO: 37215 - DNA, 80 bp, synthetic construct
  source 1..80: mol_type = other DNA
tccacacacttaacaaatgctccatttcctccatttccttattccttgttccaacagatttcataacactggcagttgtt

SEQ ID NO: 37216 - DNA, 80 bp, synthetic construct
  source 1..80: mol_type = other DNA
cactagcagaaattttatcacaagcacacttctatggcacttgcaaaaccctctgcttgctccttttctggaatacaaaa

SEQ ID NO: 37217 - DNA, 80 bp, synthetic construct; identical to SEQ ID NO: 10199
  source 1..80: mol_type = other DNA

SEQ ID NO: 37218 - DNA, 80 bp, synthetic construct
  source 1..80: mol_type = other DNA
cacaatgttctaaaattactgtcaaagaaggcaaatatactcctttagaaacaactccactgtaatggcaaaaagctttt

SEQ ID NO: 37219 - DNA, 80 bp, synthetic construct
  source 1..80: mol_type = other DNA
cccagagaaggtgtaatatgcccaaggttacacagctaattagtaacagagcctagatagcttcaaaagacagtaatttt

SEQ ID NO: 37220 - DNA, 80 bp, synthetic construct
  source 1..80: mol_type = other DNA
catctacaccagtgatcaaataagaaataatgccccaaaccagggtttccaaccaccagcgcgaaattactcccattact

SEQ ID NO: 37221 - DNA, 80 bp, synthetic construct
  source 1..80: mol_type = other DNA
cactctcaggattatgctcccgcacccaagactggagctcctcaggcaggatggtcaggaactgctccagcaccaacaat

SEQ ID NO: 37222 - DNA, 80 bp, synthetic construct; identical to SEQ ID NO: 10200
  source 1..80: mol_type = other DNA

SEQ ID NO: 37223 - DNA, 80 bp, synthetic construct
  source 1..80: mol_type = other DNA
gtctaggcaaatgggtgattttacttgagctccttttttgttcttggtcaggaaagtttttgatataagaaaacactcaa

SEQ ID NO: 37224 - DNA, 80 bp, synthetic construct
  source 1..80: mol_type = other DNA
agagcgactcactaaagcttcagggtcacaaattgagcggcaagatacttgcgagacagaaaaccgaggttatgacggat

SEQ ID NO: 37225 - DNA, 80 bp, synthetic construct
  source 1..80: mol_type = other DNA
cacctctgaggagctcagaccctgtggaacccagactagtgggtcgagggaaacactctacagctcaggtggaggttccg

SEQ ID NO: 37226 - DNA, 80 bp, synthetic construct; identical to SEQ ID NO: 10201
  source 1..80: mol_type = other DNA

SEQ ID NO: 37227 - DNA, 80 bp, synthetic construct
  source 1..80: mol_type = other DNA
ttcgggccactttcacctttccctttcaccctaaatcagacttaaaaagaaatgtaagagttagtccattgtttccattt

SEQ ID NO: 37228 - DNA, 80 bp, synthetic construct
  source 1..80: mol_type = other DNA
acattcttttcaagcagtcactgggttcctccatacctctggtagcgcagagatgcccaaggaatatttgttgaattgct

SEQ ID NO: 37229 - DNA, 80 bp, synthetic construct
  source 1..80: mol_type = other DNA
gtcttgagtaaaattctgtataaaatttttgtctgtgtgcctgtgtcatccaaccctgaaaagatcattttcccagtcac

SEQ ID NO: 37230 - DNA, 80 bp, synthetic construct; identical to SEQ ID NO: 10202
  source 1..80: mol_type = other DNA

SEQ ID NO: 37231 - DNA, 80 bp, synthetic construct
  source 1..80: mol_type = other DNA
gtttcttcatcctcagttccattcctcagaaaaattgatgccgagtttgttgtatgtacctccaacctatttttaaaatg

SEQ ID NO: 37232 - DNA, 80 bp, synthetic construct
  source 1..80: mol_type = other DNA
ttttggtttgttttaaacttaaatcctcccccagaaactgccaagccaacatgtgttacatgtctatcccattcttttta

SEQ ID NO: 37233 - DNA, 80 bp, synthetic construct
  source 1..80: mol_type = other DNA
agatttgcaaaagtatgctagtatagtgaaaattagttaagacagcttcctctccctactccagcttatcctcagataca

SEQ ID NO: 37234 - DNA, 80 bp, synthetic construct
  source 1..80: mol_type = other DNA
agagatctccctgaattttattttgacagttactccttcttcagcagcaaagcgtcagctttcctgtcagcgtgagtctc

SEQ ID NO: 37235 - DNA, 80 bp, synthetic construct; identical to SEQ ID NO: 10203
  source 1..80: mol_type = other DNA

SEQ ID NO: 37236 - DNA, 80 bp, synthetic construct
  source 1..80: mol_type = other DNA
tatcgacttacgaaaagctccagcagcaacgtggaaacccaattcctgtgatggagacaaacgcttcctcaaaatttcct

SEQ ID NO: 37237 - DNA, 80 bp, synthetic construct
  source 1..80: mol_type = other DNA
tcccccatcttgatgagacaattcaccctcatctgctttctctagtcccctgtacttcttagtctctccgctcaccccga

SEQ ID NO: 37238 - DNA, 80 bp, synthetic construct
  source 1..80: mol_type = other DNA
cggtggaggggccctacaacttgtgtgggagacaagggagatgggggtaaaaagacctctgccttcagccgttcgcctgg

SEQ ID NO: 37239 - DNA, 80 bp, synthetic construct; identical to SEQ ID NO: 10204
  source 1..80: mol_type = other DNA

SEQ ID NO: 37240 - DNA, 80 bp, synthetic construct
  source 1..80: mol_type = other DNA
attatttattttcagatttcttactttgacattttgattttcgcatacataccaaaaaaccaaatcgaatcctactttca

SEQ ID NO: 37241 - DNA, 80 bp, synthetic construct
  source 1..80: mol_type = other DNA
ttgcagagggaaataacattttcttgtggtgttgccttagctagtgtggccccaccttctttccactttgttgatgttag

SEQ ID NO: 37242 - DNA, 80 bp, synthetic construct
  source 1..80: mol_type = other DNA
atccacttatcctagctcaaaccagtaactcagactttatcccaagcctctaaattaaggtaatggacaagacctgattg

SEQ ID NO: 37243 - DNA, 80 bp, synthetic construct; identical to SEQ ID NO: 10205
  source 1..80: mol_type = other DNA

SEQ ID NO: 37244 - DNA, 80 bp, synthetic construct
  source 1..80: mol_type = other DNA
tatcaagtttctctttttccacccttgatatctaatcaagttcctcgtagtcactttctatcaaatggttgtcttaccct

SEQ ID NO: 37245 - DNA, 80 bp, synthetic construct
  source 1..80: mol_type = other DNA
atatcctgggaaaacttcttttccaaagaagatatccagctaaggattgagaatatgatcagctgccgagagaagatgtg

SEQ ID NO: 37246 - DNA, 80 bp, synthetic construct
  source 1..80: mol_type = other DNA
gacaaaattcaacaccctttcatcataaaaactctcaaaagattagttttatagagccagagcaattagataagagaaag

SEQ ID NO: 37247 - DNA, 80 bp, synthetic construct; identical to SEQ ID NO: 10206
  source 1..80: mol_type = other DNA

SEQ ID NO: 37248 - DNA, 80 bp, synthetic construct
  source 1..80: mol_type = other DNA
caatgcaatccttgtcaaaactccaatgtcatattttacatgaatagaaaaaacaattcttaaatttgtatggaaccaca

SEQ ID NO: 37249 - DNA, 80 bp, synthetic construct
  source 1..80: mol_type = other DNA
aacccatgtatttattgtcgattgatttttgacaaaggtgccaagaacacacaaaaggacagcttctttaataaatggtg

SEQ ID NO: 37250 - DNA, 80 bp, synthetic construct
  source 1..80: mol_type = other DNA
ctgggcaatgatttttttttttttttgactccaaagcacaagcaacagaagctaaagcagacagatgggattgcatcaaa

SEQ ID NO: 37251 - DNA, 80 bp, synthetic construct; identical to SEQ ID NO: 10207
  source 1..80: mol_type = other DNA

SEQ ID NO: 37252 - DNA, 80 bp, synthetic construct
  source 1..80: mol_type = other DNA
gcctggccaccatggtgaaaccccgtctctattaaaaatacaaaaattagccgggcatggtggtacgcacctctaatccc

SEQ ID NO: 37253 - DNA, 80 bp, synthetic construct
  source 1..80: mol_type = other DNA
aaaacaaaaacttctttttttggctttgttttgctttttgttttgagaccgagcctggctctgtcgcccaggctggagtg

SEQ ID NO: 37254 - DNA, 80 bp, synthetic construct
  source 1..80: mol_type = other DNA
tattttgtagagatggtggtctccttatgttagccaggctgctctcaaacacttgggttcgaactcctgggctcaagcga

SEQ ID NO: 37255 - DNA, 80 bp, synthetic construct; identical to SEQ ID NO: 10208
  source 1..80: mol_type = other DNA

SEQ ID NO: 37256 - DNA, 80 bp, synthetic construct
  source 1..80: mol_type = other DNA
agaaaatgtgctaggccaggaacagtggctcaagcctgtaatcccagcattttgggaggccgaggcgggtggatcacctg

SEQ ID NO: 37257 - DNA, 80 bp, synthetic construct
  source 1..80: mol_type = other DNA
agctgagatggtgccattgcactccagcctgggtgacaagagcaaaactccaaagagaaagaaaatgtgctatatataca

SEQ ID NO: 37258 - DNA, 80 bp, synthetic construct
  source 1..80: mol_type = other DNA
tagaaatagagagattagaataatggttaccagatgttacaggatggggtgggagttggggaaggaatagagttgttagt

SEQ ID NO: 37259 - DNA, 80 bp, synthetic construct; identical to SEQ ID NO: 10209
  source 1..80: mol_type = other DNA

SEQ ID NO: 37260 - DNA, 80 bp, synthetic construct
  source 1..80: mol_type = other DNA
gaggatcagccactgcacttcagcctcggtgttagagcaaaacccagtctcaaaaaaaaaaaaaaaaaaaaaaaaagaag

SEQ ID NO: 37261 - DNA, 80 bp, synthetic construct
  source 1..80: mol_type = other DNA
cagaccagccaggccaacatggcgagaccccgtctctactaaaaatacaaaaattagctgggcttggtggcacgtgcctg

SEQ ID NO: 37262 - DNA, 80 bp, synthetic construct
  source 1..80: mol_type = other DNA
tggatataacatgtagatacttcagccatgtacaagccttaagaccaacataggaaacatctgaatactttattaaatca

SEQ ID NO: 37263 - DNA, 80 bp, synthetic construct; identical to SEQ ID NO: 10210
  source 1..80: mol_type = other DNA

SEQ ID NO: 37264 - DNA, 80 bp, synthetic construct
  source 1..80: mol_type = other DNA
tacagaaaacccaaattgtccaacagagaactggttaaataatatatggtaaagtatgcattgggatacaatgcatcctt

SEQ ID NO: 37265 - DNA, 80 bp, synthetic construct
  source 1..80: mol_type = other DNA
tcatatgtgcttagtgtaatcctggaaagaattaacaacagtggttatcagtaaagaatgtaattaggtggttggggaat

SEQ ID NO: 37266 - DNA, 80 bp, synthetic construct
  source 1..80: mol_type = other DNA
aggcccacgatggaaatcacaagtagaaactattcaatatggacattcctctctgtcttgcttatggaggcatctttaga

SEQ ID NO: 37267 - DNA, 80 bp, synthetic construct
  source 1..80: mol_type = other DNA
agaccagcagacaataatggttaagtattttgttgggggagggcagtttaaagttagcaaagagtaaaaatttcagtaag

SEQ ID NO: 37268 - DNA, 80 bp, synthetic construct; identical to SEQ ID NO: 10211
  source 1..80: mol_type = other DNA

SEQ ID NO: 37269 - DNA, 80 bp, synthetic construct
  source 1..80: mol_type = other DNA
cgctaactaggcagcactcagacccatcctttcagagggttaaataaaaacctccagaaacgacgaggatgggattcgaa

SEQ ID NO: 37270 - DNA, 80 bp, synthetic construct
  source 1..80: mol_type = other DNA
tccttacaaccacacccagaatcgggtatttttaggtacatttcgcagcaaccacaaaagtgataaatgacacctagagt

SEQ ID NO: 37271 - DNA, 80 bp, synthetic construct
  source 1..80: mol_type = other DNA
agggaccggattattccttctcctgatgagaacatctccagagattcctgttttctgggaggtgccagaaattagcaaac

SEQ ID NO: 37272 - DNA, 80 bp, synthetic construct; identical to SEQ ID NO: 10212
  source 1..80: mol_type = other DNA

SEQ ID NO: 37273 - DNA, 80 bp, synthetic construct
  source 1..80: mol_type = other DNA
ccaactccatcccataatttttatctatccaggaagaagcggactttggcaatttcaaataaacccagcaccaaggaacc

SEQ ID NO: 37274 - DNA, 80 bp, synthetic construct
  source 1..80: mol_type = other DNA
ttctctccccatcatgttcctttaccaaatttcatatatccatcctcaccatacaactacccagcatggaaaactgacct

SEQ ID NO: 37275 - DNA, 80 bp, synthetic construct
  source 1..80: mol_type = other DNA
actaaaaataaaataaaataaaataaaataaaataaaataaaataaaattagctgagtgcggcggcgcgcacttgtaatc

SEQ ID NO: 37276 - DNA, 80 bp, synthetic construct; identical to SEQ ID NO: 10213
  source 1..80: mol_type = other DNA

SEQ ID NO: 37277 - DNA, 80 bp, synthetic construct
  source 1..80: mol_type = other DNA
atgtgaggaaagctacaaaactctgactgaagcaatcaaagagaatccaaataaatggagagatattccatgttcatgga

SEQ ID NO: 37278 - DNA, 80 bp, synthetic construct
  source 1..80: mol_type = other DNA
gcaaaagaactatgctgaaaaactaacattacccaatgtcaaagttatagtaatcaggacagtgtggtggtggtgtgata

SEQ ID NO: 37279 - DNA, 80 bp, synthetic construct
  source 1..80: mol_type = other DNA
ataagtctcatgagatatgatggttttaaaaaggggagtttccctgcacaaactcttctcttgtctgccaccatgtgaga

SEQ ID NO: 37280 - DNA, 80 bp, synthetic construct; identical to SEQ ID NO: 10214
  source 1..80: mol_type = other DNA

SEQ ID NO: 37281 - DNA, 80 bp, synthetic construct
  source 1..80: mol_type = other DNA
aataacataggagaaaatctaggtagcgttggctttggcaattagtttataaaaacaacaccaaaagcaaaacatctgga

SEQ ID NO: 37282 - DNA, 80 bp, synthetic construct
  source 1..80: mol_type = other DNA
aggtggcggctaagcttatttatagattctcaacatcatacgtcactagggaattaaaagtcaaaacagcaggtggggag

SEQ ID NO: 37283 - DNA, 80 bp, synthetic construct
  source 1..80: mol_type = other DNA
ctacttgggaggctgaggtgagaggcctgtttgagcccaggagattgcagtgagctgagattgcaccactgtactccagc

SEQ ID NO: 37284 - DNA, 80 bp, synthetic construct; identical to SEQ ID NO: 10215
  source 1..80: mol_type = other DNA

SEQ ID NO: 37285 - DNA, 80 bp, synthetic construct
  source 1..80: mol_type = other DNA
ggcgcgatctcggctcaccgcaagctccatctcccagggttcacgccattctcctgcctcagcctccggagtagctggga

SEQ ID NO: 37286 - DNA, 80 bp, synthetic construct
  source 1..80: mol_type = other DNA
cggccacatgtgcccattttttaaaatgttcttttctcttagacatatactgaagtatttaaacatcaaattacataatg

SEQ ID NO: 37287 - DNA, 80 bp, synthetic construct
  source 1..80: mol_type = other DNA
ctagaagagcttttttcgatgcaagcgttagctgtcaactacctgtttttgtcaatgatattcaaaattactctcactct

SEQ ID NO: 37288 - DNA, 80 bp, synthetic construct; identical to SEQ ID NO: 10216
  source 1..80: mol_type = other DNA

SEQ ID NO: 37289 - DNA, 80 bp, synthetic construct
  source 1..80: mol_type = other DNA
ccaccgatgttgaggtgtttgagggagggaaagttgttgttctgtgggaccctggtgctgaagacatgatctgggtaacc

SEQ ID NO: 37290 - DNA, 80 bp, synthetic construct
  source 1..80: mol_type = other DNA
atgctgatagtgcagataatgcctgtgaagaagaaagaaagactcactgaaagtttgatctgtataggtcctttggttta

SEQ ID NO: 37291 - DNA, 80 bp, synthetic construct
  source 1..80: mol_type = other DNA
gctcactgaaaccttggcctcccgggtcaagtgattctcctgccttagcctcctgagtaactgggactacaggtgctcac

SEQ ID NO: 37292 - DNA, 80 bp, synthetic construct; identical to SEQ ID NO: 10217
  source 1..80: mol_type = other DNA

SEQ ID NO: 37293 - DNA, 80 bp, synthetic construct
  source 1..80: mol_type = other DNA
ttactaaactctgaatggaaataaagtattcaataaactcagattgaacttggagtattgttgctttaatctagtgtatt

SEQ ID NO: 37294 - DNA, 80 bp, synthetic construct
  source 1..80: mol_type = other DNA
tcgcccaggctggagtgcagtggcgcgatctcggctcactgcaaactccgcctcccggattcaagccattctcctgcctc

SEQ ID NO: 37295 - DNA, 80 bp, synthetic construct
  source 1..80: mol_type = other DNA
gagccaccgtgcccgcccaaaataaatttttaaataaaattttaaacactttctcattcttaaagtttactttgatgggt

SEQ ID NO: 37296 - DNA, 80 bp, synthetic construct; identical to SEQ ID NO: 10218
  source 1..80: mol_type = other DNA

SEQ ID NO: 37297 - DNA, 80 bp, synthetic construct
  source 1..80: mol_type = other DNA
ttcagaattttcacataatcttccatttctattattattattttttaaatcagtattctgtggctgtgtaataaagtact

SEQ ID NO: 37298 - DNA, 80 bp, synthetic construct
  source 1..80: mol_type = other DNA
agggctattttctggagttcatcagttttccttcatgtgatctccccaacaggactgcccagatttcttatacagtgata

SEQ ID NO: 37299 - DNA, 80 bp, synthetic construct
  source 1..80: mol_type = other DNA
gggaggagatgcaaagaattcgcagttgtgtttatctatctcagcttgcttcacatgttccatgttcttaactatttttg

SEQ ID NO: 37300 - DNA, 80 bp, synthetic construct
  source 1..80: mol_type = other DNA
taaggtcaggagttcaagaccagcctggccaacaaggtgaaacccgtctctattaaaaatacaaaaattagctgggcgtg

SEQ ID NO: 37301 - DNA, 80 bp, synthetic construct; identical to SEQ ID NO: 10219
  source 1..80: mol_type = other DNA

SEQ ID NO: 37302 - DNA, 80 bp, synthetic construct
  source 1..80: mol_type = other DNA
tattgtgtgatcttaacataagagagttctgcaggcctaactcggggaagttttctttcagagaggatatatttctactt

SEQ ID NO: 37303 - DNA, 80 bp, synthetic construct
  source 1..80: mol_type = other DNA
ctcagctcctccaactctctgcttttctgatattaaatattcatcctcacagttgtttttcgattggtatctgacttcag

SEQ ID NO: 37304 - DNA, 80 bp, synthetic construct
  source 1..80: mol_type = other DNA
tgacctgggctccaggtgtttctaagtcactttagcgcccagaaaatattcatttatttttgttttgagtgacctctaaa

SEQ ID NO: 37305 - DNA, 80 bp, synthetic construct; identical to SEQ ID NO: 10220
  source 1..80: mol_type = other DNA

SEQ ID NO: 37306 - DNA, 80 bp, synthetic construct
  source 1..80: mol_type = other DNA
cctgtaatcccagctactcaggaggctgaggcaagagaatcatttgaacccgggaggcggaggttgcagtgagccgagat

SEQ ID NO: 37307 - DNA, 80 bp, synthetic construct
  source 1..80: mol_type = other DNA
ggacaactaaatgcaacgcctgaccctagactagatcctatatgagaggaaaacatcaggtcaattggtcaacttgaaat

SEQ ID NO: 37308 - DNA, 80 bp, synthetic construct
  source 1..80: mol_type = other DNA
acaggagagagaagaagcaactcataaggcaaatggggtaaaatattaataatatctaaatctgagtaaaggatagaagg

SEQ ID NO: 37309 - DNA, 80 bp, synthetic construct; identical to SEQ ID NO: 10221
  source 1..80: mol_type = other DNA

SEQ ID NO: 37310 - DNA, 80 bp, synthetic construct
  source 1..80: mol_type = other DNA
cagatttccagtttgtccttgtgattgattcatgacatcttgagctcacaagaacgttccctgccatcaccactaagtgt

SEQ ID NO: 37311 - DNA, 80 bp, synthetic construct
  source 1..80: mol_type = other DNA
ggctgcgctactggctttggcctcctggggccttatggttgaaaacagcaggaaatgaagctggaaaaagcgagagacaa

SEQ ID NO: 37312 - DNA, 80 bp, synthetic construct
  source 1..80: mol_type = other DNA
cattgcaatttaccgaatctttgagaaatactgattataaatcatgaaagaaatgcaaagcaacctgtctgtggttgggg

SEQ ID NO: 37313 - DNA, 80 bp, synthetic construct; identical to SEQ ID NO: 10222
  source 1..80: mol_type = other DNA

SEQ ID NO: 37314 - DNA, 80 bp, synthetic construct
  source 1..80: mol_type = other DNA
agagcaaagaacagcatggaggtggaatagcagaaacatatcttattgatgtctttcttctgagcttccaaccaccctat

SEQ ID NO: 37315 - DNA, 80 bp, synthetic construct
  source 1..80: mol_type = other DNA
aaccagaactactgtccttttgctgaaatagcttagtgggagtgtgagagaccaggcatccaaatatctcttgttcaaga

SEQ ID NO: 37316 - DNA, 80 bp, synthetic construct
  source 1..80: mol_type = other DNA
gagacccgctctcttatctgtaaacactgcgttcaaggagaaagacactcctttgaaatactggaatgtggacagactcc

SEQ ID NO: 37317 - DNA, 80 bp, synthetic construct; identical to SEQ ID NO: 10223
  source 1..80: mol_type = other DNA

SEQ ID NO: 37318 - DNA, 80 bp, synthetic construct
  source 1..80: mol_type = other DNA
acgacacctacacatgttaatcaatccaaatcaaaggtgatttgcctacgccagagctagtatgaaatattgattaaata

SEQ ID NO: 37319 - DNA, 80 bp, synthetic construct
  source 1..80: mol_type = other DNA
aagctgaggcaggagaattgcttgagcccaggagttctagaccagcctgggcaacatagagagatgatgtctcttttaaa

SEQ ID NO: 37320 - DNA, 80 bp, synthetic construct
  source 1..80: mol_type = other DNA
aagcgggggttggggggagggcgctgttcatggtatgtattcccatttaagtctatttatggtattttgggatcaaatac

SEQ ID NO: 37321 - DNA, 80 bp, synthetic construct; identical to SEQ ID NO: 10224
  source 1..80: mol_type = other DNA

SEQ ID NO: 37322 - DNA, 80 bp, synthetic construct
  source 1..80: mol_type = other DNA
cctatctctcctgtatggaatgtatttcaggataaacatatagttgatgagggaaagatttttcttctcaggaaataaca

SEQ ID NO: 37323 - DNA, 80 bp, synthetic construct
  source 1..80: mol_type = other DNA
tctagaatggttggattaggctgatgtcacctaaaaccaaagctaaattttatatcatcaaatgtgagacaaccacatat

SEQ ID NO: 37324 - DNA, 80 bp, synthetic construct
  source 1..80: mol_type = other DNA
gctaaatccagaatgtggaaaattctcctggacaaactgaccttcaagaaataaatggcatggagtccaggcaagttggc

SEQ ID NO: 37325 - DNA, 80 bp, synthetic construct; identical to SEQ ID NO: 10225
  source 1..80: mol_type = other DNA

SEQ ID NO: 37326 - DNA, 80 bp, synthetic construct
  source 1..80: mol_type = other DNA
aaaaatacaacaaattagctgggtgtggtggcgtgtgcctgtaatcccagctactcaggaggctgaggcaggagaattgc

SEQ ID NO: 37327 - DNA, 80 bp, synthetic construct
  source 1..80: mol_type = other DNA
agtcatccacaatcacaagtagtttatactttgatgtgtccttctaggtcctgtgtgtgtagacataacatccagttata

SEQ ID NO: 37328 - DNA, 80 bp, synthetic construct
  source 1..80: mol_type = other DNA
gggacaaaaattttatagaaggcaaaaatggagacatgcctctagataaaagcattagcagagttctgattaaaatactg

SEQ ID NO: 37329 - DNA, 80 bp, synthetic construct; identical to SEQ ID NO: 10226
  source 1..80: mol_type = other DNA

SEQ ID NO: 37330 - DNA, 80 bp, synthetic construct
  source 1..80: mol_type = other DNA
catatagacctatggttatcatctaaaaccatgttctagataatggagatactagcaaagagcccttcccttcaactttc

SEQ ID NO: 37331 - DNA, 80 bp, synthetic construct
  source 1..80: mol_type = other DNA
tccaagaggtggattaacaaaggtcactcctggaagacaggccttcctaaaaactaacaaaaggatataaatggattgtt

SEQ ID NO: 37332 - DNA, 80 bp, synthetic construct
  source 1..80: mol_type = other DNA
ttgccactacccagtgaaaagtcagtgtactctccaaaacctcaagtttaacaattccattcccaaatacaaccactcct

SEQ ID NO: 37333 - DNA, 80 bp, synthetic construct
  source 1..80: mol_type = other DNA
tttaaaagtgtcttctaaataggaacattacggcctagaatcgtttcccttctcacctctaaattaaccctatggacagg

SEQ ID NO: 37334 - DNA, 80 bp, synthetic construct; identical to SEQ ID NO: 10227
  source 1..80: mol_type = other DNA

SEQ ID NO: 37335 - DNA, 80 bp, synthetic construct
  source 1..80: mol_type = other DNA
gagccactgggccctgatcacttctgtgtttttaagaacactctgtgaattttaacataaggtgtactcaatgtatcagt

SEQ ID NO: 37336 - DNA, 80 bp, synthetic construct
  source 1..80: mol_type = other DNA
cttcctccctgaaccagcacaaatataataatgtgtactgctcagggaattagtttgatcagttttcaaaagacaatatt

SEQ ID NO: 37337 - DNA, 80 bp, synthetic construct
  source 1..80: mol_type = other DNA
taaattgaaacattctattctagaatccttaatttcttcccactcctctccaccacaaactcagtggatataggcacttg

SEQ ID NO: 37338 - DNA, 80 bp, synthetic construct; identical to SEQ ID NO: 10228
  source 1..80: mol_type = other DNA

SEQ ID NO: 37339 - DNA, 80 bp, synthetic construct
  source 1..80: mol_type = other DNA
ctacctccctcaactcaacgaacaagtagagagcacactgttcagagaggtggtttaacaattccacttccaaatacagt

SEQ ID NO: 37340 - DNA, 80 bp, synthetic construct
  source 1..80: mol_type = other DNA
atggttataatctgaggtatcttccaaatatgatcattttagtcttgaaccattccctcctcacttccttctctctgcct

SEQ ID NO: 37341 - DNA, 80 bp, synthetic construct
  source 1..80: mol_type = other DNA
tgagctaattttactgagtactttgtcatacactggcaacctctaacatctaagggactagatgttgcaaaattatgact

SEQ ID NO: 37342 - DNA, 80 bp, synthetic construct; identical to SEQ ID NO: 10229
  source 1..80: mol_type = other DNA

SEQ ID NO: 37343 - DNA, 80 bp, synthetic construct
  source 1..80: mol_type = other DNA
cgcccagctgattttgtatttttagtagagacagagtttcaccatgttgaccatggctggtttcaaactcctgacctcag

SEQ ID NO: 37344 - DNA, 80 bp, synthetic construct
  source 1..80: mol_type = other DNA
cctgtacatttaacatatgctgggcacttctaaacatctagataggctagatgtttcaggtaaggagtatatttgttgtc

SEQ ID NO: 37345 - DNA, 80 bp, synthetic construct
  source 1..80: mol_type = other DNA
gattacaggcatgcatcaccacacccagctaatttttgtatttttagtagagatggggtttcaccatgttggccaggctg

SEQ ID NO: 37346 - DNA, 80 bp, synthetic construct; identical to SEQ ID NO: 10230
  source 1..80: mol_type = other DNA

SEQ ID NO: 37347 - DNA, 80 bp, synthetic construct
  source 1..80: mol_type = other DNA
cactgtatacacagataaggaaaacaaagtgcacagacatgagagacaatagttaatcttgcctcaccgtaagcacactg

SEQ ID NO: 37348 - DNA, 80 bp, synthetic construct
  source 1..80: mol_type = other DNA
ttaaccaaaagatatttacaaaatgtaatattttactatctctaaatttaacacgtattagacacttcagaccatctaga

SEQ ID NO: 37349 - DNA, 80 bp, synthetic construct
  source 1..80: mol_type = other DNA
tcgtttctactaaaaatacaaaaattagtagggcatggtggtgcgcgcctgtaatctcagctacttgggagactgaggca

SEQ ID NO: 37350 - DNA, 80 bp, synthetic construct; identical to SEQ ID NO: 10231
  source 1..80: mol_type = other DNA

SEQ ID NO: 37351 - DNA, 80 bp, synthetic construct
  source 1..80: mol_type = other DNA
tcttagtctatcatacatcggcagcttctttacatctggaggggctagatgtggcaaatgttttcttgtaaaagttttcg

SEQ ID NO: 37352 - DNA, 80 bp, synthetic construct
  source 1..80: mol_type = other DNA
ccccatggccgttaccgttctactcgtcctcatccgggactgcgctgaccttctggccgttaaagccgttatccactgtt

SEQ ID NO: 37353 - DNA, 80 bp, synthetic construct
  source 1..80: mol_type = other DNA
acacgccgccacccaaagcctctgtgtcccggcggccacccggtcaccgaggtgtgaggagaggttccccgctgcttcaa

SEQ ID NO: 37354 - DNA, 80 bp, synthetic construct; identical to SEQ ID NO: 10232
  source 1..80: mol_type = other DNA

SEQ ID NO: 37355 - DNA, 80 bp, synthetic construct
  source 1..80: mol_type = other DNA
cctttctactctgcctcattttattctatttttatttcaggtagatttaaggtaatcatggtcttcccttctcttccaca

SEQ ID NO: 37356 - DNA, 80 bp, synthetic construct
  source 1..80: mol_type = other DNA
agcgattcttttgcttctgcttcctgagtagctgggattacaggcgcacaccatcacacccagctaattttttatatttt

SEQ ID NO: 37357 - DNA, 80 bp, synthetic construct
  source 1..80: mol_type = other DNA
ctatctatctatttatttatttatttatctcggctcactggtgcccgacctcttaggcgcaggtgattctcccacctcag

SEQ ID NO: 37358 - DNA, 80 bp, synthetic construct; identical to SEQ ID NO: 10233
  source 1..80: mol_type = other DNA

SEQ ID NO: 37359 - DNA, 80 bp, synthetic construct
  source 1..80: mol_type = other DNA
tgttttgtatgttactacatgtatattttcttcattgtttctaattgtttctggccaaactaagggtctggctgctgttt

SEQ ID NO: 37360 - DNA, 80 bp, synthetic construct
  source 1..80: mol_type = other DNA
aagtgtgcattcatctaaagacataagtgattaacttctttcaatctataactaaggtctcagtcttgaagactttcctc

SEQ ID NO: 37361 - DNA, 80 bp, synthetic construct
  source 1..80: mol_type = other DNA
tgtttaatcctaaatgcgtcctgttaagaactccttcgttattttgtcatgctataaggcccacgaaagtcctaggcaaa

SEQ ID NO: 37362 - DNA, 80 bp, synthetic construct; identical to SEQ ID NO: 10234
  source 1..80: mol_type = other DNA

SEQ ID NO: 37363 - DNA, 80 bp, synthetic construct
  source 1..80: mol_type = other DNA
gtagtcccagctatttggggggctgcagtgggacatcgcttcagcctgggagatcaaggctgcagtgagttacagtcata

SEQ ID NO: 37364 - DNA, 80 bp, synthetic construct
  source 1..80: mol_type = other DNA
acacaatatgtctgtgcccctggttactgacatagaacttctgaaacccttaggtgggcagtaggaaaatcttttgttct

SEQ ID NO: 37365 - DNA, 80 bp, synthetic construct
  source 1..80: mol_type = other DNA
tccagggagaagagaggcattaaaggctgagttgatcaccaatgaccaatgatttaaccagtcatgcctatgtaatgaag

SEQ ID NO: 37366 - DNA, 80 bp, synthetic construct; identical to SEQ ID NO: 10235
  source 1..80: mol_type = other DNA

SEQ ID NO: 37367 - DNA, 80 bp, synthetic construct
  source 1..80: mol_type = other DNA
gtaggattacaggctcaccccaccatgcccagctaatttttttttttttttgtattttttttggtagagacggagtttca

SEQ ID NO: 37368 - DNA, 80 bp, synthetic construct
  source 1..80: mol_type = other DNA
tagactcaagattgagaagaagtcaagctaggatgcatgcaaggtaggatgcatgcctgacagcctcagctaacactatg

SEQ ID NO: 37369 - DNA, 80 bp, synthetic construct
  source 1..80: mol_type = other DNA
catggagaaaccctgtgtctacaaaattagccaggcgtggtggtgcatgcctgtaatcccagctacttgggaagctgagg

SEQ ID NO: 37370 - DNA, 80 bp, synthetic construct; identical to SEQ ID NO: 10236
  source 1..80: mol_type = other DNA

SEQ ID NO: 37371 - DNA, 80 bp, synthetic construct
  source 1..80: mol_type = other DNA
ctaaggatggctgtgtattattctgcactttacccagaagtgcaaaccaaaaacaaacaaatagaaagtcaaataaggac

SEQ ID NO: 37372 - DNA, 80 bp, synthetic construct
  source 1..80: mol_type = other DNA
tgaacaaaaaggttacctacagaatgggagggaatatttgcacatcatatacctgtaaaggagctaatttccaaaatata

SEQ ID NO: 37373 - DNA, 80 bp, synthetic construct; identical to SEQ ID NO: 10237
  source 1..80: mol_type = other DNA

SEQ ID NO: 37374 - DNA, 80 bp, synthetic construct
  source 1..80: mol_type = other DNA
cagcgtgagcgacgcagaagacgggtgatttctgcatttcaatctgaggtaccgggttcatctcactagggagtgccaga

SEQ ID NO: 37375 - DNA, 80 bp, synthetic construct
  source 1..80: mol_type = other DNA
tactgcgcttttccgacgggcttaaaaaacggcacaccaggagactatatcccgcacctggctcggagggtcctacgccc

SEQ ID NO: 37376 - DNA, 80 bp, synthetic construct
  source 1..80: mol_type = other DNA
gcctccctctgtaggctccacctctgggggcaggacacagacaaacaaaaagacagcagtaacctctgccgacttaaatg

SEQ ID NO: 37377 - DNA, 80 bp, synthetic construct; identical to SEQ ID NO: 10238
  source 1..80: mol_type = other DNA

SEQ ID NO: 37378 - DNA, 80 bp, synthetic construct
  source 1..80: mol_type = other DNA
gaccaaaagtagataaaaccacaaagatggggaaaaaacagagcagaaaaactggaaactctaaaaagcagagcgcctct

SEQ ID NO: 37379 - DNA, 80 bp, synthetic construct
  source 1..80: mol_type = other DNA
atttagaagaatgtataactagaataaccaatacagagaagtgcttaaaggagctgatggagctgaaagccaaggctcga

SEQ ID NO: 37380 - DNA, 80 bp, synthetic construct; identical to SEQ ID NO: 10239
  source 1..80: mol_type = other DNA

SEQ ID NO: 37381 - DNA, 80 bp, synthetic construct
  source 1..80: mol_type = other DNA
tgttaagggcagccagagagaaaggtcaggttacccacaaagggaagcccatcagactaacagtggatctctcggcagaa

SEQ ID NO: 37382 - DNA, 80 bp, synthetic construct
  source 1..80: mol_type = other DNA
gcctgccctaaaagagctcctgtaggaagcactaaacatggaaaggaacaaccagtaccagccactgcaaaatcatgcca

SEQ ID NO: 37383 - DNA, 80 bp, synthetic construct
  source 1..80: mol_type = other DNA
gataaagaatcaagacccatcagtgtgctgtattcaggaaacccatctcacgtgcagagacacacataggctcaaaataa

SEQ ID NO: 37384 - DNA, 80 bp, synthetic construct
  source 1..80: mol_type = other DNA
tatcctaaatatatatgcacccaatacaggagcacccagattcataaagcaagtcctgagtgacctacaaagagacttag

SEQ ID NO: 37385 - DNA, 80 bp, synthetic construct; identical to SEQ ID NO: 10240
  source 1..80: mol_type = other DNA

SEQ ID NO: 37386 - DNA, 80 bp, synthetic construct
  source 1..80: mol_type = other DNA
aaagatgttctttaaaaccaacaagaacaaagacacaacataccagaatctctgggacacattcaaagcagtgtgtagag

SEQ ID NO: 37387 - DNA, 80 bp, synthetic construct
  source 1..80: mol_type = other DNA
agagatacaaaaaacccttcaaaaaattaataaatccaggagctggttttttgaaaggatcaacaaaattgatagactgc

SEQ ID NO: 37388 - DNA, 80 bp, synthetic construct
  source 1..80: mol_type = other DNA
taaattcctcgacacatacaccctcccaagactaaaccaggaagaagttgaatctctgaatagaccaataacaggagctg

SEQ ID NO: 37389 - DNA, 80 bp, synthetic construct; identical to SEQ ID NO: 10241
  source 1..80: mol_type = other DNA

SEQ ID NO: 37390 - DNA, 80 bp, synthetic construct
  source 1..80: mol_type = other DNA
agacaaaaaccacatgattatctcaatagatgcagaaaaggcctttgacgaaattcaacaaccttcatgctaaaaactcc

SEQ ID NO: 37391 - DNA, 80 bp, synthetic construct
  source 1..80: mol_type = other DNA
gtgttggaagttctggccagggcaattaagcaggagaaggaaataaagggtattcaattaggaaaaggggaagtcaaatt

SEQ ID NO: 37392 - DNA, 80 bp, synthetic construct
  source 1..80: mol_type = other DNA
agccaaatcatgagtgaactcccattcacaattgcttcaaagagaatcaaatacctaggaatccaacttacaagggatgt

SEQ ID NO: 37393 - DNA, 80 bp, synthetic construct
  source 1..80: mol_type = other DNA
aagctaccaatgactttcttcacagaattggaaaaaactactttaaagttcatatggaaccaaaaaagagcctgcatcgc

SEQ ID NO: 37394 - DNA, 80 bp, synthetic construct; identical to SEQ ID NO: 10242
  source 1..80: mol_type = other DNA

SEQ ID NO: 37395 - DNA, 80 bp, synthetic construct
  source 1..80: mol_type = other DNA
ggcaaggacttcatgtctaaaacaccaaaagcaatggcaacaaaagccaaaattgacaaatgggatctaattaaactaaa

SEQ ID NO: 37396 - DNA, 80 bp, synthetic construct
  source 1..80: mol_type = other DNA
atgggcgaaggacatgaacagacacttctcaaaagaagacctttatgcagccaaaaaacacatgaaaaaatgctcaccat

SEQ ID NO: 37397 - DNA, 80 bp, synthetic construct
  source 1..80: mol_type = other DNA
accattgtggaagtcagtgtggcaattcctcagggatctaaaactagaaataccatttgacccagccatcccattactgg

SEQ ID NO: 37398 - DNA, 80 bp, synthetic construct; identical to SEQ ID NO: 10243
  source 1..80: mol_type = other DNA

SEQ ID NO: 37399 - DNA, 80 bp, synthetic construct
  source 1..80: mol_type = other DNA
aaatgacgagttaatgggtgcagcacaccagcatggcacatgtatacatatgtaactaacatgcacattgtgcacatgta

SEQ ID NO: 37400 - DNA, 80 bp, synthetic construct
  source 1..80: mol_type = other DNA
aagatatggaaacaacctgtatccattgacagatgaatgaaaaaacaaagtgtggcatatatatccaacggaaaattatt

SEQ ID NO: 37401 - DNA, 80 bp, synthetic construct
  source 1..80: mol_type = other DNA
tggttgccaggggctgggaggctgaagaagatggggaattgttgctcaatggatatatttcagttatgctacatgaataa

SEQ ID NO: 37402 - DNA, 80 bp, synthetic construct; identical to SEQ ID NO: 10244
  source 1..80: mol_type = other DNA

SEQ ID NO: 37403 - DNA, 80 bp, synthetic construct
  source 1..80: mol_type = other DNA
agctgggattacaggcgcctgccactgcgcccggctaatttttgtacttttagtagaaatggggtttcaccatcttggcc

SEQ ID NO: 37404 - DNA, 80 bp, synthetic construct
  source 1..80: mol_type = other DNA
tgcatattctaagaattatttcattgcttgttttaaatattgcaaataacttctctaaatctgtcgttgtgttagtccga

SEQ ID NO: 37405 - DNA, 80 bp, synthetic construct
  source 1..80: mol_type = other DNA
ttactatatatataaagagacttattataaggttttgctttacgcaattctggaggctgagaggttccatgatctaccat

SEQ ID NO: 37406 - DNA, 80 bp, synthetic construct; identical to SEQ ID NO: 10245
  source 1..80: mol_type = other DNA

SEQ ID NO: 37407 - DNA, 80 bp, synthetic construct
  source 1..80: mol_type = other DNA
aaggtattctttgtctctaaggtatttgaaatctttaacaatctccaatttctttcaaactaaaggcttggccagccgtg

SEQ ID NO: 37408 - DNA, 80 bp, synthetic construct
  source 1..80: mol_type = other DNA
ctcgggaggctgaggcaggagaatggcgtgaacccaggaggcgaagcttgcagtgagctgagattgcgccactgcactcc

SEQ ID NO: 37409 - DNA, 80 bp, synthetic construct
  source 1..80: mol_type = other DNA
ttgttagcgtgtggcatgccaatggataataatgataatgaaaactatgatgatgacaaaaatgataatgatgatagcag

SEQ ID NO: 37410 - DNA, 80 bp, synthetic construct; identical to SEQ ID NO: 10246
  source 1..80: mol_type = other DNA

SEQ ID NO: 37411 - DNA, 80 bp, synthetic construct
  source 1..80: mol_type = other DNA
agtaaaataaaaatgaaaacaaaactgggtcattattagaagttattatgaagaaacagaacaaaaccattaatcacaac

SEQ ID NO: 37412 - DNA, 80 bp, synthetic construct
  source 1..80: mol_type = other DNA
aagcaatgtaataactcctttgcctactgatagggcaaccagagtggagtgaatatggaaagctagtttacatattgata

SEQ ID NO: 37413 - DNA, 80 bp, synthetic construct
  source 1..80: mol_type = other DNA
taaaaggcagttcccctgcacacgccctcttacctgccaccatgtaagatatgcctttgcttctcctttgccttctgcca

SEQ ID NO: 37414 - DNA, 80 bp, synthetic construct; identical to SEQ ID NO: 10247
  source 1..80: mol_type = other DNA

SEQ ID NO: 37415 - DNA, 80 bp, synthetic construct
  source 1..80: mol_type = other DNA
tggagccagaggtcctagcattgaaaacaatgtggctttatttcaccatctgcatgcactcctatttaaaactaagataa

SEQ ID NO: 37416 - DNA, 80 bp, synthetic construct
  source 1..80: mol_type = other DNA
acaagttctcatcccttaggtcatcagccggtacaccagagcaagtgtgctatattgaaaataaaataataggacaggct

SEQ ID NO: 37417 - DNA, 80 bp, synthetic construct
  source 1..80: mol_type = other DNA
atacaaaaaaattagctgggcgtggtggcgggcacctgtaatctcagctagttgggaggctgaggcaggagaattgcttg

SEQ ID NO: 37418 - DNA, 80 bp, synthetic construct; identical to SEQ ID NO: 10248
  source 1..80: mol_type = other DNA

SEQ ID NO: 37419 - DNA, 80 bp, synthetic construct
  source 1..80: mol_type = other DNA
caaaaaattagccaggagtggtggcctgcgcctgtagtcctagctactcaggaggctgagtcaggagaatcgctagaacc

SEQ ID NO: 37420 - DNA, 80 bp, synthetic construct
  source 1..80: mol_type = other DNA
aaaaaaaggtccttgcaaagatcaaaaatccactcagtatcagcatctaatctactaagccagccagcacatggaatgat

SEQ ID NO: 37421 - DNA, 80 bp, synthetic construct
  source 1..80: mol_type = other DNA
aatacatgcaatgtctcactctttaaaaagacaggtgggaagaggaagttctgcggaacaaatgtgggtcctccaatctt

SEQ ID NO: 37422 - DNA, 80 bp, synthetic construct
  source 1..80: mol_type = other DNA
aatgaaataacctatgaacaaacagaataggtcttgcttcattttgctccttgtggggaagacaaattggagataccaag

SEQ ID NO: 37423 - DNA, 80 bp, synthetic construct; identical to SEQ ID NO: 10249
  source 1..80: mol_type = other DNA

SEQ ID NO: 37424 - DNA, 80 bp, synthetic construct
  source 1..80: mol_type = other DNA
cggcagaaaaggtatcttaaggcaaatagttcagacagttcctgatataaagctcaaagctaattttttaaagtgtttca

SEQ ID NO: 37425 - DNA, 80 bp, synthetic construct
  source 1..80: mol_type = other DNA
gtttttttttttttcttaaagttttttggacgttaacaggcgctcaacatcttcttccatttactcctttctgaactggc

SEQ ID NO: 37426 - DNA, 80 bp, synthetic construct
  source 1..80: mol_type = other DNA
gcagagttgaggacagagcccgggtaggcgaggcatggcgcgtcaggtgagataaagccaggcaagccaatgggagggac

SEQ ID NO: 37427 - DNA, 80 bp, synthetic construct
  source 1..80: mol_type = other DNA
taagatgatcctcgtggctgagagagggtagaatcatcttcaactgtgctccaaataactgtatttctggttacaaatca

SEQ ID NO: 37428 - DNA, 80 bp, synthetic construct; identical to SEQ ID NO: 10250
  source 1..80: mol_type = other DNA

SEQ ID NO: 37429 - DNA, 80 bp, synthetic construct
  source 1..80: mol_type = other DNA
taacaatatagagtagcactacccaattccgtcggctttttcaatttatattcatagaaaatcaagtcggttcaacaaat

SEQ ID NO: 37430 - DNA, 80 bp, synthetic construct
  source 1..80: mol_type = other DNA
tagtatagaggtggagtacagcagccactcacagagcagtgagaaataaattacaggtgccctctgttcaggatatattt

SEQ ID NO: 37431 - DNA, 80 bp, synthetic construct
  source 1..80: mol_type = other DNA
ttgacgactccaggaattttgaaagacttgaccaaataaataaaggccgagagttacgcatgagaaccaacatgggttgt

SEQ ID NO: 37432 - DNA, 80 bp, synthetic construct; identical to SEQ ID NO: 10251
  source 1..80: mol_type = other DNA

SEQ ID NO: 37433 - DNA, 80 bp, synthetic construct
  source 1..80: mol_type = other DNA
ccgttaagtattttccggaaccgtttatcagctcggccttggacatatgtccttttacccttcagcaataaaaacatggc

SEQ ID NO: 37434 - DNA, 80 bp, synthetic construct
  source 1..80: mol_type = other DNA
acatctccaacctttgcctcgccctgcctgtcatcccggttttctttcttgcccgcctaagtgtggcggacagggatact

SEQ ID NO: 37435 - DNA, 80 bp, synthetic construct
  source 1..80: mol_type = other DNA
tgtggatgttcctgggtcccctagaacactcgaaatctccccaaaaataccagagagtagcggtgggtgccctgcccctt

SEQ ID NO: 37436 - DNA, 80 bp, synthetic construct; identical to SEQ ID NO: 10252
  source 1..80: mol_type = other DNA

SEQ ID NO: 37437 - DNA, 80 bp, synthetic construct
  source 1..80: mol_type = other DNA
cctgtctactgcttagccctgcgtgtttagttaaagcggtgcatttgttaaaattgatgacctaaattgacacatcagta

SEQ ID NO: 37438 - DNA, 80 bp, synthetic construct
  source 1..80: mol_type = other DNA
taaaaatcctttgtgctccaccaattaatcagtccctccctctccctctaacccttggcaacttctgatcttttactatc

SEQ ID NO: 37439 - DNA, 80 bp, synthetic construct
  source 1..80: mol_type = other DNA
catggtctggatgtgccacagtttgtttattcacctacagaaggaaatcttggttgtttccaagtttgggcaattatgaa

SEQ ID NO: 37440 - DNA, 80 bp, synthetic construct; identical to SEQ ID NO: 10253
  source 1..80: mol_type = other DNA

SEQ ID NO: 37441 - DNA, 80 bp, synthetic construct
  source 1..80: mol_type = other DNA
gtctttcttctctttgcttttcggttttggaaatttctactgatatatccttaagttcaaagcttctttcttcagccatg

SEQ ID NO: 37442 - DNA, 80 bp, synthetic construct
  source 1..80: mol_type = other DNA
atattaatcatagttgttttgaattccccatctggtaatcccaaaatccctgcccatgtctgtttctgatgcttgctttc

SEQ ID NO: 37443 - DNA, 80 bp, synthetic construct
  source 1..80: mol_type = other DNA
gcaattaggcctgtcttttagtaagcctgcacctctgcactgtgaatcatacaagtgttgcttagatgtttttctcttcc

SEQ ID NO: 37444 - DNA, 80 bp, synthetic construct; identical to SEQ ID NO: 10254
  source 1..80: mol_type = other DNA

SEQ ID NO: 37445 - DNA, 80 bp, synthetic construct
  source 1..80: mol_type = other DNA
tcattgattagaattcaggttttcttatctatgcaatggttcccacagatatttctgctcgtgtgctgtgattttcaatg

SEQ ID NO: 37446 - DNA, 80 bp, synthetic construct
  source 1..80: mol_type = other DNA
taaactggaaatccagactgtttttactgtcttattttccttttttaatcccaattaattgtatctctattatatgtact

SEQ ID NO: 37447 - DNA, 80 bp, synthetic construct
  source 1..80: mol_type = other DNA
cggtgtggtggcacgtgcctaaaatcccagctactcgggaggctgagacagaagaatcacttgaaaccggaaggtgcagg

SEQ ID NO: 37448 - DNA, 80 bp, synthetic construct; identical to SEQ ID NO: 10255
  source 1..80: mol_type = other DNA

SEQ ID NO: 37449 - DNA, 80 bp, synthetic construct
  source 1..80: mol_type = other DNA
gtaaaccttcgcggtgagttttacagctcttaaggcagggcgtctggagttgttccctccttccagtgggctcatcatct

SEQ ID NO: 37450 - DNA, 80 bp, synthetic construct
  source 1..80: mol_type = other DNA
cagtatagaccaaagagtcagccatgacaaaatttattgcaaacagcaacaaaaacaaagcttcaacactgtgggaggag

SEQ ID NO: 37451 - DNA, 80 bp, synthetic construct
  source 1..80: mol_type = other DNA
tccccatcaggttaactagatacagagtgtccatacaaaggttttccagggccccaccagagtagctagatacagtgacg

SEQ ID NO: 37452 - DNA, 80 bp, synthetic construct
  source 1..80: mol_type = other DNA
attggtgcattcacaaaccctgagctagacacagggtgctgattggtgtgtttacaaagcttgagctcgatacagagtgc

SEQ ID NO: 37453 - DNA, 80 bp, synthetic construct; identical to SEQ ID NO: 10256
  source 1..80: mol_type = other DNA

SEQ ID NO: 37454 - DNA, 80 bp, synthetic construct
  source 1..80: mol_type = other DNA
gggtccgccgagcccacgcccacccggaactcaccctggcccgcaagcaccgcgcgcagccccggttcatgtccgcgcat

SEQ ID NO: 37455 - DNA, 80 bp, synthetic construct
  source 1..80: mol_type = other DNA
gactgccagcatgctgtcacctctcaacacaaattgacttgttttcaaatagatttggtgatttttttaaatgcaggttt

SEQ ID NO: 37456 - DNA, 80 bp, synthetic construct
  source 1..80: mol_type = other DNA
tcctctctactaaaaatacaaaaattagccaggcgcggtggtgggtgcccgtaatcccggctactcaggaggctgagaca

SEQ ID NO: 37457 - DNA, 80 bp, synthetic construct; identical to SEQ ID NO: 10257
  source 1..80: mol_type = other DNA

SEQ ID NO: 37458 - DNA, 80 bp, synthetic construct
  source 1..80: mol_type = other DNA
ccagcagactgatctcaaatgaggtgtcccttgtaacacaagagcgaagattaattagtctgttcacatactggaacaaa

SEQ ID NO: 37459 - DNA, 80 bp, synthetic construct
  source 1..80: mol_type = other DNA
agcctcccgcgtagctgggactacaggcgcctgccaccacgcccggctaaatttttttgtatttttagtagagacggtgt

SEQ ID NO: 37460 - DNA, 80 bp, synthetic construct
  source 1..80: mol_type = other DNA
cctcaggaaacttataatcatagcagcaggtgaaggggaagcaagcatatcttaccggacggaccaggtcagaggggtgg

SEQ ID NO: 37461 - DNA, 80 bp, synthetic construct; identical to SEQ ID NO: 10258
  source 1..80: mol_type = other DNA

SEQ ID NO: 37462 - DNA, 80 bp, synthetic construct
  source 1..80: mol_type = other DNA
ctctctaaagcccaaattgcatgtgcactgagacaaacgttgctgcttcaaaacaaccaaaattgggaaaataactgagg

SEQ ID NO: 37463 - DNA, 80 bp, synthetic construct
  source 1..80: mol_type = other DNA
tccagaaacaaattttctctctcctgactcctcctcttctcttaatatggtggatagattctttaatgctcaaaggcttt

SEQ ID NO: 37464 - DNA, 80 bp, synthetic construct
  source 1..80: mol_type = other DNA
attattttatttttaaatgctagaaacaccttagtactgtgttattgttagaaaatgaaacagcaggccgggcgcggtgg

SEQ ID NO: 37465 - DNA, 80 bp, synthetic construct
  source 1..80: mol_type = other DNA
gggaggctgagacaggagaattgcttaaaccctggaggcggaggttgcagagagccaagatcgtgccattgcactacagc

SEQ ID NO: 37466 - DNA, 80 bp, synthetic construct; identical to SEQ ID NO: 10259
  source 1..80: mol_type = other DNA

SEQ ID NO: 37467 - DNA, 80 bp, synthetic construct
  source 1..80: mol_type = other DNA
gatacagatttactcacccaatctactgagtgggatttttcttcttagacgaggcggagggttggtttgtggataattcc

SEQ ID NO: 37468 - DNA, 80 bp, synthetic construct
  source 1..80: mol_type = other DNA
ggccatttcaattgactggatctgaatgatttatatacatagtcctgctcagataaaagccagttttgcaaccccttgtt

SEQ ID NO: 37469 - DNA, 80 bp, synthetic construct
  source 1..80: mol_type = other DNA
gtatatttttaaaaactttttttggaacaacaagggtctatgtgtggggatgtagctcagtggtagagcgcatgctttgc

SEQ ID NO: 37470 - DNA, 80 bp, synthetic construct; identical to SEQ ID NO: 10260
  source 1..80: mol_type = other DNA

SEQ ID NO: 37471 - DNA, 80 bp, synthetic construct
  source 1..80: mol_type = other DNA
atatatatttttttttttttttttgagatggagtctagctccgtcacccaggctggagtgcagtggcgcaatctcggctc

SEQ ID NO: 37472 - DNA, 80 bp, synthetic construct
  source 1..80: mol_type = other DNA
cgcctcggcctcccaaaatgctgggattacaggcgtgaaacaccgcgcccggccacaagtgatgatatttaaagtcaact

SEQ ID NO: 37473 - DNA, 80 bp, synthetic construct
  source 1..80: mol_type = other DNA
tcatttggcaaccatcatacttctaactgattcaggccaggatcatcaatgggtgctaaattaagttgataaaagttgaa

SEQ ID NO: 37474 - DNA, 80 bp, synthetic construct
  source 1..80: mol_type = other DNA
gccattaaatatctcctggtaaaatgcactgaaaagggcacaatgtcagctctctggtattcctacccaaaatacataaa

SEQ ID NO: 37475 - DNA, 80 bp, synthetic construct; identical to SEQ ID NO: 10261
  source 1..80: mol_type = other DNA

SEQ ID NO: 37476 - DNA, 80 bp, synthetic construct
  source 1..80: mol_type = other DNA
tattattattatttttttgagacagagtgtcactctgtcgcccaggctggagtgcagtggcgctatcttggctcactgca

SEQ ID NO: 37477 - DNA, 80 bp, synthetic construct
  source 1..80: mol_type = other DNA
cacccaccttggcctcccaaagtgctgggattacaggcatgagccaccatgcctggcaacttattcttaaatggcaaatg

SEQ ID NO: 37478 - DNA, 80 bp, synthetic construct
  source 1..80: mol_type = other DNA
agataacagtatatctcacacgtatatgagataaaggcatatctcatatgtataagagattaaaagtatatctcatatgt

SEQ ID NO: 37479 - DNA, 80 bp, synthetic construct; identical to SEQ ID NO: 10262
  source 1..80: mol_type = other DNA

SEQ ID NO: 37480 - DNA, 80 bp, synthetic construct
  source 1..80: mol_type = other DNA
ccacttcacttttcaatctgtggtccagtacataaacttagaagttgtttgctaagtttgcacagagactgactcagctc

SEQ ID NO: 37481 - DNA, 80 bp, synthetic construct
  source 1..80: mol_type = other DNA
ctcccagtaagcacaactaaattctcattgaaaccttagtgaattcatcaccattaagtaaagagaaagaggataggatt

SEQ ID NO: 37482 - DNA, 80 bp, synthetic construct
  source 1..80: mol_type = other DNA
taggctttttctcaattggggggttttccccctaaaacttgatgccaattccttttaagtatttcttacatttatacttt

SEQ ID NO: 37483 - DNA, 80 bp, synthetic construct; identical to SEQ ID NO: 10263
  source 1..80: mol_type = other DNA

SEQ ID NO: 37484 - DNA, 80 bp, synthetic construct
  source 1..80: mol_type = other DNA
cctatgctgtcctctttctttgcaactgaagactctcttcttatctccctgatgaaaccaaatcccatcggtgtgttcta

SEQ ID NO: 37485 - DNA, 80 bp, synthetic construct
  source 1..80: mol_type = other DNA
agaccaggcctgttcagtttacctttccacaccttggtgtgagtaggcatagaattaataattttgggaatgaatgaggg

SEQ ID NO: 37486 - DNA, 80 bp, synthetic construct
  source 1..80: mol_type = other DNA
gatctcacatccagaaatataactttttgaaactggcatgctggctcagagtcataacactcctgttgggaaatctgctt

SEQ ID NO: 37487 - DNA, 80 bp, synthetic construct
  source 1..80: mol_type = other DNA
ttcagtggcacatggacacccaagaacttaaggaggtcagagaaaatctcaaaagaatatgcaaaatttgtccgtaagtc

SEQ ID NO: 37488 - DNA, 80 bp, synthetic construct; identical to SEQ ID NO: 10264
  source 1..80: mol_type = other DNA

SEQ ID NO: 37489 - DNA, 80 bp, synthetic construct
  source 1..80: mol_type = other DNA
ataaattgcaaccatttttcatccatgtggactttaagcaaggttaacatggagtttgagaaaccagaagaatatatttt

SEQ ID NO: 37490 - DNA, 80 bp, synthetic construct
  source 1..80: mol_type = other DNA
atagtctttgaggatgcaggtgtaatgaagagagattggagagattaaagctctatgcagtggacttgatattgtgatta

SEQ ID NO: 37491 - DNA, 80 bp, synthetic construct
  source 1..80: mol_type = other DNA
cagccgtgctgattctgtggcttcttttatgaccgaattgcacttaattaggtgacaaattctgttgccattaagagtta

SEQ ID NO: 37492 - DNA, 80 bp, synthetic construct
  source 1..80: mol_type = other DNA
gtgcttagaacaatgtcagcgcgtcccagagggcaaataaaaccgtgaaatcggagagtggagatgaaccatgttcccag

SEQ ID NO: 37493 - DNA, 80 bp, synthetic construct; identical to SEQ ID NO: 10265
  source 1..80: mol_type = other DNA

SEQ ID NO: 37494 - DNA, 80 bp, synthetic construct
  source 1..80: mol_type = other DNA
cgtcaccggacagggtctttcctaattctgccttcctcattttggttcttcaagcttcaattagatgtttcctaatatct

SEQ ID NO: 37495 - DNA, 80 bp, synthetic construct
  source 1..80: mol_type = other DNA
ctgttaacgattgtatcctagttttctgcctttgcttagtactgaggctggtgccaaagtgagggagtgagttcaccaaa

SEQ ID NO: 37496 - DNA, 80 bp, synthetic construct
  source 1..80: mol_type = other DNA
gcccttgaatcctaaagtctttcttaattcctctcttgagccaaaatttggagcattgccatttcgtatcccattcagaa

SEQ ID NO: 37497 - DNA, 80 bp, synthetic construct
  source 1..80: mol_type = other DNA
atcataaggaccaggaatcatagcctttctgaatttgaatcagctgaattgtttatgatcaggattgtactaacttcagt

SEQ ID NO: 37498 - DNA, 80 bp, synthetic construct; identical to SEQ ID NO: 10266
  source 1..80: mol_type = other DNA

SEQ ID NO: 37499 - DNA, 80 bp, synthetic construct
  source 1..80: mol_type = other DNA
acaaaataaagaatatggctgggcgcagtggctcatgcctataatcctagcactttgggaggctgaggcaggcagatcac

SEQ ID NO: 37500 - DNA, 80 bp, synthetic construct
  source 1..80: mol_type = other DNA
gtgagtcgagatcacaccactgcactccagcctgggcgacagagtgagactccgtctcaaaaaaaaaaaaaaaaaaaaaa

SEQ ID NO: 37501 - DNA, 80 bp, synthetic construct
  source 1..80: mol_type = other DNA
ctagcccagtgggatcctcctccaaatagagttgcactcaaaaagaaaaaaaaaatatgtgagtgaattgaaaggctaaa

SEQ ID NO: 37502 - DNA, 80 bp, synthetic construct; identical to SEQ ID NO: 10267
  source 1..80: mol_type = other DNA

SEQ ID NO: 37503 - DNA, 80 bp, synthetic construct
  source 1..80: mol_type = other DNA
ggactttgggaggcggaggtgggtggatcacctgaggtcaggagttcaagaccagcctggccaatatggtgaaaccccat

SEQ ID NO: 37504 - DNA, 80 bp, synthetic construct
  source 1..80: mol_type = other DNA
cttcatctcaaaaaaaaaagtagggggatggaaatttgaacatacacacacatgcagggagaataccatgtgaacatgaa

SEQ ID NO: 37505 - DNA, 80 bp, synthetic construct
  source 1..80: mol_type = other DNA
gattataaagttctgttgtttgagctgcctagtttgtgttattttgttatagcagcccgaggaaactattgcagtaagca

SEQ ID NO: 37506 - DNA, 80 bp, synthetic construct; identical to SEQ ID NO: 10268
  source 1..80: mol_type = other DNA

SEQ ID NO: 37507 - DNA, 80 bp, synthetic construct
  source 1..80: mol_type = other DNA
aaagttaagctaagaataggaattagaaaggatggaaaccgaaggatagaatagggatggtagaggaagaggccatcgta

SEQ ID NO: 37508 - DNA, 80 bp, synthetic construct
  source 1..80: mol_type = other DNA
gagaacagaagatggagatgaatgtgatctgagattaaggtgggaaagtaatttaggaataagggatggagtgggtgcac

SEQ ID NO: 37509 - DNA, 80 bp, synthetic construct
  source 1..80: mol_type = other DNA
ggcaattggcaggtatctatgctaaagtgttgggcattttgccctaataaaacttcgtcatgagattgaagtgccattca

SEQ ID NO: 37510 - DNA, 80 bp, synthetic construct
  source 1..80: mol_type = other DNA
ttttccagcctgaaaaggctatgtttgagtgtggatttcaccacaatgaggcaagagaaagtaaaagtacttactaacag

SEQ ID NO: 37511 - DNA, 80 bp, synthetic construct; identical to SEQ ID NO: 10269
  source 1..80: mol_type = other DNA

SEQ ID NO: 37512 - DNA, 80 bp, synthetic construct
  source 1..80: mol_type = other DNA
cctactgctctgccagttgtgtaaaaatatagtacatacaattatgtacagtacataatacttgataatgataataaatg

SEQ ID NO: 37513 - DNA, 80 bp, synthetic construct
  source 1..80: mol_type = other DNA
ctacttggtattgcctctgaagaacttgcagtggaacaagatttggaggtggaagatggtgatattgataatcctgaccc

SEQ ID NO: 37514 - DNA, 80 bp, synthetic construct
  source 1..80: mol_type = other DNA
tcttttggattttttgtctgtttgtttttgttttttgagacggagtcttgctctgtcacccaggctggagcgcagtggcg

SEQ ID NO: 37515 - DNA, 80 bp, synthetic construct
  source 1..80: mol_type = other DNA
ctggtctcaaactcttgacctccagtgatcagcatgcctcagcctcccaaagtgctgggattacaggcataaaccaccat

SEQ ID NO: 37516 - DNA, 80 bp, synthetic construct; identical to SEQ ID NO: 10270
  source 1..80: mol_type = other DNA

SEQ ID NO: 37517 - DNA, 80 bp, synthetic construct
  source 1..80: mol_type = other DNA
aggcgtgtgccaccacacccagctaatttttgtattttgtagagatgcggtttcaccatgttgcccaggttggtctacaa

SEQ ID NO: 37518 - DNA, 80 bp, synthetic construct
  source 1..80: mol_type = other DNA
ggtattcagttcagcaacatgctgtacagctttgtagcctaggagcaataggctataccatacagcctaggtgtatagtc

SEQ ID NO: 37519 - DNA, 80 bp, synthetic construct
  source 1..80: mol_type = other DNA
gcactttgggaggccgaagctggcggatcacaaggtcaggagattgagaccatcctggctaatacggtgaaaccctgtct

SEQ ID NO: 37520 - DNA, 80 bp, synthetic construct; identical to SEQ ID NO: 10271
  source 1..80: mol_type = other DNA

SEQ ID NO: 37521 - DNA, 80 bp, synthetic construct
  source 1..80: mol_type = other DNA
aaacacaaccaaacaaaaacccaccagtaattcaagtccagcatagtaagtgcatgaagtaaaaccatttaacccagagg

SEQ ID NO: 37522 - DNA, 80 bp, synthetic construct
  source 1..80: mol_type = other DNA
ctcttagggaaaataagagtcaaagcagtatctcggtatccactggccctttagtcatagacatatgagcagttcgcaga

SEQ ID NO: 37523 - DNA, 80 bp, synthetic construct
  source 1..80: mol_type = other DNA
agctaggtattggggaaaaaagccgatcccttaagaattcagggccttctgggatagaagaaatagacccttaaactctg

SEQ ID NO: 37524 - DNA, 80 bp, synthetic construct; identical to SEQ ID NO: 10272
  source 1..80: mol_type = other DNA

SEQ ID NO: 37525 - DNA, 80 bp, synthetic construct
  source 1..80: mol_type = other DNA
aaaagactcctttttgttaccagaatgaaactgctctgagcctccatttagtggttgctacagtcttgtgctagagaaaa

SEQ ID NO: 37526 - DNA, 80 bp, synthetic construct
  source 1..80: mol_type = other DNA
tcatggtgggtagacagaaatttaacagtgattctctcttctttcttgtctgtattgggcaaacctgggaaagtttaaac

SEQ ID NO: 37527 - DNA, 80 bp, synthetic construct
  source 1..80: mol_type = other DNA
taaaggacctaagagaaagatggtagatgggaaggggaagacagttacatgttacgcactgaaaattcaaataaataaat

SEQ ID NO: 37528 - DNA, 80 bp, synthetic construct; identical to SEQ ID NO: 10273
  source 1..80: mol_type = other DNA

SEQ ID NO: 37529 - DNA, 80 bp, synthetic construct
  source 1..80: mol_type = other DNA
cttccagaaaagatagaaaatgttttgccaacgactgtttttacttagggaaactactgaactgccccccgattccttac

SEQ ID NO: 37530 - DNA, 80 bp, synthetic construct
  source 1..80: mol_type = other DNA
aaagtcctcacacacgtgcatggtataaaagcaccagctttaaaaagagaagtgtttttgtttttttgtttgagaagcat

SEQ ID NO: 37531 - DNA, 80 bp, synthetic construct
  source 1..80: mol_type = other DNA
gtcactgaaggaaaaacgtcagtgtcaaaatgctactatttcacctctttgtgtacgatttctgagagaactgccacgtt

SEQ ID NO: 37532 - DNA, 80 bp, synthetic construct
  source 1..80: mol_type = other DNA
aacccagcagcaaaactcagtgaaaagatgaattcgttcacaaaacatccatttaggatttttattgataattgtccttt

SEQ ID NO: 37533 - DNA, 80 bp, synthetic construct; identical to SEQ ID NO: 10274
  source 1..80: mol_type = other DNA

SEQ ID NO: 37534 - DNA, 80 bp, synthetic construct
  source 1..80: mol_type = other DNA
gaatgaaattttaaaaatgaaagagctacaggcgtaaccaaagcaagatataaatacgggagtgggggcaatatgattaa

SEQ ID NO: 37535 - DNA, 80 bp, synthetic construct
  source 1..80: mol_type = other DNA
catgcgctctaccactgagctacatccccacctcgaaaaacgttcgtctttaaactgcttttatgaaagaatatagaaat

SEQ ID NO: 37536 - DNA, 80 bp, synthetic construct
  source 1..80: mol_type = other DNA
aatttcagttaagaaacatcctcccagaccttccttttctgaatgcttttctcatttgtaaaaaagattttcaggacaca

SEQ ID NO: 37537 - DNA, 80 bp, synthetic construct; identical to SEQ ID NO: 10275
  source 1..80: mol_type = other DNA

SEQ ID NO: 37538 - DNA, 80 bp, synthetic construct
  source 1..80: mol_type = other DNA
cgcattattttctgtagagggaatggttctctctacagaaaatgtagagatggttcagactcctgtctcaccaagggaac

SEQ ID NO: 37539 - DNA, 80 bp, synthetic construct
  source 1..80: mol_type = other DNA
ggaggaggctctaaaaggtagcttggcaagatgacaccagcaattctcaccctaccttgcacttacagcatccagaacta

SEQ ID NO: 37540 - DNA, 80 bp, synthetic construct
  source 1..80: mol_type = other DNA
ggaagtgactaaaaggtggagtttgttaaaggaatggacatgtgtcaatgaatattataaaattcattaatctcatgcaa

SEQ ID NO: 37541 - DNA, 80 bp, synthetic construct; identical to SEQ ID NO: 10276
  source 1..80: mol_type = other DNA

SEQ ID NO: 37542 - DNA, 80 bp, synthetic construct
  source 1..80: mol_type = other DNA
ctggccaggatagagtgacaggaaccagagttactattccacctgaatcaaccaaaaatttctaaaatggcaaaatgtga

SEQ ID NO: 37543 - DNA, 80 bp, synthetic construct
  source 1..80: mol_type = other DNA
gagttgcttggtcaaactcttggtcaaagtttcagagttgcttggtcagagttgcttggtcaaacatcagtctagaagtt

SEQ ID NO: 37544 - DNA, 80 bp, synthetic construct
  source 1..80: mol_type = other DNA
ctaaaaatacaaaaattagctaggcgtggtggcacatgcctgtaattccagctactcaggaggctgaggcataaaaatcg

SEQ ID NO: 37545 - DNA, 80 bp, synthetic construct; identical to SEQ ID NO: 10277
  source 1..80: mol_type = other DNA

SEQ ID NO: 37546 - DNA, 80 bp, synthetic construct
  source 1..80: mol_type = other DNA
actattctttggtaagagaggaaggcaggcctccctttaccacaatcacttgaaataattgtatgggataaccagaattc

SEQ ID NO: 37547 - DNA, 80 bp, synthetic construct
  source 1..80: mol_type = other DNA
ggaatttctggtggatatattttgaggtgtattcattccatggtataggcattcttgtcttgtcgtaaaagctgccacca

SEQ ID NO: 37548 - DNA, 80 bp, synthetic construct
  source 1..80: mol_type = other DNA
ccctgaactggaagggcaagggagagaaggacgccactaggagtagattgaaaaaatatctgaacaataaggagtcaatc

SEQ ID NO: 37549 - DNA, 80 bp, synthetic construct
  source 1..80: mol_type = other DNA
aaaggcaaataagagttggaattttatgctaaaggtagtgaaatggagggtgctactttggttgtttacctaacattcag

SEQ ID NO: 37550 - DNA, 80 bp, synthetic construct; identical to SEQ ID NO: 10278
  source 1..80: mol_type = other DNA

SEQ ID NO: 37551 - DNA, 80 bp, synthetic construct
  source 1..80: mol_type = other DNA
aattagtttgaatgaaacagtaatgaaggcacaggtatgtagtgttggatgtttaaagccaagagccatgcttgccttgc

SEQ ID NO: 37552 - DNA, 80 bp, synthetic construct
  source 1..80: mol_type = other DNA
gtgccatcatacccggcgaatttttgtagagacggggtttcacgatgttgtccaggctggtctcgaactcctgacctcgt

SEQ ID NO: 37553 - DNA, 80 bp, synthetic construct
  source 1..80: mol_type = other DNA
gtgtggccgggcgcggtggctcacgtctgtaagcccagcactttgggaagccgaggcaggtggatcacctgatgtcagga

SEQ ID NO: 37554 - DNA, 80 bp, synthetic construct; identical to SEQ ID NO: 10279
  source 1..80: mol_type = other DNA

SEQ ID NO: 37555 - DNA, 80 bp, synthetic construct
  source 1..80: mol_type = other DNA
tttgttatgaggaattgctgtgtttatttgtaagatactcttacccctttccattagatgtctgtagcagccactagtct

SEQ ID NO: 37556 - DNA, 80 bp, synthetic construct
  source 1..80: mol_type = other DNA
ttctgggacaagtatttctcttgttagaagacaaatgtgctaaggaagaatgttctttgcttttgcctttactttcttgc

SEQ ID NO: 37557 - DNA, 80 bp, synthetic construct
  source 1..80: mol_type = other DNA
acgacttcaagatgagtcttggagctactccattaccaagtagggtgtcagaaagcaggaggaggaacgtactatccttt

SEQ ID NO: 37558 - DNA, 80 bp, synthetic construct
  source 1..80: mol_type = other DNA
aaaaattagccaggtgtggtggtctgcgcctgtatcccagctactcaggaggctgagacaggagaattgcttcaacttgg

SEQ ID NO: 37559 - DNA, 80 bp, synthetic construct; identical to SEQ ID NO: 10280
  source 1..80: mol_type = other DNA

SEQ ID NO: 37560 - DNA, 80 bp, synthetic construct
  source 1..80: mol_type = other DNA
ccttatatgtaacttttaagtgcctcgctatttcattctggtcatgttttattaaaccagaggcctagtaagcaggggtt

SEQ ID NO: 37561 - DNA, 80 bp, synthetic construct
  source 1..80: mol_type = other DNA
gatggtcaggttttccgttaatggaagcaaaacatatgctagctgaagcagaatttgaggtaggaaatgatacaatgtaa

SEQ ID NO: 37562 - DNA, 80 bp, synthetic construct
  source 1..80: mol_type = other DNA
taatttttttttttttttttttttttttgagactgagtttcgttcttgttgcccagcctggagtgcaatggcggaatctc

SEQ ID NO: 37563 - DNA, 80 bp, synthetic construct
  source 1..80: mol_type = other DNA
caggtgatccacccgccttggcctcccaaagtgctgggattacaggcgtgagccaccacacccagtctaatttttgtatt

SEQ ID NO: 37564 - DNA, 80 bp, synthetic construct; identical to SEQ ID NO: 10281
  source 1..80: mol_type = other DNA

SEQ ID NO: 37565 - DNA, 80 bp, synthetic construct
  source 1..80: mol_type = other DNA
agtgaatgtttttggcttaggcagtttaaagtggaagagaggtgtgggtggattccagacacacttttgacacaaaatag

SEQ ID NO: 37566 - DNA, 80 bp, synthetic construct
  source 1..80: mol_type = other DNA
atgtactctgggttctcagaaaacatgacccatgacaaacatctgctttgcaaccctagaccagagtagttcttgtaacc

SEQ ID NO: 37567 - DNA, 80 bp, synthetic construct
  source 1..80: mol_type = other DNA
gaacctgggaagcggagcttgcagtgagccgagattgcgccactgcactccagcctgggagacagagcgagactcccttt

SEQ ID NO: 37568 - DNA, 80 bp, synthetic construct; identical to SEQ ID NO: 10282
  source 1..80: mol_type = other DNA

SEQ ID NO: 37569 - DNA, 80 bp, synthetic construct
  source 1..80: mol_type = other DNA
tggtaaataagcactcctctcaacttagttgctaaactcttaacctgtattaactgaagactatgagatctgcagaggcc

SEQ ID NO: 37570 - DNA, 80 bp, synthetic construct
  source 1..80: mol_type = other DNA
gagtagccgggattacaggcttgtgccaccacgccctgctaattttttgtatttttagtggagacggggtttcaccgtgt

SEQ ID NO: 37571 - DNA, 80 bp, synthetic construct
  source 1..80: mol_type = other DNA
aggtccttaccggaaaaggccatcacaaggacagaagggaaattgacttatgaatatgtacaataagttagaagaatttc

SEQ ID NO: 37572 - DNA, 80 bp, synthetic construct; identical to SEQ ID NO: 10283
  source 1..80: mol_type = other DNA

SEQ ID NO: 37573 - DNA, 80 bp, synthetic construct
  source 1..80: mol_type = other DNA
tacgtgaaatcaatgcaatatattgtaatggaaagacaaggctgtttcaaagcaagaatcatttgtgtcaaatgataaaa

SEQ ID NO: 37574 - DNA, 80 bp, synthetic construct
  source 1..80: mol_type = other DNA
gagaaatgagagtaagatgaggaatggagacacagagtaaaaatatccatttcaagaaatgtggctggaattggaaggaa

SEQ ID NO: 37575 - DNA, 80 bp, synthetic construct
  source 1..80: mol_type = other DNA
acaacaggaataattaacagcacaaattccctgtgaatgcaggacaagatggcctgaggacctttgaagaactagctgtg

SEQ ID NO: 37576 - DNA, 80 bp, synthetic construct; identical to SEQ ID NO: 10284
  source 1..80: mol_type = other DNA

SEQ ID NO: 37577 - DNA, 80 bp, synthetic construct
  source 1..80: mol_type = other DNA
gaatctcaggggttaccccagacatatggaattttcgtcttaaaaaaattcacaggtgatgctatataaacattaaagct

SEQ ID NO: 37578 - DNA, 80 bp, synthetic construct
  source 1..80: mol_type = other DNA
agctgaaggtacagaaagtaggattagatatcttgaggaagtcaagccttcttgaagtagctactatgaatcctattagg

SEQ ID NO: 37579 - DNA, 80 bp, synthetic construct
  source 1..80: mol_type = other DNA
gctctttctctcctctttgaagatgataccaagttgaatccttatgcaggaggagatggtgagtacagaactgccccttg

SEQ ID NO: 37580 - DNA, 80 bp, synthetic construct; identical to SEQ ID NO: 10285
  source 1..80: mol_type = other DNA

SEQ ID NO: 37581 - DNA, 80 bp, synthetic construct
  source 1..80: mol_type = other DNA
aaatgtggctgaagggaaagaacaaggaatctaagctggaaatggaagaaagaaaaggtaggaacagaaagatccatgga

SEQ ID NO: 37582 - DNA, 80 bp, synthetic construct
  source 1..80: mol_type = other DNA
cctaaacttgtgaacatgataccttacatgacaaaggggacgttgcagtttgattaatttaagggccttgagatggagca

SEQ ID NO: 37583 - DNA, 80 bp, synthetic construct
  source 1..80: mol_type = other DNA
aagctagaaaagacaaaggaactgattattccctagagtctccacaagaaacatagccctgttgacacccttatattagc

SEQ ID NO: 37584 - DNA, 80 bp, synthetic construct; identical to SEQ ID NO: 10286
  source 1..80: mol_type = other DNA

SEQ ID NO: 37585 - DNA, 80 bp, synthetic construct
  source 1..80: mol_type = other DNA
ctgccaccacgactggctaattttgtatttttagtagagacagggtttcaccatgttggccaggctggtctagaacttct

SEQ ID NO: 37586 - DNA, 80 bp, synthetic construct
  source 1..80: mol_type = other DNA
ctaggctggagtgcaatggtgcgatctcggctcaatgcaacctctgcctcccaggttcaagcgattctcctgcctcagcc

SEQ ID NO: 37587 - DNA, 80 bp, synthetic construct
  source 1..80: mol_type = other DNA
gagccaccacacccagccaattgattcttatatatttaattttcattgagttcttaccatagtcagttattaataagtag

SEQ ID NO: 37588 - DNA, 80 bp, synthetic construct
  source 1..80: mol_type = other DNA
tctcacagtagcggaaaagctgagatttaaacatgagtattctaattccagagtctgtgttcttataaactactctatac

SEQ ID NO: 37589 - DNA, 80 bp, synthetic construct; identical to SEQ ID NO: 10287
  source 1..80: mol_type = other DNA

SEQ ID NO: 37590 - DNA, 80 bp, synthetic construct
  source 1..80: mol_type = other DNA
cttggctcaccccaacctccgcctcccggattcaagccattctcctgcctcagcctccagagtagctgggattacaggca

SEQ ID NO: 37591 - DNA, 80 bp, synthetic construct
  source 1..80: mol_type = other DNA
gtgtttcataaagcaaagcctccaaggaacagggttttgcttaggggagagtggttgttctaattttttttttagaaatg

SEQ ID NO: 37592 - DNA, 80 bp, synthetic construct
  source 1..80: mol_type = other DNA
ttttttgtttttgtttttgcttttgttttgagacagagtctcactctgttgcctaggctggagtgcagtggtgtaatcac

SEQ ID NO: 37593 - DNA, 80 bp, synthetic construct; identical to SEQ ID NO: 10288
  source 1..80: mol_type = other DNA

SEQ ID NO: 37594 - DNA, 80 bp, synthetic construct
  source 1..80: mol_type = other DNA
cacaaagtcaggaggttgagaccagccttgccaatatggtgaaaccccattctgtactaaaaatacaaaaaaattagctg

SEQ ID NO: 37595 - DNA, 80 bp, synthetic construct
  source 1..80: mol_type = other DNA
caatgatttggaaattggaatgtggcctcagaaggtactaacctatttcctgatcctgagattggagaatgtgtagtttc

SEQ ID NO: 37596 - DNA, 80 bp, synthetic construct
  source 1..80: mol_type = other DNA
aatatgcagagagacaaattgcaagtctacattattgaaacagaagaacacaggggtatggagatgaaggtataggtgga

SEQ ID NO: 37597 - DNA, 80 bp, synthetic construct
  source 1..80: mol_type = other DNA
aaattaagagattgagacagatagcttcatccttgaggtagatcttgctggatatcaatctcttgggaaaagtctacagt

SEQ ID NO: 37598 - DNA, 80 bp, synthetic construct; identical to SEQ ID NO: 10289
  source 1..80: mol_type = other DNA

SEQ ID NO: 37599 - DNA, 80 bp, synthetic construct
  source 1..80: mol_type = other DNA
cttgcttttataatgtttcattatttcctcttataatgtttcgttgtaatatttcactattattgtgatcctctcttttt

SEQ ID NO: 37600 - DNA, 80 bp, synthetic construct
  source 1..80: mol_type = other DNA
aacataaacctaaaaattcatttacttacagttgcccagaatgcaacctcagttgggttctcagtgctgtcaggaaatct

SEQ ID NO: 37601 - DNA, 80 bp, synthetic construct
  source 1..80: mol_type = other DNA
ccaactctgccttccatttctacaggctatttctaacctttactactttcccaaatgtcccaaatgttctatgaccagct

SEQ ID NO: 37602 - DNA, 80 bp, synthetic construct; identical to SEQ ID NO: 10290
  source 1..80: mol_type = other DNA

SEQ ID NO: 37603 - DNA, 80 bp, synthetic construct
  source 1..80: mol_type = other DNA
ggaagtttccaggaaacaggaatatggagtgtggctagtcaaccaaatagaagagaaacaaacataaagacaggaaattg

SEQ ID NO: 37604 - DNA, 80 bp, synthetic construct
  source 1..80: mol_type = other DNA
atgcgctctaccactgagctacatcccctggcacaagtcggttgtaacggagaattcctgtcatgttaaaaacgcgaagc

SEQ ID NO: 37605 - DNA, 80 bp, synthetic construct
  source 1..80: mol_type = other DNA
agcacaattagtcctcttggcgcaattgaatcccaggcggaaagaattaagggattgttcaagatcttttgacagatttt

SEQ ID NO: 37606 - DNA, 80 bp, synthetic construct; identical to SEQ ID NO: 10291
  source 1..80: mol_type = other DNA

SEQ ID NO: 37607 - DNA, 80 bp, synthetic construct
  source 1..80: mol_type = other DNA
tgaagctgcacgcaacagcctttcccgggacccgggataggccctggccaggcgctccggcggcggcagccgcaacgccc

SEQ ID NO: 37608 - DNA, 80 bp, synthetic construct
  source 1..80: mol_type = other DNA
taacttatacttcattaaaaatctaaaaatcggatctgcgaaacgcactctcaaagagaatgagaagacaagccacagac

SEQ ID NO: 37609 - DNA, 80 bp, synthetic construct
  source 1..80: mol_type = other DNA
gcatataaaaagtttccacatcatatatcatcaggaaaatgcaaattaaaacaacaatgataccactacacactttttag

SEQ ID NO: 37610 - DNA, 80 bp, synthetic construct; identical to SEQ ID NO: 10292
  source 1..80: mol_type = other DNA

SEQ ID NO: 37611 - DNA, 80 bp, synthetic construct
  source 1..80: mol_type = other DNA
ggaggaaacttaacatggaggaaacttaaatgcatattactaagttaaataagccaatctgaaaagccaatgtactatga

SEQ ID NO: 37612 - DNA, 80 bp, synthetic construct
  source 1..80: mol_type = other DNA
cacatttgtcaaaacccataaattacccaacaccaagagagaaccctccagtgaactatggactttgggtgataatggtg

SEQ ID NO: 37613 - DNA, 80 bp, synthetic construct
  source 1..80: mol_type = other DNA
acgcaaaaaaaaaaaaaaaaaaaaaaaggggaatgaaaccttcatggactcaggacagtgacatggaagcatggaaggtg

SEQ ID NO: 37614 - DNA, 80 bp, synthetic construct
  source 1..80: mol_type = other DNA
cgggcggatcacgaggtcaggaaatcgagaccatcctggctaacacggtgaaacaccatctctattaaaaatacaaaaca

SEQ ID NO: 37615 - DNA, 80 bp, synthetic construct; identical to SEQ ID NO: 10293
  source 1..80: mol_type = other DNA

SEQ ID NO: 37616 - DNA, 80 bp, synthetic construct
  source 1..80: mol_type = other DNA
atgtcttttgctccctctgctttcacagcagcttccttgaaacatagaaacctgtttcaatattgtcttttaaaatggcg

SEQ ID NO: 37617 - DNA, 80 bp, synthetic construct
  source 1..80: mol_type = other DNA
taataataataatagtaattagctgggagtggtgatacatgcctgtggtcccagctaccaaagaggctgaggtgggacga

SEQ ID NO: 37618 - DNA, 80 bp, synthetic construct
  source 1..80: mol_type = other DNA
tgcggggtgctcccatgagggaaggatcttcttattactgaacaatttgagaagaaaatctggctcttcagtagatgata

SEQ ID NO: 37619 - DNA, 80 bp, synthetic construct
  source 1..80: mol_type = other DNA
tcacagcaaaacagaggaagtacagagttcccctaagccccctgacgccccaaccgacctccttttatactttatgcttt

SEQ ID NO: 37620 - DNA, 80 bp, synthetic construct; identical to SEQ ID NO: 10294
  source 1..80: mol_type = other DNA

SEQ ID NO: 37621 - DNA, 80 bp, synthetic construct
  source 1..80: mol_type = other DNA
tgaagcaatcagtgtagtttttcctttcttttcctctttatcggagactattttaacatataaaggagcaaaaaggctgg

SEQ ID NO: 37622 - DNA, 80 bp, synthetic construct
  source 1..80: mol_type = other DNA
cagctactaggggatttgaggaaggagaatcgcttgaacccgggaggcggaggttgcagtgacccgagatggtgccactg

SEQ ID NO: 37623 - DNA, 80 bp, synthetic construct
  source 1..80: mol_type = other DNA
gtgattgattagaatgaggcaaatgagttgtataacttcagagactggctcacaaaagacagggtaatttattatgtagc

SEQ ID NO: 37624 - DNA, 80 bp, synthetic construct; identical to SEQ ID NO: 10295
  source 1..80: mol_type = other DNA

SEQ ID NO: 37625 - DNA, 80 bp, synthetic construct
  source 1..80: mol_type = other DNA
tccaattccactcttttaattatttaaaaatatacaataaattattgttgactacagtcaccttactgtgttatcaaact

SEQ ID NO: 37626 - DNA, 80 bp, synthetic construct
  source 1..80: mol_type = other DNA
gtgcctggcttatttcacttaacataatgtactccagttccatccatgttattgcaaatgacaggatttcattctttttt

SEQ ID NO: 37627 - DNA, 80 bp, synthetic construct
  source 1..80: mol_type = other DNA
ctgatttcctttcttttggatatatacctagcagtgagattgccagatcatgtggtagttctgtttttagtttttcaaag

SEQ ID NO: 37628 - DNA, 80 bp, synthetic construct; identical to SEQ ID NO: 10296
  source 1..80: mol_type = other DNA

SEQ ID NO: 37629 - DNA, 80 bp, synthetic construct
  source 1..80: mol_type = other DNA
ataatgactatggttttaaatgtacataatttgccatgctaaagaaattgtattatcttgctatttttcttagctaacat

SEQ ID NO: 37630 - DNA, 80 bp, synthetic construct
  source 1..80: mol_type = other DNA
tgtatggatgaatgacacctcatgacgggtggttatgtgtgtatttgcatgtgtacataatttatatatatactataata

SEQ ID NO: 37631 - DNA, 80 bp, synthetic construct
  source 1..80: mol_type = other DNA
tataaacaaatttaatttcttatgataaaccatagttcctgcctcaggtttttccaccccaactctcatcaccatgacca

SEQ ID NO: 37632 - DNA, 80 bp, synthetic construct; identical to SEQ ID NO: 10297
  source 1..80: mol_type = other DNA

SEQ ID NO: 37633 - DNA, 80 bp, synthetic construct
  source 1..80: mol_type = other DNA
atcaaagatgctaaatgaaaaattgaaacatccttaaacaaatagcctttgcaatacctacaatgggccttgactaaaat

SEQ ID NO: 37634 - DNA, 80 bp, synthetic construct
  source 1..80: mol_type = other DNA
gacccatgatttgcagtcttataatctgggtatgtaatctaatgccatttaaaagttggtgagatagggtaaattttgga

SEQ ID NO: 37635 - DNA, 80 bp, synthetic construct
  source 1..80: mol_type = other DNA
ctactgaaaatacaaaaattagctgggcatgggggtgcacacctgtagtcccagctactcaggaggctgagtcaggagaa

SEQ ID NO: 37636 - DNA, 80 bp, synthetic construct; identical to SEQ ID NO: 10298
  source 1..80: mol_type = other DNA

SEQ ID NO: 37637 - DNA, 80 bp, synthetic construct
  source 1..80: mol_type = other DNA
ggtttctcagaaaattctgtaatttatgagttaatcccacaacttcccattgaatagatgtttcaataatgctattcaaa

SEQ ID NO: 37638 - DNA, 80 bp, synthetic construct
  source 1..80: mol_type = other DNA
tcatgctagttgtgctctacactacaagccaagttaaaacctgctccatctccccaccctacacatagatacctgtacac

SEQ ID NO: 37639 - DNA, 80 bp, synthetic construct
  source 1..80: mol_type = other DNA
gtctctgaacgtgaagagtcttgtaagggctgcggagggcaaaatgcagatagcaataacctcacctgaatttctaatat

SEQ ID NO: 37640 - DNA, 80 bp, synthetic construct; identical to SEQ ID NO: 10299
  source 1..80: mol_type = other DNA

SEQ ID NO: 37641 - DNA, 80 bp, synthetic construct
  source 1..80: mol_type = other DNA
aaataaaacctaacaacaaacaggagagcattcgtttcctgtagtgtggtaaaagataccactacctacaccaggacaaa

SEQ ID NO: 37642 - DNA, 80 bp, synthetic construct
  source 1..80: mol_type = other DNA
agggacacaatacactgaaagtcaggtattgtccaaggtttctccccagtgtgatagcctgagatatggcctcctgggaa

SEQ ID NO: 37643 - DNA, 80 bp, synthetic construct
  source 1..80: mol_type = other DNA
atgttctatttactgagataggagaaaacagccttaaggctggaggtgagacatgctagcggcaatattgctctttaatg

SEQ ID NO: 37644 - DNA, 80 bp, synthetic construct; identical to SEQ ID NO: 10300
  source 1..80: mol_type = other DNA

SEQ ID NO: 37645 - DNA, 80 bp, synthetic construct
  source 1..80: mol_type = other DNA
gccaccccttaatctggtgcccaacgtgggtgcttttctctagggtgaaggtacactagagcgtagtcattgaggacaag

SEQ ID NO: 37646 - DNA, 80 bp, synthetic construct
  source 1..80: mol_type = other DNA
aaaaatctaatcatgctatttcaaacaatagaacaattctgcccatggtttctagaacagggaaccttagatctaaaaga

SEQ ID NO: 37647 - DNA, 80 bp, synthetic construct
  source 1..80: mol_type = other DNA
atcgattgtgaagaagaggctgggatagaatctcagaaaggaacggaaagttcacattgtaaatatgtagcagagctggt

SEQ ID NO: 37648 - DNA, 80 bp, synthetic construct; identical to SEQ ID NO: 10301
  source 1..80: mol_type = other DNA

SEQ ID NO: 37649 - DNA, 80 bp, synthetic construct
  source 1..80: mol_type = other DNA
gctctagatcctcagccgtccactgtgagacttaatcctacagcactacctagtggacagcatagtgcattacataaaat

SEQ ID NO: 37650 - DNA, 80 bp, synthetic construct
  source 1..80: mol_type = other DNA
ggagtaaaacagtatggacccagctccccttatatgaaaatattattagattccattgctcatggacagagactcattcc

SEQ ID NO: 37651 - DNA, 80 bp, synthetic construct
  source 1..80: mol_type = other DNA
aattggagcactaccaatcaacaagcaataatgcaaaatgaggccattaagcaagttagagctatatgccttagagcctg

SEQ ID NO: 37652 - DNA, 80 bp, synthetic construct; identical to SEQ ID NO: 10302
  source 1..80: mol_type = other DNA

SEQ ID NO: 37653 - DNA, 80 bp, synthetic construct
  source 1..80: mol_type = other DNA
attgttcatctaaaaaaattgcccagcctcaaacaaaatattcaagctactacaacaacagatagagccacctgacttat

SEQ ID NO: 37654 - DNA, 80 bp, synthetic construct
  source 1..80: mol_type = other DNA
cagacaacccccactgtcacaaatgcctcagcgaatgagccagttaccacaatacagcaattgtcccccgccacaagtgg

SEQ ID NO: 37655 - DNA, 80 bp, synthetic construct
  source 1..80: mol_type = other DNA
actggtgtggttgagtcaaactatgaaggtgaaattcaattggctattagctcctcaattccttggagtggcaatccagg

SEQ ID NO: 37656 - DNA, 80 bp, synthetic construct
  source 1..80: mol_type = other DNA
gtctcagagagcagacctgtgtgtaaggccattattcaaaaaaaacagtttgaagggttagtagacactggagcagatgt

SEQ ID NO: 37657 - DNA, 80 bp, synthetic construct; identical to SEQ ID NO: 10303
  source 1..80: mol_type = other DNA

SEQ ID NO: 37658 - DNA, 80 bp, synthetic construct
  source 1..80: mol_type = other DNA
cccaattcagagtgacaaaaatcgagaaagaaaaggaatagggtatcctttttaggggctaccactgtagagcctcctaa

SEQ ID NO: 37659 - DNA, 80 bp, synthetic construct
  source 1..80: mol_type = other DNA
tgtttgtaattcagaaaacatccggcagatggcgtatgttaactgacttaagggccgtaaatgccgtaattcaacccaag

SEQ ID NO: 37660 - DNA, 80 bp, synthetic construct
  source 1..80: mol_type = other DNA
ccaccaggtttcagtggaaagtgttacctcagggaatgcttaatagtccaacaatttgtcagactttcctagatcaagct

SEQ ID NO: 37661 - DNA, 80 bp, synthetic construct; identical to SEQ ID NO: 10304
  source 1..80: mol_type = other DNA

SEQ ID NO: 37662 - DNA, 80 bp, synthetic construct
  source 1..80: mol_type = other DNA
caaaagaaattaaataagtggaagaaaaaattcagtcagcgcaaataaatagaatagatccctgtggggaaaagagagat

SEQ ID NO: 37663 - DNA, 80 bp, synthetic construct
  source 1..80: mol_type = other DNA
ggatttagagctgtgcaggatgtgctttgttaaaaaagtgcttgaaggtagtatgcttgttaaaagtcatcatcattctc

SEQ ID NO: 37664 - DNA, 80 bp, synthetic construct
  source 1..80: mol_type = other DNA
ggaggattagtaaaagaggaagtcctctttgcagttgagataagaggaaggcatctgtctcctgctcctccctgggaatg

SEQ ID NO: 37665 - DNA, 80 bp, synthetic construct; identical to SEQ ID NO: 10305
  source 1..80: mol_type = other DNA

SEQ ID NO: 37666 - DNA, 80 bp, synthetic construct
  source 1..80: mol_type = other DNA
tcttatttcttttcttagcttctcatcccacctgatgagaaacacccacaggtgtggaggggcaggccaccccttcagat

SEQ ID NO: 37667 - DNA, 80 bp, synthetic construct
  source 1..80: mol_type = other DNA
caagattacaaataataaaattctgtggaaacgacccagacaaaatagttgttcctttaaccaaggaacaagttagacaa

SEQ ID NO: 37668 - DNA, 80 bp, synthetic construct
  source 1..80: mol_type = other DNA
tgtttactgatggttccagcaatgggaaagcggcttacacagggccaaaagagcaagtaatcaaaattcaatatcaatcg

SEQ ID NO: 37669 - DNA, 80 bp, synthetic construct; identical to SEQ ID NO: 10306
  source 1..80: mol_type = other DNA

SEQ ID NO: 37670 - DNA, 80 bp, synthetic construct
  source 1..80: mol_type = other DNA
agtgtcaaatcctacacctgcccactcaagaggtaggagttaatcccagaggtctgtgtcccaatgcgttatggcaaatg

SEQ ID NO: 37671 - DNA, 80 bp, synthetic construct
  source 1..80: mol_type = other DNA
aaaaaattaaaactgacaatggaccaggatactgtagtaaagctttccaaaatccaaaaaatcttatatcagtggaaaat

SEQ ID NO: 37672 - DNA, 80 bp, synthetic construct
  source 1..80: mol_type = other DNA
aatgttttaaacatttatagatatcagactactacttctgcagaacaacatcttactgataaaaagaacagcccacatga

SEQ ID NO: 37673 - DNA, 80 bp, synthetic construct; identical to SEQ ID NO: 10307
  source 1..80: mol_type = other DNA

SEQ ID NO: 37674 - DNA, 80 bp, synthetic construct
  source 1..80: mol_type = other DNA
aacggtggtgtctccccatgcctgcaggagtagctgcagctaattatacctactgggcctatgtgcctttcctgccctta

SEQ ID NO: 37675 - DNA, 80 bp, synthetic construct
  source 1..80: mol_type = other DNA
gagaacaccaggatgtttaatgcctgcaatccaaaattggttggtaaacgtacctactttcagtaccaccagtagattta

SEQ ID NO: 37676 - DNA, 80 bp, synthetic construct
  source 1..80: mol_type = other DNA
tgtggccaatagagcagtgatattacaaaacgatgaatttggaactgttatagatagggcacctcgaggtcaattctacc

SEQ ID NO: 37677 - DNA, 80 bp, synthetic construct; identical to SEQ ID NO: 10308
  source 1..80: mol_type = other DNA

SEQ ID NO: 37678 - DNA, 80 bp, synthetic construct
  source 1..80: mol_type = other DNA
aaaattgcagactgtttacttgcattgattcgacttttaattggcagcactgtattctgctagtgagagcaagagaaggc

SEQ ID NO: 37679 - DNA, 80 bp, synthetic construct
  source 1..80: mol_type = other DNA
ggcaggagttgcattgcactcttctgttcagacagtaaactttgttaacgattggcaaaagaattctacaagattgtgga

SEQ ID NO: 37680 - DNA, 80 bp, synthetic construct
  source 1..80: mol_type = other DNA
tgagtctgagcatcactgggacatggttagatgccatctacagggaagagaagataacctcactttagacatttccaaat

SEQ ID NO: 37681 - DNA, 80 bp, synthetic construct; identical to SEQ ID NO: 10309
  source 1..80: mol_type = other DNA

SEQ ID NO: 37682 - DNA, 80 bp, synthetic construct
  source 1..80: mol_type = other DNA
gttaatctgtaaccctatccccaaccctgtgctttgcagagacatgtgctgtgttgactcaaggtttagtggatttaggg

SEQ ID NO: 37683 - DNA, 80 bp, synthetic construct
  source 1..80: mol_type = other DNA
ctgagatagggcgtcgtgggaagggaaagacctgactgtcccccagcctgacacccataaagggtctgtgtagtaaaaga

SEQ ID NO: 37684 - DNA, 80 bp, synthetic construct
  source 1..80: mol_type = other DNA
gctctttaatgcacccagagatgtttgtgtacgagatgtttttgtacatgcacatcaaagcacaacacgttttcttaaac

SEQ ID NO: 37685 - DNA, 80 bp, synthetic construct; identical to SEQ ID NO: 10310
  source 1..80: mol_type = other DNA

SEQ ID NO: 37686 - DNA, 80 bp, synthetic construct
  source 1..80: mol_type = other DNA
tctgattgatggcttcagccattatttttctggcctaacagctcaaattcaaatgtccagaatagagcaaggtgaattaa

SEQ ID NO: 37687 - DNA, 80 bp, synthetic construct
  source 1..80: mol_type = other DNA
agcttaagtacagagaaatacagttatcgtcagctttgtcttccattccaaacgaaaacaatcgcttgcagaactacctc

SEQ ID NO: 37688 - DNA, 80 bp, synthetic construct
  source 1..80: mol_type = other DNA
tggaaacagcccaacgacgctctcaaaagccgacagttgtttgcgtaaaaaggaatggtatcttactaggggacgaaagg

SEQ ID NO: 37689 - DNA, 80 bp, synthetic construct
  source 1..80: mol_type = other DNA
tttttcgtacctagaggactcagagaaaacgtgcagagcttggacacgtcctacttattcatccatccaaatcctgtacg

SEQ ID NO: 37690 - DNA, 80 bp, synthetic construct; identical to SEQ ID NO: 10311
  source 1..80: mol_type = other DNA

SEQ ID NO: 37691 - DNA, 80 bp, synthetic construct
  source 1..80: mol_type = other DNA
acacaccttctcccttgccctctcctgattccagagagaatcccatctgaaagaggctatgtatccgactgcagcattct

SEQ ID NO: 37692 - DNA, 80 bp, synthetic construct
  source 1..80: mol_type = other DNA
tacatcctccattaggacctagagttcgccaagcagcatttaactttacttctttgatttcctttctgtgttacctttgg

SEQ ID NO: 37693 - DNA, 80 bp, synthetic construct
  source 1..80: mol_type = other DNA
atgaatcccagggtccaaaatcggtctaaggccaagttttattttgttttctagaaatctatatgaatgcatttccagtc

SEQ ID NO: 37694 - DNA, 80 bp, synthetic construct; identical to SEQ ID NO: 10312
  source 1..80: mol_type = other DNA

SEQ ID NO: 37695 - DNA, 80 bp, synthetic construct
  source 1..80: mol_type = other DNA
gcagggatctttggtgtgctgttaactcatgaattctactttctggttgtacaactgtaaacacaagcaacttgattttt

SEQ ID NO: 37696 - DNA, 80 bp, synthetic construct
  source 1..80: mol_type = other DNA
gaagaaaacttttaagactttaagccccctaccatatctaattctccctgcatgctgatagcatctggccctcaaacttg

SEQ ID NO: 37697 - DNA, 80 bp, synthetic construct
  source 1..80: mol_type = other DNA
tgggactacaggcgccctccaccacacccggctaatttttttgtatttttagtaaagacggggtttcaccgtgttagcca

SEQ ID NO: 37698 - DNA, 80 bp, synthetic construct; identical to SEQ ID NO: 10313
  source 1..80: mol_type = other DNA

SEQ ID NO: 37699 - DNA, 80 bp, synthetic construct
  source 1..80: mol_type = other DNA
tttaacttaagagttaggtagagaaagtccactggattaaatttcattatctctgaaattacaagactggatactgtgta

SEQ ID NO: 37700 - DNA, 80 bp, synthetic construct
  source 1..80: mol_type = other DNA
ttgcctccaccaggaaggtcctgagacagtctcaagtctccaacatatatagcagcgataatgactcagaaaaaagtgtt

SEQ ID NO: 37701 - DNA, 80 bp, synthetic construct
  source 1..80: mol_type = other DNA
ctgattccacaccccatctctatttctcgcttgacgattattatatccacaaacgggttttaaaacagcgacttcaaaac

SEQ ID NO: 37702 - DNA, 80 bp, synthetic construct
  source 1..80: mol_type = other DNA
ggacacaaggaggaattctgctatatatgtacatatttgaaagaaaaagtcaaagaggcccggaaaccttcaagcagtgc

SEQ ID NO: 37703 - DNA, 80 bp, synthetic construct; identical to SEQ ID NO: 10314
  source 1..80: mol_type = other DNA

SEQ ID NO: 37704 - DNA, 80 bp, synthetic construct
  source 1..80: mol_type = other DNA
cttgaaaagtgagtgcaggaggatgtttgtgatcaggcaacatgctgctgaaacacatcattgatttcaaactctgagga

SEQ ID NO: 37705 - DNA, 80 bp, synthetic construct
  source 1..80: mol_type = other DNA
ttgggatcaataacctgccacatttggtaattgattgaaactactgccatctgtgtgcatggaagagcagtgaggggaga

SEQ ID NO: 37706 - DNA, 80 bp, synthetic construct
  source 1..80: mol_type = other DNA
agagcttactaatgtgatggtgacacgattgttcctctccttttgggagatcctgagtgagggggatatttctctctcaa

SEQ ID NO: 37707 - DNA, 80 bp, synthetic construct; identical to SEQ ID NO: 10315
  source 1..80: mol_type = other DNA

SEQ ID NO: 37708 - DNA, 80 bp, synthetic construct
  source 1..80: mol_type = other DNA
catcagcttcaactcatcgaggagaatcccaagttgagatatttacttcttttcaatattattttctttcaacttccatg

SEQ ID NO: 37709 - DNA, 80 bp, synthetic construct
  source 1..80: mol_type = other DNA
atacaaaaattagtgaggggtgttggcacatgccagtagtctcagctacttgggaggctgaggcatgagaatcacttgaa

SEQ ID NO: 37710 - DNA, 80 bp, synthetic construct
  source 1..80: mol_type = other DNA
gtgttacctcaggggatttagatccaggtaagtgggaaagatagaagtgaaataaattaataatacttgctgagaaatga

SEQ ID NO: 37711 - DNA, 80 bp, synthetic construct; identical to SEQ ID NO: 10316
  source 1..80: mol_type = other DNA

SEQ ID NO: 37712 - DNA, 80 bp, synthetic construct
  source 1..80: mol_type = other DNA
atctgctgggcacagtggttcacacctgtaatcccaggactttgggaggctgaggcaggtggattatgaggtcaggagtt

SEQ ID NO: 37713 - DNA, 80 bp, synthetic construct
  source 1..80: mol_type = other DNA
gccactgcactccagcctgggggacaagagtgaaactccatctcaaaaaaaaaaaaaaaaaattccagatcctcgtgaag

SEQ ID NO: 37714 - DNA, 80 bp, synthetic construct
  source 1..80: mol_type = other DNA
attttaaagcttcccagatgattccagtaatcagtcagctttgagaaccaatagcctaggaagtcaagcacccagagcct

SEQ ID NO: 37715 - DNA, 80 bp, synthetic construct; identical to SEQ ID NO: 10317
  source 1..80: mol_type = other DNA

SEQ ID NO: 37716 - DNA, 80 bp, synthetic construct
  source 1..80: mol_type = other DNA
tggttacactgcaatcaatgttaattatagaagtggaatttatggctgattttggctttagcatctcaggtatgtgtgta

SEQ ID NO: 37717 - DNA, 80 bp, synthetic construct
  source 1..80: mol_type = other DNA
tgtggtggcacatgcctgtaatcccagctactcaggaggctgaggcgggagaatcacttgaacgcaagaggtggaggtgg

SEQ ID NO: 37718 - DNA, 80 bp, synthetic construct
  source 1..80: mol_type = other DNA
agaagctctttaactatgaaggggcatagcccatttggtggaggtttagtcttttaaggtgagatttcaggatttaaacc

SEQ ID NO: 37719 - DNA, 80 bp, synthetic construct; identical to SEQ ID NO: 10318
  source 1..80: mol_type = other DNA

SEQ ID NO: 37720 - DNA, 80 bp, synthetic construct
  source 1..80: mol_type = other DNA
tgacgggggatttagagttatggatttagtgagtgagggatttacttaaggagacttccaagtagcttgattagtcttct

SEQ ID NO: 37721 - DNA, 80 bp, synthetic construct
  source 1..80: mol_type = other DNA
acccatgaagttaaatggaaaaacacttaattcccaatcagaaaactgacagctcacaatgaaaattggaacaatactca

SEQ ID NO: 37722 - DNA, 80 bp, synthetic construct
  source 1..80: mol_type = other DNA
tctgcagagtttctgactcagagattagggtgccttccaaaaactctgtatattgttacttagacataatccactttaaa

SEQ ID NO: 37723 - DNA, 80 bp, synthetic construct; identical to SEQ ID NO: 10319
  source 1..80: mol_type = other DNA

SEQ ID NO: 37724 - DNA, 80 bp, synthetic construct
  source 1..80: mol_type = other DNA
attataagagtccaccaccatgcccagctaatttttgaatttttagtagagacaagatttcaccatgttggccaggctgg

SEQ ID NO: 37725 - DNA, 80 bp, synthetic construct
  source 1..80: mol_type = other DNA
tcccaataactctgtgtagtggcaacccattacattttgttttactttgccagggagcagaaaataatgaggggaaaagg

SEQ ID NO: 37726 - DNA, 80 bp, synthetic construct
  source 1..80: mol_type = other DNA
gccacagccccatcactgttgcaatttcttgttgcatattccctagttttacattttacatggttttgtgaaagtgtaac

SEQ ID NO: 37727 - DNA, 80 bp, synthetic construct
  source 1..80: mol_type = other DNA
gagtgcagtggcacaatctcagctcactgcaacctccactttactggctcaagcaattctcctgcctcagcctcccaagt

SEQ ID NO: 37728 - DNA, 80 bp, synthetic construct; identical to SEQ ID NO: 10320
  source 1..80: mol_type = other DNA

SEQ ID NO: 37729 - DNA, 80 bp, synthetic construct
  source 1..80: mol_type = other DNA
agatagataatatttttgaacacatgggtatggacaaaatggccaagaaggactggatagcttggtctataccgtaaaaa

SEQ ID NO: 37730 - DNA, 80 bp, synthetic construct
  source 1..80: mol_type = other DNA
aagaaaatatgtttatttgtgaacagagcattgcagtgggaataggcatgccatagtaaacgatgtatgtcttcagggag

SEQ ID NO: 37731 - DNA, 80 bp, synthetic construct
  source 1..80: mol_type = other DNA
gcagttgctaggcagatgtccttgtagacatattttttgtgtgtaagattgcaaggttgtggttttcacagtcttttgtg

SEQ ID NO: 37732 - DNA, 80 bp, synthetic construct; identical to SEQ ID NO: 10321
  source 1..80: mol_type = other DNA

SEQ ID NO: 37733 - DNA, 80 bp, synthetic construct
  source 1..80: mol_type = other DNA
atgtgcacagctactgttttttattcttcttgaagggaaacaatagttgcatgagattcctttcaagtaatgcaacaaaa

SEQ ID NO: 37734 - DNA, 80 bp, synthetic construct
  source 1..80: mol_type = other DNA
ctgcctccagagcttcttcagtgttacctggcttcttctaaatctattttccttcagtggtaaataattttcccatttat

SEQ ID NO: 37735 - DNA, 80 bp, synthetic construct
  source 1..80: mol_type = other DNA
agcctgggttctaatttctgtattttctgttcctgttttcaaccattgcctatgctgacaaaggcttatgtattgcaact

SEQ ID NO: 37736 - DNA, 80 bp, synthetic construct
  source 1..80: mol_type = other DNA
tcagggatataaatgtaactagtattaatatatcttatgttaggtggtagttgtactgggttaatactgtccttcccccc

SEQ ID NO: 37737 - DNA, 80 bp, synthetic construct; identical to SEQ ID NO: 10322
  source 1..80: mol_type = other DNA

SEQ ID NO: 37738 - DNA, 80 bp, synthetic construct
  source 1..80: mol_type = other DNA
taggaaactaatacagtgggtgagccagaaaaggaaagaaaaaagactggttacgataaacacacagaaagaatgctcat

SEQ ID NO: 37739 - DNA, 80 bp, synthetic construct
  source 1..80: mol_type = other DNA
ccaaaccttcactcctagagagtttatgacatttagcagtgccctgtacaaaagattgttctagtttttgattgacttta

SEQ ID NO: 37740 - DNA, 80 bp, synthetic construct
  source 1..80: mol_type = other DNA
aatcaccatgagcaatcaccaagagtaagccccttccttgcctgctggtttattggcacaaaaaggccaaagtggtaaaa

SEQ ID NO: 37741 - DNA, 80 bp, synthetic construct
  source 1..80: mol_type = other DNA
acaagcagaagattccaggttttctatgtttgcataatcccatcacaatatatcttgctgattatagcaaaaattatggg

SEQ ID NO: 37742 - DNA, 80 bp, synthetic construct; identical to SEQ ID NO: 10323
  source 1..80: mol_type = other DNA

SEQ ID NO: 37743 - DNA, 80 bp, synthetic construct
  source 1..80: mol_type = other DNA
aacagtatatttatacgaagacctccatctcagactaacaccaagtgggacatgctcaagggaagacctgaaacagcata

SEQ ID NO: 37744 - DNA, 80 bp, synthetic construct
  source 1..80: mol_type = other DNA
tgcccgccaccatgcccagctaattaattttggtatttttgtatttttagtatttctagtagagacggggtttcaccgtt

SEQ ID NO: 37745 - DNA, 80 bp, synthetic construct
  source 1..80: mol_type = other DNA
taaatcaagcattctccacaaaatcatcacaataaaaaatttctcaacatacaaagatccagggggatatattcaatctt

SEQ ID NO: 37746 - DNA, 80 bp, synthetic construct; identical to SEQ ID NO: 10324
  source 1..80: mol_type = other DNA

SEQ ID NO: 37747 - DNA, 80 bp, synthetic construct
  source 1..80: mol_type = other DNA
ataccactgtacttcagcctgggccttggagtaagaccctgtctcaaaaaaaacaaaaagaaatagaaagtattgaaaaa

SEQ ID NO: 37748 - DNA, 80 bp, synthetic construct
  source 1..80: mol_type = other DNA
cattcaatttaatgggaagagagagaaaaaaaagactgaaaacaatgaattcaaggtcctgtagaataatatcaaatagt

SEQ ID NO: 37749 - DNA, 80 bp, synthetic construct
  source 1..80: mol_type = other DNA
aaaaaactaattagacacattatcatccagctgctgaaaataaaagcttttttaaaaatcttggagctgggcatggtggc

SEQ ID NO: 37750 - DNA, 80 bp, synthetic construct; identical to SEQ ID NO: 10325
  source 1..80: mol_type = other DNA

SEQ ID NO: 37751 - DNA, 80 bp, synthetic construct
  source 1..80: mol_type = other DNA
acaattttaaaacggagaccacaatccaaatatgtggatttttctttcagaaactatgatagtcaaaagacagtggaaca

SEQ ID NO: 37752 - DNA, 80 bp, synthetic construct
  source 1..80: mol_type = other DNA
gctgaaaggaaatgataccagagggaaacttggatcttcaggagtgaaggaaaagccactgaaatgataaatatctgtga

SEQ ID NO: 37753 - DNA, 80 bp, synthetic construct
  source 1..80: mol_type = other DNA
aaggatcctatattggtgctggactttcatgaagtctaagtggatggcgtgcatattgtaatcactaaatcacagagcaa

SEQ ID NO: 37754 - DNA, 80 bp, synthetic construct; identical to SEQ ID NO: 10326
  source 1..80: mol_type = other DNA

SEQ ID NO: 37755 - DNA, 80 bp, synthetic construct
  source 1..80: mol_type = other DNA
aaataaaaccataatgagatgtcattacacacctgtcagaatggtccctcatcttcagcccattaattaatccctatgag

SEQ ID NO: 37756 - DNA, 80 bp, synthetic construct
  source 1..80: mol_type = other DNA
gctaagacaagtgcaggatgcaagtaaagaataccgaaagagtccgggcgtggctttcaagatgttctttataaaattgc

SEQ ID NO: 37757 - DNA, 80 bp, synthetic construct
  source 1..80: mol_type = other DNA
tgcctgtaatcccagctactcgggaggctgaggcaggagaatggcgtgaacctgggaggcggagcttacagtgagccaag

SEQ ID NO: 37758 - DNA, 80 bp, synthetic construct; identical to SEQ ID NO: 10327
  source 1..80: mol_type = other DNA

SEQ ID NO: 37759 - DNA, 80 bp, synthetic construct
  source 1..80: mol_type = other DNA
ttgttcttcttcgtctttcgctgcttcatctcttccactttccccactctcgcccataataccctccactctctatctcc

SEQ ID NO: 37760 - DNA, 80 bp, synthetic construct
  source 1..80: mol_type = other DNA
ccaacccccattgtctccaaaacacttgcctgggttgactgtggcacacgcatgttgaataaagacaggaaacccttacc

SEQ ID NO: 37761 - DNA, 80 bp, synthetic construct
  source 1..80: mol_type = other DNA
aaagaggtgaaagtcgcctggagctgttttctttctggtcttcgctctctagggatctcagccagtgagcagcgtcttgg

SEQ ID NO: 37762 - DNA, 80 bp, synthetic construct; identical to SEQ ID NO: 10328
  source 1..80: mol_type = other DNA

SEQ ID NO: 37763 - DNA, 80 bp, synthetic construct
  source 1..80: mol_type = other DNA
gaaatagtagagttggatagagtagactttgacctcggtttaaatcgtagaacactagcagataacagtgacagccagtt

SEQ ID NO: 37764 - DNA, 80 bp, synthetic construct
  source 1..80: mol_type = other DNA
atttgcttcatgagtggcaacagactcaaaagtagcctaaggtctacgttttgggtggtatgtctaaataatgctgcatt

SEQ ID NO: 37765 - DNA, 80 bp, synthetic construct
  source 1..80: mol_type = other DNA
tgagcagcatgatgaaatgtcgcctcatgtgctccatcccgcctgggaagtaaaccatctatttgtccagcatatccacg

SEQ ID NO: 37766 - DNA, 80 bp, synthetic construct; identical to SEQ ID NO: 10329
  source 1..80: mol_type = other DNA

SEQ ID NO: 37767 - DNA, 80 bp, synthetic construct
  source 1..80: mol_type = other DNA
acttaatctacttgagggcaacacgttataccagaaaacactgagcccatatgaagacttcatcaagggatcctctgaaa

SEQ ID NO: 37768 - DNA, 80 bp, synthetic construct
  source 1..80: mol_type = other DNA
tttacgaatccaatgattacactctaaagagttcagaagaacatattgctagatgtgttattctacatttatgctattaa

SEQ ID NO: 37769 - DNA, 80 bp, synthetic construct
  source 1..80: mol_type = other DNA
taaaaatacaaaaaaaataggcaggcatggggtgcacagctgtactcccagctactctagaggctgagtcaggagaatca

SEQ ID NO: 37770 - DNA, 80 bp, synthetic construct; identical to SEQ ID NO: 10330
  source 1..80: mol_type = other DNA

SEQ ID NO: 37771 - DNA, 80 bp, synthetic construct
  source 1..80: mol_type = other DNA
gccagaaacagtgtgattaacaataaataacatgaacagatagtttctggactgaaaaggatgagttggtgccagaaaac

SEQ ID NO: 37772 - DNA, 80 bp, synthetic construct
  source 1..80: mol_type = other DNA
cttttgcctgtagtcccagctagtcaggagtccaaggtgggagaatcacttgaacccaagaggcagaggttgcagtgagc

SEQ ID NO: 37773 - DNA, 80 bp, synthetic construct
  source 1..80: mol_type = other DNA
aatatatattatatatttaatatacatttatatatataataatatatatatttatatttataaatatatatatttatata

SEQ ID NO: 37774 - DNA, 80 bp, synthetic construct; identical to SEQ ID NO: 10331
  source 1..80: mol_type = other DNA

SEQ ID NO: 37775 - DNA, 80 bp, synthetic construct
  source 1..80: mol_type = other DNA
gatgtactatcacaataatgaggatattcagtttgtcttctatttttccctattattgaagaaaaggagaaatagaagag

SEQ ID NO: 37776 - DNA, 80 bp, synthetic construct
  source 1..80: mol_type = other DNA
cgagtagctgagattacaggcatgtgccaccacgccgggctaattttgtatttttggttgagacagggtttccctatgtt

SEQ ID NO: 37777 - DNA, 80 bp, synthetic construct
  source 1..80: mol_type = other DNA
cactgcaatctccgcctcccgggtacaagcgattctcctgcctcagcctcccaagtagctgggactacacgtgtgtgcta

SEQ ID NO: 37778 - DNA, 80 bp, synthetic construct; identical to SEQ ID NO: 10332
  source 1..80: mol_type = other DNA

SEQ ID NO: 37779 - DNA, 80 bp, synthetic construct
  source 1..80: mol_type = other DNA
agaaggccatagtcaggaatgcagggtactccctctacacaggctttttttttcctccccagtgatattttcatagctat

SEQ ID NO: 37780 - DNA, 80 bp, synthetic construct
  source 1..80: mol_type = other DNA
gccttttccatgcacttatcacacactgtagcagtagctttcgcaaaactaacaagaatttattttcccttctttacaat

SEQ ID NO: 37781 - DNA, 80 bp, synthetic construct
  source 1..80: mol_type = other DNA
ttcttaccatagctcttagcaacgttggatacgaattttttctctttccgtattaagtagagaactttccccttttcact

SEQ ID NO: 37782 - DNA, 80 bp, synthetic construct
  source 1..80: mol_type = other DNA
atgagaaggtggaagaacagagcattttctcattgatcatcctactagtctcctcccttcacctcaatcttcacagtacc

SEQ ID NO: 37783 - DNA, 80 bp, synthetic construct; identical to SEQ ID NO: 10333
  source 1..80: mol_type = other DNA

SEQ ID NO: 37784 - DNA, 80 bp, synthetic construct
  source 1..80: mol_type = other DNA
aaacaagagcagttgctacctttgctttttttttcccacttcttcaatatgatcaccatgcttttcattaccctgctact

SEQ ID NO: 37785 - DNA, 80 bp, synthetic construct
  source 1..80: mol_type = other DNA
ttcttttcacctggcagcctctcttcacattctagccccaagaaggaaattccatttctttactcaatggctgcattctt

SEQ ID NO: 37786 - DNA, 80 bp, synthetic construct; identical to SEQ ID NO: 10334
  source 1..80: mol_type = other DNA

SEQ ID NO: 37787 - DNA, 80 bp, synthetic construct
  source 1..80: mol_type = other DNA
cgtggtggcgggcgcctgttgtcccagctactggggaggctgaggcaggagaatggcgtgaacccgagaggcggagcttg

SEQ ID NO: 37788 - DNA, 80 bp, synthetic construct
  source 1..80: mol_type = other DNA
tggatcacttgaggtcaggagttggagaccagcctggccaacatggcgaaaccgcatttctactaaaaaatgcaaaaatt

SEQ ID NO: 37789 - DNA, 80 bp, synthetic construct
  source 1..80: mol_type = other DNA
aaaaacttactgaatggatcagatgatgaaatttcaagtttcctagtggacatctagaattattgactgaaggattggat

SEQ ID NO: 37790 - DNA, 80 bp, synthetic construct; identical to SEQ ID NO: 10335
  source 1..80: mol_type = other DNA

SEQ ID NO: 37791 - DNA, 80 bp, synthetic construct
  source 1..80: mol_type = other DNA
aagccttcaaaattcaagcttccctacacctggtagtaaatgtacctcatttactaccttcaaaattcagtgccttcaaa

SEQ ID NO: 37792 - DNA, 80 bp, synthetic construct
  source 1..80: mol_type = other DNA
aaaaaaatggaaatgcccatttccaatttctctagtttagggaggaaagcaatatacagcccctataatgaagaaaagaa

SEQ ID NO: 37793 - DNA, 80 bp, synthetic construct
  source 1..80: mol_type = other DNA
cctgctaatccaagtaacgaagccagggaagaaagcaagaaagaaaggggaaagagagagagcgtactacatttgcccta

SEQ ID NO: 37794 - DNA, 80 bp, synthetic construct
  source 1..80: mol_type = other DNA
caagtagctgggattacaggcatgtgccaccaccccggctaattttgtgtttttagtagagatggggtttccccatgttg

SEQ ID NO: 37795 - DNA, 80 bp, synthetic construct; identical to SEQ ID NO: 10336
  source 1..80: mol_type = other DNA

SEQ ID NO: 37796 - DNA, 80 bp, synthetic construct
  source 1..80: mol_type = other DNA
taattcagttaattttttggtcgaggatcaagttgctaaaacttcttttagatcaataaatgagatagacaaactgcaca

SEQ ID NO: 37797 - DNA, 80 bp, synthetic construct
  source 1..80: mol_type = other DNA
gggtacctaagttttggctaggagtgactactagcacactggctcataaggcaagggaaagcattaaaaaatataggtta

SEQ ID NO: 37798 - DNA, 80 bp, synthetic construct
  source 1..80: mol_type = other DNA
aggaggctgaagcagggagaattgcttgaatctgggagggggaggttgcagtgagccgaggtcatgccactgcactccag

SEQ ID NO: 37799 - DNA, 80 bp, synthetic construct; identical to SEQ ID NO: 10337
  source 1..80: mol_type = other DNA

SEQ ID NO: 37800 - DNA, 80 bp, synthetic construct
  source 1..80: mol_type = other DNA
ttctgttctactgtaggggagatcatctatttgcagttcttttgtatctagaatgtagttataaggtcaaactaccgtgt

SEQ ID NO: 37801 - DNA, 80 bp, synthetic construct
  source 1..80: mol_type = other DNA
gaaacaaaactatacagagaagtatcactcaagagaaattttcaagctgctggagattgttacatcatgggaccctctca

SEQ ID NO: 37802 - DNA, 80 bp, synthetic construct
  source 1..80: mol_type = other DNA
tcatacataagggatctttgtattaaatttcagattctcaaaactcacaagcaaagagaaagattaaattataatgttta

SEQ ID NO: 37803 - DNA, 80 bp, synthetic construct; identical to SEQ ID NO: 10338
  source 1..80: mol_type = other DNA

SEQ ID NO: 37804 - DNA, 80 bp, synthetic construct
  source 1..80: mol_type = other DNA
cacgcatgcattgtggagtagctaaatcgagctaattaccatatgcattacctcacatagttatcatttttgtagtgaca

SEQ ID NO: 37805 - DNA, 80 bp, synthetic construct
  source 1..80: mol_type = other DNA
catttttgttactcacttactctctctagccactctgagcaatcactgctatgttggctacagtcttatacttcacaaaa

SEQ ID NO: 37806 - DNA, 80 bp, synthetic construct
  source 1..80: mol_type = other DNA
cttccacctcatctttcatgcacctcagactagcatcaggaattaattcaagagggttcgttcttggatttgggggaaag

SEQ ID NO: 37807 - DNA, 80 bp, synthetic construct; identical to SEQ ID NO: 10339
  source 1..80: mol_type = other DNA

SEQ ID NO: 37808 - DNA, 80 bp, synthetic construct
  source 1..80: mol_type = other DNA
ggatgaagaacccagtaatgaaaagcaagacttcgttacacaatgtgtggagcccaaagtcctgtgaaccgcactggtca

SEQ ID NO: 37809 - DNA, 80 bp, synthetic construct
  source 1..80: mol_type = other DNA
acaaagacttgctaccctgtcctgcccggtttgaatcctgaagtgaaagaagtgagagtgcagaaaaactcctttgtctt

SEQ ID NO: 37810 - DNA, 80 bp, synthetic construct
  source 1..80: mol_type = other DNA
cacatgaacagggggcgcagacacaccctctgcactgagttaggacaatcgccttatgtttgtgggatatttctacattt

SEQ ID NO: 37811 - DNA, 80 bp, synthetic construct; identical to SEQ ID NO: 10340
  source 1..80: mol_type = other DNA

SEQ ID NO: 37812 - DNA, 80 bp, synthetic construct
  source 1..80: mol_type = other DNA
ttggcattctctgaacctgctctggtttgtagggttgcctgattcttcaatcgtttttgttgtgttttgctatgtttcat

SEQ ID NO: 37813 - DNA, 80 bp, synthetic construct
  source 1..80: mol_type = other DNA
ttagtgcttgttgcaaataattcgccactttttagaagaaaccaagtggtcacataaagtcagaggccactgcaaatgtt

SEQ ID NO: 37814 - DNA, 80 bp, synthetic construct
  source 1..80: mol_type = other DNA
aaaattagccaggtgtggtggtgcatgcctgtaatcctagctactcgggaggctgagacagaagaattgcctgggaggca

SEQ ID NO: 37815 - DNA, 80 bp, synthetic construct; identical to SEQ ID NO: 10341
  source 1..80: mol_type = other DNA

SEQ ID NO: 37816 - DNA, 80 bp, synthetic construct
  source 1..80: mol_type = other DNA
gtattaaagacttctcccctctctagtagagatgtcagttgctgcttacaggtccttttggagtgaatgctgttgtcatt

SEQ ID NO: 37817 - DNA, 80 bp, synthetic construct
  source 1..80: mol_type = other DNA
gctctattttgaatatatatttgtgtgtgtacatatatttaaaattgcttacatatctatataaaaaatggcttatatac

SEQ ID NO: 37818 - DNA, 80 bp, synthetic construct
  source 1..80: mol_type = other DNA
ggaagagtattacacaaatacttgaacactaggagatagaaattattggagatcaacctagggaatctttgtcaaagtaa

SEQ ID NO: 37819 - DNA, 80 bp, synthetic construct; identical to SEQ ID NO: 10342
  source 1..80: mol_type = other DNA

SEQ ID NO: 37820 - DNA, 80 bp, synthetic construct
  source 1..80: mol_type = other DNA
aataataattattattattacagatgggggctcaaagttagcctttcctatcatcaaagtcatttgctaatgctcatctg

SEQ ID NO: 37821 - DNA, 80 bp, synthetic construct
  source 1..80: mol_type = other DNA
tgtttgcttttagcatgtcattacattgcaaattagtcacttcaaagtgaggcttagtgtgaagctcctcaattgcacaa

SEQ ID NO: 37822 - DNA, 80 bp, synthetic construct
  source 1..80: mol_type = other DNA
aattgcttcttttaacttttgacagcacaagcagtgcacagggcagcttgatattactatgattctagcagtgttagctg

SEQ ID NO: 37823 - DNA, 80 bp, synthetic construct
  source 1..80: mol_type = other DNA
ccagtcagtgtttgatcatagtaattgagggcagttcttccccttcaaaaaaaaatttccatctcatccctgagttaaac

SEQ ID NO: 37824 - DNA, 80 bp, synthetic construct; identical to SEQ ID NO: 10343
  source 1..80: mol_type = other DNA

SEQ ID NO: 37825 - DNA, 80 bp, synthetic construct
  source 1..80: mol_type = other DNA
tcttagcagatttagctgcaggttgcagtgaattattgtttttcaacttcttagaaaatactgtacttctaggccgtgcg

SEQ ID NO: 37826 - DNA, 80 bp, synthetic construct
  source 1..80: mol_type = other DNA
aaaaattagcagggtgtcatggtgcatgcctgtaatcccagttactcggtaggctgaggcaggagaattgcttgaaccca

SEQ ID NO: 37827 - DNA, 80 bp, synthetic construct
  source 1..80: mol_type = other DNA
tgaactgcatgaatctatcaatctagctgggacacacatatatattccactaactcatttggtagctgttgtcctaatct

SEQ ID NO: 37828 - DNA, 80 bp, synthetic construct
  source 1..80: mol_type = other DNA
aagtcactgaggttattaactccttcactcattttccttccttttcaaacttagtaaaccataggaattgcttgagctca

SEQ ID NO: 37829 - DNA, 80 bp, synthetic construct; identical to SEQ ID NO: 10344
  source 1..80: mol_type = other DNA

SEQ ID NO: 37830 - DNA, 80 bp, synthetic construct
  source 1..80: mol_type = other DNA
ttctaccacaaataccaaggtatactctgatagaaggaaaccaaaaacagtctccgtgggctccgtagcttagttggtta

SEQ ID NO: 37831 - DNA, 80 bp, synthetic construct
  source 1..80: mol_type = other DNA
aggtggcatccaaaggctttggaaacaaactgaaactgtacatcctcccaacataagactacataaaaatagcaaagatc

SEQ ID NO: 37832 - DNA, 80 bp, synthetic construct
  source 1..80: mol_type = other DNA
ctgtaggcgtggattttaatacagtactggccagtgctcttgggattataattcaactataggcatgcgaagagttagaa

SEQ ID NO: 37833 - DNA, 80 bp, synthetic construct; identical to SEQ ID NO: 10345
  source 1..80: mol_type = other DNA

SEQ ID NO: 37834 - DNA, 80 bp, synthetic construct
  source 1..80: mol_type = other DNA
aaattcacggggcatcgcgattgctttattatatatggagaagcaaaggaagtcagacacgaaattcctttgcttatgtg

SEQ ID NO: 37835 - DNA, 80 bp, synthetic construct
  source 1..80: mol_type = other DNA
gctgatgccctcccaaccgagctatctcagcttactgtagactgaaaattttattcaatttctctttcaatacttcgatt

SEQ ID NO: 37836 - DNA, 80 bp, synthetic construct
  source 1..80: mol_type = other DNA
cagtgtggaatggataggtggaggagggagatagaagaaaagtaacaggaattaaaaaacaaacaaaaaactttctgctc

SEQ ID NO: 37837 - DNA, 80 bp, synthetic construct; identical to SEQ ID NO: 10346
  source 1..80: mol_type = other DNA

SEQ ID NO: 37838 - DNA, 80 bp, synthetic construct
  source 1..80: mol_type = other DNA
ccaagacagcacacattttaagtatgcattctaccaccgagcaacattcttgtgatagccaagctctcttggagatacat

SEQ ID NO: 37839 - DNA, 80 bp, synthetic construct
  source 1..80: mol_type = other DNA
gcatctgcttctaggacattcccagtccaacctgaaaagggtagacaattgctgaaacatgtttatatgaatattgtttt

SEQ ID NO: 37840 - DNA, 80 bp, synthetic construct
  source 1..80: mol_type = other DNA
atattcacctttttattaagagctagaacaagtctttattgtggatcggaagctgattgggaaactaggagctagtttta

SEQ ID NO: 37841 - DNA, 80 bp, synthetic construct; identical to SEQ ID NO: 10347
  source 1..80: mol_type = other DNA

SEQ ID NO: 37842 - DNA, 80 bp, synthetic construct
  source 1..80: mol_type = other DNA
tgcattaacgaggattgagagtcagctggaaaatggatgttgtcacactgtccgacaaatacagtgtgaattcagctcgc

SEQ ID NO: 37843 - DNA, 80 bp, synthetic construct
  source 1..80: mol_type = other DNA
gtttgtgctttttgctggtggaggaaagtagctttcatgcagtttgcttgtgaatggagcttgaagcaggctaacaggaa

SEQ ID NO: 37844 - DNA, 80 bp, synthetic construct
  source 1..80: mol_type = other DNA
caacagaaaatgaaaccaacaaactgaaaacaagtgatattttatatataagccaacagaactctcatgcggtcaggggg

SEQ ID NO: 37845 - DNA, 80 bp, synthetic construct; identical to SEQ ID NO: 10348
  source 1..80: mol_type = other DNA

SEQ ID NO: 37846 - DNA, 80 bp, synthetic construct
  source 1..80: mol_type = other DNA
tctaggcttacatcaaagctgtgtgtgggtcatggcatcatttctaactgtatgtagatatcgacttgtagcccagcgta

SEQ ID NO: 37847 - DNA, 80 bp, synthetic construct
  source 1..80: mol_type = other DNA
gaaataagaaaaaataggcagctcagagaaaattttccgtgcatctctgctttaggggcattaggtcgtccaaggatgag

SEQ ID NO: 37848 - DNA, 80 bp, synthetic construct
  source 1..80: mol_type = other DNA
aaggtggcactcagcgctttgcctcgcgaacgcttaaaacatcatttgggtgactgaaaacagccagctctcgttcgctg

SEQ ID NO: 37849 - DNA, 80 bp, synthetic construct; identical to SEQ ID NO: 10349
  source 1..80: mol_type = other DNA

SEQ ID NO: 37850 - DNA, 80 bp, synthetic construct
  source 1..80: mol_type = other DNA
actttcacaggaaatgtacacaaaatatgtaatagaagacaccgaataactccccccattcctcaaaccaaaacatctag

SEQ ID NO: 37851 - DNA, 80 bp, synthetic construct
  source 1..80: mol_type = other DNA
caaaggtgtgtggatgaggaataggactagataaagttgcttgaatttctagaaagaaacacttgttaaagagtaagtaa

SEQ ID NO: 37852 - DNA, 80 bp, synthetic construct
  source 1..80: mol_type = other DNA
gcgtcaaatttcctttgtttgaaaaaactaagagcgtgctcctcctagttccttaaggagcaggagagggagcaaggatg

SEQ ID NO: 37853 - DNA, 80 bp, synthetic construct; identical to SEQ ID NO: 10350
  source 1..80: mol_type = other DNA

SEQ ID NO: 37854 - DNA, 80 bp, synthetic construct
  source 1..80: mol_type = other DNA
acatccccatgaagcagtagaactctggccattgtaatccatgagggaatccatattttggagacccctttccaggaaaa

SEQ ID NO: 37855 - DNA, 80 bp, synthetic construct
  source 1..80: mol_type = other DNA
attttcactgcttctggctgtctgcacaattagaaatactaggaggagggtacaaaagagcagaactcagaaagttgtct

SEQ ID NO: 37856 - DNA, 80 bp, synthetic construct
  source 1..80: mol_type = other DNA
gaagggaaactttcacaatgttcggagcccttgatgtactgcagatgaatgaggaggatgtccttaagttccttgccgca

SEQ ID NO: 37857 - DNA, 80 bp, synthetic construct
  source 1..80: mol_type = other DNA
gctcgtgccattgctgccattgaaaaccttgctgatgtcagtgttatatcctccaggaatactggccagagggcagtgct

SEQ ID NO: 37858 - DNA, 80 bp, synthetic construct; identical to SEQ ID NO: 10351
  source 1..80: mol_type = other DNA

SEQ ID NO: 37859 - DNA, 80 bp, synthetic construct
  source 1..80: mol_type = other DNA
agagattgaaaaagaaaagcaagctgctgctgaaaaggctgtgaccaacgaggaatttcagggtgaatggactgcaccag

SEQ ID NO: 37860 - DNA, 80 bp, synthetic construct
  source 1..80: mol_type = other DNA
agaagcaaccactgaatggtcttaagctattcttgcacaggctcttagacaacatggaaataacattgacgggaaataaa

SEQ ID NO: 37861 - DNA, 80 bp, synthetic construct
  source 1..80: mol_type = other DNA
tgtatgctgtcacagtcactgctctagcaaactcttcagtggatcatcatgatcaggaaactcagcagtggcttcgtctc

SEQ ID NO: 37862 - DNA, 80 bp, synthetic construct; identical to SEQ ID NO: 10352
  source 1..80: mol_type = other DNA

SEQ ID NO: 37863 - DNA, 80 bp, synthetic construct
  source 1..80: mol_type = other DNA
gctggaaagtcactgagatgggcgtttagaggcaaggcgccatttataacatagccaaccagaaacaacctccaataaag

SEQ ID NO: 37864 - DNA, 80 bp, synthetic construct
  source 1..80: mol_type = other DNA
cagacgattatcattcaggcttgagaacgccaacctagaaagtggagctgcagaaactgtagtgagctgagctgctggag

SEQ ID NO: 37865 - DNA, 80 bp, synthetic construct
  source 1..80: mol_type = other DNA
tttacggaggcctaagatttggatggccctgaaattgtccgcattgccaatgtctcctaggctcctctataatgttttgt

SEQ ID NO: 37866 - DNA, 80 bp, synthetic construct; identical to SEQ ID NO: 10353
  source 1..80: mol_type = other DNA

SEQ ID NO: 37867 - DNA, 80 bp, synthetic construct
  source 1..80: mol_type = other DNA
agcggctttttccatctctgaaaataattttctcaactgtgtattttgaaagtctcggagtttcgccagaagcgtctttc

SEQ ID NO: 37868 - DNA, 80 bp, synthetic construct
  source 1..80: mol_type = other DNA
tggagtgggggtgggggggggaggagagaaatctaatggatgttttccaagggcgatttttttttcttctctttctgttt

SEQ ID NO: 37869 - DNA, 80 bp, synthetic construct
  source 1..80: mol_type = other DNA
gtggcgcgatctcggctcactgcaagctcagcctcccgggtttatgcaattctcctgtctcagcctctggagtagctggg

SEQ ID NO: 37870 - DNA, 80 bp, synthetic construct; identical to SEQ ID NO: 10354
  source 1..80: mol_type = other DNA

SEQ ID NO: 37871 - DNA, 80 bp, synthetic construct
  source 1..80: mol_type = other DNA
tcaacgatagatataaggaaatgtacttgtggaagtgctggggatcgaacccagagcctcatgaatgttaagcatacgct

SEQ ID NO: 37872 - DNA, 80 bp, synthetic construct
  source 1..80: mol_type = other DNA
tcaagaggagaaaggcattctggaccgaaagacccttggatcctctcacagccgtcatctatttcaaggactgctgttag

SEQ ID NO: 37873 - DNA, 80 bp, synthetic construct
  source 1..80: mol_type = other DNA
ataaagacgagttctgtgagtgctgcagaggaaacgtagatccaggtgaggagacaagacaagatgttaatgcacaaaag

SEQ ID NO: 37874 - DNA, 80 bp, synthetic construct; identical to SEQ ID NO: 10355
  source 1..80: mol_type = other DNA

SEQ ID NO: 37875 - DNA, 80 bp, synthetic construct
  source 1..80: mol_type = other DNA
caaagaagacatacaaatagccactaggtatgtgaagaggtgctcttaacatcactaatcatcaaggaaatgcaaatcaa

SEQ ID NO: 37876 - DNA, 80 bp, synthetic construct
  source 1..80: mol_type = other DNA
tcaaaagataaaaatagaactaccatatgatccagcaatcccacttctgggtatatgtccccaaaaaatcgaaattagaa

SEQ ID NO: 37877 - DNA, 80 bp, synthetic construct
  source 1..80: mol_type = other DNA
tgccatttgcaccagcatcaatgattaacctggaggacattatgctaagtgaaataagccagtcacagaaggacaaatat

SEQ ID NO: 37878 - DNA, 80 bp, synthetic construct; identical to SEQ ID NO: 10356
  source 1..80: mol_type = other DNA

SEQ ID NO: 37879 - DNA, 80 bp, synthetic construct
  source 1..80: mol_type = other DNA
gctactcgagaggctgaggcaggagaatggcgtgaacccggaagtcggaggttgcagtgagccgagatcgcaccactgca

SEQ ID NO: 37880 - DNA, 80 bp, synthetic construct
  source 1..80: mol_type = other DNA
ttataaatgtatgcatatgtcctcactcatatgcttaccttcaacgtgtaggggttttgcatatatcaactgtacttcaa

SEQ ID NO: 37881 - DNA, 80 bp, synthetic construct
  source 1..80: mol_type = other DNA
tacagctataggtttttttgtttttgattttttatagagacgggatgggggaagggggcgggtcggtcttctccctgtgt

SEQ ID NO: 37882 - DNA, 80 bp, synthetic construct; identical to SEQ ID NO: 10357
  source 1..80: mol_type = other DNA

SEQ ID NO: 37883 - DNA, 80 bp, synthetic construct
  source 1..80: mol_type = other DNA
ctaatgtacaggttatgttcttactatactagaaaggcaagtggctgggaactgaaatgagctgaggagtggacgcaagg

SEQ ID NO: 37884 - DNA, 80 bp, synthetic construct
  source 1..80: mol_type = other DNA
gccgcgtctctgccaagctttctctaggccctggggaagagagaaggctctaggtgagtggtttcaaagtgtatatccca

SEQ ID NO: 37885 - DNA, 80 bp, synthetic construct
  source 1..80: mol_type = other DNA
cgttgtgtcagttctcatgtggaagcagcctgcagctttgatgcaggcagcaactgtttagtttgtgtttctttttgttt

SEQ ID NO: 37886 - DNA, 80 bp, synthetic construct; identical to SEQ ID NO: 10358
  source 1..80: mol_type = other DNA

SEQ ID NO: 37887 - DNA, 80 bp, synthetic construct
  source 1..80: mol_type = other DNA
gaggtattcattcaaggctcttttctgccctactgtcaagtggatgaacaaaacgctgacttaagatatgaggaggattg

SEQ ID NO: 37888 - DNA, 80 bp, synthetic construct
  source 1..80: mol_type = other DNA
cgcgatcgcggctctctgcaacttccgcctaccgggatcaagcgattgtcctgcctcagcctcccgagtagctgggagta

SEQ ID NO: 37889 - DNA, 80 bp, synthetic construct
  source 1..80: mol_type = other DNA
aaagtgctgggattacaggcgtgagccacagcacccggccataaatttattaatataaaaaattattggtcaggagcagt

SEQ ID NO: 37890 - DNA, 80 bp, synthetic construct; identical to SEQ ID NO: 10359
  source 1..80: mol_type = other DNA

SEQ ID NO: 37891 - DNA, 80 bp, synthetic construct
  source 1..80: mol_type = other DNA
agaccaagacaagagaactgagtccaggagtttgtgctcaagtaataacaatactatcagcactcaatcttggtatctta

SEQ ID NO: 37892 - DNA, 80 bp, synthetic construct
  source 1..80: mol_type = other DNA
tggggtgccagtggcgtgatctcagttcactgcaacctccacctcccgggttcaagtgattctcgtgtctcagcctccct

SEQ ID NO: 37893 - DNA, 80 bp, synthetic construct
  source 1..80: mol_type = other DNA
accatgcccgggccaaattggaatttagcacccacatttatcttaactcagtagttcctaagtaaaagagatttgtaagg

SEQ ID NO: 37894 - DNA, 80 bp, synthetic construct
  source 1..80: mol_type = other DNA
aaaaaaattagccgggcttggtggcatgcgcctgtagtcccagctactcaggaggctgaggcaggagaatcgcttgaatc

SEQ ID NO: 37895 - DNA, 80 bp, synthetic construct; identical to SEQ ID NO: 10360
  source 1..80: mol_type = other DNA

SEQ ID NO: 37896 - DNA, 80 bp, synthetic construct
  source 1..80: mol_type = other DNA
ctggctcattttgctgatagggttgccaaactcttagtgtgataatagtgcattctttgaccactttgtttctaaattct

SEQ ID NO: 37897 - DNA, 80 bp, synthetic construct
  source 1..80: mol_type = other DNA
gactctcgagttttgagagcccaaagaaagtttttgatagaaactttcttttcttggtgatatactctccttgattgtga

SEQ ID NO: 37898 - DNA, 80 bp, synthetic construct
  source 1..80: mol_type = other DNA
tagaaatcagagagaatggcataggccctgtaagtcaccatcatctttaatgcggatgttaaccagtacaagaaccccgt

SEQ ID NO: 37899 - DNA, 80 bp, synthetic construct; identical to SEQ ID NO: 10361
  source 1..80: mol_type = other DNA

SEQ ID NO: 37900 - DNA, 80 bp, synthetic construct
  source 1..80: mol_type = other DNA
ggctgaggcaggagaatagcttgaaccctggaggtggagattgcaatgagcagagattgtgccactgcactccagccagg

SEQ ID NO: 37901 - DNA, 80 bp, synthetic construct
  source 1..80: mol_type = other DNA
actaaaaaaacacaaaaattagccgggcgtgatggcgggcgcctgtaatcccagctactcgggaggctgaggcaggagaa

SEQ ID NO: 37902 - DNA, 80 bp, synthetic construct
  source 1..80: mol_type = other DNA
tgaaacaagtaggacaagaccataaattgaaaaaccaagcccattccaaattacgaatgcctccggtagtacctatgcca

SEQ ID NO: 37903 - DNA, 80 bp, synthetic construct; identical to SEQ ID NO: 10362
  source 1..80: mol_type = other DNA

SEQ ID NO: 37904 - DNA, 80 bp, synthetic construct
  source 1..80: mol_type = other DNA
agtttctgttttcaaacctttaacttcgtaattagagatttaacaacttgaaggggggcggggagaggcgggggaggagg

SEQ ID NO: 37905 - DNA, 80 bp, synthetic construct
  source 1..80: mol_type = other DNA
aagaactcaagtctgcaatgaaggagtggacatgacagcgtaagagggagcatcattgtttgatctattttaaccttttc

SEQ ID NO: 37906 - DNA, 80 bp, synthetic construct
  source 1..80: mol_type = other DNA
ggtgacgggttcaatcgtactccagacatcagcaacacgcaatacacccttgtcccaaacctgcactgtactccctgaat

SEQ ID NO: 37907 - DNA, 80 bp, synthetic construct; identical to SEQ ID NO: 10363
  source 1..80: mol_type = other DNA

SEQ ID NO: 37908 - DNA, 80 bp, synthetic construct
  source 1..80: mol_type = other DNA
tcctggatcccttgtacaccattttctccaggtttctccagtcaaaactcaagaattgttttaggccatattttggatgg

SEQ ID NO: 37909 - DNA, 80 bp, synthetic construct
  source 1..80: mol_type = other DNA
cgtcctatgaggagcattagattgaataagggtttctggtgtgatccagtttggggaggctacttgctctagtcagtgct

SEQ ID NO: 37910 - DNA, 80 bp, synthetic construct
  source 1..80: mol_type = other DNA
ctaacaaatttaaataaaagggcattttttgttcagtctggaggaggaaaagttaactggcagacgtaggcagcagatag

SEQ ID NO: 37911 - DNA, 80 bp, synthetic construct; identical to SEQ ID NO: 10364
  source 1..80: mol_type = other DNA

SEQ ID NO: 37912 - DNA, 80 bp, synthetic construct
  source 1..80: mol_type = other DNA
attcttaatctctctataacaatctgtctagataatttcactgaagaaatgaatggaggagggtgtctgtagataaaggt

SEQ ID NO: 37913 - DNA, 80 bp, synthetic construct
  source 1..80: mol_type = other DNA
atgaccctaataatgttcttaactttagaatttggaaaactcagcatttcctgtgaggtgtgatccagtgtacaacaaac

SEQ ID NO: 37914 - DNA, 80 bp, synthetic construct
  source 1..80: mol_type = other DNA
tggggatgggggctactgtgaaaggaaaggataaagaaaactcagccaagtaaagattttctactcacatatctatttac

SEQ ID NO: 37915 - DNA, 80 bp, synthetic construct; identical to SEQ ID NO: 10365
  source 1..80: mol_type = other DNA

SEQ ID NO: 37916 - DNA, 80 bp, synthetic construct
  source 1..80: mol_type = other DNA
atcaacagataaatgaataaagtaaatgtggtacgtatacacaacggggtactattcggccatgaaaagaatgaggtctt

SEQ ID NO: 37917 - DNA, 80 bp, synthetic construct
  source 1..80: mol_type = other DNA
gaaggggagaagggaaaagatatatatatatatatatatacacacactcaccaaatatatatatatatatataaatatat

SEQ ID NO: 37918 - DNA, 80 bp, synthetic construct
  source 1..80: mol_type = other DNA
aaaggtcaacttgtttttgcgattgtctgttgtttttcaataactaacgtataggaatagattgaaatagagatttctcc

SEQ ID NO: 37919 - DNA, 80 bp, synthetic construct; identical to SEQ ID NO: 10366
  source 1..80: mol_type = other DNA

SEQ ID NO: 37920 - DNA, 80 bp, synthetic construct
  source 1..80: mol_type = other DNA
tgtctgtaacaaagaaatgataaggtgttgaggcgatggatgaggtgatggatgcttcgtttatcccaatatgattatta

SEQ ID NO: 37921 - DNA, 80 bp, synthetic construct
  source 1..80: mol_type = other DNA
ttactgcctttgtctgtctgtgtttggagaacgaatatctggcagaaaaatgcttgctgtgtttaacatcactatttcta

SEQ ID NO: 37922 - DNA, 80 bp, synthetic construct
  source 1..80: mol_type = other DNA
attatggaatgttctcttgcatcttcaaattcttcctccttcgtctctcttaccctctgcctacaaaggcttcaagaaag

SEQ ID NO: 37923 - DNA, 80 bp, synthetic construct; identical to SEQ ID NO: 10367
  source 1..80: mol_type = other DNA

SEQ ID NO: 37924 - DNA, 80 bp, synthetic construct
  source 1..80: mol_type = other DNA
tggtagaacatcagacttttaatctgacggtgcagggttcaagtccctgttcaggcgaaatatttgtgtgttttactcta

SEQ ID NO: 37925 - DNA, 80 bp, synthetic construct
  source 1..80: mol_type = other DNA
cagaagtccaaaccctattgtgaactgcgtatgaaagggatctagattgtgggctccttatgagaatctaatgcttgata

SEQ ID NO: 37926 - DNA, 80 bp, synthetic construct
  source 1..80: mol_type = other DNA
tgcttgaatcatcccaaaatcatcccccccaacccctgctccctcatccatggaaaaaactgtctttcatgaaacggtct

SEQ ID NO: 37927 - DNA, 80 bp, synthetic construct; identical to SEQ ID NO: 10368
  source 1..80: mol_type = other DNA

SEQ ID NO: 37928 - DNA, 80 bp, synthetic construct
  source 1..80: mol_type = other DNA
cttatcagaaatcacagaagtcagaaagagtggcacaacagttttcaaggaccgaaagaaaagaattgttaattctgaat

SEQ ID NO: 37929 - DNA, 80 bp, synthetic construct
  source 1..80: mol_type = other DNA
caggaaagaagaaagaacatggtaagcaaaaaaaaaaaaggtaaaaacaatacattttccttttcctcttgagctttcta

SEQ ID NO: 37930 - DNA, 80 bp, synthetic construct
  source 1..80: mol_type = other DNA
acaaaaaattagctgggcatggtggcacacacctgtagtcccagctactcgagaggctgaggagggagaatcacttgaac

SEQ ID NO: 37931 - DNA, 80 bp, synthetic construct; identical to SEQ ID NO: 10369
  source 1..80: mol_type = other DNA

SEQ ID NO: 37932 - DNA, 80 bp, synthetic construct
  source 1..80: mol_type = other DNA
tgtggtcaggaattcgagaccagcctggccaacatggtgaaaccctgtctctactaaaactacaaaaattagctgggcat

SEQ ID NO: 37933 - DNA, 80 bp, synthetic construct
  source 1..80: mol_type = other DNA
aatacatacatacatacatatccccagaaaatggcagtaacagggtacaaatagaaaacaaactgctagatttcagccct

SEQ ID NO: 37934 - DNA, 80 bp, synthetic construct
  source 1..80: mol_type = other DNA
aaatataattatacatacaggttgaaattaagcatataaaaatatataacattcaaatgttaattaaaagaaagcaaaag

SEQ ID NO: 37935 - DNA, 80 bp, synthetic construct
  source 1..80: mol_type = other DNA
agctggaattacaggcacgtaccaccatgactggctaatttttgtatttttagtagagatggggtttcactatgttggtc

SEQ ID NO: 37936 - DNA, 80 bp, synthetic construct; identical to SEQ ID NO: 10370
  source 1..80: mol_type = other DNA

SEQ ID NO: 37937 - DNA, 80 bp, synthetic construct
  source 1..80: mol_type = other DNA
cagctaacagaattcagtcaacatttaaagaagactccacacaagaaaagcagaacacacagaacacaggtcaagatgga

SEQ ID NO: 37938 - DNA, 80 bp, synthetic construct
  source 1..80: mol_type = other DNA
aaacacttggaaaatgaacaacacactactaaatagtacacaggacaaagagaaagacttagtagatatcaaaaaataaa

SEQ ID NO: 37939 - DNA, 80 bp, synthetic construct
  source 1..80: mol_type = other DNA
aaaagcaaaataaacccaaagcaaatagacaaaagataacaataaaaataagaacaaaattcagtgaaacggaacacaaa

SEQ ID NO: 37940 - DNA, 80 bp, synthetic construct
  source 1..80: mol_type = other DNA
gatatcactgtagactctgctgacatcaaaaggatatgtttttggatgatttcctttaaaaaatttagccgggctcggtg

SEQ ID NO: 37941 - DNA, 80 bp, synthetic construct; identical to SEQ ID NO: 10371
  source 1..80: mol_type = other DNA

SEQ ID NO: 37942 - DNA, 80 bp, synthetic construct
  source 1..80: mol_type = other DNA
attaaaatagcagctgcataggaatctcaacatagtgcttaaaatgtgcataaacgagactaggagtgccctgcgctttt

SEQ ID NO: 37943 - DNA, 80 bp, synthetic construct
  source 1..80: mol_type = other DNA
actaataatatataaggatatattatatcctaataatataagtaaataataatatataacttgttaaataatcatataaa

SEQ ID NO: 37944 - DNA, 80 bp, synthetic construct
  source 1..80: mol_type = other DNA
gactgatacaggagaacaggaggatatttattttaaggtaagcagccactgagtggattcacatccaaaaagttgagcac

SEQ ID NO: 37945 - DNA, 80 bp, synthetic construct
  source 1..80: mol_type = other DNA
taaaaatacaaaaattagccaggcgtggttgcacatgcttgtaatcccagctactcgggaggctgaggcagaattgcttg

SEQ ID NO: 37946 - DNA, 80 bp, synthetic construct; identical to SEQ ID NO: 10372
  source 1..80: mol_type = other DNA

SEQ ID NO: 37947 - DNA, 80 bp, synthetic construct
  source 1..80: mol_type = other DNA
tccttgaagtgagctgctaggcaaacgaaaacttgtttcttttctttttaaccctttcctgttacttttcttggagtgaa

SEQ ID NO: 37948 - DNA, 80 bp, synthetic construct
  source 1..80: mol_type = other DNA
aattaaatttgtaacataatttaaaaaaaaaatcaagaatctggccgggcgtggtggctcatggctgtaatcccagcact

SEQ ID NO: 37949 - DNA, 80 bp, synthetic construct
  source 1..80: mol_type = other DNA
tttgaacctgggaggcagaggttgcagtgagccaagatcgcaccattgcactccagcctggaggccaagagcaagacttc

SEQ ID NO: 37950 - DNA, 80 bp, synthetic construct
  source 1..80: mol_type = other DNA
cctggctaacacggtgaaaccccgtctctactgaaaaaacaaaaaattagctgggcgtggtggcagggagcctgtagtcc

SEQ ID NO: 37951 - DNA, 80 bp, synthetic construct; identical to SEQ ID NO: 10373
  source 1..80: mol_type = other DNA

SEQ ID NO: 37952 - DNA, 80 bp, synthetic construct
  source 1..80: mol_type = other DNA
atcacgtgatcatatcacagtagaaaaagaatttgtcaaacttcaatagctactcatgacaaaaagtctcagaaaaatag

SEQ ID NO: 37953 - DNA, 80 bp, synthetic construct
  source 1..80: mol_type = other DNA
tctcggctcatttcaacctccgcctcctgggttcaagcaattcttctgcctcagtctcccgagtggctgggactacaggc

SEQ ID NO: 37954 - DNA, 80 bp, synthetic construct
  source 1..80: mol_type = other DNA
aaaggaaataggtttaattgagtcacatagctgaggaggcttcgggaaacttacaatcatggcggaagggaaatgggaag

SEQ ID NO: 37955 - DNA, 80 bp, synthetic construct; identical to SEQ ID NO: 10374
  source 1..80: mol_type = other DNA

SEQ ID NO: 37956 - DNA, 80 bp, synthetic construct
  source 1..80: mol_type = other DNA
atattctcaactggtttttgacaaagttgcctaagtagtaattccatggaagaaaaataagtctcatgccttcacaaaag

SEQ ID NO: 37957 - DNA, 80 bp, synthetic construct
  source 1..80: mol_type = other DNA
tcctcctttcctctcctgctatgtcagttgctttggctggtacagaggctgaccaaatagaaatagaaataagagagcag

SEQ ID NO: 37958 - DNA, 80 bp, synthetic construct
  source 1..80: mol_type = other DNA
atggtgaaaccccacctctactaaaaattagctgggcatggtgacgcgcacctgaaatcccagctacttgggaggctgag

SEQ ID NO: 37959 - DNA, 80 bp, synthetic construct
  source 1..80: mol_type = other DNA
gaaagaaagaaagaaaaagaaagaaagaaagaaagaaagaaagaaagaaagaaagaaagaaagaaagaaaagaaagaaag

SEQ ID NO: 37960 - DNA, 80 bp, synthetic construct; identical to SEQ ID NO: 10375
  source 1..80: mol_type = other DNA

SEQ ID NO: 37961 - DNA, 80 bp, synthetic construct
  source 1..80: mol_type = other DNA
ttgggaggccgaggcgggcggatcacggggtcaagagttcgagacaagcctgaccaacatagtgaaaccccgtctcgact

SEQ ID NO: 37962 - DNA, 80 bp, synthetic construct
  source 1..80: mol_type = other DNA
tcaaaaaacaaaacaaaacaactttaacatcagagtcacttgagggcttattcaaacacaggcggctggacgccaccctc

SEQ ID NO: 37963 - DNA, 80 bp, synthetic construct
  source 1..80: mol_type = other DNA
ttgcttaaagtgcctggagagaaccagtggatagaagggaaaacaagtatgaaacgaaaagaaaatgtctgcattacctt

SEQ ID NO: 37964 - DNA, 80 bp, synthetic construct; identical to SEQ ID NO: 10376
  source 1..80: mol_type = other DNA

SEQ ID NO: 37965 - DNA, 80 bp, synthetic construct
  source 1..80: mol_type = other DNA
gaagtgccaacacacctgcaatttactcacctttactttgcatctattttccattgtggcagaaaagctttctctacttt

SEQ ID NO: 37966 - DNA, 80 bp, synthetic construct
  source 1..80: mol_type = other DNA
aaacgattctcctgactcagccttttgagtagctgggattacaggcgtgcgtcaccacgcccggctaattttgtattttt

SEQ ID NO: 37967 - DNA, 80 bp, synthetic construct
  source 1..80: mol_type = other DNA
gcaatacaggaaaatgaatcaatcgtatggactatcagtagggaatgtgttgatccttattgatttcgctccttccgtgt

SEQ ID NO: 37968 - DNA, 80 bp, synthetic construct; identical to SEQ ID NO: 10377
  source 1..80: mol_type = other DNA

SEQ ID NO: 37969 - DNA, 80 bp, synthetic construct
  source 1..80: mol_type = other DNA
ctttctcctcttccttctgccgtcgcaatcgccttaggtgatgttgaggcttacattatagagatgggagataagtgaag

SEQ ID NO: 37970 - DNA, 80 bp, synthetic construct
  source 1..80: mol_type = other DNA
tgcaaagcatgtgctctaccactgagctacacccccctcctgaaagactgttttgtaataattttcaggaggtaactttc

SEQ ID NO: 37971 - DNA, 80 bp, synthetic construct
  source 1..80: mol_type = other DNA
tgtcagataaccgccaaaagaagtttccaatgtggctttaaaacgttgagttgtcaggatctccttcttctgttatgctt

SEQ ID NO: 37972 - DNA, 80 bp, synthetic construct; identical to SEQ ID NO: 10378
  source 1..80: mol_type = other DNA

SEQ ID NO: 37973 - DNA, 80 bp, synthetic construct
  source 1..80: mol_type = other DNA
acaacacctctagggatgacgagaagagttgaattatgagggtgagataaaaaataagtagaaacaggatttaagaggta

SEQ ID NO: 37974 - DNA, 80 bp, synthetic construct
  source 1..80: mol_type = other DNA
acactgtgaggatgttacatggagaactcaggcaattgactctccagcctggggtttgtgagcattagtagtagtagaca

SEQ ID NO: 37975 - DNA, 80 bp, synthetic construct
  source 1..80: mol_type = other DNA
gttgcaagttcgagaccaggctggccaacatggtgaaaccctgtctctactaaaaatacaaaaattagctgggtgtggtg

SEQ ID NO: 37976 - DNA, 80 bp, synthetic construct; identical to SEQ ID NO: 10379
  source 1..80: mol_type = other DNA

SEQ ID NO: 37977 - DNA, 80 bp, synthetic construct
  source 1..80: mol_type = other DNA
aggttatatggcagacttgtcttttcggttggctgatggaatttctagaacaaaaataggaagcactgaatgctaggttt

SEQ ID NO: 37978 - DNA, 80 bp, synthetic construct
  source 1..80: mol_type = other DNA
tgtcatgttgcacccagagaaacctggatgtctactggattcttgggaattcatcataatatgaaggtctgcttttttgt

SEQ ID NO: 37979 - DNA, 80 bp, synthetic construct
  source 1..80: mol_type = other DNA
cagaacaccctcatgtgatacatactcaattcagaaaacctaaaaatatataaagtatctgtttaaacctgcactgtcca

SEQ ID NO: 37980 - DNA, 80 bp, synthetic construct
  source 1..80: mol_type = other DNA
gtcaggagttcgagaccagcctgaccaacatggtgaaaccccatctctactaaaaatacaaaaattagcctggcttggtg

SEQ ID NO: 37981 - DNA, 80 bp, synthetic construct; identical to SEQ ID NO: 10380
  source 1..80: mol_type = other DNA

SEQ ID NO: 37982 - DNA, 80 bp, synthetic construct
  source 1..80: mol_type = other DNA
tcttgggtactatgcctactacctgggtgatgggatcaattgcactcaaaacctcatgcaatttacccagcatcatgtag

SEQ ID NO: 37983 - DNA, 80 bp, synthetic construct
  source 1..80: mol_type = other DNA
gaattgtctaaagacaatgttatccatttaggtgctgttctgggagaatcccagaagcagagaacacggagcatgatctg

SEQ ID NO: 37984 - DNA, 80 bp, synthetic construct
  source 1..80: mol_type = other DNA
tgaatggcagacaaatcatgcttggaattgccctaggccttccatttcaacagaatgtaaaggaatctttactgcgttag

SEQ ID NO: 37985 - DNA, 80 bp, synthetic construct
  source 1..80: mol_type = other DNA
acagtcaatgtccctaacccaaggttacttctcatttggtactaattttccttttgcaacttgctgcagttctgatagtg

SEQ ID NO: 37986 - DNA, 80 bp, synthetic construct; identical to SEQ ID NO: 10381
  source 1..80: mol_type = other DNA

SEQ ID NO: 37987 - DNA, 80 bp, synthetic construct
  source 1..80: mol_type = other DNA
aaattctagacaaggttgccaggctaaagaaatgtcttctcagcaagaaaatttagaatgttcttgtaattgggcctggt

SEQ ID NO: 37988 - DNA, 80 bp, synthetic construct
  source 1..80: mol_type = other DNA
ggtggtgctcgcctgtagtcccatctactcagggtgctgacatgtggagtcacttcagcctagagaggttgaggctgtag

SEQ ID NO: 37989 - DNA, 80 bp, synthetic construct
  source 1..80: mol_type = other DNA
agagaaagaaagaaaaaaaaagttcttacagcactttaataatggagttgactcaagatacaaacccgggtttttctaat

SEQ ID NO: 37990 - DNA, 80 bp, synthetic construct; identical to SEQ ID NO: 10382
  source 1..80: mol_type = other DNA

SEQ ID NO: 37991 - DNA, 80 bp, synthetic construct
  source 1..80: mol_type = other DNA
agcttacttgggaggctgagatatgagaacagcttgaactcaggaggcggaggttgcagtgagccgagatcgcgccgttg

SEQ ID NO: 37992 - DNA, 80 bp, synthetic construct
  source 1..80: mol_type = other DNA
gagatatgtaagcttctgggattggcgtataagtgctgtataagggagtgataattaggcagaactcaaaagatgctggc

SEQ ID NO: 37993 - DNA, 80 bp, synthetic construct
  source 1..80: mol_type = other DNA
tttgtagagtgagtgtattttctaatgcctaattctgttttgttcaatatcaatacaaaaattagccaggggtggtggtg

SEQ ID NO: 37994 - DNA, 80 bp, synthetic construct; identical to SEQ ID NO: 10383
  source 1..80: mol_type = other DNA

SEQ ID NO: 37995 - DNA, 80 bp, synthetic construct
  source 1..80: mol_type = other DNA
cgctctgtcgcccaggctggagtacagcggcgcggagtagctgggattacaggcgcgcgccaccacccctggctaatttt

SEQ ID NO: 37996 - DNA, 80 bp, synthetic construct
  source 1..80: mol_type = other DNA
ttcgatcccgggtttcaccaggtttgtttggtttttttagttctgcctaattatcactcccttatacaacacttgcacgc

SEQ ID NO: 37997 - DNA, 80 bp, synthetic construct
  source 1..80: mol_type = other DNA
aaccctctctggaatgagaaaattgctgaggccgacgatgatttgcaaactgaattttaataaaaccttttctatgtctt

SEQ ID NO: 37998 - DNA, 80 bp, synthetic construct
  source 1..80: mol_type = other DNA
ttacagacttttttctccccttgtaaggtctgagccttctcagacaggaaacaacattcctctactctagttttatcccc

SEQ ID NO: 37999 - DNA, 80 bp, synthetic construct; identical to SEQ ID NO: 10384
  source 1..80: mol_type = other DNA

SEQ ID NO: 38000 - DNA, 80 bp, synthetic construct
  source 1..80: mol_type = other DNA
tgtaatctcagctaatcgggagactgaggcaggagaatcgcttgatcccaggaggtggaggttgcagtgaaccgagatcg

SEQ ID NO: 38001 - DNA, 80 bp, synthetic construct
  source 1..80: mol_type = other DNA
ccgtgaagtggaggaagcaaaggacaaaagggagagaggtagagggcaaggaaaagcatcctcaagattattagtacttg

SEQ ID NO: 38002 - DNA, 80 bp, synthetic construct
  source 1..80: mol_type = other DNA
cacctctctttacgttgctggacagaccagttgagctctttgggtatgcacgtaatgtcgcatttttattttcagttcag

SEQ ID NO: 38003 - DNA, 80 bp, synthetic construct; identical to SEQ ID NO: 10385
  source 1..80: mol_type = other DNA

SEQ ID NO: 38004 - DNA, 80 bp, synthetic construct
  source 1..80: mol_type = other DNA
tagccggcgaccaaaagaggactaacgctcgatattctctcggccccgaggaaggggcttgattttcctttatactttgg

SEQ ID NO: 38005 - DNA, 80 bp, synthetic construct
  source 1..80: mol_type = other DNA
aactcaaggctttatggtgttatctcttgagtgaaatcctgggaacttcgtgcattgtttgcttcagtaccttatcagtt

SEQ ID NO: 38006 - DNA, 80 bp, synthetic construct
  source 1..80: mol_type = other DNA
gtgattaacggagagtctaaaaacaacgttaggtattacattccccacttgtgtttttggggaatcaaatcgttgattcc

SEQ ID NO: 38007 - DNA, 80 bp, synthetic construct; identical to SEQ ID NO: 10386
  source 1..80: mol_type = other DNA

SEQ ID NO: 38008 - DNA, 80 bp, synthetic construct
  source 1..80: mol_type = other DNA
gggaatgtaacaaatctacgacagactggaggttacttaaattagcatctacctgttgagatagggccattattccagtt

SEQ ID NO: 38009 - DNA, 80 bp, synthetic construct
  source 1..80: mol_type = other DNA
ttacatgcacaggagaggtcctggttcagttccattaatgcagtgagtgagacttgaagtgcaggccaaccaggtattgt

SEQ ID NO: 38010 - DNA, 80 bp, synthetic construct
  source 1..80: mol_type = other DNA
agataaagggccacttttaagtgtggcctctactcctaagcctacataataagggggttttgcttttagacatagccaac

SEQ ID NO: 38011 - DNA, 80 bp, synthetic construct
  source 1..80: mol_type = other DNA
cctacataataagggggttttgcttttagacatagccaacaatcttgggctagtttaggctgggtgaggttaagaaggtg

SEQ ID NO: 38012 - DNA, 80 bp, synthetic construct; identical to SEQ ID NO: 10387
  source 1..80: mol_type = other DNA

SEQ ID NO: 38013 - DNA, 80 bp, synthetic construct
  source 1..80: mol_type = other DNA
tacacgtgtccaatcagggcagaaaaactggtaaatatctcaacagctagagtcagggtgatttccaggacagaggtaaa

SEQ ID NO: 38014 - DNA, 80 bp, synthetic construct
  source 1..80: mol_type = other DNA
acataaatcaactgcaaaggagacttccttggaggttcctgccctccaagtactgtttgcgaatatacgtcttgtcatga

SEQ ID NO: 38015 - DNA, 80 bp, synthetic construct
  source 1..80: mol_type = other DNA
ttgttggcctttttgatgcgggagtgacgaatccaagcaggaatgccatccaccttcagagctgttggcatggtgaggat

SEQ ID NO: 38016 - DNA, 80 bp, synthetic construct; identical to SEQ ID NO: 10388
  source 1..80: mol_type = other DNA

SEQ ID NO: 38017 - DNA, 80 bp, synthetic construct
  source 1..80: mol_type = other DNA
aaggaaggagccttactcagttctcaccggtctctaagattaactttgtaagagtgctttttagggtgcggttcatgcgt

SEQ ID NO: 38018 - DNA, 80 bp, synthetic construct
  source 1..80: mol_type = other DNA
aaaacctaactaccatggtggcagtctcattcttggtggcaaatgcctcagtccatacggagaaggtgtctactagtact

SEQ ID NO: 38019 - DNA, 80 bp, synthetic construct
  source 1..80: mol_type = other DNA
ctgctaagctttgaagatagggaatcttaaaatggctctagaggagccgggccagttttgctcctcctaaatgggtggta

SEQ ID NO: 38020 - DNA, 80 bp, synthetic construct; identical to SEQ ID NO: 10389
  source 1..80: mol_type = other DNA

SEQ ID NO: 38021 - DNA, 80 bp, synthetic construct
  source 1..80: mol_type = other DNA
ctccatgtacatgtacagtagttaaagcatacctgctgtcagtgtaaatgttaataagtttatccttaccccatcggaga

SEQ ID NO: 38022 - DNA, 80 bp, synthetic construct
  source 1..80: mol_type = other DNA
ttctttaggggcacatcttggagatcaggtgggccagtttctgtagtttctaacagttcctggcagtcatggacaggtgt

SEQ ID NO: 38023 - DNA, 80 bp, synthetic construct
  source 1..80: mol_type = other DNA
ggagcggtaaaggttaaattttgacctagagttaacttatcagcctcttagactaggcttgctgttgccactatgactcg

SEQ ID NO: 38024 - DNA, 80 bp, synthetic construct; identical to SEQ ID NO: 10390
  source 1..80: mol_type = other DNA

SEQ ID NO: 38025 - DNA, 80 bp, synthetic construct
  source 1..80: mol_type = other DNA
tttccttggcttatgtcgtatcctaggtaggacactgtgggaagacaaagctggaccttcttggctgagactcgataccc

SEQ ID NO: 38026 - DNA, 80 bp, synthetic construct
  source 1..80: mol_type = other DNA
gtgggggaatttttaaaaccttgaggtaactgagtccaagtcaattgggtagtgtctcctgagctaggatctgtccattc

SEQ ID NO: 38027 - DNA, 80 bp, synthetic construct
  source 1..80: mol_type = other DNA
cttcccttaagtcctgtaccggctggtaatcattcgttccgggtttctggaccggcaaaaatggaatattccaggcggac

SEQ ID NO: 38028 - DNA, 80 bp, synthetic construct; identical to SEQ ID NO: 10391
  source 1..80: mol_type = other DNA

SEQ ID NO: 38029 - DNA, 80 bp, synthetic construct
  source 1..80: mol_type = other DNA
acactctggaaccacaagaaatgactgtctcactcttttctgtcccaagctcacttctcgtgagtgtgtgacaggatatt

SEQ ID NO: 38030 - DNA, 80 bp, synthetic construct
  source 1..80: mol_type = other DNA
gagggagtcctggctccatcagtcatcagactcttccgttgcggggagggtgagggcctttttcttttctgatttttcct

SEQ ID NO: 38031 - DNA, 80 bp, synthetic construct
  source 1..80: mol_type = other DNA
tccgatggccgcagctaagatttttgcttgtcttttgtatgctttatcagctgctgcctgtgctgtttgttttctttttt

SEQ ID NO: 38032 - DNA, 80 bp, synthetic construct; identical to SEQ ID NO: 10392
  source 1..80: mol_type = other DNA

SEQ ID NO: 38033 - DNA, 80 bp, synthetic construct
  source 1..80: mol_type = other DNA
tcctcctctggcctattggctgatgtgaggaaatactttctggcctctcttcggatatgttccctctcttcagaggtaaa

SEQ ID NO: 38034 - DNA, 80 bp, synthetic construct
  source 1..80: mol_type = other DNA
aatggggctgagcgctcatcacccggagggacttgtgcttctttccgcggtagagggggggctacttcctcctgccgcgg

SEQ ID NO: 38035 - DNA, 80 bp, synthetic construct
  source 1..80: mol_type = other DNA
gagggtccaggcggaagtgcggtctggctcaaaacgaccttggaggcagaattatgaatggcgcatgagcggagccatgg

SEQ ID NO: 38036 - DNA, 80 bp, synthetic construct; identical to SEQ ID NO: 10393
  source 1..80: mol_type = other DNA

SEQ ID NO: 38037 - DNA, 80 bp, synthetic construct
  source 1..80: mol_type = other DNA
ggggctggagtatcggaagaacagaattaacataaccagaaggagccgaaagacaacaatagctcacactacttgccaca

SEQ ID NO: 38038 - DNA, 80 bp, synthetic construct
  source 1..80: mol_type = other DNA
aattagctgggtgtggtgacgggtgtctgtagtcccagctacttgggaggctgaggcagaagagtggcctgaacctggga

SEQ ID NO: 38039 - DNA, 80 bp, synthetic construct
  source 1..80: mol_type = other DNA
tctttccctggacctgtagcctaaatacttttggtgtctccacgactcaaaggcaaatagctcaaattcggccttttctt

SEQ ID NO: 38040 - DNA, 80 bp, synthetic construct
  source 1..80: mol_type = other DNA
tctttcctagggtaggagagtagccacagaggaatagaataagggtttaaacgaagtaaagtggtacgggcgtaggtttc

SEQ ID NO: 38041 - DNA, 80 bp, synthetic construct; identical to SEQ ID NO: 10394
  source 1..80: mol_type = other DNA

SEQ ID NO: 38042 - DNA, 80 bp, synthetic construct
  source 1..80: mol_type = other DNA
gtatcgatgacctgacatacgaaactttgacaaccactaaacaggacaatagacaccgagcaggacaacaaacacaaaac

SEQ ID NO: 38043 - DNA, 80 bp, synthetic construct
  source 1..80: mol_type = other DNA
tgggcttctcttagcattggcaggcaggtataaacccccggctcggatggagctatgcccgatgctgccttaagccttat

SEQ ID NO: 38044 - DNA, 80 bp, synthetic construct
  source 1..80: mol_type = other DNA
agagtttataacaatttttgttatttcccgttctaaacaaaggtcccagaagacctgaacgagaggaggagaagagatag

SEQ ID NO: 38045 - DNA, 80 bp, synthetic construct
  source 1..80: mol_type = other DNA
aaccagaaccaaaaggcgcctaacagaaaaaccagggctctgtcctccagcgccctggaaaagcgggcagtgtcaaagac

SEQ ID NO: 38046 - DNA, 80 bp, synthetic construct; identical to SEQ ID NO: 10395
  source 1..80: mol_type = other DNA

SEQ ID NO: 38047 - DNA, 80 bp, synthetic construct
  source 1..80: mol_type = other DNA
gactaacgctcgaaattctctcggccccgaggaaggggcttgattttcctttatactttggtttagaaaggggaggggga

SEQ ID NO: 38048 - DNA, 80 bp, synthetic construct
  source 1..80: mol_type = other DNA
ttatctcttgagcgaaatcctggtaacttcgtaaattgcttgcttcagtaccttatcagttaattggactctttgatatg

SEQ ID NO: 38049 - DNA, 80 bp, synthetic construct
  source 1..80: mol_type = other DNA
aaaaacaaggttaggtactacaaagtcgcggtaaaatcggtgttaactacgtgtgcagccaccttttccttagtgctatt

SEQ ID NO: 38050 - DNA, 80 bp, synthetic construct; identical to SEQ ID NO: 10396
  source 1..80: mol_type = other DNA

SEQ ID NO: 38051 - DNA, 80 bp, synthetic construct
  source 1..80: mol_type = other DNA
aaagagacacctaaagcctttgcctaacaatcagtaggcaaacgccgagaaaattgtaaccccatagcactcagcctatg

SEQ ID NO: 38052 - DNA, 80 bp, synthetic construct
  source 1..80: mol_type = other DNA
agatggatgagtttattttctcacataacagctgcagaggtggtacaggtgaatccctctcaagtcaagtgggttaacct

SEQ ID NO: 38053 - DNA, 80 bp, synthetic construct
  source 1..80: mol_type = other DNA
acatggagaaagaggctgcttttctgccttctaggtgtttagtaacttaatttttaatcctttgatgaaatagagtggaa

SEQ ID NO: 38054 - DNA, 80 bp, synthetic construct; identical to SEQ ID NO: 10397
  source 1..80: mol_type = other DNA

SEQ ID NO: 38055 - DNA, 80 bp, synthetic construct
  source 1..80: mol_type = other DNA
caacatggtgaaaccccatctctactaaaaatacaaaaaattagccaggcgaggtggcaagtgcctgtatttccagctat

SEQ ID NO: 38056 - DNA, 80 bp, synthetic construct
  source 1..80: mol_type = other DNA
aaaagaaaaaaaaaagaagaaacgagcttctaccctagatggatcttggactctggagttcagagagcttgccatttcag

SEQ ID NO: 38057 - DNA, 80 bp, synthetic construct
  source 1..80: mol_type = other DNA
ttaaatagcttggattaagtttcagaatttgtcggtctctaatggaaaaagtgaccaccagcacatcaccagcaatcatc

SEQ ID NO: 38058 - DNA, 80 bp, synthetic construct
  source 1..80: mol_type = other DNA
atcagacttaggtcacagaattcaatggtttctgactattttatttaaactggaaatcggcgggatggcaaggaatacta

SEQ ID NO: 38059 - DNA, 80 bp, synthetic construct; identical to SEQ ID NO: 10398
  source 1..80: mol_type = other DNA

SEQ ID NO: 38060 - DNA, 80 bp, synthetic construct
  source 1..80: mol_type = other DNA
gttgcctgagtctgtgctctgtgtcatcaagacaatcactgtatgtttccaattccactgtttatgaattcccgacacta

SEQ ID NO: 38061 - DNA, 80 bp, synthetic construct
  source 1..80: mol_type = other DNA
caaagtggtctccccatcatattagactttctggagcataattccattctatcccttgagtgacctccggcatacaacat

SEQ ID NO: 38062 - DNA, 80 bp, synthetic construct
  source 1..80: mol_type = other DNA
cacattgaagaggaaagaactgatataagaaaatggtttacacagattgttgttctaattgtgagatcaaaaagaacatc

SEQ ID NO: 38063 - DNA, 80 bp, synthetic construct
  source 1..80: mol_type = other DNA
tctcactgtgggagaagaaggaaggtaaagaatagtcctgttgatactgatgggaattagaggcatcagtatgaaattgt

SEQ ID NO: 38064 - DNA, 80 bp, synthetic construct; identical to SEQ ID NO: 10399
  source 1..80: mol_type = other DNA

SEQ ID NO: 38065 - DNA, 80 bp, synthetic construct
  source 1..80: mol_type = other DNA
ggaacttaaacaaataaatatggaggacgggacgattttccttacagtggtttgccaaatgataaatgtgaaagtgagtg

SEQ ID NO: 38066 - DNA, 80 bp, synthetic construct
  source 1..80: mol_type = other DNA
tcccagctactcgggaggctgaggcaggagaatggcgtgaacccgggaggcggagcttgcagtgagccaagattgcgcca

SEQ ID NO: 38067 - DNA, 80 bp, synthetic construct
  source 1..80: mol_type = other DNA
atttgatgaggatcaggatatttacgtagtctcagagtatttccctgtagattatttattaattacaatgaggaaaatga

SEQ ID NO: 38068 - DNA, 80 bp, synthetic construct; identical to SEQ ID NO: 10400
  source 1..80: mol_type = other DNA

SEQ ID NO: 38069 - DNA, 80 bp, synthetic construct
  source 1..80: mol_type = other DNA
tcaatgtcaaatttactgaacttgataattgtgttgtgttaaggaattgacctttttcttaagaaatacacattgaagta

SEQ ID NO: 38070 - DNA, 80 bp, synthetic construct
  source 1..80: mol_type = other DNA
agatttgaacaatatatgcttctcagatggtcccactttattttaaatgttgcaaggcagagacaaaggtacaaatttct

SEQ ID NO: 38071 - DNA, 80 bp, synthetic construct
  source 1..80: mol_type = other DNA
taatgaggggctgctctggtagggaaagaaatagtgaagttcttttttggagaaaagcagcaaaaaaaaaagagagtgac

SEQ ID NO: 38072 - DNA, 80 bp, synthetic construct; identical to SEQ ID NO: 10401
  source 1..80: mol_type = other DNA

SEQ ID NO: 38073 - DNA, 80 bp, synthetic construct
  source 1..80: mol_type = other DNA
agctgctcgaggaggctgaggcagagaatggcgtgaacccgagaggcggagcttgcagtgagctgagatcgcgccactgc

SEQ ID NO: 38074 - DNA, 80 bp, synthetic construct
  source 1..80: mol_type = other DNA
cctcttctcagaggagggacacttttttaggtactaaaaaagaattgtctggcacttcatggcagcaacatgtttgatgt

SEQ ID NO: 38075 - DNA, 80 bp, synthetic construct
  source 1..80: mol_type = other DNA
gaaaacagcttgaggtcaggagttggaagccccagtgctctacgattgccctggtgaatagccactgcactctagtctgg

SEQ ID NO: 38076 - DNA, 80 bp, synthetic construct; identical to SEQ ID NO: 10402
  source 1..80: mol_type = other DNA

SEQ ID NO: 38077 - DNA, 80 bp, synthetic construct
  source 1..80: mol_type = other DNA
aaaaaaacaggaccgggcgcgctggctcacgactgtaatcccagcactttggaaggccgaggcgggcggatcacaaagtc

SEQ ID NO: 38078 - DNA, 80 bp, synthetic construct
  source 1..80: mol_type = other DNA
gcagtgagccaagatcgtgccactgcactccagcctgggcaacaaagtaaggctctgtctcaaaacaaaacaaaacaaaa

SEQ ID NO: 38079 - DNA, 80 bp, synthetic construct
  source 1..80: mol_type = other DNA
tggcgtgcacctgcagtcccagctactagggaggctgaggctcgagaattgcttgaacccgggaggtggaggttgcagtg

SEQ ID NO: 38080 - DNA, 80 bp, synthetic construct; identical to SEQ ID NO: 10403
  source 1..80: mol_type = other DNA

SEQ ID NO: 38081 - DNA, 80 bp, synthetic construct
  source 1..80: mol_type = other DNA
ctcctctttggagaatttcctcgttttcttggagccacttctgtggcctgactcttcggtgtcattaactgtttcctcct

SEQ ID NO: 38082 - DNA, 80 bp, synthetic construct
  source 1..80: mol_type = other DNA
atgggtcttccattccattctcctgatgaatctcctggggcttttgctttttcttctttttgggtttttcaatcgtctcc

SEQ ID NO: 38083 - DNA, 80 bp, synthetic construct
  source 1..80: mol_type = other DNA
agacggcgtttcaccatgttaggcagggtggtgtccatctcctgacctggtgatccacccgcctcggcctcccaaaatgc

SEQ ID NO: 38084 - DNA, 80 bp, synthetic construct; identical to SEQ ID NO: 10404
  source 1..80: mol_type = other DNA

SEQ ID NO: 38085 - DNA, 80 bp, synthetic construct
  source 1..80: mol_type = other DNA
ttaacctgaataaaaatgaaaacacaatgtatcaaaatttccaagacaacttaatctctgagagagaaatttacagcact

SEQ ID NO: 38086 - DNA, 80 bp, synthetic construct
  source 1..80: mol_type = other DNA
agaaagaaaagaaaaaagtctcaaatcagtcctttaagctcttacttgaagaactcaggtgggggaaaataacccaaagc

SEQ ID NO: 38087 - DNA, 80 bp, synthetic construct
  source 1..80: mol_type = other DNA
tcaagaataaaaagaagagtatatcactatagactctgctgacatcaaaagggtaaatgaatactatgaacaacacttta

SEQ ID NO: 38088 - DNA, 80 bp, synthetic construct; identical to SEQ ID NO: 10405
  source 1..80: mol_type = other DNA

SEQ ID NO: 38089 - DNA, 80 bp, synthetic construct
  source 1..80: mol_type = other DNA
aggtagctaggattacaggcacgtgccagcacgcccggctaatttttgtatttttagtagagatggggtttcaccatgtt

SEQ ID NO: 38090 - DNA, 80 bp, synthetic construct
  source 1..80: mol_type = other DNA
ttaaagtgttttttaaattctcccttcttacatcttcttttccttctgccttcaagggctgtcacacgaagagtagcgta

SEQ ID NO: 38091 - DNA, 80 bp, synthetic construct
  source 1..80: mol_type = other DNA
acccagcatggatttcatcttggggacgttgtggctccagttttgagactcaagtaacgatggatggagaggagaacaag

SEQ ID NO: 38092 - DNA, 80 bp, synthetic construct; identical to SEQ ID NO: 10406
  source 1..80: mol_type = other DNA

SEQ ID NO: 38093 - DNA, 80 bp, synthetic construct
  source 1..80: mol_type = other DNA
ccgaggaaaggacagagaagccgcctatttccaatccctactgttcgtcagggggagagtgttgaaccaggtctctctag

SEQ ID NO: 38094 - DNA, 80 bp, synthetic construct
  source 1..80: mol_type = other DNA
cagggagtctcagtatattttaaacttaaattggttttcagaagtacttataccttgttcctaaggaattcagggtgtcc

SEQ ID NO: 38095 - DNA, 80 bp, synthetic construct
  source 1..80: mol_type = other DNA
gaagagtgggcaaaaccaaggtcaccacacaaaagtatatccctacacgagataagtggaaataaagcactggcttaggt

SEQ ID NO: 38096 - DNA, 80 bp, synthetic construct; identical to SEQ ID NO: 10407
  source 1..80: mol_type = other DNA

SEQ ID NO: 38097 - DNA, 80 bp, synthetic construct
  source 1..80: mol_type = other DNA
ctaatttttgtatttttggtagagacgggtttcaccatgttggccaggaatgtctcgatctcttgacctcgtgattcacc

SEQ ID NO: 38098 - DNA, 80 bp, synthetic construct
  source 1..80: mol_type = other DNA
aatgattacagtgtcttcctcagagcttagaaacttccaagctctaaggaaaggccttaggtttcaaattgaaaggccaa

SEQ ID NO: 38099 - DNA, 80 bp, synthetic construct
  source 1..80: mol_type = other DNA
ctgatgtaatgcaaatacgtcactggctttcctacgtggtttgagttttttattgaaaataggcagggaaccccgggagc

SEQ ID NO: 38100 - DNA, 80 bp, synthetic construct; identical to SEQ ID NO: 10408
  source 1..80: mol_type = other DNA

SEQ ID NO: 38101 - DNA, 80 bp, synthetic construct
  source 1..80: mol_type = other DNA
gctaagcaggtttcaccagacagtatccctcctggatactggttatggatattttcaccggataaaagaatcaagaagtg

SEQ ID NO: 38102 - DNA, 80 bp, synthetic construct
  source 1..80: mol_type = other DNA
taggatttcctgggagttccctggtcatgcaatgcaattgtgatgggattgacagagaaagaacaaaaaaaatttgtttt

SEQ ID NO: 38103 - DNA, 80 bp, synthetic construct
  source 1..80: mol_type = other DNA
aggaaaatggaatggctgaggaaatacaggaaaatgaatcaattgtatcagtagggaatgttgatccgtattggtttctg

SEQ ID NO: 38104 - DNA, 80 bp, synthetic construct; identical to SEQ ID NO: 10409
  source 1..80: mol_type = other DNA

SEQ ID NO: 38105 - DNA, 80 bp, synthetic construct
  source 1..80: mol_type = other DNA
catggtgaaaccccgtctctactaaaaatacaaaaattacccgggcctgatggcacgcacctgtaaacccacctgccgag

SEQ ID NO: 38106 - DNA, 80 bp, synthetic construct
  source 1..80: mol_type = other DNA
tttccttctctttaatcatagcacaaaatgagagcaaatgtgaacctcccgtggatgtgcacacttttgtttgggttcaa

SEQ ID NO: 38107 - DNA, 80 bp, synthetic construct
  source 1..80: mol_type = other DNA
aaataggacagaaaaaggtgcggaggcagaagtaagtctatgttgcttgagaattaggtttgagcactaccagagcaaaa

SEQ ID NO: 38108 - DNA, 80 bp, synthetic construct; identical to SEQ ID NO: 10410
  source 1..80: mol_type = other DNA

SEQ ID NO: 38109 - DNA, 80 bp, synthetic construct
  source 1..80: mol_type = other DNA
taaataatttatttaatgtcagcgcttcatggaagacttcactggaatatgcaaccaaagcagagagtgatgcatatata

SEQ ID NO: 38110 - DNA, 80 bp, synthetic construct
  source 1..80: mol_type = other DNA
cagcactttgggaggccgaggcgggccgatcacctgaggtcgggagttcgagaccagcctgaccaacatggagaaactcc

SEQ ID NO: 38111 - DNA, 80 bp, synthetic construct
  source 1..80: mol_type = other DNA
actccgtcaaaaaataaataaataaacaaaataagggttctattaggcaaaactgaaagaaagaaagaaaaaaaaaaaac

SEQ ID NO: 38112 - DNA, 80 bp, synthetic construct; identical to SEQ ID NO: 10411
  source 1..80: mol_type = other DNA

SEQ ID NO: 38113 - DNA, 80 bp, synthetic construct
  source 1..80: mol_type = other DNA
gtttttctgtcttgctcttcaacgatatggcaaaaaggaacagaggattattgggcacgttaatgtggtggcaggtttat

SEQ ID NO: 38114 - DNA, 80 bp, synthetic construct
  source 1..80: mol_type = other DNA
gtttttaaaaggagaaaagtacagagtggcgagaattgtgaaaaacagatgaacatgtatgcttttgaactctgtgcaag

SEQ ID NO: 38115 - DNA, 80 bp, synthetic construct
  source 1..80: mol_type = other DNA
aactatatcccctgaagctgctaggagaaatgtaagagaatcacagaccagaacacagtttctgcttttggaacatttca

SEQ ID NO: 38116 - DNA, 80 bp, synthetic construct; identical to SEQ ID NO: 10412
  source 1..80: mol_type = other DNA

SEQ ID NO: 38117 - DNA, 80 bp, synthetic construct
  source 1..80: mol_type = other DNA
aatgctggacacagtggctcacgcctatactcccagcagtttgggaggtcgaggcgggtggatcacttgaggttaggagt

SEQ ID NO: 38118 - DNA, 80 bp, synthetic construct
  source 1..80: mol_type = other DNA
tgcactccagcctgggcagcacagcaagacactgtcgaaaaaaaaaacacaaaataatattgctcttcattggaatcatt

SEQ ID NO: 38119 - DNA, 80 bp, synthetic construct
  source 1..80: mol_type = other DNA
atatatatatatatgctatgaccccaaaactagacggttacatttatacccaagagaagtgcatgagcatctcccttgaa

SEQ ID NO: 38120 - DNA, 80 bp, synthetic construct; identical to SEQ ID NO: 10413
  source 1..80: mol_type = other DNA

SEQ ID NO: 38121 - DNA, 80 bp, synthetic construct
  source 1..80: mol_type = other DNA
ggcgtggtggatggcacctgtagtcccagctactcgggaggctgaggcaggagaatggcgtgaacctggtaggcagagct

SEQ ID NO: 38122 - DNA, 80 bp, synthetic construct
  source 1..80: mol_type = other DNA
tgtggtttgaaagtgtcccctccaaagcttaggtgtcaccatgtgataattatcaagacatagggcctttaagaagatta

SEQ ID NO: 38123 - DNA, 80 bp, synthetic construct
  source 1..80: mol_type = other DNA
cccagcctccagaactgtgagaaaatgtttctgggcctggtgcagtggctgtctcctgtaatcccagggttttgggaggc

SEQ ID NO: 38124 - DNA, 80 bp, synthetic construct; identical to SEQ ID NO: 10414
  source 1..80: mol_type = other DNA

SEQ ID NO: 38125 - DNA, 80 bp, synthetic construct
  source 1..80: mol_type = other DNA
cagagagttaggataattgaaatgaggcaaaaggcagctgttggttgctgaaaaattcagtatcttggcctgaattttgg

SEQ ID NO: 38126 - DNA, 80 bp, synthetic construct
  source 1..80: mol_type = other DNA
gagacggagtctcgctctgtcgcatcctcatgattattaggacttggatggacgggatggtacagtgagtctaagcgcca

SEQ ID NO: 38127 - DNA, 80 bp, synthetic construct
  source 1..80: mol_type = other DNA
gagagtgatactgggttttggtttgcccttcaggaaccgctgatactgtagcttctgagggagctgcagggatttcccga

SEQ ID NO: 38128 - DNA, 80 bp, synthetic construct; identical to SEQ ID NO: 10415
  source 1..80: mol_type = other DNA

SEQ ID NO: 38129 - DNA, 80 bp, synthetic construct
  source 1..80: mol_type = other DNA
cagattgactttagcgatggcttgtgaccacctgatagatagtggccgttacagcgtttagaaagtgagtaaaagaaagg

SEQ ID NO: 38130 - DNA, 80 bp, synthetic construct
  source 1..80: mol_type = other DNA
tgcttgcagagtatttctctgtggatttctgcttggcactgtgataccacaaagagctctaatctggaggtatgggttgt

SEQ ID NO: 38131 - DNA, 80 bp, synthetic construct
  source 1..80: mol_type = other DNA
tgcatctcagaccagaagcttcctcagaggacccagagaagtgctttttacttccaccaaatttcagctgaggtgaatgc

SEQ ID NO: 38132 - DNA, 80 bp, synthetic construct; identical to SEQ ID NO: 10416
  source 1..80: mol_type = other DNA

SEQ ID NO: 38133 - DNA, 80 bp, synthetic construct
  source 1..80: mol_type = other DNA
tcaccctctgtatgagagagaaatgcagaggccaacacaattcaccttgacagacagaaaaatttaaagttggggaatat

SEQ ID NO: 38134 - DNA, 80 bp, synthetic construct
  source 1..80: mol_type = other DNA
tgtgagcctgccctctgtgtcaggataatcactatatgtttccaattccattgttaattccctacatgaagcgcttcctc

SEQ ID NO: 38135 - DNA, 80 bp, synthetic construct
  source 1..80: mol_type = other DNA
gaaaaattagccgggcgtggtgacaggcgcctgtaatcccagctactctgaagtagagaattgcttgaacccgggaggca

SEQ ID NO: 38136 - DNA, 80 bp, synthetic construct; identical to SEQ ID NO: 10417
  source 1..80: mol_type = other DNA

SEQ ID NO: 38137 - DNA, 80 bp, synthetic construct
  source 1..80: mol_type = other DNA
aaataaaactgactcaagtgcgtgtgaaaataccttaaaattcaatacgaatagaggcaaattcaaatggcgttgtctat

SEQ ID NO: 38138 - DNA, 80 bp, synthetic construct
  source 1..80: mol_type = other DNA
gtatcagggttatttttgtagagctagggctgtaagaattctgagattttgtgtgaattttaggattgggaaaatgagtg

SEQ ID NO: 38139 - DNA, 80 bp, synthetic construct
  source 1..80: mol_type = other DNA
ttggcaggccaagacgggcagctcacttgaggtcaggagttcgagaacagcctggccaacatggtgaaacccccgtctct

SEQ ID NO: 38140 - DNA, 80 bp, synthetic construct; identical to SEQ ID NO: 10418
  source 1..80: mol_type = other DNA

SEQ ID NO: 38141 - DNA, 80 bp, synthetic construct
  source 1..80: mol_type = other DNA
ataaatatggaagatgggaagattttctttacagtggtatgccagctaataaatgtggaaagaaggataaaatttgcaaa

SEQ ID NO: 38142 - DNA, 80 bp, synthetic construct
  source 1..80: mol_type = other DNA
tctcagagtatttctctagagcttacttattgattacaatgaggaagatgatacttttgcagggaagaaatagtagttac

SEQ ID NO: 38143 - DNA, 80 bp, synthetic construct
  source 1..80: mol_type = other DNA
acaaaccactggcatatactcttcaaaaacattatcaaagttgtgaaagacacaattgagcaactgttctaaattaaagg

SEQ ID NO: 38144 - DNA, 80 bp, synthetic construct; identical to SEQ ID NO: 10419
  source 1..80: mol_type = other DNA

SEQ ID NO: 38145 - DNA, 80 bp, synthetic construct
  source 1..80: mol_type = other DNA
tatatatatatggagtatatatatatatatggagtatatatatatatatggagtatatatatatatatggagtatatata

SEQ ID NO: 38146 - DNA, 80 bp, synthetic construct
  source 1..80: mol_type = other DNA
tatatattccattgttgctgattgtttggttgaagaggcaagatggtctgaaatgatcccaagatgtggacaatatgtgc

SEQ ID NO: 38147 - DNA, 80 bp, synthetic construct
  source 1..80: mol_type = other DNA
ttgggagtcaatcaactaaggacatctgaaggaaacagaatttaattctcagagtcaggaggtgatgagagactgctttg

SEQ ID NO: 38148 - DNA, 80 bp, synthetic construct; identical to SEQ ID NO: 10420
  source 1..80: mol_type = other DNA

SEQ ID NO: 38149 - DNA, 80 bp, synthetic construct
  source 1..80: mol_type = other DNA
cgggcgaatcatgaggtcaggagatcaagaccaccctggctaacacggtgaaaccccatctctactaaaaaatacaaaaa

SEQ ID NO: 38150 - DNA, 80 bp, synthetic construct
  source 1..80: mol_type = other DNA
aaagagtgttgaagaactcaaacatcttcagccaccagaattcagttaacatttataaaacagtccacacaggaagagca

SEQ ID NO: 38151 - DNA, 80 bp, synthetic construct
  source 1..80: mol_type = other DNA
tccaaacgcttggaaaatgaacaacacactactaaacagttcatacaacaaagagaaaaccttagtagatatcaaaaaat

SEQ ID NO: 38152 - DNA, 80 bp, synthetic construct; identical to SEQ ID NO: 10421
  source 1..80: mol_type = other DNA

SEQ ID NO: 38153 - DNA, 80 bp, synthetic construct
  source 1..80: mol_type = other DNA
acatcaggaataaaaagaggacatcactgtagactcagctgacatcaaaaggatgaaggaggctgggaatggtggcccac

SEQ ID NO: 38154 - DNA, 80 bp, synthetic construct
  source 1..80: mol_type = other DNA
ctgaggcaggagaatcgcttgaactcaataggcggaggttgcagtgagccaagattgcaccactgcacttcagcctgggt

SEQ ID NO: 38155 - DNA, 80 bp, synthetic construct
  source 1..80: mol_type = other DNA
ccaggaaaaaatcttccccctcagcagccacctgatcctgggacctccttcttaaacttctagaacagtgcttctcaaac

SEQ ID NO: 38156 - DNA, 80 bp, synthetic construct; identical to SEQ ID NO: 10422
  source 1..80: mol_type = other DNA

SEQ ID NO: 38157 - DNA, 80 bp, synthetic construct
  source 1..80: mol_type = other DNA
agaatcaagaagtaaagacatgccagcctgatagagtgttaggctggtggactgggaataaacattgtagtttcttgtct

SEQ ID NO: 38158 - DNA, 80 bp, synthetic construct
  source 1..80: mol_type = other DNA
gagaaagaacatgaaatgtttgtttggttttttccaaggcagaaagcgcccacacaattgcgatctacttaccttttact

SEQ ID NO: 38159 - DNA, 80 bp, synthetic construct
  source 1..80: mol_type = other DNA
atccgtattagtttttgcttcttgcatgttgaaggcctctaattcccggacagtcttcgtttggccgtccagcgtcctgc

SEQ ID NO: 38160 - DNA, 80 bp, synthetic construct; identical to SEQ ID NO: 10423
  source 1..80: mol_type = other DNA

SEQ ID NO: 38161 - DNA, 80 bp, synthetic construct
  source 1..80: mol_type = other DNA
cagctacttgggaggctgaggcaggagaatctcttgaaaccggaaggcggaggttgcagtgagccgaggtggtgcgactg

SEQ ID NO: 38162 - DNA, 80 bp, synthetic construct
  source 1..80: mol_type = other DNA
ccccctcgttacttttttgtcttccttctgctgtcgcaatcgccttatgtgatgttgaggctcacagcatagaggttgga

SEQ ID NO: 38163 - DNA, 80 bp, synthetic construct
  source 1..80: mol_type = other DNA
agcatgcgctctaccactgagctacacccccttactataacacccatttgtaataattttcaggaggtaactttcatttt

SEQ ID NO: 38164 - DNA, 80 bp, synthetic construct; identical to SEQ ID NO: 10424
  source 1..80: mol_type = other DNA

SEQ ID NO: 38165 - DNA, 80 bp, synthetic construct
  source 1..80: mol_type = other DNA
tcataattgttgtttgctcagtcggaatatcaaaggtaagatttgatagaggaaagccatgatcagaagaaaacctgaga

SEQ ID NO: 38166 - DNA, 80 bp, synthetic construct
  source 1..80: mol_type = other DNA
ggagctatgattgcaccactaccctcgagcccggacaatggagtgagaaaagcaagcaagcaagcaagcaagagaaagtg

SEQ ID NO: 38167 - DNA, 80 bp, synthetic construct
  source 1..80: mol_type = other DNA
accagctttgggggtggagatgagggttgaattatgagagtaagacgaaagataaatagaaacaggattgaagagtagtt

SEQ ID NO: 38168 - DNA, 80 bp, synthetic construct; identical to SEQ ID NO: 10425
  source 1..80: mol_type = other DNA

SEQ ID NO: 38169 - DNA, 80 bp, synthetic construct
  source 1..80: mol_type = other DNA
aaaacccatttctcggaaccaaatttctggtgacgattaactctttctcattctggtttgcccatatatgagcctttgcc

SEQ ID NO: 38170 - DNA, 80 bp, synthetic construct
  source 1..80: mol_type = other DNA
gtttcactgaatgagagactagagaagcgttacacacaaaattcatatgtattcatgtgtgtgcgtgtctgcctgtctgt

SEQ ID NO: 38171 - DNA, 80 bp, synthetic construct
  source 1..80: mol_type = other DNA
aagaagatatgcttttttgtttgccacatgaaaggggggaatttaaaataattaaatatccatatctatcttcaggctat

SEQ ID NO: 38172 - DNA, 80 bp, synthetic construct; identical to SEQ ID NO: 10426
  source 1..80: mol_type = other DNA

SEQ ID NO: 38173 - DNA, 80 bp, synthetic construct
  source 1..80: mol_type = other DNA
aggccatttacgtatattattaaaactggacataaaagacggaaacagtaaacatcggggactactagggagtagctggg

SEQ ID NO: 38174 - DNA, 80 bp, synthetic construct
  source 1..80: mol_type = other DNA
taatatagagaccgggctcggtggctcacgcctgtaataccagcactttgggagaccgaggtgggcggatcacctgagat

SEQ ID NO: 38175 - DNA, 80 bp, synthetic construct
  source 1..80: mol_type = other DNA
cacggtgaaaccccaattctactaaaaaatacaaaaaattagccaggcgtggtggcaggcgcctgtagtcccagctactc

SEQ ID NO: 38176 - DNA, 80 bp, synthetic construct
  source 1..80: mol_type = other DNA
gctgaggcggcaggagaatcgcttgaaccctggaggcagaggttgcggtgagccgagatcgcgccattgcactccagcct

SEQ ID NO: 38177 - DNA, 80 bp, synthetic construct; identical to SEQ ID NO: 10427
  source 1..80: mol_type = other DNA

SEQ ID NO: 38178 - DNA, 80 bp, synthetic construct
  source 1..80: mol_type = other DNA
gctattgaatagaagacaaatcatgcttggaattaccctagaccttccctttcaacagaatgtaaaggaatcattaccgt

SEQ ID NO: 38179 - DNA, 80 bp, synthetic construct
  source 1..80: mol_type = other DNA
cagtttctgtagagtcagtgtcctcaccctgaggtttcttctcatttggtactaattttcctttttcaacttgctgcagt

SEQ ID NO: 38180 - DNA, 80 bp, synthetic construct
  source 1..80: mol_type = other DNA
attacccccaacacagtatttcaacagagaagttgaagtggaaaagggaaaatgaggcacatgcacctgaatcttgatga

SEQ ID NO: 38181 - DNA, 80 bp, synthetic construct
  source 1..80: mol_type = other DNA
taagatttggaaattctggacaagggtgccaggcttcctgtcagtaagaaaacttagaatattcctgtaattaggcctgg

SEQ ID NO: 38182 - DNA, 80 bp, synthetic construct; identical to SEQ ID NO: 10428
  source 1..80: mol_type = other DNA

SEQ ID NO: 38183 - DNA, 80 bp, synthetic construct
  source 1..80: mol_type = other DNA
tcaaggtacaaacccggttttttctaattgcaaaatgtttcttgaatataccaccaccacatatatacactcatacagta

SEQ ID NO: 38184 - DNA, 80 bp, synthetic construct
  source 1..80: mol_type = other DNA
taagactttaaataatttacgtcctgtcagttaacacttcatggaagtcttcagtggagagagtgttacaaatatatata

SEQ ID NO: 38185 - DNA, 80 bp, synthetic construct
  source 1..80: mol_type = other DNA
atatagacctctgggattggtgcgcaagcgctgtgttgaaggagtgacaattatgctaaaaccaaaatgcaactgccgaa

SEQ ID NO: 38186 - DNA, 80 bp, synthetic construct; identical to SEQ ID NO: 10429
  source 1..80: mol_type = other DNA

SEQ ID NO: 38187 - DNA, 80 bp, synthetic construct
  source 1..80: mol_type = other DNA
ttttctggcttgctcttcaatggcatgtcataaaggaacagaagattagtggacactttaacacggtagtgggcttatag

SEQ ID NO: 38188 - DNA, 80 bp, synthetic construct
  source 1..80: mol_type = other DNA
ttgagatggagtcccgctctgtctcccaggctggagtgcagtggcacgatctggacttagtgcaacctccgtctttcagg

SEQ ID NO: 38189 - DNA, 80 bp, synthetic construct
  source 1..80: mol_type = other DNA
ttgagccaccgttcccggcctattccttggagttcagagaattgtggtctgcacattgatgcataagaattgtttttttt

SEQ ID NO: 38190 - DNA, 80 bp, synthetic construct; identical to SEQ ID NO: 10430
  source 1..80: mol_type = other DNA

SEQ ID NO: 38191 - DNA, 80 bp, synthetic construct
  source 1..80: mol_type = other DNA
aactttcacctcctggctcaatcagttcttccacctcagcctagaagttttatatcaattcaaaagtgtcaagacattgg

SEQ ID NO: 38192 - DNA, 80 bp, synthetic construct
  source 1..80: mol_type = other DNA
aaccctctctatgtctggacagttttcaaactgagtctcctattctgaaagagtcaaggctttcagttttagccaaaatt

SEQ ID NO: 38193 - DNA, 80 bp, synthetic construct
  source 1..80: mol_type = other DNA
cctagtcaacatggtgaaaccccgtctctactaaatgcacataaattagccaggcatggtggcgggcgcctataatccca

SEQ ID NO: 38194 - DNA, 80 bp, synthetic construct
  source 1..80: mol_type = other DNA
ttaaataaataaaatttataaaattatgttcgctttcagtctttgtcttgtcctcccgcttgtaaggtccgagccttctc

SEQ ID NO: 38195 - DNA, 80 bp, synthetic construct; identical to SEQ ID NO: 10431
  source 1..80: mol_type = other DNA

SEQ ID NO: 38196 - DNA, 80 bp, synthetic construct
  source 1..80: mol_type = other DNA
aaaacacaaatgggagagagatagagggcaaggaaaagcatccttaagatgattcggacttggatggacgggaccgtaga

SEQ ID NO: 38197 - DNA, 80 bp, synthetic construct
  source 1..80: mol_type = other DNA
cttcaagagcgcctctccgctatttccgtcgctcgacagacgggctgagctctttggagtgatgttgggttttggtttgc

SEQ ID NO: 38198 - DNA, 80 bp, synthetic construct
  source 1..80: mol_type = other DNA
aaaagatgagaaaaagttaccgtttctttgctccatatatatctcctagaataaagccaatcgaaagccaacttcaccct

SEQ ID NO: 38199 - DNA, 80 bp, synthetic construct
  source 1..80: mol_type = other DNA
taactacgtgtgcagccaccgtcttcttagtcctgttacaggtgcagaggcaatataagtgaaccactcacaagtcgtgt

SEQ ID NO: 38200 - DNA, 80 bp, synthetic construct; identical to SEQ ID NO: 10432
  source 1..80: mol_type = other DNA

SEQ ID NO: 38201 - DNA, 80 bp, synthetic construct
  source 1..80: mol_type = other DNA
gaaggaggttatttctggagagtaagtacaatcaggtagaaaaggatccgttgggcttgggagaataaacgttcattact

SEQ ID NO: 38202 - DNA, 80 bp, synthetic construct
  source 1..80: mol_type = other DNA
atttgccttgtgtttgtagttaaatagtttaagtttcaaactatgtgggtctctaatggaaaaagtgaccaccagcacat

SEQ ID NO: 38203 - DNA, 80 bp, synthetic construct
  source 1..80: mol_type = other DNA
atttcatttacaactagaaattggttgcatggccaggaatactgcttgcttccctcgtgcgtggttcatgttagtgattg

SEQ ID NO: 38204 - DNA, 80 bp, synthetic construct; identical to SEQ ID NO: 10433
  source 1..80: mol_type = other DNA

SEQ ID NO: 38205 - DNA, 80 bp, synthetic construct
  source 1..80: mol_type = other DNA
tcaatttcctacaggaagtgtttcctctcttaggccctgctacaccaaaagaaaggtagcttaatagtacaaataaaggc

SEQ ID NO: 38206 - DNA, 80 bp, synthetic construct
  source 1..80: mol_type = other DNA
tgactcttggaagcgtgttagtctcacatggtcaaaaaataaaactgactcaagtgtgtgtgaaaataccctaaaattca

SEQ ID NO: 38207 - DNA, 80 bp, synthetic construct
  source 1..80: mol_type = other DNA
tagagctaaggctgcaggaattctgagattttgtgtgaattttaggattgggaaaatgagtgtgtgtgagcgcgtgtgtt

SEQ ID NO: 38208 - DNA, 80 bp, synthetic construct; identical to SEQ ID NO: 10434
  source 1..80: mol_type = other DNA

SEQ ID NO: 38209 - DNA, 80 bp, synthetic construct
  source 1..80: mol_type = other DNA
cattttccctacagatctgtctgctaactgagcctggaagaaataccttagaaacaatgagcaagatgactctatatttt

SEQ ID NO: 38210 - DNA, 80 bp, synthetic construct
  source 1..80: mol_type = other DNA
cagaagctccggggtggctcacgcctgtaaacccagcactttgggagaccgaggcgggcggatcaccagaggttaggagt

SEQ ID NO: 38211 - DNA, 80 bp, synthetic construct
  source 1..80: mol_type = other DNA
caccactgcactccagcctggacgacagggcaagacctgtctcaataaataaataaataataaagtacatgagaaaaata

SEQ ID NO: 38212 - DNA, 80 bp, synthetic construct; identical to SEQ ID NO: 10435
  source 1..80: mol_type = other DNA

SEQ ID NO: 38213 - DNA, 80 bp, synthetic construct
  source 1..80: mol_type = other DNA
atggatttcgtcttggggacgctatggctccagttctgacactcaagaaacgatggatggagaggagaacgaggaccacc

SEQ ID NO: 38214 - DNA, 80 bp, synthetic construct
  source 1..80: mol_type = other DNA
gcttttcctcgctgtccgcgataagcgagagggctcattccctgttggagaagtgagctgaaaacactttcctcgcaaga

SEQ ID NO: 38215 - DNA, 80 bp, synthetic construct
  source 1..80: mol_type = other DNA
cctactgttagcgagggggagagtgtttaaccgggaagagagaccctcccgctgaagcatagggtcctttgttatagata

SEQ ID NO: 38216 - DNA, 80 bp, synthetic construct; identical to SEQ ID NO: 10436
  source 1..80: mol_type = other DNA

SEQ ID NO: 38217 - DNA, 80 bp, synthetic construct
  source 1..80: mol_type = other DNA
agaggaagagacaaacgtgaaaatgtagaaagtggatacagaattttttccaaggaggaagaggaatggtctgctcacaa

SEQ ID NO: 38218 - DNA, 80 bp, synthetic construct
  source 1..80: mol_type = other DNA
atgattactctctgccacagggcttagaatcgtccaagcctgggtttcaaattgcaaggcccaaatagcttgagagagct

SEQ ID NO: 38219 - DNA, 80 bp, synthetic construct
  source 1..80: mol_type = other DNA
aaatggtaaattcaaccccatccctgacataagacgaatacaaacctcactggctttcctaggtttgtgtttttgattga

SEQ ID NO: 38220 - DNA, 80 bp, synthetic construct; identical to SEQ ID NO: 10437
  source 1..80: mol_type = other DNA

SEQ ID NO: 38221 - DNA, 80 bp, synthetic construct
  source 1..80: mol_type = other DNA
ccttcctccaaaaaatgtgtctcaaaacaaacatatgattggtctggaggcacacacacagccagtcctcagctaagcag

SEQ ID NO: 38222 - DNA, 80 bp, synthetic construct
  source 1..80: mol_type = other DNA
tggactaggaacaaacatcatactctcttgcctctcaaagacactttaattcaataggaaatatgtacagagagaacagc

SEQ ID NO: 38223 - DNA, 80 bp, synthetic construct
  source 1..80: mol_type = other DNA
gtttgtttgttttttcccaaggcaggaagtgcccaacacacctgcgatctacttatcttttagtctgcatgtattttgca

SEQ ID NO: 38224 - DNA, 80 bp, synthetic construct
  source 1..80: mol_type = other DNA
acaaatcagtcttatggaacatcagtagggaatgttgatccgtattggtttctgcttctcgcacgttgaaggcctctaat

SEQ ID NO: 38225 - DNA, 80 bp, synthetic construct; identical to SEQ ID NO: 10438
  source 1..80: mol_type = other DNA

SEQ ID NO: 38226 - DNA, 80 bp, synthetic construct
  source 1..80: mol_type = other DNA
ttggtgatgtcgaggttcacagcataaccagtggagatagttcaaggctgaacattgggctacacttttactgtctatat

SEQ ID NO: 38227 - DNA, 80 bp, synthetic construct
  source 1..80: mol_type = other DNA
tctttgtaataattttcaggaggtaactttcatttcctgagactccgtgagcatgctggtagtagtggtcagtattatgg

SEQ ID NO: 38228 - DNA, 80 bp, synthetic construct
  source 1..80: mol_type = other DNA
tagggtctccttctattatgcttggcaagaatcaagttcaggttttcgtttcttttaatttctcccagatacgacacaaa

SEQ ID NO: 38229 - DNA, 80 bp, synthetic construct; identical to SEQ ID NO: 10439
  source 1..80: mol_type = other DNA

SEQ ID NO: 38230 - DNA, 80 bp, synthetic construct
  source 1..80: mol_type = other DNA
ttcataaggcgtgaatgaaaaacagctatggggatggagagaagggttgaattatgagaataagaccgaagataaataca

SEQ ID NO: 38231 - DNA, 80 bp, synthetic construct
  source 1..80: mol_type = other DNA
aggatgtttctcagagaattcaggcaattaactctgtctctagcctgggatttgtaagcattaatagtagtagacacatt

SEQ ID NO: 38232 - DNA, 80 bp, synthetic construct
  source 1..80: mol_type = other DNA
atgagaagaaaacctatttctcagcaccaaatttctagtgactattaactctttctcattctggtttgcctatataagag

SEQ ID NO: 38233 - DNA, 80 bp, synthetic construct; identical to SEQ ID NO: 10440
  source 1..80: mol_type = other DNA

SEQ ID NO: 38234 - DNA, 80 bp, synthetic construct
  source 1..80: mol_type = other DNA
aataattaaatatctgtagctatcttcagactatctaccagcaacacgattgaaacatgttttttgtgtgaaatctgtag

SEQ ID NO: 38235 - DNA, 80 bp, synthetic construct
  source 1..80: mol_type = other DNA
tctgcactgtccaatatggttaccattagccacattgggtattgagtactgaaaattgcctagtctaagttaagatgtgt

SEQ ID NO: 38236 - DNA, 80 bp, synthetic construct
  source 1..80: mol_type = other DNA
gggttcaatccattctcctgcctcagcctcctgagtaactgggactacaggcgcgcaccaccatgcctggcaatttttct

SEQ ID NO: 38237 - DNA, 80 bp, synthetic construct
  source 1..80: mol_type = other DNA
gggccgccgcacctggccagatgtaatatcattttttaaacataaaatgtctcactgataattttaagattgattacttg

SEQ ID NO: 38238 - DNA, 80 bp, synthetic construct; identical to SEQ ID NO: 10441
  source 1..80: mol_type = other DNA

SEQ ID NO: 38239 - DNA, 80 bp, synthetic construct
  source 1..80: mol_type = other DNA
caggcatgcaccaccacacccagctaatttttgtatttttattagagacagggtttcaccatattggtcaggttggtctt

SEQ ID NO: 38240 - DNA, 80 bp, synthetic construct
  source 1..80: mol_type = other DNA
actacagaagtggctctcatttaagatttgtattaacttttttaaaaattctttttatcccagaagctaaagcagaagac

SEQ ID NO: 38241 - DNA, 80 bp, synthetic construct
  source 1..80: mol_type = other DNA
tgccgcgagtggacttgactaaatgcatttccatgcatgatctccttagacctttgcaacatcccattttacataatcat

SEQ ID NO: 38242 - DNA, 80 bp, synthetic construct
  source 1..80: mol_type = other DNA
taaaggaatcactactgtgctaggcaagaaaacattcaatcctgccatttgtctaatcaaatgtttccttttttttttct

SEQ ID NO: 38243 - DNA, 80 bp, synthetic construct; identical to SEQ ID NO: 10442
  source 1..80: mol_type = other DNA

SEQ ID NO: 38244 - DNA, 80 bp, synthetic construct
  source 1..80: mol_type = other DNA
tctgattcctagttcctgtacagtcaatgtccccaccctgaggttggtctctcatttggtaccaattttcctttcacaat

SEQ ID NO: 38245 - DNA, 80 bp, synthetic construct
  source 1..80: mol_type = other DNA
acaggacaaaaaaggcccattatcccaacacaaaatttcaagagaggagttgaagtaaaaaaaaggaaaatggggcacat

SEQ ID NO: 38246 - DNA, 80 bp, synthetic construct
  source 1..80: mol_type = other DNA
gttggagaccaggctggccaacatggtgaaatcccgtctttactaaaaatacaaaaattagtcaggcatggtggtggacg

SEQ ID NO: 38247 - DNA, 80 bp, synthetic construct; identical to SEQ ID NO: 10443
  source 1..80: mol_type = other DNA

SEQ ID NO: 38248 - DNA, 80 bp, synthetic construct
  source 1..80: mol_type = other DNA
acaaaaaaaaagtacaaaagagagagagagaaagccaggcttgttgttgcatttctgtagtctcagctacccaggaggct

SEQ ID NO: 38249 - DNA, 80 bp, synthetic construct
  source 1..80: mol_type = other DNA
ccgaggtgggtggatcacgaggtcagtagatcgagaccatcccagctaacatggtgaaaccccgtctctactaaaaatac

SEQ ID NO: 38250 - DNA, 80 bp, synthetic construct
  source 1..80: mol_type = other DNA
aaagaaagttattttcccagcagtttaactgcagagctatggagttgactcaagatacaaaccgaggtgtttctttcttt

SEQ ID NO: 38251 - DNA, 80 bp, synthetic construct
  source 1..80: mol_type = other DNA
ttttttgtacttttagtagagacgggggtttcaccgtggtctcgatctcctgacctcgtgatccacccgcttcggcctcc

SEQ ID NO: 38252 - DNA, 80 bp, synthetic construct; identical to SEQ ID NO: 10444
  source 1..80: mol_type = other DNA

SEQ ID NO: 38253 - DNA, 80 bp, synthetic construct
  source 1..80: mol_type = other DNA
ttatatatagacctctgggattggtgtgcaagtgttgtataaaggaaagacaattatgcaacaaccaaaaggtatctgcc

SEQ ID NO: 38254 - DNA, 80 bp, synthetic construct
  source 1..80: mol_type = other DNA
tttgtaaggtcagtgtatcttccaacgcctaattcggttgtcttcaatatcacccgtcattcactcacctcctcccaatc

SEQ ID NO: 38255 - DNA, 80 bp, synthetic construct
  source 1..80: mol_type = other DNA
gttcaagaccagcctggccaacatggtgaaatcccttctttacaagaaatataaaaattagccaggagaggtggcgcacg

SEQ ID NO: 38256 - DNA, 80 bp, synthetic construct; identical to SEQ ID NO: 10445
  source 1..80: mol_type = other DNA

SEQ ID NO: 38257 - DNA, 80 bp, synthetic construct
  source 1..80: mol_type = other DNA
gcgagccaattctttttctctgtttccttccttttactgatctagtgctaacacatccaccttaggtggtacagagagcc

SEQ ID NO: 38258 - DNA, 80 bp, synthetic construct
  source 1..80: mol_type = other DNA
ataatataaaatatacatgtatctctctctctatatatatatatagagagagagagagagagaagattccagcgagtgag

SEQ ID NO: 38259 - DNA, 80 bp, synthetic construct
  source 1..80: mol_type = other DNA
taaataacttagaaacaatttcagagtttaccgaatttcagaaacaatcctctctggaatgaggaaatagctacagccaa

SEQ ID NO: 38260 - DNA, 80 bp, synthetic construct; identical to SEQ ID NO: 10446
  source 1..80: mol_type = other DNA

SEQ ID NO: 38261 - DNA, 80 bp, synthetic construct
  source 1..80: mol_type = other DNA
ggaaattaaaacagtggctacatataaatctcagcacagtgcttagaatgtgtgtaaatggttctaggagtgcactgcac

SEQ ID NO: 38262 - DNA, 80 bp, synthetic construct
  source 1..80: mol_type = other DNA
agaggggtagaggacaaggaaaagcatcctcaagattattaggatttggatggacgggatgttagagtgagtctaagcac

SEQ ID NO: 38263 - DNA, 80 bp, synthetic construct
  source 1..80: mol_type = other DNA
ctttccatcgctcgatagacaggctaggctctttggaggagcacgtgatgttgcgttttttgtttgcgggttcgggaacc

SEQ ID NO: 38264 - DNA, 80 bp, synthetic construct
  source 1..80: mol_type = other DNA
agttcccgtttgtttgctccacatgtttcctttagaatgaagccgattggaagtcaacttcaccctgaagaaattcctcc

SEQ ID NO: 38265 - DNA, 80 bp, synthetic construct; identical to SEQ ID NO: 10447
  source 1..80: mol_type = other DNA

SEQ ID NO: 38266 - DNA, 80 bp, synthetic construct
  source 1..80: mol_type = other DNA
ctgaaaatagaaggcgatttccttttaacgagatagtattgagatgcttgcagagtatccccgcgtggattctgcttagc

SEQ ID NO: 38267 - DNA, 80 bp, synthetic construct
  source 1..80: mol_type = other DNA
tggaaaacaaagaaatgagctttaccctatactgatcttggttcctggagttccgagtgcttgcatctcagggcagaaac

SEQ ID NO: 38268 - DNA, 80 bp, synthetic construct
  source 1..80: mol_type = other DNA
acattaagttttagagtttgtgggtttctaatggaaaaagtgaccaccagcacatcaggtcctcagccactggcagtgaa

SEQ ID NO: 38269 - DNA, 80 bp, synthetic construct
  source 1..80: mol_type = other DNA
gaaacccccatctctactaaaaatacaaaattagccaggcatggtggtgcatggttgtaatcccagctactcaggaggct

SEQ ID NO: 38270 - DNA, 80 bp, synthetic construct; identical to SEQ ID NO: 10448
  source 1..80: mol_type = other DNA

SEQ ID NO: 38271 - DNA, 80 bp, synthetic construct
  source 1..80: mol_type = other DNA
ggggaaggtcatggagctcttcttacagtgccacagggaagaaaatggacctctggaggtactggggaatcagcccaaga

SEQ ID NO: 38272 - DNA, 80 bp, synthetic construct
  source 1..80: mol_type = other DNA
ctaagtgccccctctcttaggcacggttacatcaagaaaaggtacgttaacagtaaaaagaaaaacactgttcctgattt

SEQ ID NO: 38273 - DNA, 80 bp, synthetic construct
  source 1..80: mol_type = other DNA
tattttctgtaatgctaaggcaatagcaattctgatattttgtgtgaattttaggattggaaaaatgagcatgtgtgcgc

SEQ ID NO: 38274 - DNA, 80 bp, synthetic construct; identical to SEQ ID NO: 10449
  source 1..80: mol_type = other DNA

SEQ ID NO: 38275 - DNA, 80 bp, synthetic construct
  source 1..80: mol_type = other DNA
gatttgaaaggacagagaagccagcttgaaagggatctcaatggccaaatctgacacattttgagcattaatgatgacaa

SEQ ID NO: 38276 - DNA, 80 bp, synthetic construct
  source 1..80: mol_type = other DNA
ttgggaggccgaggcagggggatcacctgaggttgggagttcgagaccagcctgaccaacatggagaaaccccgtctcta

SEQ ID NO: 38277 - DNA, 80 bp, synthetic construct
  source 1..80: mol_type = other DNA
tctgtgacatttccatgacctgaatgtaaccatgactacacaaattaagaaacattcaacaaaaccactggcatatgctc

SEQ ID NO: 38278 - DNA, 80 bp, synthetic construct; identical to SEQ ID NO: 10450
  source 1..80: mol_type = other DNA

SEQ ID NO: 38279 - DNA, 80 bp, synthetic construct
  source 1..80: mol_type = other DNA
gctgattggttgttgaggtgaggaagaggcaagaccgtgttctgaaataatgtcaagatttggacgatatgtgtttctca

SEQ ID NO: 38280 - DNA, 80 bp, synthetic construct
  source 1..80: mol_type = other DNA
tgcaaactctgccacctgggttcaagcaattctcctgcctcagactcccaagtacctgggattacaggtgtgtgccacca

SEQ ID NO: 38281 - DNA, 80 bp, synthetic construct
  source 1..80: mol_type = other DNA
tataagaccaccgtaggatatgtggtctgtggtttactaaaatgtcaacatgtagcacattactgcactcatatcagatt

SEQ ID NO: 38282 - DNA, 80 bp, synthetic construct; identical to SEQ ID NO: 10451
  source 1..80: mol_type = other DNA

SEQ ID NO: 38283 - DNA, 80 bp, synthetic construct
  source 1..80: mol_type = other DNA
actcctattcaacatagtgttggaagttctggccagggcaatcaggcaagagaaacaaataaagggtattcagttaggaa

SEQ ID NO: 38284 - DNA, 80 bp, synthetic construct
  source 1..80: mol_type = other DNA
taacagacagagagccaaatcatgagggaactcccattcacaattgctacaaagagaataaaatacctgggaatccaact

SEQ ID NO: 38285 - DNA, 80 bp, synthetic construct; identical to SEQ ID NO: 10452
  source 1..80: mol_type = other DNA

SEQ ID NO: 38286 - DNA, 80 bp, synthetic construct
  source 1..80: mol_type = other DNA
aataataccacacgtctacaaccatttgatctttgacaaacctgacaaaaacaagaaatggggaaaggattccctattta

SEQ ID NO: 38287 - DNA, 80 bp, synthetic construct
  source 1..80: mol_type = other DNA
ggacataggcatgggcaaggacttcatgtctaaaacaccaaaagcaatggcaacaaaagccaaaatagacaaatgggatc

SEQ ID NO: 38288 - DNA, 80 bp, synthetic construct; identical to SEQ ID NO: 10453
  source 1..80: mol_type = other DNA

SEQ ID NO: 38289 - DNA, 80 bp, synthetic construct
  source 1..80: mol_type = other DNA
gttggtgggactgtaaactagttcaaccattgtggaagacagtgtggcgattcctcaaggatctagaactagaaatacca

SEQ ID NO: 38290 - DNA, 80 bp, synthetic construct
  source 1..80: mol_type = other DNA
caatgatagactgaatttaacaaacgtggcacatatacaccatggaatactatgcagccataaaaaaggatgagttcatg

SEQ ID NO: 38291 - DNA, 80 bp, synthetic construct
  source 1..80: mol_type = other DNA
ggggtggggtgataggggagggatagcattaggagaaatacctaatgtaaatgaggagttaatgggtgcagcacaccaac

SEQ ID NO: 38292 - DNA, 80 bp, synthetic construct
  source 1..80: mol_type = other DNA
tcacgaggtcaggagatcgagaccatcctggctaacacggtgaaacccggtctctactaaaaatacaaaaaaaaaaaaaa

SEQ ID NO: 38293 - DNA, 80 bp, synthetic construct; identical to SEQ ID NO: 10454
  source 1..80: mol_type = other DNA

SEQ ID NO: 38294 - DNA, 80 bp, synthetic construct
  source 1..80: mol_type = other DNA
atctcctcatgccaagagatatttgtgtcgtcctccaagtactattgcagtatatgaaaacaataaaaatatggaaataa

SEQ ID NO: 38295 - DNA, 80 bp, synthetic construct
  source 1..80: mol_type = other DNA
agccgggcgtgatggcacgtgcctgtaaccccagctgctcagaggttgaggcaggagaatctcttgaacctgggaggtgg

SEQ ID NO: 38296 - DNA, 80 bp, synthetic construct
  source 1..80: mol_type = other DNA
tctcgttatattctgtgggtctccattcctgtgttcattgttttagcactaagtgttgggtttagaagcaggatttgtga

SEQ ID NO: 38297 - DNA, 80 bp, synthetic construct; identical to SEQ ID NO: 10455
  source 1..80: mol_type = other DNA

SEQ ID NO: 38298 - DNA, 80 bp, synthetic construct
  source 1..80: mol_type = other DNA
gatttatagagcaagccagaaagtggggaatccataaaagagagcctcaacaaacaggaggaaaaaaagcagaatagaga

SEQ ID NO: 38299 - DNA, 80 bp, synthetic construct
  source 1..80: mol_type = other DNA
gtgagtagaaggcaccaatacagtgtgagtacaatgagaactcaaagtgtcctttgagatatgaagatcagaaacttact

SEQ ID NO: 38300 - DNA, 80 bp, synthetic construct
  source 1..80: mol_type = other DNA
atcttcattctcattctccttatgtatgactttacctatattggtaagcatattgctgagcccctttcgaggttgggaac

SEQ ID NO: 38301 - DNA, 80 bp, synthetic construct; identical to SEQ ID NO: 10456
  source 1..80: mol_type = other DNA

SEQ ID NO: 38302 - DNA, 80 bp, synthetic construct
  source 1..80: mol_type = other DNA
cttaaaaaaaaaaacaaaaaacaaaaaattagccaggtgtagtggagggcgcctgtagtcccagctactcgggaggctga

SEQ ID NO: 38303 - DNA, 80 bp, synthetic construct
  source 1..80: mol_type = other DNA
gtgaaagttgtttccagagtcatcatgtaattattctctaacttgcacctgaagaaaccaagataccagttagattacca

SEQ ID NO: 38304 - DNA, 80 bp, synthetic construct
  source 1..80: mol_type = other DNA
aaccaaccatttatctcaggagatagaactcattcatactcaattactctgctcagggagcctgcagacatgcgaatgac

SEQ ID NO: 38305 - DNA, 80 bp, synthetic construct; identical to SEQ ID NO: 10457
  source 1..80: mol_type = other DNA

SEQ ID NO: 38306 - DNA, 80 bp, synthetic construct
  source 1..80: mol_type = other DNA
ccacacattcacccagggtctcacgcatggccacgtcctcattcctctcagaagtccttaattttttttttttttttttg

SEQ ID NO: 38307 - DNA, 80 bp, synthetic construct
  source 1..80: mol_type = other DNA
gtccttaatttctctgtggagaaaaatttttttaaaatatgatctcattgaagtatacaaccccaaaataaaatatagtt

SEQ ID NO: 38308 - DNA, 80 bp, synthetic construct
  source 1..80: mol_type = other DNA
atagctttcttatattaaactcttggtttttgcatcctatccatttctaccctaaattacagaggtggacttccttaaag

SEQ ID NO: 38309 - DNA, 80 bp, synthetic construct; identical to SEQ ID NO: 10458
  source 1..80: mol_type = other DNA

SEQ ID NO: 38310 - DNA, 80 bp, synthetic construct
  source 1..80: mol_type = other DNA
gggacagaggtggcctgatattatatcggaaaccaaggatttcccaattcttgagatatccttcagctcacactttcatt

SEQ ID NO: 38311 - DNA, 80 bp, synthetic construct
  source 1..80: mol_type = other DNA
gagcaaggatacaaacttcccagtttacattagaagttagcacagcctttattgcaaaacttgcgaaaaagaaaataaag

SEQ ID NO: 38312 - DNA, 80 bp, synthetic construct
  source 1..80: mol_type = other DNA
gttactcgggatgctgaggcaggagaatcgcttgaacccgggaggcggaggttgcagtgagtcgagatcgcgccactgca

SEQ ID NO: 38313 - DNA, 80 bp, synthetic construct; identical to SEQ ID NO: 10459
  source 1..80: mol_type = other DNA

SEQ ID NO: 38314 - DNA, 80 bp, synthetic construct
  source 1..80: mol_type = other DNA
tgccaccaactcttgtgtggaccaagagtctgaaagatatccttacgatagagggcgcacctgtcttaggtaaaattact

SEQ ID NO: 38315 - DNA, 80 bp, synthetic construct
  source 1..80: mol_type = other DNA
cggcagaagtgtgacgcctctacattcattgatgaaaataactttctcaatttcccagtttggaaggctttgcgtttgtc

SEQ ID NO: 38316 - DNA, 80 bp, synthetic construct
  source 1..80: mol_type = other DNA
cggtgaaaccctgtctctaccaaaaaaatagaaaaaattagccgggcgtggtgacgggcgcctgtagtcccggctactcg

SEQ ID NO: 38317 - DNA, 80 bp, synthetic construct; identical to SEQ ID NO: 10460
  source 1..80: mol_type = other DNA

SEQ ID NO: 38318 - DNA, 80 bp, synthetic construct
  source 1..80: mol_type = other DNA
aaaataaagtaaagcaatgggaaaaaaattaaaagcaaaaggaatggaggtgccggggattgaacccggggcctcgtgca

SEQ ID NO: 38319 - DNA, 80 bp, synthetic construct
  source 1..80: mol_type = other DNA
ccaaggtctattttatttagttatttctgatatctcaaatttaggttttgcgtccctctttgctgacagctgagcaaacc

SEQ ID NO: 38320 - DNA, 80 bp, synthetic construct
  source 1..80: mol_type = other DNA
ctctctcctttctttcaccgctgctttaaagggctgccagaaagccacaaagtacaaagcgaggcatttagagaccatag

SEQ ID NO: 38321 - DNA, 80 bp, synthetic construct; identical to SEQ ID NO: 10461
  source 1..80: mol_type = other DNA

SEQ ID NO: 38322 - DNA, 80 bp, synthetic construct
  source 1..80: mol_type = other DNA
gtggtgaataacagaattatccaatcctattatcagcccatctgagattaaagggacgtcaatcatacttgaatacttta

SEQ ID NO: 38323 - DNA, 80 bp, synthetic construct
  source 1..80: mol_type = other DNA
acattcttttgtagtacctgtgaaacattcatgaaaacggaccacagaagaaaacctcagtaagttccaaagtatagaaa

SEQ ID NO: 38324 - DNA, 80 bp, synthetic construct
  source 1..80: mol_type = other DNA
aaaagtgcaaatgtgacatagaatctgtgagatagagctaaagcatttatcagaaggaaatttatttcctcacataccta

SEQ ID NO: 38325 - DNA, 80 bp, synthetic construct; identical to SEQ ID NO: 10462
  source 1..80: mol_type = other DNA

SEQ ID NO: 38326 - DNA, 80 bp, synthetic construct
  source 1..80: mol_type = other DNA
aatagtttaacaggcatactcaataaaaagggcaccaagctcaaatactttcataaagaaatcctaccaaactgtcaaat

SEQ ID NO: 38327 - DNA, 80 bp, synthetic construct
  source 1..80: mol_type = other DNA
agcaaacagaatacaatagcacatttaaaacagtaatacaggatgtccaagtagggtttattccaggagtgtaaagatca

SEQ ID NO: 38328 - DNA, 80 bp, synthetic construct
  source 1..80: mol_type = other DNA
tagataccagggtcagggaagggtgtgtgcattggagctgcgtacaaaggcaggttggtcaatgtgtacaaacatataat

SEQ ID NO: 38329 - DNA, 80 bp, synthetic construct; identical to SEQ ID NO: 10463
  source 1..80: mol_type = other DNA

SEQ ID NO: 38330 - DNA, 80 bp, synthetic construct
  source 1..80: mol_type = other DNA
ttagtcttttcatagagtactggtgggaatggaaaatggtataattccaagggcagaaaatttgcagtatctagaaaaaa

SEQ ID NO: 38331 - DNA, 80 bp, synthetic construct
  source 1..80: mol_type = other DNA
gaccagcctggtcaacacagtgaaaccctgcctctactaaaaatacaaaaagtagtcaggtgtagtggcgggcacttgta

SEQ ID NO: 38332 - DNA, 80 bp, synthetic construct
  source 1..80: mol_type = other DNA
ggaaaacagatgcatgactattcatcacaactctatttgtaaagcaaaagaaggaaacaatccaggccgggtgcggtggc

SEQ ID NO: 38333 - DNA, 80 bp, synthetic construct; identical to SEQ ID NO: 10464
  source 1..80: mol_type = other DNA

SEQ ID NO: 38334 - DNA, 80 bp, synthetic construct
  source 1..80: mol_type = other DNA
gggtaatcactctcctacaattaccccatgcttatgtatgttaaataaattttgtatgtctttttcttttattaatctgc

SEQ ID NO: 38335 - DNA, 80 bp, synthetic construct
  source 1..80: mol_type = other DNA
tacaagccaagaggatttcagactactgcacttcatccactgagtgttcagcatctagaacttttcttccacaaagagaa

SEQ ID NO: 38336 - DNA, 80 bp, synthetic construct
  source 1..80: mol_type = other DNA
ctggccaacatggcgaaaacccatctctactaaaaatacaaaaaaaatagctgggcctggtggtgtgtgcctataattcc

SEQ ID NO: 38337 - DNA, 80 bp, synthetic construct; identical to SEQ ID NO: 10465
  source 1..80: mol_type = other DNA

SEQ ID NO: 38338 - DNA, 80 bp, synthetic construct
  source 1..80: mol_type = other DNA
aggtaggaggaacccttttggagtcaggacaaatatcaaatacttacatcagaaactattccatttaaggagctacattt

SEQ ID NO: 38339 - DNA, 80 bp, synthetic construct
  source 1..80: mol_type = other DNA
ataccaaaaactgcatcaccacgaagactaatgtcagaggattagcactcttgggagtgaaatatccagggttatataat

SEQ ID NO: 38340 - DNA, 80 bp, synthetic construct
  source 1..80: mol_type = other DNA
gcggatcacgagttcaggagatcgagaccatcgtggctaacacggtgaaaccccgtctctactaaaaaaaatgaaaaaaa

SEQ ID NO: 38341 - DNA, 80 bp, synthetic construct
  source 1..80: mol_type = other DNA
gcctggtcaagggagcaaaactccgactcaaaaaaagaaaaaagaaaagaaaaaagaaaaaagtactcagcaaactagga

SEQ ID NO: 38342 - DNA, 80 bp, synthetic construct; identical to SEQ ID NO: 10466
  source 1..80: mol_type = other DNA

SEQ ID NO: 38343 - DNA, 80 bp, synthetic construct
  source 1..80: mol_type = other DNA
gaggcagggttcacttgaacccgggaggtggaggttgcaatgagccgagatcacaccattgtactccagcatggggacaa

SEQ ID NO: 38344 - DNA, 80 bp, synthetic construct
  source 1..80: mol_type = other DNA
cctgttacaactaataaacaactttagaaaagtagcagggtataaaatgaacacacaaaaatcagttgcatttctacaaa

SEQ ID NO: 38345 - DNA, 80 bp, synthetic construct
  source 1..80: mol_type = other DNA
taaatggaaaggcatcctgtgcttgtggagtggaagactttaatactgtgaataagtacatattatccaacgtgatctac

SEQ ID NO: 38346 - DNA, 80 bp, synthetic construct; identical to SEQ ID NO: 10467
  source 1..80: mol_type = other DNA

SEQ ID NO: 38347 - DNA, 80 bp, synthetic construct
  source 1..80: mol_type = other DNA
gcttgaacccggcaggcagaggttgcagtgagctgagatcatgccaatgcaccctagcctgggtgacaggtgacagagca

SEQ ID NO: 38348 - DNA, 80 bp, synthetic construct
  source 1..80: mol_type = other DNA
gtaaacagtattggaaaaagtggttatctacatgcaaaataatgaattggaccttatctttatacatatacaaaaaaaat

SEQ ID NO: 38349 - DNA, 80 bp, synthetic construct
  source 1..80: mol_type = other DNA
ccaaacttaaaaatttccgcacatcaaaggaaacaatcaaaaaagtgaaaacacaacctatggaacaggaggaaaatgtt

SEQ ID NO: 38350 - DNA, 80 bp, synthetic construct; identical to SEQ ID NO: 10468
  source 1..80: mol_type = other DNA

SEQ ID NO: 38351 - DNA, 80 bp, synthetic construct
  source 1..80: mol_type = other DNA
ttcatccacagttactggttcataacttccatctcccttgttacagtcttttgttataatgttgtgtgtgttaggcctca

SEQ ID NO: 38352 - DNA, 80 bp, synthetic construct
  source 1..80: mol_type = other DNA
cagtctcataccctggaggaaggaatgcttccatacaaacccaagaagactgggttcaaagacctccagatagctgaacc

SEQ ID NO: 38353 - DNA, 80 bp, synthetic construct
  source 1..80: mol_type = other DNA
cttaacccaaagaggaggttgtaggaaccccaaattgaaaccagtcagtcaagaagtcccagagacccagacttgcaact

SEQ ID NO: 38354 - DNA, 80 bp, synthetic construct; identical to SEQ ID NO: 10469
  source 1..80: mol_type = other DNA

SEQ ID NO: 38355 - DNA, 80 bp, synthetic construct
  source 1..80: mol_type = other DNA
ctagccaagaggtaaaagcaaaacaaatgtcaattgacagatgaatggatataccaaatgtggtatatacatacaacaga

SEQ ID NO: 38356 - DNA, 80 bp, synthetic construct
  source 1..80: mol_type = other DNA
aaggtagaaaggtggttgccaaggactggctggaagggagaggagaattagcgtttgttgggcatagagtttcagtgttg

SEQ ID NO: 38357 - DNA, 80 bp, synthetic construct
  source 1..80: mol_type = other DNA
cagtcaggcgcggtggctcatgcctgtaatcccagcactttgagaggccaaggcgggcgaatcacttgacgctaggagtt

SEQ ID NO: 38358 - DNA, 80 bp, synthetic construct; identical to SEQ ID NO: 10470
  source 1..80: mol_type = other DNA

SEQ ID NO: 38359 - DNA, 80 bp, synthetic construct
  source 1..80: mol_type = other DNA
gattagagtggaaactaatgaaatagaaaaacaataaataaataaataaaataaaatatttatttcttaaaaaggtaaac

SEQ ID NO: 38360 - DNA, 80 bp, synthetic construct
  source 1..80: mol_type = other DNA
agtttgggaccagcctggccaacatggtgaaaccccatttctactaaaaatacaaaaattaggtaggtatggtggtaccc

SEQ ID NO: 38361 - DNA, 80 bp, synthetic construct
  source 1..80: mol_type = other DNA
aatagagtgaaaacaagatggccaaataggaacagctctggtctgcagctcccagcgtgattgccacagaagataggtga

SEQ ID NO: 38362 - DNA, 80 bp, synthetic construct; identical to SEQ ID NO: 10471
  source 1..80: mol_type = other DNA

SEQ ID NO: 38363 - DNA, 80 bp, synthetic construct
  source 1..80: mol_type = other DNA
cttattgggtggagtccaccacagctcaaggaggcctgcctgcctttgtagactccacctctggggggcagggcatagct

SEQ ID NO: 38364 - DNA, 80 bp, synthetic construct
  source 1..80: mol_type = other DNA
tcccagtaggggccgactaacacctcatacagccaggtgcccctctgagacgaagcttccagaagaaggatcaggcagta

SEQ ID NO: 38365 - DNA, 80 bp, synthetic construct
  source 1..80: mol_type = other DNA
acaacaaggacatccacaccaaaagcccatctgtaggtcaccatcatcaaagaccaaaggcagataaaaccacaaagatg

SEQ ID NO: 38366 - DNA, 80 bp, synthetic construct
  source 1..80: mol_type = other DNA
tctccgagctaaaggaggcggtttgaacccatcataaggaagctaaaaaccttgaaaaaagattagacaaatggctaact

SEQ ID NO: 38367 - DNA, 80 bp, synthetic construct; identical to SEQ ID NO: 10472
  source 1..80: mol_type = other DNA

SEQ ID NO: 38368 - DNA, 80 bp, synthetic construct
  source 1..80: mol_type = other DNA
tggagcttgcagtgagccaagatggcaccactgccctccagcctcggtgacacagtgagactctgtctcaaaaaaaaata

SEQ ID NO: 38369 - DNA, 80 bp, synthetic construct
  source 1..80: mol_type = other DNA
cttccccaacctagtaaggcaggccaacattcaaattcaggaaatacagagaacaccacaaagatactcctcgagaaaaa

SEQ ID NO: 38370 - DNA, 80 bp, synthetic construct
  source 1..80: mol_type = other DNA
gccaatatttatcattcttaaagaaaagaattttcaacctagaatttcatatccagccaaactaagcttcataattgaag

SEQ ID NO: 38371 - DNA, 80 bp, synthetic construct
  source 1..80: mol_type = other DNA
aagaaactgcatcaactaatgggcaaaataaccagctaacatcatgacaggatcaaattcacacataacaatattaacct

SEQ ID NO: 38372 - DNA, 80 bp, synthetic construct; identical to SEQ ID NO: 10473
  source 1..80: mol_type = other DNA

SEQ ID NO: 38373 - DNA, 80 bp, synthetic construct
  source 1..80: mol_type = other DNA
gactttaacaccccactgtcaatattagacagatcaatgagacagaaggttaacaaggatattcaggacttgaactcagc

SEQ ID NO: 38374 - DNA, 80 bp, synthetic construct
  source 1..80: mol_type = other DNA
aactgtctctcagaccacagtgcaatcaaattagaactcaggattaagaacctcattcaaaactgcacaactacatggaa

SEQ ID NO: 38375 - DNA, 80 bp, synthetic construct
  source 1..80: mol_type = other DNA
cacaagggaaagcaggaaagatctaaaatcgacatcctaacatcacaatgaaaagaactagagaagcaagagcaaacaca

SEQ ID NO: 38376 - DNA, 80 bp, synthetic construct; identical to SEQ ID NO: 10474
  source 1..80: mol_type = other DNA

SEQ ID NO: 38377 - DNA, 80 bp, synthetic construct
  source 1..80: mol_type = other DNA
cctaccaaccaaaaaaagtccaggaccagacggattcacagcagaattctaccacaggtacaaagaggagctagtccgat

SEQ ID NO: 38378 - DNA, 80 bp, synthetic construct
  source 1..80: mol_type = other DNA
taaaatacaggcaaaccaaatcgagcagcacatcaaaaagcttatccaccaagaacaagttggcttcatccctgggatac

SEQ ID NO: 38379 - DNA, 80 bp, synthetic construct
  source 1..80: mol_type = other DNA
gacgtatctcaaaataataagagctgtttatgccaaacccacagccaatatcatattgaatgggcaaaaactggaagcat

SEQ ID NO: 38380 - DNA, 80 bp, synthetic construct; identical to SEQ ID NO: 10475
  source 1..80: mol_type = other DNA

SEQ ID NO: 38381 - DNA, 80 bp, synthetic construct
  source 1..80: mol_type = other DNA
aaaccactgctcaacaaaataaaagaggacacaaacaaatggaagaacattccatgctcatggataggaagaatcaatat

SEQ ID NO: 38382 - DNA, 80 bp, synthetic construct
  source 1..80: mol_type = other DNA
aaagctggaggcatcacgctacctgacttcaaactatactacgtggttacagtaaccaaaacagatggtactggtaccaa

SEQ ID NO: 38383 - DNA, 80 bp, synthetic construct; identical to SEQ ID NO: 10476
  source 1..80: mol_type = other DNA

SEQ ID NO: 38384 - DNA, 80 bp, synthetic construct
  source 1..80: mol_type = other DNA
ccatcagagtgaacaggcaacctacagaatgggagtaaatttttgcaatctacccatctgacaaagggctaatatccaga

SEQ ID NO: 38385 - DNA, 80 bp, synthetic construct
  source 1..80: mol_type = other DNA
tcaaaaccacaatgagataccatctcacaccagttagaatggtgatcattaaaaagtcaggaaacaacaggtgctggaga

SEQ ID NO: 38386 - DNA, 80 bp, synthetic construct
  source 1..80: mol_type = other DNA
tatgctactataaagacacatgcacacatatgtttattgcggcactattcacaatagcaaagacttggaacaacccaaat

SEQ ID NO: 38387 - DNA, 80 bp, synthetic construct; identical to SEQ ID NO: 10477
  source 1..80: mol_type = other DNA

SEQ ID NO: 38388 - DNA, 80 bp, synthetic construct
  source 1..80: mol_type = other DNA
agaataaaatatttccccccttagacctgagccctgatagtatttatttatatttctgaccccctactacagcttcttac

SEQ ID NO: 38389 - DNA, 80 bp, synthetic construct
  source 1..80: mol_type = other DNA
tcactatgcctggctaattttttgtatttttagtagagaaggggttttgccatattggccaggctggtctcaaactcctg

SEQ ID NO: 38390 - DNA, 80 bp, synthetic construct
  source 1..80: mol_type = other DNA
cagacctgccaaagtctcaaccaacaccatagggagcactggattacatatggcctatactcctgtggtgccaaaacgac

SEQ ID NO: 38391 - DNA, 80 bp, synthetic construct; identical to SEQ ID NO: 10478
  source 1..80: mol_type = other DNA

SEQ ID NO: 38392 - DNA, 80 bp, synthetic construct
  source 1..80: mol_type = other DNA
gctcactgcaagctccgctttctgggttcatgccattttcctgcctcagactcccaagtagctgggactacaggtgcctg

SEQ ID NO: 38393 - DNA, 80 bp, synthetic construct
  source 1..80: mol_type = other DNA
tttcttctaaattattttccactttactaatactcttttcagttgtgtcaagtttgttgttaatttatccttcaagttct

SEQ ID NO: 38394 - DNA, 80 bp, synthetic construct
  source 1..80: mol_type = other DNA
taatttccaaatctgaagtttagtagattctatttctggtatctgtcatttctttttctttctttcctttcttttctctt

SEQ ID NO: 38395 - DNA, 80 bp, synthetic construct; identical to SEQ ID NO: 10479
  source 1..80: mol_type = other DNA

SEQ ID NO: 38396 - DNA, 80 bp, synthetic construct
  source 1..80: mol_type = other DNA
ggcagccctaggtttctgtttttgttcctctaaccctatgaggctatcagaaacatagataagtctcttggcttctacat

SEQ ID NO: 38397 - DNA, 80 bp, synthetic construct
  source 1..80: mol_type = other DNA
tgttgtctttaccagggggattatctgaattacctagacatccattatctggaacagagttctgtctctcttcacttgtc

SEQ ID NO: 38398 - DNA, 80 bp, synthetic construct
  source 1..80: mol_type = other DNA
agacaagattgaaaacctaacttaggaatatgtgcctataacaatagctgagtcttggccaatcccagtggctgtaattc

SEQ ID NO: 38399 - DNA, 80 bp, synthetic construct
  source 1..80: mol_type = other DNA
ggctggagtgcagtggctcgatctcagctcactgaaacctctgcctcccgggttcaagcaattctcctggctcagcctcc

SEQ ID NO: 38400 - DNA, 80 bp, synthetic construct; identical to SEQ ID NO: 10480
  source 1..80: mol_type = other DNA

SEQ ID NO: 38401 - DNA, 80 bp, synthetic construct
  source 1..80: mol_type = other DNA
aggtgtgagtgagcctataccaacaaggtcaggctcaaacctagccattttcttccaaagtgttaaccacagtattaaat

SEQ ID NO: 38402 - DNA, 80 bp, synthetic construct
  source 1..80: mol_type = other DNA
ggatcacctgaggtcgggagtttgagacaagcctgaccaacatggagaaaccccgtctctactaaaaatacaaaattagc

SEQ ID NO: 38403 - DNA, 80 bp, synthetic construct
  source 1..80: mol_type = other DNA
aagagatataatccagtaccttatatctgtgctacaccctcatactgtagactttgtatgactgtacgatgctcttcttt

SEQ ID NO: 38404 - DNA, 80 bp, synthetic construct
  source 1..80: mol_type = other DNA
tttcccctaaatctttagcaagcacttgttggattagtgaatctttgcccttgcgtgcaagtcagaggatggcagctcaa

SEQ ID NO: 38405 - DNA, 80 bp, synthetic construct; identical to SEQ ID NO: 10481
  source 1..80: mol_type = other DNA

SEQ ID NO: 38406 - DNA, 80 bp, synthetic construct
  source 1..80: mol_type = other DNA
actatccttttgccaacatctactcagatgactggactaatacagtcatgcctagatcaacctcagggatatgatctgaa

SEQ ID NO: 38407 - DNA, 80 bp, synthetic construct
  source 1..80: mol_type = other DNA
ggcaatggaacacacagatacgtatttgtgtacttaaacacaggaaagatacagtaaaaatatggtattatagtcttata

SEQ ID NO: 38408 - DNA, 80 bp, synthetic construct
  source 1..80: mol_type = other DNA
aggttgttcatacatattatatgctattataaggtattttaaactaccatgaacaccacaataaaacatgggaaaatgtt

SEQ ID NO: 38409 - DNA, 80 bp, synthetic construct; identical to SEQ ID NO: 10482
  source 1..80: mol_type = other DNA

SEQ ID NO: 38410 - DNA, 80 bp, synthetic construct
  source 1..80: mol_type = other DNA
ataaccctccaaaaaactaaaactatagcaaggcttcagttttccacctccagtaccatttgcgcatttacaaatggatt

SEQ ID NO: 38411 - DNA, 80 bp, synthetic construct
  source 1..80: mol_type = other DNA
tctatatctgtgctgtccacctggtaggtatgacatgccacgtgtggctattgagcattgaaatgggaatagtacaacag

SEQ ID NO: 38412 - DNA, 80 bp, synthetic construct
  source 1..80: mol_type = other DNA
attctcaaaatctgagaaagcaacacaaatttatggtcttctttaaatcaacatttgaaaacaccatcgcaaaattacaa

SEQ ID NO: 38413 - DNA, 80 bp, synthetic construct; identical to SEQ ID NO: 10483
  source 1..80: mol_type = other DNA

SEQ ID NO: 38414 - DNA, 80 bp, synthetic construct
  source 1..80: mol_type = other DNA
tgtggcccccatccagaaattaagccaacacaagaggacagcttcgactccctctgatttcatctccgacccgactaatc

SEQ ID NO: 38415 - DNA, 80 bp, synthetic construct
  source 1..80: mol_type = other DNA
aactcattgggtggttacacattttcaaattttcagagctttccttagactaaaactttaccatcagtcctaaggtagta

SEQ ID NO: 38416 - DNA, 80 bp, synthetic construct
  source 1..80: mol_type = other DNA
tggccacgtggttcaaccagaagatccgcagaatcaaggcccggcaagccaaagggcgctgcatcgccccgcgcccggag

SEQ ID NO: 38417 - DNA, 80 bp, synthetic construct; identical to SEQ ID NO: 10484
  source 1..80: mol_type = other DNA

SEQ ID NO: 38418 - DNA, 80 bp, synthetic construct
  source 1..80: mol_type = other DNA
aatgcttggcggcaatgctcggctcttcggcatatgggcaaaaagagccaaggaagctgaaaaacaggatgtgtgaaagc

SEQ ID NO: 38419 - DNA, 80 bp, synthetic construct
  source 1..80: mol_type = other DNA
ggagaaataacacaagatttaggaactatgccaacgtttacgaccccaggtctagaggtcaagccgtgcacttggtctct

SEQ ID NO: 38420 - DNA, 80 bp, synthetic construct
  source 1..80: mol_type = other DNA
aatgttgctgcagactccttacagataactgccaccgctaatatgttgagatgttcacacatgcatgtgtgaggcccttc

SEQ ID NO: 38421 - DNA, 80 bp, synthetic construct; identical to SEQ ID NO: 10485
  source 1..80: mol_type = other DNA

SEQ ID NO: 38422 - DNA, 80 bp, synthetic construct
  source 1..80: mol_type = other DNA
gaaacccccgtttccactaaaaaaaaaaaaattagccgggcatggtggtgcatcatgcctgtaattccagctactcggga

SEQ ID NO: 38423 - DNA, 80 bp, synthetic construct
  source 1..80: mol_type = other DNA
aaaaaaaaaaaagcctacaaaaagcttacaaagtctaaaatcggacgaacaagaggacacctgatgggggaaaagaaaag

SEQ ID NO: 38424 - DNA, 80 bp, synthetic construct
  source 1..80: mol_type = other DNA
ttgcttgatcttcgataatactgggaaatgtaaccaatgtgattgggcttgttaatttggtgccttgcttgtttttcggg

SEQ ID NO: 38425 - DNA, 80 bp, synthetic construct; identical to SEQ ID NO: 10486
  source 1..80: mol_type = other DNA

SEQ ID NO: 38426 - DNA, 80 bp, synthetic construct
  source 1..80: mol_type = other DNA
ttatcggtcgtgccaagaagcatattttgtcgaacttaattttgaattcgctatactggatattgtttcctgactgcgct

SEQ ID NO: 38427 - DNA, 80 bp, synthetic construct
  source 1..80: mol_type = other DNA
tgattctgcttggaaaggttgccaggaaaccgcgagcataacgcagaaagataaaacgaaagccctaaacgccgccgtgg

SEQ ID NO: 38428 - DNA, 80 bp, synthetic construct
  source 1..80: mol_type = other DNA
gagatgcgcactgggaagagaaaagagccaggacgcacctgcatttatggcgccatcgcccgggcggaatcctccacgga

SEQ ID NO: 38429 - DNA, 80 bp, synthetic construct; identical to SEQ ID NO: 10487
  source 1..80: mol_type = other DNA

SEQ ID NO: 38430 - DNA, 80 bp, synthetic construct
  source 1..80: mol_type = other DNA
gaaatgccatactgtatacgtacaatgcataggccaaaggcgaccctatgacccagagattagaaagactcggacgtctt

SEQ ID NO: 38431 - DNA, 80 bp, synthetic construct
  source 1..80: mol_type = other DNA
tgatcttccaattaaagtaggtgataagaccgtcaattcagaggggagaaaatgtacttggaggaaataaacgaagacac

SEQ ID NO: 38432 - DNA, 80 bp, synthetic construct
  source 1..80: mol_type = other DNA
ctaagcataaaaatataggaagtcctcacttattgtcagttggtttttggaaactattactttaagcaaaataaaactaa

SEQ ID NO: 38433 - DNA, 80 bp, synthetic construct
  source 1..80: mol_type = other DNA
aatatgagctgcacctcaagttaagatcagcaaaaacgacatgattgatttatttttggtgaatcagtgactgcaattct

SEQ ID NO: 38434 - DNA, 80 bp, synthetic construct; identical to SEQ ID NO: 10488
  source 1..80: mol_type = other DNA

SEQ ID NO: 38435 - DNA, 80 bp, synthetic construct
  source 1..80: mol_type = other DNA
cgtagtgtaaacccaaagaacaatcaagatccatcgcagagagcgaaaaatcacttccgcaccgtgggaaaaagcccgaa

SEQ ID NO: 38436 - DNA, 80 bp, synthetic construct
  source 1..80: mol_type = other DNA
ctgagctagacacaaaagttctccaagtccccaccagagtagctagatacagagtgtccattagtgaattcacaaaccct

SEQ ID NO: 38437 - DNA, 80 bp, synthetic construct
  source 1..80: mol_type = other DNA
gagctagacacagggtgccgattggtgtgtttacaaaccttgagctagatacagagtgccgattggtgtatttataatcc

SEQ ID NO: 38438 - DNA, 80 bp, synthetic construct; identical to SEQ ID NO: 10489
  source 1..80: mol_type = other DNA

SEQ ID NO: 38439 - DNA, 80 bp, synthetic construct
  source 1..80: mol_type = other DNA
cccggaactcgcgctgggcccgcaagcgccgcgcgcagcctcggttcccgcctgcgcttctccctccacacatccctgca

SEQ ID NO: 38440 - DNA, 80 bp, synthetic construct
  source 1..80: mol_type = other DNA
tctcagtatggcggctggctgttttagcaccatgtcgtttattgtcatgcatttgtaggattatgaaatgcttcctgaat

SEQ ID NO: 38441 - DNA, 80 bp, synthetic construct
  source 1..80: mol_type = other DNA
cacacacacactcacacatatgctcgcgtgctctttcactcagactgatgacgctagactcagactagatatgctaatga

SEQ ID NO: 38442 - DNA, 80 bp, synthetic construct; identical to SEQ ID NO: 10490
  source 1..80: mol_type = other DNA

SEQ ID NO: 38443 - DNA, 80 bp, synthetic construct
  source 1..80: mol_type = other DNA
ttagtggaaatgggggtttctccatgttggccaggctggtctcaaactcctgacctcaggtgatccaccagcttcagccc

SEQ ID NO: 38444 - DNA, 80 bp, synthetic construct
  source 1..80: mol_type = other DNA
tgcaggagtccccaaaggtgaaaatttacctgcgggagttaataaaaacaggaatccccaggccttaccccagagactga

SEQ ID NO: 38445 - DNA, 80 bp, synthetic construct
  source 1..80: mol_type = other DNA
aaaatctagccacaacagaaactgaaactaggatctggggaaagttaacaaggggaggagaaagattggaaagtattaca

SEQ ID NO: 38446 - DNA, 80 bp, synthetic construct; identical to SEQ ID NO: 10491
  source 1..80: mol_type = other DNA

SEQ ID NO: 38447 - DNA, 80 bp, synthetic construct
  source 1..80: mol_type = other DNA
tcttacattctttctgccaatcttgtgtgagactccttgagtagggtggaaggaaagaactatacaggtctataacgtct

SEQ ID NO: 38448 - DNA, 80 bp, synthetic construct
  source 1..80: mol_type = other DNA
atatcatggatctgagttgacaaatggtttaaagtacctctgacattactctcttcatcagggaaataggtgcaacagtt

SEQ ID NO: 38449 - DNA, 80 bp, synthetic construct
  source 1..80: mol_type = other DNA
tattttatagggagaggtatctgactggttgttgactgcttctggagttgcagctcagtctagaaagacattaccagctg

SEQ ID NO: 38450 - DNA, 80 bp, synthetic construct
  source 1..80: mol_type = other DNA
tgcaagttccgcctcctgggttcacgccattctcctgcctcagcttcctgagtagctgggactacaggcgcccgccacca

SEQ ID NO: 38451 - DNA, 80 bp, synthetic construct; identical to SEQ ID NO: 10492
  source 1..80: mol_type = other DNA

SEQ ID NO: 38452 - DNA, 80 bp, synthetic construct
  source 1..80: mol_type = other DNA
tatggcagttatcatggcaccaccctccagtactataaaactaatccagtatggaggcatattccagctcagcttcaggt

SEQ ID NO: 38453 - DNA, 80 bp, synthetic construct
  source 1..80: mol_type = other DNA
gtgctagtgggtgactcatttaaagtttgtatggctttatggagattcttagtccaggaacttaaagagccaacctgaaa

SEQ ID NO: 38454 - DNA, 80 bp, synthetic construct
  source 1..80: mol_type = other DNA
atctcggctcactgcaacctccgcctcccggattaaagcaattctcccacctcagtctcccaagtagctgggactacacg

SEQ ID NO: 38455 - DNA, 80 bp, synthetic construct; identical to SEQ ID NO: 10493
  source 1..80: mol_type = other DNA

SEQ ID NO: 38456 - DNA, 80 bp, synthetic construct
  source 1..80: mol_type = other DNA
aaattcatccctgtgacatctctggtgattactaatacagcagtagagtctgtatgcttgggcttgtttcaccaatattt

SEQ ID NO: 38457 - DNA, 80 bp, synthetic construct
  source 1..80: mol_type = other DNA
gagtagactactatgctatcttatcaatgacggctttgggtatgtttcacatcttacccaaccaggtaactctcaggaat

SEQ ID NO: 38458 - DNA, 80 bp, synthetic construct
  source 1..80: mol_type = other DNA
tatcattaatatagtgaaacagggagaccaaggcaggcaaagagattatagacagctcctgtgtaaccatactgtgagag

SEQ ID NO: 38459 - DNA, 80 bp, synthetic construct; identical to SEQ ID NO: 10494
  source 1..80: mol_type = other DNA

SEQ ID NO: 38460 - DNA, 80 bp, synthetic construct
  source 1..80: mol_type = other DNA
ttacctgcaaggatacaggtgcatatttggcctatcccctttttgctttctctgtggacctgatcgttatttttatccag

SEQ ID NO: 38461 - DNA, 80 bp, synthetic construct
  source 1..80: mol_type = other DNA
cgtggagtctgtcccttctgatgttcagatgtgtccgcagtttcttttttctggtggggtcgtggtcttgctagctcagg

SEQ ID NO: 38462 - DNA, 80 bp, synthetic construct
  source 1..80: mol_type = other DNA
cctgcttttattcttttatctggccccacccacatcctgctgattggtagagccgagtggcctgttttgtcagggcgctg

SEQ ID NO: 38463 - DNA, 80 bp, synthetic construct; identical to SEQ ID NO: 10495
  source 1..80: mol_type = other DNA

SEQ ID NO: 38464 - DNA, 80 bp, synthetic construct
  source 1..80: mol_type = other DNA
cacggaggggggtgggaggctcaggcatggcgggctgcaggtcccgagccctgccccgtgggaaggcagccaaggcccgg

SEQ ID NO: 38465 - DNA, 80 bp, synthetic construct
  source 1..80: mol_type = other DNA
ctccagctggcccgcaagtgcggcacacagccctggttcccgctcgtgtctctccctccacacctccctgcaagctgaag

SEQ ID NO: 38466 - DNA, 80 bp, synthetic construct
  source 1..80: mol_type = other DNA
accaatgccctatattataaatgccattttttgaattggaaatgatccagacattcaacaagtacttaaaacaattttaa

SEQ ID NO: 38467 - DNA, 80 bp, synthetic construct
  source 1..80: mol_type = other DNA
caggtgttcacctaggcaagaactttaaagttaaacacatgggcatttttgccaataactcaggaattttagctgttttc

SEQ ID NO: 38468 - DNA, 80 bp, synthetic construct; identical to SEQ ID NO: 10496
  source 1..80: mol_type = other DNA

SEQ ID NO: 38469 - DNA, 80 bp, synthetic construct
  source 1..80: mol_type = other DNA
tttaagcatgtatctatacacacaaaccaatatccaacagcttttacttggaactctagccatgagacaacatcataaat

SEQ ID NO: 38470 - DNA, 80 bp, synthetic construct
  source 1..80: mol_type = other DNA
aaagtagctgggagtggtggcgcacccctgtaatcccagcttctcaagaggctcaggcaggagaatcacttgaacttggg

SEQ ID NO: 38471 - DNA, 80 bp, synthetic construct
  source 1..80: mol_type = other DNA
tgtttgcactgataggtaatccaataaagactgtggaacacaattttgggtaaagcagtttctataccagtttgattttt

SEQ ID NO: 38472 - DNA, 80 bp, synthetic construct
  source 1..80: mol_type = other DNA
atttgagtgttggggtgatcagacccaacaccaggtcgtgggggcgacaaagtcctgcagagtcacagaaatgagaaaaa

SEQ ID NO: 38473 - DNA, 80 bp, synthetic construct; identical to SEQ ID NO: 10497
  source 1..80: mol_type = other DNA

SEQ ID NO: 38474 - DNA, 80 bp, synthetic construct
  source 1..80: mol_type = other DNA
gtggtggtgggttcctgtaatcccagctactcgggaggctgaggcaggaaaagagcttgaacccgggaggcggaggctgt

SEQ ID NO: 38475 - DNA, 80 bp, synthetic construct
  source 1..80: mol_type = other DNA
tttttgttgtaatttccccatcagttaaaaaatgtgcacaagaaagggccatacataataggtaaccagctggagtccta

SEQ ID NO: 38476 - DNA, 80 bp, synthetic construct
  source 1..80: mol_type = other DNA
ctttgatatcttagcctcttgcaatatgcgcttagtccccgccacattttctgaatatccctatacttcctcagcagtcc

SEQ ID NO: 38477 - DNA, 80 bp, synthetic construct; identical to SEQ ID NO: 10498
  source 1..80: mol_type = other DNA

SEQ ID NO: 38478 - DNA, 80 bp, synthetic construct
  source 1..80: mol_type = other DNA
ctgggttcaagtgattctcctgcctcagcctcccgggtagctgggattacaggcacccgccaccccatcctgctaatatt

SEQ ID NO: 38479 - DNA, 80 bp, synthetic construct
  source 1..80: mol_type = other DNA
tttgtctactgtgtttgagtgatgagactgtttttcttagtaggttcctagatactctcccggatgtttgggttcttagg

SEQ ID NO: 38480 - DNA, 80 bp, synthetic construct
  source 1..80: mol_type = other DNA
aagaggaaacccatgaggtgagaggcagcgtgctgggtagtggagcctcaaggatgctcaggatttggatgctcagatct

SEQ ID NO: 38481 - DNA, 80 bp, synthetic construct; identical to SEQ ID NO: 10499
  source 1..80: mol_type = other DNA

SEQ ID NO: 38482 - DNA, 80 bp, synthetic construct
  source 1..80: mol_type = other DNA
aggtgcatctcttaaactgtatgtttgaagttcgttagtcacatacagctgctctttgaaactgtcataaggaagccaac

SEQ ID NO: 38483 - DNA, 80 bp, synthetic construct
  source 1..80: mol_type = other DNA
caacaacaaaaaaagacaagacagaccacagacaaatgtgtacactttacaagattctcaagacaacaacagcaacaaag

SEQ ID NO: 38484 - DNA, 80 bp, synthetic construct
  source 1..80: mol_type = other DNA
tttcctgggcacgctctttatagcatatgcagctgactcttctgctactggcacactgctattggataaaaagaagtctt

SEQ ID NO: 38485 - DNA, 80 bp, synthetic construct
  source 1..80: mol_type = other DNA
tgtaatcccagctgctagggaggctgaggcaggagaatcgcttgaacctgggagatggaggttgctgtgagccgagattg

SEQ ID NO: 38486 - DNA, 80 bp, synthetic construct; identical to SEQ ID NO: 10500
  source 1..80: mol_type = other DNA

SEQ ID NO: 38487 - DNA, 80 bp, synthetic construct
  source 1..80: mol_type = other DNA
ggtctaaactagcagagacttgagtgacaaaaaacaaagaaggaacctatttgaactggagaaagaaggtggatgctgca

SEQ ID NO: 38488 - DNA, 80 bp, synthetic construct
  source 1..80: mol_type = other DNA
tttatttgtgggaagtaggatggtatccagaaggggatgaagctgtttggttttggacaagaatttaaaatacttaaagg

SEQ ID NO: 38489 - DNA, 80 bp, synthetic construct
  source 1..80: mol_type = other DNA
tataaattgatgtaacccacgtgagaggaaaatgtgaatataaaaatgcaaagccctaacatttactcacacacatacac

SEQ ID NO: 38490 - DNA, 80 bp, synthetic construct
  source 1..80: mol_type = other DNA
gaagacacaggatgcaaagtacaagtggaagagaaagtggggatggagccaaagttgagacaaaaaagggggcagaaata

SEQ ID NO: 38491 - DNA, 80 bp, synthetic construct; identical to SEQ ID NO: 10501
  source 1..80: mol_type = other DNA

SEQ ID NO: 38492 - DNA, 80 bp, synthetic construct
  source 1..80: mol_type = other DNA
ggtgacctgattccaattcattaaaaaggtgagccacatatattctttcaacagtaagtgtcccaatgctgatgatgaag

SEQ ID NO: 38493 - DNA, 80 bp, synthetic construct
  source 1..80: mol_type = other DNA
tatgtatgtgtattgcatcaaacacttataatgtgtcttgtacaggttccagtttccagttatttaaagggattaagaac

SEQ ID NO: 38494 - DNA, 80 bp, synthetic construct
  source 1..80: mol_type = other DNA
agtttttacatttgtccttgtacttgttcatcatggcgatattatgttttgttaatggttgctgcatagatagggcgcag

SEQ ID NO: 38495 - DNA, 80 bp, synthetic construct; identical to SEQ ID NO: 10502
  source 1..80: mol_type = other DNA

SEQ ID NO: 38496 - DNA, 80 bp, synthetic construct
  source 1..80: mol_type = other DNA
aaaatgcaaaaattagccgggtgtggtggcgcatgcctgtagtctcagccattcgtgaggttgaggcaagagaattgctt

SEQ ID NO: 38497 - DNA, 80 bp, synthetic construct
  source 1..80: mol_type = other DNA
gctgtatctttaggcaatctttgcagtttttgcagtagatgttaagctacctttctaaaatgcagtgggacattttgttg

SEQ ID NO: 38498 - DNA, 80 bp, synthetic construct
  source 1..80: mol_type = other DNA
tcaatgtcccttcctcatcgatgtccctgggttcctgagcaaagcctaaagtaagacactctaaaaattttgactgaata

SEQ ID NO: 38499 - DNA, 80 bp, synthetic construct
  source 1..80: mol_type = other DNA
tcaaggaaccaaaatcatactgtgtaatggacagaccggtgttatagttctacttaagggttggacgtttcacatctttc

SEQ ID NO: 38500 - DNA, 80 bp, synthetic construct; identical to SEQ ID NO: 10503
  source 1..80: mol_type = other DNA

SEQ ID NO: 38501 - DNA, 80 bp, synthetic construct
  source 1..80: mol_type = other DNA
tgcagcatcagttcagaactgaaaatctccctatcccacttctcgaagccattaatcagagatttcaacagggttcaccg

SEQ ID NO: 38502 - DNA, 80 bp, synthetic construct
  source 1..80: mol_type = other DNA
aggaactttttattaagctggatctttgaagtcagcacttaaaaagcccccttccccaccatgttacattccctttgtgt

SEQ ID NO: 38503 - DNA, 80 bp, synthetic construct
  source 1..80: mol_type = other DNA
tcgaaagatatttgttgattcagagcattttcccttttcttgctccggtctggctgccaattaacaactaaaggtagaag

SEQ ID NO: 38504 - DNA, 80 bp, synthetic construct; identical to SEQ ID NO: 10504
  source 1..80: mol_type = other DNA

SEQ ID NO: 38505 - DNA, 80 bp, synthetic construct
  source 1..80: mol_type = other DNA
gggaaggagtggaaatcactacagagaaaaatcaacaaaaagggataaagggagttaaatttctgggaacaagatctctc

SEQ ID NO: 38506 - DNA, 80 bp, synthetic construct
  source 1..80: mol_type = other DNA
tcctctagtgcaacctgtattagagtagtcatgataggttgaatttttgcaagtgggccaatgccataaattgatctgaa

SEQ ID NO: 38507 - DNA, 80 bp, synthetic construct
  source 1..80: mol_type = other DNA
agaaacaacgcaattcccagatttaacaccaacgccagttaacatttaccgaatgcatacactgtagctgcactattcca

SEQ ID NO: 38508 - DNA, 80 bp, synthetic construct; identical to SEQ ID NO: 10505
  source 1..80: mol_type = other DNA

SEQ ID NO: 38509 - DNA, 80 bp, synthetic construct
  source 1..80: mol_type = other DNA
gctgcgagtacaggcgcatgccaccacgcccagctaattttttctacttttagtagagacggggtttcactgtgttagcc

SEQ ID NO: 38510 - DNA, 80 bp, synthetic construct
  source 1..80: mol_type = other DNA
ctcctgcctcagcctcccgtgtaacttaaactacagtcatgtgtcacaacacctggctaatttttaattttttgtagaga

SEQ ID NO: 38511 - DNA, 80 bp, synthetic construct
  source 1..80: mol_type = other DNA
caccttttgtctttttgaaatcgcctattctagatatttcatataagtggagttatacagtacttgtgtcctttcatacc

SEQ ID NO: 38512 - DNA, 80 bp, synthetic construct; identical to SEQ ID NO: 10506
  source 1..80: mol_type = other DNA

SEQ ID NO: 38513 - DNA, 80 bp, synthetic construct
  source 1..80: mol_type = other DNA
acatcttcaccaacactttttcattggccattttcctgattatagccatccaagaaagtttgaaatggtaccctactttg

SEQ ID NO: 38514 - DNA, 80 bp, synthetic construct
  source 1..80: mol_type = other DNA
tgccttgttgattttcagttctaaggtttggtttttgtttttttggatatatctggatgttagacccttatcaaacatgt

SEQ ID NO: 38515 - DNA, 80 bp, synthetic construct
  source 1..80: mol_type = other DNA
gagctgtcacccaggctggaatgcagtggcatgatctaagctcactgcagcctctacctccaggttcaaataatttttct

SEQ ID NO: 38516 - DNA, 80 bp, synthetic construct
  source 1..80: mol_type = other DNA
tggtctggctggcttacaaggagcgaaacatgcagaccttcagcataagtgttgcaactcttaagatggtatgtctgaag

SEQ ID NO: 38517 - DNA, 80 bp, synthetic construct; identical to SEQ ID NO: 10507
  source 1..80: mol_type = other DNA

SEQ ID NO: 38518 - DNA, 80 bp, synthetic construct
  source 1..80: mol_type = other DNA
tgattggtgcatttacaatcctttagctagacataaaggtccccactagagttgctagattcagagtgctgattggtgta

SEQ ID NO: 38519 - DNA, 80 bp, synthetic construct
  source 1..80: mol_type = other DNA
gtgccacgcacctgcactcctcagcccttgggcggtcgatgggaccgggcgccgcggagcagggggcggcgcccatcagg

SEQ ID NO: 38520 - DNA, 80 bp, synthetic construct
  source 1..80: mol_type = other DNA
ccccctccgcagctgctggcccagatgataagctcctcactacccgcgctcaagacaccaatccgcactagctcatggtt

SEQ ID NO: 38521 - DNA, 80 bp, synthetic construct; identical to SEQ ID NO: 10508
  source 1..80: mol_type = other DNA

SEQ ID NO: 38522 - DNA, 80 bp, synthetic construct
  source 1..80: mol_type = other DNA
cactttgcgtctagctcagggtttgtaaatacaccaatcacactctgtatctagctaatctagtggggacttggagaact

SEQ ID NO: 38523 - DNA, 80 bp, synthetic construct
  source 1..80: mol_type = other DNA
ttctccacattgtggaaggtttgttttttttgctgtttgcaatgattcctgctgctgctcggtttttgcatgcgcattgc

SEQ ID NO: 38524 - DNA, 80 bp, synthetic construct
  source 1..80: mol_type = other DNA
acgaacccacctgaatggaatgaaactctgaacatatgcaaacatcagaatgaacaaattccccacacactgctcttcag

SEQ ID NO: 38525 - DNA, 80 bp, synthetic construct; identical to SEQ ID NO: 10509
  source 1..80: mol_type = other DNA

SEQ ID NO: 38526 - DNA, 80 bp, synthetic construct
  source 1..80: mol_type = other DNA
aacacctgtaatcccagcactttaggaggccgaggcgggtggatcacggggccaggagatcatgactatcctggctaaca

SEQ ID NO: 38527 - DNA, 80 bp, synthetic construct
  source 1..80: mol_type = other DNA
ctccatctcaaaaaaaaaaaaaaaaaaaaactcaagtgttgtactccatagtttccctttaatgaaaagctgattgcttt

SEQ ID NO: 38528 - DNA, 80 bp, synthetic construct
  source 1..80: mol_type = other DNA
tctctactaaaaatacaaaaaattagcctggcatggtggcacgcgcctgtaatcccagctactccagaggcggagaattg

SEQ ID NO: 38529 - DNA, 80 bp, synthetic construct; identical to SEQ ID NO: 10510
  source 1..80: mol_type = other DNA

SEQ ID NO: 38530 - DNA, 80 bp, synthetic construct
  source 1..80: mol_type = other DNA
atgccctcctacatatcaactcatgaattacatatacatcttcaaaagatcagagatttccattttagccatctcgtcaa

SEQ ID NO: 38531 - DNA, 80 bp, synthetic construct
  source 1..80: mol_type = other DNA
ccagctacatgcatacaaagatgaggaagaaccatctggttccctttctctcaatttgtaccaacatcactagatctgtg

SEQ ID NO: 38532 - DNA, 80 bp, synthetic construct
  source 1..80: mol_type = other DNA
gctcactgcaacctattcctcctgggctcaagtgattctcccacctcagcctcccaagtagccaggattacaggcctgca

SEQ ID NO: 38533 - DNA, 80 bp, synthetic construct; identical to SEQ ID NO: 10511
  source 1..80: mol_type = other DNA

SEQ ID NO: 38534 - DNA, 80 bp, synthetic construct
  source 1..80: mol_type = other DNA
ctgggtgagactgaccctttccttaaggaggataatgactgaaaacacatttatttctgctaaaacaagttctagccaac

SEQ ID NO: 38535 - DNA, 80 bp, synthetic construct
  source 1..80: mol_type = other DNA
cagaggtatatatcttttttctctgatatgggttttctttttaatgtctaaaaaggttctgatgggaaataagaccttca

SEQ ID NO: 38536 - DNA, 80 bp, synthetic construct
  source 1..80: mol_type = other DNA
ggcctccattgtgactaaagctttctccacattccttaaagtgataaggtttctctcagtgtgtactctatgatgcttaa

SEQ ID NO: 38537 - DNA, 80 bp, synthetic construct; identical to SEQ ID NO: 10512
  source 1..80: mol_type = other DNA

SEQ ID NO: 38538 - DNA, 80 bp, synthetic construct
  source 1..80: mol_type = other DNA
ttacagggtctctcttcagtgtggatcctttgctgttgaataagatttgatttcttagtgaagaactgtctacattcatc

SEQ ID NO: 38539 - DNA, 80 bp, synthetic construct
  source 1..80: mol_type = other DNA
ttgcaggatttaagggatcatcacttttccatcttcccaggaacagtgagtgagatgctacttcttcagtactttttgga

SEQ ID NO: 38540 - DNA, 80 bp, synthetic construct
  source 1..80: mol_type = other DNA
aaaaaaaaaaaaaaaaaaaaaaagctgctcatggtggtgtgtacctgtagtcccagctactcaggaggctgagatgggag

SEQ ID NO: 38541 - DNA, 80 bp, synthetic construct; identical to SEQ ID NO: 10513
  source 1..80: mol_type = other DNA

SEQ ID NO: 38542 - DNA, 80 bp, synthetic construct
  source 1..80: mol_type = other DNA
cattattaagtgtgagttgctattgttaccattgttgtcacatctcagtatcccaacatgttgcttatcttaaattgaaa

SEQ ID NO: 38543 - DNA, 80 bp, synthetic construct
  source 1..80: mol_type = other DNA
gtccttcagttacaaggcagtgtggtaaatactataagagtgaagcataagagctttgggagtgcaaagaaggaaacatc

SEQ ID NO: 38544 - DNA, 80 bp, synthetic construct
  source 1..80: mol_type = other DNA
ctttcagacagttgagaacagtttggtctagctggaacacagattgaatatgaaggcgaaaggagataaagctgaaaatg

SEQ ID NO: 38545 - DNA, 80 bp, synthetic construct
  source 1..80: mol_type = other DNA
tgacgctggtggatcacgaggtcaggagatctagaccatcctggctaacacagtgaaaccctgtctctactaaaaataca

SEQ ID NO: 38546 - DNA, 80 bp, synthetic construct; identical to SEQ ID NO: 10514
  source 1..80: mol_type = other DNA

SEQ ID NO: 38547 - DNA, 80 bp, synthetic construct
  source 1..80: mol_type = other DNA
ggtggcacgggcctcccagctactcggaagacttaggcaggagaatcgtttgaaccggggaggcagaggttgcagaaagc

SEQ ID NO: 38548 - DNA, 80 bp, synthetic construct
  source 1..80: mol_type = other DNA
ctcgagtagctgggactacaggcacgcaccgccacacccagctaatttttgtattttctggtagagacagggtttcacca

SEQ ID NO: 38549 - DNA, 80 bp, synthetic construct
  source 1..80: mol_type = other DNA
tattctaaataagttttcttatcctaaaatattttatattccaatattggaatcgcctgagtccagggtggtcaaggctg

SEQ ID NO: 38550 - DNA, 80 bp, synthetic construct; identical to SEQ ID NO: 10515
  source 1..80: mol_type = other DNA

SEQ ID NO: 38551 - DNA, 80 bp, synthetic construct
  source 1..80: mol_type = other DNA
agttgagacaaaagttaacattcgaatttagatttagattttatatcttcagcttcttctatctagaaaaggcattcact

SEQ ID NO: 38552 - DNA, 80 bp, synthetic construct
  source 1..80: mol_type = other DNA
cttatgtaatgtcttatttgtctgaatgaaagattattgtgtctttagcagaggaaaagagataatctctccgcactgaa

SEQ ID NO: 38553 - DNA, 80 bp, synthetic construct
  source 1..80: mol_type = other DNA
tatttagaatacattcgataagtgggtagtggtatgtcccctattctgcttaaaacccaggatcaccactttgggaggct

SEQ ID NO: 38554 - DNA, 80 bp, synthetic construct
  source 1..80: mol_type = other DNA
gcgaggcagtggttgcagtgagccaagacagcgccattgaactttagcctgggtgatacagcaagactctgtctcaagaa

SEQ ID NO: 38555 - DNA, 80 bp, synthetic construct; identical to SEQ ID NO: 10516
  source 1..80: mol_type = other DNA

SEQ ID NO: 38556 - DNA, 80 bp, synthetic construct
  source 1..80: mol_type = other DNA
ggaaagtaccttggccttttaccccaaatctacacaattttacacagtggcagtgctttttcctctaacgctataataga

SEQ ID NO: 38557 - DNA, 80 bp, synthetic construct
  source 1..80: mol_type = other DNA
aacttcatcccgccttacagataaatgccattttactttgaaaagcagtaggtgggggtagggggcgagaaatagaaaat

SEQ ID NO: 38558 - DNA, 80 bp, synthetic construct
  source 1..80: mol_type = other DNA
aaatctcctattatataatctgcagtttactttgttttcttgttggagaaagtggtttttggagtccaagtatgcagagg

SEQ ID NO: 38559 - DNA, 80 bp, synthetic construct; identical to SEQ ID NO: 10517
  source 1..80: mol_type = other DNA

SEQ ID NO: 38560 - DNA, 80 bp, synthetic construct
  source 1..80: mol_type = other DNA
gattacaggcatctgccaccacactcagctaatttttgtgtttttagtagagacagggtttcaccatgttggccaggctg

SEQ ID NO: 38561 - DNA, 80 bp, synthetic construct
  source 1..80: mol_type = other DNA
tctcactctgttgcccaggctggagtgcagcgggcaatgtgggctcactgcaagctccgcctcccgggtttaggcgattc

SEQ ID NO: 38562 - DNA, 80 bp, synthetic construct
  source 1..80: mol_type = other DNA
caaagtgctgggattacaggcctgagccactgcacccggccagcaatatttcttctgtaaaagaaaagaataagtgttcc

SEQ ID NO: 38563 - DNA, 80 bp, synthetic construct; identical to SEQ ID NO: 10518
  source 1..80: mol_type = other DNA

SEQ ID NO: 38564 - DNA, 80 bp, synthetic construct
  source 1..80: mol_type = other DNA
gccacagcgttgtgagattggtaggaaagtgctccaggaaatatctaggggagggcttggatctgagacacagagtgtga

SEQ ID NO: 38565 - DNA, 80 bp, synthetic construct
  source 1..80: mol_type = other DNA
ttttttggcccaaatctcgcggcttcgtaaaaatatcgcgatgcttccgcttttaatgtttttagtttggacaagccctt

SEQ ID NO: 38566 - DNA, 80 bp, synthetic construct
  source 1..80: mol_type = other DNA
actacaggcgcccgccaccacgcccagctattttttttgtatttttagtagagacgaggtttcaccgtgttagccagaat

SEQ ID NO: 38567 - DNA, 80 bp, synthetic construct; identical to SEQ ID NO: 10519
  source 1..80: mol_type = other DNA

SEQ ID NO: 38568 - DNA, 80 bp, synthetic construct
  source 1..80: mol_type = other DNA
agggcagaaagccacttgtggattgaaaaagcaaaagggttcgcaggactagaaaatgtttctgcataaaactggatcaa

SEQ ID NO: 38569 - DNA, 80 bp, synthetic construct
  source 1..80: mol_type = other DNA
gaaatcttgatcgtggttagcctcccccaggacttcattgtttggaagatggtgaggaacaaaacaaaaccctaacaaaa

SEQ ID NO: 38570 - DNA, 80 bp, synthetic construct
  source 1..80: mol_type = other DNA
aaggtctccacagggaccaccacatgggcaaggctggtgtccgcgccgagggatcggcgatcccaggtccggggaaactc

SEQ ID NO: 38571 - DNA, 80 bp, synthetic construct; identical to SEQ ID NO: 10520
  source 1..80: mol_type = other DNA

SEQ ID NO: 38572 - DNA, 80 bp, synthetic construct
  source 1..80: mol_type = other DNA
ctggcaaacacggtagaggttcaataaatacattttaactcaaccgtcttaactcttgtatttggggctgtgaggttcag

SEQ ID NO: 38573 - DNA, 80 bp, synthetic construct
  source 1..80: mol_type = other DNA
ccacagacttccttggtttcatatcctatttttgatagagagaaaattagtagtgagaagtacagtgaacactggttccc

SEQ ID NO: 38574 - DNA, 80 bp, synthetic construct
  source 1..80: mol_type = other DNA
aaaaattaaaatcatccataatctcactagtcagaggtaactattaacatttttatatatttagtctttcatatggtata

SEQ ID NO: 38575 - DNA, 80 bp, synthetic construct; identical to SEQ ID NO: 10521
  source 1..80: mol_type = other DNA

SEQ ID NO: 38576 - DNA, 80 bp, synthetic construct
  source 1..80: mol_type = other DNA
agtagctgggactataggcgcccgtcacgacgcccggctaatttttgtatttttagtagagacggggtttcactatgttg

SEQ ID NO: 38577 - DNA, 80 bp, synthetic construct
  source 1..80: mol_type = other DNA
gtgcagtggcatgatcttagctcacagcaacctatctcccaggttcaagtgattctcgtctcagcctcccgagtagctgg

SEQ ID NO: 38578 - DNA, 80 bp, synthetic construct
  source 1..80: mol_type = other DNA
ctcctggcacattttaataggtaacaaatgatatagcgcccccccttttttttctgatttgattattagtgaggtccaat

SEQ ID NO: 38579 - DNA, 80 bp, synthetic construct; identical to SEQ ID NO: 10522
  source 1..80: mol_type = other DNA

SEQ ID NO: 38580 - DNA, 80 bp, synthetic construct
  source 1..80: mol_type = other DNA
agtggcgcaatctcggcttgcttcaagctctgcctcccaggttcaagcaattttcctgcctcagcctcccaagtagctgg

SEQ ID NO: 38581 - DNA, 80 bp, synthetic construct
  source 1..80: mol_type = other DNA
cggctgtgccgtattttttctttcttcctttatggcatgttaaactcctgatgtcttgattttatgggtttgttttggtt

SEQ ID NO: 38582 - DNA, 80 bp, synthetic construct
  source 1..80: mol_type = other DNA
tttttagtagagatggggtttcaccatgttggccaggctggtcttgaactcctgacctcaggtgatccgcccgcctcagc

SEQ ID NO: 38583 - DNA, 80 bp, synthetic construct; identical to SEQ ID NO: 10523
  source 1..80: mol_type = other DNA

SEQ ID NO: 38584 - DNA, 80 bp, synthetic construct
  source 1..80: mol_type = other DNA
agattggggtggaaattgagatgatgctgtattcaaatgagactgaccataaattggtagttgaagttgggagatgatat

SEQ ID NO: 38585 - DNA, 80 bp, synthetic construct
  source 1..80: mol_type = other DNA
taggttcaaatctttctaattctcacttttttctattattctttttgtgcatcagaaccctaaaatgggtttggcaatca

SEQ ID NO: 38586 - DNA, 80 bp, synthetic construct
  source 1..80: mol_type = other DNA
aattcaacagataagccagatctaagaaatgtatcttttctccaacgggaaaaaggaaatgtaatggggcaatactgtca

SEQ ID NO: 38587 - DNA, 80 bp, synthetic construct; identical to SEQ ID NO: 10524
  source 1..80: mol_type = other DNA

SEQ ID NO: 38588 - DNA, 80 bp, synthetic construct
  source 1..80: mol_type = other DNA
cacaagtttcacttctccccagatcatctttagttgtactctacattttttcacgttattttccccctctcctaattaac

SEQ ID NO: 38589 - DNA, 80 bp, synthetic construct
  source 1..80: mol_type = other DNA
ttgttttttattttgctgggaggagatacgtgatttccacgtatactctttggtctgcatctcaggtaactaaaggaatt

SEQ ID NO: 38590 - DNA, 80 bp, synthetic construct
  source 1..80: mol_type = other DNA
tcttctaggccttgtctgctcttggggaagatggtcttctttgcatgttggcctttatcagaaaaaacaagagcacctga

SEQ ID NO: 38591 - DNA, 80 bp, synthetic construct; identical to SEQ ID NO: 10525
  source 1..80: mol_type = other DNA

SEQ ID NO: 38592 - DNA, 80 bp, synthetic construct
  source 1..80: mol_type = other DNA
gctctgctgcttcctagctgtgtaccttggataagtcatttaccctctctgctgcagtttatctgtaaagtaagacaaca

SEQ ID NO: 38593 - DNA, 80 bp, synthetic construct
  source 1..80: mol_type = other DNA
aatctagcctcatggaagctactttctatagccctggttctattatttcccttaaaacctgatgaataaatgaagaatta

SEQ ID NO: 38594 - DNA, 80 bp, synthetic construct
  source 1..80: mol_type = other DNA
ccagcactttaggaggccaaggcaggtggatcacaagggtcaggagttcaagaccaccctggccaagatggtgaaacccc

SEQ ID NO: 38595 - DNA, 80 bp, synthetic construct; identical to SEQ ID NO: 10526
  source 1..80: mol_type = other DNA

SEQ ID NO: 38596 - DNA, 80 bp, synthetic construct
  source 1..80: mol_type = other DNA
tctgaacccaatcctaccaacacccagaaagcaacaacaatgtaaacatccatattcagtttatttttaaacagaggggc

SEQ ID NO: 38597 - DNA, 80 bp, synthetic construct
  source 1..80: mol_type = other DNA
ttgataggatgcacttaagcatggtcaattcccccttcccccaaaggaaatggagaaaaggagccaagaagtcaatgaat

SEQ ID NO: 38598 - DNA, 80 bp, synthetic construct
  source 1..80: mol_type = other DNA
gaagagaacagacaaagccctcagaaaagatacaaaggcagagacattgattagaacattatctcataacagaggtgggg

SEQ ID NO: 38599 - DNA, 80 bp, synthetic construct; identical to SEQ ID NO: 10527
  source 1..80: mol_type = other DNA

SEQ ID NO: 38600 - DNA, 80 bp, synthetic construct
  source 1..80: mol_type = other DNA
tctcattacatttcacaatctgcatgggaaggaaaaggatggtagagaacatggacatcctgtctcccactgcaagggcg

SEQ ID NO: 38601 - DNA, 80 bp, synthetic construct
  source 1..80: mol_type = other DNA
acccatctatcccactcatggggcagatgatcagaggagctgcacttttccctcccgagtaactcagactgaagtagggc

SEQ ID NO: 38602 - DNA, 80 bp, synthetic construct
  source 1..80: mol_type = other DNA
aatattctttcccataccacaaagacactgcccagaatccattctggggggctgaggttactccaccttttctgcacact

SEQ ID NO: 38603 - DNA, 80 bp, synthetic construct; identical to SEQ ID NO: 10528
  source 1..80: mol_type = other DNA

SEQ ID NO: 38604 - DNA, 80 bp, synthetic construct
  source 1..80: mol_type = other DNA
gttaccagaatactctgaaaatacagaattttagccccgtatcttttctttcacatctgaagccacaatatccatcatga

SEQ ID NO: 38605 - DNA, 80 bp, synthetic construct
  source 1..80: mol_type = other DNA
gtagctgggaccataggtgtgcactaccaccctaattttaaaaaattttttgtagagatgaggtcttactatgttgctca

SEQ ID NO: 38606 - DNA, 80 bp, synthetic construct
  source 1..80: mol_type = other DNA
tcatcatcccttattctgaaaattccaggggccccaagtttcatagaattcagaatattacaggttttagacaggcagca

SEQ ID NO: 38607 - DNA, 80 bp, synthetic construct
  source 1..80: mol_type = other DNA
aaaataatgaaaaaggttttggctttcagagatttgggattttagaactgtgggtaagggactgggaacctgtatcagta

SEQ ID NO: 38608 - DNA, 80 bp, synthetic construct; identical to SEQ ID NO: 10529
  source 1..80: mol_type = other DNA

SEQ ID NO: 38609 - DNA, 80 bp, synthetic construct
  source 1..80: mol_type = other DNA
tagtattacagcatcttgctatcatcaagtgttttcctgcttcaaaaacactgataatgggctggatatgtggctcatgc

SEQ ID NO: 38610 - DNA, 80 bp, synthetic construct
  source 1..80: mol_type = other DNA
gtaattccagctactcaggaggctgaggcaggaggatcacttgagcccaggagtatgaggctgcagcaagctatcaccat

SEQ ID NO: 38611 - DNA, 80 bp, synthetic construct
  source 1..80: mol_type = other DNA
cctcacatcttgttcaggaggaagagtcccaaacattacctctcagaaatttaagcccacaaatttttactcccacaaaa

SEQ ID NO: 38612 - DNA, 80 bp, synthetic construct
  source 1..80: mol_type = other DNA
gtaaaccccaagagtaggatgacttatgctcttctgttcctctaaaataccctgcacaatgttaggcagtgtaggataca

SEQ ID NO: 38613 - DNA, 80 bp, synthetic construct; identical to SEQ ID NO: 10530
  source 1..80: mol_type = other DNA

SEQ ID NO: 38614 - DNA, 80 bp, synthetic construct
  source 1..80: mol_type = other DNA
ctacttttggggaactgcggtttccaccctataatccttctttaacacctgagattgattttaccctatggcttcagctc

SEQ ID NO: 38615 - DNA, 80 bp, synthetic construct
  source 1..80: mol_type = other DNA
ccttaccctaatatggttttgtctctcatcacctacctgagtataactgagcctctcttaattctgaaagaataaaagag

SEQ ID NO: 38616 - DNA, 80 bp, synthetic construct
  source 1..80: mol_type = other DNA
aattttttcatatgatgtatggctctatcatccaaccaaaagctttaaggggagagggattgggaatcttaagtacaggg

SEQ ID NO: 38617 - DNA, 80 bp, synthetic construct
  source 1..80: mol_type = other DNA
cataacttttgagttgcataagtcatctgtgtacaagagctgaatggctcaagtgacactcactgacactctggggtaaa

SEQ ID NO: 38618 - DNA, 80 bp, synthetic construct; identical to SEQ ID NO: 10531
  source 1..80: mol_type = other DNA

SEQ ID NO: 38619 - DNA, 80 bp, synthetic construct
  source 1..80: mol_type = other DNA
taagagaagggtttacctacatataaggatttcagaatccaccagactgcccaggaattttagtattcctgggtggaata

SEQ ID NO: 38620 - DNA, 80 bp, synthetic construct
  source 1..80: mol_type = other DNA
ttcttatacctcaggaggtaagaactattactgttctgttacagatgaggaaattacttgttgaatccttactaagtggt

SEQ ID NO: 38621 - DNA, 80 bp, synthetic construct
  source 1..80: mol_type = other DNA
gctcaagtgaaacgtatccaaggtagtttttgttcattctttccgaagtaaacaatcaaattaattctggattgattaat

SEQ ID NO: 38622 - DNA, 80 bp, synthetic construct; identical to SEQ ID NO: 10532
  source 1..80: mol_type = other DNA

SEQ ID NO: 38623 - DNA, 80 bp, synthetic construct
  source 1..80: mol_type = other DNA
ctcctcacattacctgtgaactgctttagactctccgtcaagaatagacatttttgggcaaaaatgtggattttctcttg

SEQ ID NO: 38624 - DNA, 80 bp, synthetic construct
  source 1..80: mol_type = other DNA
caggttcaagcgattctcctgcctcagcctcctgagtagctgggattacaggcatgcgccaccatacccagctaattttg

SEQ ID NO: 38625 - DNA, 80 bp, synthetic construct
  source 1..80: mol_type = other DNA
ccaggaactaggacaggggctaagttaaactgtctagcgtacacggacagtctttaaaatcagccactacagcttttccc

SEQ ID NO: 38626 - DNA, 80 bp, synthetic construct; identical to SEQ ID NO: 10533
  source 1..80: mol_type = other DNA

SEQ ID NO: 38627 - DNA, 80 bp, synthetic construct
  source 1..80: mol_type = other DNA
taagttctggcctatgagaagtaagacgtatctcatggtgttttgagaaatctacttaaaaatgtaacatgacaggaaac

SEQ ID NO: 38628 - DNA, 80 bp, synthetic construct
  source 1..80: mol_type = other DNA
aatgtgatgcgacttatctccttcttcttggttggcattctaccagctattgtggactatatgaggaccataccttaggg

SEQ ID NO: 38629 - DNA, 80 bp, synthetic construct
  source 1..80: mol_type = other DNA
taccagctattgtggactatatgaggaccataccttagggatggtagaacagtgaatgggaagaaacctgagtctctgag

SEQ ID NO: 38630 - DNA, 80 bp, synthetic construct
  source 1..80: mol_type = other DNA
ctgcctcaacctcccaagtagctgggattacaggcatgcaccaccacgcccagctaatttttgtatttttagtagaaatg

SEQ ID NO: 38631 - DNA, 80 bp, synthetic construct; identical to SEQ ID NO: 10534
  source 1..80: mol_type = other DNA

SEQ ID NO: 38632 - DNA, 80 bp, synthetic construct
  source 1..80: mol_type = other DNA
tgccccatctataaggacctccccaatctccttaaatgctcccacatagtcaagctgcattttgctttagaaggttttca

SEQ ID NO: 38633 - DNA, 80 bp, synthetic construct
  source 1..80: mol_type = other DNA
agctctccctctttgatcgtgttccagctgccagggagttcttcctcacttttttttttttgatggaacatagagaaata

SEQ ID NO: 38634 - DNA, 80 bp, synthetic construct
  source 1..80: mol_type = other DNA
gaagggggaaaggattctgaaatgtataggaagcaatagacataaactacccttatattcagcccaggtccctgtaaggc

SEQ ID NO: 38635 - DNA, 80 bp, synthetic construct; identical to SEQ ID NO: 10535
  source 1..80: mol_type = other DNA

SEQ ID NO: 38636 - DNA, 80 bp, synthetic construct
  source 1..80: mol_type = other DNA
ggatcactggaacataactcagtgttgaggagctaaaaggcaggcagaggaaaatgggatgcatactatttgctatacca

SEQ ID NO: 38637 - DNA, 80 bp, synthetic construct
  source 1..80: mol_type = other DNA
ctgttagtacaaagaactccagtatactttttttttttttttttttgagacggagtctcgctctgtgtagcccaggctgg

SEQ ID NO: 38638 - DNA, 80 bp, synthetic construct
  source 1..80: mol_type = other DNA
ggatggtcttgaactcctgacctcaggtgatccacccacctcggcctctcaaagtgctgggattacaagtgtgagccagc

SEQ ID NO: 38639 - DNA, 80 bp, synthetic construct; identical to SEQ ID NO: 10536
  source 1..80: mol_type = other DNA

SEQ ID NO: 38640 - DNA, 80 bp, synthetic construct
  source 1..80: mol_type = other DNA
attgatacgtaacagacatatatattttgggggtgcatgcgataatttaacatgttcataatttgtaaagaaatcagtgt

SEQ ID NO: 38641 - DNA, 80 bp, synthetic construct
  source 1..80: mol_type = other DNA
gaggtcgggagtttgggaccagactggccaacatggagaaaccccgtctctactaaaaatacaaaattagccgggcatgg

SEQ ID NO: 38642 - DNA, 80 bp, synthetic construct
  source 1..80: mol_type = other DNA
atatatataatatacgtatgtatatgtgtgtgtatatacatagatatatataatagttttgtaaactacagtcaccctac

SEQ ID NO: 38643 - DNA, 80 bp, synthetic construct; identical to SEQ ID NO: 10537
  source 1..80: mol_type = other DNA

SEQ ID NO: 38644 - DNA, 80 bp, synthetic construct
  source 1..80: mol_type = other DNA
aaagcaatttatgtcttttgcagcttgtctatttgtgccttcaacccatttttctctagaattttggtcttttctctcgc

SEQ ID NO: 38645 - DNA, 80 bp, synthetic construct
  source 1..80: mol_type = other DNA
gtgtagtatctagtagggccagttctccctcagagctcttctttcacagtgtagcctacctatgtttttttttttttttt

SEQ ID NO: 38646 - DNA, 80 bp, synthetic construct
  source 1..80: mol_type = other DNA
atctcagctcactgcaacttccacctccgggttcaagagattctcctgcctcagcctcccaggtagctgagattacaggc

SEQ ID NO: 38647 - DNA, 80 bp, synthetic construct; identical to SEQ ID NO: 10538
  source 1..80: mol_type = other DNA

SEQ ID NO: 38648 - DNA, 80 bp, synthetic construct
  source 1..80: mol_type = other DNA
aatatatccgagtaacagaaaaaaaaaagaaactgcatttatgaatgtgaaggacaacttgctttccctgtcttatcaaa

SEQ ID NO: 38649 - DNA, 80 bp, synthetic construct
  source 1..80: mol_type = other DNA
ttctcttctaatatgtcttctagtggctgctatctggcatatgaaggctgctgatttctgtatgttaacttctttcccaa

SEQ ID NO: 38650 - DNA, 80 bp, synthetic construct
  source 1..80: mol_type = other DNA
gacttccaacataaacactttttgatattcatggagcccctcctcccttactgagtccatgacttctttctttctctcct

SEQ ID NO: 38651 - DNA, 80 bp, synthetic construct
  source 1..80: mol_type = other DNA
ggagttgaagaccagcctggccaacatggtgaaaccccatctctaccaaaaatacaaaaattagctaggtgtggtggtgt

SEQ ID NO: 38652 - DNA, 80 bp, synthetic construct; identical to SEQ ID NO: 10539
  source 1..80: mol_type = other DNA

SEQ ID NO: 38653 - DNA, 80 bp, synthetic construct
  source 1..80: mol_type = other DNA
aaaatgcccatcgactgatgaataaacaaaacatattatatatccatacaatggaatgttattcagccataaagagaaat

SEQ ID NO: 38654 - DNA, 80 bp, synthetic construct
  source 1..80: mol_type = other DNA
tctgcctcccaggttcaagtgattgtcctgcctcagcctcctgagtagctgggattacaggcatgcgccaccacgcctgg

SEQ ID NO: 38655 - DNA, 80 bp, synthetic construct
  source 1..80: mol_type = other DNA
ccgccgcgcctggccagtactgaaacatattacaatatgaatgaatctttaaaaaaatatgctaagtgataggccgggcg

SEQ ID NO: 38656 - DNA, 80 bp, synthetic construct
  source 1..80: mol_type = other DNA
tactcggaaggctgaggcaggagaatcgcttgaacctggcaggcggaggttgcggtgagcggagatcgtgccgttacact

SEQ ID NO: 38657 - DNA, 80 bp, synthetic construct; identical to SEQ ID NO: 10540
  source 1..80: mol_type = other DNA

SEQ ID NO: 38658 - DNA, 80 bp, synthetic construct
  source 1..80: mol_type = other DNA
ttgcttgagcccaggagttcaagaccagccgaggcaacatggcaaaactccatctctacaaaaattacacaaattagcca

SEQ ID NO: 38659 - DNA, 80 bp, synthetic construct
  source 1..80: mol_type = other DNA
taaggaaaaaaaaacactcaagtccatcttgcaaaaccccaatcctggatgagactgaccatctgcttactcagtgccca

SEQ ID NO: 38660 - DNA, 80 bp, synthetic construct
  source 1..80: mol_type = other DNA
aaactccgtctctataaaaaatacaaaaattagctgggcgtggtggcacacgcctgtaatcccagctacttgggaggctg

SEQ ID NO: 38661 - DNA, 80 bp, synthetic construct; identical to SEQ ID NO: 10541
  source 1..80: mol_type = other DNA

SEQ ID NO: 38662 - DNA, 80 bp, synthetic construct
  source 1..80: mol_type = other DNA
gcaatggcgcaatctcggctcactgcaaccatcgtctcactggttcaagcgattctcctgcctcagcctcctgagtagct

SEQ ID NO: 38663 - DNA, 80 bp, synthetic construct
  source 1..80: mol_type = other DNA
ccggccagtatatggtttcttgtggcttcagtgttctccctcacctagaaaccttacaacatatactcctttccatatgt

SEQ ID NO: 38664 - DNA, 80 bp, synthetic construct
  source 1..80: mol_type = other DNA
actcaactccccctaatgtggctcctgccccaattattccattgtgatagttctacctaagatcaccaatgatggtcatg

SEQ ID NO: 38665 - DNA, 80 bp, synthetic construct; identical to SEQ ID NO: 10542
  source 1..80: mol_type = other DNA

SEQ ID NO: 38666 - DNA, 80 bp, synthetic construct
  source 1..80: mol_type = other DNA
cactccagcctgggcaacagagcaagactcaatctcaaaataaataaataatattaaattaaaattaaaatgtaaaaacc

SEQ ID NO: 38667 - DNA, 80 bp, synthetic construct
  source 1..80: mol_type = other DNA
cttggctcactgcaaccacttcctcctggttttgggcaattccttgcctcagcctcccgcgtagctgggactacaggcac

SEQ ID NO: 38668 - DNA, 80 bp, synthetic construct
  source 1..80: mol_type = other DNA
catttttaatggcttttatcaaatacctataagaactatctgatcgccacactaaaatataattcaggaaagcttatttg

SEQ ID NO: 38669 - DNA, 80 bp, synthetic construct; identical to SEQ ID NO: 10543
  source 1..80: mol_type = other DNA

SEQ ID NO: 38670 - DNA, 80 bp, synthetic construct
  source 1..80: mol_type = other DNA
atgagacaacgcaattgactaattcaagttgtgtgaaccagaacttctagtttacacagtttccttccaaggtgcacaat

SEQ ID NO: 38671 - DNA, 80 bp, synthetic construct
  source 1..80: mol_type = other DNA
tgcttctcttctagctgagcgatcaggctgctgaggtgggagatgttgcaagagaactgggtgatggcaccattgatgct

SEQ ID NO: 38672 - DNA, 80 bp, synthetic construct
  source 1..80: mol_type = other DNA
cggctcatttctagggccttcatagttctcctgtgaccatgtagcccaagacctcattatggattaaaacaagcacagtg

SEQ ID NO: 38673 - DNA, 80 bp, synthetic construct; identical to SEQ ID NO: 10544
  source 1..80: mol_type = other DNA

SEQ ID NO: 38674 - DNA, 80 bp, synthetic construct
  source 1..80: mol_type = other DNA
tgggggtaaggactctatcccaactgggaagcatggaagattgtcacacaggaaagtgacagggtcagatatgtgcccta

SEQ ID NO: 38675 - DNA, 80 bp, synthetic construct
  source 1..80: mol_type = other DNA
cgctcatttgtttgccataatttactgtccttcgttcttcacccaacccccaccaccaacaggactctattataaacttt

SEQ ID NO: 38676 - DNA, 80 bp, synthetic construct
  source 1..80: mol_type = other DNA
gtctgttggcgtacgcctgtagcctcagctacctgggaggctgaggtgggagaatcgcttgaactgggaggcagaggttg

SEQ ID NO: 38677 - DNA, 80 bp, synthetic construct; identical to SEQ ID NO: 10545
  source 1..80: mol_type = other DNA

SEQ ID NO: 38678 - DNA, 80 bp, synthetic construct
  source 1..80: mol_type = other DNA
aaaagtaagggaatcttagttctccgggtgagttcccactgccatgtgcggttgatccacctctacctacaagttctggg

SEQ ID NO: 38679 - DNA, 80 bp, synthetic construct
  source 1..80: mol_type = other DNA
aatggtcgagctggttctggatttgctcctgagaaaagcaaaacagatgggcagttcaaaattaggtagaccttagcatc

SEQ ID NO: 38680 - DNA, 80 bp, synthetic construct
  source 1..80: mol_type = other DNA
ttcaaccactcagctacctcgtcaggactatttgtgtctatcttaaacaatgagtcatctacctgtccctggtaggatat

SEQ ID NO: 38681 - DNA, 80 bp, synthetic construct; identical to SEQ ID NO: 10546
  source 1..80: mol_type = other DNA

SEQ ID NO: 38682 - DNA, 80 bp, synthetic construct
  source 1..80: mol_type = other DNA
ccagttcacaaagggctctgtgagtcacatgattccacaatattcctcataactgtgttatctcctgagtctcagagtgg

SEQ ID NO: 38683 - DNA, 80 bp, synthetic construct
  source 1..80: mol_type = other DNA
agtgtctgcagcttgtcgatgtgtacgcggttttatgcacttcttttaaactgtcaaaaggatgtctccgtgtacaatgt

SEQ ID NO: 38684 - DNA, 80 bp, synthetic construct
  source 1..80: mol_type = other DNA
acagagaggaaatgacggctgtgaaccacacgtccggctcagccattttctaggcggaaaaaaggaagcccctttggctc

SEQ ID NO: 38685 - DNA, 80 bp, synthetic construct; identical to SEQ ID NO: 10547
  source 1..80: mol_type = other DNA

SEQ ID NO: 38686 - DNA, 80 bp, synthetic construct
  source 1..80: mol_type = other DNA
ctgcgaagtactgcaggcacacggggcaggtggtctcctgctgcaggcactcggccacactcccggaggccatggcgccg

SEQ ID NO: 38687 - DNA, 80 bp, synthetic construct
  source 1..80: mol_type = other DNA
ggagtggccgggccgatgcctgcgcctgtgccccctaagcgagagcgggaatacggccggctcaccgaggctcgcggcca

SEQ ID NO: 38688 - DNA, 80 bp, synthetic construct
  source 1..80: mol_type = other DNA
cgcgcttccagcgagtgacaaggtttcgtggcctgggggcctgagctgtttcctcttggaaaggccgaggaggctccgcc

SEQ ID NO: 38689 - DNA, 80 bp, synthetic construct; identical to SEQ ID NO: 10548
  source 1..80: mol_type = other DNA

SEQ ID NO: 38690 - DNA, 80 bp, synthetic construct
  source 1..80: mol_type = other DNA
gacccgagatcgccactgcactccagcctgcgggacagagggagactctgtctcaaaaaaaaaaaaaaaaaaaaaaaaga

SEQ ID NO: 38691 - DNA, 80 bp, synthetic construct
  source 1..80: mol_type = other DNA
gaaaaagaaaggtttaattatcagatggtaacatttctgtgtgtcaataacaagcccagttctgctacctctcacttgtg

SEQ ID NO: 38692 - DNA, 80 bp, synthetic construct
  source 1..80: mol_type = other DNA
agggttgttgtattgagtagcaactaaaaattgcttgctcctttctgaagtatagagaaactaagaatcctgcggtgacc

SEQ ID NO: 38693 - DNA, 80 bp, synthetic construct; identical to SEQ ID NO: 10549
  source 1..80: mol_type = other DNA

SEQ ID NO: 38694 - DNA, 80 bp, synthetic construct
  source 1..80: mol_type = other DNA
atactctgagtacccagtcattcaaattccagtcccaaatagctttagcccatttccagaaaaatgtagagtacttgggc

SEQ ID NO: 38695 - DNA, 80 bp, synthetic construct
  source 1..80: mol_type = other DNA
cttcatcttctcctttacttgggggatgcaagccttgagtttggctttgtttttcagaattgattgtgtttatcttacca

SEQ ID NO: 38696 - DNA, 80 bp, synthetic construct
  source 1..80: mol_type = other DNA
ccccgtctctaccaaaaatacaaaaactcgatgggcacagtggtgcacacctgtaatcccaactactctggagactgagg

SEQ ID NO: 38697 - DNA, 80 bp, synthetic construct; identical to SEQ ID NO: 10550
  source 1..80: mol_type = other DNA

SEQ ID NO: 38698 - DNA, 80 bp, synthetic construct
  source 1..80: mol_type = other DNA
tgcccagcccctcttccttgagtgtttactgtcttcccttcatcatccagatttcatggaattttgatttgcttaattta

SEQ ID NO: 38699 - DNA, 80 bp, synthetic construct
  source 1..80: mol_type = other DNA
tcatccttaaaaattcttaaagaagaaaatgcttttcattctgtcgcttcttactcagacatcttcaaagttttgtgggt

SEQ ID NO: 38700 - DNA, 80 bp, synthetic construct
  source 1..80: mol_type = other DNA
gatcatgaccagcctggccaacacagtgaaaccccgtctctactaaaaatacaaaaattagccgggcatggtggcgcaca

SEQ ID NO: 38701 - DNA, 80 bp, synthetic construct; identical to SEQ ID NO: 10551
  source 1..80: mol_type = other DNA

SEQ ID NO: 38702 - DNA, 80 bp, synthetic construct
  source 1..80: mol_type = other DNA
aggatggtctcaattccctgacatcgtgatccgccctcctcgggctcccaaagtgctgggattacaggcgtgagccaccg

SEQ ID NO: 38703 - DNA, 80 bp, synthetic construct
  source 1..80: mol_type = other DNA
ccacgcatggtgtcgcatgcctataacctcagctactcgggaggctgaggcaggagaatcgcttgaacctgggaggcaga

SEQ ID NO: 38704 - DNA, 80 bp, synthetic construct
  source 1..80: mol_type = other DNA
agtattggccaaatccaagggacacttttcagtcttcatcttaacatctcgaaggcattttatgtggagtcctaatcagg

SEQ ID NO: 38705 - DNA, 80 bp, synthetic construct; identical to SEQ ID NO: 10552
  source 1..80: mol_type = other DNA

SEQ ID NO: 38706 - DNA, 80 bp, synthetic construct
  source 1..80: mol_type = other DNA
tacctgtgacattttacactgttgatccctccctccttggatcattcttcttccaagcagcaaactgagtgggacctgat

SEQ ID NO: 38707 - DNA, 80 bp, synthetic construct
  source 1..80: mol_type = other DNA
gagaaaaagacaaaatatcaataagaatttaacattaatataaggtccgggcgcggtggcttatgcagggtaatcccagc

SEQ ID NO: 38708 - DNA, 80 bp, synthetic construct
  source 1..80: mol_type = other DNA
ccagctactggggaggctaaggtgggaggatcccttgatcccaggaggcagaggttgcagtgagccgagattgcaccact

SEQ ID NO: 38709 - DNA, 80 bp, synthetic construct; identical to SEQ ID NO: 10553
  source 1..80: mol_type = other DNA

SEQ ID NO: 38710 - DNA, 80 bp, synthetic construct
  source 1..80: mol_type = other DNA
aaaattggggaaagatgtttttagcaaattaaacaaaggatgaatttccttgagacaaaatatttgcacaaataaaagca

SEQ ID NO: 38711 - DNA, 80 bp, synthetic construct
  source 1..80: mol_type = other DNA
aggaattccagtacactgtgagaatgtaaattgggagaacaccattgaaagcaatttgacaattgggctgggcgcggtgg

SEQ ID NO: 38712 - DNA, 80 bp, synthetic construct
  source 1..80: mol_type = other DNA
ggaggctgaggcaggagaatagcttgaacccgggaggcagatgttgcggtgagccgaggtcacgccattgcactccatcc

SEQ ID NO: 38713 - DNA, 80 bp, synthetic construct; identical to SEQ ID NO: 10554
  source 1..80: mol_type = other DNA

SEQ ID NO: 38714 - DNA, 80 bp, synthetic construct
  source 1..80: mol_type = other DNA
aaaaagaagaaataatctaatagggaaaggtgtctgagatttatttactcattaatttattcaacaaatgtttgttgagt

SEQ ID NO: 38715 - DNA, 80 bp, synthetic construct
  source 1..80: mol_type = other DNA
agaatatggaagatgaagagtgatggttattactttatattgggtcatcagggtggaatctctctgatgaggtagccaaa

SEQ ID NO: 38716 - DNA, 80 bp, synthetic construct
  source 1..80: mol_type = other DNA
ggcacatccatattatgaaatactacccagagataaaaatgaatgaactactgagataggcagcaacttggatagatctc

SEQ ID NO: 38717 - DNA, 80 bp, synthetic construct
  source 1..80: mol_type = other DNA
tcggctcactgcagcctctgccttccgggttcaagtgattctcctgtgtcagcctccggagtagctaggattaaggcatg

SEQ ID NO: 38718 - DNA, 80 bp, synthetic construct; identical to SEQ ID NO: 10555
  source 1..80: mol_type = other DNA

SEQ ID NO: 38719 - DNA, 80 bp, synthetic construct
  source 1..80: mol_type = other DNA
atctgagtaagattggtggattttatcaaaaataatttcctggtgtgatattgtactatatttatgcaagatgttaccat

SEQ ID NO: 38720 - DNA, 80 bp, synthetic construct
  source 1..80: mol_type = other DNA
gcctcccaagtagctgggattacaggcatgtgccaccatggctaggtaatttttgtatttttagtagagacagggttttg

SEQ ID NO: 38721 - DNA, 80 bp, synthetic construct
  source 1..80: mol_type = other DNA
ttttaaaaaatttctgcagtcacagcatcaatgacttgtctttcccagccagcaaagccctgtgttttgctcttattgat

SEQ ID NO: 38722 - DNA, 80 bp, synthetic construct; identical to SEQ ID NO: 10556
  source 1..80: mol_type = other DNA

SEQ ID NO: 38723 - DNA, 80 bp, synthetic construct
  source 1..80: mol_type = other DNA
ctggatggaggccgagatggtagctgtctccaagatagtcactatcttagagacctctcatatgcacatgacattggatc

SEQ ID NO: 38724 - DNA, 80 bp, synthetic construct
  source 1..80: mol_type = other DNA
taaaaaaaaaaaaggccgggtgcggtggctcgcacctgtaatcccagcactttgggaagccaaagcaggcagatcacctg

SEQ ID NO: 38725 - DNA, 80 bp, synthetic construct
  source 1..80: mol_type = other DNA
gccaagatcacaccattgcactccagcctgggcaacaagagtgaaactctgtctcaaaaaacaaacaaacaaacaacaac

SEQ ID NO: 38726 - DNA, 80 bp, synthetic construct; identical to SEQ ID NO: 10557
  source 1..80: mol_type = other DNA

SEQ ID NO: 38727 - DNA, 80 bp, synthetic construct
  source 1..80: mol_type = other DNA
cttcttcttataaggacaccagtattatcagcttagggcctcactcttatgacatcatttatccttaattgtcatcccta

SEQ ID NO: 38728 - DNA, 80 bp, synthetic construct
  source 1..80: mol_type = other DNA
aaagcctgtctctactaaaaatacaaaaatcagctgggcatggtggtgcacacctgtaatcccagctactcaggaggctg

SEQ ID NO: 38729 - DNA, 80 bp, synthetic construct
  source 1..80: mol_type = other DNA
atagtcacattgggggttaaaattccaaaacatgagttgggagctgtgtgtatgtggtgggcagagtggacacaactcag

SEQ ID NO: 38730 - DNA, 80 bp, synthetic construct; identical to SEQ ID NO: 10558
  source 1..80: mol_type = other DNA

SEQ ID NO: 38731 - DNA, 80 bp, synthetic construct
  source 1..80: mol_type = other DNA
ctgaagaagatttcaatgcttttgtgagctctggaaccatttctcttccctttctgggctaaactccttgaataagcgga

SEQ ID NO: 38732 - DNA, 80 bp, synthetic construct
  source 1..80: mol_type = other DNA
acacctgtaatcccagtactttgggaggctgaggcttgcggatcacttgaggtcaggagtttgagaccagcctggccaac

SEQ ID NO: 38733 - DNA, 80 bp, synthetic construct
  source 1..80: mol_type = other DNA
ttggcaacacggagagagactccatctcaaaacaaaacaaaacaaaaaaagagaaatacctgagactgggtaatttataa

SEQ ID NO: 38734 - DNA, 80 bp, synthetic construct
  source 1..80: mol_type = other DNA
ctgtcttggctcactgcaagctccgcctcccgggttcaagcagttctcctgtctcagcctccaagtagctgggattacag

SEQ ID NO: 38735 - DNA, 80 bp, synthetic construct; identical to SEQ ID NO: 10559
  source 1..80: mol_type = other DNA

SEQ ID NO: 38736 - DNA, 80 bp, synthetic construct
  source 1..80: mol_type = other DNA
gtaaaatatacataaagggaacaagccttcagtgtataagctaatgaattgttacatgtgtgtacccaccatccagatca

SEQ ID NO: 38737 - DNA, 80 bp, synthetic construct
  source 1..80: mol_type = other DNA
gagcacttattggggttttaaattgttgtctgttatgaataaagctgccctaaacgttctggtggtatatgtctgttcat

SEQ ID NO: 38738 - DNA, 80 bp, synthetic construct
  source 1..80: mol_type = other DNA
acagcatatgtgttttaaaatattttagctgttcaggtggatttgtagtggtatctcattgtggttttaatttatatttc

SEQ ID NO: 38739 - DNA, 80 bp, synthetic construct; identical to SEQ ID NO: 10560
  source 1..80: mol_type = other DNA

SEQ ID NO: 38740 - DNA, 80 bp, synthetic construct
  source 1..80: mol_type = other DNA
gatttacaagagtgctttatatatttaggatgagtcctttctcaggtatgtattttgcaaatgtttcctgcaatttgtgg

SEQ ID NO: 38741 - DNA, 80 bp, synthetic construct
  source 1..80: mol_type = other DNA
caggtgtgcgccaccacgctcagctaatttttgtatttttagtagagacagggtttcactgtgttggccaggatggtctt

SEQ ID NO: 38742 - DNA, 80 bp, synthetic construct
  source 1..80: mol_type = other DNA
atttttaaaatttttacacttatttatttatttaatagacatgggttctcactgtgttgcccaggctagagtgcagtgac

SEQ ID NO: 38743 - DNA, 80 bp, synthetic construct; identical to SEQ ID NO: 10561
  source 1..80: mol_type = other DNA

SEQ ID NO: 38744 - DNA, 80 bp, synthetic construct
  source 1..80: mol_type = other DNA
tcgttttaaccactatctccaaaaagcagaaaatagctgcactaatggaaaaccagttcaccagatttacttattctgtt

SEQ ID NO: 38745 - DNA, 80 bp, synthetic construct
  source 1..80: mol_type = other DNA
ctgtcgcccaggctggagtgcaatggcgtgatctcggctcattgcaacctccacctccccggtccaagcaatactctttc

SEQ ID NO: 38746 - DNA, 80 bp, synthetic construct
  source 1..80: mol_type = other DNA
gggattacaggcatgagccaccgcacgcggcctattttttgtatttttagtagagatggagtttcaccatgttggccagg

SEQ ID NO: 38747 - DNA, 80 bp, synthetic construct; identical to SEQ ID NO: 10562
  source 1..80: mol_type = other DNA

SEQ ID NO: 38748 - DNA, 80 bp, synthetic construct
  source 1..80: mol_type = other DNA
atacatttcttaattcaacatatatttattgaatacatttttgaatatggcaatatacattcatatttgttattattatt

SEQ ID NO: 38749 - DNA, 80 bp, synthetic construct
  source 1..80: mol_type = other DNA
aatagagacagggtttcaccatgttggccagggtggtcttgaactcctgacctcaggcaatccgcctgcctcggcgtccc

SEQ ID NO: 38750 - DNA, 80 bp, synthetic construct
  source 1..80: mol_type = other DNA
cttttgttcttcctgggattaataattgcctcctgttctttgcttacttttctaaatatttattcctaattcaaaaccag

SEQ ID NO: 38751 - DNA, 80 bp, synthetic construct; identical to SEQ ID NO: 10563
  source 1..80: mol_type = other DNA

SEQ ID NO: 38752 - DNA, 80 bp, synthetic construct
  source 1..80: mol_type = other DNA
cttttggtgttggtgctgctgtggagaaaaaaagatgacattctaattcataatcctttctgtgcaatcttttagttttg

SEQ ID NO: 38753 - DNA, 80 bp, synthetic construct
  source 1..80: mol_type = other DNA
acatctttatctcctttattccactttctcctcttttcctagaatccctgttagtttgttggcatatcttctattataca

SEQ ID NO: 38754 - DNA, 80 bp, synthetic construct
  source 1..80: mol_type = other DNA
ggagttcgagaccagtcagaccaacatggagaaaccctgtcttaactaaaaacataaaattagccgggcgtggtggcgca

SEQ ID NO: 38755 - DNA, 80 bp, synthetic construct; identical to SEQ ID NO: 10564
  source 1..80: mol_type = other DNA

SEQ ID NO: 38756 - DNA, 80 bp, synthetic construct
  source 1..80: mol_type = other DNA
ctgattatccttggttgtcgtacatattttaagtaaggcactaaacacctgattctggaagctctgtggacctgctccaa

SEQ ID NO: 38757 - DNA, 80 bp, synthetic construct
  source 1..80: mol_type = other DNA
gatatctcatctgtctttctttatctctggaaaactttatcccagtttcccttgacatactccttcaacctcctgggaga

SEQ ID NO: 38758 - DNA, 80 bp, synthetic construct
  source 1..80: mol_type = other DNA
cacttcaccctctttcaactcctgaccaagtcaactcctgttactcacatcgacagtcatttttcatgttcaagacccct

SEQ ID NO: 38759 - DNA, 80 bp, synthetic construct
  source 1..80: mol_type = other DNA
ttttttcttgtcatgctatgtgttctttcttgttcaaggcagagtcgcggctgggttgttaggatgctcgcgcccctgta

SEQ ID NO: 38760 - DNA, 80 bp, synthetic construct; identical to SEQ ID NO: 10565
  source 1..80: mol_type = other DNA

SEQ ID NO: 38761 - DNA, 80 bp, synthetic construct
  source 1..80: mol_type = other DNA
ctgtgttttcattctttctacctcaactttttttattctaactaaaatgatacactctcaatgaggtctgcccccttgct

SEQ ID NO: 38762 - DNA, 80 bp, synthetic construct
  source 1..80: mol_type = other DNA
attacatactggccctgagctcataggttattgggaccgcagattacatgtttttcctcacggccagaaaccatcaaaaa

SEQ ID NO: 38763 - DNA, 80 bp, synthetic construct
  source 1..80: mol_type = other DNA
acaaaaaatggatactcgatccacctggggtctctcttgtcttctacttactaattgatttaaagtaattttgcaggggc

SEQ ID NO: 38764 - DNA, 80 bp, synthetic construct
  source 1..80: mol_type = other DNA
gatttctttccatccttcggggcagggcagtatactgatctgggaatatggttattcctggagatttttattttctttcg

SEQ ID NO: 38765 - DNA, 80 bp, synthetic construct; identical to SEQ ID NO: 10566
  source 1..80: mol_type = other DNA

SEQ ID NO: 38766 - DNA, 80 bp, synthetic construct
  source 1..80: mol_type = other DNA
ctcagtgggacagcccagcttagacttttgggagactttagacttcttttttgccttcacttgctaggctaaattttaca

SEQ ID NO: 38767 - DNA, 80 bp, synthetic construct
  source 1..80: mol_type = other DNA
tggatgaccaaactaggatgttatagtgctggatgtagtaattcattttttcaaatcttaactttattaagataacatgg

SEQ ID NO: 38768 - DNA, 80 bp, synthetic construct
  source 1..80: mol_type = other DNA
taaattgctaaggaaccctggaatcatttgctggcattcatcctttcaagcaaggtgcctgttacaaaatatctgctcaa

SEQ ID NO: 38769 - DNA, 80 bp, synthetic construct; identical to SEQ ID NO: 10567
  source 1..80: mol_type = other DNA

SEQ ID NO: 38770 - DNA, 80 bp, synthetic construct
  source 1..80: mol_type = other DNA
gactgtttcttttgttggttcgtttgttttttcagccttagcacatttatcccttggagaagacaatggaaaatagggca

SEQ ID NO: 38771 - DNA, 80 bp, synthetic construct
  source 1..80: mol_type = other DNA
aaatcgagaaacatttgggcaccgtttgtgggactgtacatatgggtgttatctgtggcccctaggaaaacagaagagga

SEQ ID NO: 38772 - DNA, 80 bp, synthetic construct
  source 1..80: mol_type = other DNA
cttagaccgctcggccacgctaccacccacagggtgcgtcgccgctttcagtttcacccaagtgactgtcgcccctttcc

SEQ ID NO: 38773 - DNA, 80 bp, synthetic construct; identical to SEQ ID NO: 10568
  source 1..80: mol_type = other DNA

SEQ ID NO: 38774 - DNA, 80 bp, synthetic construct
  source 1..80: mol_type = other DNA
acggaacttcacaagggaggaaaagagtgaactcattattatttgtcttgtcttcgtttcagaggcggtacatctacgaa

SEQ ID NO: 38775 - DNA, 80 bp, synthetic construct
  source 1..80: mol_type = other DNA
taggaattggcccctgccttgtactacgtagttttgtcatccaaagtgttttagaagtgaattgaatcatagttacgcct

SEQ ID NO: 38776 - DNA, 80 bp, synthetic construct
  source 1..80: mol_type = other DNA
agggggcaaggcgtctgttttgccattttacttcttcttgatccaaaatgagtaagacaacaaaggaagttgacaaaacg

SEQ ID NO: 38777 - DNA, 80 bp, synthetic construct; identical to SEQ ID NO: 10569
  source 1..80: mol_type = other DNA

SEQ ID NO: 38778 - DNA, 80 bp, synthetic construct
  source 1..80: mol_type = other DNA
ggaatggcttaccaccaggttgccaccaataacattccatatgaaaaaagaaaggaaacaaaaaactgacaaaaaactcc

SEQ ID NO: 38779 - DNA, 80 bp, synthetic construct
  source 1..80: mol_type = other DNA
aataatgagcaagactgatcattaatgtcctgctcttgagtcctactttgttccaagctgtgttcctattaatccattcc

SEQ ID NO: 38780 - DNA, 80 bp, synthetic construct
  source 1..80: mol_type = other DNA
gggctgctttctaaattttgttcttcctgtcaggtcactccaacaatggcagttgaatcccatctctatttgttctcttc

SEQ ID NO: 38781 - DNA, 80 bp, synthetic construct; identical to SEQ ID NO: 10570
  source 1..80: mol_type = other DNA

SEQ ID NO: 38782 - DNA, 80 bp, synthetic construct
  source 1..80: mol_type = other DNA
ccagctaatttttgtatttttaccagagacggggtttcaccatgttggccaggctggtcttgaactcctgacctcaagtg

SEQ ID NO: 38783 - DNA, 80 bp, synthetic construct
  source 1..80: mol_type = other DNA
ggggaatgataaagaataaattcaaccagatatataaaatgtgaagtagtgatacatgccatgaaggaaaagagcaagag

SEQ ID NO: 38784 - DNA, 80 bp, synthetic construct
  source 1..80: mol_type = other DNA
agggagaagagaatttcaggccaagggaacagtaattacaaaaggcttggcaggaatgccattggcatgttcaaggaacg

SEQ ID NO: 38785 - DNA, 80 bp, synthetic construct; identical to SEQ ID NO: 10571
  source 1..80: mol_type = other DNA

SEQ ID NO: 38786 - DNA, 80 bp, synthetic construct
  source 1..80: mol_type = other DNA
gcccggctaattttgtgtttttagtagagatgtggtttctccatgttggtcaggctggtctcgatctcctggcctcagat

SEQ ID NO: 38787 - DNA, 80 bp, synthetic construct
  source 1..80: mol_type = other DNA
atttatcctatgttgaccgtctctggagagatcatttcctcccaaaattctcctcatttttgtttagtcatccagggctt

SEQ ID NO: 38788 - DNA, 80 bp, synthetic construct
  source 1..80: mol_type = other DNA
cccaaaattctcctcatttttgtttagtcatccagggcttgcttactggttaaaactaggagcacttgcctcatcaagag

SEQ ID NO: 38789 - DNA, 80 bp, synthetic construct
  source 1..80: mol_type = other DNA
tctcggctcactgcaacctctgcctcccaggttcaagtgattattttgcctcagacccttgaggtagctgggactacagt

SEQ ID NO: 38790 - DNA, 80 bp, synthetic construct; identical to SEQ ID NO: 10572
  source 1..80: mol_type = other DNA

SEQ ID NO: 38791 - DNA, 80 bp, synthetic construct
  source 1..80: mol_type = other DNA
tttacataaagccagtgtactcttaaaagtaatctcatcatgtcatttcttcctgcttagaattcccagtggcttcacat

SEQ ID NO: 38792 - DNA, 80 bp, synthetic construct
  source 1..80: mol_type = other DNA
ctggaagtgttctgctctttaatctccctggaatgctggaatcacatttttgtccaactaggcctttagttttcagttta

SEQ ID NO: 38793 - DNA, 80 bp, synthetic construct
  source 1..80: mol_type = other DNA
agggcagggtgtgatttacagtgtgcgatttacagtgtgcattattttgtctcaccttacttttctctatgttcccttta

SEQ ID NO: 38794 - DNA, 80 bp, synthetic construct
  source 1..80: mol_type = other DNA
cattgtgctagacctagcctttgagggatttctgctgtgagattaaagtggtcaagagattaacaaacttgtctaaagtg

SEQ ID NO: 38795 - DNA, 80 bp, synthetic construct; identical to SEQ ID NO: 10573
  source 1..80: mol_type = other DNA

SEQ ID NO: 38796 - DNA, 80 bp, synthetic construct
  source 1..80: mol_type = other DNA
cagctcttaacgtgacgtgtctggagtttgttccttctgatgttcccatgtgttaggagtattcttctttctggtgggtt

SEQ ID NO: 38797 - DNA, 80 bp, synthetic construct
  source 1..80: mol_type = other DNA
ggaaaaaagctgcagaccttcacggtgagtcttacagctcataaaagcaatgtggacccaaacagtaaccagtcgcaaaa

SEQ ID NO: 38798 - DNA, 80 bp, synthetic construct
  source 1..80: mol_type = other DNA
ctgattggtgcatttacaatccctgagctagatacaaaggttctccacgtccccaccagattagttagatacagagtttt

SEQ ID NO: 38799 - DNA, 80 bp, synthetic construct
  source 1..80: mol_type = other DNA
acagagtgccgatatgtgtatttacaatccctgagctagacataaagattctccacgtccccaccagactcaggatccca

SEQ ID NO: 38800 - DNA, 80 bp, synthetic construct; identical to SEQ ID NO: 10574
  source 1..80: mol_type = other DNA

SEQ ID NO: 38801 - DNA, 80 bp, synthetic construct
  source 1..80: mol_type = other DNA
ctccagctggcccgcaagcgccgcatgcagccccggttcccgctcgcgcctctctctccacacctccctgcaagctgagg

SEQ ID NO: 38802 - DNA, 80 bp, synthetic construct
  source 1..80: mol_type = other DNA
gtacttctccactgcaggaaacccggggcaaagctgagagccttgctcaaaataagttctcaaaacctattttttttttt

SEQ ID NO: 38803 - DNA, 80 bp, synthetic construct
  source 1..80: mol_type = other DNA
agtagagacgaggtttcaccatgttggccaggatggtctagatttcctgaccttgtgatcgcccgcctcggcctcccaaa

SEQ ID NO: 38804 - DNA, 80 bp, synthetic construct; identical to SEQ ID NO: 10575
  source 1..80: mol_type = other DNA

SEQ ID NO: 38805 - DNA, 80 bp, synthetic construct
  source 1..80: mol_type = other DNA
ggttcaagtccctgttcgggcgggagtggtggcttttagtacctgattctggtatcatgtttgaaaaagccaaaaaggat

SEQ ID NO: 38806 - DNA, 80 bp, synthetic construct
  source 1..80: mol_type = other DNA
aatacatgggccctctacagtgagatagccccagattttctgaagaaaactaacatttaaggacaaccttagaatacgaa

SEQ ID NO: 38807 - DNA, 80 bp, synthetic construct; identical to SEQ ID NO: 10576
  source 1..80: mol_type = other DNA

SEQ ID NO: 38808 - DNA, 80 bp, synthetic construct
  source 1..80: mol_type = other DNA
gcgtggtggcgggcgcatgtagtcccagctactcgggaggctgaggctggagaagggcgtgaacccgggaggtagagctt

SEQ ID NO: 38809 - DNA, 80 bp, synthetic construct
  source 1..80: mol_type = other DNA
tgcggtcaggagttcgagaccagccgggccaacatgctgaaacagtctctactaaaaatacaaaaattagccgagagtgg

SEQ ID NO: 38810 - DNA, 80 bp, synthetic construct
  source 1..80: mol_type = other DNA
aaaaatagtgtctgattctgcaaaggagaggaacagactctgaattgtgatggctccaataaggataaagcagtctctgg

SEQ ID NO: 38811 - DNA, 80 bp, synthetic construct; identical to SEQ ID NO: 10577
  source 1..80: mol_type = other DNA

SEQ ID NO: 38812 - DNA, 80 bp, synthetic construct
  source 1..80: mol_type = other DNA
taatctaagtttgagatgttgattgtgtggaataagatagtgacaagaagcatggaaagaaaaccataacatttaatatg

SEQ ID NO: 38813 - DNA, 80 bp, synthetic construct
  source 1..80: mol_type = other DNA
aggaaactttatatagtaaaaaattctatgaagaaaataaaacagcttgaggttgatgtgatgggaggttggtgagtgaa

SEQ ID NO: 38814 - DNA, 80 bp, synthetic construct
  source 1..80: mol_type = other DNA
cactggaaagagatgatactcataagaagaactaaaagagatttactagaacttgataagccgtcgggacaaagagagct

SEQ ID NO: 38815 - DNA, 80 bp, synthetic construct; identical to SEQ ID NO: 10578
  source 1..80: mol_type = other DNA

SEQ ID NO: 38816 - DNA, 80 bp, synthetic construct
  source 1..80: mol_type = other DNA
cttaggtggaaaatttccaaaacgtcctgtccagaaacctgacaattaacctgcacgggcgtccatccattttgtctgga

SEQ ID NO: 38817 - DNA, 80 bp, synthetic construct
  source 1..80: mol_type = other DNA
tgtgctcaaacgtcttgtaaggccgtcttaatgtacagcaaacttcttgtaaggccgtcttaatgtacagcaaactcctt

SEQ ID NO: 38818 - DNA, 80 bp, synthetic construct
  source 1..80: mol_type = other DNA
atgcaacttcatggggtaaagaatatggcgctcttggtgcaaactcttgggcatctgctaggatgtgagaacggtagtaa

SEQ ID NO: 38819 - DNA, 80 bp, synthetic construct; identical to SEQ ID NO: 10579
  source 1..80: mol_type = other DNA

SEQ ID NO: 38820 - DNA, 80 bp, synthetic construct
  source 1..80: mol_type = other DNA
gttttcagccgtgaccgtagcactcggtctttgactgtagactgttgtgtctacatagtgctagtttgtattgctagttt

SEQ ID NO: 38821 - DNA, 80 bp, synthetic construct
  source 1..80: mol_type = other DNA
cccggctaattttttgtatctttagtagagacggggtttcaccatgttggccaggctattctggaactgctgacctcaag

SEQ ID NO: 38822 - DNA, 80 bp, synthetic construct
  source 1..80: mol_type = other DNA
gaaaacgagaacgattatcatgcgaacgccagcataacccagatagcactgaaaaagtctaagtagactgttacttcaat

SEQ ID NO: 38823 - DNA, 80 bp, synthetic construct; identical to SEQ ID NO: 10580
  source 1..80: mol_type = other DNA

SEQ ID NO: 38824 - DNA, 80 bp, synthetic construct
  source 1..80: mol_type = other DNA
agaggaaattctgataccacatattggtctcttgcagtgtacagctgattctatcagacgaccttgctctctacaacata

SEQ ID NO: 38825 - DNA, 80 bp, synthetic construct
  source 1..80: mol_type = other DNA
acaagttagatcttgctcatctatctgcatatttggcagacagtgcaaatgtaaattttggcaaattccattcagactat

SEQ ID NO: 38826 - DNA, 80 bp, synthetic construct
  source 1..80: mol_type = other DNA
ccagcctggctaacatggtgaaaccccgtttctactaaaaatacaaaaaatcaacggggtgtggtggcacatgcctgtaa

SEQ ID NO: 38827 - DNA, 80 bp, synthetic construct; identical to SEQ ID NO: 10581
  source 1..80: mol_type = other DNA

SEQ ID NO: 38828 - DNA, 80 bp, synthetic construct
  source 1..80: mol_type = other DNA
ttgctggccataggatagatgttaaaatgtttacttggtgtaaaatcatattttcaaaatgtgggacaagaggaatgcta

SEQ ID NO: 38829 - DNA, 80 bp, synthetic construct
  source 1..80: mol_type = other DNA
agcatctcatctacaaaataggaaggtgctctgacgaggagatgaggttataggtagaaaaggctgaagaaactacaaac

SEQ ID NO: 38830 - DNA, 80 bp, synthetic construct
  source 1..80: mol_type = other DNA
tctcctgttttttggaaaactggcctgttttaaatttcagtttgattacttggcaccctgcacaaagggctcccttctgg

SEQ ID NO: 38831 - DNA, 80 bp, synthetic construct
  source 1..80: mol_type = other DNA
taaataggactttatcaatctcttgctaaaaatacaatttatttggaatccaagctttgtttcccaaatttatcatttat

SEQ ID NO: 38832 - DNA, 80 bp, synthetic construct; identical to SEQ ID NO: 10582
  source 1..80: mol_type = other DNA

SEQ ID NO: 38833 - DNA, 80 bp, synthetic construct
  source 1..80: mol_type = other DNA
tttattaaatataggtaatatctgcttaagtagttttattgtagttatgttcttcttttacattcttgttgtattttacg

SEQ ID NO: 38834 - DNA, 80 bp, synthetic construct
  source 1..80: mol_type = other DNA
tattatttatgtaattagtcctattataaattacttctaattgccattattaactactcctattgagaggtgacagcatg

SEQ ID NO: 38835 - DNA, 80 bp, synthetic construct
  source 1..80: mol_type = other DNA
gtggacggagaggcacgagcgggaaccggggctgtgtgcggcgcttgccggccagctggagttccgggtgggcgtgggct

SEQ ID NO: 38836 - DNA, 80 bp, synthetic construct; identical to SEQ ID NO: 10583
  source 1..80: mol_type = other DNA

SEQ ID NO: 38837 - DNA, 80 bp, synthetic construct
  source 1..80: mol_type = other DNA
gggatgtggagagtctttatatgtagctcaggattgtaaatacaccaatcagcaccctgtgtttagctcaaggtttgtga

SEQ ID NO: 38838 - DNA, 80 bp, synthetic construct
  source 1..80: mol_type = other DNA
gtgcaccaatcgacactctgtatctagctgctctggtgaggatgtggagaacctttatgtctagctcagagattgtaaat

SEQ ID NO: 38839 - DNA, 80 bp, synthetic construct
  source 1..80: mol_type = other DNA
gagaacctgtgtgtcaaaactctgtatctaactaatctgttggggaggtggagaacctttgtatctagctcagggattgt

SEQ ID NO: 38840 - DNA, 80 bp, synthetic construct; identical to SEQ ID NO: 10584
  source 1..80: mol_type = other DNA

SEQ ID NO: 38841 - DNA, 80 bp, synthetic construct
  source 1..80: mol_type = other DNA
acatctgaacatcagaaggggcagactccagacccaccaccttaagagctgtaatgctcaccgtgagggtccgtggcttc

SEQ ID NO: 38842 - DNA, 80 bp, synthetic construct
  source 1..80: mol_type = other DNA
tttattatataattgttggattttttttttgtgggggtggaaaggtttggtatggctatgtctcagttggctccctaaaa

SEQ ID NO: 38843 - DNA, 80 bp, synthetic construct
  source 1..80: mol_type = other DNA
gatggtttgatagataataatggtttataggtgattggaggtaacaggatgattgccaatggcttttccttcttttcaga

SEQ ID NO: 38844 - DNA, 80 bp, synthetic construct; identical to SEQ ID NO: 10585
  source 1..80: mol_type = other DNA

SEQ ID NO: 38845 - DNA, 80 bp, synthetic construct
  source 1..80: mol_type = other DNA
ctcagcctcccaagtagctgggactacaggcgcccgccaccacacctggctaatttttttgtatttttagtagagacggg

SEQ ID NO: 38846 - DNA, 80 bp, synthetic construct
  source 1..80: mol_type = other DNA
tgaagggggaatatcaactgggccaaatgacattgagaggctgagcaaattgaagcctgaaaattgaacattgggagagc

SEQ ID NO: 38847 - DNA, 80 bp, synthetic construct
  source 1..80: mol_type = other DNA
cagattgctcctgtaggacctgggagacacctcaaatactgtgagtgcccaaactgtggaagtgagaaagggagatcctc

SEQ ID NO: 38848 - DNA, 80 bp, synthetic construct; identical to SEQ ID NO: 10586
  source 1..80: mol_type = other DNA

SEQ ID NO: 38849 - DNA, 80 bp, synthetic construct
  source 1..80: mol_type = other DNA
aactcttcttgcccactgcctggaaacagatttggtgctgttaggggaggcacagtgggagtgagactggcccttcagat

SEQ ID NO: 38850 - DNA, 80 bp, synthetic construct
  source 1..80: mol_type = other DNA
gagagtctgaactcagacacgcctagccctgccctcacctgatggtccttctttacccaccctgataactgaacacaaag

SEQ ID NO: 38851 - DNA, 80 bp, synthetic construct
  source 1..80: mol_type = other DNA
tttcacaccctgccacctccactggaacagatgctggtatccaaggctgagagacccatagatggttcacatcacaggac

SEQ ID NO: 38852 - DNA, 80 bp, synthetic construct
  source 1..80: mol_type = other DNA
aagaatctgaacaacagttttagccttagaccctccctctgacagagcctacccaaatgagaaggaaccagaaaaccaac

SEQ ID NO: 38853 - DNA, 80 bp, synthetic construct; identical to SEQ ID NO: 10587
  source 1..80: mol_type = other DNA

SEQ ID NO: 38854 - DNA, 80 bp, synthetic construct
  source 1..80: mol_type = other DNA
gaacctgggaggcggaggttgcaatgagctgagatcatgtcactgcactccagcctgagcaacacagtgagacttcgtct

SEQ ID NO: 38855 - DNA, 80 bp, synthetic construct
  source 1..80: mol_type = other DNA
gcttgaaggcaaggtctttgaattaaaccaatccaacaaacacaaagaaaaaagaaaaagaaaatatgaacaaagcctcc

SEQ ID NO: 38856 - DNA, 80 bp, synthetic construct
  source 1..80: mol_type = other DNA
aaacacctggaaaattcatcacaaaaaagatcattgcctaggcacattgtcatcaagttatctaaagttaaggcaaagga

SEQ ID NO: 38857 - DNA, 80 bp, synthetic construct; identical to SEQ ID NO: 10588
  source 1..80: mol_type = other DNA

SEQ ID NO: 38858 - DNA, 80 bp, synthetic construct
  source 1..80: mol_type = other DNA
ctaaaaatacaaaaaattagccaggtgtggtggcgggcacctgtagtcccagctactcgggaggctgaggcaggagaatg

SEQ ID NO: 38859 - DNA, 80 bp, synthetic construct
  source 1..80: mol_type = other DNA
tcttatatcagacaaaacaaactttaaagcaacagcagttaaaaaagacaaagagagacattatataatggtaaaaggcc

SEQ ID NO: 38860 - DNA, 80 bp, synthetic construct; identical to SEQ ID NO: 10589
  source 1..80: mol_type = other DNA

SEQ ID NO: 38861 - DNA, 80 bp, synthetic construct
  source 1..80: mol_type = other DNA
aaatcaactccaaaaggaaccttcaaaaccatgcaaatacatagaaattaaataagctgctcctgaatgaacattaggtc

SEQ ID NO: 38862 - DNA, 80 bp, synthetic construct
  source 1..80: mol_type = other DNA
ctaaggtcacatctcaaggaactggagaaacaagaacaaaccaaacccaaacacagcagaagaaaggaaatgaccaagat

SEQ ID NO: 38863 - DNA, 80 bp, synthetic construct
  source 1..80: mol_type = other DNA
atgggagatattacagctgacaccacagaaatacaaaagatcattcaaggctgctatgaatacctctatacacataaact

SEQ ID NO: 38864 - DNA, 80 bp, synthetic construct; identical to SEQ ID NO: 10590
  source 1..80: mol_type = other DNA

SEQ ID NO: 38865 - DNA, 80 bp, synthetic construct
  source 1..80: mol_type = other DNA
agagtgagactccgtctcaaaaaaaaaaaaaacaaaaaaaaaattaccaggtcaggcatggtgacccatgcctgcaatct

SEQ ID NO: 38866 - DNA, 80 bp, synthetic construct
  source 1..80: mol_type = other DNA
ccaattatccaggaggcgaggctgcagtgagccgagatcatgccactgcactccagcctgggtgaccgagcgagactccg

SEQ ID NO: 38867 - DNA, 80 bp, synthetic construct
  source 1..80: mol_type = other DNA
tctatgaagccggtatcaccctaataccaaaaccaggaaaggacataaccaaaaaagaaaactacagaccaatatccctg

SEQ ID NO: 38868 - DNA, 80 bp, synthetic construct; identical to SEQ ID NO: 10591
  source 1..80: mol_type = other DNA

SEQ ID NO: 38869 - DNA, 80 bp, synthetic construct
  source 1..80: mol_type = other DNA
cttcaacatagtactgaaagtcctagccagagcaatcagataagagaaaggaagggcatccaaatcagtaaagaggaact

SEQ ID NO: 38870 - DNA, 80 bp, synthetic construct; identical to SEQ ID NO: 10592
  source 1..80: mol_type = other DNA

SEQ ID NO: 38871 - DNA, 80 bp, synthetic construct
  source 1..80: mol_type = other DNA
caaaatatcaccatcattcttcacagaattagaaaaaaaaatcctaaaattcatatggaatggaaaaagagcccacatag

SEQ ID NO: 38872 - DNA, 80 bp, synthetic construct
  source 1..80: mol_type = other DNA
cttacagccaactgatcttccacaaagcaaacaaaaacataatatggggaaaggacactcttttcaacaaatgtgctggg

SEQ ID NO: 38873 - DNA, 80 bp, synthetic construct
  source 1..80: mol_type = other DNA
caaggatttcatgcctaagaacccaaaaacaaatgcaataaaaacaaagataaatagttgggacttaattaaactaaaga

SEQ ID NO: 38874 - DNA, 80 bp, synthetic construct
  source 1..80: mol_type = other DNA
agtgggctaaggacaggaatagacaattctcaaaagaagatatccaaatggccagcaaacatataaaaaatgctcaacac

SEQ ID NO: 38875 - DNA, 80 bp, synthetic construct; identical to SEQ ID NO: 10593
  source 1..80: mol_type = other DNA

SEQ ID NO: 38876 - DNA, 80 bp, synthetic construct
  source 1..80: mol_type = other DNA
actacttagcaataaaaaggaatgaattaatggcatttgcaatgacctgaatgggattggagactattcttctttttttt

SEQ ID NO: 38877 - DNA, 80 bp, synthetic construct
  source 1..80: mol_type = other DNA
atggctaatttttgtattttagtagatacagggtttcaccttgttggccaagctgggtttgaactgctgacctcaggtga

SEQ ID NO: 38878 - DNA, 80 bp, synthetic construct
  source 1..80: mol_type = other DNA
acaatggactttgggggaagggtgggaggagagtgaggaataaaatactacaaatagggtgcagtgtatacttctcgggt

SEQ ID NO: 38879 - DNA, 80 bp, synthetic construct; identical to SEQ ID NO: 10594
  source 1..80: mol_type = other DNA

SEQ ID NO: 38880 - DNA, 80 bp, synthetic construct
  source 1..80: mol_type = other DNA
tggaggaatttagtttatagtttaagttggaagcaaagatgataatatccctccttgtttggggtgctaaaactgccttt

SEQ ID NO: 38881 - DNA, 80 bp, synthetic construct
  source 1..80: mol_type = other DNA
atatagatcctaagattggtcttaaagatgcttttcagacttttgtattctaccaaccgactgaccccacctggatttgg

SEQ ID NO: 38882 - DNA, 80 bp, synthetic construct
  source 1..80: mol_type = other DNA
taacttctaaaccttcaggaagactgatttaagcaataactccatcttccacgtggctggccttgtgttaattaaactgg

SEQ ID NO: 38883 - DNA, 80 bp, synthetic construct; identical to SEQ ID NO: 10595
  source 1..80: mol_type = other DNA

SEQ ID NO: 38884 - DNA, 80 bp, synthetic construct
  source 1..80: mol_type = other DNA
ggattccgctgagctgctccatctgcaggacatagcgggcctccacctccctcaagctgttctccaagctggccttcaga

SEQ ID NO: 38885 - DNA, 80 bp, synthetic construct
  source 1..80: mol_type = other DNA
tctgctgaggccagtgcttgtctagctcctctcggttcttccaagacagctcgtcttattgggcccagatgtctgccatg

SEQ ID NO: 38886 - DNA, 80 bp, synthetic construct
  source 1..80: mol_type = other DNA
tgacattggtatcatcaatgaccttgcggaacccatggatgtcgctctccacagactagcgcatggccagctctgtctca

SEQ ID NO: 38887 - DNA, 80 bp, synthetic construct; identical to SEQ ID NO: 10596
  source 1..80: mol_type = other DNA

SEQ ID NO: 38888 - DNA, 80 bp, synthetic construct
  source 1..80: mol_type = other DNA
gatccgggaaccagagcccccggcgcctgcatagacgctggccgcgctgcagactggctgggaaccgtagctgggcgcct

SEQ ID NO: 38889 - DNA, 80 bp, synthetic construct
  source 1..80: mol_type = other DNA
tgcagggtgggggcaggaagaacctgtctggtgattacatgaccaatgattgtgagtgagacaaaggttttgtaagctac

SEQ ID NO: 38890 - DNA, 80 bp, synthetic construct
  source 1..80: mol_type = other DNA
ttgggcttggtgcctgcagtttaggttaatgtcaaggtcaagggtagtgtgtttttcaaaatgtatattgtgacaccctt

SEQ ID NO: 38891 - DNA, 80 bp, synthetic construct; identical to SEQ ID NO: 10597
  source 1..80: mol_type = other DNA

SEQ ID NO: 38892 - DNA, 80 bp, synthetic construct
  source 1..80: mol_type = other DNA
gcaggcacatttactgaaaccatgatttttaaagcaggaagaaatcatagttctcaaattaaggaaagtgagcatatttc

SEQ ID NO: 38893 - DNA, 80 bp, synthetic construct
  source 1..80: mol_type = other DNA
tctactaaaaacacaaaaaattaggctgggcacagtggctgacacctgtaatcccagcgctttgggaggctgaggcaggc

SEQ ID NO: 38894 - DNA, 80 bp, synthetic construct
  source 1..80: mol_type = other DNA
gactctgtctaaaaaaaaaaaaatatatatatatatatatatacatatacacacacacacacacatatgtgtacatatat

SEQ ID NO: 38895 - DNA, 80 bp, synthetic construct; identical to SEQ ID NO: 10598
  source 1..80: mol_type = other DNA

SEQ ID NO: 38896 - DNA, 80 bp, synthetic construct
  source 1..80: mol_type = other DNA
cccaccaccacgcccggctaattttttgtacttttagtagagaccaggtttcaccgtgttagccaggatggtcttgatct

SEQ ID NO: 38897 - DNA, 80 bp, synthetic construct
  source 1..80: mol_type = other DNA
ttcaaatctcacgtcttcagaagaaaagtatcatcttggagaagacttgctgcttctgatggcaggcgactagcatcatc

SEQ ID NO: 38898 - DNA, 80 bp, synthetic construct
  source 1..80: mol_type = other DNA
ttctcctgcctcagcctcccgagtagctgggactacaggcgcccgccaccatgcccggctaattttttgtatttttagta

SEQ ID NO: 38899 - DNA, 80 bp, synthetic construct
  source 1..80: mol_type = other DNA
ttgttttgttttttttgaggcggtgtctctcgctctgtcgcccaggctggagtgcagtggcctgatctcggctcactgca

SEQ ID NO: 38900 - DNA, 80 bp, synthetic construct; identical to SEQ ID NO: 10599
  source 1..80: mol_type = other DNA

SEQ ID NO: 38901 - DNA, 80 bp, synthetic construct
  source 1..80: mol_type = other DNA
tagccgggactacaggtgccggccaccatgctcagctaatttttgtatttttagcagggacggggtttcagcatgtaggc

SEQ ID NO: 38902 - DNA, 80 bp, synthetic construct
  source 1..80: mol_type = other DNA
tacaagattaccaccaccgttttacatgagactttttccctcctcttccttctcctctttctgtatctttcctggattac

SEQ ID NO: 38903 - DNA, 80 bp, synthetic construct
  source 1..80: mol_type = other DNA
gagaggacttttgacattttcccttttctatgcttcatcagccctgagggttgtctttctgtaattcatccaccaaaatg

SEQ ID NO: 38904 - DNA, 80 bp, synthetic construct; identical to SEQ ID NO: 10600
  source 1..80: mol_type = other DNA

SEQ ID NO: 38905 - DNA, 80 bp, synthetic construct
  source 1..80: mol_type = other DNA
gtcatactgacctctctgttcagaacacttttctgtctctccatagccttttagggaaagctcaaagtatttagtattgt

SEQ ID NO: 38906 - DNA, 80 bp, synthetic construct
  source 1..80: mol_type = other DNA
gatgtgattaaggttagggaacttgtgatggagagatgatcctaatcactagagtcttaaaagtggaaagaggaagcaga

SEQ ID NO: 38907 - DNA, 80 bp, synthetic construct
  source 1..80: mol_type = other DNA
acagagactttgatccaacaactgcaaacaactgaattttgccaataatctgaatgagcagaaaacagattctcccttgg

SEQ ID NO: 38908 - DNA, 80 bp, synthetic construct; identical to SEQ ID NO: 10601
  source 1..80: mol_type = other DNA

SEQ ID NO: 38909 - DNA, 80 bp, synthetic construct
  source 1..80: mol_type = other DNA
gtttctcatggcatggtgactggattctgagagggagcatcccaagatttagcattccagaaaaccaagtcagaaggtgc

SEQ ID NO: 38910 - DNA, 80 bp, synthetic construct
  source 1..80: mol_type = other DNA
atgctgcattgaggtcagtttttggagactgtatactacacaaagtaacgattttttcctttgtagcctcatctttatcc

SEQ ID NO: 38911 - DNA, 80 bp, synthetic construct
  source 1..80: mol_type = other DNA
tctcaagtagctgggattataggtgtgtgccaccacacctggctaatttttgtatttttagtgtgtgtcggtggcggggg

SEQ ID NO: 38912 - DNA, 80 bp, synthetic construct
  source 1..80: mol_type = other DNA
catgaacctttgattttctgctcaggtctacttgaactaggaactagtaattttcccaggcattcatacctttttagctt

SEQ ID NO: 38913 - DNA, 80 bp, synthetic construct; identical to SEQ ID NO: 10602
  source 1..80: mol_type = other DNA

SEQ ID NO: 38914 - DNA, 80 bp, synthetic construct
  source 1..80: mol_type = other DNA
attctcctgcttcagcctcccgagtagctgggactacaggtgcccaccaccacgcccggctaattttttgtatttttagt

SEQ ID NO: 38915 - DNA, 80 bp, synthetic construct
  source 1..80: mol_type = other DNA
ctattctttaacaggccataagctccttagaggagtgcattttgtactctcagattccccaggtagacctactgtatatg

SEQ ID NO: 38916 - DNA, 80 bp, synthetic construct
  source 1..80: mol_type = other DNA
agagctaaaaaacaagaaagaaaatgtctagagtcacttgtgaggctggaactgtggttttctttctttcctttctttct

SEQ ID NO: 38917 - DNA, 80 bp, synthetic construct; identical to SEQ ID NO: 10603
  source 1..80: mol_type = other DNA

SEQ ID NO: 38918 - DNA, 80 bp, synthetic construct
  source 1..80: mol_type = other DNA
gctgtttgtttaattgacctttttgtaaaggttccgaggacaacatagtaagggatgctcattcatctctctgccagtgc

SEQ ID NO: 38919 - DNA, 80 bp, synthetic construct
  source 1..80: mol_type = other DNA
acgcggtggcgcgcgcctgtaatcccagctccccgggaggctgaggtcggcggatcgtgggtgctcgggggttcggagct

SEQ ID NO: 38920 - DNA, 80 bp, synthetic construct
  source 1..80: mol_type = other DNA
ctgcgagcaacgcctgcagttccgcccgggacatccgacgagacccggtctcttttaacttcccttttcgggatttcttt

SEQ ID NO: 38921 - DNA, 80 bp, synthetic construct; identical to SEQ ID NO: 10604
  source 1..80: mol_type = other DNA

SEQ ID NO: 38922 - DNA, 80 bp, synthetic construct
  source 1..80: mol_type = other DNA
ccaagtcagtttagcaagaacccccatatcatctatgtttaacctccatttctgatcaggctcctcattctccaccatcc

SEQ ID NO: 38923 - DNA, 80 bp, synthetic construct
  source 1..80: mol_type = other DNA
tgctatattcagaactgaggccgatctctttccctcactgcaaaacctccttgcaatggtcccttgtgcctatcccgata

SEQ ID NO: 38924 - DNA, 80 bp, synthetic construct
  source 1..80: mol_type = other DNA
ttccagctttttcaggaacttcccacataaaaacctgtacacaactattcttatcggattggataaaacacctaaagaga

SEQ ID NO: 38925 - DNA, 80 bp, synthetic construct
  source 1..80: mol_type = other DNA
tgactaaaataaaaatagtggcaacaaccaaatgctgatgaggctgtatacatgtaggtgggaatgtgaaatgtagctgt

SEQ ID NO: 38926 - DNA, 80 bp, synthetic construct; identical to SEQ ID NO: 10605
  source 1..80: mol_type = other DNA

SEQ ID NO: 38927 - DNA, 80 bp, synthetic construct
  source 1..80: mol_type = other DNA
tgccagaggttgaggcaggaacagtaggcaagtgggtgtggctgtaaaagggccaaaaggaatccttgtggtgatggaaa

SEQ ID NO: 38928 - DNA, 80 bp, synthetic construct
  source 1..80: mol_type = other DNA
aaaattaaacatttaatttaaaaaaagaccaaagtcattaaaattggagggatagggagctgaaagggaagagcaagaga

SEQ ID NO: 38929 - DNA, 80 bp, synthetic construct
  source 1..80: mol_type = other DNA
tgcagacatagataaggaagctggaaacttgcatgggggaaggctggcagctgcaccgatagaaaaggtctacctggggg

SEQ ID NO: 38930 - DNA, 80 bp, synthetic construct; identical to SEQ ID NO: 10606
  source 1..80: mol_type = other DNA

SEQ ID NO: 38931 - DNA, 80 bp, synthetic construct
  source 1..80: mol_type = other DNA
agacaacgaggctgcttcaaaatcccaaagtccaaaggaggactgcttcataagggaaggattgtttataggttggtata

SEQ ID NO: 38932 - DNA, 80 bp, synthetic construct
  source 1..80: mol_type = other DNA
taaacattgttctttcaacaggtttggtgctgagtggaaggaaagagtctgaggataatgcataaggtcatgtgttccat

SEQ ID NO: 38933 - DNA, 80 bp, synthetic construct
  source 1..80: mol_type = other DNA
cctccgagtaggaagacaggggttgaatatgccaagagctagcaaattaggaggttaggaaaaaggtggctgagggaata

SEQ ID NO: 38934 - DNA, 80 bp, synthetic construct; identical to SEQ ID NO: 10607
  source 1..80: mol_type = other DNA

SEQ ID NO: 38935 - DNA, 80 bp, synthetic construct
  source 1..80: mol_type = other DNA
acattcttcccttgcccgcaataaacgggcccttattgtatctttccactgcttactcctaacctataaaactagctgca

SEQ ID NO: 38936 - DNA, 80 bp, synthetic construct
  source 1..80: mol_type = other DNA
gaacagaggtcgcaaataaaatgtaattagtattgctcaagattaaacttctttcagcacgtttgccttttcttctttta

SEQ ID NO: 38937 - DNA, 80 bp, synthetic construct
  source 1..80: mol_type = other DNA
gagtgtttctgtattgtagaaggaaaattccatatttgtattgccgtgggcacaaaaaaccgagcgctctcatgccgaaa

SEQ ID NO: 38938 - DNA, 80 bp, synthetic construct; identical to SEQ ID NO: 10608
  source 1..80: mol_type = other DNA

SEQ ID NO: 38939 - DNA, 80 bp, synthetic construct
  source 1..80: mol_type = other DNA
aggtcagtgaatacgagagcatgaccgtgcactaactcgtcggaaaagtagaagtcaactgtgtgcgtatgtgttgagtt

SEQ ID NO: 38940 - DNA, 80 bp, synthetic construct
  source 1..80: mol_type = other DNA
ctctgagtaaacagcaaattgtggataagttaactttcaattttcataggaggcattttctgcatagaaaccctgttcct

SEQ ID NO: 38941 - DNA, 80 bp, synthetic construct
  source 1..80: mol_type = other DNA
aattccggagacaatccattaggagttagttgagattagcataaccttttgaaaagacagttatgaagatgacagagaag

SEQ ID NO: 38942 - DNA, 80 bp, synthetic construct; identical to SEQ ID NO: 10609
  source 1..80: mol_type = other DNA

SEQ ID NO: 38943 - DNA, 80 bp, synthetic construct
  source 1..80: mol_type = other DNA
tgcacatttggtaaatttaccgagagctactggagaaaaagcagactttttgtttctctcctgacaaggtttggtgaccc

SEQ ID NO: 38944 - DNA, 80 bp, synthetic construct
  source 1..80: mol_type = other DNA
tgacttctctacaagtttccaaacaaagatcgtggtgctcctgatcttatttcaccaacaaatggaatatgtgatttttt

SEQ ID NO: 38945 - DNA, 80 bp, synthetic construct
  source 1..80: mol_type = other DNA
tttttgtatttttagtagagacgcggtttcaccatgttggccaggctggtctcgaactcctgatctcaagagacccaccc

SEQ ID NO: 38946 - DNA, 80 bp, synthetic construct; identical to SEQ ID NO: 10610
  source 1..80: mol_type = other DNA

SEQ ID NO: 38947 - DNA, 80 bp, synthetic construct
  source 1..80: mol_type = other DNA
acgttgtctcctctatgtgcagcaagaatctcttgcttcattagtttttatgcctctgctttcagaaaacagtctggttg

SEQ ID NO: 38948 - DNA, 80 bp, synthetic construct
  source 1..80: mol_type = other DNA
attattcattgtccataggaaaaaaaattccctaattttggcacggtaggttctgtttattcaccagacttgctaccgtt

SEQ ID NO: 38949 - DNA, 80 bp, synthetic construct
  source 1..80: mol_type = other DNA
aacagctagggtcaaggaatcaatctgcaaatattcagagccagtaggcttgtactacactagtcactatggaaaatgaa

SEQ ID NO: 38950 - DNA, 80 bp, synthetic construct; identical to SEQ ID NO: 10611
  source 1..80: mol_type = other DNA

SEQ ID NO: 38951 - DNA, 80 bp, synthetic construct
  source 1..80: mol_type = other DNA
cgcccggctaattttttgtatttttagtagagacggggtttcaccgtgttagccaggatggtctcgatctcctgacctgg

SEQ ID NO: 38952 - DNA, 80 bp, synthetic construct
  source 1..80: mol_type = other DNA
tggaggtggggtggggaagaccctatttgaagtgggctttgaagaatgaacaagatttttattagggaacaaaatggaaa

SEQ ID NO: 38953 - DNA, 80 bp, synthetic construct
  source 1..80: mol_type = other DNA
ggatggcatcaagatttcaatttcaagctttctggtcatgcacagtaaagctggaattagagtctcttacgtatggcagt

SEQ ID NO: 38954 - DNA, 80 bp, synthetic construct; identical to SEQ ID NO: 10612
  source 1..80: mol_type = other DNA

SEQ ID NO: 38955 - DNA, 80 bp, synthetic construct
  source 1..80: mol_type = other DNA
caggacaaaaaagcgagacccccgtttctaccaaaaaggggggggggtgggcggggggaagagagagagagagagaaagg

SEQ ID NO: 38956 - DNA, 80 bp, synthetic construct
  source 1..80: mol_type = other DNA
catactttgttctgactttgtgtgcccttactctttcctcaggtgcacgcttgggctcgttactgctcagaattttagaa

SEQ ID NO: 38957 - DNA, 80 bp, synthetic construct
  source 1..80: mol_type = other DNA
ttctacggagagagaagggttgtggggcttgttctgttgcgggttcaaacccaaattgtctttttcttttcagacttttg

SEQ ID NO: 38958 - DNA, 80 bp, synthetic construct; identical to SEQ ID NO: 10613
  source 1..80: mol_type = other DNA

SEQ ID NO: 38959 - DNA, 80 bp, synthetic construct
  source 1..80: mol_type = other DNA
tggaatgatgcctttgatggaccaagatgcagctgatgaagcattgaaccaattagcacctagcaggagggcacccttgc

SEQ ID NO: 38960 - DNA, 80 bp, synthetic construct
  source 1..80: mol_type = other DNA
ttgacacagcaggtgacaaaagaggcgcgcctaccttggggaatacggaggaacagaggaaagtgagaccaggagaaaga

SEQ ID NO: 38961 - DNA, 80 bp, synthetic construct
  source 1..80: mol_type = other DNA
gtggtggcgaatgcctgtagtcccagctactcggaaggctgaggcaggagaatcgcttgaacccggaacccgggaggcag

SEQ ID NO: 38962 - DNA, 80 bp, synthetic construct; identical to SEQ ID NO: 10614
  source 1..80: mol_type = other DNA

SEQ ID NO: 38963 - DNA, 80 bp, synthetic construct
  source 1..80: mol_type = other DNA
aatttgttacagtaaccacaggaaattaacaccaggcactatgcagtaaattccgtatgaacaactcaaatataagaatt

SEQ ID NO: 38964 - DNA, 80 bp, synthetic construct
  source 1..80: mol_type = other DNA
gagttccagaccagcctgaccaacatggagaaacccccatctctactaaaaatacaaaattagccgggcttggtagcgca

SEQ ID NO: 38965 - DNA, 80 bp, synthetic construct
  source 1..80: mol_type = other DNA
gcatattggataaaaacttccgtcagcagtgattttaatgaagatgaatgacaaaacaataagaaactccagcgctagtt

SEQ ID NO: 38966 - DNA, 80 bp, synthetic construct; identical to SEQ ID NO: 10615
  source 1..80: mol_type = other DNA

SEQ ID NO: 38967 - DNA, 80 bp, synthetic construct
  source 1..80: mol_type = other DNA
gcgaacctgcgaaccacagcgtcccctgggggtctccgtccgcgtggccgcttcctcttacatcggtgacgcaagggaag

SEQ ID NO: 38968 - DNA, 80 bp, synthetic construct
  source 1..80: mol_type = other DNA
aaacgccccggggtggggggggggggcgacattccctaatgggaaaaaagacacaccttaaacgcagtagagggcgacat

SEQ ID NO: 38969 - DNA, 80 bp, synthetic construct
  source 1..80: mol_type = other DNA
gaatccctttccaaatgttcagtatgaatggttcttacgtatcaatcccattctcctcttcgacttctgtttaccacgga

SEQ ID NO: 38970 - DNA, 80 bp, synthetic construct
  source 1..80: mol_type = other DNA
cccggttcaagccattctcctgcctcagtctcccgagtggctgggattacaggtgcgcgccaccacgccctggctaattt

SEQ ID NO: 38971 - DNA, 80 bp, synthetic construct; identical to SEQ ID NO: 10616
  source 1..80: mol_type = other DNA

SEQ ID NO: 38972 - DNA, 80 bp, synthetic construct
  source 1..80: mol_type = other DNA
ctcattctctagacctcagcttggaagttgtttctccttggaagccttccctcatctccttctcttcctctttccagctt

SEQ ID NO: 38973 - DNA, 80 bp, synthetic construct
  source 1..80: mol_type = other DNA
tgccctaatatggggcaaactctactaaaaaggagatagctttctatgtgtagattttgaatgatgttccagatttaaga

SEQ ID NO: 38974 - DNA, 80 bp, synthetic construct
  source 1..80: mol_type = other DNA
ctgacctcaagtgatcctcccacctgggactccccaagtgctgggattacaggtgtgagccaccacgcctgaccaccttt

SEQ ID NO: 38975 - DNA, 80 bp, synthetic construct; identical to SEQ ID NO: 10617
  source 1..80: mol_type = other DNA

SEQ ID NO: 38976 - DNA, 80 bp, synthetic construct
  source 1..80: mol_type = other DNA
tagttttagaaacaagagtcttcctaaggaaatataccagatgaacctggaaaatcttttcaccagaaagcaaggaggct

SEQ ID NO: 38977 - DNA, 80 bp, synthetic construct
  source 1..80: mol_type = other DNA
ttttaggacatgcaggggcagaggaatgtgttaaatactaccaaaggtgtgcaataattaaaatccaaactgtgaaactc

SEQ ID NO: 38978 - DNA, 80 bp, synthetic construct
  source 1..80: mol_type = other DNA
ctctgtcacccaggctggagtgtggtggcacaatcacggctcactgcagctttgacctcccaagctcgtctcccgagtag

SEQ ID NO: 38979 - DNA, 80 bp, synthetic construct; identical to SEQ ID NO: 10618
  source 1..80: mol_type = other DNA

SEQ ID NO: 38980 - DNA, 80 bp, synthetic construct
  source 1..80: mol_type = other DNA
tgggactacagcataggccgtcgtgcccctggctctattattagtttgttagttagtttgtttgtttgtttatttattta

SEQ ID NO: 38981 - DNA, 80 bp, synthetic construct
  source 1..80: mol_type = other DNA
atttttgtatttttagtacaggcggggtttcaccatgttggccaggctggtcttgaactcctgacctcaggcaatccatc

SEQ ID NO: 38982 - DNA, 80 bp, synthetic construct
  source 1..80: mol_type = other DNA
ggaatgggtggggatacagatgaaacaagattaaccctgacgtaataattgttgaagctgaatgatgtgtacatggagtt

SEQ ID NO: 38983 - DNA, 80 bp, synthetic construct
  source 1..80: mol_type = other DNA
caagcgattctcctgcctcagactctgagtagctgggattacgggcaagcgccaccatgcctggctaatttttgcatttt

SEQ ID NO: 38984 - DNA, 80 bp, synthetic construct; identical to SEQ ID NO: 10619
  source 1..80: mol_type = other DNA

SEQ ID NO: 38985 - DNA, 80 bp, synthetic construct
  source 1..80: mol_type = other DNA
atctttctgggagataaggaaagtaggctggaggcgttgacattcagtatgctcctttttcaaatggaattcctgtcctc

SEQ ID NO: 38986 - DNA, 80 bp, synthetic construct
  source 1..80: mol_type = other DNA
tcgttttagtctattcattctcatttccaggggtacatggtgccaccaattcttgagtcgcttaaagattctatgatgta

SEQ ID NO: 38987 - DNA, 80 bp, synthetic construct
  source 1..80: mol_type = other DNA
tctatttttaataaagagacagggtttcaccatgttggccaggctggtctcaaattgctgatcccaagtgatctgcccat

SEQ ID NO: 38988 - DNA, 80 bp, synthetic construct; identical to SEQ ID NO: 10620
  source 1..80: mol_type = other DNA

SEQ ID NO: 38989 - DNA, 80 bp, synthetic construct
  source 1..80: mol_type = other DNA
gttttacctggtgatttttgtatgtaaattataacttagactaactcttgtttggtaactcttcagaattagaactacag

SEQ ID NO: 38990 - DNA, 80 bp, synthetic construct
  source 1..80: mol_type = other DNA
attgtaattctattctgggatagttgcagaacaagattaacccactgttcataaagtagtccttcagaattttcaagaca

SEQ ID NO: 38991 - DNA, 80 bp, synthetic construct
  source 1..80: mol_type = other DNA
ctggagtgcagtgacacgatcttggctcactgcaacctctgcctccagggtagctgggactacaggcgtgcaccaccatg

SEQ ID NO: 38992 - DNA, 80 bp, synthetic construct; identical to SEQ ID NO: 10621
  source 1..80: mol_type = other DNA

SEQ ID NO: 38993 - DNA, 80 bp, synthetic construct
  source 1..80: mol_type = other DNA
cctgagcacagaatttactagttacgtgatcctgggcaagtttgttaatctttctgtgcctcaaattcctgatctcatag

SEQ ID NO: 38994 - DNA, 80 bp, synthetic construct
  source 1..80: mol_type = other DNA
gacaatgtctttggggaatctcacaattaagggtcaggaaatcaggaataactaatataagagacagaaggaccagccta

SEQ ID NO: 38995 - DNA, 80 bp, synthetic construct
  source 1..80: mol_type = other DNA
tcatgggtactccatacttgatgttttcttttcttatgtccagtaagatttgagctcactctaaaagcttttccacattc

SEQ ID NO: 38996 - DNA, 80 bp, synthetic construct
  source 1..80: mol_type = other DNA
tttgtgctgcctcaggactgaactatgatggaaggccattccacatacctcacatttgtgaggcttctctccagtgtgaa

SEQ ID NO: 38997 - DNA, 80 bp, synthetic construct; identical to SEQ ID NO: 10622
  source 1..80: mol_type = other DNA

SEQ ID NO: 38998 - DNA, 80 bp, synthetic construct
  source 1..80: mol_type = other DNA
aggtcgttccccagtgtggattcttatgtgtttggtgaggtctgaactcccactgaaggccttcccgcactcctcacatt

SEQ ID NO: 38999 - DNA, 80 bp, synthetic construct
  source 1..80: mol_type = other DNA
cctgcactcgtgaggcttctccccactgtgggtttttttatgtcggcaaagagctgatctactgttgaaagccttcccac

SEQ ID NO: 39000 - DNA, 80 bp, synthetic construct
  source 1..80: mol_type = other DNA
tttgctcatggagaattagatctgagtgccaactgaagtttttgccacacctggcacattcatggagtttctgtgctata

SEQ ID NO: 39001 - DNA, 80 bp, synthetic construct; identical to SEQ ID NO: 10623
  source 1..80: mol_type = other DNA

SEQ ID NO: 39002 - DNA, 80 bp, synthetic construct
  source 1..80: mol_type = other DNA
cgtgaagcaatgttaagctgtttgaagagtaaataacttttccatgctggaaaaattactaacgttgtggccaaaagtca

SEQ ID NO: 39003 - DNA, 80 bp, synthetic construct
  source 1..80: mol_type = other DNA
ctgtctcccttgtatttacccagctaacattttacaaattctacctgtgaagagagttacagaggaggtgctgaaatgct

SEQ ID NO: 39004 - DNA, 80 bp, synthetic construct
  source 1..80: mol_type = other DNA
attgtgatctgacggcaggtaaggccagctctaagagtagctcagtctttagcacttaaatttgagaactagtggtggtg

SEQ ID NO: 39005 - DNA, 80 bp, synthetic construct; identical to SEQ ID NO: 10624
  source 1..80: mol_type = other DNA

SEQ ID NO: 39006 - DNA, 80 bp, synthetic construct
  source 1..80: mol_type = other DNA
tttaccctgaatcccttctaatccatcctctgcactgcttccagattattctctctgaaaatcaagtctaatcatgtcac

SEQ ID NO: 39007 - DNA, 80 bp, synthetic construct
  source 1..80: mol_type = other DNA
agttaataaatcttaatacctgtgtgaacttgggaggatgacttcacttctcctttgcctcagttgctttatctaaatga

SEQ ID NO: 39008 - DNA, 80 bp, synthetic construct
  source 1..80: mol_type = other DNA
agctattctaagtcccctgctctactcacactgaacaattcatagttcatattattttattcctcaatgctttctcacat

SEQ ID NO: 39009 - DNA, 80 bp, synthetic construct; identical to SEQ ID NO: 10625
  source 1..80: mol_type = other DNA

SEQ ID NO: 39010 - DNA, 80 bp, synthetic construct
  source 1..80: mol_type = other DNA
ctgtgcccagcctctgagccttttttgagggccaaattgcaaaaatctattagataggttgcaaagaaccaattagataa

SEQ ID NO: 39011 - DNA, 80 bp, synthetic construct
  source 1..80: mol_type = other DNA
tctctattactcacctgggtaggagcagcttagggactccctgtcctgtggatcctgcacacaggggtctacttctcgct

SEQ ID NO: 39012 - DNA, 80 bp, synthetic construct
  source 1..80: mol_type = other DNA
agagaaaagggtttttcaggggtctagtaacatgtaaaagaacatgtttggggactttctcagaaaagtcacactcagaa

SEQ ID NO: 39013 - DNA, 80 bp, synthetic construct; identical to SEQ ID NO: 10626
  source 1..80: mol_type = other DNA

SEQ ID NO: 39014 - DNA, 80 bp, synthetic construct
  source 1..80: mol_type = other DNA
aataaaaaaagaaggtagaaagcattaagtgtagggaaggtccttaccaagtgataccatgttcccataattttccaaca

SEQ ID NO: 39015 - DNA, 80 bp, synthetic construct
  source 1..80: mol_type = other DNA
gaaaggaatttgcaaggaggaggtttatagaagtgaaaggctcttcccttttggtgggtatgtacaaatgagatgaaagg

SEQ ID NO: 39016 - DNA, 80 bp, synthetic construct
  source 1..80: mol_type = other DNA
gaacgcagtgaaaacaaggccatattttggaggtagtgatgtattttcaaggaggaggaaaggggcctcagctcacttgg

SEQ ID NO: 39017 - DNA, 80 bp, synthetic construct; identical to SEQ ID NO: 10627
  source 1..80: mol_type = other DNA

SEQ ID NO: 39018 - DNA, 80 bp, synthetic construct
  source 1..80: mol_type = other DNA
aatcacttattccctggttttgaatagaccttcttcctgtatttgaatactgaagtcatttcttccaaaatacttggggt

SEQ ID NO: 39019 - DNA, 80 bp, synthetic construct
  source 1..80: mol_type = other DNA
tagagaagaatcattcttcccgattttgcacatttttcctactaattccctagtactgagttatcctccctatgtcaata

SEQ ID NO: 39020 - DNA, 80 bp, synthetic construct
  source 1..80: mol_type = other DNA
gatcttgcctcactgcaagctctacctcctgggttcacaccattctcctgcctcagcctcccaagtagctgggactacag

SEQ ID NO: 39021 - DNA, 80 bp, synthetic construct; identical to SEQ ID NO: 10628
  source 1..80: mol_type = other DNA

SEQ ID NO: 39022 - DNA, 80 bp, synthetic construct
  source 1..80: mol_type = other DNA
accctttggatttagacctccaagactatcattccatttttacgaaaaaccgatttagaaccaagctgatttcttttcac

SEQ ID NO: 39023 - DNA, 80 bp, synthetic construct
  source 1..80: mol_type = other DNA
tctggatggcacacaactcacagcagacacatgtttgtgccttgttaatgttacataacagttcttttccttataacatt

SEQ ID NO: 39024 - DNA, 80 bp, synthetic construct
  source 1..80: mol_type = other DNA
tatccatttatctattcctctctctgttcattaatgtattttattttttgaatcatttcaaagtaagttgaaagcatcag

SEQ ID NO: 39025 - DNA, 80 bp, synthetic construct; identical to SEQ ID NO: 10629
  source 1..80: mol_type = other DNA

SEQ ID NO: 39026 - DNA, 80 bp, synthetic construct
  source 1..80: mol_type = other DNA
ctacagaatttctgaccctgaaaatccaccacagcagatttcacgaccatttgagaaaaagaagactgggagactcgtgc

SEQ ID NO: 39027 - DNA, 80 bp, synthetic construct
  source 1..80: mol_type = other DNA
ttttttgcaggtagcatatactaaaaagcttacttttgaatgtgcctactcctctgtccaaaagtctatgcctttctggg

SEQ ID NO: 39028 - DNA, 80 bp, synthetic construct
  source 1..80: mol_type = other DNA
aagcaattcttctgcctcagcctcctgagtaactggggttacaggtgcattacaccacacctggctaatttttgtatttt

SEQ ID NO: 39029 - DNA, 80 bp, synthetic construct; identical to SEQ ID NO: 10630
  source 1..80: mol_type = other DNA

SEQ ID NO: 39030 - DNA, 80 bp, synthetic construct
  source 1..80: mol_type = other DNA
tgtacgctatttaccatatatctcaggttatacaaacagtaaatgcctgactgcattgattctttctgataaattgcttt

SEQ ID NO: 39031 - DNA, 80 bp, synthetic construct
  source 1..80: mol_type = other DNA
tttccacccactctgtgtccttactacattctcagctgccgtgactcctgccacaatctcctgtgtatctcaccgctttc

SEQ ID NO: 39032 - DNA, 80 bp, synthetic construct
  source 1..80: mol_type = other DNA
ccacagaaactgtctcccagaaataccaaaagaagggagaaaataatggactcagttcctaataccttatgaaaactaga

SEQ ID NO: 39033 - DNA, 80 bp, synthetic construct; identical to SEQ ID NO: 10631
  source 1..80: mol_type = other DNA

SEQ ID NO: 39034 - DNA, 80 bp, synthetic construct
  source 1..80: mol_type = other DNA
tggatttggggttcattagcaacactaaaccgctgtgatctcacatcttgtttccctgcatatttggtgaagggaaaaga

SEQ ID NO: 39035 - DNA, 80 bp, synthetic construct
  source 1..80: mol_type = other DNA
tcacctgctatctcccctcctttccattactgcggtagtcttctaactggtctcctttcttcaatccttgccttcctcct

SEQ ID NO: 39036 - DNA, 80 bp, synthetic construct
  source 1..80: mol_type = other DNA
cgctctgctgaaaactctccagtggttcatacttaaaataaaacctgaagtccttaccgaggtatacaaggccctactga

SEQ ID NO: 39037 - DNA, 80 bp, synthetic construct; identical to SEQ ID NO: 10632
  source 1..80: mol_type = other DNA

SEQ ID NO: 39038 - DNA, 80 bp, synthetic construct
  source 1..80: mol_type = other DNA
ttaatatatacattgtttacggtggttctaccttcgctaaaatctaggctcttaggctccatgagggcaggaatttttgt

SEQ ID NO: 39039 - DNA, 80 bp, synthetic construct
  source 1..80: mol_type = other DNA
aaaaaaaaaaaaaaatgggtcacgagcccctgggaggaggtagggcaaatgggcgggaaatgctcattttggggaatggc

SEQ ID NO: 39040 - DNA, 80 bp, synthetic construct
  source 1..80: mol_type = other DNA
gcacagaccttcccgccggtactctccccaagaaatgagaaacagaaatatacagaagctccacttcctagtccgccaat

SEQ ID NO: 39041 - DNA, 80 bp, synthetic construct; identical to SEQ ID NO: 10633
  source 1..80: mol_type = other DNA

SEQ ID NO: 39042 - DNA, 80 bp, synthetic construct
  source 1..80: mol_type = other DNA
ataaaattctgccacacttgtttcatccatctccattttttcttgctgaaacgttttaaagcaaaccccaaatatcttac

SEQ ID NO: 39043 - DNA, 80 bp, synthetic construct
  source 1..80: mol_type = other DNA
ttcattcaagatctaaagttccagtatttaatttgggcatgtgtcttaattcttttaaaattcacatctgaactagttcc

SEQ ID NO: 39044 - DNA, 80 bp, synthetic construct
  source 1..80: mol_type = other DNA
aaaggtttgattagagttaggtttaactttgttagtaagaatccttaggtggtgctatgtactttttgccacacatcagg

SEQ ID NO: 39045 - DNA, 80 bp, synthetic construct; identical to SEQ ID NO: 10634
  source 1..80: mol_type = other DNA

SEQ ID NO: 39046 - DNA, 80 bp, synthetic construct
  source 1..80: mol_type = other DNA
cattcacatccttgtgtagcccccttccacattgtaccagggttggtttgtgtgactgaatgatctggtaaaagtgatgc

SEQ ID NO: 39047 - DNA, 80 bp, synthetic construct
  source 1..80: mol_type = other DNA
tataggcatgcatcagcatgcccagctaatttttatattttagtagagatagagtttcgccatgttggctgactggtctt

SEQ ID NO: 39048 - DNA, 80 bp, synthetic construct
  source 1..80: mol_type = other DNA
acggcttctgttttggtctgtttttctttcgtagatcacacacccttgggaaagccaaatgccatgttgtaaggagaggc

SEQ ID NO: 39049 - DNA, 80 bp, synthetic construct; identical to SEQ ID NO: 10635
  source 1..80: mol_type = other DNA

SEQ ID NO: 39050 - DNA, 80 bp, synthetic construct
  source 1..80: mol_type = other DNA
atcaatatgaacacatggatttaaaaaaatacattcaatgagtctcaatcaattgcagtagttattctttttaatgttca

SEQ ID NO: 39051 - DNA, 80 bp, synthetic construct
  source 1..80: mol_type = other DNA
aaggtgttctggtgctttcagtgggggcaaggattgcatacctttgtgaatagtcatggttagctgttttaaaaatgtat

SEQ ID NO: 39052 - DNA, 80 bp, synthetic construct
  source 1..80: mol_type = other DNA
aatacgtggaaatcacttaacacattgcctggcatcaaatttcatgatgagaataactgcaaacctggaagatactataa

SEQ ID NO: 39053 - DNA, 80 bp, synthetic construct; identical to SEQ ID NO: 10636
  source 1..80: mol_type = other DNA

SEQ ID NO: 39054 - DNA, 80 bp, synthetic construct
  source 1..80: mol_type = other DNA
agggttaatatacatatattgtatatgaaaatgcctggccatattgcttgctgaataaaaatcattatacaaaaataatt

SEQ ID NO: 39055 - DNA, 80 bp, synthetic construct
  source 1..80: mol_type = other DNA
cgtggtcatctaccttccaggctgactgggtacagtctttcttcccaatattaatctacttaatagtaataatgtccagt

SEQ ID NO: 39056 - DNA, 80 bp, synthetic construct
  source 1..80: mol_type = other DNA
aaacatctcctaaaataattaatactggaattttaccagggatccatgtcaaatttttcaccctgttaattccacagttc

SEQ ID NO: 39057 - DNA, 80 bp, synthetic construct; identical to SEQ ID NO: 10637
  source 1..80: mol_type = other DNA

SEQ ID NO: 39058 - DNA, 80 bp, synthetic construct
  source 1..80: mol_type = other DNA
ctactcctcaccaattccttcccccttccttcccaggttaactactatcttgattttgatgttattattcccatgcatgt

SEQ ID NO: 39059 - DNA, 80 bp, synthetic construct
  source 1..80: mol_type = other DNA
aggggttactatgtaatttgtactcaactttacatgtagttttgagatttatccttcatgaaaaatgtggctctagctca

SEQ ID NO: 39060 - DNA, 80 bp, synthetic construct
  source 1..80: mol_type = other DNA
ttttcttggaattttcccttctaaaagggtaatttcccataatttttggtagaaagtttatattctaatatgggaaagaa

SEQ ID NO: 39061 - DNA, 80 bp, synthetic construct; identical to SEQ ID NO: 10638
  source 1..80: mol_type = other DNA

SEQ ID NO: 39062 - DNA, 80 bp, synthetic construct
  source 1..80: mol_type = other DNA
ggacatctctgtactttcagctcaattttgctgtgaacctaaaactgctctaaaagataaaatctagtaaaaaaagtatt

SEQ ID NO: 39063 - DNA, 80 bp, synthetic construct
  source 1..80: mol_type = other DNA
cttgaaaatacagaatacattacttataacgtatgcttgttggccctcatgatcctaaaagttatagcacatttaaatgt

SEQ ID NO: 39064 - DNA, 80 bp, synthetic construct
  source 1..80: mol_type = other DNA
aatgtacaaaacggttaaagatctctgccccgtggagcttatattcaagtaattctaattgactcgtgctttcattttct

SEQ ID NO: 39065 - DNA, 80 bp, synthetic construct; identical to SEQ ID NO: 10639
  source 1..80: mol_type = other DNA

SEQ ID NO: 39066 - DNA, 80 bp, synthetic construct
  source 1..80: mol_type = other DNA
gcggggaggtgggtagggagggtcccgccagcagaggcatcttatttttaacctcttctcggctgtttttctctcgtcca

SEQ ID NO: 39067 - DNA, 80 bp, synthetic construct
  source 1..80: mol_type = other DNA
atcattatcccaatttttagataggcctggagaagataataaacttgccaacagtgtcacagctggtaagttgagggtgg

SEQ ID NO: 39068 - DNA, 80 bp, synthetic construct
  source 1..80: mol_type = other DNA
cactttgaaccctttctattaataccttgcagtgggcagagactcatccttatagggatttgtatgtattccaggtataa

SEQ ID NO: 39069 - DNA, 80 bp, synthetic construct; identical to SEQ ID NO: 10640
  source 1..80: mol_type = other DNA

SEQ ID NO: 39070 - DNA, 80 bp, synthetic construct
  source 1..80: mol_type = other DNA
ataagtctctgttaaaagagttagggtgaggtttgaggtggttttagattattatttttgctaaagaacccagaaatgac

SEQ ID NO: 39071 - DNA, 80 bp, synthetic construct
  source 1..80: mol_type = other DNA
ttaatattctatggggcaataagcagaactattcagaaatgatcctgggatctcactctagattgcccaggaaatgtgct

SEQ ID NO: 39072 - DNA, 80 bp, synthetic construct
  source 1..80: mol_type = other DNA
ctcagctctgctagcatctaaacccagactgcccggcaatcaagtagtctgcttgttgtcttactgaaaagtggtgttca

SEQ ID NO: 39073 - DNA, 80 bp, synthetic construct; identical to SEQ ID NO: 10641
  source 1..80: mol_type = other DNA

SEQ ID NO: 39074 - DNA, 80 bp, synthetic construct
  source 1..80: mol_type = other DNA
actaatttataaagagctaagtgagtgctcagataatcaaataatcacccatggagaagttcaaatctcttgcagaagtt

SEQ ID NO: 39075 - DNA, 80 bp, synthetic construct
  source 1..80: mol_type = other DNA
gtttagctgtctcatgctctttgggcccagaggagaggaaaagcaagacaaagtcttaaactttccaccagatatcaaga

SEQ ID NO: 39076 - DNA, 80 bp, synthetic construct
  source 1..80: mol_type = other DNA
cactaccccttccagcccactggaagaatgggttttttaaaaaaacatacactcaagatgagctctattagtcatttcct

SEQ ID NO: 39077 - DNA, 80 bp, synthetic construct; identical to SEQ ID NO: 10642
  source 1..80: mol_type = other DNA

SEQ ID NO: 39078 - DNA, 80 bp, synthetic construct
  source 1..80: mol_type = other DNA
acccaaagctaaaccctgcctacatggtaacgcttttgtaaatgggattctttctctctgacatccctttttcctgcagt

SEQ ID NO: 39079 - DNA, 80 bp, synthetic construct
  source 1..80: mol_type = other DNA
cttactaattatgtcccaaggtgggctcagcctctggcccttcaaggagcttagagagctctggagagctaaaggacgca

SEQ ID NO: 39080 - DNA, 80 bp, synthetic construct
  source 1..80: mol_type = other DNA
tcggcctcggcgcccactctggccgcgctcgaggagcccttcagcttgccgctgcactgtgggaacccctctctgggctg

SEQ ID NO: 39081 - DNA, 80 bp, synthetic construct; identical to SEQ ID NO: 10643
  source 1..80: mol_type = other DNA

SEQ ID NO: 39082 - DNA, 80 bp, synthetic construct
  source 1..80: mol_type = other DNA
gactggcgggcagctccgcctgcggcccgggtgcaggatccaccaggtgaagccagctggactcctgagtctagtggcga

SEQ ID NO: 39083 - DNA, 80 bp, synthetic construct
  source 1..80: mol_type = other DNA
ccaatcagcactctgtgtctagctaatctggtggggacttggagaacctttatgtctatctaagggattgtaaatacacc

SEQ ID NO: 39084 - DNA, 80 bp, synthetic construct
  source 1..80: mol_type = other DNA
aatcagcaccctgtcaaaacggaccaatcggctctctgtaaaatggaccaatcagcaggatgtgggtggggccagataag

SEQ ID NO: 39085 - DNA, 80 bp, synthetic construct; identical to SEQ ID NO: 10644
  source 1..80: mol_type = other DNA

SEQ ID NO: 39086 - DNA, 80 bp, synthetic construct
  source 1..80: mol_type = other DNA
ctgacacattgcttttccgcaggaggttgcgggaagacgtacaaggaagggtcgggatggtgcttgaggtggtcagagcc

SEQ ID NO: 39087 - DNA, 80 bp, synthetic construct
  source 1..80: mol_type = other DNA
cacacgccacttgcttgctgggaggttccttacaagttacatagagggggagcttttcctggccaaacgtgggttattct

SEQ ID NO: 39088 - DNA, 80 bp, synthetic construct
  source 1..80: mol_type = other DNA
ttagtaacactttatgttgcggataggtgaaagaaaaactgacgcttcggagatggggttgcccaaagaggaagagagaa

SEQ ID NO: 39089 - DNA, 80 bp, synthetic construct; identical to SEQ ID NO: 10645
  source 1..80: mol_type = other DNA

SEQ ID NO: 39090 - DNA, 80 bp, synthetic construct
  source 1..80: mol_type = other DNA
ttcaggcagaaggggatccctaaatggaaacactgacattttaatactgcaagtgggggatgatgaacagacaaataaca

SEQ ID NO: 39091 - DNA, 80 bp, synthetic construct
  source 1..80: mol_type = other DNA
atatatgtataaacttaaatgtcctttttgcttggaacgttcaaatttttttctagttatatctaaatatatatcaagca

SEQ ID NO: 39092 - DNA, 80 bp, synthetic construct
  source 1..80: mol_type = other DNA
cgattctcctgcctcagcctcccaagtagctgggattacaggcatacgccatcacaccgggccaatttttatatttttag

SEQ ID NO: 39093 - DNA, 80 bp, synthetic construct; identical to SEQ ID NO: 10646
  source 1..80: mol_type = other DNA

SEQ ID NO: 39094 - DNA, 80 bp, synthetic construct
  source 1..80: mol_type = other DNA
tatctatgttcatcagggattttggcctgtagttttgtttttgatttgatttctgacacagattttgctgtatccttgtc

SEQ ID NO: 39095 - DNA, 80 bp, synthetic construct
  source 1..80: mol_type = other DNA
atgagagactttattaaggcttcaatttcattactcattattggtttgttagggtttctattcatggttcaatcttagta

SEQ ID NO: 39096 - DNA, 80 bp, synthetic construct
  source 1..80: mol_type = other DNA
gaaaggtttgttaattttgtctatcttcaaaaaatcaacttttcatttcattgatcaaatgtatttatgttttagtttca

SEQ ID NO: 39097 - DNA, 80 bp, synthetic construct; identical to SEQ ID NO: 10647
  source 1..80: mol_type = other DNA

SEQ ID NO: 39098 - DNA, 80 bp, synthetic construct
  source 1..80: mol_type = other DNA
gatatggtctgttctggagaatgtgccatgtgcaagtgaaaagaatgtgtactctgtagcagctgggtgaaatgttctat

SEQ ID NO: 39099 - DNA, 80 bp, synthetic construct
  source 1..80: mol_type = other DNA
atatttggatgctctggtgttgggtgcacagatatttataatttttaatatcctcttgatgaattgaccccttcatcatt

SEQ ID NO: 39100 - DNA, 80 bp, synthetic construct
  source 1..80: mol_type = other DNA
ttcttgtagcaccacatagttgggtctcgtctctttacccatttaacttctatacatcttttaattggagaatttggtcc

SEQ ID NO: 39101 - DNA, 80 bp, synthetic construct; identical to SEQ ID NO: 10648
  source 1..80: mol_type = other DNA

SEQ ID NO: 39102 - DNA, 80 bp, synthetic construct
  source 1..80: mol_type = other DNA
agtctcctgagtagctgataccatagacacatgccaccatagccagctaagttttgtattttttgtagagatgaggtttt

SEQ ID NO: 39103 - DNA, 80 bp, synthetic construct
  source 1..80: mol_type = other DNA
caaaaaaacttaaataacccccacaaaaccctgccctttaactctatacccctacatcttgactttttgttgtctcggtt

SEQ ID NO: 39104 - DNA, 80 bp, synthetic construct
  source 1..80: mol_type = other DNA
tggtttttttcctcaaatattttctttatgcatgttagcatctttttctcttagattgaaggacttcatttgccatttat

SEQ ID NO: 39105 - DNA, 80 bp, synthetic construct; identical to SEQ ID NO: 10649
  source 1..80: mol_type = other DNA

SEQ ID NO: 39106 - DNA, 80 bp, synthetic construct
  source 1..80: mol_type = other DNA
acccactaccatgccccactaattactgtatttttagtggagacagggtttcaccatgttggccaggctgatctcgaact

SEQ ID NO: 39107 - DNA, 80 bp, synthetic construct
  source 1..80: mol_type = other DNA
tcatgttctctaatcttgtacctagatacttatatatttcttaagtttggaaagttttgagttatttctttggataagct

SEQ ID NO: 39108 - DNA, 80 bp, synthetic construct
  source 1..80: mol_type = other DNA
tactaattccttccactgtctgatccattctgctgtcgagagtctctaataaatttttcagtttgacaagtatatttctc

SEQ ID NO: 39109 - DNA, 80 bp, synthetic construct; identical to SEQ ID NO: 10650
  source 1..80: mol_type = other DNA

SEQ ID NO: 39110 - DNA, 80 bp, synthetic construct
  source 1..80: mol_type = other DNA
atgacagcatctacttttttttcgccctcttggtcttgccttctttctgacatcacatggagtctgcagtccaggttttc

SEQ ID NO: 39111 - DNA, 80 bp, synthetic construct
  source 1..80: mol_type = other DNA
tggcgtctcctttggctgagttaaagaagagtgtttctagggttggggaaggaagtcccacctccccactttttctctgg

SEQ ID NO: 39112 - DNA, 80 bp, synthetic construct
  source 1..80: mol_type = other DNA
cagatttgggagagggatgtcacggatttggaagtctgattcttacagcgtctgcttgaagttttttacttctttgttgc

SEQ ID NO: 39113 - DNA, 80 bp, synthetic construct; identical to SEQ ID NO: 10651
  source 1..80: mol_type = other DNA

SEQ ID NO: 39114 - DNA, 80 bp, synthetic construct
  source 1..80: mol_type = other DNA
ctttgatagtttttcttttgatgctacacctagtgactaccatattttaaaacagacatgttctaattgctcttgaatct

SEQ ID NO: 39115 - DNA, 80 bp, synthetic construct
  source 1..80: mol_type = other DNA
tgaaagtaaagaatagatagaaatagtcctacctcagttcaggtcaggttttgttgccaacagagttatgaaaactttta

SEQ ID NO: 39116 - DNA, 80 bp, synthetic construct
  source 1..80: mol_type = other DNA
ttttaatttttttatttcaatagggttttggagggacaggtggtgtttccttacatgaataagttctttagtggcgattt

SEQ ID NO: 39117 - DNA, 80 bp, synthetic construct; identical to SEQ ID NO: 10652
  source 1..80: mol_type = other DNA

SEQ ID NO: 39118 - DNA, 80 bp, synthetic construct
  source 1..80: mol_type = other DNA
caacctctacctcctgggttcaagccattctcctgcctcagcctccggagtagctgggactacaggtgcccaccaccacg

SEQ ID NO: 39119 - DNA, 80 bp, synthetic construct
  source 1..80: mol_type = other DNA
ttatgttattgttaccaggcaaaaggggctcactgctggatgtgctagaagctaatactatgacactggatttctaagaa

SEQ ID NO: 39120 - DNA, 80 bp, synthetic construct
  source 1..80: mol_type = other DNA
aagtcctcaaatgcacagttatctccattcctcttcatgggtcccacatgcaaattcaaagggagttagtatgaaacatg

SEQ ID NO: 39121 - DNA, 80 bp, synthetic construct; identical to SEQ ID NO: 10653
  source 1..80: mol_type = other DNA

SEQ ID NO: 39122 - DNA, 80 bp, synthetic construct
  source 1..80: mol_type = other DNA
ccaatctagaagtttactaattctgtgtattggatgtgcatatccttgtcaatcattttggcctaagggagtctttcttt

SEQ ID NO: 39123 - DNA, 80 bp, synthetic construct
  source 1..80: mol_type = other DNA
aaagatttttgctacctccccttgaatcaattttgcccctgtggggatgatatcatccctgatatgaaggcatatattga

SEQ ID NO: 39124 - DNA, 80 bp, synthetic construct
  source 1..80: mol_type = other DNA
ggatgttgtaaagattctataatattatgtatgtattctataatatgtatgtgaaagaaaaactgtatcttttcctttgc

SEQ ID NO: 39125 - DNA, 80 bp, synthetic construct; identical to SEQ ID NO: 10654
  source 1..80: mol_type = other DNA

SEQ ID NO: 39126 - DNA, 80 bp, synthetic construct
  source 1..80: mol_type = other DNA
gttgagacaagatttcagcagggtatgaaggttgaatagaaggtttttaagtgataaatgcctagcaagatttaggatca

SEQ ID NO: 39127 - DNA, 80 bp, synthetic construct
  source 1..80: mol_type = other DNA
atgtttaccaaggtatgtacaactgacaattttagagtcatctgcaaagaaaagataactattaggtactgggcttaaca

SEQ ID NO: 39128 - DNA, 80 bp, synthetic construct
  source 1..80: mol_type = other DNA
aggattgtagagacatcataagccctattactcccatcttcctactcaattacttcatgtaagctgtggcttactctgtc

SEQ ID NO: 39129 - DNA, 80 bp, synthetic construct; identical to SEQ ID NO: 10655
  source 1..80: mol_type = other DNA

SEQ ID NO: 39130 - DNA, 80 bp, synthetic construct
  source 1..80: mol_type = other DNA
tgggaaggttaaggctgggtgtgatgattgtgtaaaagagtgaagaacttcccttcatcttgggatatggtattctgtgg

SEQ ID NO: 39131 - DNA, 80 bp, synthetic construct
  source 1..80: mol_type = other DNA
aaaagaaataccactccgaaagcaaagacaacaatctcaattacttttgaatagacacaagccatcttgatcaatgctgg

SEQ ID NO: 39132 - DNA, 80 bp, synthetic construct
  source 1..80: mol_type = other DNA
taacgatcataggccatcacagccaacagaagacattctgtggctcccaagtcaaggacaaaaaagaattggagtacaca

SEQ ID NO: 39133 - DNA, 80 bp, synthetic construct; identical to SEQ ID NO: 10656
  source 1..80: mol_type = other DNA

SEQ ID NO: 39134 - DNA, 80 bp, synthetic construct
  source 1..80: mol_type = other DNA
tgcatgctctctctcatttggaacatctcttttaacatttccctatggcccagtgctcacaacttgttcatatttaatcc

SEQ ID NO: 39135 - DNA, 80 bp, synthetic construct
  source 1..80: mol_type = other DNA
atgtgattttaagagaggcatatgtattgaggagttgttcctctttgaagctatgacataagcatcacttgatcatgata

SEQ ID NO: 39136 - DNA, 80 bp, synthetic construct
  source 1..80: mol_type = other DNA
tactcctcctccttatattttttttacccctcaacattgcaggcactgttgttattctatcaattttggtgttccctact

SEQ ID NO: 39137 - DNA, 80 bp, synthetic construct; identical to SEQ ID NO: 10657
  source 1..80: mol_type = other DNA

SEQ ID NO: 39138 - DNA, 80 bp, synthetic construct
  source 1..80: mol_type = other DNA
ttaggtaaaaccatcaccccattgggctctaaaagaatacagatacagataaaaatgtcatcaatctcaccatttctgat

SEQ ID NO: 39139 - DNA, 80 bp, synthetic construct
  source 1..80: mol_type = other DNA
gcggatcacttgatgtcaggagtccagaccagcatggcctacgtggggaaaaattttgtattttctactaaaaatacaaa

SEQ ID NO: 39140 - DNA, 80 bp, synthetic construct
  source 1..80: mol_type = other DNA
aaaccaaacaaaacaaaaatcttgctctgttgcctaggctggagtgcggtgacacagtgacagctcattgcagcctggac

SEQ ID NO: 39141 - DNA, 80 bp, synthetic construct; identical to SEQ ID NO: 10658
  source 1..80: mol_type = other DNA

SEQ ID NO: 39142 - DNA, 80 bp, synthetic construct
  source 1..80: mol_type = other DNA
taagtgtttcagttagaacagaataatgttataatcataaagaaggaaatgttatcaagtagtatgagatagaggtgtag

SEQ ID NO: 39143 - DNA, 80 bp, synthetic construct
  source 1..80: mol_type = other DNA
ctggcatcaaattccagcttcaccacttggaagctgtatccttgggcaattatttaacttgtttgtgtaggaggttcttt

SEQ ID NO: 39144 - DNA, 80 bp, synthetic construct
  source 1..80: mol_type = other DNA
ttcacctgtcattgttattctgtctaccccttagtccattaatttttcacactagtgattttaccgcaatgacctagaac

SEQ ID NO: 39145 - DNA, 80 bp, synthetic construct
  source 1..80: mol_type = other DNA
tcaaattcttttgactgctgttgggtttgtgttgggaattaaaaggtcatgaatttcaaagtggaaaaaaacctcagaag

SEQ ID NO: 39146 - DNA, 80 bp, synthetic construct; identical to SEQ ID NO: 10659
  source 1..80: mol_type = other DNA

SEQ ID NO: 39147 - DNA, 80 bp, synthetic construct
  source 1..80: mol_type = other DNA
cccctgaagtatccactatgctgctatttatagtaatcccctctttgcatgttagtaggttaattacccaaatgtgcacc

SEQ ID NO: 39148 - DNA, 80 bp, synthetic construct
  source 1..80: mol_type = other DNA
tgctttttcttgttgctctccctggacacaccatgatttgtcaagtgctgcaaattagtgagtataaaagtaagcacgat

SEQ ID NO: 39149 - DNA, 80 bp, synthetic construct
  source 1..80: mol_type = other DNA
ggatcacgtaaagccctaggcattcttattagaaatgctgccaagtcaggcatgacaatttatgtagtttaatgttgtga

SEQ ID NO: 39150 - DNA, 80 bp, synthetic construct; identical to SEQ ID NO: 10660
  source 1..80: mol_type = other DNA

SEQ ID NO: 39151 - DNA, 80 bp, synthetic construct
  source 1..80: mol_type = other DNA
atattgctgtagtcatacaaaattcaagatgaaaggacgaaataaaaataggtaagaccctagactggttcagaccgcct

SEQ ID NO: 39152 - DNA, 80 bp, synthetic construct
  source 1..80: mol_type = other DNA
tgtaggatggctatgaggaggattacatgctatgctaaatatttagcatgatgcttggtgcatagagagcattcagtaac

SEQ ID NO: 39153 - DNA, 80 bp, synthetic construct
  source 1..80: mol_type = other DNA
tcatgttagactgagtcttacgctatctaggatctgttttctacctggagtcatcctctgttagagatagcagagaatac

SEQ ID NO: 39154 - DNA, 80 bp, synthetic construct
  source 1..80: mol_type = other DNA
ctgaagaattggattaaccactggtcatactgacactacagtgccattcacacttaaatgcaacagctgaaataagattt

SEQ ID NO: 39155 - DNA, 80 bp, synthetic construct; identical to SEQ ID NO: 10661
  source 1..80: mol_type = other DNA

SEQ ID NO: 39156 - DNA, 80 bp, synthetic construct
  source 1..80: mol_type = other DNA
tggtcagaggcatatccaaataataatttcatgaaaagttctcttaacacattaggtttcggccaggcacagtggttcat

SEQ ID NO: 39157 - DNA, 80 bp, synthetic construct
  source 1..80: mol_type = other DNA
ctgaggcaggagaatcacttgaacctgggagacgaaggttgcggtcagccgagattgcgccattgcactccggcctgtga

SEQ ID NO: 39158 - DNA, 80 bp, synthetic construct
  source 1..80: mol_type = other DNA
tatataaaaatgaacacatttacttgaaatttggtttattcaattggtaagatcaaaattggataaattaagttatgtag

SEQ ID NO: 39159 - DNA, 80 bp, synthetic construct; identical to SEQ ID NO: 10662
  source 1..80: mol_type = other DNA

SEQ ID NO: 39160 - DNA, 80 bp, synthetic construct
  source 1..80: mol_type = other DNA
acattttcttgatttattcattcattgatgaacacaaagtttgattccatatctttgctattgtgaataatgctgccata

SEQ ID NO: 39161 - DNA, 80 bp, synthetic construct
  source 1..80: mol_type = other DNA
acggtgtgcaagggttcctttttttccctacattctcaccaagctgttatctttgctttttatgacaatagccattctaa

SEQ ID NO: 39162 - DNA, 80 bp, synthetic construct
  source 1..80: mol_type = other DNA
aaattattttattttattttttatttttatttttgagatggagtctctctctgtctcccaggctggagtgcagtgacaca

SEQ ID NO: 39163 - DNA, 80 bp, synthetic construct; identical to SEQ ID NO: 10663
  source 1..80: mol_type = other DNA

SEQ ID NO: 39164 - DNA, 80 bp, synthetic construct
  source 1..80: mol_type = other DNA
ataatctcatttatttatatttgcttttgttgactgtgcttttgaggtcatatccaaaaaatcattgaccagatcaatgt

SEQ ID NO: 39165 - DNA, 80 bp, synthetic construct
  source 1..80: mol_type = other DNA
tgccctgtccccattgtgtgttcttggcacctttgttgaaaatcaattgattgtaaatgtatggattgatttttacgcta

SEQ ID NO: 39166 - DNA, 80 bp, synthetic construct
  source 1..80: mol_type = other DNA
tggatccagacaaattttagaatcgttttttctatttctctacaaaatgacattggtacttggatagagattgcattgaa

SEQ ID NO: 39167 - DNA, 80 bp, synthetic construct; identical to SEQ ID NO: 10664
  source 1..80: mol_type = other DNA

SEQ ID NO: 39168 - DNA, 80 bp, synthetic construct
  source 1..80: mol_type = other DNA
tttctttttcttgcctaactgctctggctaggacattcagtactatgttgaacagaagtggtgagcgtgggcatctttat

SEQ ID NO: 39169 - DNA, 80 bp, synthetic construct
  source 1..80: mol_type = other DNA
actctgtaatatggaatttaaaaaattccatgtgtgattttctaactctatcataggtcggtaacctctatacatctgga

SEQ ID NO: 39170 - DNA, 80 bp, synthetic construct
  source 1..80: mol_type = other DNA
cttttcccacatcaacgtctggtagaaggaaggccaactgccccatggtcgctaccattccacccgtcctcatccgggac

SEQ ID NO: 39171 - DNA, 80 bp, synthetic construct; identical to SEQ ID NO: 10665
  source 1..80: mol_type = other DNA

SEQ ID NO: 39172 - DNA, 80 bp, synthetic construct
  source 1..80: mol_type = other DNA
cagttttctcacgctggtcaacaaataggccttcatcacacactaatttgtaatgtcattcttttcatatttactgttgt

SEQ ID NO: 39173 - DNA, 80 bp, synthetic construct
  source 1..80: mol_type = other DNA
taatcctcccactacagcctcccgagtagcggggactacaggcacaggccaccacgcccggctatttgtttgttttttgt

SEQ ID NO: 39174 - DNA, 80 bp, synthetic construct
  source 1..80: mol_type = other DNA
ctggccagagcaaatccttgcttattattcgtttatgaaaatggcttgactcttctaagctgtaatttgaccaaataaat

SEQ ID NO: 39175 - DNA, 80 bp, synthetic construct; identical to SEQ ID NO: 10666
  source 1..80: mol_type = other DNA

SEQ ID NO: 39176 - DNA, 80 bp, synthetic construct
  source 1..80: mol_type = other DNA
caatcctcaccctccttcctcctgccaccctcaggtaggcccaggtgtctgttgttcccctctttgtgtctgtgtgtact

SEQ ID NO: 39177 - DNA, 80 bp, synthetic construct
  source 1..80: mol_type = other DNA
tgtcacattttctttatccagtccaccactgatgggcatctagattgattctatgtctttgctactgtgaatagtgctgt

SEQ ID NO: 39178 - DNA, 80 bp, synthetic construct
  source 1..80: mol_type = other DNA
gccgtgtgtaagtattccattttctctgcaacctcactaacatctgttattttttgactttttaataatgtccattctga

SEQ ID NO: 39179 - DNA, 80 bp, synthetic construct; identical to SEQ ID NO: 10667
  source 1..80: mol_type = other DNA

SEQ ID NO: 39180 - DNA, 80 bp, synthetic construct
  source 1..80: mol_type = other DNA
gatagttttctttcttcttattttttgggggatatacctgtatttttcagctaatgtaaaacaacagagtagaaactcta

SEQ ID NO: 39181 - DNA, 80 bp, synthetic construct
  source 1..80: mol_type = other DNA
aatcatagtggctgaaaaaggtgaagtgggcgtatggttagcatttaccaccacaatcctatgtcccagttatgatgaaa

SEQ ID NO: 39182 - DNA, 80 bp, synthetic construct
  source 1..80: mol_type = other DNA
aagacaacagaggtagggttttactttcatgtcagcattgagaaagtggaacttatccatagtaggacacaggcccattt

SEQ ID NO: 39183 - DNA, 80 bp, synthetic construct; identical to SEQ ID NO: 10668
  source 1..80: mol_type = other DNA

SEQ ID NO: 39184 - DNA, 80 bp, synthetic construct
  source 1..80: mol_type = other DNA
tcttggctcactgggctcactgcaagctctgtctcccgggttcacgccattctcctgcctcagcctcccgagtagctggg

SEQ ID NO: 39185 - DNA, 80 bp, synthetic construct
  source 1..80: mol_type = other DNA
cccatagaatgtaatatttgaatgaataaatgcacttatatcaatagcctgacaaagtgttttaaagtatactacagtta

SEQ ID NO: 39186 - DNA, 80 bp, synthetic construct
  source 1..80: mol_type = other DNA
acagtgatttggaatttgggagtacaattagtgaaaacaggtactggaattgctccagtgttgggaatggacccacatat

SEQ ID NO: 39187 - DNA, 80 bp, synthetic construct; identical to SEQ ID NO: 10669
  source 1..80: mol_type = other DNA

SEQ ID NO: 39188 - DNA, 80 bp, synthetic construct
  source 1..80: mol_type = other DNA
aagattggaattgttttaattgcatctgtgttctgaggaatggagcagcagcagcagaagaaaaggtgttcttttactta

SEQ ID NO: 39189 - DNA, 80 bp, synthetic construct
  source 1..80: mol_type = other DNA
gacaaagacagattggaatagaagttgggaccgaaagtaaataagatcttccaaaacatggagcaagggggacctaaaaa

SEQ ID NO: 39190 - DNA, 80 bp, synthetic construct
  source 1..80: mol_type = other DNA
gttagtggtactttagagaataaaagaaaataggcttggttcactggcaagaggacaagaaatagtctttaagtggagaa

SEQ ID NO: 39191 - DNA, 80 bp, synthetic construct; identical to SEQ ID NO: 10670
  source 1..80: mol_type = other DNA

SEQ ID NO: 39192 - DNA, 80 bp, synthetic construct
  source 1..80: mol_type = other DNA
gcaggaggatggcatgaacccgggaggtggaggttgcagtgagctgagattgtgccactgcactccagcctgggcgacag

SEQ ID NO: 39193 - DNA, 80 bp, synthetic construct
  source 1..80: mol_type = other DNA
catctatacccaggtattgcttgaaaaatgttaccaattaataattagcttaatttttacagcatgtttgaaaatttgat

SEQ ID NO: 39194 - DNA, 80 bp, synthetic construct
  source 1..80: mol_type = other DNA
tatatgtatttgacctctagaggttcctgtacttcaaaattcatcactatatgacaattgagtatcatagcatcttctgc

SEQ ID NO: 39195 - DNA, 80 bp, synthetic construct; identical to SEQ ID NO: 10671
  source 1..80: mol_type = other DNA

SEQ ID NO: 39196 - DNA, 80 bp, synthetic construct
  source 1..80: mol_type = other DNA
aatcagagttgaacttcttgtggaagaatctggagatgtccatatgaaaggaaaataggcaataaactagattgtattat

SEQ ID NO: 39197 - DNA, 80 bp, synthetic construct
  source 1..80: mol_type = other DNA
ggatattgttaagcccgttgagactggtgctccacaacagtaattaagcataattatgatgcaggtcaaggtaagacatt

SEQ ID NO: 39198 - DNA, 80 bp, synthetic construct
  source 1..80: mol_type = other DNA
ttcaatgcctactaagagtcatggaaccctattatatgatggtgaatcgagaaagaactatacaaaattatgctttcaag

SEQ ID NO: 39199 - DNA, 80 bp, synthetic construct; identical to SEQ ID NO: 10672
  source 1..80: mol_type = other DNA

SEQ ID NO: 39200 - DNA, 80 bp, synthetic construct
  source 1..80: mol_type = other DNA
aacatattatccacattgtgaaaaccagtggtacaccaaagaaagggacaactcaaaatgctagtggtgtgctgctcatc

SEQ ID NO: 39201 - DNA, 80 bp, synthetic construct
  source 1..80: mol_type = other DNA
cattgtcccataaaagctaaatattatattatgataaatagaaataaaaagatttattctgttatgcaattccactacat

SEQ ID NO: 39202 - DNA, 80 bp, synthetic construct
  source 1..80: mol_type = other DNA
gtgtcattacctttaaaaccctttaatttgtggctttatattacgatagagtagtaatagacttaaatagcagagaccct

SEQ ID NO: 39203 - DNA, 80 bp, synthetic construct; identical to SEQ ID NO: 10673
  source 1..80: mol_type = other DNA

SEQ ID NO: 39204 - DNA, 80 bp, synthetic construct
  source 1..80: mol_type = other DNA
aatttctaatgatctgttttctctgatgatataccaatgatcagggacataaaggagctaagtagaatggttgtaatttt

SEQ ID NO: 39205 - DNA, 80 bp, synthetic construct
  source 1..80: mol_type = other DNA
tgtagatttgtggtgaaatctcatcagtttcttcagggcatccttcatgtccttatttcttaaggtgtaaatgagcgggt

SEQ ID NO: 39206 - DNA, 80 bp, synthetic construct
  source 1..80: mol_type = other DNA
tgcttttgacttcgttctcagcacagctttggcaatgtagccataggatataagaataaggatgagaggtgtgaggacaa

SEQ ID NO: 39207 - DNA, 80 bp, synthetic construct; identical to SEQ ID NO: 10674
  source 1..80: mol_type = other DNA

SEQ ID NO: 39208 - DNA, 80 bp, synthetic construct
  source 1..80: mol_type = other DNA
acaagttgaccagcatctgagggatgatgctggttgtgaaacatagatctaggaaagataaatttctgaggaaaaagtac

SEQ ID NO: 39209 - DNA, 80 bp, synthetic construct
  source 1..80: mol_type = other DNA
aattgctttggtccatagtccttcaatgtctaaatcctagagtgagaaaaggaggaggaggaggtagatgatgatacaag

SEQ ID NO: 39210 - DNA, 80 bp, synthetic construct
  source 1..80: mol_type = other DNA
attgaaaaaatttaatggataaaagtaaaaattacagccaagaaatctgctatttgtcatagattcttttatggcaatga

SEQ ID NO: 39211 - DNA, 80 bp, synthetic construct; identical to SEQ ID NO: 10675
  source 1..80: mol_type = other DNA

SEQ ID NO: 39212 - DNA, 80 bp, synthetic construct
  source 1..80: mol_type = other DNA
aagggtactaagtttcagttagaaaaaaggaaccagttttagtgatctcacagaatggtgactacaataaacaataatgc

SEQ ID NO: 39213 - DNA, 80 bp, synthetic construct
  source 1..80: mol_type = other DNA
tgcttaattaaaaataaaccttaaaaaagagtgaggaaagattgttcttcttttttcatatcttagtgactaagcacctt

SEQ ID NO: 39214 - DNA, 80 bp, synthetic construct
  source 1..80: mol_type = other DNA
tcaaatcactatgatttcttttctggattctggcaatagtcttgcatccagtccttgcatccagtcttatgcctttacat

SEQ ID NO: 39215 - DNA, 80 bp, synthetic construct; identical to SEQ ID NO: 10676
  source 1..80: mol_type = other DNA

SEQ ID NO: 39216 - DNA, 80 bp, synthetic construct
  source 1..80: mol_type = other DNA
ctcaggaggctgaggcgggaggatcacttgagcccaggagtttgaggttgcggtgagctatgattgcaccactgcactcc

SEQ ID NO: 39217 - DNA, 80 bp, synthetic construct
  source 1..80: mol_type = other DNA
gaaattacttccaactgtggccatgattcaaaagtggatacatttgtgagactaaccggagatggtggttgaaatagccg

SEQ ID NO: 39218 - DNA, 80 bp, synthetic construct
  source 1..80: mol_type = other DNA
caagctgtcacaccccattaaagttccataatgtctgagcaggggcatcaataattaatgcttatttattttaacagact

SEQ ID NO: 39219 - DNA, 80 bp, synthetic construct; identical to SEQ ID NO: 10677
  source 1..80: mol_type = other DNA

SEQ ID NO: 39220 - DNA, 80 bp, synthetic construct
  source 1..80: mol_type = other DNA
cttttgtttctgctggatcaatatttattctcagacttctgaaataaaaccagcccatacagatctaagttctttttctt

SEQ ID NO: 39221 - DNA, 80 bp, synthetic construct
  source 1..80: mol_type = other DNA
tccacactatggaaaatagatcccggttaagcatttttttctccagggctgtaaatttctcatgatttccctgcagtgcc

SEQ ID NO: 39222 - DNA, 80 bp, synthetic construct
  source 1..80: mol_type = other DNA
tctgagtttaaatcaacctgcaagtaggtcttgaccatagagaaacattaggaaaagcaaccggataattcagaatcaga

SEQ ID NO: 39223 - DNA, 80 bp, synthetic construct
  source 1..80: mol_type = other DNA
gaattagaccataccctaatatttcactagggcaggtttagtagatgtaaaagttatttaatatgaaggaaaactatagg

SEQ ID NO: 39224 - DNA, 80 bp, synthetic construct; identical to SEQ ID NO: 10678
  source 1..80: mol_type = other DNA

SEQ ID NO: 39225 - DNA, 80 bp, synthetic construct
  source 1..80: mol_type = other DNA
aattctagagtaagtatatactatgaaaatttttgtgagttggcttataatcataggttttaacagcttccttaaattaa

SEQ ID NO: 39226 - DNA, 80 bp, synthetic construct
  source 1..80: mol_type = other DNA
atagtgtaatggttagatggatagattgtggagccagactttctgggctgaaatcctggtggctacagttaccagatgtg

SEQ ID NO: 39227 - DNA, 80 bp, synthetic construct
  source 1..80: mol_type = other DNA
aactgttacaatttcaatcagttcagggtgtctgtgtgctgcagaaatatttggggaaagtttatgctgatatttgataa

SEQ ID NO: 39228 - DNA, 80 bp, synthetic construct; identical to SEQ ID NO: 10679
  source 1..80: mol_type = other DNA

SEQ ID NO: 39229 - DNA, 80 bp, synthetic construct
  source 1..80: mol_type = other DNA
gtcatgcccacccatgtttctggtttaaatacattcctacacagtgacttttctagtcccttgctccttattctgtgatt

SEQ ID NO: 39230 - DNA, 80 bp, synthetic construct
  source 1..80: mol_type = other DNA
atgcccttgccttaaactttaatataagacctttccatacccctttgaataaatcaagacatgttttcctgtttcctttt

SEQ ID NO: 39231 - DNA, 80 bp, synthetic construct
  source 1..80: mol_type = other DNA
tgcccttgccaaaggctcaattcttttctgtttatactgtgtccctagatagaatcttagagttttaaggatttgaatcc

SEQ ID NO: 39232 - DNA, 80 bp, synthetic construct; identical to SEQ ID NO: 10680
  source 1..80: mol_type = other DNA

SEQ ID NO: 39233 - DNA, 80 bp, synthetic construct
  source 1..80: mol_type = other DNA
ctctgctttaattcattcccctttcaatctattctccatatggcggccaaaagcgttctttaaaaaaaccacacgttggc

SEQ ID NO: 39234 - DNA, 80 bp, synthetic construct
  source 1..80: mol_type = other DNA
aaaatcaacaatacaacaatacaaaattagccgggtatggtggcgcatgcctggaatcccagctactctggaggctgaga

SEQ ID NO: 39235 - DNA, 80 bp, synthetic construct
  source 1..80: mol_type = other DNA
tgaaatctttttagacttcctatgcacttaactataaaattcagactccttaccaagaactaccagatgcaccttgcctg

SEQ ID NO: 39236 - DNA, 80 bp, synthetic construct; identical to SEQ ID NO: 10681
  source 1..80: mol_type = other DNA

SEQ ID NO: 39237 - DNA, 80 bp, synthetic construct
  source 1..80: mol_type = other DNA
aactaaatagacaaaacagtaaagtccctgacttaatggagcttacttttatttgtgaaaacaagctcatcagccaaatt

SEQ ID NO: 39238 - DNA, 80 bp, synthetic construct
  source 1..80: mol_type = other DNA
ctaattggtcaggacctgatagccctgtgataatgctgcactcagcattccttgatgatgctatattagcttccagtggc

SEQ ID NO: 39239 - DNA, 80 bp, synthetic construct
  source 1..80: mol_type = other DNA
tgtggtgatggagatccgtgtttaatgatattgatcatcaaatagcctggataaagagtatgttcccagaagaaagagat

SEQ ID NO: 39240 - DNA, 80 bp, synthetic construct; identical to SEQ ID NO: 10682
  source 1..80: mol_type = other DNA

SEQ ID NO: 39241 - DNA, 80 bp, synthetic construct
  source 1..80: mol_type = other DNA
cccaaaccgtatatgattctctcaatagttgcagaaaaatcttctgataaaatccaacacctcttcatgttaaaaccctc

SEQ ID NO: 39242 - DNA, 80 bp, synthetic construct
  source 1..80: mol_type = other DNA
gaaaatcctagccaaataaatcaggcaagagagagaaataaaaagcatccagataggaaaagaggagtcaaattatgcta

SEQ ID NO: 39243 - DNA, 80 bp, synthetic construct
  source 1..80: mol_type = other DNA
tccctttaaaatacacacacacacacacacacacacacacacacacacacacaaaatctaggaatacttctaaccaagga

SEQ ID NO: 39244 - DNA, 80 bp, synthetic construct; identical to SEQ ID NO: 10683
  source 1..80: mol_type = other DNA

SEQ ID NO: 39245 - DNA, 80 bp, synthetic construct
  source 1..80: mol_type = other DNA
ggcacctagaccaatggaacagaataaagaacccagaaataaagcagcatacctacaaccaactgatcttgaacaaagtc

SEQ ID NO: 39246 - DNA, 80 bp, synthetic construct
  source 1..80: mol_type = other DNA
taaaaatcctggggaaaaaactcagaaatacccttttggacattggccttggcaaagaacttatgaccaagtcctcaaaa

SEQ ID NO: 39247 - DNA, 80 bp, synthetic construct
  source 1..80: mol_type = other DNA
taaggaacctaaacaaatcaacaagagaaaaacaaataaccccattaaagaatgggcaaagaacatgaatggacaattct

SEQ ID NO: 39248 - DNA, 80 bp, synthetic construct; identical to SEQ ID NO: 10684
  source 1..80: mol_type = other DNA

SEQ ID NO: 39249 - DNA, 80 bp, synthetic construct
  source 1..80: mol_type = other DNA
taatggtggattggataaagaaaatgtggtacatatacaacatggaatgctacacagccataaaagagaacgaaataatg

SEQ ID NO: 39250 - DNA, 80 bp, synthetic construct
  source 1..80: mol_type = other DNA
ttccaaaaggaaggagaggaggagaggagcaaggactgaaaaatttcctattgtatactatattcactgtctgggtgaca

SEQ ID NO: 39251 - DNA, 80 bp, synthetic construct
  source 1..80: mol_type = other DNA
ttttacctctgttcttttcactgcagctttgtgaaggtataattaacaagtaaaaattgcatacacttactatgtgtatg

SEQ ID NO: 39252 - DNA, 80 bp, synthetic construct; identical to SEQ ID NO: 10685
  source 1..80: mol_type = other DNA

SEQ ID NO: 39253 - DNA, 80 bp, synthetic construct
  source 1..80: mol_type = other DNA
ttgttgcaagtggcagaatttccttctttttgatggatgcttggtttgtttccaagtgttggctaatgtgaatgatgcta

SEQ ID NO: 39254 - DNA, 80 bp, synthetic construct
  source 1..80: mol_type = other DNA
caccagtagtgcataaggattccctttctttctgaatccttgccaatacttgttatctcgtctcgataatagccatccta

SEQ ID NO: 39255 - DNA, 80 bp, synthetic construct
  source 1..80: mol_type = other DNA
ttatttttgctatggagttgtttgaattccttgtattttttggatattaactccttatcagatttgtgagttacgtaaga

SEQ ID NO: 39256 - DNA, 80 bp, synthetic construct; identical to SEQ ID NO: 10686
  source 1..80: mol_type = other DNA

SEQ ID NO: 39257 - DNA, 80 bp, synthetic construct
  source 1..80: mol_type = other DNA
gggtattatggacattttagtagtattaattcttctattccatgagcatgaaatattttaaacatttatttgtattttct

SEQ ID NO: 39258 - DNA, 80 bp, synthetic construct
  source 1..80: mol_type = other DNA
tggcacatgtatacatatgtaactaacctgcacaatgtgcacatgtaccctaaaacttaaagtataataaaaaaaaaaga

SEQ ID NO: 39259 - DNA, 80 bp, synthetic construct
  source 1..80: mol_type = other DNA
tggcaatttttaagaatacaatatattgttattaagtatggccatcatgatgtacaatagatcacttgaatttattcctc

SEQ ID NO: 39260 - DNA, 80 bp, synthetic construct; identical to SEQ ID NO: 10687
  source 1..80: mol_type = other DNA

SEQ ID NO: 39261 - DNA, 80 bp, synthetic construct
  source 1..80: mol_type = other DNA
gggattcctggatcatatgatatttctatttttaattttttgaggaacccccttactattttccataaaggctatactaa

SEQ ID NO: 39262 - DNA, 80 bp, synthetic construct
  source 1..80: mol_type = other DNA
ttatatacctggccatgtctttgagaaatgtctattcaatcatttgtccaatttttcattgggctgttagttttcttact

SEQ ID NO: 39263 - DNA, 80 bp, synthetic construct
  source 1..80: mol_type = other DNA
ctatctttatttttgttgcgtgtgctttgaggatcacctaaaaaaaccattgctcaggccaatgtcatggaggttttccc

SEQ ID NO: 39264 - DNA, 80 bp, synthetic construct; identical to SEQ ID NO: 10688
  source 1..80: mol_type = other DNA

SEQ ID NO: 39265 - DNA, 80 bp, synthetic construct
  source 1..80: mol_type = other DNA
tcaagattgctttgtctgtttagagtcttttgtgattccacataaattttaagattgtttctctatttctacgaaaaatg

SEQ ID NO: 39266 - DNA, 80 bp, synthetic construct
  source 1..80: mol_type = other DNA
ctttcacctctttggtttaatttatgcctgagcattttcatgttttgaaaataggattgttttattgattcttttaaaaa

SEQ ID NO: 39267 - DNA, 80 bp, synthetic construct
  source 1..80: mol_type = other DNA
tagccctctcctagcctcccacccactgacaagccccagtgtgtgatgttctcctccctgtgtccatgtgttctcattat

SEQ ID NO: 39268 - DNA, 80 bp, synthetic construct; identical to SEQ ID NO: 10689
  source 1..80: mol_type = other DNA

SEQ ID NO: 39269 - DNA, 80 bp, synthetic construct
  source 1..80: mol_type = other DNA
cactgtcttctacaatggttgaactaatttacactcccaccaacatcgtaaaagtgttcctatttctccacatcttctcc

SEQ ID NO: 39270 - DNA, 80 bp, synthetic construct
  source 1..80: mol_type = other DNA
gtttatatcctttgcccactttttgatagggttgtttgatttttttcttgtaaatttaagatacttgtagattctggata

SEQ ID NO: 39271 - DNA, 80 bp, synthetic construct
  source 1..80: mol_type = other DNA
acacatgaagtctttgcccatgcctatgtcctgaatggtatttcccagttttcttgtaggatttttatggttttaggtct

SEQ ID NO: 39272 - DNA, 80 bp, synthetic construct
  source 1..80: mol_type = other DNA
cagatggttgcagatgtgtggtgttatttctgaggcctctcttctgttccattgctctatatatttgttttggtaccagt

SEQ ID NO: 39273 - DNA, 80 bp, synthetic construct; identical to SEQ ID NO: 10690
  source 1..80: mol_type = other DNA

SEQ ID NO: 39274 - DNA, 80 bp, synthetic construct
  source 1..80: mol_type = other DNA
ctcatgatttggctatttgtttgtctattactggtgtataagaatgcttgtgatttttgcatgttgattttgtatcctga

SEQ ID NO: 39275 - DNA, 80 bp, synthetic construct
  source 1..80: mol_type = other DNA
agaacttccaatactatgttgagtaggcgtggtgagaaagggcatctttgtcttgtgctggttttccaagaaaatgcttc

SEQ ID NO: 39276 - DNA, 80 bp, synthetic construct
  source 1..80: mol_type = other DNA
atgtggtttttgtcgttggttctgtttatctgatggattacgtttattgatttgtgtatgttgaaccagccttacatccc

SEQ ID NO: 39277 - DNA, 80 bp, synthetic construct; identical to SEQ ID NO: 10691
  source 1..80: mol_type = other DNA

SEQ ID NO: 39278 - DNA, 80 bp, synthetic construct
  source 1..80: mol_type = other DNA
tatgtgtccagaagtttatcaatttcttctagattttctggtttatttgcgtagtggtgtttataatattctctgatggt

SEQ ID NO: 39279 - DNA, 80 bp, synthetic construct
  source 1..80: mol_type = other DNA
agttatttcttgtcttctgctagcttttgaatttgtttgctcttgcttctctagttcttctaattgtgatgttaaggtgt

SEQ ID NO: 39280 - DNA, 80 bp, synthetic construct
  source 1..80: mol_type = other DNA
ccagtagtcattcaggagcaggttgttcagtttccatgtagttgtgtagttttgagtgagtttcttaatcttgagttcta

SEQ ID NO: 39281 - DNA, 80 bp, synthetic construct
  source 1..80: mol_type = other DNA
gatgtctattaggtctgcttggtccagagctgagttcaagttctgaatatccttattaattttctgtctcactgatctgt

SEQ ID NO: 39282 - DNA, 80 bp, synthetic construct; identical to SEQ ID NO: 10692
  source 1..80: mol_type = other DNA

SEQ ID NO: 39283 - DNA, 80 bp, synthetic construct
  source 1..80: mol_type = other DNA
atttagcccatttatatttaaggttaatattgttatgtgtgaatttgatcatgtcattatgatgctagctggttattttg

SEQ ID NO: 39284 - DNA, 80 bp, synthetic construct
  source 1..80: mol_type = other DNA
agtatacaaagaccatttctttccttcctccctccctccctttctctctctctttctttctctctctcttttgttcattc

SEQ ID NO: 39285 - DNA, 80 bp, synthetic construct
  source 1..80: mol_type = other DNA
catggtctttattgtgttgtcatacattccttataaccaatttgttgagacatttcttatgaagaaatgttgaatgtttt

SEQ ID NO: 39286 - DNA, 80 bp, synthetic construct; identical to SEQ ID NO: 10693
  source 1..80: mol_type = other DNA

SEQ ID NO: 39287 - DNA, 80 bp, synthetic construct
  source 1..80: mol_type = other DNA
aattcaattctccaatgcctactctcataatctaaagaaagcaaggcagaagtgttttcctgaaaggaagaatctttgtt

SEQ ID NO: 39288 - DNA, 80 bp, synthetic construct
  source 1..80: mol_type = other DNA
ctgaattttacatatgtgaaaagacattaatcctcttagactttggggttgttgtgtgaggcctaggaggagcacactag

SEQ ID NO: 39289 - DNA, 80 bp, synthetic construct
  source 1..80: mol_type = other DNA
attgggtgccctggaagcctgaggtagatttggtactatggagggtgcacttgctgatatgaagttttattttatacaaa

SEQ ID NO: 39290 - DNA, 80 bp, synthetic construct
  source 1..80: mol_type = other DNA
agttgaaagccaggtttatataaataggaagaaagagtttgccatagaatttatgctttagttggagaaaaatgtaaagt

SEQ ID NO: 39291 - DNA, 80 bp, synthetic construct; identical to SEQ ID NO: 10694
  source 1..80: mol_type = other DNA

SEQ ID NO: 39292 - DNA, 80 bp, synthetic construct
  source 1..80: mol_type = other DNA
ggctaaaatgagcattgcaatgtccaggaaagcataaactacacgcaaaaaagctcaagaatgggatgaccaactgagca

SEQ ID NO: 39293 - DNA, 80 bp, synthetic construct
  source 1..80: mol_type = other DNA
tgtcagggactcagggacttagaattggggagaatgaagcaatcagaaagtaagtaccagtcaatcatcagtcaaaaggg

SEQ ID NO: 39294 - DNA, 80 bp, synthetic construct
  source 1..80: mol_type = other DNA
aatttaaagagtttgtattgtttagaagtctgtaaaggatgtgagagaaacactgggtaattcttcttcatgtattttta

SEQ ID NO: 39295 - DNA, 80 bp, synthetic construct
  source 1..80: mol_type = other DNA
ttcctcaagcctcttgtcattaaagcctgtaaaaattacagtaaaagtattcagaatgggttaagcaatttgaccgtcag

SEQ ID NO: 39296 - DNA, 80 bp, synthetic construct; identical to SEQ ID NO: 10695
  source 1..80: mol_type = other DNA

SEQ ID NO: 39297 - DNA, 80 bp, synthetic construct
  source 1..80: mol_type = other DNA
cattagatataactcctaacgctatccctcccccctccccccaccccacaacaggccctggcacgtgatgttccccttcc

SEQ ID NO: 39298 - DNA, 80 bp, synthetic construct
  source 1..80: mol_type = other DNA
ttccatggtgtatatgtgccatattttcttaatccagtctatcattgttggacatttgggttggttccaagtctttgcta

SEQ ID NO: 39299 - DNA, 80 bp, synthetic construct
  source 1..80: mol_type = other DNA
aactagtttacagtcccaccaacagtgtaaaagtgttcctatttctccacatcctctccagcacctgttgtttcctgact

SEQ ID NO: 39300 - DNA, 80 bp, synthetic construct; identical to SEQ ID NO: 10696
  source 1..80: mol_type = other DNA

SEQ ID NO: 39301 - DNA, 80 bp, synthetic construct
  source 1..80: mol_type = other DNA
tcttttggctgcataaatgtcttgttttgagaagtgtctgttcatgtccttcacccactttttgatggggttgtttgttt

SEQ ID NO: 39302 - DNA, 80 bp, synthetic construct
  source 1..80: mol_type = other DNA
tttgtcaattttggcttttgttgccattgcttttggtgttttagacatgaagtccttgcccatgcctatgtcctgaatgg

SEQ ID NO: 39303 - DNA, 80 bp, synthetic construct; identical to SEQ ID NO: 10697
  source 1..80: mol_type = other DNA

SEQ ID NO: 39304 - DNA, 80 bp, synthetic construct
  source 1..80: mol_type = other DNA
gttccatatgaactttaaagtacttttttccaattctgtgaagaaagtcattggtagcttgatggggatggcgctgaatc

SEQ ID NO: 39305 - DNA, 80 bp, synthetic construct
  source 1..80: mol_type = other DNA
aggtattttattctctttgaagcaattgtgaatgggagttcactcatgatttggctctctgtttgtctgttattggtgta

SEQ ID NO: 39306 - DNA, 80 bp, synthetic construct
  source 1..80: mol_type = other DNA
tgaataccctttatttctttctcctgcctgattgccctggccagaacttccaacactatgttgaataggagtggtgagag

SEQ ID NO: 39307 - DNA, 80 bp, synthetic construct; identical to SEQ ID NO: 10698
  source 1..80: mol_type = other DNA

SEQ ID NO: 39308 - DNA, 80 bp, synthetic construct
  source 1..80: mol_type = other DNA
atagtgaatgctagaaaaaaaatgcagaacaaggggaactcttatttattactgatgagaatgcaaaatgttaaaatcac

SEQ ID NO: 39309 - DNA, 80 bp, synthetic construct
  source 1..80: mol_type = other DNA
atctggaggcatcacattacctgatttgaaactatactataaggccatagtcaccaaaacagcatggtatgggtataaaa

SEQ ID NO: 39310 - DNA, 80 bp, synthetic construct
  source 1..80: mol_type = other DNA
aatgaaccaggatcctcatctctcaccttatacaaaaatcaactcaagatggatcaaagctgagtgcggtggctcacgcc

SEQ ID NO: 39311 - DNA, 80 bp, synthetic construct
  source 1..80: mol_type = other DNA
aggcaggagaatggcgtgaacccaggcagcagagcttgcagtgagctggtattgagccactgcactctagcctgggggac

SEQ ID NO: 39312 - DNA, 80 bp, synthetic construct; identical to SEQ ID NO: 10699
  source 1..80: mol_type = other DNA

SEQ ID NO: 39313 - DNA, 80 bp, synthetic construct
  source 1..80: mol_type = other DNA
tctcaaaagaagatatacaaatggccagcaaacatatgaataaatgctcaacatcactaatgatcagagaaatgcaaatc

SEQ ID NO: 39314 - DNA, 80 bp, synthetic construct
  source 1..80: mol_type = other DNA
ccttaaagaactaaaagtggaactaccatttgatccagcaatccccttactgggtatctactcagaggaaaagaagtcat

SEQ ID NO: 39315 - DNA, 80 bp, synthetic construct
  source 1..80: mol_type = other DNA
cataaaaaggaatgaattaatggcattcacaacaacctagatgggattggagactattattctaaatgaagtaactcagg

SEQ ID NO: 39316 - DNA, 80 bp, synthetic construct; identical to SEQ ID NO: 10700
  source 1..80: mol_type = other DNA

SEQ ID NO: 39317 - DNA, 80 bp, synthetic construct
  source 1..80: mol_type = other DNA
taaaaaatacttatttagagcccattctctcaatacaggtcagtactatgaaggagaggtacacagtgaaatcaggccta

SEQ ID NO: 39318 - DNA, 80 bp, synthetic construct
  source 1..80: mol_type = other DNA
ttgtgtgttaatagattttgttcttgtcattcagaagagcacagtggaaatacatgaaggatgggcagatgtgtgaaggc

SEQ ID NO: 39319 - DNA, 80 bp, synthetic construct
  source 1..80: mol_type = other DNA
atccaactttctactttgtcacctctatctcaaaattgacggtctgatagctagtttattttatatttgccccaggttgt

SEQ ID NO: 39320 - DNA, 80 bp, synthetic construct; identical to SEQ ID NO: 10701
  source 1..80: mol_type = other DNA

SEQ ID NO: 39321 - DNA, 80 bp, synthetic construct
  source 1..80: mol_type = other DNA
tgatcttgctggcaatccataaaaagttaatttgcaaataaaagattagcctttaaatcacattcataataacaagaagg

SEQ ID NO: 39322 - DNA, 80 bp, synthetic construct
  source 1..80: mol_type = other DNA
aaggacatagttctcactaccatgcaaattgcagacaatctgaggattaggattcacacttgaaatgatatccaacaaac

SEQ ID NO: 39323 - DNA, 80 bp, synthetic construct
  source 1..80: mol_type = other DNA
cctggtgatacaaaaagacaagaagcctcctcattgccccttttatgtccctgttgctcaaagtgtagataaaagggtta

SEQ ID NO: 39324 - DNA, 80 bp, synthetic construct; identical to SEQ ID NO: 10702
  source 1..80: mol_type = other DNA

SEQ ID NO: 39325 - DNA, 80 bp, synthetic construct
  source 1..80: mol_type = other DNA
atggccactaggaggacacagagttgctgatgcatgatagctgggtacctcaagtgtttgcagatggcaatgtaaggatc

SEQ ID NO: 39326 - DNA, 80 bp, synthetic construct
  source 1..80: mol_type = other DNA
gaatgaagatctttcgagcaattgcattgcccagattcctgtcattgctcttgttggtggatttgagggaaaggaaaggc

SEQ ID NO: 39327 - DNA, 80 bp, synthetic construct
  source 1..80: mol_type = other DNA
aaaaattttatctaaaggccaaaatgttacctttctagtgcctctaaaaggaagatcaacaaatctctgtatcttaccca

SEQ ID NO: 39328 - DNA, 80 bp, synthetic construct
  source 1..80: mol_type = other DNA
ctacccatgctaactaacacgtgttaatttctttcatccaaaatctgttggccctggtcatgttctggttcaatttgtga

SEQ ID NO: 39329 - DNA, 80 bp, synthetic construct; identical to SEQ ID NO: 10703
  source 1..80: mol_type = other DNA

SEQ ID NO: 39330 - DNA, 80 bp, synthetic construct
  source 1..80: mol_type = other DNA
tatgtgtttgtatgacctggattctgatgtacaatatattccttactataggtaatggtaaaaaatttggacaatactgg

SEQ ID NO: 39331 - DNA, 80 bp, synthetic construct
  source 1..80: mol_type = other DNA
ctccgttgtggagattaattagcaccatatgtgtgaacacgctttattaagtccaatactcaatgttgggttggttattt

SEQ ID NO: 39332 - DNA, 80 bp, synthetic construct
  source 1..80: mol_type = other DNA
tctaccattttatttccctacattactcagatcccttgccttgaatctgatgttaatgatttctagattttaatatcagt

SEQ ID NO: 39333 - DNA, 80 bp, synthetic construct
  source 1..80: mol_type = other DNA
ggctatcctataggcagtgtgcccacagtagccttttttaaaatagtttttttagtatgcaaattttcataaggagatca

SEQ ID NO: 39334 - DNA, 80 bp, synthetic construct; identical to SEQ ID NO: 10704
  source 1..80: mol_type = other DNA

SEQ ID NO: 39335 - DNA, 80 bp, synthetic construct
  source 1..80: mol_type = other DNA
ttttctgaaataggacatacatgcactctgataaaacagaatgaaacatcttaattcatgagaattcctgtacaaggcgc

SEQ ID NO: 39336 - DNA, 80 bp, synthetic construct
  source 1..80: mol_type = other DNA
agaaaaccaacatggaagcaatcatacttctcatgtctctgataagagaagtatggggaacctttaaccaaaggaaaatt

SEQ ID NO: 39337 - DNA, 80 bp, synthetic construct
  source 1..80: mol_type = other DNA
cattcagtacctggcagtgaaaaagtatgtttcccgaacaagtcagtactgaagactgagaactccaactaaataactat

SEQ ID NO: 39338 - DNA, 80 bp, synthetic construct; identical to SEQ ID NO: 10705
  source 1..80: mol_type = other DNA

SEQ ID NO: 39339 - DNA, 80 bp, synthetic construct
  source 1..80: mol_type = other DNA
gttaacctttactttaaacacagcaacgtagatatctaaggagataagatgtaagacaaagagctcaggaaaaatccaat

SEQ ID NO: 39340 - DNA, 80 bp, synthetic construct
  source 1..80: mol_type = other DNA
taactttgtcctgtcttcctattcagaaaaattttcctctagaatctgtgcaaaagtaactgacacacctgcagtatgtg

SEQ ID NO: 39341 - DNA, 80 bp, synthetic construct
  source 1..80: mol_type = other DNA
taacttacactataattaactgctcaatagtgaatgatctgctacacattccttgagaaggaatgaccctagcttaccac

SEQ ID NO: 39342 - DNA, 80 bp, synthetic construct
  source 1..80: mol_type = other DNA
ctcaccaacctgctaactcagcaggagtgagtttacccaaatgagctctggcctccaatgtgtatctgttcataatttta

SEQ ID NO: 39343 - DNA, 80 bp, synthetic construct; identical to SEQ ID NO: 10706
  source 1..80: mol_type = other DNA

SEQ ID NO: 39344 - DNA, 80 bp, synthetic construct
  source 1..80: mol_type = other DNA
agacagtgactcttggcttctcaatgctagacatgattggagacctttcattgttctattagaaaagtccatgaagaagc

SEQ ID NO: 39345 - DNA, 80 bp, synthetic construct
  source 1..80: mol_type = other DNA
ccatgttcctctttcctgtggtctgtccagaaagcccaaatatctcaaagagtttttcttcacttattgcattgttctgt

SEQ ID NO: 39346 - DNA, 80 bp, synthetic construct
  source 1..80: mol_type = other DNA
acatgcttgcttgtgtccaccaagatcaagagttgtaaaagtcattccagcaattaatagcttttctgatgtcggatgta

SEQ ID NO: 39347 - DNA, 80 bp, synthetic construct; identical to SEQ ID NO: 10707
  source 1..80: mol_type = other DNA

SEQ ID NO: 39348 - DNA, 80 bp, synthetic construct
  source 1..80: mol_type = other DNA
tcaacccatcacgtatgtattaagcccagcatgcattagctatttttcctgatgttctccctcccctctccacccccaga

SEQ ID NO: 39349 - DNA, 80 bp, synthetic construct
  source 1..80: mol_type = other DNA
gttctaaaggtactttaaaaaaagtactttatagggttgccactcactctataaagctgtgaaactttgttctctgtaca

SEQ ID NO: 39350 - DNA, 80 bp, synthetic construct
  source 1..80: mol_type = other DNA
aatggactcaggtctgagagaagccaaggaaactgaatctgccttaacaattttataaaaatttccttggatcacaagga

SEQ ID NO: 39351 - DNA, 80 bp, synthetic construct; identical to SEQ ID NO: 10708
  source 1..80: mol_type = other DNA

SEQ ID NO: 39352 - DNA, 80 bp, synthetic construct
  source 1..80: mol_type = other DNA
ttttttcacccatggttcacaattagcagcagatctagcaatctggaatccttctagccaagttcacactgatcatctca

SEQ ID NO: 39353 - DNA, 80 bp, synthetic construct
  source 1..80: mol_type = other DNA
gtttttatttcttttctgtctgaatccactcccacccaattcattattgacattaatgaatacatttgacttattctcgg

SEQ ID NO: 39354 - DNA, 80 bp, synthetic construct
  source 1..80: mol_type = other DNA
tcctttctgatggtattagtttccttacatcatcctgctggtgtggaagtgaaaagtgaatgataaattcttactacaca

SEQ ID NO: 39355 - DNA, 80 bp, synthetic construct
  source 1..80: mol_type = other DNA
ggggagggatagcattaggagaaatacctaatgtagatgacaggttggtgggtgcagcaaaccaccatggcacatgtata

SEQ ID NO: 39356 - DNA, 80 bp, synthetic construct; identical to SEQ ID NO: 10709
  source 1..80: mol_type = other DNA

SEQ ID NO: 39357 - DNA, 80 bp, synthetic construct
  source 1..80: mol_type = other DNA
aagacaaactatccttatacacttttctgaaatgttgcatcattattggctcctgaatgggagaaaatataaagaacatt

SEQ ID NO: 39358 - DNA, 80 bp, synthetic construct
  source 1..80: mol_type = other DNA
aaaaatttcatagatatgaaaactacatttatatattacatatgtgtaaaagtaaggcaaatgtaaatgaatgatgactc

SEQ ID NO: 39359 - DNA, 80 bp, synthetic construct
  source 1..80: mol_type = other DNA
catctactgttttgtctactctgaagaatttactacctcacttatagatctgagcctaaatgacacttccctagaagagc

SEQ ID NO: 39360 - DNA, 80 bp, synthetic construct; identical to SEQ ID NO: 10710
  source 1..80: mol_type = other DNA

SEQ ID NO: 39361 - DNA, 80 bp, synthetic construct
  source 1..80: mol_type = other DNA
gaacattgatggtgattcaaattttagagctcaacccatcttatttttgttatttaagttactaatgccccccaaagtat

SEQ ID NO: 39362 - DNA, 80 bp, synthetic construct
  source 1..80: mol_type = other DNA
gttattatggctttaagatagtgtctaatgggaagcaaataaacattaatgcaagacttttcaaggtgaaatagacttag

SEQ ID NO: 39363 - DNA, 80 bp, synthetic construct
  source 1..80: mol_type = other DNA
ctcaccacagttagcttggtgaacttatttctagtgttttcttacacatataggtatacataaaattagggtcatgttct

SEQ ID NO: 39364 - DNA, 80 bp, synthetic construct; identical to SEQ ID NO: 10711
  source 1..80: mol_type = other DNA

SEQ ID NO: 39365 - DNA, 80 bp, synthetic construct
  source 1..80: mol_type = other DNA
aaagtagctcctccatccattgttcttcataaccctcgggttccactcagttgttaggttcattatctgccttctaagtt

SEQ ID NO: 39366 - DNA, 80 bp, synthetic construct
  source 1..80: mol_type = other DNA
tcccttccctccctccctctctctttctctttcttttctttcctttctctctttctttctttctctttcttttctttctt

SEQ ID NO: 39367 - DNA, 80 bp, synthetic construct
  source 1..80: mol_type = other DNA
aggctcaggtgatccttctgcctcagcatcccctagtagctgggactacaagtgtttgctcctacacccaatgaattttt

SEQ ID NO: 39368 - DNA, 80 bp, synthetic construct; identical to SEQ ID NO: 10712
  source 1..80: mol_type = other DNA

SEQ ID NO: 39369 - DNA, 80 bp, synthetic construct
  source 1..80: mol_type = other DNA
tttggttttctgtgcctacgttactttgcttaagaaaatggtcttcagctccatccatgttcctgcaaaaggcatcatct

SEQ ID NO: 39370 - DNA, 80 bp, synthetic construct
  source 1..80: mol_type = other DNA
accataggctgagaccacctagaggagcatggtgagctttgggggaatgggcgtctctggccatgctccactgcagccgt

SEQ ID NO: 39371 - DNA, 80 bp, synthetic construct
  source 1..80: mol_type = other DNA
caacggacctcttccccaggagtcactgcgggccaagaacatgggccagaaacgagtccgggtactctgcaactccgtgc

SEQ ID NO: 39372 - DNA, 80 bp, synthetic construct; identical to SEQ ID NO: 10713
  source 1..80: mol_type = other DNA

SEQ ID NO: 39373 - DNA, 80 bp, synthetic construct
  source 1..80: mol_type = other DNA
acagccaggtctgcattcgataggacagggatgtgcaattttaccatctgcctagaaggggagaaaaaataaaatattta

SEQ ID NO: 39374 - DNA, 80 bp, synthetic construct
  source 1..80: mol_type = other DNA
gaaactctcagagtttgcaaaagctcgtgaagcaaccattctcatttgctatatacagtgatctatctgggaatgtggaa

SEQ ID NO: 39375 - DNA, 80 bp, synthetic construct
  source 1..80: mol_type = other DNA
attcatattgaattattggcagtagtagtaacaataatcaaaacaaggagtgtaaatatgctcaacaataggaaagtggt

SEQ ID NO: 39376 - DNA, 80 bp, synthetic construct
  source 1..80: mol_type = other DNA
cctgcctcagcctcccgagtagctgggactacaggcgcctgccaccatgcccggctatttttttgtatttttagtagaga

SEQ ID NO: 39377 - DNA, 80 bp, synthetic construct; identical to SEQ ID NO: 10714
  source 1..80: mol_type = other DNA

SEQ ID NO: 39378 - DNA, 80 bp, synthetic construct
  source 1..80: mol_type = other DNA
aattaaggggtcattccacatgcctgaggtagaacttgggacaaatatggaatttgacaaaagggaaaaacaaggagaaa

SEQ ID NO: 39379 - DNA, 80 bp, synthetic construct
  source 1..80: mol_type = other DNA
ttatataatataattatatataatataataatatataatataataatatataatataattatatataatatatcattatc

SEQ ID NO: 39380 - DNA, 80 bp, synthetic construct
  source 1..80: mol_type = other DNA
gtgtccttacattactaactgtaaaccatcatttaaatgtctcagtttaagaatcattgccttctggaactagcacattt

SEQ ID NO: 39381 - DNA, 80 bp, synthetic construct; identical to SEQ ID NO: 10715
  source 1..80: mol_type = other DNA

SEQ ID NO: 39382 - DNA, 80 bp, synthetic construct
  source 1..80: mol_type = other DNA
agatgggtggagcacctgaggtcaggagttcgagaccagcctggccaacacaaagaaaccccgtttctactaaaaataca

SEQ ID NO: 39383 - DNA, 80 bp, synthetic construct
  source 1..80: mol_type = other DNA
aaacaaaaacaaagccagctagattgaagccaaattacataccaaaaacagttctgaaaaggtgcatatgatgaatttta

SEQ ID NO: 39384 - DNA, 80 bp, synthetic construct
  source 1..80: mol_type = other DNA
ccatcaaagtctcctgactaccctgaagttgataggaaattgacatgacttgtctcaaggaacagagtacattgggggaa

SEQ ID NO: 39385 - DNA, 80 bp, synthetic construct
  source 1..80: mol_type = other DNA
ggcgcgatctgggctaactgcaacttctgactcctgggttcaagcgattctcttgccccagcctcctgagtatctgggat

SEQ ID NO: 39386 - DNA, 80 bp, synthetic construct; identical to SEQ ID NO: 10716
  source 1..80: mol_type = other DNA

SEQ ID NO: 39387 - DNA, 80 bp, synthetic construct
  source 1..80: mol_type = other DNA
tatctttatttctaaggctgtagatgagggagttcaacatggatgtgatgattccatagaagagggaaaccatctttccc

SEQ ID NO: 39388 - DNA, 80 bp, synthetic construct
  source 1..80: mol_type = other DNA
agatgaggatcaatgtcactggaattagaagaattagtacactaaagaagaagagctcagcctcaataggctttgtgtca

SEQ ID NO: 39389 - DNA, 80 bp, synthetic construct
  source 1..80: mol_type = other DNA
tcatgatgactacatagtggaggggtctgcaaacagccacatatctgtcaaaggacataacagccagaaggagacactct

SEQ ID NO: 39390 - DNA, 80 bp, synthetic construct; identical to SEQ ID NO: 10717
  source 1..80: mol_type = other DNA

SEQ ID NO: 39391 - DNA, 80 bp, synthetic construct
  source 1..80: mol_type = other DNA
ctcttactggagctgaattaaatttaatgaatagctcagcatcaaatacaatttacagtcaagtggataaagcccttgta

SEQ ID NO: 39392 - DNA, 80 bp, synthetic construct
  source 1..80: mol_type = other DNA
catggaaaattgtgagttctcaatgcattttatgttctctcctcttcttacctcctaacctatcttaataaacagtttag

SEQ ID NO: 39393 - DNA, 80 bp, synthetic construct
  source 1..80: mol_type = other DNA
taaatgccatgcatgtaggtccatttccacaaagaactaccgtgggtattagtaataaaattatggctacttgtgatata

SEQ ID NO: 39394 - DNA, 80 bp, synthetic construct; identical to SEQ ID NO: 10718
  source 1..80: mol_type = other DNA

SEQ ID NO: 39395 - DNA, 80 bp, synthetic construct
  source 1..80: mol_type = other DNA
tcagttatttagttatattacctaagtgcacctaagtttcttcagtctactttgcatgtttaaatgaaatgtcatcgagg

SEQ ID NO: 39396 - DNA, 80 bp, synthetic construct
  source 1..80: mol_type = other DNA
tgatatataaagtataatttgataatggaatgaataaatgaaaatgaacagagatgaccttgagatttttaacttcttcc

SEQ ID NO: 39397 - DNA, 80 bp, synthetic construct
  source 1..80: mol_type = other DNA
gataacttgatttagccactttataatgtacacatatatcaaaacatcatgttgtacactataaatatatacaattttta

SEQ ID NO: 39398 - DNA, 80 bp, synthetic construct; identical to SEQ ID NO: 10719
  source 1..80: mol_type = other DNA

SEQ ID NO: 39399 - DNA, 80 bp, synthetic construct
  source 1..80: mol_type = other DNA
tggagccagaatctgccagggttttattactggattgtgtgatcctgggcaatgaatgaacattcttgtgctacattaaa

SEQ ID NO: 39400 - DNA, 80 bp, synthetic construct
  source 1..80: mol_type = other DNA
ttaatagtaatactatatcattatctcagcttgtcttgtatatgagaaaacagaaaatttactattggtggttcaagtga

SEQ ID NO: 39401 - DNA, 80 bp, synthetic construct
  source 1..80: mol_type = other DNA
aagaggaccctattcagtagctgttattttctactcctattttttcacgtcctcttctcttcacattttatatggcactg

SEQ ID NO: 39402 - DNA, 80 bp, synthetic construct; identical to SEQ ID NO: 10720
  source 1..80: mol_type = other DNA

SEQ ID NO: 39403 - DNA, 80 bp, synthetic construct
  source 1..80: mol_type = other DNA
ccactcatggtaatataatacactgtattagacgccactcaccttttttctaaatgtccaagagatattcacgcctttct

SEQ ID NO: 39404 - DNA, 80 bp, synthetic construct
  source 1..80: mol_type = other DNA
gaaaaatacttatgaggagaggaaaatgtgtatagttagtgtgtcttcagtcattggggcatttttgactgacatgggct

SEQ ID NO: 39405 - DNA, 80 bp, synthetic construct
  source 1..80: mol_type = other DNA
ccctagagattctagagtccctcaagtttaattggtcattatgtccagagagtcaataagtcaactctattcctaactgg

SEQ ID NO: 39406 - DNA, 80 bp, synthetic construct
  source 1..80: mol_type = other DNA
ggtttaatgaacttatagccccaaattccttttaaatagttgcaaggtcaaatagggagtcctatgatggcgtataggga

SEQ ID NO: 39407 - DNA, 80 bp, synthetic construct; identical to SEQ ID NO: 10721
  source 1..80: mol_type = other DNA

SEQ ID NO: 39408 - DNA, 80 bp, synthetic construct
  source 1..80: mol_type = other DNA
acctagtgtctactaaaaatacaaaaaattagctgggcatggtggtgggtgcttgtaatctcagctactcgggaggcaga

SEQ ID NO: 39409 - DNA, 80 bp, synthetic construct
  source 1..80: mol_type = other DNA
taaaataaagaagttgtaattgaattgagcatcagcctagatataatcttaaggaaactaatgtgctcgtattttaatgt

SEQ ID NO: 39410 - DNA, 80 bp, synthetic construct
  source 1..80: mol_type = other DNA
tatatttgtaattagttttcaaatacaatttgttgtgcttggattataatagaaaagttattttattttttgtggtttta

SEQ ID NO: 39411 - DNA, 80 bp, synthetic construct; identical to SEQ ID NO: 10722
  source 1..80: mol_type = other DNA

SEQ ID NO: 39412 - DNA, 80 bp, synthetic construct
  source 1..80: mol_type = other DNA
gtcactgatgggcatttgggttggttccaagtcttagctgttgtaaatggtgctgcaataaacatatgtgtgcatgtgtc

SEQ ID NO: 39413 - DNA, 80 bp, synthetic construct
  source 1..80: mol_type = other DNA
atttctccccagcattgccaacatctgttgtttcctgactttttttttcccaatgaaatgatttgaatggacacttaaaa

SEQ ID NO: 39414 - DNA, 80 bp, synthetic construct
  source 1..80: mol_type = other DNA
gggattcccaagaaatgtgcaatcactcctggcaactcaaagtagtaataagttaacctcaagagaacaatcttggttaa

SEQ ID NO: 39415 - DNA, 80 bp, synthetic construct
  source 1..80: mol_type = other DNA
aggtatttgtcctaatgctctccctccccttgccccccaccccctgacaggccccggtgtgtaaagttcccctccctgtg

SEQ ID NO: 39416 - DNA, 80 bp, synthetic construct; identical to SEQ ID NO: 10723
  source 1..80: mol_type = other DNA

SEQ ID NO: 39417 - DNA, 80 bp, synthetic construct
  source 1..80: mol_type = other DNA
tgataagtgtcaggcactgtcatgtgcacaggagatatattgataatcaaaagaaataaagtctctgttctaatgaagct

SEQ ID NO: 39418 - DNA, 80 bp, synthetic construct
  source 1..80: mol_type = other DNA
gggggcaacatttgacctgaacagagttaggggttctcattcacttggaagattctaaactgagatttcgagtttgaatt

SEQ ID NO: 39419 - DNA, 80 bp, synthetic construct
  source 1..80: mol_type = other DNA
ttaagaaatgcagaccgatcctttgtttctgcattcatccatttgcattgctataaaggaatacctaagactgggtaatt

SEQ ID NO: 39420 - DNA, 80 bp, synthetic construct; identical to SEQ ID NO: 10724
  source 1..80: mol_type = other DNA

SEQ ID NO: 39421 - DNA, 80 bp, synthetic construct
  source 1..80: mol_type = other DNA
ttagttttaaaaatgtgtttgtaatttgtactattgacaggaggatattcttggactgcagcggttattggcaatgtgtg

SEQ ID NO: 39422 - DNA, 80 bp, synthetic construct
  source 1..80: mol_type = other DNA
aggctaactttaacttaaagaacacacattgactgaaaaaaatatttcatgcaagtagaaaccaaaagacagcaggggta

SEQ ID NO: 39423 - DNA, 80 bp, synthetic construct
  source 1..80: mol_type = other DNA
gacctaaaaagaaacagactgcaatacagtaatagcagggtttttcaacacttcactttcaacaatgaacatgtcatcta

SEQ ID NO: 39424 - DNA, 80 bp, synthetic construct; identical to SEQ ID NO: 10725
  source 1..80: mol_type = other DNA

SEQ ID NO: 39425 - DNA, 80 bp, synthetic construct
  source 1..80: mol_type = other DNA
gatattagcaagaggaatgtttgtagtaataaatgcctatattaaaaaagaagaaagatcccaaacaacctaatgttaca

SEQ ID NO: 39426 - DNA, 80 bp, synthetic construct
  source 1..80: mol_type = other DNA
aaaacttgagtagaccaactaagaagaaaagaagactctaataaagtcaaaaatgaaagaggagacattacaattgatac

SEQ ID NO: 39427 - DNA, 80 bp, synthetic construct
  source 1..80: mol_type = other DNA
tcagtaataaaagtcttctaccaaacaaaaacccagaatatgatggattttgcattcatggtttggaagaattaatatta

SEQ ID NO: 39428 - DNA, 80 bp, synthetic construct; identical to SEQ ID NO: 10726
  source 1..80: mol_type = other DNA

SEQ ID NO: 39429 - DNA, 80 bp, synthetic construct
  source 1..80: mol_type = other DNA
cagaacaatgaaattgaaaccttatttcacaccatatgcaaaaatcctctaaaaatggtttaaagatttaaatgtgtgac

SEQ ID NO: 39430 - DNA, 80 bp, synthetic construct
  source 1..80: mol_type = other DNA
aataacggattgaagagacaacccatggactgggagaaaatatttacaaaccatacatggctaatatccaaaatatgtaa

SEQ ID NO: 39431 - DNA, 80 bp, synthetic construct
  source 1..80: mol_type = other DNA
agatatcacctcatacctgttagaatggctatatcaataaaataagagttaataagtattagcaaggatgtggagaaggg

SEQ ID NO: 39432 - DNA, 80 bp, synthetic construct; identical to SEQ ID NO: 10727
  source 1..80: mol_type = other DNA

SEQ ID NO: 39433 - DNA, 80 bp, synthetic construct
  source 1..80: mol_type = other DNA
ctagtgtgtccagttcattcctaccaagataaccactctttaagagagccttgtccagaaaagaagttaatttcacgtat

SEQ ID NO: 39434 - DNA, 80 bp, synthetic construct
  source 1..80: mol_type = other DNA
gagtgagtgacagccgagaaggccgaagcctttactggggtacacagcatttcctaagcagggagtaactgattgctggg

SEQ ID NO: 39435 - DNA, 80 bp, synthetic construct
  source 1..80: mol_type = other DNA
taggtgctccacaggaaggtggaaaccaagaggccaaatatctggattgaccacctgaagaaactgggagaggagaactc

SEQ ID NO: 39436 - DNA, 80 bp, synthetic construct; identical to SEQ ID NO: 10728
  source 1..80: mol_type = other DNA

SEQ ID NO: 39437 - DNA, 80 bp, synthetic construct
  source 1..80: mol_type = other DNA
actcatgcaagtggagagtagaatatagctaccttgggggtaggggatggggaaaggggagattttaaacacaagatatt

SEQ ID NO: 39438 - DNA, 80 bp, synthetic construct
  source 1..80: mol_type = other DNA
cactccttttttccagttgtcttgtaaattttacccttagccccatggaaaactgaaaaaaaatcacatggctcagtaaa

SEQ ID NO: 39439 - DNA, 80 bp, synthetic construct
  source 1..80: mol_type = other DNA
ttgtactgagaacaccacaccaggacaacttgaagggcattaattgcaactttgggatttatactcccaaaggccccagt

SEQ ID NO: 39440 - DNA, 80 bp, synthetic construct; identical to SEQ ID NO: 10729
  source 1..80: mol_type = other DNA

SEQ ID NO: 39441 - DNA, 80 bp, synthetic construct
  source 1..80: mol_type = other DNA
ctgaaagaagttggcgcacttcttaaggggtgtacagcttctgtatttcaaaattgcaggaagtgtagattttaaatgtt

SEQ ID NO: 39442 - DNA, 80 bp, synthetic construct
  source 1..80: mol_type = other DNA
gtataaaggaatgaatatgacacgaattgggaaaatgtctcttagtaataattggggaaagaagagacactcagccatcc

SEQ ID NO: 39443 - DNA, 80 bp, synthetic construct
  source 1..80: mol_type = other DNA
tttgtcccttatttcctatcctttttatcgactctggaagaatgctgaaagatggtttatacaacagaaaaatatcagat

SEQ ID NO: 39444 - DNA, 80 bp, synthetic construct; identical to SEQ ID NO: 10730
  source 1..80: mol_type = other DNA

SEQ ID NO: 39445 - DNA, 80 bp, synthetic construct
  source 1..80: mol_type = other DNA
ttgtcttttgtcatattttatcagagagtatgagaggaagagttggctgtggcaggaggggagcagaagggggatggcaa

SEQ ID NO: 39446 - DNA, 80 bp, synthetic construct
  source 1..80: mol_type = other DNA
tgtccctgtctaacaatcctgtgttatacattctttcaatttcaaatgccacattctgacctcctcttcactgttgtgcc

SEQ ID NO: 39447 - DNA, 80 bp, synthetic construct
  source 1..80: mol_type = other DNA
tctctactctatttcactttattaatcagctttgcttatattgtgaatttttataagttggtgtgtgtgtgcatgtctgt

SEQ ID NO: 39448 - DNA, 80 bp, synthetic construct; identical to SEQ ID NO: 10731
  source 1..80: mol_type = other DNA

SEQ ID NO: 39449 - DNA, 80 bp, synthetic construct
  source 1..80: mol_type = other DNA
ctggacaaatatctcaatgaagcatacaaaggaaactgtataaaaattctactgccataatggtgcacactatctggaat

SEQ ID NO: 39450 - DNA, 80 bp, synthetic construct
  source 1..80: mol_type = other DNA
aactggcctcatctggaagtagttctctttgtggttatcttgatcttctacttgataacactgataggaaacctgttcat

SEQ ID NO: 39451 - DNA, 80 bp, synthetic construct
  source 1..80: mol_type = other DNA
gttcaactttactttgttctcgcactgggaaccgcagagtgtgtcctactggtggtgatgtcctatgatcgttatgcagc

SEQ ID NO: 39452 - DNA, 80 bp, synthetic construct; identical to SEQ ID NO: 10732
  source 1..80: mol_type = other DNA

SEQ ID NO: 39453 - DNA, 80 bp, synthetic construct
  source 1..80: mol_type = other DNA
tatctccagccaccatcagaaaattctcaagatcaaggcaagttcattgccctcttttacactgttgtcacacctagtct

SEQ ID NO: 39454 - DNA, 80 bp, synthetic construct
  source 1..80: mol_type = other DNA
tgtgtttcatctaacagctcacaaaacatggaatagttcagttcccccatttgttgctctgtttaatatttagttctgaa

SEQ ID NO: 39455 - DNA, 80 bp, synthetic construct
  source 1..80: mol_type = other DNA
aatgtgctaaattatgaactgaccattgatatgtataggaagagaagggcaatattgcaaagatgtaggctgaagaagtt

SEQ ID NO: 39456 - DNA, 80 bp, synthetic construct; identical to SEQ ID NO: 10733
  source 1..80: mol_type = other DNA

SEQ ID NO: 39457 - DNA, 80 bp, synthetic construct
  source 1..80: mol_type = other DNA
gggaaaaatggcaacataagataaaagatgaagtatctgtacatggcttaatttgtcactggggttaatgctaataaatt

SEQ ID NO: 39458 - DNA, 80 bp, synthetic construct
  source 1..80: mol_type = other DNA
ttcatagctcctgtaggaagacagtgctattaaatgaaacaaagcagaatatgtgcttaatttgctttagttggcctagt

SEQ ID NO: 39459 - DNA, 80 bp, synthetic construct
  source 1..80: mol_type = other DNA
aataacatatatttaatgtgcacaatgtgattatatataaatcaaaccaaattgtgaaattattaccacagtcaaattaa

SEQ ID NO: 39460 - DNA, 80 bp, synthetic construct; identical to SEQ ID NO: 10734
  source 1..80: mol_type = other DNA

SEQ ID NO: 39461 - DNA, 80 bp, synthetic construct
  source 1..80: mol_type = other DNA
ccacgcccagctaatttttgtattttagtagaaactagttctcaccatgttggccaggctggtcttgaacccctgacctg

SEQ ID NO: 39462 - DNA, 80 bp, synthetic construct
  source 1..80: mol_type = other DNA
ttcatccatgttataacaaatggcaggattttctttttattggctgaataatatttctcgctgtgtgtgtgtgtgtgtgt

SEQ ID NO: 39463 - DNA, 80 bp, synthetic construct
  source 1..80: mol_type = other DNA
attattgggatcacatcacatctcacacagacttcacaaaatatgagaacatagattcctcctgcctccgtggaaatctt

SEQ ID NO: 39464 - DNA, 80 bp, synthetic construct; identical to SEQ ID NO: 10735
  source 1..80: mol_type = other DNA

SEQ ID NO: 39465 - DNA, 80 bp, synthetic construct
  source 1..80: mol_type = other DNA
ttaagtagtcttgtctaaatgcacgcactaataaatggcaaatttgagtctcaaagacaggtttctcaatatcaaattga

SEQ ID NO: 39466 - DNA, 80 bp, synthetic construct
  source 1..80: mol_type = other DNA
ttggtttttcccacttttagaatttcaaataattgcaatcatgcagtgtgtaatctttgggtgtggcttgtttcatttag

SEQ ID NO: 39467 - DNA, 80 bp, synthetic construct
  source 1..80: mol_type = other DNA
gctatgaaaatttgtatacaagtgtttgtgtggatgcatgttttcacttaatttgggtaaataccttttatttgtacctc

SEQ ID NO: 39468 - DNA, 80 bp, synthetic construct; identical to SEQ ID NO: 10736
  source 1..80: mol_type = other DNA

SEQ ID NO: 39469 - DNA, 80 bp, synthetic construct
  source 1..80: mol_type = other DNA
tctttcaaagagaaaaattttaactttaataaaatacagtgtgtcatttccacagaaaaagcctggtggcattttgattg

SEQ ID NO: 39470 - DNA, 80 bp, synthetic construct
  source 1..80: mol_type = other DNA
gcatttgaggttttcattgtatagctattgtccatattttgttaaagtcacctctatgtatttcatgtttttagatacca

SEQ ID NO: 39471 - DNA, 80 bp, synthetic construct
  source 1..80: mol_type = other DNA
cattaggtatttctcctaatgctatccctcccgcatcccccccaccgcccccacaggccctggtgtatgatgtttccccc

SEQ ID NO: 39472 - DNA, 80 bp, synthetic construct; identical to SEQ ID NO: 10737
  source 1..80: mol_type = other DNA

SEQ ID NO: 39473 - DNA, 80 bp, synthetic construct
  source 1..80: mol_type = other DNA
tctgagtgtgtattgtagagaaaaaagttgagggttgcttccttagaaatactttgctgtaattaaatcatgttatgcca

SEQ ID NO: 39474 - DNA, 80 bp, synthetic construct
  source 1..80: mol_type = other DNA
atttcctggattttgataactgattgaattctgctagtccccacaggttgtaggatcactggtcaaattcctctccaata

SEQ ID NO: 39475 - DNA, 80 bp, synthetic construct
  source 1..80: mol_type = other DNA
ctggatttagtgttgggtcagagagtgacagttgaaggggatatgaactttatctgtgatactttatgtgctaaaaattc

SEQ ID NO: 39476 - DNA, 80 bp, synthetic construct
  source 1..80: mol_type = other DNA
agcagctaacatgtattgaatgattatgcactaggcatcgaggataatgtttacgtatttttcacatggagttttcacaa

SEQ ID NO: 39477 - DNA, 80 bp, synthetic construct; identical to SEQ ID NO: 10738
  source 1..80: mol_type = other DNA

SEQ ID NO: 39478 - DNA, 80 bp, synthetic construct
  source 1..80: mol_type = other DNA
aagttttctgagtttggtagtgaccttctgagtatagtttgaatggtcttcaaaggtaatttttaacacttttgcagggc

SEQ ID NO: 39479 - DNA, 80 bp, synthetic construct
  source 1..80: mol_type = other DNA
tcccaaattagactacctaacaagctatatctcaaatttggcctctagcatactgaagaattggggaagaggtttcaggt

SEQ ID NO: 39480 - DNA, 80 bp, synthetic construct
  source 1..80: mol_type = other DNA
cattaattgctactttgggatttaccctcccagtggcccaagtcaaggaaagcaagtcacattcttttgtttccaaaaag

SEQ ID NO: 39481 - DNA, 80 bp, synthetic construct; identical to SEQ ID NO: 10739
  source 1..80: mol_type = other DNA

SEQ ID NO: 39482 - DNA, 80 bp, synthetic construct
  source 1..80: mol_type = other DNA
aaagagattattttctccctccgttatacctgatttccaaaactagagaggatcacttattcctagtccatgaaagcaac

SEQ ID NO: 39483 - DNA, 80 bp, synthetic construct
  source 1..80: mol_type = other DNA
ccttggcctcccaaagtgtcaggattacaggtgtgagccacggcacccgacccaggtatttttgatacaggcatacaatg

SEQ ID NO: 39484 - DNA, 80 bp, synthetic construct
  source 1..80: mol_type = other DNA
ccagaaaaattcctaccttttccttgcttgcatctggtaagtttttgtttgtttgcttcttatctcatatctcattctaa

SEQ ID NO: 39485 - DNA, 80 bp, synthetic construct; identical to SEQ ID NO: 10740
  source 1..80: mol_type = other DNA

SEQ ID NO: 39486 - DNA, 80 bp, synthetic construct
  source 1..80: mol_type = other DNA
actggctaatgattatttacattaccaagtctgttaaaaggtctgaggtcaatcttttaatcttgggaccaaactgaatg

SEQ ID NO: 39487 - DNA, 80 bp, synthetic construct
  source 1..80: mol_type = other DNA
gtataagaaaaataactgactgtggaaggaatgaaatagagggcatgtggcaaagctggaagaggcaaagaattcagaga

SEQ ID NO: 39488 - DNA, 80 bp, synthetic construct
  source 1..80: mol_type = other DNA
aagtaacatgagattcactgggcacaatgtattaaatgatgaacagccacttaatgattcattaaatattcagaactctc

SEQ ID NO: 39489 - DNA, 80 bp, synthetic construct; identical to SEQ ID NO: 10741
  source 1..80: mol_type = other DNA

SEQ ID NO: 39490 - DNA, 80 bp, synthetic construct
  source 1..80: mol_type = other DNA
tccccagatttttagcttagttcgtatcatgaatacccatatattgatgagcaagtgtctgtgtcttctctacttgtatt

SEQ ID NO: 39491 - DNA, 80 bp, synthetic construct
  source 1..80: mol_type = other DNA
gtgattgcaatgattacgttttccacaatcacatttaagaaaataacctgaaaatgctgaaaagaaaactaaagttcctt

SEQ ID NO: 39492 - DNA, 80 bp, synthetic construct
  source 1..80: mol_type = other DNA
aattaaaaaattattttgtatttttgtgactttttattatggtaaaatttcaaacttagagaagagttgcaaaaaagtag

SEQ ID NO: 39493 - DNA, 80 bp, synthetic construct
  source 1..80: mol_type = other DNA
ctagttgagagtaagttggagatgacacgttcctttatgccaaatactttattcagtgttttttgtctaaggaaaaggat

SEQ ID NO: 39494 - DNA, 80 bp, synthetic construct; identical to SEQ ID NO: 10742
  source 1..80: mol_type = other DNA

SEQ ID NO: 39495 - DNA, 80 bp, synthetic construct
  source 1..80: mol_type = other DNA
agagcatcatcacagcaggctcatgatgttggtttgtgcaaatacagttgatcttaagatcaataaaatcactggttatg

SEQ ID NO: 39496 - DNA, 80 bp, synthetic construct
  source 1..80: mol_type = other DNA
tcttaacaccgtcaccccttctatatttgttaattagggatctactgtaaggaatagctttatcttcaccattcatttat

SEQ ID NO: 39497 - DNA, 80 bp, synthetic construct
  source 1..80: mol_type = other DNA
cctacaattaaatgatggcaagcccttcaaactggcttttattttttattcatgtgtgctgatatttttggatcatttgt

SEQ ID NO: 39498 - DNA, 80 bp, synthetic construct
  source 1..80: mol_type = other DNA
cctcatctggaagtagttatctttgtggttgtcttgatcttctacttgatgacactgataggaaacctgttcatcatcat

SEQ ID NO: 39499 - DNA, 80 bp, synthetic construct; identical to SEQ ID NO: 10743
  source 1..80: mol_type = other DNA

SEQ ID NO: 39500 - DNA, 80 bp, synthetic construct
  source 1..80: mol_type = other DNA
gttccagcacttctgcgattatcgtgtgttgatacccatgtcaatgagctgaccctcatgatcacaagctccatatttgt

SEQ ID NO: 39501 - DNA, 80 bp, synthetic construct
  source 1..80: mol_type = other DNA
cagccaccatcaggaaattctcaagatcaaggcaagttcattgccctcttttatactgttgtcacacctagtcttaaccc

SEQ ID NO: 39502 - DNA, 80 bp, synthetic construct
  source 1..80: mol_type = other DNA
actctgttagcacttgctgagcatgtactctaacaaggtcgtggagttcctggtaacaggtaggaataaaacacagtcag

SEQ ID NO: 39503 - DNA, 80 bp, synthetic construct; identical to SEQ ID NO: 10744
  source 1..80: mol_type = other DNA

SEQ ID NO: 39504 - DNA, 80 bp, synthetic construct
  source 1..80: mol_type = other DNA
atgaattgtagtaagagaggctttgaaacagtatagcagaagtcagcatctgagatccctcttttttgcaaggcagtgag

SEQ ID NO: 39505 - DNA, 80 bp, synthetic construct
  source 1..80: mol_type = other DNA
aaatgacttgaagccaatgggtgtatgaaagaattatgtgaaaatatattggaaaaattttatgatagaaactgtcatat

SEQ ID NO: 39506 - DNA, 80 bp, synthetic construct
  source 1..80: mol_type = other DNA
gaaataattgcgctatacctagagcaatttaaactgacagtcatagtcaaatgaagcggaaaaatggctaaaggagaatt

SEQ ID NO: 39507 - DNA, 80 bp, synthetic construct; identical to SEQ ID NO: 10745
  source 1..80: mol_type = other DNA

SEQ ID NO: 39508 - DNA, 80 bp, synthetic construct
  source 1..80: mol_type = other DNA
gccctttgaactgttttctactatggaaatcttacgatttggagcacttacggtagcatcctggtttctcacctactcaa

SEQ ID NO: 39509 - DNA, 80 bp, synthetic construct
  source 1..80: mol_type = other DNA
atatgcataattatgcaattattactcaagctaattaacagatcattaactcacatacttacctgttttgtggtgagaac

SEQ ID NO: 39510 - DNA, 80 bp, synthetic construct
  source 1..80: mol_type = other DNA
taacccctgacaagcatctttctgctactctgtgcttctatgattcattttatgtcgatttcacatatgagatcatgcag

SEQ ID NO: 39511 - DNA, 80 bp, synthetic construct; identical to SEQ ID NO: 10746
  source 1..80: mol_type = other DNA

SEQ ID NO: 39512 - DNA, 80 bp, synthetic construct
  source 1..80: mol_type = other DNA
cattgtgcaggttagttacatatgtatacatgtgccatgctggtgcgctgcacccactaactcgtcatctagcattaggt

SEQ ID NO: 39513 - DNA, 80 bp, synthetic construct
  source 1..80: mol_type = other DNA
aatgatgatttccaatttcatccatgtccctacaaaggacatgaactcatcattttttatggctgcatagtattccatgg

SEQ ID NO: 39514 - DNA, 80 bp, synthetic construct
  source 1..80: mol_type = other DNA
gatggctgggtcaaatggtatttctagttctagatccctgaggaatcgccacactgacttccacaatggttgaactagtt

SEQ ID NO: 39515 - DNA, 80 bp, synthetic construct; identical to SEQ ID NO: 10747
  source 1..80: mol_type = other DNA

SEQ ID NO: 39516 - DNA, 80 bp, synthetic construct
  source 1..80: mol_type = other DNA
gacctcggatgatctgcccgcctcggcttccaaagtgctgggattacagttgtgagccaccctgtttggcaatattttta

SEQ ID NO: 39517 - DNA, 80 bp, synthetic construct
  source 1..80: mol_type = other DNA
tttttcataatagacattctaactgatgtaaggtatgaggtgatatctactggtgtgggcctggactttaggtccactgg

SEQ ID NO: 39518 - DNA, 80 bp, synthetic construct
  source 1..80: mol_type = other DNA
gggctacagagtctgacctggggggccaactggcactggaaagtcctattttgccattttattgataccacttctcacta

SEQ ID NO: 39519 - DNA, 80 bp, synthetic construct; identical to SEQ ID NO: 10748
  source 1..80: mol_type = other DNA

SEQ ID NO: 39520 - DNA, 80 bp, synthetic construct
  source 1..80: mol_type = other DNA
atacatttttagctctgacaacccattcctatgtcaacaacactgaaggcaaaatagaagccctgagatgctccccttgt

SEQ ID NO: 39521 - DNA, 80 bp, synthetic construct
  source 1..80: mol_type = other DNA
taaatttctcctccccattcagacagatgtctcccagtctttgtccactgtatcttatacttgttgctgtgcagcatatt

SEQ ID NO: 39522 - DNA, 80 bp, synthetic construct
  source 1..80: mol_type = other DNA
tttacatatgtgaggctggaaaggtgattagtgatcatatattatgaaaacactacatgatttcaaacataagtttcaaa

SEQ ID NO: 39523 - DNA, 80 bp, synthetic construct; identical to SEQ ID NO: 10749
  source 1..80: mol_type = other DNA

SEQ ID NO: 39524 - DNA, 80 bp, synthetic construct
  source 1..80: mol_type = other DNA
taagggggatttattgcttataaaaccaaaaagttcagcagtagtgtgggcttcaggtatagcttgatcagtgctctgga

SEQ ID NO: 39525 - DNA, 80 bp, synthetic construct
  source 1..80: mol_type = other DNA
acaaaaatggctctttatacagagcttcatactgacgcataagttgtctgcacattcctggcaacatgtttgggacaagg

SEQ ID NO: 39526 - DNA, 80 bp, synthetic construct
  source 1..80: mol_type = other DNA
tactaaaggaatttacagacatatatgttgtcttgggtggccacaacatagttagattttgcactgcagtcctccagatc

SEQ ID NO: 39527 - DNA, 80 bp, synthetic construct; identical to SEQ ID NO: 10750
  source 1..80: mol_type = other DNA

SEQ ID NO: 39528 - DNA, 80 bp, synthetic construct
  source 1..80: mol_type = other DNA
cagagctagtaagtgatgaagcttggattcaaatgtgggctttctaacttcatagtttgttcttaatcactaggcaattg

SEQ ID NO: 39529 - DNA, 80 bp, synthetic construct
  source 1..80: mol_type = other DNA
acacctaatatttgaaccacactgaatttatcttactctcttactgtcctgaggatgttcacaagaacttttccttcaag

SEQ ID NO: 39530 - DNA, 80 bp, synthetic construct
  source 1..80: mol_type = other DNA
gacaatgtcattctcctagaccactgggcagtatctgccatatgtaggccagtcgttattttttattaccattattacta

SEQ ID NO: 39531 - DNA, 80 bp, synthetic construct; identical to SEQ ID NO: 10751
  source 1..80: mol_type = other DNA

SEQ ID NO: 39532 - DNA, 80 bp, synthetic construct
  source 1..80: mol_type = other DNA
acagaagaaatgcagccctgtagacccaatttagtattcctatctccagatacatgatatttttgttattttaaacacca

SEQ ID NO: 39533 - DNA, 80 bp, synthetic construct
  source 1..80: mol_type = other DNA
atgcattattatttcattctgtcattattttgatgctgaaatggtcactgttttggctagagaggaccccttccagttgg

SEQ ID NO: 39534 - DNA, 80 bp, synthetic construct
  source 1..80: mol_type = other DNA
aaaaaattagctgggcgtgttggcgggcgcctgtagtcccagctactcgggaggctaaggcaggagaatggtgtgaaccc

SEQ ID NO: 39535 - DNA, 80 bp, synthetic construct; identical to SEQ ID NO: 10752
  source 1..80: mol_type = other DNA

SEQ ID NO: 39536 - DNA, 80 bp, synthetic construct
  source 1..80: mol_type = other DNA
tgactggctatgggtttggggagtcatttggcaggagtgtaaatccttgaaatttgaaaatctttcaaattatcttgatt

SEQ ID NO: 39537 - DNA, 80 bp, synthetic construct
  source 1..80: mol_type = other DNA
tggctcatggcccattcctctatatttaaagtcagcagcggagtatcttccctttgacttctggcctccctcttatatgg

SEQ ID NO: 39538 - DNA, 80 bp, synthetic construct
  source 1..80: mol_type = other DNA
agcctaccatgatcccttgtgtcccagggataaagcccacgatgatcaagtaggctttatccctgataggaaaggttggt

SEQ ID NO: 39539 - DNA, 80 bp, synthetic construct
  source 1..80: mol_type = other DNA
caaaacaataagagcaatctgtaaaaaacccacagccaacatcatactgaatgggcaaaagctggaagcattccccttga

SEQ ID NO: 39540 - DNA, 80 bp, synthetic construct; identical to SEQ ID NO: 10753
  source 1..80: mol_type = other DNA

SEQ ID NO: 39541 - DNA, 80 bp, synthetic construct
  source 1..80: mol_type = other DNA
tgctaaaagaaatcagaagtgacacaaggaaatggaaaaaacatcccatgctgatggatactaagaatcagtatcattac

SEQ ID NO: 39542 - DNA, 80 bp, synthetic construct
  source 1..80: mol_type = other DNA
ttagaggcatcaccttactcaaatgataccagagggctacagtatccagaacagcatgataccggtacaaaaacagatat

SEQ ID NO: 39543 - DNA, 80 bp, synthetic construct
  source 1..80: mol_type = other DNA
tggatgccaaacttgcaccacatacaaaaatcaattcaagatgaattaaagacttaaatgtaaaaatgaaaactgttaat

SEQ ID NO: 39544 - DNA, 80 bp, synthetic construct; identical to SEQ ID NO: 10754
  source 1..80: mol_type = other DNA

SEQ ID NO: 39545 - DNA, 80 bp, synthetic construct
  source 1..80: mol_type = other DNA
tgagataccatctcgtaccaggtggaatggctattatcaaaaagtcaaattattaataacagatacatcaaggttatgga

SEQ ID NO: 39546 - DNA, 80 bp, synthetic construct
  source 1..80: mol_type = other DNA
ataaagacatatgcacgagtatgttcattgcagcactgttcacaacagcaaatacatgaaatcaacctaaatgcccatca

SEQ ID NO: 39547 - DNA, 80 bp, synthetic construct
  source 1..80: mol_type = other DNA
cttataagtgggagctaaacataagaacacatggatactagaaggtgaaccacatgcactggggtctacttgacggtgga

SEQ ID NO: 39548 - DNA, 80 bp, synthetic construct; identical to SEQ ID NO: 10755
  source 1..80: mol_type = other DNA

SEQ ID NO: 39549 - DNA, 80 bp, synthetic construct
  source 1..80: mol_type = other DNA
ctttactgccacgttcctagtaattcctgaattgcacatgtatgaaatgacattaattctctcatactttagggttgctt

SEQ ID NO: 39550 - DNA, 80 bp, synthetic construct
  source 1..80: mol_type = other DNA
gtgcagatttaggttccaagcagaacactgctagtgttctctgcagtttgttgtagaatcatagtgtcttggcaaccaaa

SEQ ID NO: 39551 - DNA, 80 bp, synthetic construct
  source 1..80: mol_type = other DNA
ttctatggcttaacatgggggatggtggtaagtgcggctctatttggattttgtaattataaaagcccactttatgtaga

SEQ ID NO: 39552 - DNA, 80 bp, synthetic construct
  source 1..80: mol_type = other DNA
gtcaggagtttgagaccagcctggccaacacggtgaaaccccatctttactaaaaatacaaaaaattagccgggcttggg

SEQ ID NO: 39553 - DNA, 80 bp, synthetic construct; identical to SEQ ID NO: 10756
  source 1..80: mol_type = other DNA

SEQ ID NO: 39554 - DNA, 80 bp, synthetic construct
  source 1..80: mol_type = other DNA
agtgtatccatcatccaaataggatacattgtcctcaataggtagtctttcatccctcaaccctttcccaacttcccacc

SEQ ID NO: 39555 - DNA, 80 bp, synthetic construct
  source 1..80: mol_type = other DNA
tgacttcagtctttttatggggaagtagtatcacattttagaaatccaatagtccattgatggacactcaggttgattct

SEQ ID NO: 39556 - DNA, 80 bp, synthetic construct
  source 1..80: mol_type = other DNA
agggcttgtactaatttacattcccaccaacagtgtatgtattctttttttctctatacccttggcaaaatttgtttttt

SEQ ID NO: 39557 - DNA, 80 bp, synthetic construct; identical to SEQ ID NO: 10757
  source 1..80: mol_type = other DNA

SEQ ID NO: 39558 - DNA, 80 bp, synthetic construct
  source 1..80: mol_type = other DNA
agattgcatcactgcactccagcctgggtgacagagcgagactccgtctaaaaaaacaaaacaaaacaaaacaaaacaaa

SEQ ID NO: 39559 - DNA, 80 bp, synthetic construct
  source 1..80: mol_type = other DNA
agggtttggatgagcatttcaatcttgaggaaaacctaacctgtttgcaaaataagcctaaggattggatgacaagttta

SEQ ID NO: 39560 - DNA, 80 bp, synthetic construct
  source 1..80: mol_type = other DNA
atgttgggacttagaactagatcaaatcagaatgagtatcgatcaatgttcagtcaaagggggttggaggaaatttgttt

SEQ ID NO: 39561 - DNA, 80 bp, synthetic construct
  source 1..80: mol_type = other DNA
tgcaccaccacttctggctaacttttgtatttttagtagagacagggtttcaccatgttgccaaggctggtctcgaattc

SEQ ID NO: 39562 - DNA, 80 bp, synthetic construct; identical to SEQ ID NO: 10758
  source 1..80: mol_type = other DNA

SEQ ID NO: 39563 - DNA, 80 bp, synthetic construct
  source 1..80: mol_type = other DNA
cctgttcttatcaaagacatgatttcccatatttaaaaaagcttgtaataattgatttacaattaagttgactgaagaaa

SEQ ID NO: 39564 - DNA, 80 bp, synthetic construct
  source 1..80: mol_type = other DNA
tcctttgtcactaaaacaaaagcactgaaaatttatgctagcaagaatgcaaagtgagggaaactctctttgattgctgg

SEQ ID NO: 39565 - DNA, 80 bp, synthetic construct
  source 1..80: mol_type = other DNA
tgttattcataattactcaaaactgtaagcaacccatgcccttcaataggggaaaaataatcttgggtatttccatacaa

SEQ ID NO: 39566 - DNA, 80 bp, synthetic construct; identical to SEQ ID NO: 10759
  source 1..80: mol_type = other DNA

SEQ ID NO: 39567 - DNA, 80 bp, synthetic construct
  source 1..80: mol_type = other DNA
gatgcaggaagatcctagaatggtatgcagacagtgacaaatcaatctcacgttatataaatgtgtaagctaacgaccct

SEQ ID NO: 39568 - DNA, 80 bp, synthetic construct
  source 1..80: mol_type = other DNA
tcacaagcatactagtgttgaacaaaaatgttaaaagatgaacagtggcatccaggtttctcactgttggtatgagaagt

SEQ ID NO: 39569 - DNA, 80 bp, synthetic construct
  source 1..80: mol_type = other DNA
acaaatatagaagcaatgacagatatgtgtgtattcagggcttactgtgtgaacacacattacctagccctttctgctga

SEQ ID NO: 39570 - DNA, 80 bp, synthetic construct; identical to SEQ ID NO: 10760
  source 1..80: mol_type = other DNA

SEQ ID NO: 39571 - DNA, 80 bp, synthetic construct
  source 1..80: mol_type = other DNA
ataaatggagaagaagagagaaatcttccttactgatctattaatagtctccacttttgggggtggagctcgtgatctcc

SEQ ID NO: 39572 - DNA, 80 bp, synthetic construct
  source 1..80: mol_type = other DNA
agcaccatcagtaatgccatgtagatattatgtaacccctgctctgatgggataaaaagggcactttacctctgtggtca

SEQ ID NO: 39573 - DNA, 80 bp, synthetic construct
  source 1..80: mol_type = other DNA
gcccgaaggagctgggaacaggcaaaagcccccaccccttatgagttggcaggcaggtgccttgtgctccccaggctcag

SEQ ID NO: 39574 - DNA, 80 bp, synthetic construct; identical to SEQ ID NO: 10761
  source 1..80: mol_type = other DNA

SEQ ID NO: 39575 - DNA, 80 bp, synthetic construct
  source 1..80: mol_type = other DNA
cctgctgcctgagccccgctctggactttgggcaccagtaagcaaggaagggaggctggggaggtgctgaaggcagcttg

SEQ ID NO: 39576 - DNA, 80 bp, synthetic construct
  source 1..80: mol_type = other DNA
agactggagtgggaatttatgatgctttttctgggcctgcacatggttgcccaagggccaatcagcacctacttcctctc

SEQ ID NO: 39577 - DNA, 80 bp, synthetic construct
  source 1..80: mol_type = other DNA
tcctctctgctgagagttgaacactggtcaggacaccctggctgtggagaggagctaccctctatgtgtctcctctgagc

SEQ ID NO: 39578 - DNA, 80 bp, synthetic construct; identical to SEQ ID NO: 10762
  source 1..80: mol_type = other DNA

SEQ ID NO: 39579 - DNA, 80 bp, synthetic construct
  source 1..80: mol_type = other DNA
ctgccacagcaagcatgcctggctgtgtgcagtaggtggaccccacactttctcgctcatacacgcctcgctgctctgct

SEQ ID NO: 39580 - DNA, 80 bp, synthetic construct
  source 1..80: mol_type = other DNA
atgagaaaacatcggacaaaccatgattgaagtgcattttataacatacctgagcagtactcaaaattatcaatatcaag

SEQ ID NO: 39581 - DNA, 80 bp, synthetic construct
  source 1..80: mol_type = other DNA
tcctaattttgaaaaataaaccagagaaatgtaacattaagggaaagtgaaactgggtaaggggtatttgggaattctcc

SEQ ID NO: 39582 - DNA, 80 bp, synthetic construct; identical to SEQ ID NO: 10763
  source 1..80: mol_type = other DNA

SEQ ID NO: 39583 - DNA, 80 bp, synthetic construct
  source 1..80: mol_type = other DNA
accgcttcctcaaccccttcacacacagacacttacagatcatgtaaatggaaactcttcaggggatgagggagaatgca

SEQ ID NO: 39584 - DNA, 80 bp, synthetic construct
  source 1..80: mol_type = other DNA
tgggatcaagtggtacttcagttttccccttagccaaaatacatcccagaactttctaaatcaactagtgcaatgaacta

SEQ ID NO: 39585 - DNA, 80 bp, synthetic construct
  source 1..80: mol_type = other DNA
agaggagctggatagggtagggtgaagaggggaatgaggagagtatgatcaataggtacaaagttagagttagcatgaat

SEQ ID NO: 39586 - DNA, 80 bp, synthetic construct; identical to SEQ ID NO: 10764
  source 1..80: mol_type = other DNA

SEQ ID NO: 39587 - DNA, 80 bp, synthetic construct
  source 1..80: mol_type = other DNA
caaaacaaaagcgatagaacaaaagtttatgccattttcaccaatagaaccattttggaataggatcataaaaaatcagg

SEQ ID NO: 39588 - DNA, 80 bp, synthetic construct
  source 1..80: mol_type = other DNA
agaactattcacaggagtttcacagacaatagaccatgtgtcagtcctttattataaatattttaaaaggaatgcatctc

SEQ ID NO: 39589 - DNA, 80 bp, synthetic construct
  source 1..80: mol_type = other DNA
aaatacagtcttaattataatatgatataatgttcatactaagaattgtgctcatgcaaattgaacgtattaatcagaaa

SEQ ID NO: 39590 - DNA, 80 bp, synthetic construct; identical to SEQ ID NO: 10765
  source 1..80: mol_type = other DNA

SEQ ID NO: 39591 - DNA, 80 bp, synthetic construct
  source 1..80: mol_type = other DNA
ctctgcaaaaacatttgaatcctctctattgcccactgagccctgcctcctcactatcctaatgcagacagcatatcaca

SEQ ID NO: 39592 - DNA, 80 bp, synthetic construct
  source 1..80: mol_type = other DNA
tcttgttaaaatgtatattatatatcatactaagtatggtatgcataaaccctttatcttaatataacatcatgttaaat

SEQ ID NO: 39593 - DNA, 80 bp, synthetic construct
  source 1..80: mol_type = other DNA
aggctggagtgcagtggcacaatctccactcactttaacctgtgcctcccaggttgaaaccattcttgtgccttagcctc

SEQ ID NO: 39594 - DNA, 80 bp, synthetic construct; identical to SEQ ID NO: 10766
  source 1..80: mol_type = other DNA

SEQ ID NO: 39595 - DNA, 80 bp, synthetic construct
  source 1..80: mol_type = other DNA
ccaagttaacctcctatgttaatctctcacacttcccccatctttttcatttttacttctcttatcctactagagagcct

SEQ ID NO: 39596 - DNA, 80 bp, synthetic construct
  source 1..80: mol_type = other DNA
cattctttaatatcagccttggttctggttcctggttctcattcaacatagatcctcctttcagtctcccatattgcccc

SEQ ID NO: 39597 - DNA, 80 bp, synthetic construct
  source 1..80: mol_type = other DNA
caagaattagtgaaccacattttcattatctatcaaatgtggctaatacataccttaaagggttattgaaagattaaata

SEQ ID NO: 39598 - DNA, 80 bp, synthetic construct; identical to SEQ ID NO: 10767
  source 1..80: mol_type = other DNA

SEQ ID NO: 39599 - DNA, 80 bp, synthetic construct
  source 1..80: mol_type = other DNA
cctagtgttatccctccccctgccccccaacccatgacaggcacccgtgtgtgatgttcctcgccctgtgtccaagtgtt

SEQ ID NO: 39600 - DNA, 80 bp, synthetic construct
  source 1..80: mol_type = other DNA
tcttgccttgcagttattatgctatgcagatcttaggacatctctaatatggagaaagccactgttaaaccttcttgagt

SEQ ID NO: 39601 - DNA, 80 bp, synthetic construct
  source 1..80: mol_type = other DNA
ctttacacaaaaggtagagcacgctttctctttcaagtataatgcgtcccttctcttctacagaatttttcaaaagttga

SEQ ID NO: 39602 - DNA, 80 bp, synthetic construct; identical to SEQ ID NO: 10768
  source 1..80: mol_type = other DNA

SEQ ID NO: 39603 - DNA, 80 bp, synthetic construct
  source 1..80: mol_type = other DNA
aagctattgtctaacaccacagaattaggtcatgtgtttgtgtgtgcatgtgtataaaatttgaaaacatttttctggca

SEQ ID NO: 39604 - DNA, 80 bp, synthetic construct
  source 1..80: mol_type = other DNA
tgtatctggtttgcagttgattcttgtttgaactaacatgaggttttccttccaattattggcttagatcttgatcatac

SEQ ID NO: 39605 - DNA, 80 bp, synthetic construct
  source 1..80: mol_type = other DNA
acaaagttttaagttttggggtgtgagtcctagaactaagttttagcacttccaacttttaatgatacaggttttgtaca

SEQ ID NO: 39606 - DNA, 80 bp, synthetic construct; identical to SEQ ID NO: 10769
  source 1..80: mol_type = other DNA

SEQ ID NO: 39607 - DNA, 80 bp, synthetic construct
  source 1..80: mol_type = other DNA
tacataaattggggttgataagcttatgagactcatgattattccaaagtataatgtgcttcacattgaatgcccagtgt

SEQ ID NO: 39608 - DNA, 80 bp, synthetic construct
  source 1..80: mol_type = other DNA
cagttactatctctgtatgtaccaaccagtatagaactattttaatatatttccataatataatgtgcctactagccaag

SEQ ID NO: 39609 - DNA, 80 bp, synthetic construct
  source 1..80: mol_type = other DNA
tcacttaaagctgaaaatgctcctcaccaagttgcgtaatgccccctttacattcttattccgcagggtgtagataaaag

SEQ ID NO: 39610 - DNA, 80 bp, synthetic construct; identical to SEQ ID NO: 10770
  source 1..80: mol_type = other DNA

SEQ ID NO: 39611 - DNA, 80 bp, synthetic construct
  source 1..80: mol_type = other DNA
gcaattgtaatgtggcagtggcctctgagacagcatagattattccaattagccacacggtggaaactaaggatacagac

SEQ ID NO: 39612 - DNA, 80 bp, synthetic construct
  source 1..80: mol_type = other DNA
cccaggttaaacagcatctgagggacaatgcttgtggtataacacatgtccaaaaaggagaggttggtgaggaagaaata

SEQ ID NO: 39613 - DNA, 80 bp, synthetic construct
  source 1..80: mol_type = other DNA
tcattagttagtggcattatcttcaatttgtttcacctgtagtagggatatgccaaagaaggtagagctatgggtatcga

SEQ ID NO: 39614 - DNA, 80 bp, synthetic construct; identical to SEQ ID NO: 10771
  source 1..80: mol_type = other DNA

SEQ ID NO: 39615 - DNA, 80 bp, synthetic construct
  source 1..80: mol_type = other DNA
attactgaaatgctaagaagaataaacatattgaggtagcaatggtaggagaaaaaggaggagaaaacctggagtcataa

SEQ ID NO: 39616 - DNA, 80 bp, synthetic construct
  source 1..80: mol_type = other DNA
tgagagagttaacctacaatgacaaagtttccctatgctcaggaattcgattttgcattcttgggcttttattcattacg

SEQ ID NO: 39617 - DNA, 80 bp, synthetic construct
  source 1..80: mol_type = other DNA
ttttagttctgagtgactgcagtcaggacaaaagttgatgtcccaatttaggcttagagacagtcaaatctgaaattatt

SEQ ID NO: 39618 - DNA, 80 bp, synthetic construct; identical to SEQ ID NO: 10772
  source 1..80: mol_type = other DNA

SEQ ID NO: 39619 - DNA, 80 bp, synthetic construct
  source 1..80: mol_type = other DNA
agtgtgcaaaacaataataacactctttccaactagtccttagtgaaccctctgtgtcaaacacccccatatgctttcta

SEQ ID NO: 39620 - DNA, 80 bp, synthetic construct
  source 1..80: mol_type = other DNA
tagtgaaccctctgtgtcaaacacccccatatgctttctacaccattaaatcatttagtatccatccccaaacgctatga

SEQ ID NO: 39621 - DNA, 80 bp, synthetic construct
  source 1..80: mol_type = other DNA
aagcatctgtactcgagggttgttcctgaatgagtgtgacccccttcacattatttgaccttgatttaatcaagatgtta

SEQ ID NO: 39622 - DNA, 80 bp, synthetic construct
  source 1..80: mol_type = other DNA
aaatgtattgttaagtgattttgtcattgtgtgaatagagtgcacttacacaaacttagatggtatggcctagtacacac

SEQ ID NO: 39623 - DNA, 80 bp, synthetic construct; identical to SEQ ID NO: 10773
  source 1..80: mol_type = other DNA

SEQ ID NO: 39624 - DNA, 80 bp, synthetic construct
  source 1..80: mol_type = other DNA
aatttctttaactttttgattattgaataacacttaaacccatcatacagctgtacaaaagtatgttctttgtttatatc

SEQ ID NO: 39625 - DNA, 80 bp, synthetic construct
  source 1..80: mol_type = other DNA
acatgcatggagctgtcatctcctatgattataataacaatatcttcttctggtatacttgctgaaagacttgtgtgagg

SEQ ID NO: 39626 - DNA, 80 bp, synthetic construct
  source 1..80: mol_type = other DNA
caggtttgattataccgtcatcactgcaaacacttgagtaatgtgttacattataacattatcatggatacagtgtcact

SEQ ID NO: 39627 - DNA, 80 bp, synthetic construct; identical to SEQ ID NO: 10774
  source 1..80: mol_type = other DNA

SEQ ID NO: 39628 - DNA, 80 bp, synthetic construct
  source 1..80: mol_type = other DNA
attaactttattaagtatattttgtctgtgagtggtggtcacccagagctcctccatttctctggacatttccctgaaga

SEQ ID NO: 39629 - DNA, 80 bp, synthetic construct
  source 1..80: mol_type = other DNA
aaatgtttcatcactattttactacatggggatttacttaatcacaaatgtttaaagccactttattaaagtgccagacc

SEQ ID NO: 39630 - DNA, 80 bp, synthetic construct
  source 1..80: mol_type = other DNA
ctctataagtcaagtttcattccttaaaggaaaacacaccattccagtcaaagccttggtaaaataaccaatttctccaa

SEQ ID NO: 39631 - DNA, 80 bp, synthetic construct; identical to SEQ ID NO: 10775
  source 1..80: mol_type = other DNA

SEQ ID NO: 39632 - DNA, 80 bp, synthetic construct
  source 1..80: mol_type = other DNA
cctgcatttaagaacatccgttagagttgtatagctgactataaaccaccttttgaagaggattaaaacaagacaattgt

SEQ ID NO: 39633 - DNA, 80 bp, synthetic construct
  source 1..80: mol_type = other DNA
aaatgagaaactgaagtgagaaaaattatgtttcaagaagtatggtacacttgttattaaattctagtctcatgagttgt

SEQ ID NO: 39634 - DNA, 80 bp, synthetic construct
  source 1..80: mol_type = other DNA
ttctaatcatgggcacatattggaatcatctggcaaccctgtatcagcttggttttaacagttgctcagttcatgggaag

SEQ ID NO: 39635 - DNA, 80 bp, synthetic construct; identical to SEQ ID NO: 10776
  source 1..80: mol_type = other DNA

SEQ ID NO: 39636 - DNA, 80 bp, synthetic construct
  source 1..80: mol_type = other DNA
agctgggtaaaatgaggttgaaacctactgggctgcattcccagatggttaaggcattctaagtcacaggatgagacaga

SEQ ID NO: 39637 - DNA, 80 bp, synthetic construct
  source 1..80: mol_type = other DNA
ccctatatggtagagtacatttgtttacaaatgccatggtaacatcaggaagctaccctgtatgttctagaaaggggagg

SEQ ID NO: 39638 - DNA, 80 bp, synthetic construct
  source 1..80: mol_type = other DNA
gtaccagaccctattcctgttgatgtctcctgttttatctccacttccatcttcattctagtgtagcttatacttcattt

SEQ ID NO: 39639 - DNA, 80 bp, synthetic construct; identical to SEQ ID NO: 10777
  source 1..80: mol_type = other DNA

SEQ ID NO: 39640 - DNA, 80 bp, synthetic construct
  source 1..80: mol_type = other DNA
ggctccctgaaatgaaatgctctctgcctttcagatgtatattaggcagtggcagtatgatctacacatatttcaatttc

SEQ ID NO: 39641 - DNA, 80 bp, synthetic construct
  source 1..80: mol_type = other DNA
ttaggttttcaattgttacagggttccaaagagaagaaaacatgggttaggaagacaatagtagaaaatatcagaatgct

SEQ ID NO: 39642 - DNA, 80 bp, synthetic construct
  source 1..80: mol_type = other DNA
tatggaaatgctacttatgtacaattagtttcctactgaactgaggttggtaggaagtctcttctgttgtcagatgtgtt

SEQ ID NO: 39643 - DNA, 80 bp, synthetic construct; identical to SEQ ID NO: 10778
  source 1..80: mol_type = other DNA

SEQ ID NO: 39644 - DNA, 80 bp, synthetic construct
  source 1..80: mol_type = other DNA
acagataactttgagattttaaaaattacatacaaaatgcataaatacattatgttgaaaaacaaattcaagtgcatggg

SEQ ID NO: 39645 - DNA, 80 bp, synthetic construct
  source 1..80: mol_type = other DNA
ttccctttgatgacctactgtcatggtctgttgtccctctcctttctttaaaggtaaccgttagtgtcataagggtgtgc

SEQ ID NO: 39646 - DNA, 80 bp, synthetic construct
  source 1..80: mol_type = other DNA
tcaagagaattccatgatatttgacttctggttgtgttcagccaatgagtcaccagctgaggattagagtgaggcagcag

SEQ ID NO: 39647 - DNA, 80 bp, synthetic construct; identical to SEQ ID NO: 10779
  source 1..80: mol_type = other DNA

SEQ ID NO: 39648 - DNA, 80 bp, synthetic construct
  source 1..80: mol_type = other DNA
tgtttttaggtctaaaatgctctttctttgattttatcacgactggctcctttctgtgtttcaggttgatctcaaatgtc

SEQ ID NO: 39649 - DNA, 80 bp, synthetic construct
  source 1..80: mol_type = other DNA
ctagtatgcatagtttttgacaatagcaacttaaataatacaattaaatcatcttgaacatattgttacttgatttttac

SEQ ID NO: 39650 - DNA, 80 bp, synthetic construct
  source 1..80: mol_type = other DNA
aattatttgctattttcccttgtgatttcctctgagccattcattatttaggaatgtgttgtttcatcgccacttacttg

SEQ ID NO: 39651 - DNA, 80 bp, synthetic construct
  source 1..80: mol_type = other DNA
actaatctgtagaatgtttcatgtgccctgagtaatatatgtattctactactattgggtggagttttctgtagaggtca

SEQ ID NO: 39652 - DNA, 80 bp, synthetic construct; identical to SEQ ID NO: 10780
  source 1..80: mol_type = other DNA

SEQ ID NO: 39653 - DNA, 80 bp, synthetic construct
  source 1..80: mol_type = other DNA
gttgatattgtgtaatatcagtatagccatccattagcactctatcttgcttactctttgaatggaatacttttttcatc

SEQ ID NO: 39654 - DNA, 80 bp, synthetic construct
  source 1..80: mol_type = other DNA
aaggtgtagagaactcacatgtaaccccttttactccctcccccagagtttcttttattattaacaacttgcattcatgt

SEQ ID NO: 39655 - DNA, 80 bp, synthetic construct
  source 1..80: mol_type = other DNA
actgccttaaaaattccctgttctccttccattcatcatttcctcccctcctccccgggagcccctgacaaccactgatt

SEQ ID NO: 39656 - DNA, 80 bp, synthetic construct
  source 1..80: mol_type = other DNA
cattctatgaatgtaccacagtctgcttattcattcatttattaaaggactttttttttttttttgcttccaagctttgg

SEQ ID NO: 39657 - DNA, 80 bp, synthetic construct; identical to SEQ ID NO: 10781
  source 1..80: mol_type = other DNA

SEQ ID NO: 39658 - DNA, 80 bp, synthetic construct
  source 1..80: mol_type = other DNA
tccttctgcttgttaaaatctggtgttcaggtcttctgctgcattttttatttccatcactgtactttttcatctctaga

SEQ ID NO: 39659 - DNA, 80 bp, synthetic construct
  source 1..80: mol_type = other DNA
caagttcaacacctagatttgctgctattgattgcatttccccctccttttatgacccatacttcctgtgtctttcttca

SEQ ID NO: 39660 - DNA, 80 bp, synthetic construct
  source 1..80: mol_type = other DNA
ttttcctgatcctctctgtcctcccatcctccaccctccaccaggccacagtatgtattgtttccctctatgtgtccata

SEQ ID NO: 39661 - DNA, 80 bp, synthetic construct
  source 1..80: mol_type = other DNA
tgtatgtaccacattttctttatcgagtctatcattgatgggcatttaggttgattccatgtctttgctattgtgagtag

SEQ ID NO: 39662 - DNA, 80 bp, synthetic construct; identical to SEQ ID NO: 10782
  source 1..80: mol_type = other DNA

SEQ ID NO: 39663 - DNA, 80 bp, synthetic construct
  source 1..80: mol_type = other DNA
tgtttttctttcttataaatttggaaaactaaatattttaaatactagaaatggcaactgtggaaaccagattctccctg

SEQ ID NO: 39664 - DNA, 80 bp, synthetic construct
  source 1..80: mol_type = other DNA
gtgtagggccattaaaatctgtactcaggtagtctagtggccagcaaataattggacagaaatttctttcaatgcctggg

SEQ ID NO: 39665 - DNA, 80 bp, synthetic construct
  source 1..80: mol_type = other DNA
tgaaggtcagccagagacaagagtttagaatcttctcagttcttgcttgagcatttatagagtcctgaatctgaacacag

SEQ ID NO: 39666 - DNA, 80 bp, synthetic construct
  source 1..80: mol_type = other DNA
aaattattttcaacaaatacctgctgagaaaatgctttttgcattggtcgaggtctgagtcatggtcaaatacagacaga

SEQ ID NO: 39667 - DNA, 80 bp, synthetic construct; identical to SEQ ID NO: 10783
  source 1..80: mol_type = other DNA

SEQ ID NO: 39668 - DNA, 80 bp, synthetic construct
  source 1..80: mol_type = other DNA
atcagagtgattataatatctatcaccacaaacactttgtgttgtgaaaattacaatttttttctagctattttgaaata

SEQ ID NO: 39669 - DNA, 80 bp, synthetic construct
  source 1..80: mol_type = other DNA
ttcatctgtttttccttgcatccatttgcagactctgataagcaccattctacccttgaccttcataagatccacttttt

SEQ ID NO: 39670 - DNA, 80 bp, synthetic construct
  source 1..80: mol_type = other DNA
attttctttatccatccttctcttgctagacactggtgttgcattctttgtgtgtttctataggtgaagtgaggttcttt

SEQ ID NO: 39671 - DNA, 80 bp, synthetic construct
  source 1..80: mol_type = other DNA
catcagtaaattttttgttatgggggtttggtgtacagataattttgtcacccagggaattagcattatacccattaagt

SEQ ID NO: 39672 - DNA, 80 bp, synthetic construct; identical to SEQ ID NO: 10784
  source 1..80: mol_type = other DNA

SEQ ID NO: 39673 - DNA, 80 bp, synthetic construct
  source 1..80: mol_type = other DNA
accaaagtctcgttttttatagctgcatagtattctgtggtatatatgttttctgtatccagtccaccactgatggacaa

SEQ ID NO: 39674 - DNA, 80 bp, synthetic construct
  source 1..80: mol_type = other DNA
tccagacttctttctacagtggctgaactagttttcatttccaccagtggtatataaatgttcccttttctccaccacct

SEQ ID NO: 39675 - DNA, 80 bp, synthetic construct
  source 1..80: mol_type = other DNA
atacttgttagatgtgtatatcttcttttgagaagtgtctgttcatgccatttgctcgttttaaaaatagagttgtttgt

SEQ ID NO: 39676 - DNA, 80 bp, synthetic construct; identical to SEQ ID NO: 10785
  source 1..80: mol_type = other DNA

SEQ ID NO: 39677 - DNA, 80 bp, synthetic construct
  source 1..80: mol_type = other DNA
agtttctggcaggcagcaggcagcatataatttggtcttgtttttaattcatttaaccattgtatgtcttttaaatagaa

SEQ ID NO: 39678 - DNA, 80 bp, synthetic construct
  source 1..80: mol_type = other DNA
cccttccccttccccttccttccttccttccttctttccttttttccttgttattttcctctggtagtatgttttaattt

SEQ ID NO: 39679 - DNA, 80 bp, synthetic construct
  source 1..80: mol_type = other DNA
ctcaaaaataaaaacaaacttccaactaaaaacttatacacattaactccattcttcacccatattttgaattttgatgt

SEQ ID NO: 39680 - DNA, 80 bp, synthetic construct; identical to SEQ ID NO: 10786
  source 1..80: mol_type = other DNA

SEQ ID NO: 39681 - DNA, 80 bp, synthetic construct
  source 1..80: mol_type = other DNA
tggaatgttgttatcctcctctagatagaatttatttttgcttttgggaagtaattaaagtaggaaaacatccctaattt

SEQ ID NO: 39682 - DNA, 80 bp, synthetic construct
  source 1..80: mol_type = other DNA
gctcaaatgaagacctgtgctgaatatttatagccacttttttcaaaatactgtggcgaaaacctagaattactgtaagt

SEQ ID NO: 39683 - DNA, 80 bp, synthetic construct
  source 1..80: mol_type = other DNA
gtagatctatcactaagaattcaagaacatgcaaacttatctatgagggcataaattagagtagtagttgactaagtctg

SEQ ID NO: 39684 - DNA, 80 bp, synthetic construct; identical to SEQ ID NO: 10787
  source 1..80: mol_type = other DNA

SEQ ID NO: 39685 - DNA, 80 bp, synthetic construct
  source 1..80: mol_type = other DNA
ttattatactttaagttctaaggtacatgtgcacaatgtgcaggtttgttacataggtatacatgtgccatgttggtttg

SEQ ID NO: 39686 - DNA, 80 bp, synthetic construct
  source 1..80: mol_type = other DNA
tattgttcaattcccacctatgagtgagaacatgtggtctttggttttctatcctcgtgatagtttgctgggaatgatgg

SEQ ID NO: 39687 - DNA, 80 bp, synthetic construct
  source 1..80: mol_type = other DNA
tgtgtccatgtgtctttataatagcatgatttataatcctttgggtatatacccagtaatgggatcactgggtcaaatgg

SEQ ID NO: 39688 - DNA, 80 bp, synthetic construct
  source 1..80: mol_type = other DNA
atgagatggtatctcattgtggttttgatttgcatttctctgatgaccagtgatgatgagcattttttatgtgtctgttg

SEQ ID NO: 39689 - DNA, 80 bp, synthetic construct; identical to SEQ ID NO: 10788
  source 1..80: mol_type = other DNA

SEQ ID NO: 39690 - DNA, 80 bp, synthetic construct
  source 1..80: mol_type = other DNA
gtgtaaggaatggatccagttgcagctttctacatggtggctagccagttttcccagaaaatattataaacaactctatg

SEQ ID NO: 39691 - DNA, 80 bp, synthetic construct
  source 1..80: mol_type = other DNA
agatggattcacagccgaattctaccagaggtacaaggaggagctggtaccattccttctgaaactattccaatcaatag

SEQ ID NO: 39692 - DNA, 80 bp, synthetic construct
  source 1..80: mol_type = other DNA
ttttcttcattattagtcttgctagcagtccatcaattttgtggatcttttcaaaatccacctcctggattaactgattc

SEQ ID NO: 39693 - DNA, 80 bp, synthetic construct; identical to SEQ ID NO: 10789
  source 1..80: mol_type = other DNA

SEQ ID NO: 39694 - DNA, 80 bp, synthetic construct
  source 1..80: mol_type = other DNA
cttcttttttaatatcggcatttattactataaactttcctcctgctaagaacttcttttgttacatcccataagttgtg

SEQ ID NO: 39695 - DNA, 80 bp, synthetic construct
  source 1..80: mol_type = other DNA
tcatacttttgtggtcagaaaagatacttgatatgatttcagtcttcttaaaactgttgagtcttattttgttaccttat

SEQ ID NO: 39696 - DNA, 80 bp, synthetic construct
  source 1..80: mol_type = other DNA
taaagtattgaaatcctctgctattattgtattgcagtctatctcttttcaggtctactaatgctttctttatatgtata

SEQ ID NO: 39697 - DNA, 80 bp, synthetic construct; identical to SEQ ID NO: 10790
  source 1..80: mol_type = other DNA

SEQ ID NO: 39698 - DNA, 80 bp, synthetic construct
  source 1..80: mol_type = other DNA
taaggaaacacaaatcacacattgccacaacctctgcagtccaataatatcccccgttgatagtacaaattacaaataca

SEQ ID NO: 39699 - DNA, 80 bp, synthetic construct
  source 1..80: mol_type = other DNA
atacagttcccatagtaaagtgtctttgtgtgtgccattttaatttatatgcgggtgcatcatatatcagacttaagact

SEQ ID NO: 39700 - DNA, 80 bp, synthetic construct
  source 1..80: mol_type = other DNA
tatcaaagtaagtaataagaatttaaatattaactcaaaaaaagatgaagccttcaaccttcctacaatagtaacaagca

SEQ ID NO: 39701 - DNA, 80 bp, synthetic construct; identical to SEQ ID NO: 10791
  source 1..80: mol_type = other DNA

SEQ ID NO: 39702 - DNA, 80 bp, synthetic construct
  source 1..80: mol_type = other DNA
aatgctagttatctttactatccataaatacaaattaaactaaggagcttccgcacagcaaaagaaactataaatagaat

SEQ ID NO: 39703 - DNA, 80 bp, synthetic construct
  source 1..80: mol_type = other DNA
aaaggtgaccaataaacatatggaaaaaattgttcatcattactaatcatcagagaaacggaaatcaaaaccacaatgag

SEQ ID NO: 39704 - DNA, 80 bp, synthetic construct
  source 1..80: mol_type = other DNA
taaaaacagagctaccattggacccagcaattccattaccgcgtatttagtcaaaggaaaatatatcattataccaaaag

SEQ ID NO: 39705 - DNA, 80 bp, synthetic construct; identical to SEQ ID NO: 10792
  source 1..80: mol_type = other DNA

SEQ ID NO: 39706 - DNA, 80 bp, synthetic construct
  source 1..80: mol_type = other DNA
gtggggggccgggaagcatggtgaccgccccaactcgcagcggaggccgttagggtgtggagggcgcgggaaggtgggtc

SEQ ID NO: 39707 - DNA, 80 bp, synthetic construct
  source 1..80: mol_type = other DNA
ctaccagacctgtatgtgggaagagagaagtggtggaacaacaggccacatttggcgcattggagatgaaattcttggtt

SEQ ID NO: 39708 - DNA, 80 bp, synthetic construct
  source 1..80: mol_type = other DNA
cttggagaatctgacaattacgtttcttggggttgcttttctcgagcagtatcttagtggtgttctcgtatttcctgaat

SEQ ID NO: 39709 - DNA, 80 bp, synthetic construct; identical to SEQ ID NO: 10793
  source 1..80: mol_type = other DNA

SEQ ID NO: 39710 - DNA, 80 bp, synthetic construct
  source 1..80: mol_type = other DNA
ttgggttagaacatgctcctttagctcagaggagtttgttattacacaccttgtgaagcctacttctgtcattcatcaat

SEQ ID NO: 39711 - DNA, 80 bp, synthetic construct
  source 1..80: mol_type = other DNA
ggtttttgtgtgacggtcctttatgttgatgttgacgttgtttctgtttgttagttttccttataacagtcaggcccctc

SEQ ID NO: 39712 - DNA, 80 bp, synthetic construct
  source 1..80: mol_type = other DNA
gtgtgaggttctgtcaacccctgttgggagttgtctcccagtcaggaggcatgggggttagggacccacttgaggaggga

SEQ ID NO: 39713 - DNA, 80 bp, synthetic construct; identical to SEQ ID NO: 10794
  source 1..80: mol_type = other DNA

SEQ ID NO: 39714 - DNA, 80 bp, synthetic construct
  source 1..80: mol_type = other DNA
tgctggcagtgagaatttcaagccagtggttcttagcttgctaggttctgtgggagtgggacctgctgagcgagaccact

SEQ ID NO: 39715 - DNA, 80 bp, synthetic construct
  source 1..80: mol_type = other DNA
aggcacacaagggaatctcctgatctacagattgcaaaaaccatgggaaaagtgtagtaacaagctaggcagcactgtcc

SEQ ID NO: 39716 - DNA, 80 bp, synthetic construct
  source 1..80: mol_type = other DNA
tcacctgccatctggattggtcttgctgggagctgcaaaccagaactgctcctatttggccgtcttcggcttcatccttt

SEQ ID NO: 39717 - DNA, 80 bp, synthetic construct; identical to SEQ ID NO: 10795
  source 1..80: mol_type = other DNA

SEQ ID NO: 39718 - DNA, 80 bp, synthetic construct
  source 1..80: mol_type = other DNA
ggatatctacaaagtgttatttactccctctacttttaacatactttgtgcacttctagaaagactagatgtttcaaata

SEQ ID NO: 39719 - DNA, 80 bp, synthetic construct
  source 1..80: mol_type = other DNA
ctagtggatataggcatatgtgtcatttagaactgatgttatcatttcacttccaaaagtccttttcagaagatagcctt

SEQ ID NO: 39720 - DNA, 80 bp, synthetic construct
  source 1..80: mol_type = other DNA
acttcatccagtatacacacaatatatacagtatagcaaagttaaatgcaatgcatgtaacatataggtaatggattaag

SEQ ID NO: 39721 - DNA, 80 bp, synthetic construct
  source 1..80: mol_type = other DNA
aggtatatctcccaacgctatccctcccccctccccccaccccacaacagtccccagagtgtgatattccccttcctgtg

SEQ ID NO: 39722 - DNA, 80 bp, synthetic construct; identical to SEQ ID NO: 10796
  source 1..80: mol_type = other DNA

SEQ ID NO: 39723 - DNA, 80 bp, synthetic construct
  source 1..80: mol_type = other DNA
catgaccattttggccttgaagtagtccttcctttcttctctctgcctttatttcagtagacaagtataggcatgtgtca

SEQ ID NO: 39724 - DNA, 80 bp, synthetic construct
  source 1..80: mol_type = other DNA
actgccagcctctttaacatctagagactagatgttgcaaaattaggactcatttgttcattatatgcgctatatacaga

SEQ ID NO: 39725 - DNA, 80 bp, synthetic construct
  source 1..80: mol_type = other DNA
gtatagacagtactataccactcacaaagatggcttaataattcaatttccaaaacacagtatttcctatgaatttcagc

SEQ ID NO: 39726 - DNA, 80 bp, synthetic construct; identical to SEQ ID NO: 10797
  source 1..80: mol_type = other DNA

SEQ ID NO: 39727 - DNA, 80 bp, synthetic construct
  source 1..80: mol_type = other DNA
tagataagtaaaagaaaatgcacaaacataagatataatggttaatcttgcctcactgtaagcacactggtggcacagag

SEQ ID NO: 39728 - DNA, 80 bp, synthetic construct
  source 1..80: mol_type = other DNA
acatatatcaggcacctcagaacatctagaaacactagacatttcaaaaaagtgtagcattgtcaatgatctatacagta

SEQ ID NO: 39729 - DNA, 80 bp, synthetic construct
  source 1..80: mol_type = other DNA
ggcttccagaagtggtccaacaattccattgcgaaaagccatttccagaagacatctattttctatcatttctttttgaa

SEQ ID NO: 39730 - DNA, 80 bp, synthetic construct; identical to SEQ ID NO: 10798
  source 1..80: mol_type = other DNA

SEQ ID NO: 39731 - DNA, 80 bp, synthetic construct
  source 1..80: mol_type = other DNA
ctaggtcggtctcgaccagttgggacagagcggtccgatctgcccgcgccccggtggcaggcgacccaccttcccgcgcc

SEQ ID NO: 39732 - DNA, 80 bp, synthetic construct
  source 1..80: mol_type = other DNA
ctgggctgagagaggagctgccatcagtcacggaggtggggtagggaagagaggttcgcggcttcttcaggcctgggccc

SEQ ID NO: 39733 - DNA, 80 bp, synthetic construct
  source 1..80: mol_type = other DNA
cctatgtctctgctgttgtgaatagtgctgccatgaacatgagtgcgtgtgttcttttggtataatgatatattttcctt

SEQ ID NO: 39734 - DNA, 80 bp, synthetic construct
  source 1..80: mol_type = other DNA
gttgttttttgacttttaaatagcagccattctgactggtgttagatgatatctcattgtggttttgatttgcatttctc

SEQ ID NO: 39735 - DNA, 80 bp, synthetic construct; identical to SEQ ID NO: 10799
  source 1..80: mol_type = other DNA

SEQ ID NO: 39736 - DNA, 80 bp, synthetic construct
  source 1..80: mol_type = other DNA
gaaaatgcaacgtaccacaacttatgggatgtaacaaaagaagttcttagcaggaggaaagtttatagtaataaatgccg

SEQ ID NO: 39737 - DNA, 80 bp, synthetic construct
  source 1..80: mol_type = other DNA
aaaactaacagttcagtttttgaaaagataaaaacaattgacaaaactttagcagaccaactaagaaaaaaaagaagact

SEQ ID NO: 39738 - DNA, 80 bp, synthetic construct
  source 1..80: mol_type = other DNA
atagaaaatctgaacagactaatgagtaagggggttgaatcagtgataaaagtctcctaccaaagaaaagcccagaacct

SEQ ID NO: 39739 - DNA, 80 bp, synthetic construct; identical to SEQ ID NO: 10800
  source 1..80: mol_type = other DNA

SEQ ID NO: 39740 - DNA, 80 bp, synthetic construct
  source 1..80: mol_type = other DNA
aatgatgcaggggaaatcaaatacccacatacagaagaatgaaattgaacccttatctcacaccatgtgtaaaaagccca

SEQ ID NO: 39741 - DNA, 80 bp, synthetic construct
  source 1..80: mol_type = other DNA
ctgaaaccaaaagcttctctacaacaaagtaaataacagattgaagagacaacccatggactgggagaaaatatttacaa

SEQ ID NO: 39742 - DNA, 80 bp, synthetic construct
  source 1..80: mol_type = other DNA
cagggaaatgcaaattaaaacaaaacaaagagatatcacctcatacctgttagaatgactattatcagtaaactaaaagg

SEQ ID NO: 39743 - DNA, 80 bp, synthetic construct; identical to SEQ ID NO: 10801
  source 1..80: mol_type = other DNA

SEQ ID NO: 39744 - DNA, 80 bp, synthetic construct
  source 1..80: mol_type = other DNA
aaaaaaagggtagattttcctctaatttggttttaacgtctctctttgaagagtggctagaaactctagcctggctctga

SEQ ID NO: 39745 - DNA, 80 bp, synthetic construct
  source 1..80: mol_type = other DNA
tttgtctgactagtgtgtccagttcattcctaccaagattgccactctctaagggagccttgtccagaaaaaaaaattaa

SEQ ID NO: 39746 - DNA, 80 bp, synthetic construct
  source 1..80: mol_type = other DNA
ggtagcgagagagagtgagtgacagaccagaaagccaaagcccttattggagtacacagcattatccaagcagggagtaa

SEQ ID NO: 39747 - DNA, 80 bp, synthetic construct; identical to SEQ ID NO: 10802
  source 1..80: mol_type = other DNA

SEQ ID NO: 39748 - DNA, 80 bp, synthetic construct
  source 1..80: mol_type = other DNA
acagataaatatataaaagggatataatgtgatatatatgaaccacattatctatataaaatggaatactattcagcctt

SEQ ID NO: 39749 - DNA, 80 bp, synthetic construct
  source 1..80: mol_type = other DNA
tagctacctggggggcaggggatggagaaaggggggattttaaacaagtagatttaaatgttctcactataagaaaaata

SEQ ID NO: 39750 - DNA, 80 bp, synthetic construct
  source 1..80: mol_type = other DNA
caggaaaaatcttggaattgaatttaaaagacaactgggaaggcataaataatataggtcagtctcaaagagcccctcat

SEQ ID NO: 39751 - DNA, 80 bp, synthetic construct; identical to SEQ ID NO: 10803
  source 1..80: mol_type = other DNA

SEQ ID NO: 39752 - DNA, 80 bp, synthetic construct
  source 1..80: mol_type = other DNA
agagtatcccgttattctttttgtttccataaagattacatttgctctgggataaagggtccatcccgtgataccttgaa

SEQ ID NO: 39753 - DNA, 80 bp, synthetic construct
  source 1..80: mol_type = other DNA
atgtttttaggttgtatggcaaccagagagccccttcatcagtttatacctgatgaggttgtaggccaggtagagagtga

SEQ ID NO: 39754 - DNA, 80 bp, synthetic construct
  source 1..80: mol_type = other DNA
gcttaatataatcattctataatgtatatatacatcaaaacattacagtgtactccataaatatatacaattattactag

SEQ ID NO: 39755 - DNA, 80 bp, synthetic construct; identical to SEQ ID NO: 10804
  source 1..80: mol_type = other DNA

SEQ ID NO: 39756 - DNA, 80 bp, synthetic construct
  source 1..80: mol_type = other DNA
attaggtcggcatcagcaaaagtatccacagcatttgagttcaagtatcttatggcatattacctttcatcttagggaga

SEQ ID NO: 39757 - DNA, 80 bp, synthetic construct
  source 1..80: mol_type = other DNA
ggcccaagttcaatgttcctagctctccagctgtaactcaaccagttaggcaactccttacatctttttcaagagtcaag

SEQ ID NO: 39758 - DNA, 80 bp, synthetic construct
  source 1..80: mol_type = other DNA
ctcctgcctcagcctccagagtagctggtattacaggtgcccactaccatgcctgcctggctaatttttgtattttttag

SEQ ID NO: 39759 - DNA, 80 bp, synthetic construct; identical to SEQ ID NO: 10805
  source 1..80: mol_type = other DNA

SEQ ID NO: 39760 - DNA, 80 bp, synthetic construct
  source 1..80: mol_type = other DNA
taactacaaggtgaattttctggattttatacaatgttcacgtatctttctactaatattagttaatgtctgttcagaag

SEQ ID NO: 39761 - DNA, 80 bp, synthetic construct
  source 1..80: mol_type = other DNA
cttcttgtccttgtctaacaaacttgttatacattctttcaacttcgcataccacattcagacctctcttcactgttgtg

SEQ ID NO: 39762 - DNA, 80 bp, synthetic construct
  source 1..80: mol_type = other DNA
tattttgctgtattaatcagctttgtgtatattgtgaatttttataagttggtgtgtgcgtgcatattctctttaaactt

SEQ ID NO: 39763 - DNA, 80 bp, synthetic construct; identical to SEQ ID NO: 10806
  source 1..80: mol_type = other DNA

SEQ ID NO: 39764 - DNA, 80 bp, synthetic construct
  source 1..80: mol_type = other DNA
aaagggaactgtataaaaattctactaccattatggtgcacactctctggaagtgggatacttttgtcttcaatctgttt

SEQ ID NO: 39765 - DNA, 80 bp, synthetic construct
  source 1..80: mol_type = other DNA
tttgtggttatcttgatcttctacctgatgacactgacaggaaacctgttcatcatcatcctgtcatacgtggactccca

SEQ ID NO: 39766 - DNA, 80 bp, synthetic construct
  source 1..80: mol_type = other DNA
ggaatcacagagtgtgtcctactggtggtgatgtcatatgatcgttatgtagctgtgtgtagacctttgcattacactgt

SEQ ID NO: 39767 - DNA, 80 bp, synthetic construct; identical to SEQ ID NO: 10807
  source 1..80: mol_type = other DNA

SEQ ID NO: 39768 - DNA, 80 bp, synthetic construct
  source 1..80: mol_type = other DNA
agtcatgtgcatgtatctccagccaccatcagaaaattctcctgatcagggcaagttcattgccctcttttatactgttg

SEQ ID NO: 39769 - DNA, 80 bp, synthetic construct
  source 1..80: mol_type = other DNA
attgtttttcctagggtcttagccatcttgaaaggtggtttccctgcttctttgtgatttatttttgttctaacagctca

SEQ ID NO: 39770 - DNA, 80 bp, synthetic construct
  source 1..80: mol_type = other DNA
tgtgcatgcgaatagttatgaggagattatttcaaaaatgttgggaatatttctaacaatgtgctaaattatgaactgat

SEQ ID NO: 39771 - DNA, 80 bp, synthetic construct; identical to SEQ ID NO: 10808
  source 1..80: mol_type = other DNA

SEQ ID NO: 39772 - DNA, 80 bp, synthetic construct
  source 1..80: mol_type = other DNA
cacactctctgtcaggaaaaatggcaacataaaagatgaagtatctgtgcatggcttaatttgtcactgggggtaatgct

SEQ ID NO: 39773 - DNA, 80 bp, synthetic construct
  source 1..80: mol_type = other DNA
atgaggtcaggagaccaagaccatcctggctaacaaggtgaaaccccatctctactaaaaatacaaaacaattagctagg

SEQ ID NO: 39774 - DNA, 80 bp, synthetic construct
  source 1..80: mol_type = other DNA
ttgaaaataacctgaaaatgctgaaaagaaaagttccttattcattaacaaagaaaaattttgtgttttatggaaattat

SEQ ID NO: 39775 - DNA, 80 bp, synthetic construct; identical to SEQ ID NO: 10809
  source 1..80: mol_type = other DNA

SEQ ID NO: 39776 - DNA, 80 bp, synthetic construct
  source 1..80: mol_type = other DNA
atctatctctttttctgcactagctgagagtaagttggagatgccacgtacctttacaccaagtacttttttttttaatt

SEQ ID NO: 39777 - DNA, 80 bp, synthetic construct; identical to SEQ ID NO: 10810
  source 1..80: mol_type = other DNA

SEQ ID NO: 39778 - DNA, 80 bp, synthetic construct
  source 1..80: mol_type = other DNA
acattaggtatatctcctcatgctatccctccccccaccacacaacaggccccggtgtgtgatgttccccttcctgtgtc

SEQ ID NO: 39779 - DNA, 80 bp, synthetic construct
  source 1..80: mol_type = other DNA
gtgtatatgtgccacattttcttaatccactctatcattgttggacatttgggttggttccaagtctttgctgttgtgaa

SEQ ID NO: 39780 - DNA, 80 bp, synthetic construct
  source 1..80: mol_type = other DNA
ttacagtcccaccaacagtgtaaaagtgttcctatttctccacatcctgtccagcacctgttgtttcctgactttttaat

SEQ ID NO: 39781 - DNA, 80 bp, synthetic construct; identical to SEQ ID NO: 10811
  source 1..80: mol_type = other DNA

SEQ ID NO: 39782 - DNA, 80 bp, synthetic construct
  source 1..80: mol_type = other DNA
atgtcctgaatggtattgcctaggttttgttctagggtttttatggttttaggtctaacattgaagtctttaatccatct

SEQ ID NO: 39783 - DNA, 80 bp, synthetic construct
  source 1..80: mol_type = other DNA
attatttctgagggctgtattctgttcctttgctctatatctctgttttggtaccagtaccatgctgttttggttactgt

SEQ ID NO: 39784 - DNA, 80 bp, synthetic construct; identical to SEQ ID NO: 10812
  source 1..80: mol_type = other DNA

SEQ ID NO: 39785 - DNA, 80 bp, synthetic construct
  source 1..80: mol_type = other DNA
tgcctgttattggtgtataagaatgtttgtgattttcgcacattgattttgtatcctgagcctttgctgaagttgcttat

SEQ ID NO: 39786 - DNA, 80 bp, synthetic construct
  source 1..80: mol_type = other DNA
aataggagtggtgagagagggcatccctgtcttgtgccagttatcaaagggaatgtttccagtttttgcccattcagtat

SEQ ID NO: 39787 - DNA, 80 bp, synthetic construct; identical to SEQ ID NO: 10813
  source 1..80: mol_type = other DNA

SEQ ID NO: 39788 - DNA, 80 bp, synthetic construct
  source 1..80: mol_type = other DNA
ggtatcaggatgatgctggcctcataaaatgagttagggaggattccctctttttctattgattggagtagtttcagaac

SEQ ID NO: 39789 - DNA, 80 bp, synthetic construct
  source 1..80: mol_type = other DNA
ggagggtgtatgtgtcgaggaatttatccatttcttctagattttctagtttatttgcacagaggtgtttatagtattct

SEQ ID NO: 39790 - DNA, 80 bp, synthetic construct
  source 1..80: mol_type = other DNA
tttttgaagggttttttgtgtgtctatctccttcagttctgctctgatcttagttatttcttgccttctgctagcttttg

SEQ ID NO: 39791 - DNA, 80 bp, synthetic construct
  source 1..80: mol_type = other DNA
ctcgctggtttcaaagaacatctttatttctgccttcatttcgttatgtaccagtagtcattcaggagcaggttgttcag

SEQ ID NO: 39792 - DNA, 80 bp, synthetic construct; identical to SEQ ID NO: 10814
  source 1..80: mol_type = other DNA

SEQ ID NO: 39793 - DNA, 80 bp, synthetic construct
  source 1..80: mol_type = other DNA
ttgggtgcatgtatatttaggatagttagctcttcttgttgaattgatccctttaccattatgtaatggccttctttgtc

SEQ ID NO: 39794 - DNA, 80 bp, synthetic construct; identical to SEQ ID NO: 10815
  source 1..80: mol_type = other DNA

SEQ ID NO: 39795 - DNA, 80 bp, synthetic construct
  source 1..80: mol_type = other DNA
atagccactttttaaaaaaatcccagatgatacactgagaaatcacatctcactagtctccttccatctggaccagtgcc

SEQ ID NO: 39796 - DNA, 80 bp, synthetic construct
  source 1..80: mol_type = other DNA
taaatatcactgaggtgacatcatgtcctgttcagagcagcatctcagcagtctcatgatgttggtttgtacaaatacag

SEQ ID NO: 39797 - DNA, 80 bp, synthetic construct
  source 1..80: mol_type = other DNA
tatgtacatgtcctgttccccatcaaatttttatccactagttttgcaatcatttatgtttttcttaacaccattatccc

SEQ ID NO: 39798 - DNA, 80 bp, synthetic construct; identical to SEQ ID NO: 10816
  source 1..80: mol_type = other DNA

SEQ ID NO: 39799 - DNA, 80 bp, synthetic construct
  source 1..80: mol_type = other DNA
gaaacctgttcatcatcatcctgacatacctggactcccatctccatactcccttgtatttcttcctttcaaatctctca

SEQ ID NO: 39800 - DNA, 80 bp, synthetic construct
  source 1..80: mol_type = other DNA
ggaaccacagagtgtttcctactggtggcgatgtcctatgaccgttatgcagctgtgtgtagacctttgcattacactgt

SEQ ID NO: 39801 - DNA, 80 bp, synthetic construct
  source 1..80: mol_type = other DNA
tcatttgtcaatacccgtgaaaataaactgaccctcatgatcacaagctccatttttgttctgctacttctcaccctcat

SEQ ID NO: 39802 - DNA, 80 bp, synthetic construct; identical to SEQ ID NO: 10817
  source 1..80: mol_type = other DNA

SEQ ID NO: 39803 - DNA, 80 bp, synthetic construct
  source 1..80: mol_type = other DNA
catgtactctaacaaagtcgtggagatcctggtaacaggtaggaataaaacacattcagcttaaataccattcacttttg

SEQ ID NO: 39804 - DNA, 80 bp, synthetic construct
  source 1..80: mol_type = other DNA
gatactctcaattttaaaatatctagaatatgtcttttaattttttgctgtttaggcagaatacttttgtcttctatctt

SEQ ID NO: 39805 - DNA, 80 bp, synthetic construct
  source 1..80: mol_type = other DNA
agtaagacaataagttttataaattgtagcaagagagatgttgaagcagtgtagcagaagtcggcgtccaagatccctct

SEQ ID NO: 39806 - DNA, 80 bp, synthetic construct; identical to SEQ ID NO: 10818
  source 1..80: mol_type = other DNA

SEQ ID NO: 39807 - DNA, 80 bp, synthetic construct
  source 1..80: mol_type = other DNA
accatcttcatctgaaataattgcgttatacctagagcaatttaaactgacagtcatagtcaaatgatgtggaaaaatga

SEQ ID NO: 39808 - DNA, 80 bp, synthetic construct
  source 1..80: mol_type = other DNA
ctccaatttctagtgtgacttgcaattgcattgattctgctgactttatcttctttctgcatctgtgactcttcctttat

SEQ ID NO: 39809 - DNA, 80 bp, synthetic construct
  source 1..80: mol_type = other DNA
aacatagcttagctctttgaactatttcctactatggaaatcttacgatttgtaacacttcctgtagcatcctggtttct

SEQ ID NO: 39810 - DNA, 80 bp, synthetic construct; identical to SEQ ID NO: 10819
  source 1..80: mol_type = other DNA

SEQ ID NO: 39811 - DNA, 80 bp, synthetic construct
  source 1..80: mol_type = other DNA
atttttctgtgcctggctcattttacttagcaaagtgtcctcaggtttgccatgtgtttgaaaatattaggacttccttc

SEQ ID NO: 39812 - DNA, 80 bp, synthetic construct
  source 1..80: mol_type = other DNA
cttttggatataaacccagaagtgtgattgatggatcatatggcagttctatttttatttattattaattaattaattaa

SEQ ID NO: 39813 - DNA, 80 bp, synthetic construct
  source 1..80: mol_type = other DNA
ttctgtatttttagtagagacaggatttcttgtgtgtgtgtgtgtgtgtgtgtgtgtgtgtgtgtgtgtcctagcaaatc

SEQ ID NO: 39814 - DNA, 80 bp, synthetic construct; identical to SEQ ID NO: 10820
  source 1..80: mol_type = other DNA

SEQ ID NO: 39815 - DNA, 80 bp, synthetic construct
  source 1..80: mol_type = other DNA
aggacatgaactcattcttttttatggctgcatagtattccaaggtgtatatgtgccacattttcttcatccagtctatt

SEQ ID NO: 39816 - DNA, 80 bp, synthetic construct
  source 1..80: mol_type = other DNA
ccttgaggaatcgccacactgtcttccacaatggatgaactaatttactctcccaccaacagtgtaaaagcattcctatt

SEQ ID NO: 39817 - DNA, 80 bp, synthetic construct; identical to SEQ ID NO: 10821
  source 1..80: mol_type = other DNA

SEQ ID NO: 39818 - DNA, 80 bp, synthetic construct
  source 1..80: mol_type = other DNA
ttgcttttggtgttttagtcatgaagtctttgcccatgcctatatcctgaatggtattgcctaggttcttttctagggtt

SEQ ID NO: 39819 - DNA, 80 bp, synthetic construct
  source 1..80: mol_type = other DNA
tggtagagatgggatttcaccatgttggccaggctggtctcaaactcctgacctcaggtgatctgccgacctcggcctcc

SEQ ID NO: 39820 - DNA, 80 bp, synthetic construct
  source 1..80: mol_type = other DNA
acctgttgtcctttgtgtttttcataatagatctaactggtgtgaggtatgaggtgatagctactggtgtgggcctgaac

SEQ ID NO: 39821 - DNA, 80 bp, synthetic construct; identical to SEQ ID NO: 10822
  source 1..80: mol_type = other DNA

SEQ ID NO: 39822 - DNA, 80 bp, synthetic construct
  source 1..80: mol_type = other DNA
gttatgttgggaacaggcccccaaatctggccataaactggccccaaaactggccataaacaaaatctctgcagccctgt

SEQ ID NO: 39823 - DNA, 80 bp, synthetic construct
  source 1..80: mol_type = other DNA
ctgcagataactagacagagcccatccctttgtttcggcccatccctttgtttcccttaaggaatacttttagttaatct

SEQ ID NO: 39824 - DNA, 80 bp, synthetic construct
  source 1..80: mol_type = other DNA
ggttagcatctccatgatcgaggtggtcttggcaaggttataattataggatatctaatattgaatcctagtcatattaa

SEQ ID NO: 39825 - DNA, 80 bp, synthetic construct; identical to SEQ ID NO: 10823
  source 1..80: mol_type = other DNA

SEQ ID NO: 39826 - DNA, 80 bp, synthetic construct
  source 1..80: mol_type = other DNA
gtgaagccagctttttcccagataggaatgatgactaactgcactgaagcatcagcttctttttccctgtaaacttctgt

SEQ ID NO: 39827 - DNA, 80 bp, synthetic construct
  source 1..80: mol_type = other DNA
atataagtgtcatgtggggaagtatgttgagattaggtagcattctgttttttaactagctttcatccactagttttatt

SEQ ID NO: 39828 - DNA, 80 bp, synthetic construct; identical to SEQ ID NO: 10824
  source 1..80: mol_type = other DNA

SEQ ID NO: 39829 - DNA, 80 bp, synthetic construct
  source 1..80: mol_type = other DNA
gttctcactgttcaactcccacttatgagtgagaacatgcagtgtttggttttctgttcctgttttagtttgctgagaat

SEQ ID NO: 39830 - DNA, 80 bp, synthetic construct
  source 1..80: mol_type = other DNA
gctgcaataaacatacatgtgcatgtgtctttatagtagaatgatttataatcctttgggtatatacctagtaatgggat

SEQ ID NO: 39831 - DNA, 80 bp, synthetic construct
  source 1..80: mol_type = other DNA
accattctaactggtgtgagatggtatctcattgtggttttgatttacatttctctaatgaccagagataatgagctttt

SEQ ID NO: 39832 - DNA, 80 bp, synthetic construct; identical to SEQ ID NO: 10825
  source 1..80: mol_type = other DNA

SEQ ID NO: 39833 - DNA, 80 bp, synthetic construct
  source 1..80: mol_type = other DNA
taaggtgtaaggaaggggtccagtttcagttttctgcatatggctagccagttttcctaacaccatttattaaataagga

SEQ ID NO: 39834 - DNA, 80 bp, synthetic construct
  source 1..80: mol_type = other DNA
ttaaagtcaggtagcatgatgcctccaactttctccttcttgcttaggattgtcttggttatacgggctctgttttggtt

SEQ ID NO: 39835 - DNA, 80 bp, synthetic construct
  source 1..80: mol_type = other DNA
ttttccatatttagtacttccttcaggaactcccgtaaggcaggactggtggtgacgaaatctctcagcatttgcttgtc

SEQ ID NO: 39836 - DNA, 80 bp, synthetic construct; identical to SEQ ID NO: 10826
  source 1..80: mol_type = other DNA

SEQ ID NO: 39837 - DNA, 80 bp, synthetic construct
  source 1..80: mol_type = other DNA
tttcaggtacaccaatcaaacgtaggtttggtcttttcacatagtcccatatttcttggaggctttgttcattcattttc

SEQ ID NO: 39838 - DNA, 80 bp, synthetic construct
  source 1..80: mol_type = other DNA
ttctctaaactgattaatttagttaggaagtcttctatcttttcttcaaggttcttagcttccttgcattgggttaaaac

SEQ ID NO: 39839 - DNA, 80 bp, synthetic construct
  source 1..80: mol_type = other DNA
tgcaaaagggtttttatagatgtgattaaattctcaaccttgagttgggattattatcctgtattagccaggagggctga

SEQ ID NO: 39840 - DNA, 80 bp, synthetic construct; identical to SEQ ID NO: 10827
  source 1..80: mol_type = other DNA

SEQ ID NO: 39841 - DNA, 80 bp, synthetic construct
  source 1..80: mol_type = other DNA
ccatatatcttaatatggtcttatgcattcttatttcattctatcattattttgatgctgaaatggtcagtgttttggct

SEQ ID NO: 39842 - DNA, 80 bp, synthetic construct
  source 1..80: mol_type = other DNA
aactttgaataaagcaatggggtttcctaatgaacaattcactagaaatgcatggagtagataacaccaagagatggtaa

SEQ ID NO: 39843 - DNA, 80 bp, synthetic construct
  source 1..80: mol_type = other DNA
gtttggggagtcatttggcaggagtgtaaatccttgaaatttgaagatctttcaaattaccttgattctcctcaacaaaa

SEQ ID NO: 39844 - DNA, 80 bp, synthetic construct; identical to SEQ ID NO: 10828
  source 1..80: mol_type = other DNA

SEQ ID NO: 39845 - DNA, 80 bp, synthetic construct
  source 1..80: mol_type = other DNA
ggctttatccctgagaggaaaggttggttcaacatatgcaaatcaatacatgtgattcatcacataaacagaaatgaaaa

SEQ ID NO: 39846 - DNA, 80 bp, synthetic construct
  source 1..80: mol_type = other DNA
ggaaaaagctggaagcattccccttgaaaaccggcataagacatggatgccctctctcaccacacctattcaacatagta

SEQ ID NO: 39847 - DNA, 80 bp, synthetic construct
  source 1..80: mol_type = other DNA
cagaaaagtttcaggatacaaaagcaatgtacaaaaatttagcattcccatacatcaacaacattcaatctgagggctaa

SEQ ID NO: 39848 - DNA, 80 bp, synthetic construct; identical to SEQ ID NO: 10829
  source 1..80: mol_type = other DNA

SEQ ID NO: 39849 - DNA, 80 bp, synthetic construct
  source 1..80: mol_type = other DNA
acggtactggaaaaaaaaaaaaaaaaacagatatatagaccaatagaataaatagagaacccagaaatagtgcaacacac

SEQ ID NO: 39850 - DNA, 80 bp, synthetic construct
  source 1..80: mol_type = other DNA
ttaaacacttaaatgttaaaatgaaaactattaatataaaaactctggaagataacctaggaaataccattctggacata

SEQ ID NO: 39851 - DNA, 80 bp, synthetic construct
  source 1..80: mol_type = other DNA
caatgcatttgacaaaggtctaatatctggcatctagaaagaacttaaacaaatttataagaaagaaacaatgccgttta

SEQ ID NO: 39852 - DNA, 80 bp, synthetic construct; identical to SEQ ID NO: 10830
  source 1..80: mol_type = other DNA

SEQ ID NO: 39853 - DNA, 80 bp, synthetic construct
  source 1..80: mol_type = other DNA
acagcaaatacatgaaatcaacctaaatgcccatcaacagtagattgggtaaagaaaatgtggtacatagaccccatgga

SEQ ID NO: 39854 - DNA, 80 bp, synthetic construct
  source 1..80: mol_type = other DNA
gtgaaccacatgcactggggtctacttgacggtggagggtgggaggaggaagaagatcagaaaaaatacctattgagtac

SEQ ID NO: 39855 - DNA, 80 bp, synthetic construct
  source 1..80: mol_type = other DNA
gaaagttaaatcgataacttaatgacaataattcaactctctcatgcttatccccctcatctaacccaaaacaaaacaag

SEQ ID NO: 39856 - DNA, 80 bp, synthetic construct; identical to SEQ ID NO: 10831
  source 1..80: mol_type = other DNA

SEQ ID NO: 39857 - DNA, 80 bp, synthetic construct
  source 1..80: mol_type = other DNA
agatttaggttccaagcagaacactgctagtgttctctgcagtttgttgtagaatcatagtgtcttggcaaccaaaggca

SEQ ID NO: 39858 - DNA, 80 bp, synthetic construct
  source 1..80: mol_type = other DNA
atggcttaacatgggggatggtggtaagtgcggctctatttggattttgtaattataaaagcccactttatgtagagaga

SEQ ID NO: 39859 - DNA, 80 bp, synthetic construct
  source 1..80: mol_type = other DNA
ggagtttgagaccagcccggccaacatggtgaaattccgtctctactaaaaatacaaaaaattagccaggcatggtggca

SEQ ID NO: 39860 - DNA, 80 bp, synthetic construct
  source 1..80: mol_type = other DNA
ttatttttcatggagtcctgcccttagaacaaggcattaaatcctctaagtgtataggaaatttgagttcaaaatagatg

SEQ ID NO: 39861 - DNA, 80 bp, synthetic construct; identical to SEQ ID NO: 10832
  source 1..80: mol_type = other DNA

SEQ ID NO: 39862 - DNA, 80 bp, synthetic construct
  source 1..80: mol_type = other DNA
ttatggccaagtagtattctaaagtgtgtatatatgtataccacattttagaaatccaatagtccactgatggacactca

SEQ ID NO: 39863 - DNA, 80 bp, synthetic construct
  source 1..80: mol_type = other DNA
atactgttttccacagaggttgtactaatttacattcccaccaatagtgtatgtaatccttttctctataccctcggcaa

SEQ ID NO: 39864 - DNA, 80 bp, synthetic construct
  source 1..80: mol_type = other DNA
gaatgaattacattcatggctaggtttagaatatgggttccgttactggaagatgtgttgaagtcttttaaatagtgaga

SEQ ID NO: 39865 - DNA, 80 bp, synthetic construct; identical to SEQ ID NO: 10833
  source 1..80: mol_type = other DNA

SEQ ID NO: 39866 - DNA, 80 bp, synthetic construct
  source 1..80: mol_type = other DNA
gctctgtcgcccaggctggagtgcagtggtgcaatctcagctcattgcaacctccatctcccggtttcaagtgattctcc

SEQ ID NO: 39867 - DNA, 80 bp, synthetic construct
  source 1..80: mol_type = other DNA
attacaggtgtgagccaccgtgcctggcctcttacaagactcttcatggagagagaaataaaatagaaattaggttgtat

SEQ ID NO: 39868 - DNA, 80 bp, synthetic construct
  source 1..80: mol_type = other DNA
caactcgtcatttacattaggtatttctcctaatgctatccctcccccagtgccccccaccccccgacaggccctggtgt

SEQ ID NO: 39869 - DNA, 80 bp, synthetic construct
  source 1..80: mol_type = other DNA
ctatggctgcatagcattccactgtgtatatgtgccacattttctttatccagtgtattattgatggacatttgggttgg

SEQ ID NO: 39870 - DNA, 80 bp, synthetic construct; identical to SEQ ID NO: 10834
  source 1..80: mol_type = other DNA

SEQ ID NO: 39871 - DNA, 80 bp, synthetic construct
  source 1..80: mol_type = other DNA
atttcccacatttaaaaaaccttgtaatagttgatttacagttaagttgactgatggaaatctcactgatttaagaaaat

SEQ ID NO: 39872 - DNA, 80 bp, synthetic construct
  source 1..80: mol_type = other DNA
agcactgaaaataataaatactagcaagaatgcaaagtgagggaaactctctttgattgctggtagaaatgcaaagtggt

SEQ ID NO: 39873 - DNA, 80 bp, synthetic construct
  source 1..80: mol_type = other DNA
ccaaactgtaagcaacccatgcccttcaacaggggaaagataatcttgggtatttccacacaatgatctatgattttgtg

SEQ ID NO: 39874 - DNA, 80 bp, synthetic construct; identical to SEQ ID NO: 10835
  source 1..80: mol_type = other DNA

SEQ ID NO: 39875 - DNA, 80 bp, synthetic construct
  source 1..80: mol_type = other DNA
gaatggtatgacagtggcaaatcaacctcactttatataaatatgtaagctaacaacactgaaaagggtagagaagaagt

SEQ ID NO: 39876 - DNA, 80 bp, synthetic construct
  source 1..80: mol_type = other DNA
acaaaaatattaaaatatgaacagtggcatccaggtttctccctgttggtaagagaagttacagagaagcaagaaaggaa

SEQ ID NO: 39877 - DNA, 80 bp, synthetic construct
  source 1..80: mol_type = other DNA
cctagccctttctgctgaaatagcctagaaacaatgttaccctcatagcaatgtgcacatgtcacactcagataatgttt

SEQ ID NO: 39878 - DNA, 80 bp, synthetic construct; identical to SEQ ID NO: 10836
  source 1..80: mol_type = other DNA

SEQ ID NO: 39879 - DNA, 80 bp, synthetic construct
  source 1..80: mol_type = other DNA
tctcctttgttaagtgtaggctggactcagtgactgtcttccaaggaatagagtatggacaggtaacaattgtaagtttc

SEQ ID NO: 39880 - DNA, 80 bp, synthetic construct
  source 1..80: mol_type = other DNA
ggtctcctctgcaaaaattcaaaggcccagtgtaattgatggcagctgaaacccatctggactgtgatgccggctgtagt

SEQ ID NO: 39881 - DNA, 80 bp, synthetic construct
  source 1..80: mol_type = other DNA
ttggggttcaggagcaggcagaagccccaccctccctggtgcagctgcagctgctcaagctgtgtctacaaacctgggca

SEQ ID NO: 39882 - DNA, 80 bp, synthetic construct; identical to SEQ ID NO: 10837
  source 1..80: mol_type = other DNA

SEQ ID NO: 39883 - DNA, 80 bp, synthetic construct
  source 1..80: mol_type = other DNA
ggcaccgtcaacagtggcaggaggcccacaggctcctgggcagaaagggacgggtccccggtgaggccccaccttcaact

SEQ ID NO: 39884 - DNA, 80 bp, synthetic construct
  source 1..80: mol_type = other DNA
tcctctgaagtccataaaaattcccagactcagccagacacaaaaagatgtcaggacaaccagctgcagagaggaattac

SEQ ID NO: 39885 - DNA, 80 bp, synthetic construct
  source 1..80: mol_type = other DNA
attgttcaataaagctcctcttcaccttactcaccctccacttatccacatacctcgtgagtgtgggacaagaacttggg

SEQ ID NO: 39886 - DNA, 80 bp, synthetic construct; identical to SEQ ID NO: 10838
  source 1..80: mol_type = other DNA

SEQ ID NO: 39887 - DNA, 80 bp, synthetic construct
  source 1..80: mol_type = other DNA
tgagatgatcatatggcttttccttttaattctgtttatgtggtgaatcacatttgtagatttgcagatgttcaaccaat

SEQ ID NO: 39888 - DNA, 80 bp, synthetic construct
  source 1..80: mol_type = other DNA
ttaagctaactcacctaacttagtgtgggtcacatatcttggcttgataatcccaagctgtgcttagaaacccaggtagc

SEQ ID NO: 39889 - DNA, 80 bp, synthetic construct
  source 1..80: mol_type = other DNA
tgagaggagcctgcaggcaggagggcttgcagaacagatgtgtcttagtcccatagggaagccagccctgctctcctttg

SEQ ID NO: 39890 - DNA, 80 bp, synthetic construct; identical to SEQ ID NO: 10839
  source 1..80: mol_type = other DNA

SEQ ID NO: 39891 - DNA, 80 bp, synthetic construct
  source 1..80: mol_type = other DNA
gggtttccagatttctgactctacagcctcagcttcagctttgcttctccatacactcagtgttttctctcctaagatca

SEQ ID NO: 39892 - DNA, 80 bp, synthetic construct
  source 1..80: mol_type = other DNA
gtgaaagcagtgcttcctggctgcaactaattggacatcttgtcccttcccatctgtgtaacacattttttatacatgct

SEQ ID NO: 39893 - DNA, 80 bp, synthetic construct
  source 1..80: mol_type = other DNA
tagactatctttggatttcagcaagattttctttaacatcctttttttgttgcagaatcccatccaggacactccattgc

SEQ ID NO: 39894 - DNA, 80 bp, synthetic construct; identical to SEQ ID NO: 10840
  source 1..80: mol_type = other DNA

SEQ ID NO: 39895 - DNA, 80 bp, synthetic construct
  source 1..80: mol_type = other DNA
ttataatcctttgggtataaacccagtaatgggattgctgggtcaaatgatatttctggatctggttctagatccttgtg

SEQ ID NO: 39896 - DNA, 80 bp, synthetic construct
  source 1..80: mol_type = other DNA
tgatttgcgtttctctaatgatgagtgatgatgagcttttttcatgtttgttggctacataaatgtcttcttttgagaag

SEQ ID NO: 39897 - DNA, 80 bp, synthetic construct
  source 1..80: mol_type = other DNA
tttgctgtgcagaagctctttagtttaattagatcccatttgtctattttggcttttgttgctattgcttttggtgtttt

SEQ ID NO: 39898 - DNA, 80 bp, synthetic construct; identical to SEQ ID NO: 10841
  source 1..80: mol_type = other DNA

SEQ ID NO: 39899 - DNA, 80 bp, synthetic construct
  source 1..80: mol_type = other DNA
agattttggacagtgcctgaaacataggaaggatctaatgaatgtaagccagttatcattaatagtatgattagcattaa

SEQ ID NO: 39900 - DNA, 80 bp, synthetic construct
  source 1..80: mol_type = other DNA
ttctagcatagtgcagagaacatagtttcctcataagtgaaagtcaagtcaatagtaggagatatttggttatctgaagg

SEQ ID NO: 39901 - DNA, 80 bp, synthetic construct
  source 1..80: mol_type = other DNA
cttgacaagagaatggtgattccactgttatcttaaaccttttcttatttatgcatcctgcatatatcaaaagaaacctc

SEQ ID NO: 39902 - DNA, 80 bp, synthetic construct; identical to SEQ ID NO: 10842
  source 1..80: mol_type = other DNA

SEQ ID NO: 39903 - DNA, 80 bp, synthetic construct
  source 1..80: mol_type = other DNA
ttgtgtttcaaggaagtctggtgcaaagactgatacatgcaatgatgttttgagctttcaactcttttgccattctgact

SEQ ID NO: 39904 - DNA, 80 bp, synthetic construct
  source 1..80: mol_type = other DNA
accgggatatttttgactgacatgggctgtccttgccaggttcctaatggatttccacaatgagaagctgattttataga

SEQ ID NO: 39905 - DNA, 80 bp, synthetic construct
  source 1..80: mol_type = other DNA
gcaataagttaactctattcccaattgcactggtggcataatactgacacataggtagttcacaaattctaaaactaggg

SEQ ID NO: 39906 - DNA, 80 bp, synthetic construct
  source 1..80: mol_type = other DNA
tatagctgtattgagatataatttatttacaatacagttcacccatttaaagtgtacaagtcaatgatttttggtatatt

SEQ ID NO: 39907 - DNA, 80 bp, synthetic construct; identical to SEQ ID NO: 10843
  source 1..80: mol_type = other DNA

SEQ ID NO: 39908 - DNA, 80 bp, synthetic construct
  source 1..80: mol_type = other DNA
tgggtggaattttgcaaaccatacttaggagtttggattctgttttgtaggacttggtctcagggtcaaatagggagtct

SEQ ID NO: 39909 - DNA, 80 bp, synthetic construct
  source 1..80: mol_type = other DNA
ttaattcactggagcagaacaagtagaaataatgagattgcaactggaatagtttttgaaaataagaagatttatgcaat

SEQ ID NO: 39910 - DNA, 80 bp, synthetic construct
  source 1..80: mol_type = other DNA
cccaggctggagtgcagtggtgcgatcacaggtcactgcagcctcgacttcccaggctgaggtcatcctcccgcctcagc

SEQ ID NO: 39911 - DNA, 80 bp, synthetic construct; identical to SEQ ID NO: 10844
  source 1..80: mol_type = other DNA

SEQ ID NO: 39912 - DNA, 80 bp, synthetic construct
  source 1..80: mol_type = other DNA
tatttttagtagagacggggtttctccatcttggtcaggctggtctcgaactcccgacctcagatgatctgcctgccttg

SEQ ID NO: 39913 - DNA, 80 bp, synthetic construct
  source 1..80: mol_type = other DNA
aattaataattcatatatacattatatatgtacatgtatatactttctcattcttctacaattaaatatattttctgaat

SEQ ID NO: 39914 - DNA, 80 bp, synthetic construct
  source 1..80: mol_type = other DNA
gaggattacttgaattcaggagtttgagaccagcctgggtgacatgatgaactcctgtttctactaaaaatgcaaaaaaa

SEQ ID NO: 39915 - DNA, 80 bp, synthetic construct; identical to SEQ ID NO: 10845
  source 1..80: mol_type = other DNA

SEQ ID NO: 39916 - DNA, 80 bp, synthetic construct
  source 1..80: mol_type = other DNA
atcctcagggttgtaaagttgcttttattttccctattcccctttaaatcctaaggtatacaatagtggtacttcctgtc

SEQ ID NO: 39917 - DNA, 80 bp, synthetic construct
  source 1..80: mol_type = other DNA
taccctgtatgcatacattgatctggtaaatgttttctttttcatccttatcaggaaacatgatcagggagtttgcactc

SEQ ID NO: 39918 - DNA, 80 bp, synthetic construct
  source 1..80: mol_type = other DNA
gaagtggtcaatacattaaaagccttgataagacacatgtgatccagagagtgagtgttgcactccataaagattcaggg

SEQ ID NO: 39919 - DNA, 80 bp, synthetic construct; identical to SEQ ID NO: 10846
  source 1..80: mol_type = other DNA

SEQ ID NO: 39920 - DNA, 80 bp, synthetic construct
  source 1..80: mol_type = other DNA
aacatctgaccatggaacaacaaataaccatgcaggcaaaactacccatatgagctggggactgtctgaaccatcaagtt

SEQ ID NO: 39921 - DNA, 80 bp, synthetic construct
  source 1..80: mol_type = other DNA
acttacgcctccaagagagaacacttccaactctaatggaggagaaaaatgtcaagcttggttcattaatgggtcagctt

SEQ ID NO: 39922 - DNA, 80 bp, synthetic construct
  source 1..80: mol_type = other DNA
tatgtataactcataggtagtgataaatggcttaggaggcttttcaggtggctggaaagaaaaagatagaaacacttgga

SEQ ID NO: 39923 - DNA, 80 bp, synthetic construct; identical to SEQ ID NO: 10847
  source 1..80: mol_type = other DNA

SEQ ID NO: 39924 - DNA, 80 bp, synthetic construct
  source 1..80: mol_type = other DNA
ttttctactttgaatgtagcaattttttttggtaggaatagatacacatactccaggcatgggtttctattcctgaacat

SEQ ID NO: 39925 - DNA, 80 bp, synthetic construct
  source 1..80: mol_type = other DNA
tgcactatcataagtgatctattagagtcatggagggatctgttgaagctacacctgaaattccagctcagatgaaatgt

SEQ ID NO: 39926 - DNA, 80 bp, synthetic construct
  source 1..80: mol_type = other DNA
aagctctgtgagtttagaggttctagctctctaaagggaaatattcccactagggggtacaaaaggtacactaggaagtg

SEQ ID NO: 39927 - DNA, 80 bp, synthetic construct; identical to SEQ ID NO: 10848
  source 1..80: mol_type = other DNA

SEQ ID NO: 39928 - DNA, 80 bp, synthetic construct
  source 1..80: mol_type = other DNA
catgtgtatacatgtgccatgttggtgtgctgcacccattaactcgtcatttacattaggtatatctcctaatgctatcc

SEQ ID NO: 39929 - DNA, 80 bp, synthetic construct
  source 1..80: mol_type = other DNA
tcagctgagatccttctttctgggttgcctcagctaaacagagttgcttcatctaaacatatggcccttttccatgtaat

SEQ ID NO: 39930 - DNA, 80 bp, synthetic construct
  source 1..80: mol_type = other DNA
tcctttcctcaatcatgctacccaccctttcctttgaaagatgttgatccaaaaaatgttccctagtaaactttctaaat

SEQ ID NO: 39931 - DNA, 80 bp, synthetic construct; identical to SEQ ID NO: 10849
  source 1..80: mol_type = other DNA

SEQ ID NO: 39932 - DNA, 80 bp, synthetic construct
  source 1..80: mol_type = other DNA
gttggaggatttcccctagggtcattaagcattttgtacttctaggcagcacttgtctatatgccaaatgggctcccatg

SEQ ID NO: 39933 - DNA, 80 bp, synthetic construct
  source 1..80: mol_type = other DNA
ggcatctactttagaaggtgagatagaaatgctgtattttacatttacaaccataggaatggaggtgtgctggcttttac

SEQ ID NO: 39934 - DNA, 80 bp, synthetic construct
  source 1..80: mol_type = other DNA
ctcccctaaccaaggaccttttacaaatagttgatccagggggaaaaaaaaaaagcatctacttcaatgattagtaattt

SEQ ID NO: 39935 - DNA, 80 bp, synthetic construct; identical to SEQ ID NO: 10850
  source 1..80: mol_type = other DNA

SEQ ID NO: 39936 - DNA, 80 bp, synthetic construct
  source 1..80: mol_type = other DNA
acaaacatgagtaaaattatggtgaaatttaagccatgagggtcagtgcatcttaatgccctgtgacattgtacttgagg

SEQ ID NO: 39937 - DNA, 80 bp, synthetic construct
  source 1..80: mol_type = other DNA
tggttggtagataggagacaacagggctaggatattcagaaaataacctccagcaagctttgtaaaagcaaaagcatata

SEQ ID NO: 39938 - DNA, 80 bp, synthetic construct
  source 1..80: mol_type = other DNA
ttgacacagttattattgttaatgattttaaatattttcatctaatttcaagcttttggttttctttaatgtactttatc

SEQ ID NO: 39939 - DNA, 80 bp, synthetic construct; identical to SEQ ID NO: 10851
  source 1..80: mol_type = other DNA

SEQ ID NO: 39940 - DNA, 80 bp, synthetic construct
  source 1..80: mol_type = other DNA
tcaataacagacagagtgaaaaggaggaatggagaagaggagaatgagagagaaaaaagagaagataaagggagaagatc

SEQ ID NO: 39941 - DNA, 80 bp, synthetic construct
  source 1..80: mol_type = other DNA
atactctttgagagcacagatgaaacacatctaatatttagcaaagtgattttcactagcaggtgcttacatgtatttta

SEQ ID NO: 39942 - DNA, 80 bp, synthetic construct
  source 1..80: mol_type = other DNA
gaaaggaatcaaacaagtcatataccacccgtcttcctgtctgtactggaaccatcacaggcttttgaggaactactttt

SEQ ID NO: 39943 - DNA, 80 bp, synthetic construct; identical to SEQ ID NO: 10852
  source 1..80: mol_type = other DNA

SEQ ID NO: 39944 - DNA, 80 bp, synthetic construct
  source 1..80: mol_type = other DNA
ttatgtagcagtgtgtcatccactgcaaaataccatgatcatgcacccaaaactttgtctgcagctggctatcttggcat

SEQ ID NO: 39945 - DNA, 80 bp, synthetic construct
  source 1..80: mol_type = other DNA
gtactgatactacctacagtgaaattcagatgtctatcgccagtgttgtcctcctggtgatgcccttgatcattatcctt

SEQ ID NO: 39946 - DNA, 80 bp, synthetic construct
  source 1..80: mol_type = other DNA
aatggggcaaatttctcactcttttctacactgtagtaaccccaactcttaatcccctcatctacactctaaggaacaag

SEQ ID NO: 39947 - DNA, 80 bp, synthetic construct; identical to SEQ ID NO: 10853
  source 1..80: mol_type = other DNA

SEQ ID NO: 39948 - DNA, 80 bp, synthetic construct
  source 1..80: mol_type = other DNA
tttgttctattttcctacaagctccaccagtgctttcagtcccaacaagatttctaaagttttgagacagaaacttcttg

SEQ ID NO: 39949 - DNA, 80 bp, synthetic construct
  source 1..80: mol_type = other DNA
gctgatactatgatgagtgtgtgtgcaagtttctcagtttgagccttgatattctgggcccccagttataggaatagact

SEQ ID NO: 39950 - DNA, 80 bp, synthetic construct
  source 1..80: mol_type = other DNA
aatcaacatcgtggaacttataacaatatcatctcttgctcttagactctttcacagtattgatataatattagatttgc

SEQ ID NO: 39951 - DNA, 80 bp, synthetic construct; identical to SEQ ID NO: 10854
  source 1..80: mol_type = other DNA

SEQ ID NO: 39952 - DNA, 80 bp, synthetic construct
  source 1..80: mol_type = other DNA
ggagggagaaacagtttcctgggccaagcccagagcccccctgctctatgcagccttgggacatggtgcccggtgtctta

SEQ ID NO: 39953 - DNA, 80 bp, synthetic construct
  source 1..80: mol_type = other DNA
tattgatgtgcctggatgtccaggaagaagtttgctgggttggcaagagccctcatggagaatctctgctagggcagtgc

SEQ ID NO: 39954 - DNA, 80 bp, synthetic construct
  source 1..80: mol_type = other DNA
gcctgtgaaagcagccaggaggggagcaaagccacaaggatggagttgcccaaggccatgggagcccacctcttgcatca

SEQ ID NO: 39955 - DNA, 80 bp, synthetic construct
  source 1..80: mol_type = other DNA
cattgtatctaggaagtaactaacttgcttttgattttacaggcttataaccagaagggacttgccttgtctcagatgag

SEQ ID NO: 39956 - DNA, 80 bp, synthetic construct; identical to SEQ ID NO: 10855
  source 1..80: mol_type = other DNA

SEQ ID NO: 39957 - DNA, 80 bp, synthetic construct
  source 1..80: mol_type = other DNA
gccttgcggaactgtgagtcaattaaacttctttcctttataaattacccagtctcaggtacgtctttattagcagcatg

SEQ ID NO: 39958 - DNA, 80 bp, synthetic construct
  source 1..80: mol_type = other DNA
taaggtctgctttggcattctcttttaatttcattttagctattacagattacaataagcaatggattatatatttttct

SEQ ID NO: 39959 - DNA, 80 bp, synthetic construct
  source 1..80: mol_type = other DNA
gttgacagaattggtagcagcacaagagatcatgagccacctaaggtgacctaactgagttgtttctggagatctaattt

SEQ ID NO: 39960 - DNA, 80 bp, synthetic construct
  source 1..80: mol_type = other DNA
tttgtagttttagtagagacgggatttcaccatcttggccaggctggtcttgaactcctgacctcatgatctaccctcct

SEQ ID NO: 39961 - DNA, 80 bp, synthetic construct; identical to SEQ ID NO: 10856
  source 1..80: mol_type = other DNA

SEQ ID NO: 39962 - DNA, 80 bp, synthetic construct
  source 1..80: mol_type = other DNA
ttccttttcatggctgtgtagtattcagtggtgtatatgtaccacattttctttatccagtctatcattgataggcattg

SEQ ID NO: 39963 - DNA, 80 bp, synthetic construct
  source 1..80: mol_type = other DNA
cacactgtctttcacaatggttgaactcaggcatcctataaaatgggagaaaatttttgcaatctatccatctgacaaag

SEQ ID NO: 39964 - DNA, 80 bp, synthetic construct
  source 1..80: mol_type = other DNA
tacactcttggtgagatctgatttcttaattaacttagatactaatttattaatagacaggaaactaatttctaatttct

SEQ ID NO: 39965 - DNA, 80 bp, synthetic construct; identical to SEQ ID NO: 10857
  source 1..80: mol_type = other DNA

SEQ ID NO: 39966 - DNA, 80 bp, synthetic construct
  source 1..80: mol_type = other DNA
attgatctcttagtgtatgcaagaaaatatgtggaaggcagtggtgacttagagactctaagaaactggtttgactatag

SEQ ID NO: 39967 - DNA, 80 bp, synthetic construct
  source 1..80: mol_type = other DNA
tcttgtctttctctgagattctctccctatgtctctaaatctgtttctctgcagagaaacagattttatccatatgctct

SEQ ID NO: 39968 - DNA, 80 bp, synthetic construct
  source 1..80: mol_type = other DNA
ctgtgcctttaaggaaataaaggagcatagggcattggacctgaagcagtatcttttgtttcttaccctctactagatct

SEQ ID NO: 39969 - DNA, 80 bp, synthetic construct; identical to SEQ ID NO: 10858
  source 1..80: mol_type = other DNA

SEQ ID NO: 39970 - DNA, 80 bp, synthetic construct
  source 1..80: mol_type = other DNA
tgatcgtgtacatgtggtagatgtatcagggtcctttggttgtaaaaaacagaaaatacctctggccatcttaaaaaaaa

SEQ ID NO: 39971 - DNA, 80 bp, synthetic construct
  source 1..80: mol_type = other DNA
cactattaacaatagcaaagacttggaaccaacccaaatgtccaacaatgatagactggattaagaaaatgtggcacata

SEQ ID NO: 39972 - DNA, 80 bp, synthetic construct
  source 1..80: mol_type = other DNA
tacatggacacaggaaggggaagatcacacaccggggactgttgtgaggtggggggagaagggagggatagcattagtag

SEQ ID NO: 39973 - DNA, 80 bp, synthetic construct; identical to SEQ ID NO: 10859
  source 1..80: mol_type = other DNA

SEQ ID NO: 39974 - DNA, 80 bp, synthetic construct
  source 1..80: mol_type = other DNA
aattggatcacttgttcacccttgtgatcagtttcatggtcaagaactcactggaactgtatggaataggaatagccgtt

SEQ ID NO: 39975 - DNA, 80 bp, synthetic construct
  source 1..80: mol_type = other DNA
ttttgcgttttgcttgagaattgggaaacatgaagaacagtgactgagtaaggggctgggtgttatttatagcatgatta

SEQ ID NO: 39976 - DNA, 80 bp, synthetic construct
  source 1..80: mol_type = other DNA
ggctttgtttaacttttttggagtattagaaccttatgggtctaaaaaaatatttacattaagaaaatattgaccatgaa

SEQ ID NO: 39977 - DNA, 80 bp, synthetic construct
  source 1..80: mol_type = other DNA
ctttctttcttcctctctctctccccaccccatgaaccttgactaactaacaaacctcaaggcttgcaaaaatcattctc

SEQ ID NO: 39978 - DNA, 80 bp, synthetic construct; identical to SEQ ID NO: 10860
  source 1..80: mol_type = other DNA

SEQ ID NO: 39979 - DNA, 80 bp, synthetic construct
  source 1..80: mol_type = other DNA
gaacaaagtcccagtggccaatcttccctggtgaaagtcagccttgtacatctaacttaaagtgtgctatgaaatgaaaa

SEQ ID NO: 39980 - DNA, 80 bp, synthetic construct
  source 1..80: mol_type = other DNA
ttacagagtacctgcctactgctataaagttttactttatacgaattctggagaagctgagtgaggccatgtctgttacc

SEQ ID NO: 39981 - DNA, 80 bp, synthetic construct
  source 1..80: mol_type = other DNA
attttccataagaagttctgttctaggtagaaaaaaagtgaagattttggttaggttaaactgatttttaaagtatagga

SEQ ID NO: 39982 - DNA, 80 bp, synthetic construct; identical to SEQ ID NO: 10861
  source 1..80: mol_type = other DNA

SEQ ID NO: 39983 - DNA, 80 bp, synthetic construct
  source 1..80: mol_type = other DNA
tattgaaaatatctcaataaacagaaataacttagagtgagtcagaactgagaacacctagaacaagttccaaagaacaa

SEQ ID NO: 39984 - DNA, 80 bp, synthetic construct
  source 1..80: mol_type = other DNA
ttatgcttttgtaaaacctttggagaggacacaaacaaaatatagtctgaattatctgaaaagaataaaaggaacactta

SEQ ID NO: 39985 - DNA, 80 bp, synthetic construct
  source 1..80: mol_type = other DNA
atgaaataaaacttcagatcatttacatatttatacatcttaaagtagaagaagataaccttcctcattgattctacctt

SEQ ID NO: 39986 - DNA, 80 bp, synthetic construct; identical to SEQ ID NO: 10862
  source 1..80: mol_type = other DNA

SEQ ID NO: 39987 - DNA, 80 bp, synthetic construct
  source 1..80: mol_type = other DNA
ttatagtgggagatttataaaggcagttgaacaatcaaagacatttggaactaaatttctgtatatcaagtgctgtattt

SEQ ID NO: 39988 - DNA, 80 bp, synthetic construct
  source 1..80: mol_type = other DNA
agactgagccaaatgtagagctcagctcttcctcccccaggatcataacatatcaccagataaacctttgaaaaaaaacg

SEQ ID NO: 39989 - DNA, 80 bp, synthetic construct
  source 1..80: mol_type = other DNA
gcacatcctttccttttcttcactcccaactgatgcctctgcttttcaaaacttcagagaaaattggagaaatcagaaag

SEQ ID NO: 39990 - DNA, 80 bp, synthetic construct; identical to SEQ ID NO: 10863
  source 1..80: mol_type = other DNA

SEQ ID NO: 39991 - DNA, 80 bp, synthetic construct
  source 1..80: mol_type = other DNA
gcttccattccagtgtggctgttgccttctttttctctagcaaaactcctcccttagtgtcacagatgacttccttattg

SEQ ID NO: 39992 - DNA, 80 bp, synthetic construct
  source 1..80: mol_type = other DNA
cgagagcagattaaagcatccgtgaggcagccttctaaaatttctcaggaagtggtagccagtgtgaaaatgtatcacct

SEQ ID NO: 39993 - DNA, 80 bp, synthetic construct
  source 1..80: mol_type = other DNA
agaatctaggctaagaaactcactaaggtcttaaggtaaaaggcccagcaaacacactgttattttgctcaatcacagaa

SEQ ID NO: 39994 - DNA, 80 bp, synthetic construct; identical to SEQ ID NO: 10864
  source 1..80: mol_type = other DNA

SEQ ID NO: 39995 - DNA, 80 bp, synthetic construct
  source 1..80: mol_type = other DNA
agggaagacattgctattgttttcaacagagaaataggaggattaggcagaggaagggaattaggagaaatttcaccgaa

SEQ ID NO: 39996 - DNA, 80 bp, synthetic construct
  source 1..80: mol_type = other DNA
actgagggtcttgttcaagtgacatcgggatctcgtaacagaacaaatggctgtcaaagtagctggaaaagccctaggct

SEQ ID NO: 39997 - DNA, 80 bp, synthetic construct
  source 1..80: mol_type = other DNA
gataaccccgcctccctaaacagcagatgccatgttggagaggtgaatgcaattggaatcactgagcatttacttcacgt

SEQ ID NO: 39998 - DNA, 80 bp, synthetic construct; identical to SEQ ID NO: 10865
  source 1..80: mol_type = other DNA

SEQ ID NO: 39999 - DNA, 80 bp, synthetic construct
  source 1..80: mol_type = other DNA
gtaataaaacatgcctcttgatatagcaatatgccctgatttatggcagtgcttctatgccaggagcatttttgcttcct

SEQ ID NO: 40000 - DNA, 80 bp, synthetic construct
  source 1..80: mol_type = other DNA
tccagagggctaagggtgagaaattttgatttataaaacactggtacccatgtcctgtttggatctgagctcttttcctt

SEQ ID NO: 40001 - DNA, 80 bp, synthetic construct
  source 1..80: mol_type = other DNA
ataactgaaataaaaaatcatgttatcaagtgttagaatgagtgatttggcctgttcccccagtttgccacagcctgctc

SEQ ID NO: 40002 - DNA, 80 bp, synthetic construct; identical to SEQ ID NO: 10866
  source 1..80: mol_type = other DNA

SEQ ID NO: 40003 - DNA, 80 bp, synthetic construct
  source 1..80: mol_type = other DNA
ggccaagtgaaatacagtaatgcagatggagaagattacatctcttcctttacagactggcaaagttcttgagtgaaaaa

SEQ ID NO: 40004 - DNA, 80 bp, synthetic construct
  source 1..80: mol_type = other DNA
aactgtatagaagagggagatgaacttcccatgagcatgggcataagaactgttggactggatgtagacagctgtgatgg

SEQ ID NO: 40005 - DNA, 80 bp, synthetic construct
  source 1..80: mol_type = other DNA
aaagagctgaacctcattatcatggatgtccacacatgcaagcttaatcatggagggtacctcacgaagaaatgttggag

SEQ ID NO: 40006 - DNA, 80 bp, synthetic construct; identical to SEQ ID NO: 10867
  source 1..80: mol_type = other DNA

SEQ ID NO: 40007 - DNA, 80 bp, synthetic construct
  source 1..80: mol_type = other DNA
agaggtgagtaagaaaaaatacatgggtgtcttgagtttagggtctacagagcagatcagaataattactgtatttccca

SEQ ID NO: 40008 - DNA, 80 bp, synthetic construct
  source 1..80: mol_type = other DNA
ccctgttcagaactaggagaaacacattacaagaattcagggaggataatgtgttggccattgggcaaaatatcaatctt

SEQ ID NO: 40009 - DNA, 80 bp, synthetic construct
  source 1..80: mol_type = other DNA
gagatacatgaaggctattgtggaagcagtattttcctgactgataactattagaagctgagataaagtgtatcacagaa

SEQ ID NO: 40010 - DNA, 80 bp, synthetic construct
  source 1..80: mol_type = other DNA
ctgagttgggcattttttaaggtttttctttatatgaatggtagctcgcttctggagattatagaggttatttttcctat

SEQ ID NO: 40011 - DNA, 80 bp, synthetic construct; identical to SEQ ID NO: 10868
  source 1..80: mol_type = other DNA

SEQ ID NO: 40012 - DNA, 80 bp, synthetic construct
  source 1..80: mol_type = other DNA
tggaaagagtggtgatcagggtaagaagggctctttagtgagactaagaggcatcaaaccaacatagaatgtttatcttc

SEQ ID NO: 40013 - DNA, 80 bp, synthetic construct
  source 1..80: mol_type = other DNA
tcatatataggacaaataggcactttccacgtggcatcaggaaaaattactccagcctaaaattcttcccctacaataac

SEQ ID NO: 40014 - DNA, 80 bp, synthetic construct
  source 1..80: mol_type = other DNA
agcagtactcaatggaaatgaaaagaagtcacaggaaaagtcagaggaggcatgggtaccccataaaaggatgaagacac

SEQ ID NO: 40015 - DNA, 80 bp, synthetic construct
  source 1..80: mol_type = other DNA
acacatacatacccataaaaacatacatacatgcgtaagtcttccgattctctcatttatgttaattcccacccatttag

SEQ ID NO: 40016 - DNA, 80 bp, synthetic construct; identical to SEQ ID NO: 10869
  source 1..80: mol_type = other DNA

SEQ ID NO: 40017 - DNA, 80 bp, synthetic construct
  source 1..80: mol_type = other DNA
taacatgggcactatataatctcccctcacccagatgaacatcactttaaaccagttcgccattaaaagttaagaatcat

SEQ ID NO: 40018 - DNA, 80 bp, synthetic construct
  source 1..80: mol_type = other DNA
gtgtctaaggctcatgtattggttgtcggggctgttatttgagattggagatcactgaagatcagcaaatcaggagacac

SEQ ID NO: 40019 - DNA, 80 bp, synthetic construct
  source 1..80: mol_type = other DNA
tctaggcaaaaccacaaagatatttaacttctgccctcatagcctcccaacgttcaattttctcatttctgctgttaagt

SEQ ID NO: 40020 - DNA, 80 bp, synthetic construct; identical to SEQ ID NO: 10870
  source 1..80: mol_type = other DNA

SEQ ID NO: 40021 - DNA, 80 bp, synthetic construct
  source 1..80: mol_type = other DNA
ccctgacttccaagacaaaacagagggcccagggggaaattccattaacttcctgtctgtcacctataaatgtatataca

SEQ ID NO: 40022 - DNA, 80 bp, synthetic construct
  source 1..80: mol_type = other DNA
acaagcaggtgatatgaatgactgagtggataaggtataagaaaaacaattgtagaaatgcaatgataagtgtcaacaaa

SEQ ID NO: 40023 - DNA, 80 bp, synthetic construct
  source 1..80: mol_type = other DNA
atttttatgaaagctttcatttaaaaaaatagtttagttagtgggtgcagcgcaccagcatggcacatgtatacatatgt

SEQ ID NO: 40024 - DNA, 80 bp, synthetic construct; identical to SEQ ID NO: 10871
  source 1..80: mol_type = other DNA

SEQ ID NO: 40025 - DNA, 80 bp, synthetic construct
  source 1..80: mol_type = other DNA
taaatatgccacaactattttatcctttgtagtactgataggctagacatttgggtgcttatgatttttgtcttttgtga

SEQ ID NO: 40026 - DNA, 80 bp, synthetic construct
  source 1..80: mol_type = other DNA
ataccaccaattctggaagttggttgcacaaacttaaactccacagtatggtgagaattacagttgctccaaatctatac

SEQ ID NO: 40027 - DNA, 80 bp, synthetic construct
  source 1..80: mol_type = other DNA
tccttgactttttccaaattcatttgtaggaaatttttatatatgccagaggtttaaaaaatagaaggcaagtttcaaat

SEQ ID NO: 40028 - DNA, 80 bp, synthetic construct; identical to SEQ ID NO: 10872
  source 1..80: mol_type = other DNA

SEQ ID NO: 40029 - DNA, 80 bp, synthetic construct
  source 1..80: mol_type = other DNA
gacaccttctatttccatttccattcaaactactttgttgtagagactttagccagtataataggataagacaaggaaca

SEQ ID NO: 40030 - DNA, 80 bp, synthetic construct
  source 1..80: mol_type = other DNA
agactatttgtaaaattttctaagattattctaaaatgtatatagaataccaagttgtatatagaatatcaagtatcatt

SEQ ID NO: 40031 - DNA, 80 bp, synthetic construct
  source 1..80: mol_type = other DNA
acttgatttacattttaggagcatgtaaaaaatcagtcaatacatgtggggtctgtgttggttcagtcatgaaaggtgga

SEQ ID NO: 40032 - DNA, 80 bp, synthetic construct; identical to SEQ ID NO: 10873
  source 1..80: mol_type = other DNA

SEQ ID NO: 40033 - DNA, 80 bp, synthetic construct
  source 1..80: mol_type = other DNA
caggcataacttaccagcattattaactttaaaacagagatcttaattaagactgacaaaacagattccttatagcaata

SEQ ID NO: 40034 - DNA, 80 bp, synthetic construct
  source 1..80: mol_type = other DNA
agggttcatcgtcttgcactaagaagattaaggacacggacacatgtgggtgtgttaaggagcagagagtttaacaggca

SEQ ID NO: 40035 - DNA, 80 bp, synthetic construct
  source 1..80: mol_type = other DNA
taccaggtgtgacatttacatagcccgcagggaagtctggttgacccaccttaatcttatggccagcaccatcttgtctg

SEQ ID NO: 40036 - DNA, 80 bp, synthetic construct; identical to SEQ ID NO: 10874
  source 1..80: mol_type = other DNA

SEQ ID NO: 40037 - DNA, 80 bp, synthetic construct
  source 1..80: mol_type = other DNA
tttaactaatagtctgacactttttaagatctcataagagacatttactacttaattttttctgaagcctgccacctgaa

SEQ ID NO: 40038 - DNA, 80 bp, synthetic construct
  source 1..80: mol_type = other DNA
ggtttgttgtacagattatttcatcacccatgtattatgctcagtatccaatagttatctttttcccctcctaccccttc

SEQ ID NO: 40039 - DNA, 80 bp, synthetic construct
  source 1..80: mol_type = other DNA
gctcccacaaaatacatgatcttttttttatagctgtatataccacatttttaaaatctaatttgtcattggtaggcatt

SEQ ID NO: 40040 - DNA, 80 bp, synthetic construct; identical to SEQ ID NO: 10875
  source 1..80: mol_type = other DNA

SEQ ID NO: 40041 - DNA, 80 bp, synthetic construct
  source 1..80: mol_type = other DNA
aatggtagttttgcttttagctctttgaggaatagccatactgtttccacattggcttaaccaatttatactcccatcaa

SEQ ID NO: 40042 - DNA, 80 bp, synthetic construct
  source 1..80: mol_type = other DNA
atgcttactggccacatgtatgtgttctttggaaaagtgtctgttcatgtcctttgcccactttttaatggggttgtttg

SEQ ID NO: 40043 - DNA, 80 bp, synthetic construct
  source 1..80: mol_type = other DNA
attctgttccattggtctatgtacctgtttttgtaccagtacaatgctgtttggttaccatagttctgtagtgtagttta

SEQ ID NO: 40044 - DNA, 80 bp, synthetic construct
  source 1..80: mol_type = other DNA
ttgggcagtatggccattttaataatattgattcttcctatccacgagcatgggatgttattccatttgtttgtgtcttc

SEQ ID NO: 40045 - DNA, 80 bp, synthetic construct; identical to SEQ ID NO: 10876
  source 1..80: mol_type = other DNA

SEQ ID NO: 40046 - DNA, 80 bp, synthetic construct
  source 1..80: mol_type = other DNA
gtgtgtatatacacactttatatatatatactttatatatgtatatactttatatatgtatatactttatatatacttta

SEQ ID NO: 40047 - DNA, 80 bp, synthetic construct
  source 1..80: mol_type = other DNA
atcaacctgtcatctacattaggtatttctcctaatgctatccctcccctggccccccaccccctaaaagaccacagtgt

SEQ ID NO: 40048 - DNA, 80 bp, synthetic construct
  source 1..80: mol_type = other DNA
ttttatggctgcataatattccatgggttatatgtgccacattttctttatccagactatcattgatgggcatttgggtt

SEQ ID NO: 40049 - DNA, 80 bp, synthetic construct; identical to SEQ ID NO: 10877
  source 1..80: mol_type = other DNA

SEQ ID NO: 40050 - DNA, 80 bp, synthetic construct
  source 1..80: mol_type = other DNA
tttgcttcacccactttttgatggggttgtttgttttcttcttgtaaatttgtttaagttccttgtagattctggatatt

SEQ ID NO: 40051 - DNA, 80 bp, synthetic construct
  source 1..80: mol_type = other DNA
catgaagtctttgcccatcctgaatggtattgcctaggttttcttctagggtttttatgtttttaggtcttacatttaag

SEQ ID NO: 40052 - DNA, 80 bp, synthetic construct
  source 1..80: mol_type = other DNA
tagtagacatgtggcattatttctgaggcctctattttgttccattggtctatatatctgttttggtaccagtaccatgc

SEQ ID NO: 40053 - DNA, 80 bp, synthetic construct
  source 1..80: mol_type = other DNA
tcagtggtagcttgatggggatagcattgaatctataaattactttgggcagtatggcctttttcactatattgattctt

SEQ ID NO: 40054 - DNA, 80 bp, synthetic construct; identical to SEQ ID NO: 10878
  source 1..80: mol_type = other DNA

SEQ ID NO: 40055 - DNA, 80 bp, synthetic construct
  source 1..80: mol_type = other DNA
gaacttccaatactgtgttgaataggagttgtgagagagggcatccttgtctcgtgctggttttcaaagggaatgcttcc

SEQ ID NO: 40056 - DNA, 80 bp, synthetic construct
  source 1..80: mol_type = other DNA
tggggtttttatcattggttctgtttatgtgatggattatgtttattgatttgtgtatgttgaaccacccttgcatctca

SEQ ID NO: 40057 - DNA, 80 bp, synthetic construct; identical to SEQ ID NO: 10879
  source 1..80: mol_type = other DNA

SEQ ID NO: 40058 - DNA, 80 bp, synthetic construct
  source 1..80: mol_type = other DNA
gtccaggaatttatccctttcttctagattttctaatttatttgcatagaggtgtttacagtattctctggtggtaattt

SEQ ID NO: 40059 - DNA, 80 bp, synthetic construct
  source 1..80: mol_type = other DNA
tttcatgtctctatctccttcagttctgctctgttcttagttatttcttatcttctgctagcttttgactttgtttactc

SEQ ID NO: 40060 - DNA, 80 bp, synthetic construct
  source 1..80: mol_type = other DNA
aagaatctatttatttctgccataattttgttatttacccagtagtcattcaggagcacattgttcagtttccatatagt

SEQ ID NO: 40061 - DNA, 80 bp, synthetic construct; identical to SEQ ID NO: 10880
  source 1..80: mol_type = other DNA

SEQ ID NO: 40062 - DNA, 80 bp, synthetic construct
  source 1..80: mol_type = other DNA
atatttaggatagttgcattgatccctttaccattatgtattgcccttctttgtcttctttgatctttgttggtttaaag

SEQ ID NO: 40063 - DNA, 80 bp, synthetic construct; identical to SEQ ID NO: 10881
  source 1..80: mol_type = other DNA

SEQ ID NO: 40064 - DNA, 80 bp, synthetic construct
  source 1..80: mol_type = other DNA
tgggggtgacaaaatctctcattatttgctgtctgtaaagagttttatttctcctttgcttatgaagcttagtttggctg

SEQ ID NO: 40065 - DNA, 80 bp, synthetic construct
  source 1..80: mol_type = other DNA
tttttccttcatttcaaccttggtgaatctgacaattacatgtttttgggttgctcttcttgaggagtatctttgtggtg

SEQ ID NO: 40066 - DNA, 80 bp, synthetic construct
  source 1..80: mol_type = other DNA
tatttcttggatgctttgttcattccttttcattctcttttctctaatcttggcttcatgctttatttcattaatttgat

SEQ ID NO: 40067 - DNA, 80 bp, synthetic construct
  source 1..80: mol_type = other DNA
aggtttttagcttccttgcattgggttagaacatgctcttttagctcagaggagtttgttattacccaccttctgaagcc

SEQ ID NO: 40068 - DNA, 80 bp, synthetic construct; identical to SEQ ID NO: 10882
  source 1..80: mol_type = other DNA

SEQ ID NO: 40069 - DNA, 80 bp, synthetic construct
  source 1..80: mol_type = other DNA
cacctgctggatgccagctggagctctcctgtatgaggtgtctgtcgatccctgctgggaggtgtttttcagtcaggagg

SEQ ID NO: 40070 - DNA, 80 bp, synthetic construct
  source 1..80: mol_type = other DNA
tcacatgatcacagctgtactgttaatataatatgtagctgaatgagaaaatagttaattgaaaaagtgattatgatgtg

SEQ ID NO: 40071 - DNA, 80 bp, synthetic construct
  source 1..80: mol_type = other DNA
tagaagaaagacttagcatgttcccgacacaaataaatgctatatttcttttttcccccactaaatattatgtttaatgt

SEQ ID NO: 40072 - DNA, 80 bp, synthetic construct; identical to SEQ ID NO: 10883
  source 1..80: mol_type = other DNA

SEQ ID NO: 40073 - DNA, 80 bp, synthetic construct
  source 1..80: mol_type = other DNA
gagttctgaaattgaatcagtaatttaaaaacttacaaatcagaaaaagccctgtaccaggcaaattcacagctgaattc

SEQ ID NO: 40074 - DNA, 80 bp, synthetic construct
  source 1..80: mol_type = other DNA
tgaatccgaaaaaggagtcagcaaagggagatggggtggggcagttttctaggatttgtgtaggtagtggaaaattactg

SEQ ID NO: 40075 - DNA, 80 bp, synthetic construct
  source 1..80: mol_type = other DNA
caggaactggctattttcacttcttttatggttcttcagttgcttcaggccatctggatgtatatgtgcaggtcacaggg

SEQ ID NO: 40076 - DNA, 80 bp, synthetic construct; identical to SEQ ID NO: 10884
  source 1..80: mol_type = other DNA

SEQ ID NO: 40077 - DNA, 80 bp, synthetic construct
  source 1..80: mol_type = other DNA
aattagagagtgagtgcccaagggggttcagtgtaattatttgcttggttggtgagtttttgggctctatccgtgagttt

SEQ ID NO: 40078 - DNA, 80 bp, synthetic construct
  source 1..80: mol_type = other DNA
aaagattgtgatatgtctgcaatgctagcagagaagtcattagagaggctacagaaggttgtggcagaggttgaattgcc

SEQ ID NO: 40079 - DNA, 80 bp, synthetic construct
  source 1..80: mol_type = other DNA
ggcagtgtaaacaagagcagggcatttatgagtaggtgagaatggtgaattggaaaatagcagggatgaaaaagcttgtg

SEQ ID NO: 40080 - DNA, 80 bp, synthetic construct; identical to SEQ ID NO: 10885
  source 1..80: mol_type = other DNA

SEQ ID NO: 40081 - DNA, 80 bp, synthetic construct
  source 1..80: mol_type = other DNA
aggcaagagaagattagcagcctggcgaatttcctgtctagcctgctggaggactggaagatagttgcccagagggctgg

SEQ ID NO: 40082 - DNA, 80 bp, synthetic construct
  source 1..80: mol_type = other DNA
gtgtgttttttaaagagcattagtccattttacctttcctgaagattgaggacagtaaggggtatgaagtttccactgaa

SEQ ID NO: 40083 - DNA, 80 bp, synthetic construct
  source 1..80: mol_type = other DNA
ccatccggtgaaggtgtcgatccaaaccaggagatacttaaatttacggacatggggcatatgagtaaagtctaactgcc

SEQ ID NO: 40084 - DNA, 80 bp, synthetic construct; identical to SEQ ID NO: 10886
  source 1..80: mol_type = other DNA

SEQ ID NO: 40085 - DNA, 80 bp, synthetic construct
  source 1..80: mol_type = other DNA
ggctggaatattagtggatgtggaggcatcagctatttcttttgccgtcctgttggcataggcatttccttttgcaataa

SEQ ID NO: 40086 - DNA, 80 bp, synthetic construct
  source 1..80: mol_type = other DNA
gatatagaaagcatatctggagtcagtataaatgtcaatgtgcattcctttagtgagagaatgcggtagttaaagcaatc

SEQ ID NO: 40087 - DNA, 80 bp, synthetic construct
  source 1..80: mol_type = other DNA
tcaataaaccaagtgtggtctgtgtttggaattggcagaataggaatatgaggacgggggaggatgctatgtttattagg

SEQ ID NO: 40088 - DNA, 80 bp, synthetic construct
  source 1..80: mol_type = other DNA
agttgaggggcagacaataaatgtgaaaggtatggggaggatattaatgcttgaaggttgtgagaactgtaaagggtaag

SEQ ID NO: 40089 - DNA, 80 bp, synthetic construct; identical to SEQ ID NO: 10887
  source 1..80: mol_type = other DNA

SEQ ID NO: 40090 - DNA, 80 bp, synthetic construct
  source 1..80: mol_type = other DNA
tgggattagttaagttatcctttgtgagcttgtaaagtggttttggttagaatagcaaagcctggtatccagagttggaa

SEQ ID NO: 40091 - DNA, 80 bp, synthetic construct
  source 1..80: mol_type = other DNA
gatacttggtacccctttcagtagagatgttgaagaagcaggatagtgtcctgctgggaagattagtaagaggggctgca

SEQ ID NO: 40092 - DNA, 80 bp, synthetic construct
  source 1..80: mol_type = other DNA
caagtaaaggcaaaaagaggctgggaggagggatgcaaggggatagtaaagaaagcatctttgaggtcgataacagaata

SEQ ID NO: 40093 - DNA, 80 bp, synthetic construct; identical to SEQ ID NO: 10888
  source 1..80: mol_type = other DNA

SEQ ID NO: 40094 - DNA, 80 bp, synthetic construct
  source 1..80: mol_type = other DNA
gtggcaatgaggtgtggctgtagcccaggaatagtcagagaagcagatagtttagttaaaatgtcttgacctaataaggg

SEQ ID NO: 40095 - DNA, 80 bp, synthetic construct
  source 1..80: mol_type = other DNA
gagtgggtagcctccgtatcaattaagaagggacttacctccactgtaagttacctgaagtgtctgtgatggtccaggag

SEQ ID NO: 40096 - DNA, 80 bp, synthetic construct
  source 1..80: mol_type = other DNA
gacacggcttaggaggaatcctgggctgcgggcattccttggcccagtggccagatttccggcacttgaagcaagatcct

SEQ ID NO: 40097 - DNA, 80 bp, synthetic construct
  source 1..80: mol_type = other DNA
ccttgaaggcaaggttaattaagtcctgttgtggggtttgagggcggaatctaatttttggagctttttctaatgttggg

SEQ ID NO: 40098 - DNA, 80 bp, synthetic construct; identical to SEQ ID NO: 10889
  source 1..80: mol_type = other DNA

SEQ ID NO: 40099 - DNA, 80 bp, synthetic construct
  source 1..80: mol_type = other DNA
tcagatggatctgtagaaaaagaggattcaaaggactcagagcttggggtggagactgaaggaacacataggagagaaag

SEQ ID NO: 40100 - DNA, 80 bp, synthetic construct
  source 1..80: mol_type = other DNA
cacttgaaactattgttgagtgtgtattggggccaagtggtattacagaagaaaataagatgtttaggttttaggtcagg

SEQ ID NO: 40101 - DNA, 80 bp, synthetic construct
  source 1..80: mol_type = other DNA
gagcagccaaagcaggtgtccccacaactgacttgtcaccaagggaatgtgggtgaatgaccaaggcaggcatcctcatg

SEQ ID NO: 40102 - DNA, 80 bp, synthetic construct; identical to SEQ ID NO: 10890
  source 1..80: mol_type = other DNA

SEQ ID NO: 40103 - DNA, 80 bp, synthetic construct
  source 1..80: mol_type = other DNA
tggtgagatgttccttgggctggtctgaggacctgaggttgtaggtggatttcctcacggagtgagggtgaggacagggg

SEQ ID NO: 40104 - DNA, 80 bp, synthetic construct
  source 1..80: mol_type = other DNA
gataggggtggggcagttttataggatttgggtaggtagtggaaaattatagttaaagggggttgttctcttgcatgcag

SEQ ID NO: 40105 - DNA, 80 bp, synthetic construct
  source 1..80: mol_type = other DNA
gtagttcttcagttgcttcaggccatctggatgtatatgtgcaggtcacaggggatatgatggcttagcttggtctcaga

SEQ ID NO: 40106 - DNA, 80 bp, synthetic construct; identical to SEQ ID NO: 10891
  source 1..80: mol_type = other DNA

SEQ ID NO: 40107 - DNA, 80 bp, synthetic construct
  source 1..80: mol_type = other DNA
acctgcagccaacatcatactacatgggcaagagctggaattattccccttgagaaccagaacaagacaaggatgtcccc

SEQ ID NO: 40108 - DNA, 80 bp, synthetic construct
  source 1..80: mol_type = other DNA
ctccactctctgccaaaaggctcctagatctgataaacgatttcagaaaagtttcagaatacacaatgaatgtgcaacta

SEQ ID NO: 40109 - DNA, 80 bp, synthetic construct
  source 1..80: mol_type = other DNA
agagataacataaacatatggaacagcttttcatgctcatggataggaagaatcagtattgttaaatgggcatactgccc

SEQ ID NO: 40110 - DNA, 80 bp, synthetic construct; identical to SEQ ID NO: 10892
  source 1..80: mol_type = other DNA

SEQ ID NO: 40111 - DNA, 80 bp, synthetic construct
  source 1..80: mol_type = other DNA
ttcctgaggctgtcacaagtgcttcctcaaccttggcaaaataaactttctaaattaatggagacctgtctcagactttc

SEQ ID NO: 40112 - DNA, 80 bp, synthetic construct
  source 1..80: mol_type = other DNA
acacacacacacacacaaaacaaagctggaggcatcacattacctgacttcaagctatactgcaaggctaccataattaa

SEQ ID NO: 40113 - DNA, 80 bp, synthetic construct
  source 1..80: mol_type = other DNA
atggggaatgactctgtattcagtaaatggcgctgaaaaaactggacggccataatcagaatatcgaagctggacaacta

SEQ ID NO: 40114 - DNA, 80 bp, synthetic construct; identical to SEQ ID NO: 10893
  source 1..80: mol_type = other DNA

SEQ ID NO: 40115 - DNA, 80 bp, synthetic construct
  source 1..80: mol_type = other DNA
ttctcaaaaaacttaaaacataactactatttgactcagcaatcccattacttatatatccaaaggaatataaatcattt

SEQ ID NO: 40116 - DNA, 80 bp, synthetic construct
  source 1..80: mol_type = other DNA
cgaggcgggcagatcaggaggtcaagagatcgagaccatcctgggcaacataatgaaacccaactactaaaaattaaaaa

SEQ ID NO: 40117 - DNA, 80 bp, synthetic construct
  source 1..80: mol_type = other DNA
taaatgtggttcatttttgagggatagttttcctggatataagactcttggttcaacgttcttttagaactttggctgtc

SEQ ID NO: 40118 - DNA, 80 bp, synthetic construct; identical to SEQ ID NO: 10894
  source 1..80: mol_type = other DNA

SEQ ID NO: 40119 - DNA, 80 bp, synthetic construct
  source 1..80: mol_type = other DNA
tttttcttgttgctcagattgcataatctctatcagcctatcttcaagttcactgattctttcttccatcagttcaaatc

SEQ ID NO: 40120 - DNA, 80 bp, synthetic construct
  source 1..80: mol_type = other DNA
ccttgaacatatttatattggttgttttgatctatgataaatctgacatttggggcctctcactggcagtttctattgtc

SEQ ID NO: 40121 - DNA, 80 bp, synthetic construct
  source 1..80: mol_type = other DNA
ttttttgtttgttagtgacttggccaggctattttagtaaatttcctccacagtgtgaagcctctggtgttacccttcag

SEQ ID NO: 40122 - DNA, 80 bp, synthetic construct; identical to SEQ ID NO: 10895
  source 1..80: mol_type = other DNA

SEQ ID NO: 40123 - DNA, 80 bp, synthetic construct
  source 1..80: mol_type = other DNA
ggcttgaactttcaacactctgcttcaaatacagtcagtttctttggacagagcttttgaatgttctgttcttcccctgt

SEQ ID NO: 40124 - DNA, 80 bp, synthetic construct
  source 1..80: mol_type = other DNA
ggcatagggtatccaccttatgtatggagtgcaggaaggtagccccagtcttttgtttagatctctgggaatgtagcctt

SEQ ID NO: 40125 - DNA, 80 bp, synthetic construct
  source 1..80: mol_type = other DNA
aggctgtggctcaagtgccatagactcttgctcttcttagtgagatttagtagagtatcttgaataagtattacttcatt

SEQ ID NO: 40126 - DNA, 80 bp, synthetic construct
  source 1..80: mol_type = other DNA
aaaaaaattgtatcagtcatggttgttttacagggcaatgagccacaccaccattatggaagtgccattataatttatga

SEQ ID NO: 40127 - DNA, 80 bp, synthetic construct; identical to SEQ ID NO: 10896
  source 1..80: mol_type = other DNA

SEQ ID NO: 40128 - DNA, 80 bp, synthetic construct
  source 1..80: mol_type = other DNA
aaagttgaggcatttttttgtcctgaaatggcttatatttaagtgactgttaggaaccaaccatgttgcaaatgtttaga

SEQ ID NO: 40129 - DNA, 80 bp, synthetic construct
  source 1..80: mol_type = other DNA
atttctaggagtttattctgcatgcatcctaaaatatttgtgaaacattactttcatgtaaaaaattggaaacagcacac

SEQ ID NO: 40130 - DNA, 80 bp, synthetic construct
  source 1..80: mol_type = other DNA
cataatttgtcttactgcgacattattggtttttggagggtgatgtgcctcatgttagaagagttacatatttaattttc

SEQ ID NO: 40131 - DNA, 80 bp, synthetic construct; identical to SEQ ID NO: 10897
  source 1..80: mol_type = other DNA

SEQ ID NO: 40132 - DNA, 80 bp, synthetic construct
  source 1..80: mol_type = other DNA
cattttggtttagatccttgtcttagtcaaattaaaaaagaaaacaaaacctattagagtctactagatcaatgcactct

SEQ ID NO: 40133 - DNA, 80 bp, synthetic construct
  source 1..80: mol_type = other DNA
cttcttgaaagcagacaattcactataaattactttcaagggctttggtttcctatatttttactgcatttctcctcaac

SEQ ID NO: 40134 - DNA, 80 bp, synthetic construct
  source 1..80: mol_type = other DNA
cgctggattgtgcttttatctgtagttattcatgtttcaggcagttcattcctactttctgagaaattgatgagttgttg

SEQ ID NO: 40135 - DNA, 80 bp, synthetic construct; identical to SEQ ID NO: 10898
  source 1..80: mol_type = other DNA

SEQ ID NO: 40136 - DNA, 80 bp, synthetic construct
  source 1..80: mol_type = other DNA
gttcagaatgaaagtgaactagctaaaactcaacccaatgtctttcattttcagacactaggaattcgtcaaagcaacca

SEQ ID NO: 40137 - DNA, 80 bp, synthetic construct
  source 1..80: mol_type = other DNA
ctcagatgagaaaatctgaatctgcaaactggcttaatatggaaactgggtaaaaagccatgaatccctattatattgtt

SEQ ID NO: 40138 - DNA, 80 bp, synthetic construct
  source 1..80: mol_type = other DNA
taggaagtctgacattaaggttctggcagattggtgtctggtgaaggcccctttatggttcacagatggtgtcttctcac

SEQ ID NO: 40139 - DNA, 80 bp, synthetic construct; identical to SEQ ID NO: 10899
  source 1..80: mol_type = other DNA

SEQ ID NO: 40140 - DNA, 80 bp, synthetic construct
  source 1..80: mol_type = other DNA
tcagctctgcaccaaagaattcagatgccacagagcattttaagaccactgatgccctcctcactgatccatttcttaat

SEQ ID NO: 40141 - DNA, 80 bp, synthetic construct
  source 1..80: mol_type = other DNA
ggctatctctgagttcaagcttcagtgagctaatgtgaaagaagatcaataacactttcaggagtttgagccaatgcttg

SEQ ID NO: 40142 - DNA, 80 bp, synthetic construct
  source 1..80: mol_type = other DNA
tggagcagtatttgtgtttaaccgtatctctttgttgttataattttccctgatgattggtgaagttgggcacattttca

SEQ ID NO: 40143 - DNA, 80 bp, synthetic construct; identical to SEQ ID NO: 10900
  source 1..80: mol_type = other DNA

SEQ ID NO: 40144 - DNA, 80 bp, synthetic construct
  source 1..80: mol_type = other DNA
atccatatccaatctagtcctacattttattttagtagcaaaattttgagaaagtccagattcctgcagcaaatagctac

SEQ ID NO: 40145 - DNA, 80 bp, synthetic construct
  source 1..80: mol_type = other DNA
tatagccaaaactcatagttaacacatgaattaatgaatttttgttatagtataatagtttaattatatttaaaattatt

SEQ ID NO: 40146 - DNA, 80 bp, synthetic construct
  source 1..80: mol_type = other DNA
ttaaagaatgaacccttgacaatgagggacattgatactaaaatacaagcaaaatttttaggtattttctttttcagatg

SEQ ID NO: 40147 - DNA, 80 bp, synthetic construct; identical to SEQ ID NO: 10901
  source 1..80: mol_type = other DNA

SEQ ID NO: 40148 - DNA, 80 bp, synthetic construct
  source 1..80: mol_type = other DNA
tgtctccagaacctttttcttttccaataagccttttcatggcccacttgaactccttattccttagtgggatgggttca

SEQ ID NO: 40149 - DNA, 80 bp, synthetic construct
  source 1..80: mol_type = other DNA
tgcagacttgatcttgagtacagccatagcaatgaagccatatgacacaagaatgagaagaagtgatgcaaggaaaatga

SEQ ID NO: 40150 - DNA, 80 bp, synthetic construct
  source 1..80: mol_type = other DNA
cagcctaatggctaaggtcagcacgaccataaaccacaaataacatcccaaccagaaaccttccaaactcctccccgacc

SEQ ID NO: 40151 - DNA, 80 bp, synthetic construct; identical to SEQ ID NO: 10902
  source 1..80: mol_type = other DNA

SEQ ID NO: 40152 - DNA, 80 bp, synthetic construct
  source 1..80: mol_type = other DNA
catgcaattttgaccattgcagatatttcacaaaaatagtgatccaggtggtggtctccgcatcgaggaagactcacagg

SEQ ID NO: 40153 - DNA, 80 bp, synthetic construct
  source 1..80: mol_type = other DNA
gtgcatagcgtcacattagtgaaaagttgaaaagcacagccaccaaaagtgattttcttgtctttaccccaggcattgac

SEQ ID NO: 40154 - DNA, 80 bp, synthetic construct
  source 1..80: mol_type = other DNA
ccagagatgatcatctccagctgaggcttcccagggaacccaaggagcataagccaaccaaagtaactatcattgatcat

SEQ ID NO: 40155 - DNA, 80 bp, synthetic construct; identical to SEQ ID NO: 10903
  source 1..80: mol_type = other DNA

SEQ ID NO: 40156 - DNA, 80 bp, synthetic construct
  source 1..80: mol_type = other DNA
attacgaaggggttagaaatctgttacaagttatcacctcctttagccaagggttcatagagaatgcaggttttatacct

SEQ ID NO: 40157 - DNA, 80 bp, synthetic construct
  source 1..80: mol_type = other DNA
aaacttgtatttccaaatattatttgcctttcctttccaactcccttgagacagccaggtgggaggtgttccctggagaa

SEQ ID NO: 40158 - DNA, 80 bp, synthetic construct
  source 1..80: mol_type = other DNA
tccccctttacacccaataaaatcctgtcttactcaccatttaagttgtgagtctgaattttcatggccatgggacaaag

SEQ ID NO: 40159 - DNA, 80 bp, synthetic construct
  source 1..80: mol_type = other DNA
ttacatggcatcaggcaagaagagtgtgcagggaaaattccctttataaaaccatcagatcttgtgagacttatttacta

SEQ ID NO: 40160 - DNA, 80 bp, synthetic construct; identical to SEQ ID NO: 10904
  source 1..80: mol_type = other DNA

SEQ ID NO: 40161 - DNA, 80 bp, synthetic construct
  source 1..80: mol_type = other DNA
tattccagatagattgtagatttagatgtgaaagggaaaaagtatcttctagaatagggtacggaaacttttttggaaag

SEQ ID NO: 40162 - DNA, 80 bp, synthetic construct
  source 1..80: mol_type = other DNA
tcctataaaactttataaaacagacacaagtggcccactggctacagtttcccaactcctgttttagaaatcaatatgaa

SEQ ID NO: 40163 - DNA, 80 bp, synthetic construct
  source 1..80: mol_type = other DNA
ttctgttcatcaggtgacaccattaggagtcaaaagacaaatcacagaaaaggaagagatatttttagtgcttgtgcttg

SEQ ID NO: 40164 - DNA, 80 bp, synthetic construct
  source 1..80: mol_type = other DNA
aatctcaaagggtaaacataagtggccaatgcatttgtgaaatggatggtgctcgtttgcttcaataatcataaaagcaa

SEQ ID NO: 40165 - DNA, 80 bp, synthetic construct; identical to SEQ ID NO: 10905
  source 1..80: mol_type = other DNA

SEQ ID NO: 40166 - DNA, 80 bp, synthetic construct
  source 1..80: mol_type = other DNA
aatgcttaatgcatagatgaatcttaaaaatataatgttatttgaaagaattcaagtacaacagaatccatgtatataaa

SEQ ID NO: 40167 - DNA, 80 bp, synthetic construct
  source 1..80: mol_type = other DNA
agtacatttttctaaaacttgacttgggtgggcttttgggtgttccatcacagtgtattgtacaataattctttaaggtg

SEQ ID NO: 40168 - DNA, 80 bp, synthetic construct
  source 1..80: mol_type = other DNA
ctaggtgtgtctctgagatttaggacaacttctgaaagtactgtcattaacggagaagctggaataaaaagaaaagtcac

SEQ ID NO: 40169 - DNA, 80 bp, synthetic construct; identical to SEQ ID NO: 10906
  source 1..80: mol_type = other DNA

SEQ ID NO: 40170 - DNA, 80 bp, synthetic construct
  source 1..80: mol_type = other DNA
gtaacatagctctgaactatcccatgaatcaacatttatcttcaagacaaaaatcaaatttatcttcagtcaaaatatgg

SEQ ID NO: 40171 - DNA, 80 bp, synthetic construct
  source 1..80: mol_type = other DNA
acatggcaatacctccatgctcatccccaaaataagtagtaaaaacttggaaggccaagtgggaaagaaaaaagcattat

SEQ ID NO: 40172 - DNA, 80 bp, synthetic construct
  source 1..80: mol_type = other DNA
tcttcttggttaacgactagctttgctgctgtcatcttcaggctggagatttgcctgtgtaaaaatattcctgggactgg

SEQ ID NO: 40173 - DNA, 80 bp, synthetic construct; identical to SEQ ID NO: 10907
  source 1..80: mol_type = other DNA

SEQ ID NO: 40174 - DNA, 80 bp, synthetic construct
  source 1..80: mol_type = other DNA
tagaaattgctgggaggaagaatcaatgtcctcttttttccatgcaatctttttcttttccagttagcctcttcatggcc

SEQ ID NO: 40175 - DNA, 80 bp, synthetic construct
  source 1..80: mol_type = other DNA
tacatgtatgtaactgtcccacagaagatggataccacaacgagatgggaggaacaggtcccaaatgctttttgtcttcc

SEQ ID NO: 40176 - DNA, 80 bp, synthetic construct
  source 1..80: mol_type = other DNA
catttcacacacacaaaaaagtggtctaggtggtggttcctacatcgaggaagactcgtggcatagggggaaggtatgat

SEQ ID NO: 40177 - DNA, 80 bp, synthetic construct; identical to SEQ ID NO: 10908
  source 1..80: mol_type = other DNA

SEQ ID NO: 40178 - DNA, 80 bp, synthetic construct
  source 1..80: mol_type = other DNA
agctgaggctgccctgtgaatccaaggagtataaaaccactgaagtggctatcattgatcattctgttttttcttaaggg

SEQ ID NO: 40179 - DNA, 80 bp, synthetic construct
  source 1..80: mol_type = other DNA
tattctggagctccaagtactcatgtgtcagaggagataatattatcctacataacttggatgctttttcttttttctct

SEQ ID NO: 40180 - DNA, 80 bp, synthetic construct
  source 1..80: mol_type = other DNA
ttctgtacaatgctaatctctttgttgagatctcccctttgttcataaatcttgtctgcctttaccagcgaaatgttaaa

SEQ ID NO: 40181 - DNA, 80 bp, synthetic construct
  source 1..80: mol_type = other DNA
aaccatgtctggatatacttcacttgaatatttcctctttttagcttcaaatgactcctgtttctttctttttctttttt

SEQ ID NO: 40182 - DNA, 80 bp, synthetic construct; identical to SEQ ID NO: 10909
  source 1..80: mol_type = other DNA

SEQ ID NO: 40183 - DNA, 80 bp, synthetic construct
  source 1..80: mol_type = other DNA
ttcacttgctgttccctcaagtggtagggaaagagtgtgctcttccttttatggtccctcttccttttatgaggtcacta

SEQ ID NO: 40184 - DNA, 80 bp, synthetic construct
  source 1..80: mol_type = other DNA
acagacattgaatccatagcattctgccttttgtctcccaaattaatgttattcttacacacacaaaaaaattgatctta

SEQ ID NO: 40185 - DNA, 80 bp, synthetic construct
  source 1..80: mol_type = other DNA
aatcagatataggtgaggctcaagatacgattaatcctgaggaaaaattcatccccagttataagtctgtgaaaccagat

SEQ ID NO: 40186 - DNA, 80 bp, synthetic construct
  source 1..80: mol_type = other DNA
ataccattagatcttaaagctcaaggataatctttggtttcataatttgccttctgggtctactgggatgacagtcccac

SEQ ID NO: 40187 - DNA, 80 bp, synthetic construct; identical to SEQ ID NO: 10910
  source 1..80: mol_type = other DNA

SEQ ID NO: 40188 - DNA, 80 bp, synthetic construct
  source 1..80: mol_type = other DNA
taatctctttatcgagtgagggtccagccacacctttggtggttttttttttttctcagcatgctttctcatcttttgca

SEQ ID NO: 40189 - DNA, 80 bp, synthetic construct
  source 1..80: mol_type = other DNA
gtcagctatgttcactgttaatttcatcacttactagttttacattccacaaaacaataaaacatgaacataattcagcc

SEQ ID NO: 40190 - DNA, 80 bp, synthetic construct
  source 1..80: mol_type = other DNA
ttttctccagcagtcttatattctgtataagccctaaacagaatagctattattgtgcatatttatagcatgcatcccca

SEQ ID NO: 40191 - DNA, 80 bp, synthetic construct; identical to SEQ ID NO: 10911
  source 1..80: mol_type = other DNA

SEQ ID NO: 40192 - DNA, 80 bp, synthetic construct
  source 1..80: mol_type = other DNA
catataaatttggagtgacacaaacagtccataacaatttgtaaaaaatacttgtagggacagaaataaatagtaagtag

SEQ ID NO: 40193 - DNA, 80 bp, synthetic construct
  source 1..80: mol_type = other DNA
actgtcttcaactattttgaaggaagggtgggcctgaattctggtgagagtccagataagtcttgatgttttatagtgag

SEQ ID NO: 40194 - DNA, 80 bp, synthetic construct
  source 1..80: mol_type = other DNA
tatgaaagcttgtagtgcattggagtgaattatcttagcttttctgctgcacttgtggcaaaatacccatccaagtttgc

SEQ ID NO: 40195 - DNA, 80 bp, synthetic construct
  source 1..80: mol_type = other DNA
caatacctttaaagagggtatcagttatcatgattaatcacaacacaactaggtaggatgtttctgtctccctggagcat

SEQ ID NO: 40196 - DNA, 80 bp, synthetic construct; identical to SEQ ID NO: 10912
  source 1..80: mol_type = other DNA

SEQ ID NO: 40197 - DNA, 80 bp, synthetic construct
  source 1..80: mol_type = other DNA
cactggggagtgccggatagtgggtgcaagacagtgggtgcagtgcaccatgtgtgagccgaagcagggcgaggcatcgc

SEQ ID NO: 40198 - DNA, 80 bp, synthetic construct
  source 1..80: mol_type = other DNA
cggagggtcctacgcccaaggagccttgctcattgctagcacagcagtctgagatcaaactacaaggcagcaacaaggct

SEQ ID NO: 40199 - DNA, 80 bp, synthetic construct
  source 1..80: mol_type = other DNA
ctgcagacttaaatgtccctgtctgacagctttgaagagagtagtggttctcccagcacgcagcttgagaactgagaacg

SEQ ID NO: 40200 - DNA, 80 bp, synthetic construct
  source 1..80: mol_type = other DNA
tgctgttctgcaaccactgctgctgatacccaggaaaacagggtctggagtggacctccagcaaactccaacagacctgc

SEQ ID NO: 40201 - DNA, 80 bp, synthetic construct; identical to SEQ ID NO: 10913
  source 1..80: mol_type = other DNA

SEQ ID NO: 40202 - DNA, 80 bp, synthetic construct
  source 1..80: mol_type = other DNA
catggcacgagaactacgtgatgaatgcacaagcctcagtagccgatgcaatcaactggaagaaagggtatcagttatgg

SEQ ID NO: 40203 - DNA, 80 bp, synthetic construct
  source 1..80: mol_type = other DNA
aaacactctgcagggtattatccaggagaacttccccaatctagcaaggcaggccaacattcaaattcaggaaatacaga

SEQ ID NO: 40204 - DNA, 80 bp, synthetic construct
  source 1..80: mol_type = other DNA
agaaactctacaagccagaagagagtgggggccaatattcaacattcttaaagtaaagaattttcaacccagaatttcat

SEQ ID NO: 40205 - DNA, 80 bp, synthetic construct; identical to SEQ ID NO: 10914
  source 1..80: mol_type = other DNA

SEQ ID NO: 40206 - DNA, 80 bp, synthetic construct
  source 1..80: mol_type = other DNA
aataaagcgatggaggaagatctaccaagcaaatgaaagacaaaaaaaggcaggggttgcaatcctagtctctgaaaaac

SEQ ID NO: 40207 - DNA, 80 bp, synthetic construct
  source 1..80: mol_type = other DNA
cttagactcccacacaatgataatgggagactttaacaccccactgtcaacattagacagatcaacgagacagaaagtta

SEQ ID NO: 40208 - DNA, 80 bp, synthetic construct
  source 1..80: mol_type = other DNA
caaatgtgaaagaacagaaattataacaaactgtctctcagaccacagtgccatcaaactacaactcaggattaagaaac

SEQ ID NO: 40209 - DNA, 80 bp, synthetic construct
  source 1..80: mol_type = other DNA
tagagggaaatttatagcactaaatgcccacaagagaaagcaggaaagatctaaaactgacaccagaacatcacaattaa

SEQ ID NO: 40210 - DNA, 80 bp, synthetic construct; identical to SEQ ID NO: 10915
  source 1..80: mol_type = other DNA

SEQ ID NO: 40211 - DNA, 80 bp, synthetic construct
  source 1..80: mol_type = other DNA
ctctgaaattgaggcaataattagcagcttaccaaccaaaaaaagtccaggaccagatggattcacagccgaattctacc

SEQ ID NO: 40212 - DNA, 80 bp, synthetic construct
  source 1..80: mol_type = other DNA
gatgaacattgatgcaaaaatcctcaataaaatactggcaaactgaatccagcagcacatcaaaaagcttatccaccatg

SEQ ID NO: 40213 - DNA, 80 bp, synthetic construct; identical to SEQ ID NO: 10916
  source 1..80: mol_type = other DNA

SEQ ID NO: 40214 - DNA, 80 bp, synthetic construct
  source 1..80: mol_type = other DNA
aaattgtccctgtttgcagatgacatgattgtatatctagaaaaccccatcgtctcagcccaaaatctccttaagctgat

SEQ ID NO: 40215 - DNA, 80 bp, synthetic construct
  source 1..80: mol_type = other DNA
gatgtgaaggacctcttcaaggagaactacaaaccactgctcaatgaaataatagaggatacaaacaaatggaagaacat

SEQ ID NO: 40216 - DNA, 80 bp, synthetic construct; identical to SEQ ID NO: 10917
  source 1..80: mol_type = other DNA

SEQ ID NO: 40217 - DNA, 80 bp, synthetic construct
  source 1..80: mol_type = other DNA
tgctgggaaaactggctagccatatgtagaaagctgaaactggatcccctccttacaccttatacaaaaattaattcaag

SEQ ID NO: 40218 - DNA, 80 bp, synthetic construct
  source 1..80: mol_type = other DNA
ctaaagaacttctgcacaacaaaagaaactaccatcagagtgaataggcaacctacagaatgggagaaaatttttgcaac

SEQ ID NO: 40219 - DNA, 80 bp, synthetic construct
  source 1..80: mol_type = other DNA
tcatcatcactggccatcagagaaatgcaaatcaaaaccacaatgagataccatctcacaccagttagaatggtgatcat

SEQ ID NO: 40220 - DNA, 80 bp, synthetic construct; identical to SEQ ID NO: 10918
  source 1..80: mol_type = other DNA

SEQ ID NO: 40221 - DNA, 80 bp, synthetic construct
  source 1..80: mol_type = other DNA
agcaaactatcacaaggacaaaaaaccaaacaccgcatgttctcactcataggtgggaattgaacaatgagaacacgtgg

SEQ ID NO: 40222 - DNA, 80 bp, synthetic construct; identical to SEQ ID NO: 10919
  source 1..80: mol_type = other DNA

SEQ ID NO: 40223 - DNA, 80 bp, synthetic construct
  source 1..80: mol_type = other DNA
atttcatttcatactctaagcacatttttttcataatggaattatgctctacatgccctcctcaggaaacttcccaggaa

SEQ ID NO: 40224 - DNA, 80 bp, synthetic construct
  source 1..80: mol_type = other DNA
aagatattctttacacatattagtgtatgtggggtagttgtgtatgtgttcatgtgttttaatagatacatttatttata

SEQ ID NO: 40225 - DNA, 80 bp, synthetic construct
  source 1..80: mol_type = other DNA
aacttcaggactggtagtcatttatgagatgtgtagctttttgctaatgcaaacaacactgcaacaaaggtctttgtaca

SEQ ID NO: 40226 - DNA, 80 bp, synthetic construct; identical to SEQ ID NO: 10920
  source 1..80: mol_type = other DNA

SEQ ID NO: 40227 - DNA, 80 bp, synthetic construct
  source 1..80: mol_type = other DNA
gtatttaagcttatctgtccaagaagacgattaagtatttatacacagtcttagcattttcatgtctattatttttccta

SEQ ID NO: 40228 - DNA, 80 bp, synthetic construct
  source 1..80: mol_type = other DNA
tggtttgtgttcctagtctacctgtctgtaatcttgagaaactttgattttctcagttttggaattgtcatcagctaaat

SEQ ID NO: 40229 - DNA, 80 bp, synthetic construct; identical to SEQ ID NO: 10921
  source 1..80: mol_type = other DNA

SEQ ID NO: 40230 - DNA, 80 bp, synthetic construct
  source 1..80: mol_type = other DNA
tattttattgaggattttcacatcgatgtcatcagggatattggcctgaaattttctttttttgttgtgtctctgccagg

SEQ ID NO: 40231 - DNA, 80 bp, synthetic construct
  source 1..80: mol_type = other DNA
ttggtaggctattaattactgcctgaatttcagaacttgttattggtctattcagggattagatttcttcctggtttagt

SEQ ID NO: 40232 - DNA, 80 bp, synthetic construct
  source 1..80: mol_type = other DNA
tctctgttttcttctttattagtccagttagtggtctattttgttaagcttttcaaaaaaccagctcctggattcattga

SEQ ID NO: 40233 - DNA, 80 bp, synthetic construct
  source 1..80: mol_type = other DNA
acctcttcatgctaaaaactctcaataaactaggtattgacggaacgtgtctcaaaataataagagctatttatgacaaa

SEQ ID NO: 40234 - DNA, 80 bp, synthetic construct; identical to SEQ ID NO: 10922
  source 1..80: mol_type = other DNA

SEQ ID NO: 40235 - DNA, 80 bp, synthetic construct
  source 1..80: mol_type = other DNA
acaacttacaaggaatgtgaaggacctcttcaaggagaactccaaaccacggctcaaggaaataagagaggacacaaaca

SEQ ID NO: 40236 - DNA, 80 bp, synthetic construct
  source 1..80: mol_type = other DNA
aaaaaagagcccgtatagccaagacaatcataagcaaaaataacaaagctggaggcatcatgttacctgacttcaaacta

SEQ ID NO: 40237 - DNA, 80 bp, synthetic construct; identical to SEQ ID NO: 10923
  source 1..80: mol_type = other DNA

SEQ ID NO: 40238 - DNA, 80 bp, synthetic construct
  source 1..80: mol_type = other DNA
ggatctaattaaactaaagagcttctgcacaacaaaagaaactatcatcagagtgaacagttaacctacggaatggaaga

SEQ ID NO: 40239 - DNA, 80 bp, synthetic construct
  source 1..80: mol_type = other DNA
aaacatatgaaatgaagctcatcatcattggtcattagagaaatgcaaatcaaaactacaatgagataccatctcatgcc

SEQ ID NO: 40240 - DNA, 80 bp, synthetic construct
  source 1..80: mol_type = other DNA
tttgacctagaaatcccattactggatatatacccaaaggattataaaacattccactataaagacacacgcacatatat

SEQ ID NO: 40241 - DNA, 80 bp, synthetic construct; identical to SEQ ID NO: 10924
  source 1..80: mol_type = other DNA

SEQ ID NO: 40242 - DNA, 80 bp, synthetic construct
  source 1..80: mol_type = other DNA
tgtatcccagaacttaaagtataatgaaaaaaatcatcttggcaaccatgagatttagtcttgcttgaattaattttctt

SEQ ID NO: 40243 - DNA, 80 bp, synthetic construct
  source 1..80: mol_type = other DNA
gcttaaacggaagtatgagagtgaggcagtaatggcatgaaagctccctgaagagctatgtattctatggatggccatca

SEQ ID NO: 40244 - DNA, 80 bp, synthetic construct
  source 1..80: mol_type = other DNA
agacaaactgatggattacaacccagcatcaggtaaatgttgaagggatttggagagggaatattaattaaagttgtcat

SEQ ID NO: 40245 - DNA, 80 bp, synthetic construct; identical to SEQ ID NO: 10925
  source 1..80: mol_type = other DNA

SEQ ID NO: 40246 - DNA, 80 bp, synthetic construct
  source 1..80: mol_type = other DNA
aactatctggtgtttgccaatctttgttaaacactattctattattaggagactgatggaaaaatatgtgttaccaatca

SEQ ID NO: 40247 - DNA, 80 bp, synthetic construct
  source 1..80: mol_type = other DNA
tgatttttgagaaaatttagctctgaaaggcctaccactcagataatcaaaggttgtttaaatccattagctgggtgtgg

SEQ ID NO: 40248 - DNA, 80 bp, synthetic construct
  source 1..80: mol_type = other DNA
ttaaatctatgacaatttagaacaagggaatctgatagcatggaattaaaactatagcaaaagttcttacaaagtaacat

SEQ ID NO: 40249 - DNA, 80 bp, synthetic construct; identical to SEQ ID NO: 10926
  source 1..80: mol_type = other DNA

SEQ ID NO: 40250 - DNA, 80 bp, synthetic construct
  source 1..80: mol_type = other DNA
tcatttttattttctatttttcttccatttctttttatattcatatatttgacagctacttatgtgactattactatgta

SEQ ID NO: 40251 - DNA, 80 bp, synthetic construct
  source 1..80: mol_type = other DNA
atgaagtatatggaaaaccaggggaacaggctacatatacttctttaataactttactgttttcctcgggtaaagtatat

SEQ ID NO: 40252 - DNA, 80 bp, synthetic construct
  source 1..80: mol_type = other DNA
acacagctttcttcagatttagaacattatctgagttctaactaaatgagattctgaaagagactctagcaagaaaacaa

SEQ ID NO: 40253 - DNA, 80 bp, synthetic construct; identical to SEQ ID NO: 10927
  source 1..80: mol_type = other DNA

SEQ ID NO: 40254 - DNA, 80 bp, synthetic construct
  source 1..80: mol_type = other DNA
aagctccgccccctccgggttcacgccattctgctgcctcagcctcccgagtagctgggactacaggtggctgccaccac

SEQ ID NO: 40255 - DNA, 80 bp, synthetic construct
  source 1..80: mol_type = other DNA
aggctctattcctaaagactcactgtcccaggtgagaaatgggagaagaaaggaattggatagcaccagtttgaatgaag

SEQ ID NO: 40256 - DNA, 80 bp, synthetic construct
  source 1..80: mol_type = other DNA
ttacaaaggaaatatacatttaattgtcattaaagtactatggagtttatatgcaagtattttaattctcttgatctggt

SEQ ID NO: 40257 - DNA, 80 bp, synthetic construct; identical to SEQ ID NO: 10928
  source 1..80: mol_type = other DNA

SEQ ID NO: 40258 - DNA, 80 bp, synthetic construct
  source 1..80: mol_type = other DNA
cacgtgctgactcttttcaaagagtatgtaatcgatatagtcaggaaaacatatcgagtacaaaaaagacagaaaaaaat

SEQ ID NO: 40259 - DNA, 80 bp, synthetic construct
  source 1..80: mol_type = other DNA
acgaccagtaagaaaggagagcaggaaatacttaaggacatttttatatttgagatgatccttacaggatacataacaac

SEQ ID NO: 40260 - DNA, 80 bp, synthetic construct
  source 1..80: mol_type = other DNA
aataattttgaattgaaatgtacatggccacattttaacgatgaaaagactgttctccaaaccagctaggttgttttgaa

SEQ ID NO: 40261 - DNA, 80 bp, synthetic construct; identical to SEQ ID NO: 10929
  source 1..80: mol_type = other DNA

SEQ ID NO: 40262 - DNA, 80 bp, synthetic construct
  source 1..80: mol_type = other DNA
ttcacacggataccgtaactcagatgacacgatttgaaatatagagctggccaactaagtacatgaaccctactaagtca

SEQ ID NO: 40263 - DNA, 80 bp, synthetic construct
  source 1..80: mol_type = other DNA
ttgttacaaatatcattataaactgcataaatgcataaaaataaaacaactgtaatacatctggggattcataattaggt

SEQ ID NO: 40264 - DNA, 80 bp, synthetic construct
  source 1..80: mol_type = other DNA
ttaaatgacatctccaaagtcacacagctaatgaatggaatgactgggatttggaggaaatcccagtcttttataaatgt

SEQ ID NO: 40265 - DNA, 80 bp, synthetic construct; identical to SEQ ID NO: 10930
  source 1..80: mol_type = other DNA

SEQ ID NO: 40266 - DNA, 80 bp, synthetic construct
  source 1..80: mol_type = other DNA
aaaatttcatcaaatgtatccagatatttttaaagttgcattttcacagcaaacaaatttctaaggactgattgtctttt

SEQ ID NO: 40267 - DNA, 80 bp, synthetic construct
  source 1..80: mol_type = other DNA
atgcagactttataaagtgctccagttcttatggtgttttctgaccaggatctgtaccaagcagatgaacgtgccaagat

SEQ ID NO: 40268 - DNA, 80 bp, synthetic construct
  source 1..80: mol_type = other DNA
catatccatgcatgtagagttgatggtagtatactaaaactttttagaagagaagatatgaaaacccaaatggagtgaat

SEQ ID NO: 40269 - DNA, 80 bp, synthetic construct
  source 1..80: mol_type = other DNA
gaagatacagatgccgattagagcaaaaatgaaaatttcatcttggcatctctgatctctaattctcagtggcttcctcc

SEQ ID NO: 40270 - DNA, 80 bp, synthetic construct; identical to SEQ ID NO: 10931
  source 1..80: mol_type = other DNA

SEQ ID NO: 40271 - DNA, 80 bp, synthetic construct
  source 1..80: mol_type = other DNA
gttgcccaactctatatatttttggccctgggttctactgaatgcatacttctagccatcatggcctttgaccgttacgc

SEQ ID NO: 40272 - DNA, 80 bp, synthetic construct
  source 1..80: mol_type = other DNA
ttctgtgaagttccagcccttttgaaactagcctgtattgatattcgtgtgaatgaaatggagctcaatgtactaggcgc

SEQ ID NO: 40273 - DNA, 80 bp, synthetic construct
  source 1..80: mol_type = other DNA
tatgtgttcattgctcaggcagtaatgagaatctgctctgctgaaagtcgctggaaggctttcaatacctgtgcctcaca

SEQ ID NO: 40274 - DNA, 80 bp, synthetic construct
  source 1..80: mol_type = other DNA
aaagctgccctgagaaggtcactgactaaagagttttggattaagacaagatgatatctgaaaagaagtcctaagaagcg

SEQ ID NO: 40275 - DNA, 80 bp, synthetic construct; identical to SEQ ID NO: 10932
  source 1..80: mol_type = other DNA

SEQ ID NO: 40276 - DNA, 80 bp, synthetic construct
  source 1..80: mol_type = other DNA
accatttagccatcttctaacattcgatgtccaattatatcaccctcaaatgcttttgtaaggtctcacaggcaagtaaa

SEQ ID NO: 40277 - DNA, 80 bp, synthetic construct
  source 1..80: mol_type = other DNA
attttttttgccataaatgttttgccttagtcaatcttatgctcttgtggtacacaacaatgaggcctaggtcaatgcaa

SEQ ID NO: 40278 - DNA, 80 bp, synthetic construct
  source 1..80: mol_type = other DNA
tgttttgacaaggcagctttcttcaccacttgactgggtaatttagtcctatttcagtgtgggggtttgagaataccatg

SEQ ID NO: 40279 - DNA, 80 bp, synthetic construct
  source 1..80: mol_type = other DNA
agttcaccaaaaaatccacatcattaaaagaacagtgcaaagctctatttcctgtactgtgagcatgtccactttctgtg

SEQ ID NO: 40280 - DNA, 80 bp, synthetic construct; identical to SEQ ID NO: 10933
  source 1..80: mol_type = other DNA

SEQ ID NO: 40281 - DNA, 80 bp, synthetic construct
  source 1..80: mol_type = other DNA
ttaacttagaagtataaatagaactcaaaataattgaacattgaaactactgtgttgcattggaataaacatggatatat

SEQ ID NO: 40282 - DNA, 80 bp, synthetic construct
  source 1..80: mol_type = other DNA
taaacagttttaaatttttgactttataaaggtataatatttctgcatgtatgctgcctgagattttggaaggctatata

SEQ ID NO: 40283 - DNA, 80 bp, synthetic construct
  source 1..80: mol_type = other DNA
ttacatcaattatgcaaataattggcaagccattaaatagaaataggccctgtgctataggagcagtaggaaaacatatt

SEQ ID NO: 40284 - DNA, 80 bp, synthetic construct; identical to SEQ ID NO: 10934
  source 1..80: mol_type = other DNA

SEQ ID NO: 40285 - DNA, 80 bp, synthetic construct
  source 1..80: mol_type = other DNA
agaactgagcatccagactaaggcagaatttgtcataaaaagtgtcagaaaagataatgctaaacatagaaaaatctttc

SEQ ID NO: 40286 - DNA, 80 bp, synthetic construct
  source 1..80: mol_type = other DNA
tttacaagcctctggcatttcccctgcttgcacttctctctcctgccaccatgtgaagaaggtcagtgcttcctcttcac

SEQ ID NO: 40287 - DNA, 80 bp, synthetic construct
  source 1..80: mol_type = other DNA
tgagcgctgatttgcatgtgtgtgaggaagctatccaagaatgaggaaagaaccacttaatggattaaggtaaatagtgc

SEQ ID NO: 40288 - DNA, 80 bp, synthetic construct
  source 1..80: mol_type = other DNA
ccaatgcttatgcaaaggctgggaattttgtgggttctcaagctatttatgtgccagaatgaaaacctaagaattcctga

SEQ ID NO: 40289 - DNA, 80 bp, synthetic construct; identical to SEQ ID NO: 10935
  source 1..80: mol_type = other DNA

SEQ ID NO: 40290 - DNA, 80 bp, synthetic construct
  source 1..80: mol_type = other DNA
gatgaaaaccacaacgtttaaatatacataatacctaaaagcactgaatgtaattcatagtacactaaacattgagaagt

SEQ ID NO: 40291 - DNA, 80 bp, synthetic construct
  source 1..80: mol_type = other DNA
gcgttctgctctatccagggcctccctgaaagcccctgcccgactaggcacagctgcagccgccaaagtcggtgcagtat

SEQ ID NO: 40292 - DNA, 80 bp, synthetic construct
  source 1..80: mol_type = other DNA
aatggagacagtagatgtgggcctccgtgtgctcttgagagccagggaaggccccctttgccattgcaggctcagaggtg

SEQ ID NO: 40293 - DNA, 80 bp, synthetic construct; identical to SEQ ID NO: 10936
  source 1..80: mol_type = other DNA

SEQ ID NO: 40294 - DNA, 80 bp, synthetic construct
  source 1..80: mol_type = other DNA
tccataaaagccccaggatcagcaatagcatggtagaggacaactgagagatgacgagatgaccagctgcagagagtagc

SEQ ID NO: 40295 - DNA, 80 bp, synthetic construct
  source 1..80: mol_type = other DNA
agcaaatctatcagtatcatttttccaacggcatgtgctcccttcatatctctatgtgacgttttggtaattctcacaat

SEQ ID NO: 40296 - DNA, 80 bp, synthetic construct
  source 1..80: mol_type = other DNA
tgacattccaccacaaaagaagtgaaaatggccggtccttgccttaactgatgacattaccttgtgaaattccttttcct

SEQ ID NO: 40297 - DNA, 80 bp, synthetic construct
  source 1..80: mol_type = other DNA
cagcccgcctgcacccaggtgattaaaaagctttattgctcacacaaagcctgtttggtgatctcttcacacggacgcag

SEQ ID NO: 40298 - DNA, 80 bp, synthetic construct; identical to SEQ ID NO: 10937
  source 1..80: mol_type = other DNA

SEQ ID NO: 40299 - DNA, 80 bp, synthetic construct
  source 1..80: mol_type = other DNA
aaatgcgctactccagtaaacacataaataagatagcaaaacagtcttattgctgatatggagaaaattttttgtggtct

SEQ ID NO: 40300 - DNA, 80 bp, synthetic construct
  source 1..80: mol_type = other DNA
aattaatttttgtattttttgtagagacagggtctcaccatgttgcccaggctggtcttgaactcatgtgctctagtgat

SEQ ID NO: 40301 - DNA, 80 bp, synthetic construct
  source 1..80: mol_type = other DNA
ttatcctagaggagttgtggaaaaacatcctcatggcatgaattatgagtcagaatattaaaggcatagacacaggagtt

SEQ ID NO: 40302 - DNA, 80 bp, synthetic construct; identical to SEQ ID NO: 10938
  source 1..80: mol_type = other DNA

SEQ ID NO: 40303 - DNA, 80 bp, synthetic construct
  source 1..80: mol_type = other DNA
tttcttaatgtatttaattctgaaatgattcattcagtttcggtctgatgaagagagtaaagtgaaaatattactcatca

SEQ ID NO: 40304 - DNA, 80 bp, synthetic construct
  source 1..80: mol_type = other DNA
tcctatttgaactatcccacagttttctctaaattatccattattgttgtatgttgaaatttttggattatttgtctact

SEQ ID NO: 40305 - DNA, 80 bp, synthetic construct
  source 1..80: mol_type = other DNA
ttgttcataaacagccttatgaaaacgtgtgatccttactgagacaccatattgtggtacttaatgtggtactatatttg

SEQ ID NO: 40306 - DNA, 80 bp, synthetic construct; identical to SEQ ID NO: 10939
  source 1..80: mol_type = other DNA

SEQ ID NO: 40307 - DNA, 80 bp, synthetic construct
  source 1..80: mol_type = other DNA
gcaacttcagcaaagtctgaggataaaaaatcaatgtgcaaaaatcacaagcattcttatacaccgataacagacagaga

SEQ ID NO: 40308 - DNA, 80 bp, synthetic construct
  source 1..80: mol_type = other DNA
tcatgggtaggaagaatcaatatcgtgaaaatggccatactgcccaaggtaatttatagattcaatgccatccccatcaa

SEQ ID NO: 40309 - DNA, 80 bp, synthetic construct
  source 1..80: mol_type = other DNA
aaaatagcatggtactggtaccaaaacagatatagaccaatggaacagaacagaggcctcagaaataatgccacatatct

SEQ ID NO: 40310 - DNA, 80 bp, synthetic construct
  source 1..80: mol_type = other DNA
agacttcaatgttagacctaaaaccagaaaaaccctagaacaaaacctaggcaataccattcaggacataggcatgggca

SEQ ID NO: 40311 - DNA, 80 bp, synthetic construct; identical to SEQ ID NO: 10940
  source 1..80: mol_type = other DNA

SEQ ID NO: 40312 - DNA, 80 bp, synthetic construct
  source 1..80: mol_type = other DNA
aataacaggtgctggagaggatatggagaaacaggaacacttttacactgttggtgggactgtaaactagttcaaccatt

SEQ ID NO: 40313 - DNA, 80 bp, synthetic construct
  source 1..80: mol_type = other DNA
agttggaaccaacccaaatgtccaacaatgatagactggattaagaaaatgtggcacatatacaccatggaatactatgc

SEQ ID NO: 40314 - DNA, 80 bp, synthetic construct
  source 1..80: mol_type = other DNA
ggaacatcacactctggggcctgttgtggggtggggggagtggggagggatagcattaggagatatacctaatgctaaat

SEQ ID NO: 40315 - DNA, 80 bp, synthetic construct; identical to SEQ ID NO: 10941
  source 1..80: mol_type = other DNA

SEQ ID NO: 40316 - DNA, 80 bp, synthetic construct
  source 1..80: mol_type = other DNA
ctgttaattaatgaaaaaaatcctttttactagaaaaacctgtgaacctgtgttacagaaaacgagttatgtataatatt

SEQ ID NO: 40317 - DNA, 80 bp, synthetic construct
  source 1..80: mol_type = other DNA
ttttgtccccagtgcctggacagcactggcttcatttcaaataccccttagttaataggaaatttaaatgtccctgggca

SEQ ID NO: 40318 - DNA, 80 bp, synthetic construct
  source 1..80: mol_type = other DNA
tcttcaaattttatggaatttatccaacatttatgtagcacctgcttagtgccagcgactatgcgagtcttcaaagttat

SEQ ID NO: 40319 - DNA, 80 bp, synthetic construct; identical to SEQ ID NO: 10942
  source 1..80: mol_type = other DNA

SEQ ID NO: 40320 - DNA, 80 bp, synthetic construct
  source 1..80: mol_type = other DNA
acaattctcctgcctcagcctccctagtagctgggattacaggtgcccaccaccgtgcccggctaatttttgtattttta

SEQ ID NO: 40321 - DNA, 80 bp, synthetic construct
  source 1..80: mol_type = other DNA
tgaggggcaattctaatgggaggacttccagacaggagggatagtgtgatttaagaaaagaaacacagcatggtgataca

SEQ ID NO: 40322 - DNA, 80 bp, synthetic construct
  source 1..80: mol_type = other DNA
cataatcaagtcaataaagagctaaaagctaaattaatgttacaagatgtgatctgcatcaccatttgtcctggcaacag

SEQ ID NO: 40323 - DNA, 80 bp, synthetic construct; identical to SEQ ID NO: 10943
  source 1..80: mol_type = other DNA

SEQ ID NO: 40324 - DNA, 80 bp, synthetic construct
  source 1..80: mol_type = other DNA
gaatatttttgagtaaacaaaagtacagaaagaaagtgtcaggacaaatttttggaaaccatcaaatttcaataaatgtt

SEQ ID NO: 40325 - DNA, 80 bp, synthetic construct
  source 1..80: mol_type = other DNA
atagaaagagtgcattgaatttaccgttgtgatagttatttgtggatttgctggagctgtttgtgaggactcatgaagca

SEQ ID NO: 40326 - DNA, 80 bp, synthetic construct
  source 1..80: mol_type = other DNA
gagtgaagacttttctttttctttaaaatggatgagtcttaagattatctctatctatctatctatctatctatctatct

SEQ ID NO: 40327 - DNA, 80 bp, synthetic construct; identical to SEQ ID NO: 10944
  source 1..80: mol_type = other DNA

SEQ ID NO: 40328 - DNA, 80 bp, synthetic construct
  source 1..80: mol_type = other DNA
gttttctcattgaagttattggcaatgctacctcccaggaaatagaggaaaatagtgaagaagagacacaggatgctaac

SEQ ID NO: 40329 - DNA, 80 bp, synthetic construct
  source 1..80: mol_type = other DNA
ttgcatacaagtggttagtgaagacagaaaaaaatgcttgggggaaacaaatgacattgaaagaatcattatactctcca

SEQ ID NO: 40330 - DNA, 80 bp, synthetic construct
  source 1..80: mol_type = other DNA
ttctcgcagtatcatccttaatcctaagagtatctccacacgtatatgattcccttccttcttatttgataagtgatgaa

SEQ ID NO: 40331 - DNA, 80 bp, synthetic construct; identical to SEQ ID NO: 10945
  source 1..80: mol_type = other DNA

SEQ ID NO: 40332 - DNA, 80 bp, synthetic construct
  source 1..80: mol_type = other DNA
attaagattggcagcactggggattaagctatatcttatggaggaccaggaaaactgtaggagcaagaaagctagagaaa

SEQ ID NO: 40333 - DNA, 80 bp, synthetic construct
  source 1..80: mol_type = other DNA
ttacagcaaaatcaaaaagatcttggtttaagtgatttttaaccttttcctacagcttagggattaataaatgaaacaaa

SEQ ID NO: 40334 - DNA, 80 bp, synthetic construct
  source 1..80: mol_type = other DNA
aagaaatggacagaaatgatgaaggaatagtctttgtgcagaagaaactcagtgaaaatgatactgattgacctttcaac

SEQ ID NO: 40335 - DNA, 80 bp, synthetic construct; identical to SEQ ID NO: 10946
  source 1..80: mol_type = other DNA

SEQ ID NO: 40336 - DNA, 80 bp, synthetic construct
  source 1..80: mol_type = other DNA
ttgtcataagaattttgagaattaaacgttctttgacggtgaacctttgtcacttagttgcaagatctccaaagctcagg

SEQ ID NO: 40337 - DNA, 80 bp, synthetic construct
  source 1..80: mol_type = other DNA
ttctagattagcttctgagctgtttctagatctgcctctgagctgtttctagatccatttgcaaggtggtatcaataact

SEQ ID NO: 40338 - DNA, 80 bp, synthetic construct
  source 1..80: mol_type = other DNA
tgcaaactctgctccagaaaatgtttatgacttgttgatcacattcagggattctatttctgaataattgctaaaacgtt

SEQ ID NO: 40339 - DNA, 80 bp, synthetic construct; identical to SEQ ID NO: 10947
  source 1..80: mol_type = other DNA

SEQ ID NO: 40340 - DNA, 80 bp, synthetic construct
  source 1..80: mol_type = other DNA
ccagtccattgcaaattcacttatgggcaacggttacatttctcttgttcagtgcattcttcaggttttcttcttcatag

SEQ ID NO: 40341 - DNA, 80 bp, synthetic construct
  source 1..80: mol_type = other DNA
tgctgccattaacttctccatacctctctgtgggaagagagtcattcaccaattcttctgtgatgttcctcagatgctga

SEQ ID NO: 40342 - DNA, 80 bp, synthetic construct
  source 1..80: mol_type = other DNA
cacctgcctaccacacctatttgtagccaccttctttctttcagctgcaggctttgagtttctcagactgccttctgatt

SEQ ID NO: 40343 - DNA, 80 bp, synthetic construct; identical to SEQ ID NO: 10948
  source 1..80: mol_type = other DNA

SEQ ID NO: 40344 - DNA, 80 bp, synthetic construct
  source 1..80: mol_type = other DNA
gagaaagacaattagtttggagtctggcctgtataatttaaaacttgttattaacaaataaggttggagatagatgaagc

SEQ ID NO: 40345 - DNA, 80 bp, synthetic construct
  source 1..80: mol_type = other DNA
catttttttgactcaagaaaacaactcttctagctataacatattgtccccattttgccaataggaacaataaatttagg

SEQ ID NO: 40346 - DNA, 80 bp, synthetic construct
  source 1..80: mol_type = other DNA
tgatgtgtataatctataaatataagcatatactactataatctattaataaaattgtcatcacccttgtgcatccctat

SEQ ID NO: 40347 - DNA, 80 bp, synthetic construct; identical to SEQ ID NO: 10949
  source 1..80: mol_type = other DNA

SEQ ID NO: 40348 - DNA, 80 bp, synthetic construct
  source 1..80: mol_type = other DNA
gtaagttttttttctttaatctgccacatgagattttttcttttttttatatactttaagctctggggtacatgtgcaga

SEQ ID NO: 40349 - DNA, 80 bp, synthetic construct
  source 1..80: mol_type = other DNA
gttctcattgttcagctcctacttatgagtgagaacatgcaatgtttagttttatgttcttgtgttagtttgctgagaat

SEQ ID NO: 40350 - DNA, 80 bp, synthetic construct
  source 1..80: mol_type = other DNA
tgtgaacagtgccacaataaacatacgtgtgcatgtgtctttatagtagaatgatttataatcctttgggtatataccct

SEQ ID NO: 40351 - DNA, 80 bp, synthetic construct
  source 1..80: mol_type = other DNA
ttaatgatagccattctaactggcatgagatggtatctcattatggttttgattcacatttctctgataaccagtgatga

SEQ ID NO: 40352 - DNA, 80 bp, synthetic construct; identical to SEQ ID NO: 10950
  source 1..80: mol_type = other DNA

SEQ ID NO: 40353 - DNA, 80 bp, synthetic construct
  source 1..80: mol_type = other DNA
aattttctcccattctgtaggttgcctattcactctgctgatgatttcttttcctgtgcagaagctctttagtttaattt

SEQ ID NO: 40354 - DNA, 80 bp, synthetic construct
  source 1..80: mol_type = other DNA
aatttttgtataaggtataaggaaggagtccagtttcagttttctgcatatggctagccagttttctcaacagcatttat

SEQ ID NO: 40355 - DNA, 80 bp, synthetic construct
  source 1..80: mol_type = other DNA
gtagtatactttgaagtcaggtagcatgatgcttccagctttgttctttttgcttaggattatcttggctatgtgggctc

SEQ ID NO: 40356 - DNA, 80 bp, synthetic construct; identical to SEQ ID NO: 10951
  source 1..80: mol_type = other DNA

SEQ ID NO: 40357 - DNA, 80 bp, synthetic construct
  source 1..80: mol_type = other DNA
gagattttgggctgagacgatggggttttctaagtatagaatcatgtcatctgcaaacagagacaatttgaattcctctc

SEQ ID NO: 40358 - DNA, 80 bp, synthetic construct
  source 1..80: mol_type = other DNA
tgtgagtttgtcatagatagcttttattattttgagatacattccatcaatatctagtttattgagagtttttagcatga

SEQ ID NO: 40359 - DNA, 80 bp, synthetic construct
  source 1..80: mol_type = other DNA
agctttttgatgtgctgctggattcggtttgccagtattttattgaggattttcacatcaatgttcatcagggatattgg

SEQ ID NO: 40360 - DNA, 80 bp, synthetic construct; identical to SEQ ID NO: 10952
  source 1..80: mol_type = other DNA

SEQ ID NO: 40361 - DNA, 80 bp, synthetic construct
  source 1..80: mol_type = other DNA
catttatcatttttatagtgtctattgatttttctctcttgtcttctttattagtctggctagcagtctactttgttaat

SEQ ID NO: 40362 - DNA, 80 bp, synthetic construct
  source 1..80: mol_type = other DNA
agagtgtcgattttagatctttcctgctttctcctgtgggcatttagtgctataaatttccctttaaacactgccttagc

SEQ ID NO: 40363 - DNA, 80 bp, synthetic construct
  source 1..80: mol_type = other DNA
tcatggctcagtccctcatggcttcccttggctaggggagggagttgtctgaccccttgcgcttcccgggtgaggcgatg

SEQ ID NO: 40364 - DNA, 80 bp, synthetic construct; identical to SEQ ID NO: 10953
  source 1..80: mol_type = other DNA

SEQ ID NO: 40365 - DNA, 80 bp, synthetic construct
  source 1..80: mol_type = other DNA
tttttaaacacattcatggtgatatatatcgatgagtttattttgtattgccctgttcaacaaggttgaacatcttttca

SEQ ID NO: 40366 - DNA, 80 bp, synthetic construct
  source 1..80: mol_type = other DNA
attacagatgttttttctaatctcctgtgattgtcttttttttccatcaggttcttttggagagtaaaactttaaaaatt

SEQ ID NO: 40367 - DNA, 80 bp, synthetic construct
  source 1..80: mol_type = other DNA
gcaacctccgcctcctggttcaagcaattctcgtgcctcagactctcaagtagctgagattacaagtgtgtgctgctatg

SEQ ID NO: 40368 - DNA, 80 bp, synthetic construct; identical to SEQ ID NO: 10954
  source 1..80: mol_type = other DNA

SEQ ID NO: 40369 - DNA, 80 bp, synthetic construct
  source 1..80: mol_type = other DNA
actattctttttcattgatctatgtgtttatttttaactaataccataccatactgatttcagcaactttataacgattt

SEQ ID NO: 40370 - DNA, 80 bp, synthetic construct
  source 1..80: mol_type = other DNA
ttgtatttttagtagagacggggtttcaccgtggtagccaggatggtctcgatctcctgacctcgtgatccgcccacctc

SEQ ID NO: 40371 - DNA, 80 bp, synthetic construct
  source 1..80: mol_type = other DNA
taattcgtactaaaaagaagcatgctggcatttttattaggattgcatcaaatctatagatcatttctgagaaaatagaa

SEQ ID NO: 40372 - DNA, 80 bp, synthetic construct; identical to SEQ ID NO: 10955
  source 1..80: mol_type = other DNA

SEQ ID NO: 40373 - DNA, 80 bp, synthetic construct
  source 1..80: mol_type = other DNA
cgatctctctcatcttactttatttaaaacatttctttcctgtctgtttctactaccattccccctaaggaaaacaatta

SEQ ID NO: 40374 - DNA, 80 bp, synthetic construct
  source 1..80: mol_type = other DNA
gtctacatctagcccactttttctaaaaactgcatttttttgatgttgtacatcctcaaccttcgcaaatctgctctccc

SEQ ID NO: 40375 - DNA, 80 bp, synthetic construct
  source 1..80: mol_type = other DNA
gtccaatatatgagagacttaatttgaatttttatacccagaatgtgctccagaatgcttccatgaggctacactcctac

SEQ ID NO: 40376 - DNA, 80 bp, synthetic construct
  source 1..80: mol_type = other DNA
caattcttggcactaccctgctttctaatacttactactcaaatagaatacaatgttacctcacttttaaactttggaga

SEQ ID NO: 40377 - DNA, 80 bp, synthetic construct; identical to SEQ ID NO: 10956
  source 1..80: mol_type = other DNA

SEQ ID NO: 40378 - DNA, 80 bp, synthetic construct
  source 1..80: mol_type = other DNA
aacttatctacagtcactagcaaactactagctaacctgggactcaaactcaaggcagtttggcccccaagttttcattc

SEQ ID NO: 40379 - DNA, 80 bp, synthetic construct
  source 1..80: mol_type = other DNA
cattatgcagaaaagggttaacttttcatgtctgtgttgcagaaccctgtatattcccaagaaaggcctatattcaggac

SEQ ID NO: 40380 - DNA, 80 bp, synthetic construct
  source 1..80: mol_type = other DNA
tatgctaacaaggtgatttatggtgcctatttttgctctggtgggctggggtctgagtagctgaggtcagttacacaggt

SEQ ID NO: 40381 - DNA, 80 bp, synthetic construct; identical to SEQ ID NO: 10957
  source 1..80: mol_type = other DNA

SEQ ID NO: 40382 - DNA, 80 bp, synthetic construct
  source 1..80: mol_type = other DNA
tttgatttataaatggacaggaatatatcagtaagacactaccagagtagtgcagtgaatatgcatgcattcttacatgt

SEQ ID NO: 40383 - DNA, 80 bp, synthetic construct
  source 1..80: mol_type = other DNA
tttccctaaagacacatgacacaacttgagaccaaaagtcatagcattataaacagaatccctacgtttataactctttc

SEQ ID NO: 40384 - DNA, 80 bp, synthetic construct
  source 1..80: mol_type = other DNA
ttaaaggcataattctttatgagcgtattttatttccctttatgcgcagctctaggctccttttcctacttccctgtttc

SEQ ID NO: 40385 - DNA, 80 bp, synthetic construct
  source 1..80: mol_type = other DNA
cttgtatatgagctctcagagctttacatacttatccaacgagttactactctaaggatactgacagatacagcacactc

SEQ ID NO: 40386 - DNA, 80 bp, synthetic construct; identical to SEQ ID NO: 10958
  source 1..80: mol_type = other DNA

SEQ ID NO: 40387 - DNA, 80 bp, synthetic construct
  source 1..80: mol_type = other DNA
ttcaatctttaatccacctgaaactcatttttagatacactcatagtgagaaatatttcaatctatctttcttttcttaa

SEQ ID NO: 40388 - DNA, 80 bp, synthetic construct
  source 1..80: mol_type = other DNA
ctcatctacctgtctgttcctgtgctaacactgtactgtcttatttcctatacattgtaaatcttgctattagaacaaat

SEQ ID NO: 40389 - DNA, 80 bp, synthetic construct
  source 1..80: mol_type = other DNA
actaaagataactcctcaaccattatcaaggtaaatatccatgtttatttagatcttctctaatgtatttcagtaaagtt

SEQ ID NO: 40390 - DNA, 80 bp, synthetic construct; identical to SEQ ID NO: 10959
  source 1..80: mol_type = other DNA

SEQ ID NO: 40391 - DNA, 80 bp, synthetic construct
  source 1..80: mol_type = other DNA
ttcactgtgttagccaggatggtctcgatctcctgacctcgtaatccacccgcctcggcctcccaaagtgctgggattac

SEQ ID NO: 40392 - DNA, 80 bp, synthetic construct
  source 1..80: mol_type = other DNA
acaagtggcagtcatgtcttgttctcactgagtacatgttttgacctaggttttagatggacaactgtttcatttatcta

SEQ ID NO: 40393 - DNA, 80 bp, synthetic construct
  source 1..80: mol_type = other DNA
tatggttctccatatgacctttctacatggctaggttgggctcctcacaaaatgatggctaggttccaaggataatctga

SEQ ID NO: 40394 - DNA, 80 bp, synthetic construct; identical to SEQ ID NO: 10960
  source 1..80: mol_type = other DNA

SEQ ID NO: 40395 - DNA, 80 bp, synthetic construct
  source 1..80: mol_type = other DNA
gcaatctatagtggtagagaaaccactaacaaataaacatgtaagcatgaaccgggttagatggcaacacacattacaga

SEQ ID NO: 40396 - DNA, 80 bp, synthetic construct
  source 1..80: mol_type = other DNA
cagagataggagcattcttagaatgtataattaatagcaaggaagccagtatattttttaaattgttcttcatcattact

SEQ ID NO: 40397 - DNA, 80 bp, synthetic construct
  source 1..80: mol_type = other DNA
agaaatttgacatttaatatctttccctctattgttcttaatttcaataactcttgctcttatcgtaacactgtatcatt

SEQ ID NO: 40398 - DNA, 80 bp, synthetic construct; identical to SEQ ID NO: 10961
  source 1..80: mol_type = other DNA

SEQ ID NO: 40399 - DNA, 80 bp, synthetic construct
  source 1..80: mol_type = other DNA
gaattgacttcttagcaatattgaaacttccactttataaaaatgtaatattccttgatttatttgtctatttaaaattt

SEQ ID NO: 40400 - DNA, 80 bp, synthetic construct
  source 1..80: mol_type = other DNA
ccagatctttatgtacccaaccacatcatctattttcaaattttataccttctttgtcattttcctggctctattgggct

SEQ ID NO: 40401 - DNA, 80 bp, synthetic construct
  source 1..80: mol_type = other DNA
tgatatatactgtagcttttatgtagagtcttttcttcagatcaaacattcccttttcatctgagtatgctcagtaattc

SEQ ID NO: 40402 - DNA, 80 bp, synthetic construct
  source 1..80: mol_type = other DNA
tttaattttgttatcaagttgatactggcctcataagacaaattggaagtgtttcttcttccctatttcctggacaattt

SEQ ID NO: 40403 - DNA, 80 bp, synthetic construct; identical to SEQ ID NO: 10962
  source 1..80: mol_type = other DNA

SEQ ID NO: 40404 - DNA, 80 bp, synthetic construct
  source 1..80: mol_type = other DNA
gtcatgtcctttgagggtcttttaatctggattagctcctcagtcttttctcttataacgttggcagcttggagttcctg

SEQ ID NO: 40405 - DNA, 80 bp, synthetic construct
  source 1..80: mol_type = other DNA
aggcacatgttgatctgtcccattactggtgatattagctataatcagttggctaagatggttctgccaggtttctccat

SEQ ID NO: 40406 - DNA, 80 bp, synthetic construct
  source 1..80: mol_type = other DNA
gtagcaaaatggtgattttctaagtctaccatctctttcacatttattagttgatgtgctacttaaagatattaaatccc

SEQ ID NO: 40407 - DNA, 80 bp, synthetic construct; identical to SEQ ID NO: 10963
  source 1..80: mol_type = other DNA

SEQ ID NO: 40408 - DNA, 80 bp, synthetic construct
  source 1..80: mol_type = other DNA
tctcccatatgttctttatccactcattgattgatgggcatttggactggttacatatttttgcagttgcaaattgtgct

SEQ ID NO: 40409 - DNA, 80 bp, synthetic construct
  source 1..80: mol_type = other DNA
tctccacattgttttccataatggttatactagtttacattcccaccaacagtgtaaaagtgttcccttttcaccacatc

SEQ ID NO: 40410 - DNA, 80 bp, synthetic construct
  source 1..80: mol_type = other DNA
ttgtctattcctgtccttagcccaatttttgataggattctttgttttcttcttgctgatttgtttgggttcttcgtaga

SEQ ID NO: 40411 - DNA, 80 bp, synthetic construct; identical to SEQ ID NO: 10964
  source 1..80: mol_type = other DNA

SEQ ID NO: 40412 - DNA, 80 bp, synthetic construct
  source 1..80: mol_type = other DNA
tggctgttaagtatttggttttatttttgggttatttattctgttccattagtctatgtgcctatttttagaccagtact

SEQ ID NO: 40413 - DNA, 80 bp, synthetic construct
  source 1..80: mol_type = other DNA
gggggtattttgatgggaattgcattgaatctgtagattgcttttggcagtatggtcattttcaaaatattgattctacc

SEQ ID NO: 40414 - DNA, 80 bp, synthetic construct
  source 1..80: mol_type = other DNA
tgctcattttacagatgcagaaagattaagcgactaaagtcacctcacaaaggataaatggtagcactagaattaaaccc

SEQ ID NO: 40415 - DNA, 80 bp, synthetic construct; identical to SEQ ID NO: 10965
  source 1..80: mol_type = other DNA

SEQ ID NO: 40416 - DNA, 80 bp, synthetic construct
  source 1..80: mol_type = other DNA
gaaaaactggaaaagtgactggtatacaataggcaatcaataaatatttgttaaataaataaagaaaatttttctgcaaa

SEQ ID NO: 40417 - DNA, 80 bp, synthetic construct
  source 1..80: mol_type = other DNA
tggacttacctttatttctaagtacttacaaagttgttgcaaaaattttaatatacatattaatggatttagctatcata

SEQ ID NO: 40418 - DNA, 80 bp, synthetic construct
  source 1..80: mol_type = other DNA
tagttttccaggaggtctggcattagagatccattaatttttaaagggttaaatgttcctgtttcttttttggaaatatg

SEQ ID NO: 40419 - DNA, 80 bp, synthetic construct; identical to SEQ ID NO: 10966
  source 1..80: mol_type = other DNA

SEQ ID NO: 40420 - DNA, 80 bp, synthetic construct
  source 1..80: mol_type = other DNA
agagtagatttgagagttttaaaaaaaactgtttttaaagacgtaaagtagagctatgagctcaccaaagtccactgaag

SEQ ID NO: 40421 - DNA, 80 bp, synthetic construct
  source 1..80: mol_type = other DNA
cttatttcatctcttttgttactaatctagaaggtcaggagtgtggtaaaggcagtgtctgataaggttatgagcttcca

SEQ ID NO: 40422 - DNA, 80 bp, synthetic construct
  source 1..80: mol_type = other DNA
aacaatttacactcaaggctttatgctgagttgtcttgttctaatcaagcatgaaggtgtcaagcacaaagcacgtggca

SEQ ID NO: 40423 - DNA, 80 bp, synthetic construct; identical to SEQ ID NO: 10967
  source 1..80: mol_type = other DNA

SEQ ID NO: 40424 - DNA, 80 bp, synthetic construct
  source 1..80: mol_type = other DNA
atacattccaatattggaaataatctgaaaacactttccagtagtaacaatcctccttaatatgagggacaaaaaaaaag

SEQ ID NO: 40425 - DNA, 80 bp, synthetic construct
  source 1..80: mol_type = other DNA
tttaagtgccactcgtcattagatgttatacttcagcaatacttccaattttaagtctgtactttaagagggacccacag

SEQ ID NO: 40426 - DNA, 80 bp, synthetic construct
  source 1..80: mol_type = other DNA
aatgctgcgtcagtacaagaacaagactttttggtcaaaagttgataccgtttaaattccctctcccagcgcttcatgca

SEQ ID NO: 40427 - DNA, 80 bp, synthetic construct; identical to SEQ ID NO: 10968
  source 1..80: mol_type = other DNA

SEQ ID NO: 40428 - DNA, 80 bp, synthetic construct
  source 1..80: mol_type = other DNA
actctgtcttgggaaaaaaaatagaagtgggcagagtcaaaaaagcaacttcaaataattaatccctttgtccatatgag

SEQ ID NO: 40429 - DNA, 80 bp, synthetic construct
  source 1..80: mol_type = other DNA
cactggttttgattcatctcagtcttttggcctggagattaggccaaacatcaagcatgttgggagggcaacaatttaaa

SEQ ID NO: 40430 - DNA, 80 bp, synthetic construct
  source 1..80: mol_type = other DNA
tctcaggggttgtccattcctgcaaaagtttatgtatcaaggtgggcagaaggcaatacatttacacactacagatgatc

SEQ ID NO: 40431 - DNA, 80 bp, synthetic construct
  source 1..80: mol_type = other DNA
cccacactgcaaggtagatgcatggtagattaatctttgccctcttttggagagcttgaaaaattccttaaacttttaga

SEQ ID NO: 40432 - DNA, 80 bp, synthetic construct; identical to SEQ ID NO: 10969
  source 1..80: mol_type = other DNA

SEQ ID NO: 40433 - DNA, 80 bp, synthetic construct
  source 1..80: mol_type = other DNA
ggtcaaggttctgacatgtctacaagtcaagtgccatattgttactggagacgtatgtaaaccagtctttagtgtttgct

SEQ ID NO: 40434 - DNA, 80 bp, synthetic construct
  source 1..80: mol_type = other DNA
gcacgatctcagttcaccgcaatttccgcctcccaggttcaagcaattctcttgccccagcctcccaagtagctgggatt

SEQ ID NO: 40435 - DNA, 80 bp, synthetic construct
  source 1..80: mol_type = other DNA
gttgggatttttttaatacatgtgtttacagtgtggatgaactgcagctgcatatcaactcctccaatataaagaaaaag

SEQ ID NO: 40436 - DNA, 80 bp, synthetic construct; identical to SEQ ID NO: 10970
  source 1..80: mol_type = other DNA

SEQ ID NO: 40437 - DNA, 80 bp, synthetic construct
  source 1..80: mol_type = other DNA
cttctttcttttcctttcctgtcccctttccccagaaaacatttttttaaaaccagcagttagtgcaactaatgttcact

SEQ ID NO: 40438 - DNA, 80 bp, synthetic construct
  source 1..80: mol_type = other DNA
tcctctctaaaaaatggtatgtcatagatccaaacaaggcttccacagtttgtcaaagagtgcttattaaggcttctcat

SEQ ID NO: 40439 - DNA, 80 bp, synthetic construct
  source 1..80: mol_type = other DNA
acctggtcttccaatatgacggagataggtctcttctagctttgaaaagtcaaagtttattaccacattcacagcttgta

SEQ ID NO: 40440 - DNA, 80 bp, synthetic construct; identical to SEQ ID NO: 10971
  source 1..80: mol_type = other DNA

SEQ ID NO: 40441 - DNA, 80 bp, synthetic construct
  source 1..80: mol_type = other DNA
atcttccattaactgcccaaaatcctgggacagaaacttatctgcctcatccaatactatcacctggacatgactgacct

SEQ ID NO: 40442 - DNA, 80 bp, synthetic construct
  source 1..80: mol_type = other DNA
ttgactgacctgtagagcaggtcctcctgtgggaacaatcactattgtttgtatagtgtccttcttcaggtctagccttt

SEQ ID NO: 40443 - DNA, 80 bp, synthetic construct
  source 1..80: mol_type = other DNA
acagtaatcttcaaattaatatcctcttgtagaggtcacatccaacattttgattcttagatcctttggaaggagtttta

SEQ ID NO: 40444 - DNA, 80 bp, synthetic construct; identical to SEQ ID NO: 10972
  source 1..80: mol_type = other DNA

SEQ ID NO: 40445 - DNA, 80 bp, synthetic construct
  source 1..80: mol_type = other DNA
gcagtaacttactttcttgtactgtatcaacttttaatttttaaaaggccctcttaccagcttcaattatagctgaattc

SEQ ID NO: 40446 - DNA, 80 bp, synthetic construct
  source 1..80: mol_type = other DNA
tctggtgagattttacgtggtttagaataaagtccaaagaggctgtttgatatagtggtttttcctacttctttctagaa

SEQ ID NO: 40447 - DNA, 80 bp, synthetic construct
  source 1..80: mol_type = other DNA
tcactatagcctcaggctcctgggctcatcctcccacctcagcatactgaggagctaggactgctggcatgtgccatcat

SEQ ID NO: 40448 - DNA, 80 bp, synthetic construct
  source 1..80: mol_type = other DNA
gcctagagtgcagtggtgcaatctcagctcactgcagcctctgcctcccgggttcaagtgattctcctgcctcagcctcc

SEQ ID NO: 40449 - DNA, 80 bp, synthetic construct; identical to SEQ ID NO: 10973
  source 1..80: mol_type = other DNA

SEQ ID NO: 40450 - DNA, 80 bp, synthetic construct
  source 1..80: mol_type = other DNA
ttatcaggagcttctcctagccacacccatcagggctggtgcctgcacctgtcattgagatattcgtgggaaagccacgt

SEQ ID NO: 40451 - DNA, 80 bp, synthetic construct
  source 1..80: mol_type = other DNA
tcttacctgcaaatgccatatcctgagtcataggtcaaaccacacagcccaacacaaaacctgctgacagaagtgcatag

SEQ ID NO: 40452 - DNA, 80 bp, synthetic construct
  source 1..80: mol_type = other DNA
ggaggatgacagaggaggaattcaaagtatggattacagggaaactcaatgagatccaaaataaggttaaaaatcagtac

SEQ ID NO: 40453 - DNA, 80 bp, synthetic construct; identical to SEQ ID NO: 10974
  source 1..80: mol_type = other DNA

SEQ ID NO: 40454 - DNA, 80 bp, synthetic construct
  source 1..80: mol_type = other DNA
tgagaaattttcctttatcttgctagggaagtagacatacagatataataaatccagagaagacctgccagatcctatat

SEQ ID NO: 40455 - DNA, 80 bp, synthetic construct
  source 1..80: mol_type = other DNA
aacagcaaacagaggaaacattataaacttattgggggccttctcagcagaaatcttatgggggacttacattcagcatt

SEQ ID NO: 40456 - DNA, 80 bp, synthetic construct
  source 1..80: mol_type = other DNA
aagaataataactgctactacaaaaacacacttaactacatagtccacagaccctatatggcaaccacacaatagaaact

SEQ ID NO: 40457 - DNA, 80 bp, synthetic construct; identical to SEQ ID NO: 10975
  source 1..80: mol_type = other DNA

SEQ ID NO: 40458 - DNA, 80 bp, synthetic construct
  source 1..80: mol_type = other DNA
aacaagtactgctagacctacaaaaatacttagccacaccatgggagtgggtgacttcaacatcccattgacagagttag

SEQ ID NO: 40459 - DNA, 80 bp, synthetic construct
  source 1..80: mol_type = other DNA
ggacatcaggcaagtctcaataaagttaaaaaattcaaaatcatacaaactatactttgggccatggtggaataaaaata

SEQ ID NO: 40460 - DNA, 80 bp, synthetic construct
  source 1..80: mol_type = other DNA
ttacttttttatatacatattttattatactttaagttctagggtacatgtgcacaacgtgcaagtttgctacatatgta

SEQ ID NO: 40461 - DNA, 80 bp, synthetic construct
  source 1..80: mol_type = other DNA
atgagtgagaacatgtggtgtttggtttttttgtccttgcaatagtttgctgagaatgatggtttccagcttcatccatg

SEQ ID NO: 40462 - DNA, 80 bp, synthetic construct; identical to SEQ ID NO: 10976
  source 1..80: mol_type = other DNA

SEQ ID NO: 40463 - DNA, 80 bp, synthetic construct
  source 1..80: mol_type = other DNA
ctggttcttgtcaaccagatcaataggacaccagctaaattaacaacaaagaaagagaagatctaaataagtgcaatcag

SEQ ID NO: 40464 - DNA, 80 bp, synthetic construct
  source 1..80: mol_type = other DNA
accctggagagatcaatatagagttctgaaattgaaaaacaaacctaccaaataaaaagggccctgaaacaggtggattc

SEQ ID NO: 40465 - DNA, 80 bp, synthetic construct
  source 1..80: mol_type = other DNA
acagacaaatatccctgatgaacatagatgcaaaatttctcaataaaatactagcagatggaatccagcagcacatcaaa

SEQ ID NO: 40466 - DNA, 80 bp, synthetic construct; identical to SEQ ID NO: 10977
  source 1..80: mol_type = other DNA

SEQ ID NO: 40467 - DNA, 80 bp, synthetic construct
  source 1..80: mol_type = other DNA
ggaaaagaggaagtcaaattatctccttgctgacaatacgattctatacctagaaaaccttaatgactttgccaaaaggc

SEQ ID NO: 40468 - DNA, 80 bp, synthetic construct
  source 1..80: mol_type = other DNA
cgtaaccaaagcagtgaatgatttctttgaggaaaactacaaaatactgaagaaagaaatcatagaggatacaaataaat

SEQ ID NO: 40469 - DNA, 80 bp, synthetic construct
  source 1..80: mol_type = other DNA
aagagcccaaatagcaaaagcaatactaagcaaaaagaaaaatactggaggcatcatactacccaacttcaaactatatt

SEQ ID NO: 40470 - DNA, 80 bp, synthetic construct; identical to SEQ ID NO: 10978
  source 1..80: mol_type = other DNA

SEQ ID NO: 40471 - DNA, 80 bp, synthetic construct
  source 1..80: mol_type = other DNA
caaactacagtaaaataggagaatcaggtggaatagtggaaccaactgcttataaatttactgtacacataaaaatcatc

SEQ ID NO: 40472 - DNA, 80 bp, synthetic construct
  source 1..80: mol_type = other DNA
aattatgcagcccaaaatgtcaattgttcttctgttgagaaaccctgaactaggtgcactgtgacttaagaaaactactc

SEQ ID NO: 40473 - DNA, 80 bp, synthetic construct
  source 1..80: mol_type = other DNA
tatattagatgtaaagaaatgaaaaataaggagtgggaaaggctacccattcactctgcctattgaaatcaggcttccac

SEQ ID NO: 40474 - DNA, 80 bp, synthetic construct
  source 1..80: mol_type = other DNA
tggcattagatgaacttatctaatgctttatgtttcttctgtggaacagaaggtgagactgtctgccaagcatgaaggga

SEQ ID NO: 40475 - DNA, 80 bp, synthetic construct; identical to SEQ ID NO: 10979
  source 1..80: mol_type = other DNA

SEQ ID NO: 40476 - DNA, 80 bp, synthetic construct
  source 1..80: mol_type = other DNA
gctctatagggacataagtacagttacaaggaactgaaagacttacggaaagtgggcagttaagaaactgaaagtatctt

SEQ ID NO: 40477 - DNA, 80 bp, synthetic construct
  source 1..80: mol_type = other DNA
agaagctggagtccgtgatgtgttgtttataaaaaggaatgggaggatttgggaggtgacagaattgttttatatcttgc

SEQ ID NO: 40478 - DNA, 80 bp, synthetic construct
  source 1..80: mol_type = other DNA
aaagactatgaaggtgggatatagtcttagagtagacatgtaggtaatcttcatgatgtgatcataacatctgcactacc

SEQ ID NO: 40479 - DNA, 80 bp, synthetic construct
  source 1..80: mol_type = other DNA
ttgtattaggttgatgatcaacaataattttaaaaagaataaaaaaggagtggaggtcaaggaggtctgaggttagtgtg

SEQ ID NO: 40480 - DNA, 80 bp, synthetic construct; identical to SEQ ID NO: 10980
  source 1..80: mol_type = other DNA

SEQ ID NO: 40481 - DNA, 80 bp, synthetic construct
  source 1..80: mol_type = other DNA
agcttttgggagaagaaccaaatgtcaatgacaacacagaaatatcaggagtaggtagtggtattggagagctttttcat

SEQ ID NO: 40482 - DNA, 80 bp, synthetic construct
  source 1..80: mol_type = other DNA
cgagaccatcccggctaaaacggtgaaaccccgtctctactaaaaatacaaaaaattagccgggcgtaatggcgggcgcc

SEQ ID NO: 40483 - DNA, 80 bp, synthetic construct
  source 1..80: mol_type = other DNA
gaaaaggtgggatgacctaagttaaagaaaagaaattaacaatatgttgcttgaatttatttttctagcgatagaacttt

SEQ ID NO: 40484 - DNA, 80 bp, synthetic construct; identical to SEQ ID NO: 10981
  source 1..80: mol_type = other DNA

SEQ ID NO: 40485 - DNA, 80 bp, synthetic construct
  source 1..80: mol_type = other DNA
atggaaaaaaaagaacatgtttgcattaggtgcttcctgcagataataaaaacaaaatggaatttatttttccctcagat

SEQ ID NO: 40486 - DNA, 80 bp, synthetic construct
  source 1..80: mol_type = other DNA
aaaaaagatgacctttgaaaaggacaaaagagaaatattacagctacgtgaactggcattttgaatgttgatatggtttg

SEQ ID NO: 40487 - DNA, 80 bp, synthetic construct
  source 1..80: mol_type = other DNA
tccttcactcttctctctcctgccaccatgtgaagaaggttcttgtttccccttcactttctgctataattgtaagtttc

SEQ ID NO: 40488 - DNA, 80 bp, synthetic construct; identical to SEQ ID NO: 10982
  source 1..80: mol_type = other DNA

SEQ ID NO: 40489 - DNA, 80 bp, synthetic construct
  source 1..80: mol_type = other DNA
ccctcttagcaaattttgaagtgcacaatacctatagccactatgttgcacagtagagctcttattcatctagcataact

SEQ ID NO: 40490 - DNA, 80 bp, synthetic construct
  source 1..80: mol_type = other DNA
tacttctagaggctaaatgttacaggtcctcacataagtggactcatggagtattagtctttctgagaggcttatttcac

SEQ ID NO: 40491 - DNA, 80 bp, synthetic construct
  source 1..80: mol_type = other DNA
gaaaataggcaggatacataggtccacaatcatgctcactgtactcataaccccacctttttaccagctatctattgtcg

SEQ ID NO: 40492 - DNA, 80 bp, synthetic construct
  source 1..80: mol_type = other DNA
aaatacataaataaaaatcaatgagacttatttcatggagtttttttttttttttttttttgctgtagaatagtaatata

SEQ ID NO: 40493 - DNA, 80 bp, synthetic construct; identical to SEQ ID NO: 10983
  source 1..80: mol_type = other DNA

SEQ ID NO: 40494 - DNA, 80 bp, synthetic construct
  source 1..80: mol_type = other DNA
actgatactagtttcttgatacagaaaaagcagaggacttggatagagggaataacagtcactaatttgactgtacctgt

SEQ ID NO: 40495 - DNA, 80 bp, synthetic construct
  source 1..80: mol_type = other DNA
gggtggcaggcaagagagcttgtgcaagtgtagaaaaaactaccagtcataaaaacatcagatcttgtgagaatccactc

SEQ ID NO: 40496 - DNA, 80 bp, synthetic construct
  source 1..80: mol_type = other DNA
agcaggaaattttaaatataagttttgaatggaaagacagctgtagaggaagaatatgatttcttaaagaactattataa

SEQ ID NO: 40497 - DNA, 80 bp, synthetic construct; identical to SEQ ID NO: 10984
  source 1..80: mol_type = other DNA

SEQ ID NO: 40498 - DNA, 80 bp, synthetic construct
  source 1..80: mol_type = other DNA
aaatatcaagtggaaaaaagcttccgttttacaagatgaggcacattctttacagttgtatgttacttggattagtattt

SEQ ID NO: 40499 - DNA, 80 bp, synthetic construct
  source 1..80: mol_type = other DNA
actttgctaataccaactctctcccttgcctctctctctgccctctctctatgtatatacatttgtattaacaagaaccc

SEQ ID NO: 40500 - DNA, 80 bp, synthetic construct
  source 1..80: mol_type = other DNA
aactttgaaggatagactttgaagaaagtttatctcagtgctgtttgttaagtggcttaccccaagaggcctcttgcaga

SEQ ID NO: 40501 - DNA, 80 bp, synthetic construct; identical to SEQ ID NO: 10985
  source 1..80: mol_type = other DNA

SEQ ID NO: 40502 - DNA, 80 bp, synthetic construct
  source 1..80: mol_type = other DNA
tgtggactctttgccagtacagccctcagtgaacacacatctttaatagaaattagcaattgctataacctgtagtctta

SEQ ID NO: 40503 - DNA, 80 bp, synthetic construct
  source 1..80: mol_type = other DNA
ctgcattctttttaaatgttctgtgaaagcaataaaccttgtagctaattttcagtatggcatatacaccagttaacaat

SEQ ID NO: 40504 - DNA, 80 bp, synthetic construct
  source 1..80: mol_type = other DNA
acattaaataacatcacatataagcgtggaagagatgttagtgctcatcattcagccaccctagtaacgatgtattattt

SEQ ID NO: 40505 - DNA, 80 bp, synthetic construct; identical to SEQ ID NO: 10986
  source 1..80: mol_type = other DNA

SEQ ID NO: 40506 - DNA, 80 bp, synthetic construct
  source 1..80: mol_type = other DNA
cattctgtctcttcccctgagaaagttaaaattgtccctgattgcatgtggtatattattgtacataaaagctataaaga

SEQ ID NO: 40507 - DNA, 80 bp, synthetic construct
  source 1..80: mol_type = other DNA
cttaagaattaacataaccaaggaggttaaagatttgtacacaaaaaaactataaagcattgattaaagtaattgaaaaa

SEQ ID NO: 40508 - DNA, 80 bp, synthetic construct
  source 1..80: mol_type = other DNA
ttctatggaactaaaaaaataacccaagtagccaaagcaatcttgcaaaaaatgaacaaagctgcaggtattatactacc

SEQ ID NO: 40509 - DNA, 80 bp, synthetic construct; identical to SEQ ID NO: 10987
  source 1..80: mol_type = other DNA

SEQ ID NO: 40510 - DNA, 80 bp, synthetic construct
  source 1..80: mol_type = other DNA
ataaagccaaaaagagacaattttgactacatcaaacaaaaatgcttcagcacagccaagcgaacaatcaactgagtgaa

SEQ ID NO: 40511 - DNA, 80 bp, synthetic construct
  source 1..80: mol_type = other DNA
atatgaaaaaatactaaattaatagtcagcagagaaaggcaaatgaaaaccacaatgagatataaccttatatctgttag

SEQ ID NO: 40512 - DNA, 80 bp, synthetic construct
  source 1..80: mol_type = other DNA
caaggaatcccattacttggtatatatccaaggaaatgaaatcagcatatcaaagaaatatgtgcactccaatgtttatt

SEQ ID NO: 40513 - DNA, 80 bp, synthetic construct; identical to SEQ ID NO: 10988
  source 1..80: mol_type = other DNA

SEQ ID NO: 40514 - DNA, 80 bp, synthetic construct
  source 1..80: mol_type = other DNA
attcttgaaaattgccaaaagaatagatgagttttctcaccacaaaaaagtatgtgaggtattgcatacgttgattagcc

SEQ ID NO: 40515 - DNA, 80 bp, synthetic construct
  source 1..80: mol_type = other DNA
tcctttgatttaaaacctcatcagtttttaacttccaaatccacaggtgtacctaccatttctgccttcatttctctaac

SEQ ID NO: 40516 - DNA, 80 bp, synthetic construct
  source 1..80: mol_type = other DNA
ctgtccttccttttctgttttgagaaaacagggctcaaattgtctgtgaacctctctagtggtattgaaatgggaaaagt

SEQ ID NO: 40517 - DNA, 80 bp, synthetic construct; identical to SEQ ID NO: 10989
  source 1..80: mol_type = other DNA

SEQ ID NO: 40518 - DNA, 80 bp, synthetic construct
  source 1..80: mol_type = other DNA
gccactcggccttgctctcctctgccgcggccaaactccacctcctcccaccagctgatggcctgctggtatgctggtgc

SEQ ID NO: 40519 - DNA, 80 bp, synthetic construct
  source 1..80: mol_type = other DNA
ggggcctcgggtttttataggccaaggatgggggcatggtgggtcagggtggacttttgaaatgcaacatttgggcgaaa

SEQ ID NO: 40520 - DNA, 80 bp, synthetic construct
  source 1..80: mol_type = other DNA
cccttcccagcactcccttatcagtatgctagcatattgcttttgggattcacttctctaggttttattgtgtgtatttt

SEQ ID NO: 40521 - DNA, 80 bp, synthetic construct
  source 1..80: mol_type = other DNA
cagaaagtaaagaaaacgaatgggatataaacagaatgtgagaattgcagtggcattgataaaacagatggcaactgatt

SEQ ID NO: 40522 - DNA, 80 bp, synthetic construct; identical to SEQ ID NO: 10990
  source 1..80: mol_type = other DNA

SEQ ID NO: 40523 - DNA, 80 bp, synthetic construct
  source 1..80: mol_type = other DNA
tatgggatgtgagaaatactaaaacgtatacttcctgtaagatgtgtgttaactgggagcataaaaagtagtaagaaagc

SEQ ID NO: 40524 - DNA, 80 bp, synthetic construct
  source 1..80: mol_type = other DNA
gtttgttacataggtaaacgtgtgccatggtgatttgctgcacctaaccacccatcacctaggtattaagccctgcatgc

SEQ ID NO: 40525 - DNA, 80 bp, synthetic construct
  source 1..80: mol_type = other DNA
gatggcttccagcttcatctatgtccctgcaaaggacatgatcccattcctttttatggctgcatagtattccatgatat

SEQ ID NO: 40526 - DNA, 80 bp, synthetic construct; identical to SEQ ID NO: 10991
  source 1..80: mol_type = other DNA

SEQ ID NO: 40527 - DNA, 80 bp, synthetic construct
  source 1..80: mol_type = other DNA
aatttgttggctgtgtaagtatcttctgagaagtgtctgttcatatcctttgcccactttttgatggggttatttgtttt

SEQ ID NO: 40528 - DNA, 80 bp, synthetic construct
  source 1..80: mol_type = other DNA
tgtcaatttttgcttttgttgcaattgcttttgacaatttcatcataaaatttttgcccatgcctattctctgaatggta

SEQ ID NO: 40529 - DNA, 80 bp, synthetic construct
  source 1..80: mol_type = other DNA
aatcatttccccattgcttgtttttgtcaggtttgttgcaattcagatggttgtagatgtgccgtcttatttctgatctg

SEQ ID NO: 40530 - DNA, 80 bp, synthetic construct; identical to SEQ ID NO: 10992
  source 1..80: mol_type = other DNA

SEQ ID NO: 40531 - DNA, 80 bp, synthetic construct
  source 1..80: mol_type = other DNA
tctctttgtagcaattatgaatgaaggttcattcatgatttggttctctgtttgtctattgttggtgtatagaaatgctt

SEQ ID NO: 40532 - DNA, 80 bp, synthetic construct
  source 1..80: mol_type = other DNA
ttctttctcttgcctgattgccctggccagaacatccaatactatgttgaataggaatggtgaaagaggatttccctgtc

SEQ ID NO: 40533 - DNA, 80 bp, synthetic construct
  source 1..80: mol_type = other DNA
ggccttttctgcatctatttagataatcatgtggtttttgtcattggttctgtttatgtgatgaattgcatttattgatt

SEQ ID NO: 40534 - DNA, 80 bp, synthetic construct; identical to SEQ ID NO: 10993
  source 1..80: mol_type = other DNA

SEQ ID NO: 40535 - DNA, 80 bp, synthetic construct
  source 1..80: mol_type = other DNA
tcctggtgtagtcttgggagggtgtatgcatccaggaatttattcatttcttctagattttctagtttgtttgcatgaga

SEQ ID NO: 40536 - DNA, 80 bp, synthetic construct
  source 1..80: mol_type = other DNA
ctggatttattgatttgctgaagcattttcttgtgtctgtctcttcttcagttcttctccgatcttagttatttcttgtt

SEQ ID NO: 40537 - DNA, 80 bp, synthetic construct
  source 1..80: mol_type = other DNA
gtttcaagaatggtttagtttctgccttaatttcattatttacctagaagtcagtcaggagcaggttgttcaatttccat

SEQ ID NO: 40538 - DNA, 80 bp, synthetic construct; identical to SEQ ID NO: 10994
  source 1..80: mol_type = other DNA

SEQ ID NO: 40539 - DNA, 80 bp, synthetic construct
  source 1..80: mol_type = other DNA
gagcttgcttcatgaatctgggtgctcctgtattgggtgcatatacatttaggatagttagctctccttgttgaagtgac

SEQ ID NO: 40540 - DNA, 80 bp, synthetic construct
  source 1..80: mol_type = other DNA
cacatgtcaaggatctcctgaatacagcacactgaggggtcttgactctttatccaatttgccagtctgtgtcttttaat

SEQ ID NO: 40541 - DNA, 80 bp, synthetic construct
  source 1..80: mol_type = other DNA
tggtttttcctttctgccccccatgttcatatatttattcaggagtatttaccacctatgataggccaggaattattctc

SEQ ID NO: 40542 - DNA, 80 bp, synthetic construct; identical to SEQ ID NO: 10995
  source 1..80: mol_type = other DNA

SEQ ID NO: 40543 - DNA, 80 bp, synthetic construct
  source 1..80: mol_type = other DNA
tcaagccatacctggagaagaattatttagggttcctgcaggagatgagttacaaagtaggtagtacttagattttatag

SEQ ID NO: 40544 - DNA, 80 bp, synthetic construct
  source 1..80: mol_type = other DNA
caaggcactccactagaacactatgacaacattacacaaaagaggggctgggaagtcaagacttaatcaagggaggcatc

SEQ ID NO: 40545 - DNA, 80 bp, synthetic construct
  source 1..80: mol_type = other DNA
agtctctttatcttttaaattttctctccagtgtctgtatttatttctctcttccaccacttagtcttccttcccatttg

SEQ ID NO: 40546 - DNA, 80 bp, synthetic construct; identical to SEQ ID NO: 10996
  source 1..80: mol_type = other DNA

SEQ ID NO: 40547 - DNA, 80 bp, synthetic construct
  source 1..80: mol_type = other DNA
attggccttggcccatgcagcaggtgataaaattaaaattagctaccaacagatctggaggtaaaacatcactttactgt

SEQ ID NO: 40548 - DNA, 80 bp, synthetic construct
  source 1..80: mol_type = other DNA
caatatgaaaaagcagggaaattttcaagtgatgaagtccattaaacaaatatctcatgaaagagggaaacagtctttga

SEQ ID NO: 40549 - DNA, 80 bp, synthetic construct
  source 1..80: mol_type = other DNA
actttcaataaaaacagctgactggtgaaaaagttaattttgtagtataagattattgaacctgtgaggttcaataagtg

SEQ ID NO: 40550 - DNA, 80 bp, synthetic construct; identical to SEQ ID NO: 10997
  source 1..80: mol_type = other DNA

SEQ ID NO: 40551 - DNA, 80 bp, synthetic construct
  source 1..80: mol_type = other DNA
agtgccaactcattgacagaagtgtttccacaagacaagatcagcaaaggggggatgtcacagaagaagtaattaatctg

SEQ ID NO: 40552 - DNA, 80 bp, synthetic construct
  source 1..80: mol_type = other DNA
gccattgctgccagtaggagacactctgatcctacaaagaaaacaaatgcaaaaagttgaaccacacaccccacataaga

SEQ ID NO: 40553 - DNA, 80 bp, synthetic construct
  source 1..80: mol_type = other DNA
aaagtacagaaataagtcagaaagaagatggtgaatagtaaaaactgcaattcatttaggttggagaatcccaagatgat

SEQ ID NO: 40554 - DNA, 80 bp, synthetic construct; identical to SEQ ID NO: 10998
  source 1..80: mol_type = other DNA

SEQ ID NO: 40555 - DNA, 80 bp, synthetic construct
  source 1..80: mol_type = other DNA
aatgcgatttctagaagaatctctggtattcatttgcttctttgaagccatccctgctctcctttttcatacttcaacgt

SEQ ID NO: 40556 - DNA, 80 bp, synthetic construct
  source 1..80: mol_type = other DNA
attttccatatagaaatgttgaatagaggatcaaaagtacctattttaatctgatttttccttaattttccgtggcaata

SEQ ID NO: 40557 - DNA, 80 bp, synthetic construct
  source 1..80: mol_type = other DNA
cctgaatttggggttaggttatctgaatttttataaactttccaagagacttatcctaatgaattagaaacctattgcta

SEQ ID NO: 40558 - DNA, 80 bp, synthetic construct; identical to SEQ ID NO: 10999
  source 1..80: mol_type = other DNA

SEQ ID NO: 40559 - DNA, 80 bp, synthetic construct
  source 1..80: mol_type = other DNA
tttaactggttacaaattgttatgacttctatttctgactgttaatggcaatgtgctatgcctgcagtgttttgatggtt

SEQ ID NO: 40560 - DNA, 80 bp, synthetic construct
  source 1..80: mol_type = other DNA
gttaataaaaatgtttaataaaattaaaacagttgtagggagaatcccctaatttaaaatgctcagggcctaattcaagt

SEQ ID NO: 40561 - DNA, 80 bp, synthetic construct
  source 1..80: mol_type = other DNA
tcaagtttgagaggtggcttaattgtgcttttgttgtaattgctgtcttctttcctcgtgaactactgtggatattttta

SEQ ID NO: 40562 - DNA, 80 bp, synthetic construct; identical to SEQ ID NO: 11000
  source 1..80: mol_type = other DNA

SEQ ID NO: 40563 - DNA, 80 bp, synthetic construct
  source 1..80: mol_type = other DNA
aatcagtatctcaaagagatatctgcactcccatggtctttgcagcattattcacagtagccatggaaacaacctaaatc

SEQ ID NO: 40564 - DNA, 80 bp, synthetic construct
  source 1..80: mol_type = other DNA
tctcccttatatgtggaatctaaaaaggtcaaatctattgaggtagaaaatagaatggtggttaccagagtttgaggtag

SEQ ID NO: 40565 - DNA, 80 bp, synthetic construct
  source 1..80: mol_type = other DNA
aatgataagtatgtgaggtggcagatatgttatttagcctgctgtactcattccaaaatatatacatgcattataacatc

SEQ ID NO: 40566 - DNA, 80 bp, synthetic construct; identical to SEQ ID NO: 11001
  source 1..80: mol_type = other DNA

SEQ ID NO: 40567 - DNA, 80 bp, synthetic construct
  source 1..80: mol_type = other DNA
cctggattgaacaagcagatggctgggggtgtcattctctgaaatgaaagcaggaaattggcacttgttggcaaatctgg

SEQ ID NO: 40568 - DNA, 80 bp, synthetic construct
  source 1..80: mol_type = other DNA
ctcactcgggaagtgcaaggagcttccccagccaagggaagctgtgagggactgtgctattcacccacatactacacctt

SEQ ID NO: 40569 - DNA, 80 bp, synthetic construct
  source 1..80: mol_type = other DNA
acagaactgttcactcccctggaaagggggctgaagccaagtgctctcactcagcgggtcccactcctatggagcccagc

SEQ ID NO: 40570 - DNA, 80 bp, synthetic construct; identical to SEQ ID NO: 11002
  source 1..80: mol_type = other DNA

SEQ ID NO: 40571 - DNA, 80 bp, synthetic construct
  source 1..80: mol_type = other DNA
gggttctcccagcacagcgctcaagctctgctaagggacagactgcctctgccagtgaatccctgaccccagtgcctact

SEQ ID NO: 40572 - DNA, 80 bp, synthetic construct
  source 1..80: mol_type = other DNA
tggagtgaaccttgagcaaactgcagcagacctgcagaagaggggcctgactggtagaagaaaaactaacaaacagaaag

SEQ ID NO: 40573 - DNA, 80 bp, synthetic construct
  source 1..80: mol_type = other DNA
ctccaaatgattgcaactcctctccagcaagtgcacaaaactgggcagagaatgagtttgatgaattcacagaagtaggc

SEQ ID NO: 40574 - DNA, 80 bp, synthetic construct
  source 1..80: mol_type = other DNA
aacttcatgaagcatacacaagtatcaatagctgaattgatcaaccagaagaaaggatatcagagattgaagatcaactt

SEQ ID NO: 40575 - DNA, 80 bp, synthetic construct; identical to SEQ ID NO: 11003
  source 1..80: mol_type = other DNA

SEQ ID NO: 40576 - DNA, 80 bp, synthetic construct
  source 1..80: mol_type = other DNA
aagccagaagagagtggggaccaatattcaacattcttaaaaaaaaagaattttcaactcagaattttgcatacagccaa

SEQ ID NO: 40577 - DNA, 80 bp, synthetic construct
  source 1..80: mol_type = other DNA
taaaaaccaaagacactatgaagaaactgcatcaactaatgttcaaagtaaccaactagcatcatgatgaatggatcaaa

SEQ ID NO: 40578 - DNA, 80 bp, synthetic construct
  source 1..80: mol_type = other DNA
gacagagaaatatttaccaagcaaatggaaagagaaaaaaaaagcaggggttgcaatcctagtctctgataaaacagaat

SEQ ID NO: 40579 - DNA, 80 bp, synthetic construct; identical to SEQ ID NO: 11004
  source 1..80: mol_type = other DNA

SEQ ID NO: 40580 - DNA, 80 bp, synthetic construct
  source 1..80: mol_type = other DNA
aaaagaatggaaatcaaaacaaacagtctctcagaccacagtgcaatcaaattagaactcagcattaagaaactcactca

SEQ ID NO: 40581 - DNA, 80 bp, synthetic construct
  source 1..80: mol_type = other DNA
tgttaagagaaaaatttagagcactaaatgcccacgtcagaaagcaggaaagatttaaaatcgaccccctaacatcacaa

SEQ ID NO: 40582 - DNA, 80 bp, synthetic construct
  source 1..80: mol_type = other DNA
atagactgctagccagactagtaaagaagaaaagagagaagaatcaaatagacacaataaaaaatggtaaaggagttatc

SEQ ID NO: 40583 - DNA, 80 bp, synthetic construct; identical to SEQ ID NO: 11005
  source 1..80: mol_type = other DNA

SEQ ID NO: 40584 - DNA, 80 bp, synthetic construct
  source 1..80: mol_type = other DNA
ccctaatgaacctcgatgcaaaaatgctcaataaactactggcaaaccaaatccagcagcacatcaaaaatcttatccac

SEQ ID NO: 40585 - DNA, 80 bp, synthetic construct
  source 1..80: mol_type = other DNA
aaaactctcaataaactaaatattgatggaacatatatataaaaaaagacctattcacaacaaacccatagccaatatca

SEQ ID NO: 40586 - DNA, 80 bp, synthetic construct
  source 1..80: mol_type = other DNA
ctaattgcctctgtttgcagatgacataattgtatatttagaaaaccccatcatctcagcccaaaactccttaggctgat

SEQ ID NO: 40587 - DNA, 80 bp, synthetic construct; identical to SEQ ID NO: 11006
  source 1..80: mol_type = other DNA

SEQ ID NO: 40588 - DNA, 80 bp, synthetic construct
  source 1..80: mol_type = other DNA
atagccaagacaatcctaagcaaaaagaacaaagctgggccgggcgcggtggctcacgcctgtaatcccagcactttggg

SEQ ID NO: 40589 - DNA, 80 bp, synthetic construct
  source 1..80: mol_type = other DNA
cccgggaggcggagcttgcagtgagccgagatcccgccactgcactccagcctgggcgacagagcgagactccgtctcaa

SEQ ID NO: 40590 - DNA, 80 bp, synthetic construct; identical to SEQ ID NO: 11007
  source 1..80: mol_type = other DNA

SEQ ID NO: 40591 - DNA, 80 bp, synthetic construct
  source 1..80: mol_type = other DNA
aaagacttaaacataaaacctaaacccatacaaaccctagaagaaaaccttggcaataccattcaggacataggcatggg

SEQ ID NO: 40592 - DNA, 80 bp, synthetic construct
  source 1..80: mol_type = other DNA
aacaggaaacctacagaatgggagaaaattttggctatctatccatctggcaaaggtctaatatccagaatctacaagga

SEQ ID NO: 40593 - DNA, 80 bp, synthetic construct; identical to SEQ ID NO: 11008
  source 1..80: mol_type = other DNA

SEQ ID NO: 40594 - DNA, 80 bp, synthetic construct
  source 1..80: mol_type = other DNA
aagacacatgcatacgtaggtttattgtggcattatttaaagtagcaaagacttggaaccaacacaaatgcccatcaatg

SEQ ID NO: 40595 - DNA, 80 bp, synthetic construct
  source 1..80: mol_type = other DNA
aaactatcacaggaacagaaaaccagacactacatgttctcactcataagtgggagttgaacaatgagaacacatggaca

SEQ ID NO: 40596 - DNA, 80 bp, synthetic construct; identical to SEQ ID NO: 11009
  source 1..80: mol_type = other DNA

SEQ ID NO: 40597 - DNA, 80 bp, synthetic construct
  source 1..80: mol_type = other DNA
cctatggatgggagagtgtgaagtaggaaaaaagagaacacagaattgaactttctcagaactaatttcctgcatgtaga

SEQ ID NO: 40598 - DNA, 80 bp, synthetic construct
  source 1..80: mol_type = other DNA
cccatttttcttgccagaccattcctcatgagaaaagctatcctgcagagaactgccctccaacacaaacataggtcatt

SEQ ID NO: 40599 - DNA, 80 bp, synthetic construct
  source 1..80: mol_type = other DNA
gttctgtgatcattgccctttacttcaaaacatgcctttcccatgtccctatttgtggggaagctgttgtgataaaacga

SEQ ID NO: 40600 - DNA, 80 bp, synthetic construct; identical to SEQ ID NO: 11010
  source 1..80: mol_type = other DNA

SEQ ID NO: 40601 - DNA, 80 bp, synthetic construct
  source 1..80: mol_type = other DNA
taatggattactactgttggaatataaggcagtatagcaaaattttccaagaaaacaattgtatttcctcccttttttac

SEQ ID NO: 40602 - DNA, 80 bp, synthetic construct
  source 1..80: mol_type = other DNA
aattcttctatttccaaatctagaacaacatcctgcagctggtactcaaattgtgctacatgggtcattgttgcctctca

SEQ ID NO: 40603 - DNA, 80 bp, synthetic construct
  source 1..80: mol_type = other DNA
gttttcagaatttcatatcatagtaaagagctcaagaatggcctctaagaacccacaaggagaggcccccagaaaattca

SEQ ID NO: 40604 - DNA, 80 bp, synthetic construct; identical to SEQ ID NO: 11011
  source 1..80: mol_type = other DNA

SEQ ID NO: 40605 - DNA, 80 bp, synthetic construct
  source 1..80: mol_type = other DNA
cataaaaattacccaaaatgaaagaagcttcctgattcacatactcagtaggctgattgtcacccaaagcatgggacaga

SEQ ID NO: 40606 - DNA, 80 bp, synthetic construct
  source 1..80: mol_type = other DNA
ggagatattgagcagagattaccattcagactctgagagactgatatggggctgtttttaagaatacaacgaagtaacac

SEQ ID NO: 40607 - DNA, 80 bp, synthetic construct
  source 1..80: mol_type = other DNA
aaatgccctttggattaagaagatccccacatcttatgggaatatttcaagagcctcggagacacacgttggggatcttc

SEQ ID NO: 40608 - DNA, 80 bp, synthetic construct; identical to SEQ ID NO: 11012
  source 1..80: mol_type = other DNA

SEQ ID NO: 40609 - DNA, 80 bp, synthetic construct
  source 1..80: mol_type = other DNA
tacattgcacactacttcgcactgaagaaatattcttcagccaccgaagactgattagtcctccaaatatctattccttt

SEQ ID NO: 40610 - DNA, 80 bp, synthetic construct
  source 1..80: mol_type = other DNA
cagctaagtatgccactatcacataaaaacagaatttctgaatcctttgacctctaatgattatattgcctgccctttaa

SEQ ID NO: 40611 - DNA, 80 bp, synthetic construct
  source 1..80: mol_type = other DNA
gtacacacagcaagagagttatcatctgaagatatctatgagtggttatttcactccaaaaacagacgataataaatttt

SEQ ID NO: 40612 - DNA, 80 bp, synthetic construct; identical to SEQ ID NO: 11013
  source 1..80: mol_type = other DNA

SEQ ID NO: 40613 - DNA, 80 bp, synthetic construct
  source 1..80: mol_type = other DNA
catccatgttgctgcaaaggacattattttattctgtttttatggctgcatagtattccatggtgcatatgtaacacatt

SEQ ID NO: 40614 - DNA, 80 bp, synthetic construct
  source 1..80: mol_type = other DNA
tgagaaatctccagactgcttttcacagttgctggactaatccacattcccaccaacagcatataagcattcccttttct

SEQ ID NO: 40615 - DNA, 80 bp, synthetic construct
  source 1..80: mol_type = other DNA
gagagtgttttttcatgtcctttgcccatttattaatgggattattggctttctgcttgttgacttgtttaagttcccta

SEQ ID NO: 40616 - DNA, 80 bp, synthetic construct; identical to SEQ ID NO: 11014
  source 1..80: mol_type = other DNA

SEQ ID NO: 40617 - DNA, 80 bp, synthetic construct
  source 1..80: mol_type = other DNA
cttataaatctaggagtttggggtgtctttgctttttatgatgtataataagggatttaccaataatgtgtgctctctaa

SEQ ID NO: 40618 - DNA, 80 bp, synthetic construct
  source 1..80: mol_type = other DNA
taaatgagtgtacgtgactataaatggccataacaaaaaagaaatagatagggtagagacaaaaaggaaaaaaaatttca

SEQ ID NO: 40619 - DNA, 80 bp, synthetic construct
  source 1..80: mol_type = other DNA
gtttgtttctacaaaaaaaggagaaaaaaagttaacaaagtgtgaatttaagataaggcctggagtgctggctcacacct

SEQ ID NO: 40620 - DNA, 80 bp, synthetic construct
  source 1..80: mol_type = other DNA
aaccctgaacagtattgccagctacatatgttgtacctcgatcaggagtgactacattagtgcctgtgatttagattata

SEQ ID NO: 40621 - DNA, 80 bp, synthetic construct; identical to SEQ ID NO: 11015
  source 1..80: mol_type = other DNA

SEQ ID NO: 40622 - DNA, 80 bp, synthetic construct
  source 1..80: mol_type = other DNA
tatgcctcaaaataagcataataatttaggggaaatacagacataaaaagagagagatttttttaaagacccacatagaa

SEQ ID NO: 40623 - DNA, 80 bp, synthetic construct
  source 1..80: mol_type = other DNA
aagtatcaatgacctatgtcataatttcaagcagtctaacatatgtgcaagtggagtactaaagaagtgtttgattaaaa

SEQ ID NO: 40624 - DNA, 80 bp, synthetic construct
  source 1..80: mol_type = other DNA
tcagcaagagaaaaatcaacacagttattacaaaggaataaagataagaatggcagcatgcatcccaccagaaattatgt

SEQ ID NO: 40625 - DNA, 80 bp, synthetic construct; identical to SEQ ID NO: 11016
  source 1..80: mol_type = other DNA

SEQ ID NO: 40626 - DNA, 80 bp, synthetic construct
  source 1..80: mol_type = other DNA
agcatgagcagggagatggaagtacagtatggcatgactctagcaatacatcttaaatggtgtaatattatgtgaagaaa

SEQ ID NO: 40627 - DNA, 80 bp, synthetic construct
  source 1..80: mol_type = other DNA
aaaaaacagtaaatgaaagaagaagcaataacggacaaataggacaaatgaaaggcaaacagttggaggacaaatttaaa

SEQ ID NO: 40628 - DNA, 80 bp, synthetic construct
  source 1..80: mol_type = other DNA
gtattcaacagtaaactaatgcagggacagtaatgtaggtttagcttgattgtggtagtctcttcacaatgtatacatat

SEQ ID NO: 40629 - DNA, 80 bp, synthetic construct; identical to SEQ ID NO: 11017
  source 1..80: mol_type = other DNA

SEQ ID NO: 40630 - DNA, 80 bp, synthetic construct
  source 1..80: mol_type = other DNA
tccttgccaccgaattatcctgacatatgtacttacgcgtttggttatttggggcctccatcacattaaactttatgttt

SEQ ID NO: 40631 - DNA, 80 bp, synthetic construct
  source 1..80: mol_type = other DNA
gatatccctcattagtcctagtggtgttgctgccagtctttaaacaacttcctaccaaagattttcttcagagccatcat

SEQ ID NO: 40632 - DNA, 80 bp, synthetic construct
  source 1..80: mol_type = other DNA
tgggaggcacaagtggacagagccttgtggagtattctgcaggacctgttcttaaacagaaggaagccaattacatagaa

SEQ ID NO: 40633 - DNA, 80 bp, synthetic construct; identical to SEQ ID NO: 11018
  source 1..80: mol_type = other DNA

SEQ ID NO: 40634 - DNA, 80 bp, synthetic construct
  source 1..80: mol_type = other DNA
gatacagcctagaaaagatatagccctgcgactgcacacgaggtttacgagcagcttgggcagtgtcactgaagaataag

SEQ ID NO: 40635 - DNA, 80 bp, synthetic construct
  source 1..80: mol_type = other DNA
agtcaggccaagtagaagaaactcattcattgtagtgacattctccattgctctgggaagcaaatttaacaataacagaa

SEQ ID NO: 40636 - DNA, 80 bp, synthetic construct
  source 1..80: mol_type = other DNA
tatgtacaacaaaattgaggaagactaatatacctgataaattctgagctgttaaaatggcactagactaataaaagcat

SEQ ID NO: 40637 - DNA, 80 bp, synthetic construct; identical to SEQ ID NO: 11019
  source 1..80: mol_type = other DNA

SEQ ID NO: 40638 - DNA, 80 bp, synthetic construct
  source 1..80: mol_type = other DNA
aaaacttgaaatagttagaggtcccattagtagaagaacttcgaaaacacccccaatttttcaatccaaaaggggagtac

SEQ ID NO: 40639 - DNA, 80 bp, synthetic construct
  source 1..80: mol_type = other DNA
aatcaccaccttatcaacagaagagggagcccttgcactgaggaattggaaaggctaactaggatactcctcccacccat

SEQ ID NO: 40640 - DNA, 80 bp, synthetic construct
  source 1..80: mol_type = other DNA
caatgagaagatttaacaagtttctctctatacctgacagaagaatcagccaaaaagtcagtaaggatataaacatctga

SEQ ID NO: 40641 - DNA, 80 bp, synthetic construct; identical to SEQ ID NO: 11020
  source 1..80: mol_type = other DNA

SEQ ID NO: 40642 - DNA, 80 bp, synthetic construct
  source 1..80: mol_type = other DNA
aaagaaatattgaaaaaccaataacctaaactttcatttcaaacagctaaatgaatgaatgcatgaatgaatgaacaaat

SEQ ID NO: 40643 - DNA, 80 bp, synthetic construct
  source 1..80: mol_type = other DNA
taaaagagagagagaatacaaattttaagctagtatcactacagatactatcaacgtcaaacattgtaaaaggtcgttat

SEQ ID NO: 40644 - DNA, 80 bp, synthetic construct
  source 1..80: mol_type = other DNA
aaacaccaagtccagattttactggtgaattctaccaaataattaaggaagaaataataacttacacaaatactttcaaa

SEQ ID NO: 40645 - DNA, 80 bp, synthetic construct
  source 1..80: mol_type = other DNA
ctagaccatcctggctaacatggtgaaacaccgtctctactaaaaatacaaaaaattagcctggtgtggtggcaggagcc

SEQ ID NO: 40646 - DNA, 80 bp, synthetic construct; identical to SEQ ID NO: 11021
  source 1..80: mol_type = other DNA

SEQ ID NO: 40647 - DNA, 80 bp, synthetic construct
  source 1..80: mol_type = other DNA
tagcaaactagggatacaagggaaattagtttatttgataaaattaataaaaaataccataagaaaagatcatacctaat

SEQ ID NO: 40648 - DNA, 80 bp, synthetic construct
  source 1..80: mol_type = other DNA
tagatgatatgcctgtatggttagaagatttctgagatatgaggacattaaacaagaattaaatatattttatatgctaa

SEQ ID NO: 40649 - DNA, 80 bp, synthetic construct
  source 1..80: mol_type = other DNA
atatggtatattcatgggctgaaagatatactataatgaagatgtctactctcctaaaagtaatctgaaaagtcaacgca

SEQ ID NO: 40650 - DNA, 80 bp, synthetic construct; identical to SEQ ID NO: 11022
  source 1..80: mol_type = other DNA

SEQ ID NO: 40651 - DNA, 80 bp, synthetic construct
  source 1..80: mol_type = other DNA
catagtgattttggaaaacaatctggcagtatcctcaagctaaacatacgcatatatgaataagccagaaattccattcc

SEQ ID NO: 40652 - DNA, 80 bp, synthetic construct
  source 1..80: mol_type = other DNA
atgaagctgtttcttcatgtgggtgtgttggttatacagatatgtcattttgtgaaaatttattgagactcaggatttat

SEQ ID NO: 40653 - DNA, 80 bp, synthetic construct
  source 1..80: mol_type = other DNA
catcgaaaatgtctgcatgacaaaaatcctacaaataaaagatcaaaacgcatccaggaataaaatcacaaagcaaattg

SEQ ID NO: 40654 - DNA, 80 bp, synthetic construct
  source 1..80: mol_type = other DNA
gaaaaatgcaaattgaaatatgacatgcaggcaagcgctacagcaggctgccgtgagcactgtaaagagcaccaacgcgc

SEQ ID NO: 40655 - DNA, 80 bp, synthetic construct; identical to SEQ ID NO: 11023
  source 1..80: mol_type = other DNA

SEQ ID NO: 40656 - DNA, 80 bp, synthetic construct
  source 1..80: mol_type = other DNA
aggtaggttttttcctgcctcctatcaaaaggtagttcctccaacaacacagcacttgagtaaggggggcccatcaggaa

SEQ ID NO: 40657 - DNA, 80 bp, synthetic construct
  source 1..80: mol_type = other DNA
cttctgccacccacagacaccagagtgagaaagggggaaagagggcaccagcaagaaatattccaatttgacaatcatcc

SEQ ID NO: 40658 - DNA, 80 bp, synthetic construct
  source 1..80: mol_type = other DNA
accagcagagaacaatggaaaccccagtagtaccaaataaaactagaacacaaaaataacagctaaaagtctcttaaaaa

SEQ ID NO: 40659 - DNA, 80 bp, synthetic construct
  source 1..80: mol_type = other DNA
attgccattggatgcacagcctacaaaattaggtcaggacctgtgtgctaggtctaaacagagtgactatctgctaaaat

SEQ ID NO: 40660 - DNA, 80 bp, synthetic construct; identical to SEQ ID NO: 11024
  source 1..80: mol_type = other DNA

SEQ ID NO: 40661 - DNA, 80 bp, synthetic construct
  source 1..80: mol_type = other DNA
atatacaggttgaagaagctgaataaaccccttgcaggattaatctaaagaaatccaagccaagaaacatcataatttga

SEQ ID NO: 40662 - DNA, 80 bp, synthetic construct
  source 1..80: mol_type = other DNA
ttattagaaaatagaatgcaatatgtagaaagaatttacataggccaagtggatttatttcaggtgtacaagactacata

SEQ ID NO: 40663 - DNA, 80 bp, synthetic construct
  source 1..80: mol_type = other DNA
actcaataaagatcatccataaaaatcttccaggtaaatgctttccttctaagattaggaataaagcgtggatgtctgct

SEQ ID NO: 40664 - DNA, 80 bp, synthetic construct; identical to SEQ ID NO: 11025
  source 1..80: mol_type = other DNA

SEQ ID NO: 40665 - DNA, 80 bp, synthetic construct
  source 1..80: mol_type = other DNA
gtaaagatgtcaatcctctccaaattgatatacaggtttaacacaattcttatcaaaatcccagaaatatttcttagtag

SEQ ID NO: 40666 - DNA, 80 bp, synthetic construct
  source 1..80: mol_type = other DNA
agtgatagtgaaacagatcaatggaacagaatagagaacccataaatcagcccacacaaatatgtccaactgatttttta

SEQ ID NO: 40667 - DNA, 80 bp, synthetic construct
  source 1..80: mol_type = other DNA
tgtaaagctacatatcttctagaaaaaatagaaaacagtattcagggtctagagctaggcaaggagtccttagattttcc

SEQ ID NO: 40668 - DNA, 80 bp, synthetic construct; identical to SEQ ID NO: 11026
  source 1..80: mol_type = other DNA

SEQ ID NO: 40669 - DNA, 80 bp, synthetic construct
  source 1..80: mol_type = other DNA
caccaaatgctagggaggatacagaaagactggatcatgaatataaaactggtcaggatataaaatggtacaactgcgct

SEQ ID NO: 40670 - DNA, 80 bp, synthetic construct
  source 1..80: mol_type = other DNA
taccccaaatgtcctgcaatggagaaatgcttacacaaactgtggtatatccataccatggaatgctacttagcaataaa

SEQ ID NO: 40671 - DNA, 80 bp, synthetic construct
  source 1..80: mol_type = other DNA
gaaatggggaaaagattggtagttacagttggagaatgaagttggagaaggagcagaagagaggtgtgtgtggttatgaa

SEQ ID NO: 40672 - DNA, 80 bp, synthetic construct; identical to SEQ ID NO: 11027
  source 1..80: mol_type = other DNA

SEQ ID NO: 40673 - DNA, 80 bp, synthetic construct
  source 1..80: mol_type = other DNA
gctgggtaattttttcaatagctctcaaagttgaaaattgtgaatcacatactttgtgttataatttacctgtagatatt

SEQ ID NO: 40674 - DNA, 80 bp, synthetic construct
  source 1..80: mol_type = other DNA
atatatacacacacaaagaaaatagccaggtggatagatacggaaaggtgcacaaatcatatatatgcaaatttttacat

SEQ ID NO: 40675 - DNA, 80 bp, synthetic construct
  source 1..80: mol_type = other DNA
gataactgttgtagtctctaggaagagaaactggctgtcaaggaaacaaaggcagaagaaatactctttttagtatattt

SEQ ID NO: 40676 - DNA, 80 bp, synthetic construct; identical to SEQ ID NO: 11028
  source 1..80: mol_type = other DNA

SEQ ID NO: 40677 - DNA, 80 bp, synthetic construct
  source 1..80: mol_type = other DNA
tgtctcctgggttcaagcaattctcaggcttcaacctcccagatagctgggattacaggtacgcatcaccacactgtgct

SEQ ID NO: 40678 - DNA, 80 bp, synthetic construct
  source 1..80: mol_type = other DNA
caccatgcctggccaccatttattcttataggtagaattttgcatgtctgtctactcattggaatatcagattattagag

SEQ ID NO: 40679 - DNA, 80 bp, synthetic construct
  source 1..80: mol_type = other DNA
atccatgtactcttacaaatgactgttattctaatataataattagtaaatatgaaataaattccaagaaaaaatgaaca

SEQ ID NO: 40680 - DNA, 80 bp, synthetic construct
  source 1..80: mol_type = other DNA
gagatctcttgtctaacccccactctgagttctagacttacctaatttcatatttgactctccacttgaattcacacaaa

SEQ ID NO: 40681 - DNA, 80 bp, synthetic construct; identical to SEQ ID NO: 11029
  source 1..80: mol_type = other DNA

SEQ ID NO: 40682 - DNA, 80 bp, synthetic construct
  source 1..80: mol_type = other DNA
atcctggcccaagtcatgattgcctttaaacttaactacttcaaagcagccctacagttcttttcttcccctactctcaa

SEQ ID NO: 40683 - DNA, 80 bp, synthetic construct
  source 1..80: mol_type = other DNA
tgtgatcctactggatatcttccaattcctcaaatatatcaaggtgtcccttgacagggacttcattcatgcttgtcctc

SEQ ID NO: 40684 - DNA, 80 bp, synthetic construct
  source 1..80: mol_type = other DNA
gctgggactacaggcgcccaccaccacgcccggctaattttttgtgtttttagtagagacggggtttcaccatgttagcc

SEQ ID NO: 40685 - DNA, 80 bp, synthetic construct; identical to SEQ ID NO: 11030
  source 1..80: mol_type = other DNA

SEQ ID NO: 40686 - DNA, 80 bp, synthetic construct
  source 1..80: mol_type = other DNA
attatagttattctatttcatgttctttactactctcatgtactcacactcctccttactcatcttaagttccatatgca

SEQ ID NO: 40687 - DNA, 80 bp, synthetic construct
  source 1..80: mol_type = other DNA
ctgaacacgattggaggaaaatgcacctgtgctcacttgcctagatctaaattcattaatactcaactgcattgaaatct

SEQ ID NO: 40688 - DNA, 80 bp, synthetic construct
  source 1..80: mol_type = other DNA
aaacagtctgtaaagactggaatatatgcctatttcttcagatgcacagacaccaacgcatgaccacaaggatcatgagc

SEQ ID NO: 40689 - DNA, 80 bp, synthetic construct; identical to SEQ ID NO: 11031
  source 1..80: mol_type = other DNA

SEQ ID NO: 40690 - DNA, 80 bp, synthetic construct
  source 1..80: mol_type = other DNA
tgtgttcccctttacaattaaattctgtaaacatttgcctataccagctgtttgcaatcctctttccattccctcctaca

SEQ ID NO: 40691 - DNA, 80 bp, synthetic construct
  source 1..80: mol_type = other DNA
taatggtttttagccaataggtacaggtttttccacaattcatttttggcatgacctgctctcaatggcattaataattc

SEQ ID NO: 40692 - DNA, 80 bp, synthetic construct
  source 1..80: mol_type = other DNA
tcataaacatagctgaaggacattgtaacggatgcatataattaagggtttgggatgtacgcttgtgaaactacataagt

SEQ ID NO: 40693 - DNA, 80 bp, synthetic construct; identical to SEQ ID NO: 11032
  source 1..80: mol_type = other DNA

SEQ ID NO: 40694 - DNA, 80 bp, synthetic construct
  source 1..80: mol_type = other DNA
atttgaagcttccctcataaatgttttatgtaatgagcccacctgttgcatcctgtaatcttcatagcctatattcaaag

SEQ ID NO: 40695 - DNA, 80 bp, synthetic construct
  source 1..80: mol_type = other DNA
caaaagagttatccaaatatcatagatcagatgtatttattgtgtccttgaataaagttatcagagaaagttctgactgc

SEQ ID NO: 40696 - DNA, 80 bp, synthetic construct
  source 1..80: mol_type = other DNA
catcttgagcattaacactttgggattttctctccaaggacttattctctttatatttctcttcccctgtgtatcagttt

SEQ ID NO: 40697 - DNA, 80 bp, synthetic construct
  source 1..80: mol_type = other DNA
aagacacagctcctatccttgagaaatctaacatctaatgaatctgaaaagtaatatcacttagaacaatataatgaaaa

SEQ ID NO: 40698 - DNA, 80 bp, synthetic construct; identical to SEQ ID NO: 11033
  source 1..80: mol_type = other DNA

SEQ ID NO: 40699 - DNA, 80 bp, synthetic construct
  source 1..80: mol_type = other DNA
ttagggtaagtgtcaaagacaagtcatgttaacacacagattagttgtaggatgagactcactgaaatagctcttaggaa

SEQ ID NO: 40700 - DNA, 80 bp, synthetic construct
  source 1..80: mol_type = other DNA
aagcaagcatatttgtgagtggaatcaaagatagaaaaaagggatagagaactaggtggggttttttttcctgatatctg

SEQ ID NO: 40701 - DNA, 80 bp, synthetic construct
  source 1..80: mol_type = other DNA
tcactgagctgttttagtatcaaaattttgaatactctgcctgggattgttgacatttcttttttattgggatctgttgc

SEQ ID NO: 40702 - DNA, 80 bp, synthetic construct; identical to SEQ ID NO: 11034
  source 1..80: mol_type = other DNA

SEQ ID NO: 40703 - DNA, 80 bp, synthetic construct
  source 1..80: mol_type = other DNA
gttcttgtgcttccaagtggcttgcttggcttctgggaatggcatcagtagttcaggtatgaagttgaattcttgagccc

SEQ ID NO: 40704 - DNA, 80 bp, synthetic construct
  source 1..80: mol_type = other DNA
ccaggggaaggttgagtggggctgacctcagatcccaggaggggtgctgaggagctaccagtgatggactgggctaagtg

SEQ ID NO: 40705 - DNA, 80 bp, synthetic construct
  source 1..80: mol_type = other DNA
gtagtggctgttttgtggtcatggactggggaggactgggttgcttttcctgggaacaaccataggcaagaaactgggga

SEQ ID NO: 40706 - DNA, 80 bp, synthetic construct; identical to SEQ ID NO: 11035
  source 1..80: mol_type = other DNA

SEQ ID NO: 40707 - DNA, 80 bp, synthetic construct
  source 1..80: mol_type = other DNA
tcccttttcccacattggagagccgctcgagactcatatccgatcttggttgaacaggcggtctcatttccttctccttt

SEQ ID NO: 40708 - DNA, 80 bp, synthetic construct
  source 1..80: mol_type = other DNA
attcaaggggcctgttttgagttggccctaggcctttccccgtaagcaaactttctataacattgaaattacttgggaaa

SEQ ID NO: 40709 - DNA, 80 bp, synthetic construct
  source 1..80: mol_type = other DNA
aggttcaagcaattctcctgcctcagcctcctgagtagctgggattacaggcgtacacccccatgcccagctaatttatg

SEQ ID NO: 40710 - DNA, 80 bp, synthetic construct
  source 1..80: mol_type = other DNA
ctcagccaacttggaggtattttggggaaaaaaaagaagtaatgatttttcctaacttatgagatattaagacctacaat

SEQ ID NO: 40711 - DNA, 80 bp, synthetic construct; identical to SEQ ID NO: 11036
  source 1..80: mol_type = other DNA

SEQ ID NO: 40712 - DNA, 80 bp, synthetic construct
  source 1..80: mol_type = other DNA
aagagccttattttgaatcctagtttcacaatccattgcaaggaaaaggaaactttacttaaatcctttgagccttggtt

SEQ ID NO: 40713 - DNA, 80 bp, synthetic construct
  source 1..80: mol_type = other DNA
attatttgtatgtggaatggctcatacctataatcccaaaattttggggggatgatattggtggattgcttgagaccagg

SEQ ID NO: 40714 - DNA, 80 bp, synthetic construct
  source 1..80: mol_type = other DNA
acttttgccaagcaacaaaaatggaaactcaatagaaagacggaaaaaatacatcacagttacaactgttagtagaatcc

SEQ ID NO: 40715 - DNA, 80 bp, synthetic construct; identical to SEQ ID NO: 11037
  source 1..80: mol_type = other DNA

SEQ ID NO: 40716 - DNA, 80 bp, synthetic construct
  source 1..80: mol_type = other DNA
ataccaaaatattttccaagggagccctcaagaagagaaagtgaatctgaacctctaccataggaaatgaaaggaaattt

SEQ ID NO: 40717 - DNA, 80 bp, synthetic construct
  source 1..80: mol_type = other DNA
tgaaaactgtcttgtccatggttatgaaaccaaggaacaaacatattaagaaaaaaagataagaagaacgacaacaacag

SEQ ID NO: 40718 - DNA, 80 bp, synthetic construct
  source 1..80: mol_type = other DNA
gtttttatgtctagagatctgcagctcattggaaggcaggcagattttcagagaggaaaagatttttgaagataatttat

SEQ ID NO: 40719 - DNA, 80 bp, synthetic construct
  source 1..80: mol_type = other DNA
gttaatgagtgacctgactgcttgcgagtattaaagttagatgcccaggatttagagctggtttcctatttttatgatgg

SEQ ID NO: 40720 - DNA, 80 bp, synthetic construct; identical to SEQ ID NO: 11038
  source 1..80: mol_type = other DNA

SEQ ID NO: 40721 - DNA, 80 bp, synthetic construct
  source 1..80: mol_type = other DNA
ccttcatggaggtgtggtaaaggttagataatctctcaaaatttcctctagctgtaaagccaaatatcctatgggctccc

SEQ ID NO: 40722 - DNA, 80 bp, synthetic construct
  source 1..80: mol_type = other DNA
ctaagtgcctgccatttctatggatttcccacacattcttgcttcttttctcctaatatgcaaaagttaatccactacat

SEQ ID NO: 40723 - DNA, 80 bp, synthetic construct
  source 1..80: mol_type = other DNA
tattaaacctcattataattatcttacttataatccctcatgtgttttaacagttactgaaaaaattctattatttcaat

SEQ ID NO: 40724 - DNA, 80 bp, synthetic construct; identical to SEQ ID NO: 11039
  source 1..80: mol_type = other DNA

SEQ ID NO: 40725 - DNA, 80 bp, synthetic construct
  source 1..80: mol_type = other DNA
tggaagagtttttcttattcagagattcaggggtgtgaaaaaggaaaaagtctcagtgcaactggaaactaaaggaacaa

SEQ ID NO: 40726 - DNA, 80 bp, synthetic construct
  source 1..80: mol_type = other DNA
ctaatatttgattgatgtattattttttcctttcccagtagagctccatgacattgccagagatgtgggttagaaagaga

SEQ ID NO: 40727 - DNA, 80 bp, synthetic construct
  source 1..80: mol_type = other DNA
tatcttcctctctttttttttttttttttttttttttgagacggagtctcgctctgtcgcccaggctggagtgcagtggc

SEQ ID NO: 40728 - DNA, 80 bp, synthetic construct; identical to SEQ ID NO: 11040
  source 1..80: mol_type = other DNA

SEQ ID NO: 40729 - DNA, 80 bp, synthetic construct
  source 1..80: mol_type = other DNA
ctccttccaagtatctttggcttggtgagaaaattctgagccggaaggattctgattgcgattagtgttccatagattat

SEQ ID NO: 40730 - DNA, 80 bp, synthetic construct
  source 1..80: mol_type = other DNA
catctccgatcctagactccattcccttatgtatttcttcctgggaaacctgtcctacctggatatctgttactctacgg

SEQ ID NO: 40731 - DNA, 80 bp, synthetic construct
  source 1..80: mol_type = other DNA
acttcgctacactgtcatcatgaaccctcagctctgtacccagatggccatcacaatctgggtcattggttttttccatg

SEQ ID NO: 40732 - DNA, 80 bp, synthetic construct; identical to SEQ ID NO: 11041
  source 1..80: mol_type = other DNA

SEQ ID NO: 40733 - DNA, 80 bp, synthetic construct
  source 1..80: mol_type = other DNA
gatctatactttgaggaacaaggaagtgaagggggccttgggtagagtgatcagaaggctttgatttgaataaaccagag

SEQ ID NO: 40734 - DNA, 80 bp, synthetic construct
  source 1..80: mol_type = other DNA
ctagttgtagtaaacaatacatttctaagtaatatgaggaatacttgaaaatgcaagacactagccatggaaccctaatg

SEQ ID NO: 40735 - DNA, 80 bp, synthetic construct
  source 1..80: mol_type = other DNA
aattttgcctatattgcccatgtattgtatagatagatgatatttaggactgtttgtctgtgagatccttttagtttaac

SEQ ID NO: 40736 - DNA, 80 bp, synthetic construct
  source 1..80: mol_type = other DNA
tgttcttttaatggtgattcaaaatgcaaaagacatagaaagatgtcaaatgtttctccccatctctgccctccgtcact

SEQ ID NO: 40737 - DNA, 80 bp, synthetic construct; identical to SEQ ID NO: 11042
  source 1..80: mol_type = other DNA

SEQ ID NO: 40738 - DNA, 80 bp, synthetic construct
  source 1..80: mol_type = other DNA
aattcagatagatactgccaaattgccctccccagaggttataaaaaatttcatcaccacttgcaatgtaaaagtgttta

SEQ ID NO: 40739 - DNA, 80 bp, synthetic construct
  source 1..80: mol_type = other DNA
gttttcagactatttgaagcccaagcaagatggcaactgggagaaaggaaaagctaagattacagcaattcttgtcattg

SEQ ID NO: 40740 - DNA, 80 bp, synthetic construct
  source 1..80: mol_type = other DNA
aaagtcctgcacaaaataaaggaaaggtgccctaaaagacccaccgtttaactaaagaaaatgaatctcacacagaggac

SEQ ID NO: 40741 - DNA, 80 bp, synthetic construct; identical to SEQ ID NO: 11043
  source 1..80: mol_type = other DNA

SEQ ID NO: 40742 - DNA, 80 bp, synthetic construct
  source 1..80: mol_type = other DNA
accactcgtatctctccacccttggtcatgaaagatgatgactttaaacactctattattttggtttcgttttcctttat

SEQ ID NO: 40743 - DNA, 80 bp, synthetic construct
  source 1..80: mol_type = other DNA
acaagaataggtatgatgtttcttagtttctaagtacttagaaatggattctggctctgaaaagatgtggtatgccaaca

SEQ ID NO: 40744 - DNA, 80 bp, synthetic construct
  source 1..80: mol_type = other DNA
gtacttcttctatcttccaagtcaaccttctttggtccttcagttccagttttgttgatgagagaatgcctgtgtggaga

SEQ ID NO: 40745 - DNA, 80 bp, synthetic construct; identical to SEQ ID NO: 11044
  source 1..80: mol_type = other DNA

SEQ ID NO: 40746 - DNA, 80 bp, synthetic construct
  source 1..80: mol_type = other DNA
aaagacaaaaaccaagaaccagcattaacataacttctatcatactctattggccaaagaaatcgcaggccaactgagct

SEQ ID NO: 40747 - DNA, 80 bp, synthetic construct
  source 1..80: mol_type = other DNA
ctcaaagtctaggtttttaaaatccaaatcatgacaaagtgcaaatggggcatatttagtatgattcctcaagaatggtt

SEQ ID NO: 40748 - DNA, 80 bp, synthetic construct
  source 1..80: mol_type = other DNA
aaaaaatgggaggcacataacagttacatagcaattgtgaaacccatttggggacatttttctcactccgtcctctagag

SEQ ID NO: 40749 - DNA, 80 bp, synthetic construct; identical to SEQ ID NO: 11045
  source 1..80: mol_type = other DNA

SEQ ID NO: 40750 - DNA, 80 bp, synthetic construct
  source 1..80: mol_type = other DNA
ttttaggttcttaggattcttatttgggtttagtcaattagataagtaccacactcatacatctccttaggacaggcctt

SEQ ID NO: 40751 - DNA, 80 bp, synthetic construct
  source 1..80: mol_type = other DNA
acccttgagatttctctctgtctgtcttcatgccagtagaatactgttttatttactgtacctttgcaacatcttgggaa

SEQ ID NO: 40752 - DNA, 80 bp, synthetic construct
  source 1..80: mol_type = other DNA
gattgcattgaattcatagacaagttatggtagtgtggacattttacaattttaattcttctaagccctgaacataggtt

SEQ ID NO: 40753 - DNA, 80 bp, synthetic construct
  source 1..80: mol_type = other DNA
agctcagaaaagctagattgttaatgtataggaatgcaattgattttgtatgttaattttatattcaatttgaatgcctt

SEQ ID NO: 40754 - DNA, 80 bp, synthetic construct; identical to SEQ ID NO: 11046
  source 1..80: mol_type = other DNA

SEQ ID NO: 40755 - DNA, 80 bp, synthetic construct
  source 1..80: mol_type = other DNA
aacagagtgaaaagtcatcctatgaagcgggagaaaatatttcaaaccatctatctgataggggttaatatctaaaatac

SEQ ID NO: 40756 - DNA, 80 bp, synthetic construct
  source 1..80: mol_type = other DNA
gtactcaataccactaaccatcagaaaaaggcaaccatagtcagatatcacttaacatattttaggatggttattataaa

SEQ ID NO: 40757 - DNA, 80 bp, synthetic construct
  source 1..80: mol_type = other DNA
aattgaaatcagggccttgaagaaatatgtgcaacactctgtttattttgaaattttttacagtagacaaaatacaaaaa

SEQ ID NO: 40758 - DNA, 80 bp, synthetic construct; identical to SEQ ID NO: 11047
  source 1..80: mol_type = other DNA

SEQ ID NO: 40759 - DNA, 80 bp, synthetic construct
  source 1..80: mol_type = other DNA
tacagaaacaaaaacaacacaaaagagcatgaggacatttttggaggtggtggatatgcttactaccctggttgtggtga

SEQ ID NO: 40760 - DNA, 80 bp, synthetic construct
  source 1..80: mol_type = other DNA
agtgacctctgtgtctaacatagagggcttaagaggcctgtcttaagatttttagaaactattctaggcttccccattat

SEQ ID NO: 40761 - DNA, 80 bp, synthetic construct
  source 1..80: mol_type = other DNA
tgggatctttacctaaaaaccatacttcactaacagcaccttggaatatgatctttgccctgaagccatttcttactttg

SEQ ID NO: 40762 - DNA, 80 bp, synthetic construct
  source 1..80: mol_type = other DNA
aaagaatctgttggaactttcactattttgatggtttttatgtcagcttgactgaggatgtccacactttatttaattga

SEQ ID NO: 40763 - DNA, 80 bp, synthetic construct; identical to SEQ ID NO: 11048
  source 1..80: mol_type = other DNA

SEQ ID NO: 40764 - DNA, 80 bp, synthetic construct
  source 1..80: mol_type = other DNA
ccagcaggagtaccatgggattgaattttgagtgtgcatgatcaagggactagaacactaaactggataaatgagaatat

SEQ ID NO: 40765 - DNA, 80 bp, synthetic construct
  source 1..80: mol_type = other DNA
actcaggaaagtgggggtattggaagaatatactatatgtaggtcagaaaagccaccagaatattatgttccacaagagt

SEQ ID NO: 40766 - DNA, 80 bp, synthetic construct
  source 1..80: mol_type = other DNA
aatatatggtagcattgaaccactggaagctagtagttggcaattgctgtaatcatcagtgagtcaaaaaggtagccaag

SEQ ID NO: 40767 - DNA, 80 bp, synthetic construct; identical to SEQ ID NO: 11049
  source 1..80: mol_type = other DNA

SEQ ID NO: 40768 - DNA, 80 bp, synthetic construct
  source 1..80: mol_type = other DNA
actccaagagccaaagcatcaccatggcccaaatgttacaatgagcatacagaagccagattacgaatggagtcatgtta

SEQ ID NO: 40769 - DNA, 80 bp, synthetic construct
  source 1..80: mol_type = other DNA
aactggaagctttgaaactgccccatctggcaaggatattaaactaacaacaatatcacatcctgggaaggatagccaag

SEQ ID NO: 40770 - DNA, 80 bp, synthetic construct
  source 1..80: mol_type = other DNA
cattgatatggcaaatgcattcttgtttcttgggagcatcccaagagtgactgtttcaggagatctattaagaagttgta

SEQ ID NO: 40771 - DNA, 80 bp, synthetic construct; identical to SEQ ID NO: 11050
  source 1..80: mol_type = other DNA

SEQ ID NO: 40772 - DNA, 80 bp, synthetic construct
  source 1..80: mol_type = other DNA
atttgcccaaagtttttccgacagtgattagcaatgatagatgtaagcccaagcagaatggctacagtcattttcttgaa

SEQ ID NO: 40773 - DNA, 80 bp, synthetic construct
  source 1..80: mol_type = other DNA
agaccattctctttgtgctctttttctggacctcctttctaacagatgtgctgggaagttcacaacgtatttcctgcaat

SEQ ID NO: 40774 - DNA, 80 bp, synthetic construct
  source 1..80: mol_type = other DNA
atcaatttgcaaaaatcgcaagcattcctatacaccaacaacagacaaacagagagccacatcatgagtgaacgctcatt

SEQ ID NO: 40775 - DNA, 80 bp, synthetic construct; identical to SEQ ID NO: 11051
  source 1..80: mol_type = other DNA

SEQ ID NO: 40776 - DNA, 80 bp, synthetic construct
  source 1..80: mol_type = other DNA
aacagatatatagaccaacggaacagaacagaggcctcagaaataacaccacacatctacaaccaactgatctttgacaa

SEQ ID NO: 40777 - DNA, 80 bp, synthetic construct
  source 1..80: mol_type = other DNA
accatagaaaccctagaagaaaacctaggcaataccattcaggtcataggcttgggcaaagacttcatgactaaaacacc

SEQ ID NO: 40778 - DNA, 80 bp, synthetic construct
  source 1..80: mol_type = other DNA
aatctacaaagaacttaaacaaatttacaagaaaaaagcaaccccatcaaaaagtgagcaaaggatatgaacagaaactt

SEQ ID NO: 40779 - DNA, 80 bp, synthetic construct; identical to SEQ ID NO: 11052
  source 1..80: mol_type = other DNA

SEQ ID NO: 40780 - DNA, 80 bp, synthetic construct
  source 1..80: mol_type = other DNA
atcaatgataaactggataaagaaaatatggcacgtatacaccatggaatactatgcagccataaaaagggatgagttca

SEQ ID NO: 40781 - DNA, 80 bp, synthetic construct
  source 1..80: mol_type = other DNA
cctgtcagggggtgggagggtagggaaggggtagcattaggagaaatacctaatgtagatgacgggttgatgggtgcagc

SEQ ID NO: 40782 - DNA, 80 bp, synthetic construct
  source 1..80: mol_type = other DNA
tgagtgcagggtcctttgtgactgcatgggtcgcaggcccatgaagcttcctttgtaataaaagaaaatttaaaacaaat

SEQ ID NO: 40783 - DNA, 80 bp, synthetic construct; identical to SEQ ID NO: 11053
  source 1..80: mol_type = other DNA

SEQ ID NO: 40784 - DNA, 80 bp, synthetic construct
  source 1..80: mol_type = other DNA
catttgtattatattcacagtgtataaaataacaagaagttgagggctggccaagatggccaacgagaagcacctattgt

SEQ ID NO: 40785 - DNA, 80 bp, synthetic construct
  source 1..80: mol_type = other DNA
gggtagcctcccctgcccagagaagtggtgagtgagtgagcgaccttgggaacccatacttttcccacagaactttgcaa

SEQ ID NO: 40786 - DNA, 80 bp, synthetic construct
  source 1..80: mol_type = other DNA
caaactgggaggttagacacccccccccatatatacccctagaaaacggtctaaatccacggggctgagcaatgactatc

SEQ ID NO: 40787 - DNA, 80 bp, synthetic construct; identical to SEQ ID NO: 11054
  source 1..80: mol_type = other DNA

SEQ ID NO: 40788 - DNA, 80 bp, synthetic construct
  source 1..80: mol_type = other DNA
gcagagctcccagaggaggggtaggcctccatctttactgttttgcaggcttagccattgtcacttttgggctttggaga

SEQ ID NO: 40789 - DNA, 80 bp, synthetic construct
  source 1..80: mol_type = other DNA
tctgggatccccagccaaccctgccagtgtgtttgggctggtaacaggtccattccttcctggagcagagctcccagagg

SEQ ID NO: 40790 - DNA, 80 bp, synthetic construct
  source 1..80: mol_type = other DNA
gaaaagtggtcagactgtatgttatgtgggtccccaatcctgtatcttctcctggggcagatcctcccagcctagtctcc

SEQ ID NO: 40791 - DNA, 80 bp, synthetic construct; identical to SEQ ID NO: 11055
  source 1..80: mol_type = other DNA

SEQ ID NO: 40792 - DNA, 80 bp, synthetic construct
  source 1..80: mol_type = other DNA
tcctccaaatgatcactctagttcttcaacaagaattcttaagcagactgagatggctgaaataacaaatagaattcaga

SEQ ID NO: 40793 - DNA, 80 bp, synthetic construct
  source 1..80: mol_type = other DNA
atttttcaatgcaatcacaaatattaatagcagagtagacaaagctgaggaaagaatctgagaatttgaagacaggctct

SEQ ID NO: 40794 - DNA, 80 bp, synthetic construct
  source 1..80: mol_type = other DNA
atatcaaccatgaaaacttccccaatcttgctagagaggccaatagtcaaatgcaggaaatacagaaaacctctgcaaga

SEQ ID NO: 40795 - DNA, 80 bp, synthetic construct; identical to SEQ ID NO: 11056
  source 1..80: mol_type = other DNA

SEQ ID NO: 40796 - DNA, 80 bp, synthetic construct
  source 1..80: mol_type = other DNA
cgtgacactataaagcaaccagacaaacaagcaggcataataaccagctaacaacaaaaagacaggattaaatctacata

SEQ ID NO: 40797 - DNA, 80 bp, synthetic construct
  source 1..80: mol_type = other DNA
atctgccaagtaaatgaaaatcagaaataagaagaggttgcaattctaatttcagagaaaaacagactttaaactaacaa

SEQ ID NO: 40798 - DNA, 80 bp, synthetic construct
  source 1..80: mol_type = other DNA
gggagtctccagtagggtatttcaacactcccctgacagtactagacagatcatcaaggcagaaaattaacaaagattta

SEQ ID NO: 40799 - DNA, 80 bp, synthetic construct; identical to SEQ ID NO: 11057
  source 1..80: mol_type = other DNA

SEQ ID NO: 40800 - DNA, 80 bp, synthetic construct
  source 1..80: mol_type = other DNA
gtagcactaaatgcccacatcaaaaagatacgaagatctcaaattaacaacctaacatcataagtaaaagaactagagac

SEQ ID NO: 40801 - DNA, 80 bp, synthetic construct
  source 1..80: mol_type = other DNA
tcaataaagaaggaaagagagatgatccaaataaacacaatcagaaatgacaaatgggatgctaccattgaccccacaac

SEQ ID NO: 40802 - DNA, 80 bp, synthetic construct
  source 1..80: mol_type = other DNA
tgaatcagtaataaatagcctaccaaacaaagggggagtgactcctccccaactcattctatgaggccagcatcatcctg

SEQ ID NO: 40803 - DNA, 80 bp, synthetic construct; identical to SEQ ID NO: 11058
  source 1..80: mol_type = other DNA

SEQ ID NO: 40804 - DNA, 80 bp, synthetic construct
  source 1..80: mol_type = other DNA
gcattcctctggaaaaccagcacaagacaaggatgtcctctctcagcactcctattcaacatagcattggaagtcctggc

SEQ ID NO: 40805 - DNA, 80 bp, synthetic construct
  source 1..80: mol_type = other DNA
tacaaaatcaatgtacaaaagtcactagcattcctatacagcaacaacagtcaagctgagagacaaatcaggaacacaat

SEQ ID NO: 40806 - DNA, 80 bp, synthetic construct
  source 1..80: mol_type = other DNA
atattgtttaaatggccatactgcccaaagcaatttacagattcaatgctatttctatcaaactaccaaagacattcttg

SEQ ID NO: 40807 - DNA, 80 bp, synthetic construct; identical to SEQ ID NO: 11059
  source 1..80: mol_type = other DNA

SEQ ID NO: 40808 - DNA, 80 bp, synthetic construct
  source 1..80: mol_type = other DNA
gaattccccaaggccactgattcatattacaggtgtggaaaggcatcctgctaattcctaaaatctttctcaacaccagg

SEQ ID NO: 40809 - DNA, 80 bp, synthetic construct
  source 1..80: mol_type = other DNA
ggaatataaacatgaatagcttccttaactgtgaatcagaacactcaatcaggtaagagaatgaactaggagacaggctg

SEQ ID NO: 40810 - DNA, 80 bp, synthetic construct
  source 1..80: mol_type = other DNA
tttctatctaatggtggactcctcattgtgtttgtgagatatgaaggcccttgacttaccatgtttttattgccatacct

SEQ ID NO: 40811 - DNA, 80 bp, synthetic construct
  source 1..80: mol_type = other DNA
ctcagaagctaggaatatatgttttaccatatggatttttgggacaattttgttttctgggtccaagaaccaaaaattat

SEQ ID NO: 40812 - DNA, 80 bp, synthetic construct; identical to SEQ ID NO: 11060
  source 1..80: mol_type = other DNA

SEQ ID NO: 40813 - DNA, 80 bp, synthetic construct
  source 1..80: mol_type = other DNA
ctgtaagttccccacacatcctgacttcttccctcccaatatacaagagctaatccattacagcctaatgaaaagaacaa

SEQ ID NO: 40814 - DNA, 80 bp, synthetic construct
  source 1..80: mol_type = other DNA
gaagaaggtgaatttcacttgaggtagaatattccttaatatctgatgagtgagtttatttcaggcaaaataaaaacaga

SEQ ID NO: 40815 - DNA, 80 bp, synthetic construct
  source 1..80: mol_type = other DNA
ttcttatccagggattcacagatttcctaggaaagaaagagtctaagatcaactggtgaataaaagcacaataacatttg

SEQ ID NO: 40816 - DNA, 80 bp, synthetic construct
  source 1..80: mol_type = other DNA
tgtgattaatgtggtcatgtttcttaccccagtaggtcactgcgacatttcagggatgtgggtcaggaagagatcagtaa

SEQ ID NO: 40817 - DNA, 80 bp, synthetic construct; identical to SEQ ID NO: 11061
  source 1..80: mol_type = other DNA

SEQ ID NO: 40818 - DNA, 80 bp, synthetic construct
  source 1..80: mol_type = other DNA
attcaagaccagcctggcatacacggtgaaaccccatctctattaaaaatacaaaaattagccaggtgtggtggtggact

SEQ ID NO: 40819 - DNA, 80 bp, synthetic construct
  source 1..80: mol_type = other DNA
tcaaaaaaaaagaatgaaaatattcacagccagagaagactgtaggctagcaacgttttctgattcctgggagaaagaaa

SEQ ID NO: 40820 - DNA, 80 bp, synthetic construct
  source 1..80: mol_type = other DNA
tcatgcaaaacaacaatactctccctccagatattcttggcttggtaagaaaattctgagctggaaggattctgattgtg

SEQ ID NO: 40821 - DNA, 80 bp, synthetic construct
  source 1..80: mol_type = other DNA
ggagccattctgatgattgtcatctctgatcctagactccattcccctatgtatttcttcttgggaaacctgtcctgcct

SEQ ID NO: 40822 - DNA, 80 bp, synthetic construct; identical to SEQ ID NO: 11062
  source 1..80: mol_type = other DNA

SEQ ID NO: 40823 - DNA, 80 bp, synthetic construct
  source 1..80: mol_type = other DNA
tgggccccttctttctcacattactctcctatttctacattatcacccatctcttcttcaagactcattcttttagcatg

SEQ ID NO: 40824 - DNA, 80 bp, synthetic construct
  source 1..80: mol_type = other DNA
cactgatctacactttgaggaacaaggaagtgaaaggggcctttaatagagcaatgaaaaggtggctttggcctaaagaa

SEQ ID NO: 40825 - DNA, 80 bp, synthetic construct
  source 1..80: mol_type = other DNA
gattatataagggacatttgaatgaatgggatactagccatggaactctactgctgactatgttttgaagatatcagttg

SEQ ID NO: 40826 - DNA, 80 bp, synthetic construct; identical to SEQ ID NO: 11063
  source 1..80: mol_type = other DNA

SEQ ID NO: 40827 - DNA, 80 bp, synthetic construct
  source 1..80: mol_type = other DNA
tctaaatagttttggcacctctgtctccagatatctcttattagtcaactgtccacaccctcaatgattacttaaaatat

SEQ ID NO: 40828 - DNA, 80 bp, synthetic construct
  source 1..80: mol_type = other DNA
tcttacttggcaccaaactcatactaagcaaaggcatagaagtcataattattgaagtatttctagacatgaactgctat

SEQ ID NO: 40829 - DNA, 80 bp, synthetic construct
  source 1..80: mol_type = other DNA
ggactgacccttcaaggtccctgcatgcacttttgtaaatctaaacaattttattctgacttctctccatgcttcttttg

SEQ ID NO: 40830 - DNA, 80 bp, synthetic construct
  source 1..80: mol_type = other DNA
tttctggtggtgagaatctgccacataattcaaacttcagagagtttgtgaactgtagaagagcacatggggttctggtt

SEQ ID NO: 40831 - DNA, 80 bp, synthetic construct; identical to SEQ ID NO: 11064
  source 1..80: mol_type = other DNA

SEQ ID NO: 40832 - DNA, 80 bp, synthetic construct
  source 1..80: mol_type = other DNA
taggataattaatgccaatcttcttaaactcactcaaaaatatgaaaaggaagaaatactttcaaactcactttatgagg

SEQ ID NO: 40833 - DNA, 80 bp, synthetic construct
  source 1..80: mol_type = other DNA
ttcatccttaggatgcaagaatgggttaacatacacaaattaataaatatgatatgccacattaacatactgagggataa

SEQ ID NO: 40834 - DNA, 80 bp, synthetic construct
  source 1..80: mol_type = other DNA
aaagctaaaagcttttcttccgatatcaggagcaagtcaaggaggcccactttcacaatttctcttcaatataattctga

SEQ ID NO: 40835 - DNA, 80 bp, synthetic construct; identical to SEQ ID NO: 11065
  source 1..80: mol_type = other DNA

SEQ ID NO: 40836 - DNA, 80 bp, synthetic construct
  source 1..80: mol_type = other DNA
attcatattgtcaaaatgctcatactttcctaagcaaactgtagattctttacaatccctatcaatattctaatggaatt

SEQ ID NO: 40837 - DNA, 80 bp, synthetic construct
  source 1..80: mol_type = other DNA
taaaaacagatacatagaacaatggaacagaatagagagcccagaaataaatctatgtacttatggtcagttggtctttg

SEQ ID NO: 40838 - DNA, 80 bp, synthetic construct
  source 1..80: mol_type = other DNA
tgaaactaaaactactggaagaaaacagggaaaaacttctcaatggtggtctgggaaatgatatttttaaaatatcatac

SEQ ID NO: 40839 - DNA, 80 bp, synthetic construct; identical to SEQ ID NO: 11066
  source 1..80: mol_type = other DNA

SEQ ID NO: 40840 - DNA, 80 bp, synthetic construct
  source 1..80: mol_type = other DNA
tttgtacattgtttttgggaatttacatttgtacagccattatggggaacatatagagattcctcaaaaaacataaaggt

SEQ ID NO: 40841 - DNA, 80 bp, synthetic construct
  source 1..80: mol_type = other DNA
ggggtgtagagtgggagggggggtgaaggataaaagactacaaatacggtgcagtgtatactgcttgggtgatgagtgca

SEQ ID NO: 40842 - DNA, 80 bp, synthetic construct
  source 1..80: mol_type = other DNA
attagcccaaaggtccatcaaaacagagaagtggatttaaaaatgtgacctatataatgtgcatatagcgtggtgattat

SEQ ID NO: 40843 - DNA, 80 bp, synthetic construct; identical to SEQ ID NO: 11067
  source 1..80: mol_type = other DNA

SEQ ID NO: 40844 - DNA, 80 bp, synthetic construct
  source 1..80: mol_type = other DNA
aatacatacaatgggaatatcagaaggagtagaaaagtagataggaacagaagaaatatttgaagcaataactgaaaatt

SEQ ID NO: 40845 - DNA, 80 bp, synthetic construct
  source 1..80: mol_type = other DNA
agccagaggataaaaaataccatacctttagggaagaaaagatgacatctgagttcgcagaagctacaaaagttagaaga

SEQ ID NO: 40846 - DNA, 80 bp, synthetic construct
  source 1..80: mol_type = other DNA
taaaataaattttttagagagtaataaaattatacaagtgagacatttcaatccacctttaagaacagaagagcattgaa

SEQ ID NO: 40847 - DNA, 80 bp, synthetic construct; identical to SEQ ID NO: 11068
  source 1..80: mol_type = other DNA

SEQ ID NO: 40848 - DNA, 80 bp, synthetic construct
  source 1..80: mol_type = other DNA
tggttttaatttgcacttctctgatgactagcaatgttgagctttttttatatgtttgtaggttttgtaggctgattgta

SEQ ID NO: 40849 - DNA, 80 bp, synthetic construct
  source 1..80: mol_type = other DNA
aaggcttctgcacagtgaagggaataatcaacagagtaaacaaacaacctacagaatgggaaaacatatttgcaaattat

SEQ ID NO: 40850 - DNA, 80 bp, synthetic construct
  source 1..80: mol_type = other DNA
tagtacctaacattatcctttcgcactgtgccaagagtagacattcattatagtgcttttacatctgtgaacacccccac

SEQ ID NO: 40851 - DNA, 80 bp, synthetic construct; identical to SEQ ID NO: 11069
  source 1..80: mol_type = other DNA

SEQ ID NO: 40852 - DNA, 80 bp, synthetic construct
  source 1..80: mol_type = other DNA
tagccagggtagcttatgttgtttgcaactgaaaccacaccaagaaaattcacttctctcaattactcactcctgatttt

SEQ ID NO: 40853 - DNA, 80 bp, synthetic construct
  source 1..80: mol_type = other DNA
tttcatcatgggggaactttcccccacgctgttctcctgacatatacactaagtaaacagagctctggtctatataaccc

SEQ ID NO: 40854 - DNA, 80 bp, synthetic construct
  source 1..80: mol_type = other DNA
atagctaagtgtgattcctggctgactgatatataatgtactagagagccatttattaaaatggtgaattttggaattga

SEQ ID NO: 40855 - DNA, 80 bp, synthetic construct
  source 1..80: mol_type = other DNA
cctcaactcactggacaataatataaatagcatctctaagagtgggacaactaaatatcatgtgtctcaggatatgatgc

SEQ ID NO: 40856 - DNA, 80 bp, synthetic construct; identical to SEQ ID NO: 11070
  source 1..80: mol_type = other DNA

SEQ ID NO: 40857 - DNA, 80 bp, synthetic construct
  source 1..80: mol_type = other DNA
gcaaaatgttgatgttgaagctggatggtggctacatggagtacatgggggttcactgtgctcttctcttttatgtatgt

SEQ ID NO: 40858 - DNA, 80 bp, synthetic construct
  source 1..80: mol_type = other DNA
aattcccaaaatagaataacaaatcatgtttagccatacgatgaagcccagaagaataaagaaatagatgcttgttaata

SEQ ID NO: 40859 - DNA, 80 bp, synthetic construct
  source 1..80: mol_type = other DNA
gtattatttttaaatatttatgacatatttaataaagaactaatcaaagtttaaataattttgattatttgacatggatg

SEQ ID NO: 40860 - DNA, 80 bp, synthetic construct; identical to SEQ ID NO: 11071
  source 1..80: mol_type = other DNA

SEQ ID NO: 40861 - DNA, 80 bp, synthetic construct
  source 1..80: mol_type = other DNA
agagtccccagtggaggtgtccgaagtccaaaataacatcttcattactctccttcaatcaagtgtttcagtttgtttga

SEQ ID NO: 40862 - DNA, 80 bp, synthetic construct
  source 1..80: mol_type = other DNA
aatggacagcagagggtgcaacataaaagatcatgagcgttccatagaatgtggtcactacagctaggtgggaggagcat

SEQ ID NO: 40863 - DNA, 80 bp, synthetic construct
  source 1..80: mol_type = other DNA
agagttgtcacctgagccactctgggatccgagcaagccaggcccacgaaaagcataaagtcacagtaaaactggtcaat

SEQ ID NO: 40864 - DNA, 80 bp, synthetic construct; identical to SEQ ID NO: 11072
  source 1..80: mol_type = other DNA

SEQ ID NO: 40865 - DNA, 80 bp, synthetic construct
  source 1..80: mol_type = other DNA
atgatgaagacatagacagcagtgaatacaataaaaaacaagaaatgcagttcagggatgtcatagaagccaaggaggac

SEQ ID NO: 40866 - DNA, 80 bp, synthetic construct
  source 1..80: mol_type = other DNA
aaaatgagtctctaaaacaagactcgctcacgcaagtcttcaactatcccccttcttagttgtcattccttcctcaactc

SEQ ID NO: 40867 - DNA, 80 bp, synthetic construct
  source 1..80: mol_type = other DNA
cgcataatcacctctatcattcttatctgtatagtcagccatagcctccttcttgtgcaccagtataatattctccaaat

SEQ ID NO: 40868 - DNA, 80 bp, synthetic construct; identical to SEQ ID NO: 11073
  source 1..80: mol_type = other DNA

SEQ ID NO: 40869 - DNA, 80 bp, synthetic construct
  source 1..80: mol_type = other DNA
aaggtcggggaaggctttctgaagatagaagcaagtaggctaagttttgagggccaattaagagttggccaggaggccgg

SEQ ID NO: 40870 - DNA, 80 bp, synthetic construct
  source 1..80: mol_type = other DNA
ccagctactcgggatgccgaggcagaagaatggcgtgaactcaggaggcggagcttgcagtaagccgatatcgcgccact

SEQ ID NO: 40871 - DNA, 80 bp, synthetic construct
  source 1..80: mol_type = other DNA
acttctaaatatctgaaaatggctctgtcatacctgctggaaggttttcatatgctattcaaagcaatatgtgtttatta

SEQ ID NO: 40872 - DNA, 80 bp, synthetic construct; identical to SEQ ID NO: 11074
  source 1..80: mol_type = other DNA

SEQ ID NO: 40873 - DNA, 80 bp, synthetic construct
  source 1..80: mol_type = other DNA
cccagcttaagaacttatctctaccaagaatcccccttgactaatagagccctttatttctctcccaatcatgtactaag

SEQ ID NO: 40874 - DNA, 80 bp, synthetic construct
  source 1..80: mol_type = other DNA
caatacgccaaaagacagttaatgaattcaacctgaaagaaatagtactaggaggaagtgatgctgaactgatgagtgat

SEQ ID NO: 40875 - DNA, 80 bp, synthetic construct
  source 1..80: mol_type = other DNA
agtagccaagggtagctcaaacaatcccctcgattctgaaggagaattaggattgaggtgaagaatgggggaagacaggg

SEQ ID NO: 40876 - DNA, 80 bp, synthetic construct
  source 1..80: mol_type = other DNA
gtaacaagagtgaaagaagggatggccccactcatctgatacctgatgtgcaaatacatgctgccttgagttcatcatta

SEQ ID NO: 40877 - DNA, 80 bp, synthetic construct; identical to SEQ ID NO: 11075
  source 1..80: mol_type = other DNA

SEQ ID NO: 40878 - DNA, 80 bp, synthetic construct
  source 1..80: mol_type = other DNA
gtgagcatgtaaatcaggcaagaatacctctaataataaatagctcatgaccactacctcccctggaaatcaagagtatc

SEQ ID NO: 40879 - DNA, 80 bp, synthetic construct
  source 1..80: mol_type = other DNA
taatagacattggagacttggaaaggtgaggtgggaaggggtgagggatgagaaattacctaatgggtataatgcacact

SEQ ID NO: 40880 - DNA, 80 bp, synthetic construct
  source 1..80: mol_type = other DNA
aaaacacagaaacagtaggatatatgagaggctgttattcccttaaagacagaggggaatcagggaatagaggaagttga

SEQ ID NO: 40881 - DNA, 80 bp, synthetic construct
  source 1..80: mol_type = other DNA
gaatagtgcaaaatgcctgtttgttgtctaacgaacaatcagccacacactcaattctaagtaaaaaccataaccctcat

SEQ ID NO: 40882 - DNA, 80 bp, synthetic construct; identical to SEQ ID NO: 11076
  source 1..80: mol_type = other DNA

SEQ ID NO: 40883 - DNA, 80 bp, synthetic construct
  source 1..80: mol_type = other DNA
atatcccagttttgtcaagccatgggatagcaggaggaaaactttccaccatgaaaacattagtatgagggtgtctcgct

SEQ ID NO: 40884 - DNA, 80 bp, synthetic construct
  source 1..80: mol_type = other DNA
aatcaacttttaaaaacatccaatggagaaaagagcagcactggtattctagagaaatactgcgggacttcttgaaatga

SEQ ID NO: 40885 - DNA, 80 bp, synthetic construct
  source 1..80: mol_type = other DNA
gttctctaaagacaggactgtgaggaggagatgatctgctaagatttgctgaagacttcagaatgttggaatttcctacc

SEQ ID NO: 40886 - DNA, 80 bp, synthetic construct; identical to SEQ ID NO: 11077
  source 1..80: mol_type = other DNA

SEQ ID NO: 40887 - DNA, 80 bp, synthetic construct
  source 1..80: mol_type = other DNA
catctaaagccccaattcctagtctccataactcaccagaaaattctgatttctctgcaacatccctaaattccccatta

SEQ ID NO: 40888 - DNA, 80 bp, synthetic construct
  source 1..80: mol_type = other DNA
tttaaggagaaggaaggtggcgtgatgttacaaaatgacgttgaaatggttatgtagcgtttcaatatccttcctgacca

SEQ ID NO: 40889 - DNA, 80 bp, synthetic construct
  source 1..80: mol_type = other DNA
ccaaccgagaacactttttctctgaactacgttgtctactatctgtagttcacagtaaatgccaccctattttttcttgg

SEQ ID NO: 40890 - DNA, 80 bp, synthetic construct; identical to SEQ ID NO: 11078
  source 1..80: mol_type = other DNA

SEQ ID NO: 40891 - DNA, 80 bp, synthetic construct
  source 1..80: mol_type = other DNA
aatatcttctcaattttctccctttcttccagcccctggtaaccaccattctattctctgtttctgtgagtttgactttg

SEQ ID NO: 40892 - DNA, 80 bp, synthetic construct
  source 1..80: mol_type = other DNA
ttttctctatccattcatctgctgagggatgcttaggtttattccacatcttggctattgtgaataatactacaatgaat

SEQ ID NO: 40893 - DNA, 80 bp, synthetic construct
  source 1..80: mol_type = other DNA
atgagttctccttttccacattttcatcaacatttatctcttatcttttctgtagtaggcattctaacaagtgtgaggtg

SEQ ID NO: 40894 - DNA, 80 bp, synthetic construct; identical to SEQ ID NO: 11079
  source 1..80: mol_type = other DNA

SEQ ID NO: 40895 - DNA, 80 bp, synthetic construct
  source 1..80: mol_type = other DNA
tgtctgtgatttgaggatcatatacaagaaatcttgcccataccaacgtcatggaacttttctcctatattttcttctaa

SEQ ID NO: 40896 - DNA, 80 bp, synthetic construct
  source 1..80: mol_type = other DNA
tctgtttatatgatcatatggttttatctttaattctgttaatgttatgtatcacatttattgatttgtgtgttgaacca

SEQ ID NO: 40897 - DNA, 80 bp, synthetic construct
  source 1..80: mol_type = other DNA
ttttgtcaaaatacattttatggactttttaaggtcatcagttcagaccacagtcccatggataaagacaaggatctgtg

SEQ ID NO: 40898 - DNA, 80 bp, synthetic construct
  source 1..80: mol_type = other DNA
cctggggtcaatttggcctaaactgcaagacgtgaaaagattataagtagttccaaatgaaatgaaatatacccttggcc

SEQ ID NO: 40899 - DNA, 80 bp, synthetic construct; identical to SEQ ID NO: 11080
  source 1..80: mol_type = other DNA

SEQ ID NO: 40900 - DNA, 80 bp, synthetic construct
  source 1..80: mol_type = other DNA
tctcagaagtgactatgggatgcttcacgggggctaacttcaagctcaagtttgacaaccatttatgttgtttggctttg

SEQ ID NO: 40901 - DNA, 80 bp, synthetic construct
  source 1..80: mol_type = other DNA
tatttgttccttagactccagcctaggcatccaaggcaatctgaatccatagaaactttaataacagtacatcatggacc

SEQ ID NO: 40902 - DNA, 80 bp, synthetic construct
  source 1..80: mol_type = other DNA
agatttcttcttcactagactacgaattagaagtaaatattatccagggcagatggtgtatcctattcatctttgtatcc

SEQ ID NO: 40903 - DNA, 80 bp, synthetic construct
  source 1..80: mol_type = other DNA
acacaatgtccggttgaaaagaaagttccaaacattccaccagtagacatgactagcaatagagttgaccttcattattt

SEQ ID NO: 40904 - DNA, 80 bp, synthetic construct; identical to SEQ ID NO: 11081
  source 1..80: mol_type = other DNA

SEQ ID NO: 40905 - DNA, 80 bp, synthetic construct
  source 1..80: mol_type = other DNA
catgctcctgagcacaaaaatgttgcaatggatcttacggagaaaatgcatttgctagataagctctgttcaggcatgtg

SEQ ID NO: 40906 - DNA, 80 bp, synthetic construct
  source 1..80: mol_type = other DNA
accaaaaactcataggaatctaaccctgcatctcccctaaagcaaggaattatttaatatttgctcctacagggttcaag

SEQ ID NO: 40907 - DNA, 80 bp, synthetic construct; identical to SEQ ID NO: 11082
  source 1..80: mol_type = other DNA

SEQ ID NO: 40908 - DNA, 80 bp, synthetic construct
  source 1..80: mol_type = other DNA
aggtgctggagaggatgtggagaaataggaacacttttacgctgttggtgggactgtaaactagttcaaccattgtggaa

SEQ ID NO: 40909 - DNA, 80 bp, synthetic construct
  source 1..80: mol_type = other DNA
aaccaacacaaatgtccaacaatgatagactggattaagaaaatgtggcacatacacaccatggaatactatgcagccat

SEQ ID NO: 40910 - DNA, 80 bp, synthetic construct
  source 1..80: mol_type = other DNA
acgtaggatccagtcaaaaatcatgaatgacattttattgccatggcttttggtcttcttcaatctggaacgatgtcatc

SEQ ID NO: 40911 - DNA, 80 bp, synthetic construct; identical to SEQ ID NO: 11083
  source 1..80: mol_type = other DNA

SEQ ID NO: 40912 - DNA, 80 bp, synthetic construct
  source 1..80: mol_type = other DNA
atctaataaataaatgaaatgataaaatataaaggagtcagaagaaaactaagtacgaaatccagtttatgtaaaccctg

SEQ ID NO: 40913 - DNA, 80 bp, synthetic construct
  source 1..80: mol_type = other DNA
aatagataccaatgataaaaatgcaaagaaagatttgtataataaatgaaaaagaaatcaaagcaagaaaaattagtgac

SEQ ID NO: 40914 - DNA, 80 bp, synthetic construct
  source 1..80: mol_type = other DNA
agggtaaaattgcattattactttttgtagatgtactagaacatctacagtgatgggaaaaaatcatgagaaaaaagaag

SEQ ID NO: 40915 - DNA, 80 bp, synthetic construct; identical to SEQ ID NO: 11084
  source 1..80: mol_type = other DNA

SEQ ID NO: 40916 - DNA, 80 bp, synthetic construct
  source 1..80: mol_type = other DNA
atagaaaatagaaagacacctttgagataatatcttctggaaaacactgaaagagcccccagaggagaatgaaccaaggg

SEQ ID NO: 40917 - DNA, 80 bp, synthetic construct
  source 1..80: mol_type = other DNA
atgccaatagaatacatgatttgcaactttagataaatctggcatctgggaatattaggctattcttctgtgcctgtatt

SEQ ID NO: 40918 - DNA, 80 bp, synthetic construct
  source 1..80: mol_type = other DNA
aactagagaaatgctcacccctctaaatagttgaactgtttaatgctataggagcttaaaaagagaggatctttctcatt

SEQ ID NO: 40919 - DNA, 80 bp, synthetic construct; identical to SEQ ID NO: 11085
  source 1..80: mol_type = other DNA

SEQ ID NO: 40920 - DNA, 80 bp, synthetic construct
  source 1..80: mol_type = other DNA
atatggactccaggcaaggctgcctaatttcaaagtccatgatattctaatagaaagggagatctagtgctgcgatcaga

SEQ ID NO: 40921 - DNA, 80 bp, synthetic construct
  source 1..80: mol_type = other DNA
tccagggcttgctcttctctgtctttctcactatctacctgctgaccgtggcaggcaatttcctcattgtggtgctggtc

SEQ ID NO: 40922 - DNA, 80 bp, synthetic construct
  source 1..80: mol_type = other DNA
tcttcctcttctttggcgccacggagtgctgcctcctggcagccatggcctatgaccgctatgcagccatctgtgaaccc

SEQ ID NO: 40923 - DNA, 80 bp, synthetic construct; identical to SEQ ID NO: 11086
  source 1..80: mol_type = other DNA

SEQ ID NO: 40924 - DNA, 80 bp, synthetic construct
  source 1..80: mol_type = other DNA
aggccagctacgatccggccactgaccctctggtgtccctcttctatgctgtggtcacccccatcctcaaccccatcatc

SEQ ID NO: 40925 - DNA, 80 bp, synthetic construct
  source 1..80: mol_type = other DNA
tcacattaggggagggccagcctgtcagaaagacaaacttatctttgaaaagctaccgtagtcaaatgcgctcctcagac

SEQ ID NO: 40926 - DNA, 80 bp, synthetic construct
  source 1..80: mol_type = other DNA
acaatgatccttaaagtcatttgacatttgtacgtcctaggtaaggcatttgtttcttgggtggtactactggttagtac

SEQ ID NO: 40927 - DNA, 80 bp, synthetic construct; identical to SEQ ID NO: 11087
  source 1..80: mol_type = other DNA

SEQ ID NO: 40928 - DNA, 80 bp, synthetic construct
  source 1..80: mol_type = other DNA
tggtatctgttgttcctttctttgtgttcatgtgtactcagtgttaggtcccacttttaagtgagaatatatggtatttg

SEQ ID NO: 40929 - DNA, 80 bp, synthetic construct
  source 1..80: mol_type = other DNA
ttcattgggtttttgtgaggatttgtagacttgcaaacaatcaagcttaatatctggcacaaaatagtatcttgatagat

SEQ ID NO: 40930 - DNA, 80 bp, synthetic construct
  source 1..80: mol_type = other DNA
taacagaaactgctacccagcacagatatgagccaaaaactaccaagacacggaagagcaaatataagggctatgatatg

SEQ ID NO: 40931 - DNA, 80 bp, synthetic construct; identical to SEQ ID NO: 11088
  source 1..80: mol_type = other DNA

SEQ ID NO: 40932 - DNA, 80 bp, synthetic construct
  source 1..80: mol_type = other DNA
tatcaatgtggaaaacctcacaactactgctcttcaattgaacaaaactgcaatagcgaggaacagcatttaagaagggt

SEQ ID NO: 40933 - DNA, 80 bp, synthetic construct
  source 1..80: mol_type = other DNA
tacatatctccatcaactcatctttcctagaactggtcttgctaaagagtgttttggcattaagccattggtttacattg

SEQ ID NO: 40934 - DNA, 80 bp, synthetic construct
  source 1..80: mol_type = other DNA
agtgtgcaatttgataagttttgacccatgtatgcaccatgacattataggcgcaatcacgaaatgaacatatccagccc

SEQ ID NO: 40935 - DNA, 80 bp, synthetic construct; identical to SEQ ID NO: 11089
  source 1..80: mol_type = other DNA

SEQ ID NO: 40936 - DNA, 80 bp, synthetic construct
  source 1..80: mol_type = other DNA
aggaagttcaggttgtttccagtttttggttcatagaatgaaggttctatgaacatttgtgtacaaagtctttgtatgct

SEQ ID NO: 40937 - DNA, 80 bp, synthetic construct
  source 1..80: mol_type = other DNA
agtaatcacttttcctcttaacatgacagctagcaagtttccacctgaatttgtaactcatctccaggaaatgtgcaatt

SEQ ID NO: 40938 - DNA, 80 bp, synthetic construct
  source 1..80: mol_type = other DNA
acccagcacattagtctttctggagcaagacttagagccaccaatcagtaattaaaaaaaaaaaaatagacaggggaaag

SEQ ID NO: 40939 - DNA, 80 bp, synthetic construct
  source 1..80: mol_type = other DNA
tgggtctcacatgatctgatggttttagaaatgggagctgccctacacaagctctcatttttcctgctactatccatgta

SEQ ID NO: 40940 - DNA, 80 bp, synthetic construct; identical to SEQ ID NO: 11090
  source 1..80: mol_type = other DNA

SEQ ID NO: 40941 - DNA, 80 bp, synthetic construct
  source 1..80: mol_type = other DNA
tctccaccatagatagctaccaagggaccttgaactacattaatcctgggcaatataagcacagtcattggttttcaaga

SEQ ID NO: 40942 - DNA, 80 bp, synthetic construct
  source 1..80: mol_type = other DNA
cctaatatttcctcctaccaacctttctccctgacactcccttcctcaacttccctaatcccatgggacccactcactat

SEQ ID NO: 40943 - DNA, 80 bp, synthetic construct
  source 1..80: mol_type = other DNA
cctcagcctcctgagtagctgggattacaggagcctaccaccatgcccagctaatttatgtatttttagtagagacgggg

SEQ ID NO: 40944 - DNA, 80 bp, synthetic construct; identical to SEQ ID NO: 11091
  source 1..80: mol_type = other DNA

SEQ ID NO: 40945 - DNA, 80 bp, synthetic construct
  source 1..80: mol_type = other DNA
ctcctcctgtggcagcatggtccccctgcgtttctgctccccactgagctctctgggattcacaaatcagtgccctaggg

SEQ ID NO: 40946 - DNA, 80 bp, synthetic construct
  source 1..80: mol_type = other DNA
tcactggccttaactctttccagtcagggaagactaggaaagagttggaagaggaaatattgtagaagaaagaagagaac

SEQ ID NO: 40947 - DNA, 80 bp, synthetic construct
  source 1..80: mol_type = other DNA
cttcaaagatgccacccatcatctattcaactttttttttcttttggctaaccctttacacttctttcaagtctgcgaat

SEQ ID NO: 40948 - DNA, 80 bp, synthetic construct; identical to SEQ ID NO: 11092
  source 1..80: mol_type = other DNA

SEQ ID NO: 40949 - DNA, 80 bp, synthetic construct
  source 1..80: mol_type = other DNA
aagaatgatagatatatttattcaccacatatgtatggatatagttagagaaacaagcctcaaggcacaacgattgactg

SEQ ID NO: 40950 - DNA, 80 bp, synthetic construct
  source 1..80: mol_type = other DNA
tactgacttctcaggaggctgatttagagccaaagtaactgctgagttctgaataagcagcacacctggtctgcataata

SEQ ID NO: 40951 - DNA, 80 bp, synthetic construct
  source 1..80: mol_type = other DNA
taataactggaacttatcatccagaacaatgttttctgcctctttgtttttcagttcatgatattcctgtggactggctt

SEQ ID NO: 40952 - DNA, 80 bp, synthetic construct; identical to SEQ ID NO: 11093
  source 1..80: mol_type = other DNA

SEQ ID NO: 40953 - DNA, 80 bp, synthetic construct
  source 1..80: mol_type = other DNA
atatttatttgttgaatgaatttgaacgagtggtagaagactcttctggctggagcacttttaagtcttgcactagcatg

SEQ ID NO: 40954 - DNA, 80 bp, synthetic construct
  source 1..80: mol_type = other DNA
gagaggacctaaaacaaattagtgaaataaatactgtaggatttctgctagatgatgaggcttttaattcttcctgtttc

SEQ ID NO: 40955 - DNA, 80 bp, synthetic construct
  source 1..80: mol_type = other DNA
gtcacagttccttcagttctttcttttagccagtctatagcactctactggtcatcaaaaaagatccaaaagtgatcaac

SEQ ID NO: 40956 - DNA, 80 bp, synthetic construct
  source 1..80: mol_type = other DNA
gtgtgcgccaccacacccagctaatttttgtatttttagtaaagatggggtttcaccaagttggccaggatggtctcgat

SEQ ID NO: 40957 - DNA, 80 bp, synthetic construct; identical to SEQ ID NO: 11094
  source 1..80: mol_type = other DNA

SEQ ID NO: 40958 - DNA, 80 bp, synthetic construct
  source 1..80: mol_type = other DNA
ctgtgtccattctgcatgccactcaactcctctaatgaattcttattccttttcaagccttctgtattccttcttatcat

SEQ ID NO: 40959 - DNA, 80 bp, synthetic construct
  source 1..80: mol_type = other DNA
ccaacacttttcttgccttcaatgtatttttaatgactggtgacctcttacctctccttcttttactttaacctctaact

SEQ ID NO: 40960 - DNA, 80 bp, synthetic construct
  source 1..80: mol_type = other DNA
atgtactaggattcacttgtccaaacacatagaatatatagtaccaagagtgagtcctgaagtaaacaatggacgttggg

SEQ ID NO: 40961 - DNA, 80 bp, synthetic construct; identical to SEQ ID NO: 11095
  source 1..80: mol_type = other DNA

SEQ ID NO: 40962 - DNA, 80 bp, synthetic construct
  source 1..80: mol_type = other DNA
cttccttcttctgatatcctcacaactgaacatttccttcgaatacacccacccacccataaatgaccaatctttctctt

SEQ ID NO: 40963 - DNA, 80 bp, synthetic construct
  source 1..80: mol_type = other DNA
ccaatttttgtatctttagtagagatggggtttttccatgttggccaggctggtcttgaactcctgacctcaggtgatct

SEQ ID NO: 40964 - DNA, 80 bp, synthetic construct
  source 1..80: mol_type = other DNA
taagtcctccaacttttctagctttctcaccgaaaaatgggcctgtggcagcacagttttatgagtaactaagatatggg

SEQ ID NO: 40965 - DNA, 80 bp, synthetic construct; identical to SEQ ID NO: 11096
  source 1..80: mol_type = other DNA

SEQ ID NO: 40966 - DNA, 80 bp, synthetic construct
  source 1..80: mol_type = other DNA
ttaaaagcagacatatgttcattacaacatccactgctctgttaagtactccatctggcatggcacagaatatggcaaca

SEQ ID NO: 40967 - DNA, 80 bp, synthetic construct
  source 1..80: mol_type = other DNA
ttacaaaacactgctgaaggaaatcagagacaacacacacaaaaaatggaaaaaacattccatgttcatgaataggaaga

SEQ ID NO: 40968 - DNA, 80 bp, synthetic construct
  source 1..80: mol_type = other DNA
aaaagaacaaagctgaggacatcacattatccaacttcaagctatactacaaggttacagtaaccaaaatagcatggtac

SEQ ID NO: 40969 - DNA, 80 bp, synthetic construct; identical to SEQ ID NO: 11097
  source 1..80: mol_type = other DNA

SEQ ID NO: 40970 - DNA, 80 bp, synthetic construct
  source 1..80: mol_type = other DNA
agacagtaaataaacagcctacagtatgggagaaaatgtttgcaaactatgcatctgacaaaagtctaatatccagagct

SEQ ID NO: 40971 - DNA, 80 bp, synthetic construct
  source 1..80: mol_type = other DNA
ccatctcatatcagtcagaatgactcaaaaaataacagatgctggaagcatcgtggagaaaaaaggaatgcttacacact

SEQ ID NO: 40972 - DNA, 80 bp, synthetic construct
  source 1..80: mol_type = other DNA
gtcatgtatgtgtatgtgttcacaatagcaaagacatggaatcaacctaaatacctatcaacagtggactggagaagaaa

SEQ ID NO: 40973 - DNA, 80 bp, synthetic construct; identical to SEQ ID NO: 11098
  source 1..80: mol_type = other DNA

SEQ ID NO: 40974 - DNA, 80 bp, synthetic construct
  source 1..80: mol_type = other DNA
gaaactaaaataaaaattaggggaaaaaaaggagaagagagataaaagggcaaacaaaaaaattgttcaaaaaatgttgg

SEQ ID NO: 40975 - DNA, 80 bp, synthetic construct
  source 1..80: mol_type = other DNA
ctgccaacatctcaacagaaacaaagggagtcagaaggctatgaattatctttcaaatgtgaagagaaaaaaaatctgcc

SEQ ID NO: 40976 - DNA, 80 bp, synthetic construct
  source 1..80: mol_type = other DNA
aatatttggagtttcaaatctatgagaaggaacgaaaaactttcaagattggaaacataaaagtgtatataaaagttatc

SEQ ID NO: 40977 - DNA, 80 bp, synthetic construct; identical to SEQ ID NO: 11099
  source 1..80: mol_type = other DNA

SEQ ID NO: 40978 - DNA, 80 bp, synthetic construct
  source 1..80: mol_type = other DNA
ggtgaattaaagaggacagcaaatccttccttcctccacctcacaaataaattataaaaccagaaaaattgtcaaaaaca

SEQ ID NO: 40979 - DNA, 80 bp, synthetic construct
  source 1..80: mol_type = other DNA
tgctccagtactactccaacttagttgatggtagttttgccagtcaggaatggccatgaaaatcaacaattacactatta

SEQ ID NO: 40980 - DNA, 80 bp, synthetic construct
  source 1..80: mol_type = other DNA
gggaattagatagctatagaagaattagataagatctctacacattcctggctgactgggaaactacaggtatgtacaga

SEQ ID NO: 40981 - DNA, 80 bp, synthetic construct; identical to SEQ ID NO: 11100
  source 1..80: mol_type = other DNA

SEQ ID NO: 40982 - DNA, 80 bp, synthetic construct
  source 1..80: mol_type = other DNA
aaaagactgcagttaatggaaactgactgtaagtgggactgctgttgaatttagcaaacagagattcaaaacatctaata

SEQ ID NO: 40983 - DNA, 80 bp, synthetic construct
  source 1..80: mol_type = other DNA
tatagatgggtatcatccaatcagctggggcccagatggaaaaaaaaggcatgaaaggatgctctttatcattggttatt

SEQ ID NO: 40984 - DNA, 80 bp, synthetic construct
  source 1..80: mol_type = other DNA
ttttataaaaaaaatttactatacaacccaataattccactgtcaggtaatatccaagacaatttaaatcatatgccttc

SEQ ID NO: 40985 - DNA, 80 bp, synthetic construct; identical to SEQ ID NO: 11101
  source 1..80: mol_type = other DNA

SEQ ID NO: 40986 - DNA, 80 bp, synthetic construct
  source 1..80: mol_type = other DNA
atataagctagaaattaaaagcttctaaagaagaacataaaagaaaatatttatgaccttagaataggtaaagatttctt

SEQ ID NO: 40987 - DNA, 80 bp, synthetic construct
  source 1..80: mol_type = other DNA
cagaatatatgaagaactcatatacttttatcataaaaggaaacactataaaatatggacaaatgacttgaacagacacc

SEQ ID NO: 40988 - DNA, 80 bp, synthetic construct
  source 1..80: mol_type = other DNA
taagagaatagattttaagtactcttaccacaagaaaagtaactgtgagttgatagatatgttaattggcttgaccatag

SEQ ID NO: 40989 - DNA, 80 bp, synthetic construct
  source 1..80: mol_type = other DNA
cagctacttgggaggctggggcaggagtatcgcttgaacccaggaggcggaggttttagtgagccgagatcgtgccattg

SEQ ID NO: 40990 - DNA, 80 bp, synthetic construct; identical to SEQ ID NO: 11102
  source 1..80: mol_type = other DNA

SEQ ID NO: 40991 - DNA, 80 bp, synthetic construct
  source 1..80: mol_type = other DNA
agcctgggcgacagagtgaaactcagtctaaaaaaaaaaaaagccgggcacggtggctcacgcctgtaatcccagcactt

SEQ ID NO: 40992 - DNA, 80 bp, synthetic construct
  source 1..80: mol_type = other DNA
gcagagttttcagtgagccgagatcgcgccactgcactccagcctgggcaacagagcaagactccgtctcaaaaaaaaaa

SEQ ID NO: 40993 - DNA, 80 bp, synthetic construct
  source 1..80: mol_type = other DNA
gattcacaacagcaaaaactggaaaccaccccacactgtttctctattacagcataaaaagttatcccaaaacttaatgg

SEQ ID NO: 40994 - DNA, 80 bp, synthetic construct; identical to SEQ ID NO: 11103
  source 1..80: mol_type = other DNA

SEQ ID NO: 40995 - DNA, 80 bp, synthetic construct
  source 1..80: mol_type = other DNA
gtgacatagtctttgatgtcacatcccatcgtttctaccagattctatttgttaaaactgagtcactcagtacagctccc

SEQ ID NO: 40996 - DNA, 80 bp, synthetic construct
  source 1..80: mol_type = other DNA
taaaaaagaattggactattgatacacaaaacaacagggatgattctccaaactgtggtacagagcataacacaccaaac

SEQ ID NO: 40997 - DNA, 80 bp, synthetic construct
  source 1..80: mol_type = other DNA
agggtaatggttgtctggatgtatacatttgttcacattcagtgaattgtccattaaaatatgtgcacttcattatgtaa

SEQ ID NO: 40998 - DNA, 80 bp, synthetic construct; identical to SEQ ID NO: 11104
  source 1..80: mol_type = other DNA

SEQ ID NO: 40999 - DNA, 80 bp, synthetic construct
  source 1..80: mol_type = other DNA
ttaacttactggattgaggaaaagaagtcgttagcaagagttccatagtaaagcgctaactctagctcatgtgtctggca

SEQ ID NO: 41000 - DNA, 80 bp, synthetic construct
  source 1..80: mol_type = other DNA
accttttgaagttataaggagccgtaaatatgaagcgcttttttgagtgcccatggaagtaagcactagcaatcaatact

SEQ ID NO: 41001 - DNA, 80 bp, synthetic construct
  source 1..80: mol_type = other DNA
ttaattgcaagtaagtcacaagtttattcccctacagcccatcaatttccacatgttcttaagacagttctgaatcaaac

SEQ ID NO: 41002 - DNA, 80 bp, synthetic construct; identical to SEQ ID NO: 11105
  source 1..80: mol_type = other DNA

SEQ ID NO: 41003 - DNA, 80 bp, synthetic construct
  source 1..80: mol_type = other DNA
gagaaaaggaccagaagaaacagggtaaggaaaaggcatgttattaaagatagaaaataggagagtgcagagggtcaaag

SEQ ID NO: 41004 - DNA, 80 bp, synthetic construct
  source 1..80: mol_type = other DNA
atttaaaataatcagaatagtgtttacttcttcagtgggagagaaggagatgtgatcagggaggagaacacagaagactt

SEQ ID NO: 41005 - DNA, 80 bp, synthetic construct
  source 1..80: mol_type = other DNA
taaaaaattaagggaacaaatcttatcctcaaggagagacgtaatgatggaggaaggaatatagaaggagacaaaaagga

SEQ ID NO: 41006 - DNA, 80 bp, synthetic construct
  source 1..80: mol_type = other DNA
aacttgcttgccctaaatggccacatcccctaaacggccctcctgccattgtctgtgctcagaaaaccctcagtttctgc

SEQ ID NO: 41007 - DNA, 80 bp, synthetic construct; identical to SEQ ID NO: 11106
  source 1..80: mol_type = other DNA

SEQ ID NO: 41008 - DNA, 80 bp, synthetic construct
  source 1..80: mol_type = other DNA
acttaagagggcaagctcagacatacataatctggagtggatcttccatgggaaaacacgtatataacagaaattattgg

SEQ ID NO: 41009 - DNA, 80 bp, synthetic construct
  source 1..80: mol_type = other DNA
ttcagcctcctgagtagctgggattacagacacccaccaccacaccccgctaattttttttttttttttttttttttttt

SEQ ID NO: 41010 - DNA, 80 bp, synthetic construct
  source 1..80: mol_type = other DNA
tgagctgtttttacactaaaaaaaaattctatcttagaaacatgaagaagtgaagaggcattatatatacaactcactgt

SEQ ID NO: 41011 - DNA, 80 bp, synthetic construct; identical to SEQ ID NO: 11107
  source 1..80: mol_type = other DNA

SEQ ID NO: 41012 - DNA, 80 bp, synthetic construct
  source 1..80: mol_type = other DNA
caagacaattggcagcatttttttcatgtcattttgctacattctacataatgttaagttgaggttagggattttcattt

SEQ ID NO: 41013 - DNA, 80 bp, synthetic construct
  source 1..80: mol_type = other DNA
ttaattctacactctgcctctgattgacacctctgcaaacaaagataaagtagataaaacatgaataattccaggaaact

SEQ ID NO: 41014 - DNA, 80 bp, synthetic construct
  source 1..80: mol_type = other DNA
tgaagatcggttaattaatccatgttttacatcagctttctttgccctcaaccaggaagtcagaggcaccaatgtgaggt

SEQ ID NO: 41015 - DNA, 80 bp, synthetic construct
  source 1..80: mol_type = other DNA
gtgagcagagacagaaaagaaacacctacctgctgtgacctcacaaacacccaggctgagttttgataagacaggttgaa

SEQ ID NO: 41016 - DNA, 80 bp, synthetic construct; identical to SEQ ID NO: 11108
  source 1..80: mol_type = other DNA

SEQ ID NO: 41017 - DNA, 80 bp, synthetic construct
  source 1..80: mol_type = other DNA
agcttcctgggatgctctgtccagctcttcatcttcctgtccctggggaccactgagtgcatcctcctgacagtgatggc

SEQ ID NO: 41018 - DNA, 80 bp, synthetic construct
  source 1..80: mol_type = other DNA
cagatagatgactttttatgtgaggtcccatctctgattcgactctcctgtggagatacctcctacaatgaaatccagtt

SEQ ID NO: 41019 - DNA, 80 bp, synthetic construct
  source 1..80: mol_type = other DNA
gacctgctcctcccatctcactgtggtcaccctcttctacagctcagtcattgctgtctacctccagcccaaaaatccgt

SEQ ID NO: 41020 - DNA, 80 bp, synthetic construct
  source 1..80: mol_type = other DNA
ggaaggaaagagactccagggaaagctggagagctgcttaatatactttcgaaagtaagaagagtttcttcaagatttat

SEQ ID NO: 41021 - DNA, 80 bp, synthetic construct; identical to SEQ ID NO: 11109
  source 1..80: mol_type = other DNA

SEQ ID NO: 41022 - DNA, 80 bp, synthetic construct
  source 1..80: mol_type = other DNA
ctacgtaggtcatgtaagcaaaggcttgaagaacagctaatctgagatttagaagaatgctttttgatcctcctggaata

SEQ ID NO: 41023 - DNA, 80 bp, synthetic construct
  source 1..80: mol_type = other DNA
ggggttttctgccccacaccctttaggatatagctgaagaatataatgaggaatagctggattctagaactgactcctca

SEQ ID NO: 41024 - DNA, 80 bp, synthetic construct
  source 1..80: mol_type = other DNA
tatatgtaaataataagccatctaagtgtaaaagtggctcatatcttctccagccaaatcagctaggccatggccttgcc

SEQ ID NO: 41025 - DNA, 80 bp, synthetic construct; identical to SEQ ID NO: 11110
  source 1..80: mol_type = other DNA

SEQ ID NO: 41026 - DNA, 80 bp, synthetic construct
  source 1..80: mol_type = other DNA
gaaggacataagcattcaaccccctgcacatgtcttctttcctacttcctcaaggttctttctgtccagttgctccttct

SEQ ID NO: 41027 - DNA, 80 bp, synthetic construct
  source 1..80: mol_type = other DNA
acaaccaaaatgcaggctctattgttttcaatttagcagcctttcaaatgtatatggttctggccacattaaagttgcaa

SEQ ID NO: 41028 - DNA, 80 bp, synthetic construct
  source 1..80: mol_type = other DNA
ttgttgctatcaagtaaccatatagtataggttacacagaactcctatcttctggattaagactccgtcttcaaagtatt

SEQ ID NO: 41029 - DNA, 80 bp, synthetic construct; identical to SEQ ID NO: 11111
  source 1..80: mol_type = other DNA

SEQ ID NO: 41030 - DNA, 80 bp, synthetic construct
  source 1..80: mol_type = other DNA
accagagctgttcacctaccttcttcactccattttagcagccaatgtcattaattcccattcctcacaattgacactca

SEQ ID NO: 41031 - DNA, 80 bp, synthetic construct
  source 1..80: mol_type = other DNA
attgcactgcttcaggcagagaggaaataaaaccagagggaaaatcagaatatcatgaatgaaaaaggaacaacagaaag

SEQ ID NO: 41032 - DNA, 80 bp, synthetic construct
  source 1..80: mol_type = other DNA
ttcattctaagtagaccatgaaagggtaaatatttatatcataatccctaaagcaacaattccaataaaacaaaaaacca

SEQ ID NO: 41033 - DNA, 80 bp, synthetic construct
  source 1..80: mol_type = other DNA
agataggaggttggcataagatataggtcacaaagatcctgctgataaaacaggatgctgtaaggaagccggccaaaacc

SEQ ID NO: 41034 - DNA, 80 bp, synthetic construct; identical to SEQ ID NO: 11112
  source 1..80: mol_type = other DNA

SEQ ID NO: 41035 - DNA, 80 bp, synthetic construct
  source 1..80: mol_type = other DNA
cctaataaacttgctttcattttatggactcgccccaaattctttcttacatgagatccaagaatcctctcttggggtct

SEQ ID NO: 41036 - DNA, 80 bp, synthetic construct
  source 1..80: mol_type = other DNA
tctggggagtgtttgttcaagaataatagctgaatcttgataagaacagtgagctctgtgatgttttaactggttccact

SEQ ID NO: 41037 - DNA, 80 bp, synthetic construct
  source 1..80: mol_type = other DNA
agaggactgttattattttacctgtctggttgttccctagaactcacaatgctatccttatttgacttgactcagagcta

SEQ ID NO: 41038 - DNA, 80 bp, synthetic construct
  source 1..80: mol_type = other DNA
aacttaaaaacgaaatgtcagggaatgagatgcccataaaggggattgaaaagccttaatatactccagaaagttccgac

SEQ ID NO: 41039 - DNA, 80 bp, synthetic construct; identical to SEQ ID NO: 11113
  source 1..80: mol_type = other DNA

SEQ ID NO: 41040 - DNA, 80 bp, synthetic construct
  source 1..80: mol_type = other DNA
aatctgggaacagaaaaaatatgacttccagagttgccacattatactgtttaaaatgctaagttaaaaaagaaagaacg

SEQ ID NO: 41041 - DNA, 80 bp, synthetic construct
  source 1..80: mol_type = other DNA
ctgattctgagatgagagctcacactagcccttaatttaatctttacttgaggtgaaattcaatggattattagaatggg

SEQ ID NO: 41042 - DNA, 80 bp, synthetic construct
  source 1..80: mol_type = other DNA
ttcctgcctcctagaaccgagagagaataaacttctgtagtttaagctactcggtttgtggtctcagtcacgggagtcca

SEQ ID NO: 41043 - DNA, 80 bp, synthetic construct; identical to SEQ ID NO: 11114
  source 1..80: mol_type = other DNA

SEQ ID NO: 41044 - DNA, 80 bp, synthetic construct
  source 1..80: mol_type = other DNA
cacccagggttctggactgttaatggttgtcctttttttgttttcttcccgttgattcttttaccatcttcctcctctta

SEQ ID NO: 41045 - DNA, 80 bp, synthetic construct
  source 1..80: mol_type = other DNA
tgctgtgtgtctagagctggcctctaagggaagggccctgtgagacctggcagaacagggtaactggtccaacaaacatc

SEQ ID NO: 41046 - DNA, 80 bp, synthetic construct
  source 1..80: mol_type = other DNA
aagctgggcacccagagcctgagactgacagttcctccctccctgtatcctgcaggaggggccctgtcccaacaagagcc

SEQ ID NO: 41047 - DNA, 80 bp, synthetic construct; identical to SEQ ID NO: 11115
  source 1..80: mol_type = other DNA

SEQ ID NO: 41048 - DNA, 80 bp, synthetic construct
  source 1..80: mol_type = other DNA
ttgtattcatccaagaaatattttcctaaccataagttacactgatattctcttttcttttcttacatacagcttacagc

SEQ ID NO: 41049 - DNA, 80 bp, synthetic construct
  source 1..80: mol_type = other DNA
accttcttcaaaatcaattgaagatatatgttagggtctattctggaccctcttctgttctgttgacctatttgtccatc

SEQ ID NO: 41050 - DNA, 80 bp, synthetic construct
  source 1..80: mol_type = other DNA
attctaggtctactgcatcgccacacacagaatcactttctcatgaacatacatacatgtgcaccagaaatataaatata

SEQ ID NO: 41051 - DNA, 80 bp, synthetic construct; identical to SEQ ID NO: 11116
  source 1..80: mol_type = other DNA

SEQ ID NO: 41052 - DNA, 80 bp, synthetic construct
  source 1..80: mol_type = other DNA
gagtcattattctcttgctggatgtatgtcttttaccacttctcagtctgcatatctcctggtgatgatttgtttcatct

SEQ ID NO: 41053 - DNA, 80 bp, synthetic construct
  source 1..80: mol_type = other DNA
tcttatctttgattttctgtacatatatgtcttgttcttctctggctgtttgtaggaggactcagtttcctgggcataga

SEQ ID NO: 41054 - DNA, 80 bp, synthetic construct
  source 1..80: mol_type = other DNA
tataaatgtgctgggaccattggataacaatcagctaagtgggccaagcagccttttggcttaggctgaagcaggataat

SEQ ID NO: 41055 - DNA, 80 bp, synthetic construct; identical to SEQ ID NO: 11117
  source 1..80: mol_type = other DNA

SEQ ID NO: 41056 - DNA, 80 bp, synthetic construct
  source 1..80: mol_type = other DNA
ggggatcaccccagaggagtaattcttgagatgtggtccccaacacctttttaggggaagggaggccaacataatcttca

SEQ ID NO: 41057 - DNA, 80 bp, synthetic construct
  source 1..80: mol_type = other DNA
caatgcagaagcagctgtgaatgtccagcttgctgctgggcctctaagaggtctgcaaaatacaaaaccatcttgctctt

SEQ ID NO: 41058 - DNA, 80 bp, synthetic construct
  source 1..80: mol_type = other DNA
caaccctgatccacaaaagttctttgagctgctcaatactatttaagactgagaatctcaggtctattttaagctctggg

SEQ ID NO: 41059 - DNA, 80 bp, synthetic construct; identical to SEQ ID NO: 11118
  source 1..80: mol_type = other DNA

SEQ ID NO: 41060 - DNA, 80 bp, synthetic construct
  source 1..80: mol_type = other DNA
ttactaaactgtaatagtccatacctagccttgacatttttgtttttctgagtgagtgagagaattcaggaaactgagga

SEQ ID NO: 41061 - DNA, 80 bp, synthetic construct
  source 1..80: mol_type = other DNA
cataaaatgcccaaattgtatcccctgcctgaacatagcagcagcccaactctgtgagatcaacctgcctcttacttcca

SEQ ID NO: 41062 - DNA, 80 bp, synthetic construct
  source 1..80: mol_type = other DNA
tgggtacacagaaaaaggccatgtcatgacacagggagaaggcggccatctcaagtcaaagagggaggcctcaggggaag

SEQ ID NO: 41063 - DNA, 80 bp, synthetic construct; identical to SEQ ID NO: 11119
  source 1..80: mol_type = other DNA

SEQ ID NO: 41064 - DNA, 80 bp, synthetic construct
  source 1..80: mol_type = other DNA
gtacattgcttaccagtatcactggcacatttacaaacctgagcaagttttcggcaacagagaaaacagtgtgaatttca

SEQ ID NO: 41065 - DNA, 80 bp, synthetic construct
  source 1..80: mol_type = other DNA
gtggaaacatgcaaggtggaaaggtggactagtgagcgatggataacatcagatgatggggggttaatgtcagacttgca

SEQ ID NO: 41066 - DNA, 80 bp, synthetic construct
  source 1..80: mol_type = other DNA
taaaagaaacaaaccttttagagaagagtcaaaaaggggtggagatttaaatggggtggtctggacaaacatctttaagg

SEQ ID NO: 41067 - DNA, 80 bp, synthetic construct; identical to SEQ ID NO: 11120
  source 1..80: mol_type = other DNA

SEQ ID NO: 41068 - DNA, 80 bp, synthetic construct
  source 1..80: mol_type = other DNA
gggaagaatgcatgacattctgcagggtgggattcctgtgaagaagcacaggcgctagattgtgtgatgagtctgggaaa

SEQ ID NO: 41069 - DNA, 80 bp, synthetic construct
  source 1..80: mol_type = other DNA
aacttgttatggcactcttactgaatcgctttcctggcttttgtaggaagggatggatggaaacttgaggccataatggt

SEQ ID NO: 41070 - DNA, 80 bp, synthetic construct
  source 1..80: mol_type = other DNA
actagtttacagtcccaccaacagtgtaaagatgttcctatttctccacatcctctccagcacctgttgtttcctgactt

SEQ ID NO: 41071 - DNA, 80 bp, synthetic construct; identical to SEQ ID NO: 11121
  source 1..80: mol_type = other DNA

SEQ ID NO: 41072 - DNA, 80 bp, synthetic construct
  source 1..80: mol_type = other DNA
attctcagcaaactagtgcaaggacaaaaaaaccaaacaccgcatgttctcactcataggtgggaattgaacaatgagaa

SEQ ID NO: 41073 - DNA, 80 bp, synthetic construct
  source 1..80: mol_type = other DNA
gttgtgcacatgtaccctaaaacttaaagtataataaaaaaagaaaaataaaataaaataaaataaaataattagctgga

SEQ ID NO: 41074 - DNA, 80 bp, synthetic construct
  source 1..80: mol_type = other DNA
gtaataaataatctcaagaacattcaccctgctccttggaggatccagcatgttttccagacatgatcccttttacagcc

SEQ ID NO: 41075 - DNA, 80 bp, synthetic construct; identical to SEQ ID NO: 11122
  source 1..80: mol_type = other DNA

SEQ ID NO: 41076 - DNA, 80 bp, synthetic construct
  source 1..80: mol_type = other DNA
cccagatgatcaggatcagcttggacatgcccattacaaagcaaataagtacatgacatgtcataaagcctcatgaaatt

SEQ ID NO: 41077 - DNA, 80 bp, synthetic construct
  source 1..80: mol_type = other DNA
gacagagggcacagagaaagctctcaatactcatggccaccaggagacagagacccactgtgtcggagaaataggagaca

SEQ ID NO: 41078 - DNA, 80 bp, synthetic construct
  source 1..80: mol_type = other DNA
gccagcagatcacatcattgcctaccagtccacagagggccaccagcactgtcagggagaagaccacctgcctgtccacc

SEQ ID NO: 41079 - DNA, 80 bp, synthetic construct; identical to SEQ ID NO: 11123
  source 1..80: mol_type = other DNA

SEQ ID NO: 41080 - DNA, 80 bp, synthetic construct
  source 1..80: mol_type = other DNA
tcccgtgcacccagattatctataaggctgcataaaaaaatacatttgtttacattagcccatagggatggttctccaac

SEQ ID NO: 41081 - DNA, 80 bp, synthetic construct
  source 1..80: mol_type = other DNA
ctgttagctctcaggcctcctccctggacctttgcacatgctgttctcctgcttggaagagcctctgtgcctcagtgagc

SEQ ID NO: 41082 - DNA, 80 bp, synthetic construct
  source 1..80: mol_type = other DNA
tactttgtctttaaaattctgttcactgccttttctccagcccctggaacagggtttgacactgaggagctacttgggga

SEQ ID NO: 41083 - DNA, 80 bp, synthetic construct; identical to SEQ ID NO: 11124
  source 1..80: mol_type = other DNA

SEQ ID NO: 41084 - DNA, 80 bp, synthetic construct
  source 1..80: mol_type = other DNA
tatgtgggcaaatcacagctatctttgataagcagtggatccttttctgcctcagtattcccagctatctaagggttgct

SEQ ID NO: 41085 - DNA, 80 bp, synthetic construct
  source 1..80: mol_type = other DNA
tttaggttgggccctaatccaataggactggtgtcctcatgagatgaggagattaggattagttaaacacacagggacaa

SEQ ID NO: 41086 - DNA, 80 bp, synthetic construct
  source 1..80: mol_type = other DNA
gacttctatcatttaagtcactcagtctgtggtcttagtcatgggagtccaagctgatgatcacagtagtgaagagaact

SEQ ID NO: 41087 - DNA, 80 bp, synthetic construct
  source 1..80: mol_type = other DNA
ttgatgaaagcctaagatatgccaggaaatatctcacacgtgaccctgtgatctgcagtcacatattggtgcatcagtgg

SEQ ID NO: 41088 - DNA, 80 bp, synthetic construct; identical to SEQ ID NO: 11125
  source 1..80: mol_type = other DNA

SEQ ID NO: 41089 - DNA, 80 bp, synthetic construct
  source 1..80: mol_type = other DNA
aggagaggagatttatagataaaatagtttcatgggaagaagtgacttcccctccagccagaagaaaagatccgctatgg

SEQ ID NO: 41090 - DNA, 80 bp, synthetic construct
  source 1..80: mol_type = other DNA
cggcatctggtgtggccccagcactgggcatagagacatcctggtacttggaaatgtcatttgtggtcttgggaatgtca

SEQ ID NO: 41091 - DNA, 80 bp, synthetic construct
  source 1..80: mol_type = other DNA
agcctttgcattgggattgaagtatttgctctgattctgaggcgagagcccaccctccccacttaatttttatctgaggt

SEQ ID NO: 41092 - DNA, 80 bp, synthetic construct; identical to SEQ ID NO: 11126
  source 1..80: mol_type = other DNA

SEQ ID NO: 41093 - DNA, 80 bp, synthetic construct
  source 1..80: mol_type = other DNA
agaccacacctcagtaacacagtggctcaaatcctacttctaacagaaaaacacaccctctgcccatctacacagccagg

SEQ ID NO: 41094 - DNA, 80 bp, synthetic construct
  source 1..80: mol_type = other DNA
taaaaaatgagtctttgagttaaaatgctttgaaaatgaaaaaaaaggtagagaccttttttctcatacctgggaggact

SEQ ID NO: 41095 - DNA, 80 bp, synthetic construct
  source 1..80: mol_type = other DNA
tatcagagcccaggcctttaactgaagcatctttatctcaacatctcacgatatcccccaatcctgtctgactctattac

SEQ ID NO: 41096 - DNA, 80 bp, synthetic construct; identical to SEQ ID NO: 11127
  source 1..80: mol_type = other DNA

SEQ ID NO: 41097 - DNA, 80 bp, synthetic construct
  source 1..80: mol_type = other DNA
agtcatgaatgatccataaacataatgtaaagaagtcttgggaatgtttttgtgctgtgccacttaccaagcaggttctg

SEQ ID NO: 41098 - DNA, 80 bp, synthetic construct
  source 1..80: mol_type = other DNA
atagacttttgttcacatgtggctcaacttgagaaaaatgagatggatgcaaggctcctttcgttggtttctctagcaat

SEQ ID NO: 41099 - DNA, 80 bp, synthetic construct
  source 1..80: mol_type = other DNA
aatacactatgatcaaagggtgacaagatgttaaaatacacccctccttgtccttcggtgctgactggctgtttacctca

SEQ ID NO: 41100 - DNA, 80 bp, synthetic construct; identical to SEQ ID NO: 11128
  source 1..80: mol_type = other DNA

SEQ ID NO: 41101 - DNA, 80 bp, synthetic construct
  source 1..80: mol_type = other DNA
cctgccctgtgtccatgtgttctcatttttcaattcccacctatgagtgagaacatgccgtgtttggttttctgtccttg

SEQ ID NO: 41102 - DNA, 80 bp, synthetic construct
  source 1..80: mol_type = other DNA
ttgctattgtgaatagtgccgcaataaacatacgtgtgcatgtgtcttcatagtagcatgatttataatccttcgggtat

SEQ ID NO: 41103 - DNA, 80 bp, synthetic construct
  source 1..80: mol_type = other DNA
gactttttaatgactaccattttaactggcatgagatggtatctcattgtggttttgatttgcatttctctaatgaccag

SEQ ID NO: 41104 - DNA, 80 bp, synthetic construct
  source 1..80: mol_type = other DNA
atggataaattgcaaaaattttctcccattctgtaggttgcctgttcactctgatgatagtttcttttgctgtgcagaag

SEQ ID NO: 41105 - DNA, 80 bp, synthetic construct; identical to SEQ ID NO: 11129
  source 1..80: mol_type = other DNA

SEQ ID NO: 41106 - DNA, 80 bp, synthetic construct
  source 1..80: mol_type = other DNA
gtgtggtgctatttctgaggtctctgttctgtttcattggtctatatatctgttttggtaccagtaccatgctgttttgg

SEQ ID NO: 41107 - DNA, 80 bp, synthetic construct
  source 1..80: mol_type = other DNA
gatggggatagcattaaatctatcaattactttgggcagtatggcttttttcacgatattgattcttcctatccacaagc

SEQ ID NO: 41108 - DNA, 80 bp, synthetic construct
  source 1..80: mol_type = other DNA
cactgtctcaaattcttggtttcaagagcatcctctgttcccactctctcatgatacctaatactggtgattatcaggct

SEQ ID NO: 41109 - DNA, 80 bp, synthetic construct; identical to SEQ ID NO: 11130
  source 1..80: mol_type = other DNA

SEQ ID NO: 41110 - DNA, 80 bp, synthetic construct
  source 1..80: mol_type = other DNA
attgaagcacaagacacctgtagatagggctgctgcaagatgttcaagtcagtggcacaatgtcttgaaaaaattagaat

SEQ ID NO: 41111 - DNA, 80 bp, synthetic construct
  source 1..80: mol_type = other DNA
ctcttcttagagtcataccacatagaatgtcctgcgatatctcattggaatgccctcaccataaccaacacttaggcctt

SEQ ID NO: 41112 - DNA, 80 bp, synthetic construct
  source 1..80: mol_type = other DNA
ggcatttaattccattcattcagtgagtgtcctttccagctagacattcttgggtaaaagaacagacagaatcacacttg

SEQ ID NO: 41113 - DNA, 80 bp, synthetic construct; identical to SEQ ID NO: 11131
  source 1..80: mol_type = other DNA

SEQ ID NO: 41114 - DNA, 80 bp, synthetic construct
  source 1..80: mol_type = other DNA
acttttgtcttacaaattccctggaaacaatctcatgaaaatatttatcaatgtaatttgtgtgtgtgtgtgtgcgtgtg

SEQ ID NO: 41115 - DNA, 80 bp, synthetic construct
  source 1..80: mol_type = other DNA
tgggagcaggtaaaaccagtattgttgcaataaacaccctgtcacggatatcacttggtaacactattttgtctctgtaa

SEQ ID NO: 41116 - DNA, 80 bp, synthetic construct
  source 1..80: mol_type = other DNA
ttaaagcttattaataacaggggtagaaaatcatatctcattatgcagtgctcctgatgactaacaaagttgaataattt

SEQ ID NO: 41117 - DNA, 80 bp, synthetic construct; identical to SEQ ID NO: 11132
  source 1..80: mol_type = other DNA

SEQ ID NO: 41118 - DNA, 80 bp, synthetic construct
  source 1..80: mol_type = other DNA
actctgacacctccttaacatgctcctgaaatgtcagcatcatgagacatgagctacacaatgatgcagtatgggaatta

SEQ ID NO: 41119 - DNA, 80 bp, synthetic construct
  source 1..80: mol_type = other DNA
accttaaaaggagactatacattattttaaacaccatggtggacaaaactgaccatgtcttcagccacagagtaaatctg

SEQ ID NO: 41120 - DNA, 80 bp, synthetic construct
  source 1..80: mol_type = other DNA
cagatataaaattaataaggcttaaataaagggtatgtacttaaagggaatgcaatttttattcaaattacaaagaggta

SEQ ID NO: 41121 - DNA, 80 bp, synthetic construct; identical to SEQ ID NO: 11133
  source 1..80: mol_type = other DNA

SEQ ID NO: 41122 - DNA, 80 bp, synthetic construct
  source 1..80: mol_type = other DNA
gatgaggtaaatttgctttcttcaaagtaaaaggtttgggtgtaaattctaacctagtgaggagggattatattatccaa

SEQ ID NO: 41123 - DNA, 80 bp, synthetic construct
  source 1..80: mol_type = other DNA
tcctcttgcataagatgaaacagagttacagagagttatttgcccacaataacatgctttgaatgggagagccaaagttt

SEQ ID NO: 41124 - DNA, 80 bp, synthetic construct
  source 1..80: mol_type = other DNA
tggctggatttggaggatgttccaggataatgattgagaataatgcatggccttttgtatggtctttatttgggattcca

SEQ ID NO: 41125 - DNA, 80 bp, synthetic construct; identical to SEQ ID NO: 11134
  source 1..80: mol_type = other DNA

SEQ ID NO: 41126 - DNA, 80 bp, synthetic construct
  source 1..80: mol_type = other DNA
gattccttcagccttttctttctgaggctccccacaaagaaataaatgatagggttggcgctgctgtttataatgaggaa

SEQ ID NO: 41127 - DNA, 80 bp, synthetic construct
  source 1..80: mol_type = other DNA
atgagtagagtcagactcgacacacacatcacaagtgaaaggatagcatggaagagcccagaaagctttagaaatatgac

SEQ ID NO: 41128 - DNA, 80 bp, synthetic construct
  source 1..80: mol_type = other DNA
ctgatggccaccaggagacagagacacacctcaaaggagaagggagacaatatggccaggaaatcagggataaaaaacac

SEQ ID NO: 41129 - DNA, 80 bp, synthetic construct; identical to SEQ ID NO: 11135
  source 1..80: mol_type = other DNA

SEQ ID NO: 41130 - DNA, 80 bp, synthetic construct
  source 1..80: mol_type = other DNA
caccactgtggagacaaaggctacatgagagagatatctgtgactcagcaaacactgtccatccagccctctggctgaac

SEQ ID NO: 41131 - DNA, 80 bp, synthetic construct
  source 1..80: mol_type = other DNA
taggaacagctgaacattaactacatatcagagtggatgggagtatctgctctgcaaatagctctccatgaatttgtgat

SEQ ID NO: 41132 - DNA, 80 bp, synthetic construct
  source 1..80: mol_type = other DNA
gtctggtccaggttctactcatgagacactagtgtctcatctcttttttttttttttttttgagttggagtctcactctg

SEQ ID NO: 41133 - DNA, 80 bp, synthetic construct
  source 1..80: mol_type = other DNA
tcaccatattggccaggctggtctcaaactcctgaccttgtgatccacctgccttgacctcccaaagtgctgggattaca

SEQ ID NO: 41134 - DNA, 80 bp, synthetic construct; identical to SEQ ID NO: 11136
  source 1..80: mol_type = other DNA

SEQ ID NO: 41135 - DNA, 80 bp, synthetic construct
  source 1..80: mol_type = other DNA
gtaaatatattaatatagagagactagcatattaatactatgtaaatatttatatattaataaattatattaatataaca

SEQ ID NO: 41136 - DNA, 80 bp, synthetic construct
  source 1..80: mol_type = other DNA
attgctgttgtcccaggtttattgaaaataaaatccagtgactgctgtatattacagcattggagaaagagtcaaacagc

SEQ ID NO: 41137 - DNA, 80 bp, synthetic construct
  source 1..80: mol_type = other DNA
ctttctttctcctcctcctgtagcttgatggagatacctctcactggacctctctgaatctggttcgtcagatgcgtgac

SEQ ID NO: 41138 - DNA, 80 bp, synthetic construct; identical to SEQ ID NO: 11137
  source 1..80: mol_type = other DNA

SEQ ID NO: 41139 - DNA, 80 bp, synthetic construct
  source 1..80: mol_type = other DNA
tttggtatactatattaatattatttatatgatatgaatatgctattagtggcatattaataacaatatattaataatat

SEQ ID NO: 41140 - DNA, 80 bp, synthetic construct
  source 1..80: mol_type = other DNA
taattgttatttttatagaatctggaattgtggagcagacttcgcaaggcttctctgacctctgcctcccgctctgggat

SEQ ID NO: 41141 - DNA, 80 bp, synthetic construct
  source 1..80: mol_type = other DNA
ctaaggtagaactgtctgtaccttctttgggtttacattgtgataactgcaaggagaaaaataaattgggctgagtggat

SEQ ID NO: 41142 - DNA, 80 bp, synthetic construct
  source 1..80: mol_type = other DNA
cttcatctgctttgttaatctttgatgctcctgtccagagagggcctcttaagcaacttgagtgcaataactatttttct

SEQ ID NO: 41143 - DNA, 80 bp, synthetic construct; identical to SEQ ID NO: 11138
  source 1..80: mol_type = other DNA

SEQ ID NO: 41144 - DNA, 80 bp, synthetic construct
  source 1..80: mol_type = other DNA
gttgagagctcgtttaagtggaagatcctggatgagtgcagatacagactgtgagcaggagagctctgctctgtctcttt

SEQ ID NO: 41145 - DNA, 80 bp, synthetic construct
  source 1..80: mol_type = other DNA
tctcatgtgtcttccttagagagattcctgtccaccttcctgtctcaggaagatggatggaatcatttcattggaggatg

SEQ ID NO: 41146 - DNA, 80 bp, synthetic construct
  source 1..80: mol_type = other DNA
aagagatcagaccatcctttcctgagatcctgaacactgataatgacttctcatactttaagacagcttcacagatgaag

SEQ ID NO: 41147 - DNA, 80 bp, synthetic construct; identical to SEQ ID NO: 11139
  source 1..80: mol_type = other DNA

SEQ ID NO: 41148 - DNA, 80 bp, synthetic construct
  source 1..80: mol_type = other DNA
caccttacgcctgttaggatggccattctggaaaaacaaaagataacaagtgctaatgaggatgtggagaaagggatccc

SEQ ID NO: 41149 - DNA, 80 bp, synthetic construct
  source 1..80: mol_type = other DNA
agcactcttatgtttgctgcaatactattcacaatagccaaaatgtggaaacaacctaaaaatccatcaaaaaatgaatg

SEQ ID NO: 41150 - DNA, 80 bp, synthetic construct
  source 1..80: mol_type = other DNA
catggtgaaaccccgtctctactaaaaatacaaaaattagctgggcatggtggcaggtgcctgtaatcccagctacttgg

SEQ ID NO: 41151 - DNA, 80 bp, synthetic construct; identical to SEQ ID NO: 11140
  source 1..80: mol_type = other DNA

SEQ ID NO: 41152 - DNA, 80 bp, synthetic construct
  source 1..80: mol_type = other DNA
ggaatgtttttgcaactgaagctgcttcatctttttgagcctctggtatttcctctgcaaaattagaatactgataatac

SEQ ID NO: 41153 - DNA, 80 bp, synthetic construct
  source 1..80: mol_type = other DNA
tactctgaaggaaaaaaaaaagtggcagtgggatggactatcttaaggaaaacgggaaagacagtgagccacttaggttg

SEQ ID NO: 41154 - DNA, 80 bp, synthetic construct
  source 1..80: mol_type = other DNA
gtttagggagggaaagagagagtgagagaaataagcttttagagaggtaggcaggtgtggaatcatataggccaagataa

SEQ ID NO: 41155 - DNA, 80 bp, synthetic construct; identical to SEQ ID NO: 11141
  source 1..80: mol_type = other DNA

SEQ ID NO: 41156 - DNA, 80 bp, synthetic construct
  source 1..80: mol_type = other DNA
tgcattttaaagatcactactgtgcacttaaaattattaggataatagatctcgtgtcaagaattcttaccaaaatgaag

SEQ ID NO: 41157 - DNA, 80 bp, synthetic construct
  source 1..80: mol_type = other DNA
gcaaaaactcctccgaattagagagatgagaaagagagtcagatgaagagagaacacagttctcatcttacctgtgacat

SEQ ID NO: 41158 - DNA, 80 bp, synthetic construct
  source 1..80: mol_type = other DNA
tgatcaagattcccatgtgctccttgtttttcttctggccaatgagtggcttctatctgtggggacagatagctgagcat

SEQ ID NO: 41159 - DNA, 80 bp, synthetic construct; identical to SEQ ID NO: 11142
  source 1..80: mol_type = other DNA

SEQ ID NO: 41160 - DNA, 80 bp, synthetic construct
  source 1..80: mol_type = other DNA
cctagccctcacagtttgaaaagagtgtcctcctattacaggcatgggtatgtattgggacttctgtgtccacatttcac

SEQ ID NO: 41161 - DNA, 80 bp, synthetic construct
  source 1..80: mol_type = other DNA
gctctgatctcacctgccacattcactttaagaatgcacatttctagattattgattttccaactgagttgtcccgaggg

SEQ ID NO: 41162 - DNA, 80 bp, synthetic construct
  source 1..80: mol_type = other DNA
gatcctagttaggacaggcactgaaaatcaacaccaatgacgtattgttaccctgagagaaaatgtcttgcttaagtgta

SEQ ID NO: 41163 - DNA, 80 bp, synthetic construct; identical to SEQ ID NO: 11143
  source 1..80: mol_type = other DNA

SEQ ID NO: 41164 - DNA, 80 bp, synthetic construct
  source 1..80: mol_type = other DNA
caccagactcttttgtgacccctgaaatcagtttctctgtttctgatgaactctggaggttttgtcactgctgctgcact

SEQ ID NO: 41165 - DNA, 80 bp, synthetic construct
  source 1..80: mol_type = other DNA
aattaacttgtcaagagaaggaagaaaagaaagaaatgaaatggtcaggtatcccttgaagattctgatggtcacacaga

SEQ ID NO: 41166 - DNA, 80 bp, synthetic construct
  source 1..80: mol_type = other DNA
tctattgattcttcattgctggggtttccaacctacagggatgaggactgatgcatctgtgaatgagcatgccattccct

SEQ ID NO: 41167 - DNA, 80 bp, synthetic construct; identical to SEQ ID NO: 11144
  source 1..80: mol_type = other DNA

SEQ ID NO: 41168 - DNA, 80 bp, synthetic construct
  source 1..80: mol_type = other DNA
gacatgtttaacttcacccaccaggcacccatctcactaagaagactttgatgttcatgagaaatgaatttctgctgcct

SEQ ID NO: 41169 - DNA, 80 bp, synthetic construct
  source 1..80: mol_type = other DNA
catcaccaaagatcaataaaacatttgtagaacaccccacggagatgtgatctgcccactgtacagatcagaagagcttc

SEQ ID NO: 41170 - DNA, 80 bp, synthetic construct
  source 1..80: mol_type = other DNA
ttgggaagacttctctgtctacatttgtatatttatttggctgactttccctgaatttgctgcctgactgagtaatttat

SEQ ID NO: 41171 - DNA, 80 bp, synthetic construct; identical to SEQ ID NO: 11145
  source 1..80: mol_type = other DNA

SEQ ID NO: 41172 - DNA, 80 bp, synthetic construct
  source 1..80: mol_type = other DNA
gatggttgaaaattgtgtgaccttcccccttcactctctctctttctcctgccaccatgtgaagaaggtgcttgcttccc

SEQ ID NO: 41173 - DNA, 80 bp, synthetic construct
  source 1..80: mol_type = other DNA
ctatcttgttctctggtatctttattaaagcattttcagtgtctgctcatgctctcttctttaacaataatgtgctttct

SEQ ID NO: 41174 - DNA, 80 bp, synthetic construct
  source 1..80: mol_type = other DNA
ttaaaatcctccagtaccaaaagttgtttaagacaaaaacaaatagttaatttccagttagcaaagctttctctttgtat

SEQ ID NO: 41175 - DNA, 80 bp, synthetic construct; identical to SEQ ID NO: 11146
  source 1..80: mol_type = other DNA

SEQ ID NO: 41176 - DNA, 80 bp, synthetic construct
  source 1..80: mol_type = other DNA
agatgcaagaaataatgcaaacagatcccatacccagttttccagtggtaacatcatgcaaaattatattataatatttt

SEQ ID NO: 41177 - DNA, 80 bp, synthetic construct
  source 1..80: mol_type = other DNA
tggtttcttctttgacatactgattgttcaacatgatattatttaattttcaaaaatttgtaaattttccaattttcttc

SEQ ID NO: 41178 - DNA, 80 bp, synthetic construct
  source 1..80: mol_type = other DNA
gttctgtgtatgcttgagaagaatggtcattctgctgctgttgaatgtaatgtcccataaatgtctcttaggacctcttg

SEQ ID NO: 41179 - DNA, 80 bp, synthetic construct
  source 1..80: mol_type = other DNA
cttcattgtgttcatattttcgttacatatttaggtgctctgaacttgggtgcacatacacttaaaattgttatattttc

SEQ ID NO: 41180 - DNA, 80 bp, synthetic construct; identical to SEQ ID NO: 11147
  source 1..80: mol_type = other DNA

SEQ ID NO: 41181 - DNA, 80 bp, synthetic construct
  source 1..80: mol_type = other DNA
atttttttgtgtggtaatatgctttgattttactctttttgtcttgtgtgtacctactacaggtttttgtttgttgttgc

SEQ ID NO: 41182 - DNA, 80 bp, synthetic construct
  source 1..80: mol_type = other DNA
ccaacaaattattatggctataattgttttattttatcttttaattttatactagaattaaaagtgacttatgccatcag

SEQ ID NO: 41183 - DNA, 80 bp, synthetic construct
  source 1..80: mol_type = other DNA
gatgggcagattgtggggctccgaccccacggtggcatctaggggtggatgtttacagctcctgaagccctaggaggaga

SEQ ID NO: 41184 - DNA, 80 bp, synthetic construct; identical to SEQ ID NO: 11148
  source 1..80: mol_type = other DNA

SEQ ID NO: 41185 - DNA, 80 bp, synthetic construct
  source 1..80: mol_type = other DNA
ccttgtttctgtggcccaatactttttccaccagactccttcacgtgcctaatttgggacatggtttctgagctgcaggt

SEQ ID NO: 41186 - DNA, 80 bp, synthetic construct
  source 1..80: mol_type = other DNA
aggtggggcctgggctcagctgcagagaccaggggacgggctggaccacattctctttctgccatatgcagctgccttac

SEQ ID NO: 41187 - DNA, 80 bp, synthetic construct
  source 1..80: mol_type = other DNA
tctgggctaagaatgtcttattcatttagaactagtacctcggactctgattacgggccttgctgcgtgtaaggaacagc

SEQ ID NO: 41188 - DNA, 80 bp, synthetic construct; identical to SEQ ID NO: 11149
  source 1..80: mol_type = other DNA

SEQ ID NO: 41189 - DNA, 80 bp, synthetic construct
  source 1..80: mol_type = other DNA
ttcccaggttccttcctagaaccctggtcgccttgggatgactgggggattctagttgactacccaaggaaatctgaagc

SEQ ID NO: 41190 - DNA, 80 bp, synthetic construct
  source 1..80: mol_type = other DNA
ctggagcctctcaaccaggacaacgtgagaaaaaaatctgaagaaaaaggcccaggtgcttggggtaagaacagccaagc

SEQ ID NO: 41191 - DNA, 80 bp, synthetic construct
  source 1..80: mol_type = other DNA
ctcatggggagcattcacctgagatataaaactttggctgcttaactcattttaagggaataataacatatttgcataca

SEQ ID NO: 41192 - DNA, 80 bp, synthetic construct; identical to SEQ ID NO: 11150
  source 1..80: mol_type = other DNA

SEQ ID NO: 41193 - DNA, 80 bp, synthetic construct
  source 1..80: mol_type = other DNA
gaacaggtaggaggttgcttggtaaatgttgcaagaatgtgaactcttgtggtagaaatattctgaggctgattcagagg

SEQ ID NO: 41194 - DNA, 80 bp, synthetic construct
  source 1..80: mol_type = other DNA
caaagggcatgggaacctcctgggctgtgaccagtcatcacctgggatcccactgccacagctcagagctaaagacagaa

SEQ ID NO: 41195 - DNA, 80 bp, synthetic construct
  source 1..80: mol_type = other DNA
aactgacaatgactggcccttgattgactcacccagtgagttggtttcctggggccatggtaacaaactaccacaaacca

SEQ ID NO: 41196 - DNA, 80 bp, synthetic construct; identical to SEQ ID NO: 11151
  source 1..80: mol_type = other DNA

SEQ ID NO: 41197 - DNA, 80 bp, synthetic construct
  source 1..80: mol_type = other DNA
cacaccaggtgacccttcttccctaacagaccatccagatcctctgtggctttgcagttatgagcatggggatccttttg

SEQ ID NO: 41198 - DNA, 80 bp, synthetic construct
  source 1..80: mol_type = other DNA
ggatggagcagggcacagacaactgatatgctacctagcaatgtctctgtggagagcaaagatgcaggaatggaacttgt

SEQ ID NO: 41199 - DNA, 80 bp, synthetic construct
  source 1..80: mol_type = other DNA
acaatagcatgtgtagcctcaacagggacactataagaataaaagagtgtgctattactatttatgccatgatcacagga

SEQ ID NO: 41200 - DNA, 80 bp, synthetic construct; identical to SEQ ID NO: 11152
  source 1..80: mol_type = other DNA

SEQ ID NO: 41201 - DNA, 80 bp, synthetic construct
  source 1..80: mol_type = other DNA
tataaacagcaagcatctattactcacagttctggaggctggaagtccaagatcgtgacaccgacagatttggtgtctgg

SEQ ID NO: 41202 - DNA, 80 bp, synthetic construct
  source 1..80: mol_type = other DNA
ataccatcgcattggaggttaggtatttagcacatgaaatctgggggcaacagacattcaggccacagcaagaagcttca

SEQ ID NO: 41203 - DNA, 80 bp, synthetic construct
  source 1..80: mol_type = other DNA
agtcacaaacctccctgttccctctctatctggctattttcttggtaggaccagaaaaacttttttttatagtcttgcca

SEQ ID NO: 41204 - DNA, 80 bp, synthetic construct; identical to SEQ ID NO: 11153
  source 1..80: mol_type = other DNA

SEQ ID NO: 41205 - DNA, 80 bp, synthetic construct
  source 1..80: mol_type = other DNA
agctgagtcaggttctcatgagattctaggggtggcttggcctcctatatccacttcccccaacattggcctgtagccac

SEQ ID NO: 41206 - DNA, 80 bp, synthetic construct
  source 1..80: mol_type = other DNA
gtttatcatttctggattgctgtctgtcattttgggaagaaaatcaaacaagcatctggtgagtataggaacaacagtgc

SEQ ID NO: 41207 - DNA, 80 bp, synthetic construct
  source 1..80: mol_type = other DNA
cctcattttgaagagagtcctgtaccctctccaggctctgggtggctttatgggaaaattctgcctcatcatgacaccct

SEQ ID NO: 41208 - DNA, 80 bp, synthetic construct; identical to SEQ ID NO: 11154
  source 1..80: mol_type = other DNA

SEQ ID NO: 41209 - DNA, 80 bp, synthetic construct
  source 1..80: mol_type = other DNA
ctcaaaggatcagatgcccttcttcatccccaccctcagcctcccctgagccctccaggaaagcagcctgtgtggatccc

SEQ ID NO: 41210 - DNA, 80 bp, synthetic construct
  source 1..80: mol_type = other DNA
ttctcagaacattctgacaacacgagttgtgaatccctggggctgtatggagaaatggcccacgacctttttccatctct

SEQ ID NO: 41211 - DNA, 80 bp, synthetic construct
  source 1..80: mol_type = other DNA
tattcctcccctggtgttggtctttgaaaagtgagtctggacaccgcaaaactggaatccaggtttcctactttcgaggg

SEQ ID NO: 41212 - DNA, 80 bp, synthetic construct; identical to SEQ ID NO: 11155
  source 1..80: mol_type = other DNA

SEQ ID NO: 41213 - DNA, 80 bp, synthetic construct
  source 1..80: mol_type = other DNA
atggctggaggaacctcctcagggtgccagtggactgggtaaagccatcagggggcttggaggtcagggaagctgtgatt

SEQ ID NO: 41214 - DNA, 80 bp, synthetic construct
  source 1..80: mol_type = other DNA
gaaccacatctcctgtctgtcccaccataagtctctgcttcattcacgctttcatgtgtcgtgcatcaagcaagcatttg

SEQ ID NO: 41215 - DNA, 80 bp, synthetic construct
  source 1..80: mol_type = other DNA
gcagaccctgaccagatcccctgcaggcctggaacagcctgatcagcagcctcctaagccccatggctgccacagtgggc

SEQ ID NO: 41216 - DNA, 80 bp, synthetic construct; identical to SEQ ID NO: 11156
  source 1..80: mol_type = other DNA

SEQ ID NO: 41217 - DNA, 80 bp, synthetic construct
  source 1..80: mol_type = other DNA
tgatttaactgtcatagtctcaagggatgggtttttccaagcaagaactctagggtcagggtagcgaattgctcaagaaa

SEQ ID NO: 41218 - DNA, 80 bp, synthetic construct
  source 1..80: mol_type = other DNA
ttccaccacatgcacaaaaatggatgggatggccaaaaatgaccccaaaaaatcaggaaacaaatacggaatgggctttt

SEQ ID NO: 41219 - DNA, 80 bp, synthetic construct
  source 1..80: mol_type = other DNA
caagagaacatgtgtgtggaacactgagaaaagaaggcagaggaaatttgcattcctgcagccatagagggggatattct

SEQ ID NO: 41220 - DNA, 80 bp, synthetic construct; identical to SEQ ID NO: 11157
  source 1..80: mol_type = other DNA

SEQ ID NO: 41221 - DNA, 80 bp, synthetic construct
  source 1..80: mol_type = other DNA
aggctctaggaaaaaactctttcttgtctcttccagctttggggaactccaggcattctttggcttctggacacgtcttt

SEQ ID NO: 41222 - DNA, 80 bp, synthetic construct
  source 1..80: mol_type = other DNA
ttccagataaggtcatattctcaggttctatgtagacatgaatttgaggggggacactaacccactatagtcacagtctg

SEQ ID NO: 41223 - DNA, 80 bp, synthetic construct
  source 1..80: mol_type = other DNA
ctttgattggtcaaggtgccccttgctgcctcccagccaagccaagcaggcccaccccagggagcataggtgggtagcag

SEQ ID NO: 41224 - DNA, 80 bp, synthetic construct; identical to SEQ ID NO: 11158
  source 1..80: mol_type = other DNA

SEQ ID NO: 41225 - DNA, 80 bp, synthetic construct
  source 1..80: mol_type = other DNA
atgctcctcttcacggcattggagctcagtgtcgctatcctttcttctgtcctcttgtgaaaaaagacctgttcagatgt

SEQ ID NO: 41226 - DNA, 80 bp, synthetic construct
  source 1..80: mol_type = other DNA
ggatgacagcaagtgcccagggtggaggaatcacaataggaagcgatgggaccaaagagagcacatcacacatctgctca

SEQ ID NO: 41227 - DNA, 80 bp, synthetic construct
  source 1..80: mol_type = other DNA
gattttttggagataaaaggccttccactcagcgtacaaggcctgttcacttgctttgtcctctccagaatgtgtttcct

SEQ ID NO: 41228 - DNA, 80 bp, synthetic construct; identical to SEQ ID NO: 11159
  source 1..80: mol_type = other DNA

SEQ ID NO: 41229 - DNA, 80 bp, synthetic construct
  source 1..80: mol_type = other DNA
acaacaaaatgaagagctgcctgggagagatgaacccatggtccccgtcttcacgctaagatgcaaaagagcagagcttc

SEQ ID NO: 41230 - DNA, 80 bp, synthetic construct
  source 1..80: mol_type = other DNA
ttcttgttcccctctgcccatttctctttttatctgaatccccagatgcccctgcacaatctgagtgtgcagagtggccc

SEQ ID NO: 41231 - DNA, 80 bp, synthetic construct
  source 1..80: mol_type = other DNA
gggaccttatgacttaataggggaagagccacagaatatagccacatatatgggcagaagtcctgagatatccatggggc

SEQ ID NO: 41232 - DNA, 80 bp, synthetic construct; identical to SEQ ID NO: 11160
  source 1..80: mol_type = other DNA

SEQ ID NO: 41233 - DNA, 80 bp, synthetic construct
  source 1..80: mol_type = other DNA
aatctggtttatccatttcttctgttttttaattcactctgcattgatatttatactacaactctccaaacactatttca

SEQ ID NO: 41234 - DNA, 80 bp, synthetic construct
  source 1..80: mol_type = other DNA
gctgctataagacagcctaagactgggtaatttataaaggaaagaggtttaattgactcccaggtctgcagggctggagt

SEQ ID NO: 41235 - DNA, 80 bp, synthetic construct
  source 1..80: mol_type = other DNA
aggcaacctcccccatggttcaattacttcccaccaggtccctcccacaacatgtggggattatgggaacaacaattcag

SEQ ID NO: 41236 - DNA, 80 bp, synthetic construct
  source 1..80: mol_type = other DNA
gcctgaccaacatggtgaaaccccatctctactaaaaacacaaaaaacttagcctggtatggtggtgtgcacctgtagtc

SEQ ID NO: 41237 - DNA, 80 bp, synthetic construct; identical to SEQ ID NO: 11161
  source 1..80: mol_type = other DNA

SEQ ID NO: 41238 - DNA, 80 bp, synthetic construct
  source 1..80: mol_type = other DNA
tgtgtgaagacacagggagaagacagttatctacaaaccaacaagagaggcctcagaagaaatcaacactgcggacacct

SEQ ID NO: 41239 - DNA, 80 bp, synthetic construct
  source 1..80: mol_type = other DNA
tttgctttcaccattttgtttaaggtcctcactcttcccatcactcaaactctgaaagttcttttcccatagtgaaaagg

SEQ ID NO: 41240 - DNA, 80 bp, synthetic construct
  source 1..80: mol_type = other DNA
tgtgatctggaagacgtattctataacagtagcgtttcacagcagaagccagacttgcaacattgcaaagatcatgggat

SEQ ID NO: 41241 - DNA, 80 bp, synthetic construct; identical to SEQ ID NO: 11162
  source 1..80: mol_type = other DNA

SEQ ID NO: 41242 - DNA, 80 bp, synthetic construct
  source 1..80: mol_type = other DNA
aatagcagcattgcagatgtcattagttaagacaaagttatactagagtagagcaggccctaatccaatacggcaggtgt

SEQ ID NO: 41243 - DNA, 80 bp, synthetic construct
  source 1..80: mol_type = other DNA
agggagggtagccagctgacactttagactgctaacctccagagttatgagacaataagttcctgttgtttgaagccgcc

SEQ ID NO: 41244 - DNA, 80 bp, synthetic construct
  source 1..80: mol_type = other DNA
acatattatataattccatgtatgtaaagtgtccagaataggtgaatccatacagactaaacacagattaatggttgcca

SEQ ID NO: 41245 - DNA, 80 bp, synthetic construct; identical to SEQ ID NO: 11163
  source 1..80: mol_type = other DNA

SEQ ID NO: 41246 - DNA, 80 bp, synthetic construct
  source 1..80: mol_type = other DNA
tttctcaccctgtactctttcactttgaagtcactgccccagaaccttctctttcactccacgattgggttgtgttgacc

SEQ ID NO: 41247 - DNA, 80 bp, synthetic construct
  source 1..80: mol_type = other DNA
aggtgctccgtagacacctgctcaatgtcatataggttcttggtcttctcttccaaataaggtagaatagttatttttca

SEQ ID NO: 41248 - DNA, 80 bp, synthetic construct
  source 1..80: mol_type = other DNA
ttgcaggttacccttccaaagtgctgttccaaaagagctcaccgagacaaggtgatattggagaagtgatagacacatag

SEQ ID NO: 41249 - DNA, 80 bp, synthetic construct; identical to SEQ ID NO: 11164
  source 1..80: mol_type = other DNA

SEQ ID NO: 41250 - DNA, 80 bp, synthetic construct
  source 1..80: mol_type = other DNA
ttgaactcctgacctcgtgatccaccagcctcggcctcccaaagtgctgggattacaggcgtgagccacggcacccagtc

SEQ ID NO: 41251 - DNA, 80 bp, synthetic construct
  source 1..80: mol_type = other DNA
aatttttccaatctagttaggcaaagagttcatagatgtgacactgaaagcaaagtatagcaaaaggcaaaaataaattc

SEQ ID NO: 41252 - DNA, 80 bp, synthetic construct
  source 1..80: mol_type = other DNA
ttaaaacaatcaatccaattcaaaaacaagaaaacaaaaccagtttcagaaatgagacaaagactcagacacaaacttca

SEQ ID NO: 41253 - DNA, 80 bp, synthetic construct; identical to SEQ ID NO: 11165
  source 1..80: mol_type = other DNA

SEQ ID NO: 41254 - DNA, 80 bp, synthetic construct
  source 1..80: mol_type = other DNA
acacccgtacacaaactgttataaaagctccagtcataataggcaaaacccagaagcaaactaaatgtcctttaacaggt

SEQ ID NO: 41255 - DNA, 80 bp, synthetic construct
  source 1..80: mol_type = other DNA
gatgttatgcatcgaatctctagaatttaatcatcttccatacccgaaattttacacaagctgaaaagcaactcctcatg

SEQ ID NO: 41256 - DNA, 80 bp, synthetic construct
  source 1..80: mol_type = other DNA
tggcaggatttccttcttttgcatggctggataatattccattgtgaggatagcctccatttcctttcatctctcaatgg

SEQ ID NO: 41257 - DNA, 80 bp, synthetic construct
  source 1..80: mol_type = other DNA
ggtgaggttaagagttaaagagtagaaaacaggaggccagtgagggggcatttttgggcccatgggaaggtttctgagga

SEQ ID NO: 41258 - DNA, 80 bp, synthetic construct; identical to SEQ ID NO: 11166
  source 1..80: mol_type = other DNA

SEQ ID NO: 41259 - DNA, 80 bp, synthetic construct
  source 1..80: mol_type = other DNA
tgctgagcatgtaggcctaaaattttacacacaaactgagtccctatgaggaaagggcaagccctctgccctctgccctt

SEQ ID NO: 41260 - DNA, 80 bp, synthetic construct
  source 1..80: mol_type = other DNA
ctcatgcacacacgtgttcacaacatacacattcacactcacacacaaacacattgaatgcatgcgtgttgacagttcaa

SEQ ID NO: 41261 - DNA, 80 bp, synthetic construct
  source 1..80: mol_type = other DNA
ggacccttttctaagtgagaggcacatctcagcacagctgactgatcattctcgggtaagtgtgacctgctgtctcccct

SEQ ID NO: 41262 - DNA, 80 bp, synthetic construct; identical to SEQ ID NO: 11167
  source 1..80: mol_type = other DNA

SEQ ID NO: 41263 - DNA, 80 bp, synthetic construct
  source 1..80: mol_type = other DNA
ggcatccctcagtccaagtctgtgcaagaaaaagttccccagaggcagggatcttatccattcagactttaagtgtgggc

SEQ ID NO: 41264 - DNA, 80 bp, synthetic construct
  source 1..80: mol_type = other DNA
ggggtttaacctgcaaggccctctctctgacctgtcctccagacgtatcaccttccctttgtctcaggtattcccaggag

SEQ ID NO: 41265 - DNA, 80 bp, synthetic construct
  source 1..80: mol_type = other DNA
ccttctccgaaccaaacatcctccttcttgactggtgttattcttcaaatggattcactggccacagtgagtaaagattt

SEQ ID NO: 41266 - DNA, 80 bp, synthetic construct; identical to SEQ ID NO: 11168
  source 1..80: mol_type = other DNA

SEQ ID NO: 41267 - DNA, 80 bp, synthetic construct
  source 1..80: mol_type = other DNA
tggggtgttctctaaagctctcaggtgccatgtaattttgggagtattttgtcttatagggtggatatggacaaagacat

SEQ ID NO: 41268 - DNA, 80 bp, synthetic construct
  source 1..80: mol_type = other DNA
acacgcccatacccaacaacttttattttggcctccctcaccctctctccctctgccttgcaggttgctgatccagggca

SEQ ID NO: 41269 - DNA, 80 bp, synthetic construct
  source 1..80: mol_type = other DNA
acagaaatagagtgtagagtgggaatcaggggctgatagccttcagagctgagagccatgaatggagttagacccacata

SEQ ID NO: 41270 - DNA, 80 bp, synthetic construct; identical to SEQ ID NO: 11169
  source 1..80: mol_type = other DNA

SEQ ID NO: 41271 - DNA, 80 bp, synthetic construct
  source 1..80: mol_type = other DNA
tatcctaggcacagacgatggcatgggaaccacaagtgaactgggctctggtgaccctcagtggctttggaaataagata

SEQ ID NO: 41272 - DNA, 80 bp, synthetic construct
  source 1..80: mol_type = other DNA
gcagggctcctatacagggctctcactgtaaagcaactgagggagagtgagccccagggaaggaccagccccatcctcat

SEQ ID NO: 41273 - DNA, 80 bp, synthetic construct
  source 1..80: mol_type = other DNA
atgaagtgcaccttcagacaccatgtcatgttttgggagcactacagagtcaggtaaggcctatgggggatggagggtcc

SEQ ID NO: 41274 - DNA, 80 bp, synthetic construct; identical to SEQ ID NO: 11170
  source 1..80: mol_type = other DNA

SEQ ID NO: 41275 - DNA, 80 bp, synthetic construct
  source 1..80: mol_type = other DNA
gacagttgggaattgctcacaaagctaaatgtacttgtaccacgtgaccacaagtgtcatagacgttgacctagctgact

SEQ ID NO: 41276 - DNA, 80 bp, synthetic construct
  source 1..80: mol_type = other DNA
aggggaatgggcgcatcccatgaaatgaggttatacctgtttggtataataaaattacaggttaaatctataaatataaa

SEQ ID NO: 41277 - DNA, 80 bp, synthetic construct
  source 1..80: mol_type = other DNA
gtcaaaaggactgaatttagaatttaattttgaaaaaatcaaatatcaaaactttaaaacacctgctatcacaaaatagg

SEQ ID NO: 41278 - DNA, 80 bp, synthetic construct; identical to SEQ ID NO: 11171
  source 1..80: mol_type = other DNA

SEQ ID NO: 41279 - DNA, 80 bp, synthetic construct
  source 1..80: mol_type = other DNA
atctttcaaaataggctcttacaatcgcatgtacccacatcttccacaatagcccctggactttgaggggtaagatagtt

SEQ ID NO: 41280 - DNA, 80 bp, synthetic construct
  source 1..80: mol_type = other DNA
aggactttaaaagcaatacagaacattgtatggatgttaataactttaattttttaaatctcagttttcctaggcaaata

SEQ ID NO: 41281 - DNA, 80 bp, synthetic construct
  source 1..80: mol_type = other DNA
ggaagggtgtgtcttgcatcataagtgaaaattttcagtttcatagaaaaacttcaaaccaagagcacagaatgttatat

SEQ ID NO: 41282 - DNA, 80 bp, synthetic construct; identical to SEQ ID NO: 11172
  source 1..80: mol_type = other DNA

SEQ ID NO: 41283 - DNA, 80 bp, synthetic construct
  source 1..80: mol_type = other DNA
aataaattcttttctcataaagtctctttttacaaaccttactatgacttacacaagccacttatgacatgcctagactt

SEQ ID NO: 41284 - DNA, 80 bp, synthetic construct
  source 1..80: mol_type = other DNA
tgatcacagctcactgcagccttgacccacccaggctcaagcaatcctcccatttcaacctcccaggtagctgggactat

SEQ ID NO: 41285 - DNA, 80 bp, synthetic construct
  source 1..80: mol_type = other DNA
cattttattttagaacaaacatttaccatgcaagatttttttctcatataaaattttccttttaacctttcttaccaaaa

SEQ ID NO: 41286 - DNA, 80 bp, synthetic construct; identical to SEQ ID NO: 11173
  source 1..80: mol_type = other DNA

SEQ ID NO: 41287 - DNA, 80 bp, synthetic construct
  source 1..80: mol_type = other DNA
tttcaggtgtttacctaagtaagaagcttaaggttaaacaaatgagtttttcgccaataactcaggataaatgacttatt

SEQ ID NO: 41288 - DNA, 80 bp, synthetic construct
  source 1..80: mol_type = other DNA
gagtacacccattttcctgagacatcaattattattttttttctttccttttcttgttccttcagttccccactccctac

SEQ ID NO: 41289 - DNA, 80 bp, synthetic construct
  source 1..80: mol_type = other DNA
tttataaaccaatcatgcccactgtggaactctcactctttaggaggttgtctcaagagataacagcctgcccatgaagg

SEQ ID NO: 41290 - DNA, 80 bp, synthetic construct; identical to SEQ ID NO: 11174
  source 1..80: mol_type = other DNA

SEQ ID NO: 41291 - DNA, 80 bp, synthetic construct
  source 1..80: mol_type = other DNA
tactgaactacagcatggggcaaccactattgctatttcagtttggcttggctagcaaagggttgttttgttatgtaaat

SEQ ID NO: 41292 - DNA, 80 bp, synthetic construct
  source 1..80: mol_type = other DNA
aactttccttcaggtttgaccaagtcaactagagtggtcaaacccaacggaaaaaagactaaaacaacaaaaacagaacc

SEQ ID NO: 41293 - DNA, 80 bp, synthetic construct
  source 1..80: mol_type = other DNA
agagaatttccaagacaaaccccatttcagctacttatgtaggaataaggcccaggttgaagattgctctctatcatcct

SEQ ID NO: 41294 - DNA, 80 bp, synthetic construct
  source 1..80: mol_type = other DNA
agatctcaacaacattttgagaaatcagggattctctggagatgatacctcccaggcctcagcaaatcgtcctgttggtt

SEQ ID NO: 41295 - DNA, 80 bp, synthetic construct; identical to SEQ ID NO: 11175
  source 1..80: mol_type = other DNA

SEQ ID NO: 41296 - DNA, 80 bp, synthetic construct
  source 1..80: mol_type = other DNA
aaggcattcttcccttaccagccgagtgttcctggagaaaggttatatactggttcaactctgccattttgcctgttagt

SEQ ID NO: 41297 - DNA, 80 bp, synthetic construct
  source 1..80: mol_type = other DNA
gatggttgcctgacattcctgggcgagggtccctctcctgacctattcatgtctgactaattacctattgtaacagtttg

SEQ ID NO: 41298 - DNA, 80 bp, synthetic construct
  source 1..80: mol_type = other DNA
cccggtgtggtggcacaagcctgtagtcccagctactcaggaggctgaggtggaaggatcacctgagcccgggaggtgga

SEQ ID NO: 41299 - DNA, 80 bp, synthetic construct; identical to SEQ ID NO: 11176
  source 1..80: mol_type = other DNA

SEQ ID NO: 41300 - DNA, 80 bp, synthetic construct
  source 1..80: mol_type = other DNA
catctcacactcagtaataggccctttacataaggtgaacataagactagctacttgaggagctatttaaccttctatct

SEQ ID NO: 41301 - DNA, 80 bp, synthetic construct
  source 1..80: mol_type = other DNA
caaaccccacaagctttgcgttgttgcagattgtccctctcagaatattttacaagatggtgaagtgcctaatgaacatt

SEQ ID NO: 41302 - DNA, 80 bp, synthetic construct
  source 1..80: mol_type = other DNA
ttcctggcaggaagagctgctgagcagactccatgggctgcccacacagggtctggacctagctgtcttcctgtgcccag

SEQ ID NO: 41303 - DNA, 80 bp, synthetic construct; identical to SEQ ID NO: 11177
  source 1..80: mol_type = other DNA

SEQ ID NO: 41304 - DNA, 80 bp, synthetic construct
  source 1..80: mol_type = other DNA
ggtgacattagttctcccctctcaagtgatctgtgccctcctaggttacctcagctctcccaggtgacctctgcctttcc

SEQ ID NO: 41305 - DNA, 80 bp, synthetic construct
  source 1..80: mol_type = other DNA
tctctgccttctcaggtgacattagttctcctaggggatattaactctcccaagtgacctcttcccttccaagtgacctg

SEQ ID NO: 41306 - DNA, 80 bp, synthetic construct
  source 1..80: mol_type = other DNA
ggcttttgccagaggtaggctactgcgggggcataagccatatcatgccatgagccactatcctgctcatgttccagaat

SEQ ID NO: 41307 - DNA, 80 bp, synthetic construct; identical to SEQ ID NO: 11178
  source 1..80: mol_type = other DNA

SEQ ID NO: 41308 - DNA, 80 bp, synthetic construct
  source 1..80: mol_type = other DNA
ggactcttacaaccctgctggtccttccacctcccagctggccaccctcccaaccaccctccctgcccatggctagacca

SEQ ID NO: 41309 - DNA, 80 bp, synthetic construct
  source 1..80: mol_type = other DNA
gccactaagcagtgcctccagccaggccccaggggcattcccacccctcctctcctggccgagaccacatgatggggtca

SEQ ID NO: 41310 - DNA, 80 bp, synthetic construct
  source 1..80: mol_type = other DNA
agcctctcaggagtctacatcccaagatgttctaacttccagagtctccaagcccatcaagagcaagttttgctaaaagt

SEQ ID NO: 41311 - DNA, 80 bp, synthetic construct; identical to SEQ ID NO: 11179
  source 1..80: mol_type = other DNA

SEQ ID NO: 41312 - DNA, 80 bp, synthetic construct
  source 1..80: mol_type = other DNA
accctgaacacttctattccttctatcaggacaaggaagggttgtgcatccggctttccaccttaaactggtttctatgg

SEQ ID NO: 41313 - DNA, 80 bp, synthetic construct
  source 1..80: mol_type = other DNA
agccaggacctgtatgatgggagctttacacaccagacaccagggaattctgggcagactgggccaagacccatcttgga

SEQ ID NO: 41314 - DNA, 80 bp, synthetic construct
  source 1..80: mol_type = other DNA
tatggaagattgggtgggtctcttcccaagcagagggagcctcaggaagtccagactgaggctacagtgggccctgctca

SEQ ID NO: 41315 - DNA, 80 bp, synthetic construct; identical to SEQ ID NO: 11180
  source 1..80: mol_type = other DNA

SEQ ID NO: 41316 - DNA, 80 bp, synthetic construct
  source 1..80: mol_type = other DNA
ccactcctgacacaacccagatgaaaggcaagagtgtgttgagcacttccctgcccaggccttcctccagctgtggtttt

SEQ ID NO: 41317 - DNA, 80 bp, synthetic construct
  source 1..80: mol_type = other DNA
tttggcttgcaggagttccttcaggacacactgtcctaggcctgggccctggaggaggacatggtgatgaggcaccctga

SEQ ID NO: 41318 - DNA, 80 bp, synthetic construct
  source 1..80: mol_type = other DNA
tccctcctcctctaagaagcttctgaaaccaggctgcctgagcctagggcaaaagctgaccttgggtttactggacatgc

SEQ ID NO: 41319 - DNA, 80 bp, synthetic construct; identical to SEQ ID NO: 11181
  source 1..80: mol_type = other DNA

SEQ ID NO: 41320 - DNA, 80 bp, synthetic construct
  source 1..80: mol_type = other DNA
tcatccatctgagctctgaatcaaggctaaagcccaggctaagcagccctggggcaagagtgtgaggcaggaagactgag

SEQ ID NO: 41321 - DNA, 80 bp, synthetic construct
  source 1..80: mol_type = other DNA
gacccaggtctgtggggtccagcctggcaaaagcaagatgttctcaatggaaaagctgaccaaatctgctttcctttcag

SEQ ID NO: 41322 - DNA, 80 bp, synthetic construct
  source 1..80: mol_type = other DNA
ggtatagccctcctgaaacaggagcctcatcctccctcaccctcacctggctatgctgtacccaaggccaaagcccagag

SEQ ID NO: 41323 - DNA, 80 bp, synthetic construct; identical to SEQ ID NO: 11182
  source 1..80: mol_type = other DNA

SEQ ID NO: 41324 - DNA, 80 bp, synthetic construct
  source 1..80: mol_type = other DNA
cacttggcaagctgccccaaagccccagagagctccttagacatggaaagtcaatactgatggggaagctggacacttgg

SEQ ID NO: 41325 - DNA, 80 bp, synthetic construct
  source 1..80: mol_type = other DNA
acccagagggccctagcccagactcaacctgagccctgaaagggaaggggcaccaggggtgccttggggcctccagcagc

SEQ ID NO: 41326 - DNA, 80 bp, synthetic construct
  source 1..80: mol_type = other DNA
aaggccaagctgatgatgttaccaagctcaaactaccactggccaccttggtgagggtggggcagaaacacgtggaccag

SEQ ID NO: 41327 - DNA, 80 bp, synthetic construct; identical to SEQ ID NO: 11183
  source 1..80: mol_type = other DNA

SEQ ID NO: 41328 - DNA, 80 bp, synthetic construct
  source 1..80: mol_type = other DNA
ttgttgttatgtcctgcctgtttttgagttgcccagagctctctgcaggaagccctggacatactggggtggatgggaaa

SEQ ID NO: 41329 - DNA, 80 bp, synthetic construct
  source 1..80: mol_type = other DNA
tccagtaatttcctgtaattcaaactgcacctgatagggacccccagagggctgggaagggagcaaaagttggagttcca

SEQ ID NO: 41330 - DNA, 80 bp, synthetic construct
  source 1..80: mol_type = other DNA
ttgcttccctcatcctttccatctcatctcctctcagcatctggcaatcccaggtcctgagcctgtgccaaggcgggaca

SEQ ID NO: 41331 - DNA, 80 bp, synthetic construct; identical to SEQ ID NO: 11184
  source 1..80: mol_type = other DNA

SEQ ID NO: 41332 - DNA, 80 bp, synthetic construct
  source 1..80: mol_type = other DNA
gacagaagttatatcctgttttctttccattgattcttttaccacctttctcctcttactgattttgaatgaagggggtt

SEQ ID NO: 41333 - DNA, 80 bp, synthetic construct
  source 1..80: mol_type = other DNA
aaacaaaaaaattagccaggtgtggtggcacgcgcctgtagttccagctactggtggggctgaggtgggagaatggctta

SEQ ID NO: 41334 - DNA, 80 bp, synthetic construct
  source 1..80: mol_type = other DNA
acagcccttgtgtggtccccagcccacctcacaggttctaggctggccaccctgtggcctctgtactgtgtatctggacc

SEQ ID NO: 41335 - DNA, 80 bp, synthetic construct; identical to SEQ ID NO: 11185
  source 1..80: mol_type = other DNA

SEQ ID NO: 41336 - DNA, 80 bp, synthetic construct
  source 1..80: mol_type = other DNA
ctttttgtagaacctgcatatgagtccatcagaggtgagatttgcaaatacttcctccagcctgggacttgtcttttcat

SEQ ID NO: 41337 - DNA, 80 bp, synthetic construct
  source 1..80: mol_type = other DNA
aagttttaggccttacattttggtttatgatacattttgaataatggtgccatgtatggactgaagtttttaatatgcat

SEQ ID NO: 41338 - DNA, 80 bp, synthetic construct
  source 1..80: mol_type = other DNA
ttctattgatccatttgtctagcctcttaccaataccataccgtctgaatttctgaacctttacgataggtcttgaagtt

SEQ ID NO: 41339 - DNA, 80 bp, synthetic construct; identical to SEQ ID NO: 11186
  source 1..80: mol_type = other DNA

SEQ ID NO: 41340 - DNA, 80 bp, synthetic construct
  source 1..80: mol_type = other DNA
aaaaggcacctacaaaaaccctgtagttgatgtttactggacgttattcttaatgatgaaagactggatggtttcacccc

SEQ ID NO: 41341 - DNA, 80 bp, synthetic construct
  source 1..80: mol_type = other DNA
ttctcctgctagatggatgtcctttaccatttctcaatctgtacatctcctggtgatgatttctttcatcttttgtcaat

SEQ ID NO: 41342 - DNA, 80 bp, synthetic construct
  source 1..80: mol_type = other DNA
gtctttttcttctctatctagctgcttgtaggaggactcagcttctcgcagatagacatgtatgataaagatgcagtaac

SEQ ID NO: 41343 - DNA, 80 bp, synthetic construct
  source 1..80: mol_type = other DNA
aaccactgactaagtgggccaagtggccttttggcttaggctgaagcaggataataataacgttatctattcatagaatt

SEQ ID NO: 41344 - DNA, 80 bp, synthetic construct; identical to SEQ ID NO: 11187
  source 1..80: mol_type = other DNA

SEQ ID NO: 41345 - DNA, 80 bp, synthetic construct
  source 1..80: mol_type = other DNA
gtgctcaccagatctgattgtttcaaagtgtatagcacctctcccattgctctattcctgctgttcctgccatgtgaaga

SEQ ID NO: 41346 - DNA, 80 bp, synthetic construct
  source 1..80: mol_type = other DNA
ccaatacagggcatcatggtcagtcctggggaacagcttcctggagtgggaggagctcagtcctggtaacctgctgttcc

SEQ ID NO: 41347 - DNA, 80 bp, synthetic construct
  source 1..80: mol_type = other DNA
ctggttgagccatactgactaccatggacagcagcaacagaaggtcaaaggcaaaggtcaggtattcttttcctggcagg

SEQ ID NO: 41348 - DNA, 80 bp, synthetic construct; identical to SEQ ID NO: 11188
  source 1..80: mol_type = other DNA

SEQ ID NO: 41349 - DNA, 80 bp, synthetic construct
  source 1..80: mol_type = other DNA
ccagaaacatggccacctgcaatgtcacctggtgatacagcatgaggattttctccaacaggatcacagttacacaggag

SEQ ID NO: 41350 - DNA, 80 bp, synthetic construct
  source 1..80: mol_type = other DNA
actcgcctcccgtatgactcatgttcacttgtcctggggtctctgtcctgttgtcccaatccagcttcccagagaacact

SEQ ID NO: 41351 - DNA, 80 bp, synthetic construct
  source 1..80: mol_type = other DNA
atctcacagagcaaagtcaaggagaggaatgagtctcctgcaagtgatccatccatcccatatcctccactgcagggtac

SEQ ID NO: 41352 - DNA, 80 bp, synthetic construct; identical to SEQ ID NO: 11189
  source 1..80: mol_type = other DNA

SEQ ID NO: 41353 - DNA, 80 bp, synthetic construct
  source 1..80: mol_type = other DNA
atctttgccccagtatcaacttccagagaagcttctgcttcctattaacattgcattcatcacatgctgagtgtctatgc

SEQ ID NO: 41354 - DNA, 80 bp, synthetic construct
  source 1..80: mol_type = other DNA
tcagttacacttggggaagtgctggtgacctcttcataaaagcaaactttgcttctgaatcacagaagcttctggaacaa

SEQ ID NO: 41355 - DNA, 80 bp, synthetic construct
  source 1..80: mol_type = other DNA
cttatcctgctttgcctaggactttcccagtttaagctctgaacatctcttgtcctgaaaatcctcatagccctaggaaa

SEQ ID NO: 41356 - DNA, 80 bp, synthetic construct; identical to SEQ ID NO: 11190
  source 1..80: mol_type = other DNA

SEQ ID NO: 41357 - DNA, 80 bp, synthetic construct
  source 1..80: mol_type = other DNA
ctaaggagagaggctttggaaagaaatgatcccggcaatctttggatctcagactttcagcctcctaaaactgagagaat

SEQ ID NO: 41358 - DNA, 80 bp, synthetic construct
  source 1..80: mol_type = other DNA
ctgaatcacagaagcttctagaacagagcttgttccacaaactaactgataaatgcctgcgatatgcctggaaatattcc

SEQ ID NO: 41359 - DNA, 80 bp, synthetic construct
  source 1..80: mol_type = other DNA
agccccagcccctcccctccctgcacttgttacctagacactcttacctgaggccagggaggaccgcagatctggctcag

SEQ ID NO: 41360 - DNA, 80 bp, synthetic construct; identical to SEQ ID NO: 11191
  source 1..80: mol_type = other DNA

SEQ ID NO: 41361 - DNA, 80 bp, synthetic construct
  source 1..80: mol_type = other DNA
cacacaagaggaggacacagccctcctggggtgggaaggcttcagtgcctggtgcagccccagcactgggcacagagaga

SEQ ID NO: 41362 - DNA, 80 bp, synthetic construct
  source 1..80: mol_type = other DNA
attgaagtacttgctctggttctgagttgagagcccaccctccccacttaatctttatttgaggtgaaatttacataaca

SEQ ID NO: 41363 - DNA, 80 bp, synthetic construct
  source 1..80: mol_type = other DNA
tggcaaccccatctaccttccatttctgcacattcacctattctggacatgtcctattagtggaatcagaccctctgtga

SEQ ID NO: 41364 - DNA, 80 bp, synthetic construct; identical to SEQ ID NO: 11192
  source 1..80: mol_type = other DNA

SEQ ID NO: 41365 - DNA, 80 bp, synthetic construct
  source 1..80: mol_type = other DNA
cctggtttctgtcctgtccccattttcctgagaaatgcaccttccccagtaaaaaatcatgaggtttcaaattccaggaa

SEQ ID NO: 41366 - DNA, 80 bp, synthetic construct
  source 1..80: mol_type = other DNA
tctgcccacaggtcaggaagcaatctaacgatgtctgatttgaactgggtcctgacaagaggttgtcaatttctctgtgt

SEQ ID NO: 41367 - DNA, 80 bp, synthetic construct
  source 1..80: mol_type = other DNA
ctgaacaataacttccctcaaaaaagaaggatctttaagacaagttgtcacctgcctccctgtgtgaatctcctagaatg

SEQ ID NO: 41368 - DNA, 80 bp, synthetic construct; identical to SEQ ID NO: 11193
  source 1..80: mol_type = other DNA

SEQ ID NO: 41369 - DNA, 80 bp, synthetic construct
  source 1..80: mol_type = other DNA
ctcctgggttcaaacgattctcctgcctcagcctcctgagtagctgggattacaggcatgcaccacaacacctggctaat

SEQ ID NO: 41370 - DNA, 80 bp, synthetic construct
  source 1..80: mol_type = other DNA
tgtacccggccttgacttgcttttatgaggcaagaaaagacatgtctccttgttgcactaatttcgatcaatcaataagt

SEQ ID NO: 41371 - DNA, 80 bp, synthetic construct
  source 1..80: mol_type = other DNA
ggaattgaatttactcctcaaagtaataggcacaggcacccatggtcaacacctgtctcctgaagcttatcacttaatgg

SEQ ID NO: 41372 - DNA, 80 bp, synthetic construct; identical to SEQ ID NO: 11194
  source 1..80: mol_type = other DNA

SEQ ID NO: 41373 - DNA, 80 bp, synthetic construct
  source 1..80: mol_type = other DNA
atctgggcctgggccttttttgtgggaagatatgcaatgacagttttaatgtctttacttcttgtaggcttatacagatt

SEQ ID NO: 41374 - DNA, 80 bp, synthetic construct
  source 1..80: mol_type = other DNA
gattttaggaatttgaggccatttttttttcttggtaagtctagctaaaggtttgtcaattgtgttgttattttccatga

SEQ ID NO: 41375 - DNA, 80 bp, synthetic construct
  source 1..80: mol_type = other DNA
tccttgcttcttaccatagaaagttgaattactgattagaggtatttttcttttccaatgtaggcatttacagctacaga

SEQ ID NO: 41376 - DNA, 80 bp, synthetic construct; identical to SEQ ID NO: 11195
  source 1..80: mol_type = other DNA

SEQ ID NO: 41377 - DNA, 80 bp, synthetic construct
  source 1..80: mol_type = other DNA
tcttcaactatttttaatgatttgtttatttatcccctcaattctgtcattttcatgttttatgtatttgggggatgtgt

SEQ ID NO: 41378 - DNA, 80 bp, synthetic construct
  source 1..80: mol_type = other DNA
acatggtatacttttttccaccctctttttttaacctattcattttaaaatcaaaactgcctctggtagactgcatatac

SEQ ID NO: 41379 - DNA, 80 bp, synthetic construct
  source 1..80: mol_type = other DNA
aggctgggcgcggtggctcacgcctgtaatcccagcactttgggaggccgaggcgggcggatcacgagctcaggagatcg

SEQ ID NO: 41380 - DNA, 80 bp, synthetic construct
  source 1..80: mol_type = other DNA
ccactgcactccagcctgggcgacagagcgagactctgtctcaaaaaaaaaaaaaaaagaaaagaaaagaaacaaataaa

SEQ ID NO: 41381 - DNA, 80 bp, synthetic construct; identical to SEQ ID NO: 11196
  source 1..80: mol_type = other DNA

SEQ ID NO: 41382 - DNA, 80 bp, synthetic construct
  source 1..80: mol_type = other DNA
aatcttgagggcaaaaagagggaagcaacttatcatgtacaagagattctcagtaagaataagaactaatttctcatgaa

SEQ ID NO: 41383 - DNA, 80 bp, synthetic construct
  source 1..80: mol_type = other DNA
acctgtcttatgggaaattataaaagcagtcttgcaggttgacatgaaaggacactacatagcaactcgaatccacatga

SEQ ID NO: 41384 - DNA, 80 bp, synthetic construct
  source 1..80: mol_type = other DNA
aatttgtacggcaataaaaacacaaagaagcagaagagaatggagctgtatggaagcaaaggttttgtgtgctattgaaa

SEQ ID NO: 41385 - DNA, 80 bp, synthetic construct; identical to SEQ ID NO: 11197
  source 1..80: mol_type = other DNA

SEQ ID NO: 41386 - DNA, 80 bp, synthetic construct
  source 1..80: mol_type = other DNA
atggaagctaaaaaatgttgagctcattagaaatagagagtggaattttgattattagagcacaggaaggatcgaaggga

SEQ ID NO: 41387 - DNA, 80 bp, synthetic construct
  source 1..80: mol_type = other DNA
attgacccagaaggtggatgatttctgcatttccaactgaggtacccagttcatcttattgggactggttggacagcggg

SEQ ID NO: 41388 - DNA, 80 bp, synthetic construct
  source 1..80: mol_type = other DNA
acgtcttcgaaacctatagaccaggagattccctctggtgcctatgccaccagggccctgggtttcaagcacaaaactag

SEQ ID NO: 41389 - DNA, 80 bp, synthetic construct; identical to SEQ ID NO: 11198
  source 1..80: mol_type = other DNA

SEQ ID NO: 41390 - DNA, 80 bp, synthetic construct
  source 1..80: mol_type = other DNA
ctgagttgttataaatgggttactctggcttccatgttgagaatatactaaaggttaagggaagaaccagaggattattt

SEQ ID NO: 41391 - DNA, 80 bp, synthetic construct
  source 1..80: mol_type = other DNA
atttttgtctgagaaactagaagaatggattttcattacgggagatgagaaaggctacagaagaagcacattgtggggga

SEQ ID NO: 41392 - DNA, 80 bp, synthetic construct
  source 1..80: mol_type = other DNA
tggtgtacaatgtcataagactggatgacggaagtgcatgtaaaaaaggaaagaggactgaaccctaggcacagcaggga

SEQ ID NO: 41393 - DNA, 80 bp, synthetic construct; identical to SEQ ID NO: 11199
  source 1..80: mol_type = other DNA

SEQ ID NO: 41394 - DNA, 80 bp, synthetic construct
  source 1..80: mol_type = other DNA
ccatagcagaagtgaaaggcatgttccaaaaaggaaagctaagtccactctattgaaaagcttctaacaggtcaagtaac

SEQ ID NO: 41395 - DNA, 80 bp, synthetic construct
  source 1..80: mol_type = other DNA
gctagggggaagtgaagtcaagagaagattattttctgatgagtgaaatcaaagtatgtttatgtattgatggggatggt

SEQ ID NO: 41396 - DNA, 80 bp, synthetic construct
  source 1..80: mol_type = other DNA
aaatagtatattcctagcagtatcagaagaaaaggtggagtcccatatgtgagcacagatgcaagtaggtgaacagatgg

SEQ ID NO: 41397 - DNA, 80 bp, synthetic construct
  source 1..80: mol_type = other DNA
ccagaaagtatgcatgagttacgtaggagaggggaaagtgagtggactaggaaaatatgattatcaatgacattagcccc

SEQ ID NO: 41398 - DNA, 80 bp, synthetic construct; identical to SEQ ID NO: 11200
  source 1..80: mol_type = other DNA

SEQ ID NO: 41399 - DNA, 80 bp, synthetic construct
  source 1..80: mol_type = other DNA
gaaggaggagcaaagggaaagagaatgatgagagccacaagtggggaggtggactttggagcaaagctgatgacataaca

SEQ ID NO: 41400 - DNA, 80 bp, synthetic construct
  source 1..80: mol_type = other DNA
ttccaattgaatagtagaaatattaatgagagggaattacgctgcctttggccttcatacactgccagaggcacactacc

SEQ ID NO: 41401 - DNA, 80 bp, synthetic construct
  source 1..80: mol_type = other DNA
tcttctaaataacagggaacgttgagtcccctgttttttctctagtgagagcactcatcagcatgcttcctcctctctaa

SEQ ID NO: 41402 - DNA, 80 bp, synthetic construct; identical to SEQ ID NO: 11201
  source 1..80: mol_type = other DNA

SEQ ID NO: 41403 - DNA, 80 bp, synthetic construct
  source 1..80: mol_type = other DNA
caaagattagtcatgaaggtaagttgggtattacagtgccctacaacaaaatggtcttgtgccgagagccacattctgaa

SEQ ID NO: 41404 - DNA, 80 bp, synthetic construct
  source 1..80: mol_type = other DNA
tttattattgtgtgcctgttttcatggtgtggcatatttgaagaggaatggtttagagcttgccaggctgaacagttatg

SEQ ID NO: 41405 - DNA, 80 bp, synthetic construct
  source 1..80: mol_type = other DNA
gtcctttcatactccacagtctctagcacagtggatcctggttgatcaaacaggaaggacctcgaagttagtcaaatata

SEQ ID NO: 41406 - DNA, 80 bp, synthetic construct; identical to SEQ ID NO: 11202
  source 1..80: mol_type = other DNA

SEQ ID NO: 41407 - DNA, 80 bp, synthetic construct
  source 1..80: mol_type = other DNA
agccaggactcaaacccaggcagtctggctgctgagccctggttcttaattatgacattaatgcttattctgcccagtga

SEQ ID NO: 41408 - DNA, 80 bp, synthetic construct
  source 1..80: mol_type = other DNA
gtcatgcagcagaaagatttctgtccatcacgtaaactttcatccattacataacccatatgtttctgtaccattaagac

SEQ ID NO: 41409 - DNA, 80 bp, synthetic construct
  source 1..80: mol_type = other DNA
attgagacagagggaaatgaagatttccccatatcatataactggctaaagggagctatgtaggtaaaaccaagatgtcc

SEQ ID NO: 41410 - DNA, 80 bp, synthetic construct; identical to SEQ ID NO: 11203
  source 1..80: mol_type = other DNA

SEQ ID NO: 41411 - DNA, 80 bp, synthetic construct
  source 1..80: mol_type = other DNA
ggctgcttctgattggttgagcttaagttctgtgtttctttaacataggcatttacaagaaataccacaaataaagtttc

SEQ ID NO: 41412 - DNA, 80 bp, synthetic construct
  source 1..80: mol_type = other DNA
gtgttggccaggccaagcttggagtgttgctcttattcttagggagtttatttttaagtaatctcatctgtaaatgggat

SEQ ID NO: 41413 - DNA, 80 bp, synthetic construct
  source 1..80: mol_type = other DNA
gaggagcgctttctcctgctgggtttctccgactggccttccctgcagccggtcctcttcgcccttgtcctcctgtgcta

SEQ ID NO: 41414 - DNA, 80 bp, synthetic construct; identical to SEQ ID NO: 11204
  source 1..80: mol_type = other DNA

SEQ ID NO: 41415 - DNA, 80 bp, synthetic construct
  source 1..80: mol_type = other DNA
tgcgcgccccgcctgctggaccacttcatctgtgagctgccggcgttgctcaagctggcctgcggaggcgacggagacac

SEQ ID NO: 41416 - DNA, 80 bp, synthetic construct
  source 1..80: mol_type = other DNA
gtctgcctgttctacggctcggccatctacacctacctgcagcccgcgcagcgctacaaccaggcacggggcaagttcgt

SEQ ID NO: 41417 - DNA, 80 bp, synthetic construct
  source 1..80: mol_type = other DNA
acccaaggatggaaataccccttagtgagtcagtttagacttcaggctgttcatttttgtatgataatctgcaagatttg

SEQ ID NO: 41418 - DNA, 80 bp, synthetic construct; identical to SEQ ID NO: 11205
  source 1..80: mol_type = other DNA

SEQ ID NO: 41419 - DNA, 80 bp, synthetic construct
  source 1..80: mol_type = other DNA
tgaattttgctgagtggggttaagactggaaacccccctgcaggagttggttcttgagcaagttttaaagaaacaaggaa

SEQ ID NO: 41420 - DNA, 80 bp, synthetic construct
  source 1..80: mol_type = other DNA
aacagggatctcctcatgaaaaaaagaagagaggaaaatgctcaatcagcagaacctgagcagaatattgaggtcaaccc

SEQ ID NO: 41421 - DNA, 80 bp, synthetic construct
  source 1..80: mol_type = other DNA
agttaaacagaattgctagatccctgtggaaaatacctttccttgcccaccatcatccccagaaataataactattttag

SEQ ID NO: 41422 - DNA, 80 bp, synthetic construct
  source 1..80: mol_type = other DNA
ttgggtgtgagacatagagaataaaagggggcatggtgccagacttcatttcatacaaatagctttaaaggagaagaggg

SEQ ID NO: 41423 - DNA, 80 bp, synthetic construct; identical to SEQ ID NO: 11206
  source 1..80: mol_type = other DNA

SEQ ID NO: 41424 - DNA, 80 bp, synthetic construct
  source 1..80: mol_type = other DNA
agttgggcaatatacttcatcctacccatcccacccaaatcttactctactcatctcattctcattaattttgggaaatc

SEQ ID NO: 41425 - DNA, 80 bp, synthetic construct
  source 1..80: mol_type = other DNA
ccagtctctttccattgcaagtcacaatctgggtctcagggattatacccgtcttagtctcgatcattgctttcacttgt

SEQ ID NO: 41426 - DNA, 80 bp, synthetic construct
  source 1..80: mol_type = other DNA
gtggctttaagatcttggagcccagcaaaagaacctggtcctgcacaggaaccttggtcttagaccggacatgttctttg

SEQ ID NO: 41427 - DNA, 80 bp, synthetic construct; identical to SEQ ID NO: 11207
  source 1..80: mol_type = other DNA

SEQ ID NO: 41428 - DNA, 80 bp, synthetic construct
  source 1..80: mol_type = other DNA
cacacctttttttcgatcttgagaatggaaaataaaatcctgagcccccaaccaactgaacggacgctcttttgctcagg

SEQ ID NO: 41429 - DNA, 80 bp, synthetic construct
  source 1..80: mol_type = other DNA
cagcctggtgaacttggtgaaactctgtctctactaaaaatacaaaaattagccagtagtggtggcaagtccctgtaatc

SEQ ID NO: 41430 - DNA, 80 bp, synthetic construct
  source 1..80: mol_type = other DNA
ggttggatatgcctcattgtatcttctcccttttgcagtttagacacaactgaccagcaaagttagagattataagactg

SEQ ID NO: 41431 - DNA, 80 bp, synthetic construct
  source 1..80: mol_type = other DNA
cttgacaggaacaatattaaaacaattacagctcaccctgtgttggggaacacaggctaactgaccccgtgttccacaag

SEQ ID NO: 41432 - DNA, 80 bp, synthetic construct; identical to SEQ ID NO: 11208
  source 1..80: mol_type = other DNA

SEQ ID NO: 41433 - DNA, 80 bp, synthetic construct
  source 1..80: mol_type = other DNA
ttcctgtgtcacctttcctcctgcaaagtgcttgcttttggttttcaatcagaagcaaaacttcccagcctgtcagaatg

SEQ ID NO: 41434 - DNA, 80 bp, synthetic construct
  source 1..80: mol_type = other DNA
attttccaccttatttacctgcctctcctatccagataaagtttgtcaaatgtcaacaagtaaatacgaggcttcaaaag

SEQ ID NO: 41435 - DNA, 80 bp, synthetic construct
  source 1..80: mol_type = other DNA
gacacataatcactgaactgttagtttcttttcaaatatcccactgctttataataataactcacatactaccgtgacac

SEQ ID NO: 41436 - DNA, 80 bp, synthetic construct
  source 1..80: mol_type = other DNA
cacctgaccaatcaggtagtaaagagagctcactaaaatgctaattaggcaaaaacaggaggtaaagatatagccaatca

SEQ ID NO: 41437 - DNA, 80 bp, synthetic construct; identical to SEQ ID NO: 11209
  source 1..80: mol_type = other DNA

SEQ ID NO: 41438 - DNA, 80 bp, synthetic construct
  source 1..80: mol_type = other DNA
cccatggcttctaatagagctgtaacaaccaccacatgacccaagattccattccttggaatccatgaggccaagaaccc

SEQ ID NO: 41439 - DNA, 80 bp, synthetic construct
  source 1..80: mol_type = other DNA
aggtagggactatatctaagtcttacttcaatagctggaaaatcctaaaagatgggaaaactcacccctaatggccactt

SEQ ID NO: 41440 - DNA, 80 bp, synthetic construct
  source 1..80: mol_type = other DNA
ttaacaacttcagatgaatgagttttgtgaagctctcctttgagaggagagggaagattaagtttaagaaccttaaaaaa

SEQ ID NO: 41441 - DNA, 80 bp, synthetic construct; identical to SEQ ID NO: 11210
  source 1..80: mol_type = other DNA

SEQ ID NO: 41442 - DNA, 80 bp, synthetic construct
  source 1..80: mol_type = other DNA
agaaaccagagacagaaaaaggactttgcatgcagcttatataccagagttgagttggaaatcccctgcctggattgctg

SEQ ID NO: 41443 - DNA, 80 bp, synthetic construct
  source 1..80: mol_type = other DNA
gcaatctatttgcaaacctcattccaaacatgggatggtctttctgtgttgaaaacttttcccttttctcaggaaagatc

SEQ ID NO: 41444 - DNA, 80 bp, synthetic construct
  source 1..80: mol_type = other DNA
tgccttttcctccaactctatccccaccaccatgaatttataagaacacacggtgtaaacagtatcttcgtcaaaaagcc

SEQ ID NO: 41445 - DNA, 80 bp, synthetic construct
  source 1..80: mol_type = other DNA
ctttagaaaagagtaggaatcttgggggtcgtgattgtgtcttaattaacttgtatctttagcactgttccagcatgctg

SEQ ID NO: 41446 - DNA, 80 bp, synthetic construct; identical to SEQ ID NO: 11211
  source 1..80: mol_type = other DNA

SEQ ID NO: 41447 - DNA, 80 bp, synthetic construct
  source 1..80: mol_type = other DNA
gctcagaacacttacattagcatacagttggacaaaattatctaacaaaaagtgtatttactactgaagtgtgaaatatc

SEQ ID NO: 41448 - DNA, 80 bp, synthetic construct
  source 1..80: mol_type = other DNA
tggaatcattgtaaggaaccacctctattagtatccccgttaataagtaagaagctacctcatccacaatcatattagta

SEQ ID NO: 41449 - DNA, 80 bp, synthetic construct
  source 1..80: mol_type = other DNA
ctctcagaaaaaactaattcaggggattccctacccagagatgacctggattctgggaaatagtgccctttcaagaaaac

SEQ ID NO: 41450 - DNA, 80 bp, synthetic construct; identical to SEQ ID NO: 11212
  source 1..80: mol_type = other DNA

SEQ ID NO: 41451 - DNA, 80 bp, synthetic construct
  source 1..80: mol_type = other DNA
tcatggtggaaggtgaaggagagcaggcgtgtcacatggcaagagagggaggtaagagacagtgggaaaaatgccaggct

SEQ ID NO: 41452 - DNA, 80 bp, synthetic construct
  source 1..80: mol_type = other DNA
ggagagtacaaacatccaaactacatcatttacccctctgacaaattcagaaaaccaactaaagtgtcagaggtgtttga

SEQ ID NO: 41453 - DNA, 80 bp, synthetic construct
  source 1..80: mol_type = other DNA
gaagccagccaaaacccaccaaaaccaagatggcaacgaaagtgacttctggtcattctcactgctcattatatgctaaa

SEQ ID NO: 41454 - DNA, 80 bp, synthetic construct; identical to SEQ ID NO: 11213
  source 1..80: mol_type = other DNA

SEQ ID NO: 41455 - DNA, 80 bp, synthetic construct
  source 1..80: mol_type = other DNA
cctttccagtaacaaaagtaaaaagatgatggtatgaagatcttgccaagttataaaacaattgtggcggttatctacga

SEQ ID NO: 41456 - DNA, 80 bp, synthetic construct
  source 1..80: mol_type = other DNA
caaaaatgccaaccaaactcagtcagaaagctagtgtgaattctcatttattggtgattgggaaaaaagtctacactcaa

SEQ ID NO: 41457 - DNA, 80 bp, synthetic construct
  source 1..80: mol_type = other DNA
tgtgctagaacctattgagtgaaaaaagtgttagaaacaaatgcttattccacggtgccgcaaagaaatagcactcagac

SEQ ID NO: 41458 - DNA, 80 bp, synthetic construct; identical to SEQ ID NO: 11214
  source 1..80: mol_type = other DNA

SEQ ID NO: 41459 - DNA, 80 bp, synthetic construct
  source 1..80: mol_type = other DNA
gggtgaagagaacccggaagctcaactttcaaatggagaatcaaagaataagagagatgaatatgctgacatactgattc

SEQ ID NO: 41460 - DNA, 80 bp, synthetic construct
  source 1..80: mol_type = other DNA
acaaaaatgaagcccaatctaaattttgatataagctacttgaaggagattttcaacaggaagtaagagggcattagaag

SEQ ID NO: 41461 - DNA, 80 bp, synthetic construct
  source 1..80: mol_type = other DNA
cataagcaaaactgaatatagtatctagaactacatatgtaagcaataaggctcttataaaaatgtaaaaaccatgagtg

SEQ ID NO: 41462 - DNA, 80 bp, synthetic construct; identical to SEQ ID NO: 11215
  source 1..80: mol_type = other DNA

SEQ ID NO: 41463 - DNA, 80 bp, synthetic construct
  source 1..80: mol_type = other DNA
catgcctggctattatttatttatttatttatttatttattatttttatttttagtagagatggggtttcagcatgctgg

SEQ ID NO: 41464 - DNA, 80 bp, synthetic construct
  source 1..80: mol_type = other DNA
ataagccatgtacaagaatattcatgtgaaataattatttgcaactgaaataaatgggaacaacacttatcaatagacaa

SEQ ID NO: 41465 - DNA, 80 bp, synthetic construct
  source 1..80: mol_type = other DNA
aacatctctgtgaggagacactgactctgcaagttgcctgaggagcaggaatgagaggtggactattcattatatgtctt

SEQ ID NO: 41466 - DNA, 80 bp, synthetic construct
  source 1..80: mol_type = other DNA
tcatcactagttgacaggcaaagggccatgaaaagttggtggctatagtaggttaactattgtgattctgtgccttccct

SEQ ID NO: 41467 - DNA, 80 bp, synthetic construct; identical to SEQ ID NO: 11216
  source 1..80: mol_type = other DNA

SEQ ID NO: 41468 - DNA, 80 bp, synthetic construct
  source 1..80: mol_type = other DNA
gctaccattaacagacatctgaaaataatgtgcctttaactaaaaccccaaaaggaccagatcttagaagtcaaaatgac

SEQ ID NO: 41469 - DNA, 80 bp, synthetic construct
  source 1..80: mol_type = other DNA
acaaaatagataaaggtaatagaatacggaatctctgtaacatattactcacatcatcaagtgtaaaacaggaaatcacc

SEQ ID NO: 41470 - DNA, 80 bp, synthetic construct
  source 1..80: mol_type = other DNA
taaagaatccacagggaaagatttatacaatgggtaaagaaatgatgaattttaggagacagatgtagaaactgccattt

SEQ ID NO: 41471 - DNA, 80 bp, synthetic construct; identical to SEQ ID NO: 11217
  source 1..80: mol_type = other DNA

SEQ ID NO: 41472 - DNA, 80 bp, synthetic construct
  source 1..80: mol_type = other DNA
tagccacctcctgttactattgggtgagctcaagtgttgggagtatgggattaaaatgtcatgtaatactaatcattccc

SEQ ID NO: 41473 - DNA, 80 bp, synthetic construct
  source 1..80: mol_type = other DNA
gggttcaagtgattatcctgcctcagcctcccaagtagctgggattagaggcatgcaccaccacgcctggctaatttttg

SEQ ID NO: 41474 - DNA, 80 bp, synthetic construct
  source 1..80: mol_type = other DNA
cataaagcctgaataacaccacgagacccatatagtgatgctggaagttttccctggagacagagaaaagccataacatt

SEQ ID NO: 41475 - DNA, 80 bp, synthetic construct; identical to SEQ ID NO: 11218
  source 1..80: mol_type = other DNA

SEQ ID NO: 41476 - DNA, 80 bp, synthetic construct
  source 1..80: mol_type = other DNA
aaaagttattcatggatttccaaatgtatgagggggtcagcacctctaacccacgcattgttcaagggtcagctgtatac

SEQ ID NO: 41477 - DNA, 80 bp, synthetic construct
  source 1..80: mol_type = other DNA
aaaaaaaaaatgaggacacatcaaaaaactcacagtaatcacgttaaaggatttccccatagccaagtctgggaaaatgt

SEQ ID NO: 41478 - DNA, 80 bp, synthetic construct
  source 1..80: mol_type = other DNA
ttatcattaggcaaacagcccaatagtaattgttacagtcaaaactcatttgtggatgctaaaattagtaggcaaaacta

SEQ ID NO: 41479 - DNA, 80 bp, synthetic construct; identical to SEQ ID NO: 11219
  source 1..80: mol_type = other DNA

SEQ ID NO: 41480 - DNA, 80 bp, synthetic construct
  source 1..80: mol_type = other DNA
tctaggtatttacccaaaataaagaacacatgtgttcacacaaagaacgaagaaccatatacaacacaactaactgttct

SEQ ID NO: 41481 - DNA, 80 bp, synthetic construct
  source 1..80: mol_type = other DNA
gcagcctcaacttcctgggctcaagtgatcctcccacctcagccccccaagtagctgagactacaggatgcaccacgatg

SEQ ID NO: 41482 - DNA, 80 bp, synthetic construct
  source 1..80: mol_type = other DNA
agcagcccaaaactagaaacaacccaaatgcccatcaatgcatgaatggataaactgtggtatatttatacagtgaaata

SEQ ID NO: 41483 - DNA, 80 bp, synthetic construct; identical to SEQ ID NO: 11220
  source 1..80: mol_type = other DNA

SEQ ID NO: 41484 - DNA, 80 bp, synthetic construct
  source 1..80: mol_type = other DNA
tacgggtaataaaatgcacacattttaagtatattgttcaataagttttgacaagtgcatacacttggataaccaatacc

SEQ ID NO: 41485 - DNA, 80 bp, synthetic construct
  source 1..80: mol_type = other DNA
ttctatcttgctagatttgcttttcctgttgtaggaaagttatgtcaatgaaatcaggtggtatgaatgtatgaatgctt

SEQ ID NO: 41486 - DNA, 80 bp, synthetic construct
  source 1..80: mol_type = other DNA
taaattctatcttaaagaagtttattttattttatgtttttttgagacaaggtctgactctgtcacccaggctagagtgc

SEQ ID NO: 41487 - DNA, 80 bp, synthetic construct; identical to SEQ ID NO: 11221
  source 1..80: mol_type = other DNA

SEQ ID NO: 41488 - DNA, 80 bp, synthetic construct
  source 1..80: mol_type = other DNA
aggaaagaggcaagtggaaggtttgtaggatgatggaaatcttctgtttcttcattgaagtcatcaaaattcatcaaagc

SEQ ID NO: 41489 - DNA, 80 bp, synthetic construct
  source 1..80: mol_type = other DNA
cttgtgctcctcaatgacacagaggagcagaagtgacctttttacttaccacagggagcaccaatgctggcacgtttcct

SEQ ID NO: 41490 - DNA, 80 bp, synthetic construct
  source 1..80: mol_type = other DNA
tctctatctccactaccattaaaagacaggttaacttactaggttgaagaggagaggttgtgggcaaagagcaaccttca

SEQ ID NO: 41491 - DNA, 80 bp, synthetic construct; identical to SEQ ID NO: 11222
  source 1..80: mol_type = other DNA

SEQ ID NO: 41492 - DNA, 80 bp, synthetic construct
  source 1..80: mol_type = other DNA
aaagttataagtttattcttctcctactgtccattaatgtccacatatcgtcaatggtagagctaccccaggagcaccag

SEQ ID NO: 41493 - DNA, 80 bp, synthetic construct
  source 1..80: mol_type = other DNA
ttagcatggtgcctggtgtataggaagcacacaacagatggtagctgccaaagtattaacgtggttttcactaatgaatt

SEQ ID NO: 41494 - DNA, 80 bp, synthetic construct
  source 1..80: mol_type = other DNA
cagaagaaagagagtgagaacaaatacacgttgtgaaacacagaacaagagagaacagaaagagagtcaaagaactatgt

SEQ ID NO: 41495 - DNA, 80 bp, synthetic construct; identical to SEQ ID NO: 11223
  source 1..80: mol_type = other DNA

SEQ ID NO: 41496 - DNA, 80 bp, synthetic construct
  source 1..80: mol_type = other DNA
tggggcttttaaacacacaaaaaagagacactgcaatgggtagatgctgccaacctatagcctctccagccacctcccca

SEQ ID NO: 41497 - DNA, 80 bp, synthetic construct
  source 1..80: mol_type = other DNA
tctttacagatctatctctcacctctagccccctaccccaatatttttgccttatttgcctgcaatgtttcaagttttct

SEQ ID NO: 41498 - DNA, 80 bp, synthetic construct
  source 1..80: mol_type = other DNA
cttcagtgacttaggataggctactaaagaggataaagtcagacctgacatctaagtacaatatgtgactctcaactgga

SEQ ID NO: 41499 - DNA, 80 bp, synthetic construct; identical to SEQ ID NO: 11224
  source 1..80: mol_type = other DNA

SEQ ID NO: 41500 - DNA, 80 bp, synthetic construct
  source 1..80: mol_type = other DNA
taaccgagcattttcaaaagcaaaattctacttacatgtcccaaactcaacatggtatgtttttactactatattttatc

SEQ ID NO: 41501 - DNA, 80 bp, synthetic construct
  source 1..80: mol_type = other DNA
gcaggacatttcatttgcaggagaaatgtttgttcttagtttaataagtcataattttttttgaaagacctaaatcacct

SEQ ID NO: 41502 - DNA, 80 bp, synthetic construct
  source 1..80: mol_type = other DNA
tagtaatgtttacaattaggaaactcactgaacacacatttctttgtatttccttccacacataacaaagggaaaattca

SEQ ID NO: 41503 - DNA, 80 bp, synthetic construct; identical to SEQ ID NO: 11225
  source 1..80: mol_type = other DNA

SEQ ID NO: 41504 - DNA, 80 bp, synthetic construct
  source 1..80: mol_type = other DNA
aagctccgcaccaggctttctccttctgggcttctctgaacacccagcactggaaaggactctctttgtagttgtcttca

SEQ ID NO: 41505 - DNA, 80 bp, synthetic construct
  source 1..80: mol_type = other DNA
aagaagaccatcatcttactgggctgctctgtccagttcttcatcttcctgtccctggggaccactgagtgcatcctcct

SEQ ID NO: 41506 - DNA, 80 bp, synthetic construct
  source 1..80: mol_type = other DNA
tgcccccatcagcaggtggatgattttgtctgtgaggtcccagctctaattcgactctcctgtgaagacacctcctacaa

SEQ ID NO: 41507 - DNA, 80 bp, synthetic construct; identical to SEQ ID NO: 11226
  source 1..80: mol_type = other DNA

SEQ ID NO: 41508 - DNA, 80 bp, synthetic construct
  source 1..80: mol_type = other DNA
ttatccttttgtgaacaagtttgagctcccaagtatactacctttcatacacccatcacagtgtttacaatgggtcacag

SEQ ID NO: 41509 - DNA, 80 bp, synthetic construct
  source 1..80: mol_type = other DNA
tttttaactctcttctcccctacaggttctccaaatgcaccatgcctatttctggttatgtaacccctctccgattgtta

SEQ ID NO: 41510 - DNA, 80 bp, synthetic construct
  source 1..80: mol_type = other DNA
cttcctgagtagctgggactacaggcacatgccaccatgcccagctaattttttatttttagtagagacggggtttcacc

SEQ ID NO: 41511 - DNA, 80 bp, synthetic construct; identical to SEQ ID NO: 11227
  source 1..80: mol_type = other DNA

SEQ ID NO: 41512 - DNA, 80 bp, synthetic construct
  source 1..80: mol_type = other DNA
gatcacaacactaatctcctgccaaatcctgaaaatgtgctcccattcctggagatgattttcctttacctcttctcaac

SEQ ID NO: 41513 - DNA, 80 bp, synthetic construct
  source 1..80: mol_type = other DNA
ccaggcacaaacatgaaatccaattgtaagtaataaagtgctgcaatggagcctggatggagcaagggcctcagaaaaaa

SEQ ID NO: 41514 - DNA, 80 bp, synthetic construct
  source 1..80: mol_type = other DNA
agaggttatgctgtgataacaataccaatcctcagtgacttgaaacagcataggtttatttcttgctgctgctgcatgcc

SEQ ID NO: 41515 - DNA, 80 bp, synthetic construct; identical to SEQ ID NO: 11228
  source 1..80: mol_type = other DNA

SEQ ID NO: 41516 - DNA, 80 bp, synthetic construct
  source 1..80: mol_type = other DNA
aaataatatatagaatccccctgcaataaaatgtggagcccaaactcctagatcgggttcctgttttccagactttacca

SEQ ID NO: 41517 - DNA, 80 bp, synthetic construct
  source 1..80: mol_type = other DNA
ccaacaaaaagcacttcccatgaagtaacaggatctttttaattgtctgcctctcaaagtacacagtaaggaaagtgagg

SEQ ID NO: 41518 - DNA, 80 bp, synthetic construct
  source 1..80: mol_type = other DNA
ccaaagttgaccttgcagaactcacaaatacaaaaagtcggttctcacatccatgagtttagcatcctgagaatattgta

SEQ ID NO: 41519 - DNA, 80 bp, synthetic construct; identical to SEQ ID NO: 11229
  source 1..80: mol_type = other DNA

SEQ ID NO: 41520 - DNA, 80 bp, synthetic construct
  source 1..80: mol_type = other DNA
gtgagccctatgacatcatcgacagcagtaacttgaagaagagcagacatggaagagaaatctgcttttcactttatatt

SEQ ID NO: 41521 - DNA, 80 bp, synthetic construct
  source 1..80: mol_type = other DNA
caagtttatgccccagtaagaatcagttccagtgctcttcattaattgccaggcaaaatagccatagtaatgtagtaact

SEQ ID NO: 41522 - DNA, 80 bp, synthetic construct
  source 1..80: mol_type = other DNA
ttgggagagactcatagcaaaatgacatgtaattctgaggtcatcactgagtatggtacttgagtctatcgccacatgtg

SEQ ID NO: 41523 - DNA, 80 bp, synthetic construct; identical to SEQ ID NO: 11230
  source 1..80: mol_type = other DNA

SEQ ID NO: 41524 - DNA, 80 bp, synthetic construct
  source 1..80: mol_type = other DNA
ttcagctctaccctcatcttccagaaaatcgagagtggctagacattgagttaataatcaactatatctatttgatgaag

SEQ ID NO: 41525 - DNA, 80 bp, synthetic construct
  source 1..80: mol_type = other DNA
gccccagaagctctgtaacccttcccacacaccttttcctgtacatctcttctattttgttgttcatttgtatcctttgg

SEQ ID NO: 41526 - DNA, 80 bp, synthetic construct
  source 1..80: mol_type = other DNA
ctgaagtggggagcagccttatgggatcctttaacctgtgggatctcactgtatctccaggtgaataatgtcagaagtga

SEQ ID NO: 41527 - DNA, 80 bp, synthetic construct
  source 1..80: mol_type = other DNA
accatcctggctaacaaggtgaaaccccgtctctactaaaaatacaaaaaatcagccaggcatggtggcagatgcctgta

SEQ ID NO: 41528 - DNA, 80 bp, synthetic construct; identical to SEQ ID NO: 11231
  source 1..80: mol_type = other DNA

SEQ ID NO: 41529 - DNA, 80 bp, synthetic construct
  source 1..80: mol_type = other DNA
gtgaaagccatgctgttgaacacatacagacctgcatcctgccaccatagttactgccttcataagtccatttttaccag

SEQ ID NO: 41530 - DNA, 80 bp, synthetic construct
  source 1..80: mol_type = other DNA
ggcctatagtcactgtttacttggtttagaagaggtttagagcctcttctattgtggatgctttctagtgggcattagca

SEQ ID NO: 41531 - DNA, 80 bp, synthetic construct
  source 1..80: mol_type = other DNA
ccttccaagcacttgaccaaccaaccaagccatttgccactgcccatgtattcacaaatattcttccattaggccattat

SEQ ID NO: 41532 - DNA, 80 bp, synthetic construct
  source 1..80: mol_type = other DNA
tgaaccaaggtcatcttatttttcctccattagccaatcataaagtacccctccccccccatgacagattaaagatggct

SEQ ID NO: 41533 - DNA, 80 bp, synthetic construct; identical to SEQ ID NO: 11232
  source 1..80: mol_type = other DNA

SEQ ID NO: 41534 - DNA, 80 bp, synthetic construct
  source 1..80: mol_type = other DNA
ttccaaattcttggcccacaacatgtgagatacaataaggtttgtgttcatttaagccattaaatttggggagactttgt

SEQ ID NO: 41535 - DNA, 80 bp, synthetic construct
  source 1..80: mol_type = other DNA
acttctctcttacaactgatgatgttgcaaccactagacctcatcacttgattgatttgacaggacccagctcatgatgg

SEQ ID NO: 41536 - DNA, 80 bp, synthetic construct
  source 1..80: mol_type = other DNA
agatttgatgaagaaccccagggatctatgttgtgattttcctttcaaggcttgcccaaaatgccacactgtatcttttc

SEQ ID NO: 41537 - DNA, 80 bp, synthetic construct; identical to SEQ ID NO: 11233
  source 1..80: mol_type = other DNA

SEQ ID NO: 41538 - DNA, 80 bp, synthetic construct
  source 1..80: mol_type = other DNA
taaattcttctgtgtaatagtgtgttactgtgcatctctttccaattctgcattactggtgttaagtgtgaaatgcaata

SEQ ID NO: 41539 - DNA, 80 bp, synthetic construct
  source 1..80: mol_type = other DNA
gccgccaatatgcttgccctcatggctcattctgtttggttaataagatattgttgatacagtggaacgatgtcatgttt

SEQ ID NO: 41540 - DNA, 80 bp, synthetic construct
  source 1..80: mol_type = other DNA
ccctaagctcttcattttctaggtatttaactatcttatcatattttccatactcttctggttatttatatctgttatgt

SEQ ID NO: 41541 - DNA, 80 bp, synthetic construct; identical to SEQ ID NO: 11234
  source 1..80: mol_type = other DNA

SEQ ID NO: 41542 - DNA, 80 bp, synthetic construct
  source 1..80: mol_type = other DNA
gtggtggtcgtacaatgcgagagcatcaacatttctggcaagttctacagaaacaagttgaagtacctgggctttctccg

SEQ ID NO: 41543 - DNA, 80 bp, synthetic construct
  source 1..80: mol_type = other DNA
aaaagctttggtggttcctgctgccctcaagcttgtgtgtctgaagcctacaagaaaatttgtccgcctggacaccgagc

SEQ ID NO: 41544 - DNA, 80 bp, synthetic construct
  source 1..80: mol_type = other DNA
gaacatgaaaaagaaaactgacaaatacacacaggtctcctcaagatccatggacttctggtctgagcctaataaagact

SEQ ID NO: 41545 - DNA, 80 bp, synthetic construct; identical to SEQ ID NO: 11235
  source 1..80: mol_type = other DNA

SEQ ID NO: 41546 - DNA, 80 bp, synthetic construct
  source 1..80: mol_type = other DNA
ttttgggaggctgaggcaggcagatcacgaggtcaggagttaaagaccagtctgatcaatatggtgaaaccctgtctcta

SEQ ID NO: 41547 - DNA, 80 bp, synthetic construct
  source 1..80: mol_type = other DNA
tcaaaaagaaaagaaaagaacacattattcaccagattaatagccatataacatggacctgaaaccgtgctaatcaggca

SEQ ID NO: 41548 - DNA, 80 bp, synthetic construct
  source 1..80: mol_type = other DNA
tcccttgaattgtgatattgttcttgattcactgtctttgcggtaagaggtgtagattcagggcttccacttcaatctgt

SEQ ID NO: 41549 - DNA, 80 bp, synthetic construct; identical to SEQ ID NO: 11236
  source 1..80: mol_type = other DNA

SEQ ID NO: 41550 - DNA, 80 bp, synthetic construct
  source 1..80: mol_type = other DNA
ttttcttcctgttgacagaaagaagcaatgagtgacctcttttacctaccacagtgatgactattgttggcatatttcct

SEQ ID NO: 41551 - DNA, 80 bp, synthetic construct
  source 1..80: mol_type = other DNA
cataccatgtcaacatttctacctccaatgccactaaaacagaggcacacctctgcctagactgagggggaaaattgttg

SEQ ID NO: 41552 - DNA, 80 bp, synthetic construct
  source 1..80: mol_type = other DNA
tctggtgcttactaactatactgccttgggaaagttatttatatttctttgtttcaacttcttcatattggaaggaagag

SEQ ID NO: 41553 - DNA, 80 bp, synthetic construct; identical to SEQ ID NO: 11237
  source 1..80: mol_type = other DNA

SEQ ID NO: 41554 - DNA, 80 bp, synthetic construct
  source 1..80: mol_type = other DNA
ggtaccagaagagatttttatttgattgaaggtaagcagaacctttgctctttggctgtgagatatcagtttccgcctat

SEQ ID NO: 41555 - DNA, 80 bp, synthetic construct
  source 1..80: mol_type = other DNA
agaaccagatgttcagggagttgtttatcaccatgctttgatggtagctactaacagcaagggtagctcatggtcactag

SEQ ID NO: 41556 - DNA, 80 bp, synthetic construct
  source 1..80: mol_type = other DNA
agagaacaaagagggaaagggaaacagtcactaagaaaggtgtaatctaaagagattcagcgatatagcagagaaaggaa

SEQ ID NO: 41557 - DNA, 80 bp, synthetic construct; identical to SEQ ID NO: 11238
  source 1..80: mol_type = other DNA

SEQ ID NO: 41558 - DNA, 80 bp, synthetic construct
  source 1..80: mol_type = other DNA
caggagtctgagaccagcctggccaacatggcgaaaccccgtctctactaaaaatacaaaaattagctaggcatggtctt

SEQ ID NO: 41559 - DNA, 80 bp, synthetic construct
  source 1..80: mol_type = other DNA
ggtgacatcttgaggggtgacaaattgagaaaattgagagatcagggaggggcacacagaagcttctaagatacttgaaa

SEQ ID NO: 41560 - DNA, 80 bp, synthetic construct
  source 1..80: mol_type = other DNA
gagagtcctggcaaaaagggagatgtgatagagcttaatacaagatggggaccctgtaagaggaagacattcctgccatc

SEQ ID NO: 41561 - DNA, 80 bp, synthetic construct; identical to SEQ ID NO: 11239
  source 1..80: mol_type = other DNA

SEQ ID NO: 41562 - DNA, 80 bp, synthetic construct
  source 1..80: mol_type = other DNA
tctgaaagactacaagatttagggagagtgattcttggagtctttcgataatgttcctgtgaaccctggtgattttaaca

SEQ ID NO: 41563 - DNA, 80 bp, synthetic construct
  source 1..80: mol_type = other DNA
ccagggcaaccaacctgatctctctataagtagggatatcttaaaacaaaacaaaatctctctcatagataaaacactgt

SEQ ID NO: 41564 - DNA, 80 bp, synthetic construct
  source 1..80: mol_type = other DNA
tcattcaatataccttacgagatcatccaatagataagagacaactctagaacagcattcagaacatagtggcactcaat

SEQ ID NO: 41565 - DNA, 80 bp, synthetic construct
  source 1..80: mol_type = other DNA
ggattcctcactctcactagacaatgtttgaccaggaagaacagggaatgagaaggagctgctggatggtgatgagcctt

SEQ ID NO: 41566 - DNA, 80 bp, synthetic construct; identical to SEQ ID NO: 11240
  source 1..80: mol_type = other DNA

SEQ ID NO: 41567 - DNA, 80 bp, synthetic construct
  source 1..80: mol_type = other DNA
ccaaagaagaccatcagcttcctggactgctctgtccagatcttcatcttcctgtccctggggacaactgagtgcatcct

SEQ ID NO: 41568 - DNA, 80 bp, synthetic construct
  source 1..80: mol_type = other DNA
ttctgccccgatcggcaggtggatgattttgtctgtgaggtcccagctctaattcgactctcctgtgaagacacctccta

SEQ ID NO: 41569 - DNA, 80 bp, synthetic construct
  source 1..80: mol_type = other DNA
gtcaccctcttctacagctcagtcattgctgtctacctccagcccaaaaatccctatgcccaagagaggggcaagttctt

SEQ ID NO: 41570 - DNA, 80 bp, synthetic construct; identical to SEQ ID NO: 11241
  source 1..80: mol_type = other DNA

SEQ ID NO: 41571 - DNA, 80 bp, synthetic construct
  source 1..80: mol_type = other DNA
cacttccatttttaattcccctcccttgccatatccccactattccttcacctccaattctaattcctaccatatcttct

SEQ ID NO: 41572 - DNA, 80 bp, synthetic construct
  source 1..80: mol_type = other DNA
aatccaggccccataattttcagtcaggcaactctcaaatacacactgttgctttcacaccataatcaaatatcccagta

SEQ ID NO: 41573 - DNA, 80 bp, synthetic construct
  source 1..80: mol_type = other DNA
atatggtattgcatgtgacatcccagacttctgctccagggtcatccgaactgtactttgctcaaagacatagatatggt

SEQ ID NO: 41574 - DNA, 80 bp, synthetic construct; identical to SEQ ID NO: 11242
  source 1..80: mol_type = other DNA

SEQ ID NO: 41575 - DNA, 80 bp, synthetic construct
  source 1..80: mol_type = other DNA
tttgcattattataaagtcaaaaaatggtcaaagtcaggaaccccctgcaatttacacatattgacttatttaaccctta

SEQ ID NO: 41576 - DNA, 80 bp, synthetic construct
  source 1..80: mol_type = other DNA
atgcctcccaggcccaggtgaaaagcttcaacttctcaacaagctttgaggaaatcatttcaatctaaaactatatctaa

SEQ ID NO: 41577 - DNA, 80 bp, synthetic construct
  source 1..80: mol_type = other DNA
tgtgtgtttctggcttagttcacccactagatttcaggctctcagaaggcaaggaccagaattttgcataaaattggcac

SEQ ID NO: 41578 - DNA, 80 bp, synthetic construct
  source 1..80: mol_type = other DNA
ggcaagggcagcaataccaaattcccttttgagtacacgccgataaaataagaaaaaggaaaatcttagttttatttcta

SEQ ID NO: 41579 - DNA, 80 bp, synthetic construct; identical to SEQ ID NO: 11243
  source 1..80: mol_type = other DNA

SEQ ID NO: 41580 - DNA, 80 bp, synthetic construct
  source 1..80: mol_type = other DNA
aaaaaaaactagcctggcgtggtggcgtgctcctgtaatcccagctacttaggaggctaaggcaggagaacctgggaggc

SEQ ID NO: 41581 - DNA, 80 bp, synthetic construct
  source 1..80: mol_type = other DNA
atgaccccctctatctgctttctcttactggcacctagaaatgtctacacttttctcctgtttatcatctccctacagcc

SEQ ID NO: 41582 - DNA, 80 bp, synthetic construct
  source 1..80: mol_type = other DNA
tccatgtgacagtcatctattggatactctgtgagaaaatccaatataaagttactcagtcacaacccccacaatgtcca

SEQ ID NO: 41583 - DNA, 80 bp, synthetic construct
  source 1..80: mol_type = other DNA
agcggcagtgatcatggaagcctcttagaggtttgaaccacagaagagtaaacaaaataagaagtatttgctgactgtgt

SEQ ID NO: 41584 - DNA, 80 bp, synthetic construct; identical to SEQ ID NO: 11244
  source 1..80: mol_type = other DNA

SEQ ID NO: 41585 - DNA, 80 bp, synthetic construct
  source 1..80: mol_type = other DNA
aggagcttggagaaagtaacaccttctaggcagttaacatttttctactggaccccaaatttttaaacaaaggttctctt

SEQ ID NO: 41586 - DNA, 80 bp, synthetic construct
  source 1..80: mol_type = other DNA
gtgtgtgtagatacagagtcttgttatgtttcgcaggctggtctcaaactcttggccttaagggatcctctctccttggc

SEQ ID NO: 41587 - DNA, 80 bp, synthetic construct
  source 1..80: mol_type = other DNA
tttgggaagcaatgtgggcggatcatgaggtcagatcaagaccatcctggctaacacggtgaaaccccatctctacaaaa

SEQ ID NO: 41588 - DNA, 80 bp, synthetic construct; identical to SEQ ID NO: 11245
  source 1..80: mol_type = other DNA

SEQ ID NO: 41589 - DNA, 80 bp, synthetic construct
  source 1..80: mol_type = other DNA
ctcagccttctgagtggctgggagtacaggcatatgccaccatatttggctaatttttttatttcttgtagagttggggt

SEQ ID NO: 41590 - DNA, 80 bp, synthetic construct
  source 1..80: mol_type = other DNA
aaaaacccatgttacaatagttagtcagacacgagcagggcaggaaagggcctccttccccaccaggaatgtcaggcaac

SEQ ID NO: 41591 - DNA, 80 bp, synthetic construct
  source 1..80: mol_type = other DNA
ggcaagtgggctcatgcatgggcactaagggagaaatgacagcatttaactggtttataaccttataggaacactccctg

SEQ ID NO: 41592 - DNA, 80 bp, synthetic construct
  source 1..80: mol_type = other DNA
accctaagtcaaggtcaaaaccacgcacttgatctctcaagttgcctgcttggcccccttccaagttggctttactttat

SEQ ID NO: 41593 - DNA, 80 bp, synthetic construct; identical to SEQ ID NO: 11246
  source 1..80: mol_type = other DNA

SEQ ID NO: 41594 - DNA, 80 bp, synthetic construct
  source 1..80: mol_type = other DNA
ctataacagaaaaggctaaagacaaaaataagcatgttgtgcattaagatagggagatgtgggggaaggagttacaccga

SEQ ID NO: 41595 - DNA, 80 bp, synthetic construct
  source 1..80: mol_type = other DNA
catgatttaggtctcctgagggcaggcacttaactattcattctaacatgacatgtgagttggaagccttaaaggaacat

SEQ ID NO: 41596 - DNA, 80 bp, synthetic construct
  source 1..80: mol_type = other DNA
aacccaggaggcggaggtttcggtgaaccgagatcacgccactgcattccagcctgggagttagagtgagactccatctc

SEQ ID NO: 41597 - DNA, 80 bp, synthetic construct; identical to SEQ ID NO: 11247
  source 1..80: mol_type = other DNA

SEQ ID NO: 41598 - DNA, 80 bp, synthetic construct
  source 1..80: mol_type = other DNA
taaatccacataacaaaccttactaaaccactttgttccatattttcctggtcactttcccataacttgcctgcccatct

SEQ ID NO: 41599 - DNA, 80 bp, synthetic construct
  source 1..80: mol_type = other DNA
actcacaaaccacatagcttagaagcactggaaaaattaatgggccaggtgctgtggcacatgcctgtaatctcagaact

SEQ ID NO: 41600 - DNA, 80 bp, synthetic construct
  source 1..80: mol_type = other DNA
cttgagcccaggtggttgaggctgcagtgagctgtgattgcaccacctcactccagcctcaattaaaaaaataaataggg

SEQ ID NO: 41601 - DNA, 80 bp, synthetic construct
  source 1..80: mol_type = other DNA
gatctcagctacttgggaggctgaggcaggagaaacgcttaaactcaggaggcggaggttgcagtgagccgagatggtgc

SEQ ID NO: 41602 - DNA, 80 bp, synthetic construct; identical to SEQ ID NO: 11248
  source 1..80: mol_type = other DNA

SEQ ID NO: 41603 - DNA, 80 bp, synthetic construct
  source 1..80: mol_type = other DNA
cccttccaggtctttttctgatccaggagggattttactaatgagtctgacatcttttaaggtgcgataagaaacattta

SEQ ID NO: 41604 - DNA, 80 bp, synthetic construct
  source 1..80: mol_type = other DNA
gcaatcagaaaatctgaatccccctatgacctgtgagctcccttgcttcgagatgtcccgcctttctgagctgaaccaat

SEQ ID NO: 41605 - DNA, 80 bp, synthetic construct
  source 1..80: mol_type = other DNA
ctcagaataaacctcttcaaatattttacaaattttacttttttcatcaacaaataaatgtataaaatatatgtagatac

SEQ ID NO: 41606 - DNA, 80 bp, synthetic construct
  source 1..80: mol_type = other DNA
aaccccatctctactaaaaatacaaaaaatttgtccggcatggtggcatgtatctgcagtcccagctacccaggaggctg

SEQ ID NO: 41607 - DNA, 80 bp, synthetic construct; identical to SEQ ID NO: 11249
  source 1..80: mol_type = other DNA

SEQ ID NO: 41608 - DNA, 80 bp, synthetic construct
  source 1..80: mol_type = other DNA
gtgtatagcagtaaagagtggtctctcaagattcttgcatatatttcatcatgtctagagcaatactgtgaaccttaaat

SEQ ID NO: 41609 - DNA, 80 bp, synthetic construct
  source 1..80: mol_type = other DNA
atgatgtaaacttaaggcatcaataaatacagtatagtaccctatatgtattttccttacaattttcttgataacatttc

SEQ ID NO: 41610 - DNA, 80 bp, synthetic construct
  source 1..80: mol_type = other DNA
gtttgtgtgtggggtcagtaaccctaaaccccaagttgttcaaggggcaactatatgagctccaaattcttttttttttt

SEQ ID NO: 41611 - DNA, 80 bp, synthetic construct
  source 1..80: mol_type = other DNA
tatttttagtagagacagggtttcaccatgttgcccaggctggtgtcaaactcttgacctgaagtgatcccccagcttca

SEQ ID NO: 41612 - DNA, 80 bp, synthetic construct; identical to SEQ ID NO: 11250
  source 1..80: mol_type = other DNA

SEQ ID NO: 41613 - DNA, 80 bp, synthetic construct
  source 1..80: mol_type = other DNA
gtctccagcatatccttccacactccagggagccatgtaagtggatgccatactggttaaatattttgagtagcatccca

SEQ ID NO: 41614 - DNA, 80 bp, synthetic construct
  source 1..80: mol_type = other DNA
tgtcaagtgatagcttccctcaagggcaaagtcacagaattatctgtttcaaaagcctgagtggataaacaaactgttgc

SEQ ID NO: 41615 - DNA, 80 bp, synthetic construct
  source 1..80: mol_type = other DNA
aaggctagggtgctcagctcagagggcggacaaagaacatgttaaagtgaagtgaacactggctttgcagcaggcagacc

SEQ ID NO: 41616 - DNA, 80 bp, synthetic construct; identical to SEQ ID NO: 11251
  source 1..80: mol_type = other DNA

SEQ ID NO: 41617 - DNA, 80 bp, synthetic construct
  source 1..80: mol_type = other DNA
ctcagctgacagccaatacctcctttagatgctgagtgaaggatcttttggacaacaaccctcagacttcagatcttcca

SEQ ID NO: 41618 - DNA, 80 bp, synthetic construct
  source 1..80: mol_type = other DNA
ttgctccttagttttgtgaccccagaaaatgaacacacagtccccttgcttttagatttgtccttcacaccagagctaat

SEQ ID NO: 41619 - DNA, 80 bp, synthetic construct
  source 1..80: mol_type = other DNA
accatcaacacttgttgaagatcacctaactaatgtagcagccaagtgcacacaaagtgctctctactggtagacaacca

SEQ ID NO: 41620 - DNA, 80 bp, synthetic construct
  source 1..80: mol_type = other DNA
gcaagtcctcccagaactgccaagcggtagcctctccacctggcaacacatctcctttgcaccccttggggtacaattat

SEQ ID NO: 41621 - DNA, 80 bp, synthetic construct; identical to SEQ ID NO: 11252
  source 1..80: mol_type = other DNA

SEQ ID NO: 41622 - DNA, 80 bp, synthetic construct
  source 1..80: mol_type = other DNA
tggccagtaaaaatcttacaagttctcttctaagtacctttttaatattctcaatctcactccttcccacccctttgcac

SEQ ID NO: 41623 - DNA, 80 bp, synthetic construct
  source 1..80: mol_type = other DNA
ttaagtgcaatgcaagtttgagatgataatttgggtcttttaggttctacccagggctgttctatagctcctgctactgt

SEQ ID NO: 41624 - DNA, 80 bp, synthetic construct
  source 1..80: mol_type = other DNA
gcctcagcctcccgagtagctgagattacaggcacccaccatcacgcccagctaatttttgtatttttagtagagacagg

SEQ ID NO: 41625 - DNA, 80 bp, synthetic construct
  source 1..80: mol_type = other DNA
tgatgccaactattcattttccaaactgcaggcttatctactccatagacttcttctcttttcctagcggatatttcact

SEQ ID NO: 41626 - DNA, 80 bp, synthetic construct; identical to SEQ ID NO: 11253
  source 1..80: mol_type = other DNA

SEQ ID NO: 41627 - DNA, 80 bp, synthetic construct
  source 1..80: mol_type = other DNA
aaacaaagatgtttaaggttggaagcactcagcagccatctcatccattaccttctagcagtcatcattcttttactctt

SEQ ID NO: 41628 - DNA, 80 bp, synthetic construct
  source 1..80: mol_type = other DNA
gaatgcacaatttataatagtctttgtacccaacctatggaggaatgtattactgttattctcattttcataaatgagga

SEQ ID NO: 41629 - DNA, 80 bp, synthetic construct
  source 1..80: mol_type = other DNA
aaaacacctcttttcaccctccgctttaatgccttttcatgaacttggagtcctctgaacctcccttcttggattgaagc

SEQ ID NO: 41630 - DNA, 80 bp, synthetic construct; identical to SEQ ID NO: 11254
  source 1..80: mol_type = other DNA

SEQ ID NO: 41631 - DNA, 80 bp, synthetic construct
  source 1..80: mol_type = other DNA
ggggaaaagtgcataacaatgtgcagggtagggtacatatggctctgtcagaagaataccatgatttaagggaagaaagt

SEQ ID NO: 41632 - DNA, 80 bp, synthetic construct
  source 1..80: mol_type = other DNA
aatgcagggcacccgagagcacatgtgactgaacatgaagaaagcatacgggaaaagcgtgtgtacacatgagcatgttc

SEQ ID NO: 41633 - DNA, 80 bp, synthetic construct
  source 1..80: mol_type = other DNA
tggaaagagattatgacagtggagaaaaggagaggcccctttggggtggaaagagcacttgttgggagacccctgctgga

SEQ ID NO: 41634 - DNA, 80 bp, synthetic construct; identical to SEQ ID NO: 11255
  source 1..80: mol_type = other DNA

SEQ ID NO: 41635 - DNA, 80 bp, synthetic construct
  source 1..80: mol_type = other DNA
gcactcgactcccatcacagctaagccggtcggggggctcagggggtcccctgggcaggcccccagagggttctgggggt

SEQ ID NO: 41636 - DNA, 80 bp, synthetic construct
  source 1..80: mol_type = other DNA
gggaaagagaggaagggcacagaaaaatgtagggggaggacgtagggtaagtggacagaataaattaaaaggagaaatca

SEQ ID NO: 41637 - DNA, 80 bp, synthetic construct
  source 1..80: mol_type = other DNA
agagcttccaataaatcagagagatgtgtcaacccagttggaacatccctctctttggcattgcaccagcccctaatgac

SEQ ID NO: 41638 - DNA, 80 bp, synthetic construct; identical to SEQ ID NO: 11256
  source 1..80: mol_type = other DNA

SEQ ID NO: 41639 - DNA, 80 bp, synthetic construct
  source 1..80: mol_type = other DNA
acccacccccgcacctcagcaatgatcttttccagttcacggttctccttctccaacagccgggacttctcctcctcgtt

SEQ ID NO: 41640 - DNA, 80 bp, synthetic construct
  source 1..80: mol_type = other DNA
gtactagtgactggctgatggaaggttggaggtggaaggaatgctgataagagttgggcccaaaacaaggggaggagtga

SEQ ID NO: 41641 - DNA, 80 bp, synthetic construct
  source 1..80: mol_type = other DNA
caagagtgatataggaggagaaaactatggcaagagaggcaaaggcaaaggctgcatcctgctggctggacagaatcatg

SEQ ID NO: 41642 - DNA, 80 bp, synthetic construct; identical to SEQ ID NO: 11257
  source 1..80: mol_type = other DNA

SEQ ID NO: 41643 - DNA, 80 bp, synthetic construct
  source 1..80: mol_type = other DNA
ctacttcactgggtagttgcaagattaatgatacaatgtctgtagtgagctttgtaaactgtaaagtgctttatagacct

SEQ ID NO: 41644 - DNA, 80 bp, synthetic construct
  source 1..80: mol_type = other DNA
cggtgatcattgatcttctcagtggacacactcttggtctcataagcaaggaagattcccagcagcagcagcagcccctt

SEQ ID NO: 41645 - DNA, 80 bp, synthetic construct
  source 1..80: mol_type = other DNA
caccctgtgtcccctatcccttatgtccacccaacttgcccagaccacatcactttttcctgggattcacacaggaaagc

SEQ ID NO: 41646 - DNA, 80 bp, synthetic construct; identical to SEQ ID NO: 11258
  source 1..80: mol_type = other DNA

SEQ ID NO: 41647 - DNA, 80 bp, synthetic construct
  source 1..80: mol_type = other DNA
ttagtgcaataacaaagagtagggtgttcaaactgggttgacaagctctctacctcctcttccaaagacccctctccctc

SEQ ID NO: 41648 - DNA, 80 bp, synthetic construct
  source 1..80: mol_type = other DNA
aatgtctagggcagaaacaaggtcacaagaaagatggttgccagcctcccctcctctcctcaacgcttctcagtctctgg

SEQ ID NO: 41649 - DNA, 80 bp, synthetic construct
  source 1..80: mol_type = other DNA
gctgaatctggaggcctatgaggggctccttctaggaaggaaaggaagagcttccaatacgaggaaggcactctctccaa

SEQ ID NO: 41650 - DNA, 80 bp, synthetic construct; identical to SEQ ID NO: 11259
  source 1..80: mol_type = other DNA

SEQ ID NO: 41651 - DNA, 80 bp, synthetic construct
  source 1..80: mol_type = other DNA
ccaggagccagaggcgggcctagaaaggaagagagggcacaggcagaacagggtagagtagtagccgggactgcagtaag

SEQ ID NO: 41652 - DNA, 80 bp, synthetic construct
  source 1..80: mol_type = other DNA
accagggtgatcttgctaaaacctcctggctttagtggccaaaaacctccaaccactccccaatatctataagttatagc

SEQ ID NO: 41653 - DNA, 80 bp, synthetic construct
  source 1..80: mol_type = other DNA
gatgctccctatgcccctgaagtagccttcctctatttctctagctgataaaatcctatttgtccttcagtattcaaatg

SEQ ID NO: 41654 - DNA, 80 bp, synthetic construct; identical to SEQ ID NO: 11260
  source 1..80: mol_type = other DNA

SEQ ID NO: 41655 - DNA, 80 bp, synthetic construct
  source 1..80: mol_type = other DNA
gtgtggcagtggtcccttccccccaactctctgctgtgtttccatctctgcttctatccttccaaacccaacaaaggctc

SEQ ID NO: 41656 - DNA, 80 bp, synthetic construct
  source 1..80: mol_type = other DNA
aaggcctgccatggcaaccttggaactgacaagtaaactacagaatgaaaatggcctgcagacacagaaagaagggacag

SEQ ID NO: 41657 - DNA, 80 bp, synthetic construct
  source 1..80: mol_type = other DNA
agagtcacatcctgtaaggaatttgcccaccacctcctcacctggcagacgaaaggaaactggttcctcccaatgtggta

SEQ ID NO: 41658 - DNA, 80 bp, synthetic construct; identical to SEQ ID NO: 11261
  source 1..80: mol_type = other DNA

SEQ ID NO: 41659 - DNA, 80 bp, synthetic construct
  source 1..80: mol_type = other DNA
ccgttagctactttggagtaggagtgggggttatatctggtttccctgttttcattctcaacaagtcagaatgaaaaact

SEQ ID NO: 41660 - DNA, 80 bp, synthetic construct
  source 1..80: mol_type = other DNA
acaaggaaaacgtcagaagagaaacttaccggacatgtgagttgtagatgttaaaggacagacagacaacagctaggaca

SEQ ID NO: 41661 - DNA, 80 bp, synthetic construct
  source 1..80: mol_type = other DNA
agaggggaagggaaaagagaagggaaggaggacaaaggaatgaagacgggataggagaaaagggcaaagaactagattgc

SEQ ID NO: 41662 - DNA, 80 bp, synthetic construct
  source 1..80: mol_type = other DNA
aagatggagtgaatggtctatccataggttgggaaatgctgaggcatgtccccaaagttgtagtctttgtttttgtttgt

SEQ ID NO: 41663 - DNA, 80 bp, synthetic construct; identical to SEQ ID NO: 11262
  source 1..80: mol_type = other DNA

SEQ ID NO: 41664 - DNA, 80 bp, synthetic construct
  source 1..80: mol_type = other DNA
aaaaagggcaaaactccagcagtgctgggaatgactggatatctgctgggcagggcagacggcagccatcttcaatggtt

SEQ ID NO: 41665 - DNA, 80 bp, synthetic construct
  source 1..80: mol_type = other DNA
ctttctctctttaaaaagtatattttgagggatgtaatactacctattaggtacaaggtgcactgttcgggtgacaggca

SEQ ID NO: 41666 - DNA, 80 bp, synthetic construct
  source 1..80: mol_type = other DNA
ttttggcagatgacaattacatgaggttttccctcctcctccatagtttaagcaaccgttttcctgacagagacagacaa

SEQ ID NO: 41667 - DNA, 80 bp, synthetic construct
  source 1..80: mol_type = other DNA
ttaccccagcaatgcaccattaaaaatagtactaaccaccgcctattccctctccaaatacaccagtctcccctacccac

SEQ ID NO: 41668 - DNA, 80 bp, synthetic construct; identical to SEQ ID NO: 11263
  source 1..80: mol_type = other DNA

SEQ ID NO: 41669 - DNA, 80 bp, synthetic construct
  source 1..80: mol_type = other DNA
tagagctttgcatggttgtatctgattttattttcacctgaggccctaaggatgcttggaaggacctacgagactcttga

SEQ ID NO: 41670 - DNA, 80 bp, synthetic construct
  source 1..80: mol_type = other DNA
attcctcacacctctctcggcgagatgtctctcactttgattttggcttctaaagctttacacatatttctgcttattct

SEQ ID NO: 41671 - DNA, 80 bp, synthetic construct
  source 1..80: mol_type = other DNA
aactgtttccgttaccataacttttccttcaaaagccaactcacactcctttcaccatggctgaagtccatttcctcttg

SEQ ID NO: 41672 - DNA, 80 bp, synthetic construct
  source 1..80: mol_type = other DNA
ggagcagaaaaattaactcctagaagttctgcaaatacctgtgtgctaagtttcaagaaaatacaatctacaaaagccaa

SEQ ID NO: 41673 - DNA, 80 bp, synthetic construct; identical to SEQ ID NO: 11264
  source 1..80: mol_type = other DNA

SEQ ID NO: 41674 - DNA, 80 bp, synthetic construct
  source 1..80: mol_type = other DNA
cccagctaatttttttttttttttttgtatttttggtagagacaggtttcaccatgttggtctggctggtctcaaactcc

SEQ ID NO: 41675 - DNA, 80 bp, synthetic construct
  source 1..80: mol_type = other DNA
caagcttgatgaacagagttaaaagagaagggcagaagttgggaggtgccagggcaatcttgtgatgtctctggcattct

SEQ ID NO: 41676 - DNA, 80 bp, synthetic construct
  source 1..80: mol_type = other DNA
ggcaaaggagacaaaagcaagagtgaaagagaacatcagggactctttaaatccttctgtttttgatgtaattgagcctc

SEQ ID NO: 41677 - DNA, 80 bp, synthetic construct; identical to SEQ ID NO: 11265
  source 1..80: mol_type = other DNA

SEQ ID NO: 41678 - DNA, 80 bp, synthetic construct
  source 1..80: mol_type = other DNA
ggagactgattctgcaaagaagtaactgagaaaaacagagaatgcatgtttgtagaaggtgcctcttgggagtctctctc

SEQ ID NO: 41679 - DNA, 80 bp, synthetic construct
  source 1..80: mol_type = other DNA
cttgttcagggccagtgccaaggcccagatggcatcataggccagcggtgcctcctggaagcctcctgtctcctcagggt

SEQ ID NO: 41680 - DNA, 80 bp, synthetic construct
  source 1..80: mol_type = other DNA
ttgtcagattggacacatgtacattcaaaatctttaactatacccatgtgtctgccttagatcggaagctactagactag

SEQ ID NO: 41681 - DNA, 80 bp, synthetic construct; identical to SEQ ID NO: 11266
  source 1..80: mol_type = other DNA

SEQ ID NO: 41682 - DNA, 80 bp, synthetic construct
  source 1..80: mol_type = other DNA
aagaatgaaaactacagaaatacccttcacatttttgaagtccattatcaatcctacccacacccctcccaacactcaac

SEQ ID NO: 41683 - DNA, 80 bp, synthetic construct
  source 1..80: mol_type = other DNA
aattacttaacctcttggaactgcattctacatactggagaaaatcacatcattccttccttacctcacagaaaccatac

SEQ ID NO: 41684 - DNA, 80 bp, synthetic construct
  source 1..80: mol_type = other DNA
atgaagaataaataaataactttgttcctcatgccttgctcacttttctctccaactttctagagagatagaggagtgag

SEQ ID NO: 41685 - DNA, 80 bp, synthetic construct
  source 1..80: mol_type = other DNA
ccctctcttaatcatcagcatctagcactgtgcccaaccataatgaagtaacaataaatgtccattggattaggccagtg

SEQ ID NO: 41686 - DNA, 80 bp, synthetic construct; identical to SEQ ID NO: 11267
  source 1..80: mol_type = other DNA

SEQ ID NO: 41687 - DNA, 80 bp, synthetic construct
  source 1..80: mol_type = other DNA
actaaaatacaaaaaattagctgggcatggtggtgtgcacttgcagtcccaactactcaggaggctgagggctgaggtga

SEQ ID NO: 41688 - DNA, 80 bp, synthetic construct
  source 1..80: mol_type = other DNA
cagctctttgggaggccaaggagggtggatcacctgaggtcaggaattccagacagcctggccaacctggtgaaacccgt

SEQ ID NO: 41689 - DNA, 80 bp, synthetic construct; identical to SEQ ID NO: 11268
  source 1..80: mol_type = other DNA

SEQ ID NO: 41690 - DNA, 80 bp, synthetic construct
  source 1..80: mol_type = other DNA
gggcagatcatgaggtcaggagttcaagaccagcctggccaacatggtgaaaccctgtctctatgaaaaatacaaaaatt

SEQ ID NO: 41691 - DNA, 80 bp, synthetic construct
  source 1..80: mol_type = other DNA
aatcccagctactccggaggctgaggcaggagaatggcttgaacctgggaggcggaggttgctgtgagccaagatcgcgc

SEQ ID NO: 41692 - DNA, 80 bp, synthetic construct
  source 1..80: mol_type = other DNA
gtgagccaagatcatgccattgcactccagcctgggcaacagagcaagactccatctcagaaaaaaaaaaaattagccgg

SEQ ID NO: 41693 - DNA, 80 bp, synthetic construct
  source 1..80: mol_type = other DNA
ctaaaaatacaaaaacttatctgggcatggtggcacgcacctgtaatcccagctattcagaaggctgaggcaggagaatc

SEQ ID NO: 41694 - DNA, 80 bp, synthetic construct; identical to SEQ ID NO: 11269
  source 1..80: mol_type = other DNA

SEQ ID NO: 41695 - DNA, 80 bp, synthetic construct
  source 1..80: mol_type = other DNA
aaaaaaaagtctgttggatagataaatggatgaattcatattctaatcattttacctgctatgaaatctcaaacaagtta

SEQ ID NO: 41696 - DNA, 80 bp, synthetic construct
  source 1..80: mol_type = other DNA
cgtgaatttccttgactctcaacctcatctttgttattgatactcagatctataatttcagcccaatatttcaagtccat

SEQ ID NO: 41697 - DNA, 80 bp, synthetic construct
  source 1..80: mol_type = other DNA
tacaggcacacgacaccacacccagctgatttgtgtatttttagcagagacggggtttcaccatgttagccaggctggtc

SEQ ID NO: 41698 - DNA, 80 bp, synthetic construct; identical to SEQ ID NO: 11270
  source 1..80: mol_type = other DNA

SEQ ID NO: 41699 - DNA, 80 bp, synthetic construct
  source 1..80: mol_type = other DNA
cgatgatggtggctaacatgtatacagtccttaggacgtatcgagcattttcctgaggaaactatattaccttatttaat

SEQ ID NO: 41700 - DNA, 80 bp, synthetic construct
  source 1..80: mol_type = other DNA
agactgcctctctctaagagcacctgcacaaatagcagctaggctaatactttgagtagtcttttggcttcaaattgaaa

SEQ ID NO: 41701 - DNA, 80 bp, synthetic construct
  source 1..80: mol_type = other DNA
ggcaccactgctcctgccaccccaagagtaaagaagagtagaatgcttcccccttgagtcagtaaagatacagttataga

SEQ ID NO: 41702 - DNA, 80 bp, synthetic construct
  source 1..80: mol_type = other DNA
gtctggctctcaagaatggatgcttgacagtgggctaaaatgtatatcttgaggtagctttttagtttgtactggtccta

SEQ ID NO: 41703 - DNA, 80 bp, synthetic construct; identical to SEQ ID NO: 11271
  source 1..80: mol_type = other DNA

SEQ ID NO: 41704 - DNA, 80 bp, synthetic construct
  source 1..80: mol_type = other DNA
caaaaatgcctccagatagtatagcgtctgagtctagggtagtagttgaaaaccactaccctaactaatagttctcgagg

SEQ ID NO: 41705 - DNA, 80 bp, synthetic construct
  source 1..80: mol_type = other DNA
tgagaactattgatctaaacataaggccatccttagggaataaaagcaactctgcttcttttctaagtctccatggctcc

SEQ ID NO: 41706 - DNA, 80 bp, synthetic construct
  source 1..80: mol_type = other DNA
tatggcctcaaaagcaggaaccatctttctctagacacaaagtcagaaagggaccttccaagtcttcccaccccaatgct

SEQ ID NO: 41707 - DNA, 80 bp, synthetic construct; identical to SEQ ID NO: 11272
  source 1..80: mol_type = other DNA

SEQ ID NO: 41708 - DNA, 80 bp, synthetic construct
  source 1..80: mol_type = other DNA
agtccatttagaatgtcccaaaacagtgtgtatcatcagagtccatgtggcagcagatctttcatcacaacacaccacca

SEQ ID NO: 41709 - DNA, 80 bp, synthetic construct
  source 1..80: mol_type = other DNA
ccagctggactgctgagtagctgcatgacctgagacaagtcattaaaccactctgagtctcattttcctggtctacaaaa

SEQ ID NO: 41710 - DNA, 80 bp, synthetic construct
  source 1..80: mol_type = other DNA
acttggtgtaataagcagacacataggtggccgtatcgagcttacccaaaattcctgtactctttacaatgtagtgctga

SEQ ID NO: 41711 - DNA, 80 bp, synthetic construct; identical to SEQ ID NO: 11273
  source 1..80: mol_type = other DNA

SEQ ID NO: 41712 - DNA, 80 bp, synthetic construct
  source 1..80: mol_type = other DNA
gtaacagcccttccactcatcaggaacctactgaacatacaactccatcgtttttttttttttctctctctacccaagga

SEQ ID NO: 41713 - DNA, 80 bp, synthetic construct
  source 1..80: mol_type = other DNA
tgcaagtccccacactctcaccatgttggaaatgctgcgggtattggcaggattcagcatgacaatctcagttgtgatgt

SEQ ID NO: 41714 - DNA, 80 bp, synthetic construct
  source 1..80: mol_type = other DNA
tttgtttgctcatttgtttgtttttgtcttatctcacttgatactatttagcctcttgggaatcagggaagagcagtaga

SEQ ID NO: 41715 - DNA, 80 bp, synthetic construct; identical to SEQ ID NO: 11274
  source 1..80: mol_type = other DNA

SEQ ID NO: 41716 - DNA, 80 bp, synthetic construct
  source 1..80: mol_type = other DNA
aaactttccgggcttcagtctcatagaaaagtcccacgatgattcgggcatcctggcgctacaacagagaaagaaacagc

SEQ ID NO: 41717 - DNA, 80 bp, synthetic construct
  source 1..80: mol_type = other DNA
cagagaatcaaaacctgcccccgcctggctttcctctccaaccagtcactgtcccccagcttggtccctccgtaaacaga

SEQ ID NO: 41718 - DNA, 80 bp, synthetic construct
  source 1..80: mol_type = other DNA
cggggtgcatgagggaataaagaccagagaggttaactggggatttcagagcaatactcagatagagcaaagaagcagcc

SEQ ID NO: 41719 - DNA, 80 bp, synthetic construct; identical to SEQ ID NO: 11275
  source 1..80: mol_type = other DNA

SEQ ID NO: 41720 - DNA, 80 bp, synthetic construct
  source 1..80: mol_type = other DNA
tatttcctctctacctccccaaatctccctcttccccctcaacctctccttgtctgtcggcttctctctcttagtaccaa

SEQ ID NO: 41721 - DNA, 80 bp, synthetic construct
  source 1..80: mol_type = other DNA
tctgctgccttcctggattcctatctcatcttcgctcccatctcttgcccccactttggattgaacctactttaacagaa

SEQ ID NO: 41722 - DNA, 80 bp, synthetic construct
  source 1..80: mol_type = other DNA
aaagaactgcacttaatccacatggaatgcgttctctttcaatgaagaatcaagttcttgcccctaaaagtgactctcac

SEQ ID NO: 41723 - DNA, 80 bp, synthetic construct; identical to SEQ ID NO: 11276
  source 1..80: mol_type = other DNA

SEQ ID NO: 41724 - DNA, 80 bp, synthetic construct
  source 1..80: mol_type = other DNA
acacacccctcacaaccgggatgctctttcactgatctaatttcaattccttctgaagaaggaggtcagctgcagcactg

SEQ ID NO: 41725 - DNA, 80 bp, synthetic construct
  source 1..80: mol_type = other DNA
ccctgcttaccacaatgaggttccacatcctagcagcctcagccaccagcgtggagacagagctgcagccaggcataagg

SEQ ID NO: 41726 - DNA, 80 bp, synthetic construct
  source 1..80: mol_type = other DNA
ctcaattactcactttcatcattaattaccgttttcttctcctttctggcatctcttcctgtcaagtgccttttttctcc

SEQ ID NO: 41727 - DNA, 80 bp, synthetic construct; identical to SEQ ID NO: 11277
  source 1..80: mol_type = other DNA

SEQ ID NO: 41728 - DNA, 80 bp, synthetic construct
  source 1..80: mol_type = other DNA
tgggcgctgacatttgacaggtccattagaaaaaaagacactggggggtggaagtagggaagaatgtaggatgaggaaag

SEQ ID NO: 41729 - DNA, 80 bp, synthetic construct
  source 1..80: mol_type = other DNA
ctcccactgcctgttcccctcccactgatatatgacatttcagaagctgctggaaccccaatgcatgtgaagacgaaatg

SEQ ID NO: 41730 - DNA, 80 bp, synthetic construct
  source 1..80: mol_type = other DNA
tgggaagttggagaagggggagccaggggaagctgttggaatctgaagaaccagcagtcactgagaattctctgttgccc

SEQ ID NO: 41731 - DNA, 80 bp, synthetic construct; identical to SEQ ID NO: 11278
  source 1..80: mol_type = other DNA

SEQ ID NO: 41732 - DNA, 80 bp, synthetic construct
  source 1..80: mol_type = other DNA
ccctctctttgctcttgcaaggatctggatttgcaggcaggaaaccgactcattccaattgacacattctggttcttctg

SEQ ID NO: 41733 - DNA, 80 bp, synthetic construct
  source 1..80: mol_type = other DNA
agcctgcacccatctctccctgtcattttcttcacactccactccccaaaaccaatgatctctctgactgtcccaagtct

SEQ ID NO: 41734 - DNA, 80 bp, synthetic construct
  source 1..80: mol_type = other DNA
gaatccaccaagataggatgtctattagtaaaaatacagataaatacttgggattcatccctgaccaaggagctagaatc

SEQ ID NO: 41735 - DNA, 80 bp, synthetic construct; identical to SEQ ID NO: 11279
  source 1..80: mol_type = other DNA

SEQ ID NO: 41736 - DNA, 80 bp, synthetic construct
  source 1..80: mol_type = other DNA
attattcatgtaggggagaggggtgggaaaaaaaacctcattataagctatcccctaatacccctggacccaaatttgct

SEQ ID NO: 41737 - DNA, 80 bp, synthetic construct
  source 1..80: mol_type = other DNA
ctctcccccactgccattcttttctgttctcttctccttgtatgttgactcttcttcatccccatgctattgtgggggtt

SEQ ID NO: 41738 - DNA, 80 bp, synthetic construct
  source 1..80: mol_type = other DNA
ggaatagaaggatgagaaggagtcaggtagggctcaccactaccttgctgttttgttaagataaataaactagagctctc

SEQ ID NO: 41739 - DNA, 80 bp, synthetic construct; identical to SEQ ID NO: 11280
  source 1..80: mol_type = other DNA

SEQ ID NO: 41740 - DNA, 80 bp, synthetic construct
  source 1..80: mol_type = other DNA
gtcacacaagggaggggtctgcctcgcaatcccagagacgactcagacagatgggggcgcgtgcagctggctggccccct

SEQ ID NO: 41741 - DNA, 80 bp, synthetic construct
  source 1..80: mol_type = other DNA
gcccccgctcatgggaaacagtgccccgatgtacactgcgcgccgttctgaggaggggtgcggggggacccgcgagtgag

SEQ ID NO: 41742 - DNA, 80 bp, synthetic construct
  source 1..80: mol_type = other DNA
ggacacttttcctggggagggctgctaagagggtgccggggaggcgcctccatccctgattttgtggggaggagggggcg

SEQ ID NO: 41743 - DNA, 80 bp, synthetic construct; identical to SEQ ID NO: 11281
  source 1..80: mol_type = other DNA

SEQ ID NO: 41744 - DNA, 80 bp, synthetic construct
  source 1..80: mol_type = other DNA
ccgcgggaggctgaagcacggaggaaccagggtaggaagggaaggatgcgagtgggacgggagagaaacggggctggcgc

SEQ ID NO: 41745 - DNA, 80 bp, synthetic construct
  source 1..80: mol_type = other DNA
taagaaagggagacaggacatggaattgagaaaagacgagggaaggggtacacggaaggaaaagatgtggggaagagcgc

SEQ ID NO: 41746 - DNA, 80 bp, synthetic construct
  source 1..80: mol_type = other DNA
cctctgctgggctctgcctgacaccggcgaggctcagtctgggaggaggtggagcccagggaagtgtagccaagcaggga

SEQ ID NO: 41747 - DNA, 80 bp, synthetic construct; identical to SEQ ID NO: 11282
  source 1..80: mol_type = other DNA

SEQ ID NO: 41748 - DNA, 80 bp, synthetic construct
  source 1..80: mol_type = other DNA
agggggtcaggacttattttcttcttcgatttttcataggacaacagaatttgagacgggaatgccaatagctaagtttg

SEQ ID NO: 41749 - DNA, 80 bp, synthetic construct
  source 1..80: mol_type = other DNA
caaaagcctgttaccatatgaacacatatccatcgagccctctatattattagagcacaggaagagggccctgtaggtga

SEQ ID NO: 41750 - DNA, 80 bp, synthetic construct
  source 1..80: mol_type = other DNA
cccaaggatcttgaaagaatctaccagggtagaggaagtatgaggcatacaaatgggatgactgcatcccaggagagaag

SEQ ID NO: 41751 - DNA, 80 bp, synthetic construct; identical to SEQ ID NO: 11283
  source 1..80: mol_type = other DNA

SEQ ID NO: 41752 - DNA, 80 bp, synthetic construct
  source 1..80: mol_type = other DNA
aggtgagagaggtgagattcataaaggaaaagagaaaacgtgaggtctaagaatcgggagcaggaagatttttttaaaag

SEQ ID NO: 41753 - DNA, 80 bp, synthetic construct
  source 1..80: mol_type = other DNA
ttatagctctccattctttcccattatccattcccaccccactcccatcctcacacaagcgtcctcatcagctgcatgca

SEQ ID NO: 41754 - DNA, 80 bp, synthetic construct
  source 1..80: mol_type = other DNA
cttcccattttccagggtcaaataagacttggagcagattcggactgtggagagataggaaaataagaagagaggcgagt

SEQ ID NO: 41755 - DNA, 80 bp, synthetic construct; identical to SEQ ID NO: 11284
  source 1..80: mol_type = other DNA

SEQ ID NO: 41756 - DNA, 80 bp, synthetic construct
  source 1..80: mol_type = other DNA
ctctgggttggtgacagaggtattcaaaaatgtgatgaaatcattttagaatttttttgtcatcatctgccactaatgat

SEQ ID NO: 41757 - DNA, 80 bp, synthetic construct
  source 1..80: mol_type = other DNA
tatttgtgaattttggtatactggatttaaagtgctgacttgcaagcagtaatgctaagtttgcggcaggaaaaggaata

SEQ ID NO: 41758 - DNA, 80 bp, synthetic construct
  source 1..80: mol_type = other DNA
gttgatagccttcacctggtcccgagtcaggccccggtacctgatgcccccttcccagggcgggtgtatgatctggcaac

SEQ ID NO: 41759 - DNA, 80 bp, synthetic construct; identical to SEQ ID NO: 11285
  source 1..80: mol_type = other DNA

SEQ ID NO: 41760 - DNA, 80 bp, synthetic construct
  source 1..80: mol_type = other DNA
ggataaagggaggctaataagatcatctggacagcaaagtgggaccaagaaaagggagtaattgaggtagtaatgtgggg

SEQ ID NO: 41761 - DNA, 80 bp, synthetic construct
  source 1..80: mol_type = other DNA
atgtgggactgatgggatagtgatgaggaccagaaatgaggagatgcagggaaagggaagtggagcgaaggagggccgga

SEQ ID NO: 41762 - DNA, 80 bp, synthetic construct
  source 1..80: mol_type = other DNA
cccggagactactcgacctcttgccggttgcctcgcaggctccgaccgggctcagcctggggaccaagagagcgccccgc

SEQ ID NO: 41763 - DNA, 80 bp, synthetic construct; identical to SEQ ID NO: 11286
  source 1..80: mol_type = other DNA

SEQ ID NO: 41764 - DNA, 80 bp, synthetic construct
  source 1..80: mol_type = other DNA
ctcccccctcccttctcctccacctttctcctcctcccgtccctcctcccctcgaatccaggctccagcctggccagggt

SEQ ID NO: 41765 - DNA, 80 bp, synthetic construct
  source 1..80: mol_type = other DNA
gaaggcagggcggggggaagagaggggaagaccggggagagggcgcctcccacaacccgagccccgggagccgccccgga

SEQ ID NO: 41766 - DNA, 80 bp, synthetic construct
  source 1..80: mol_type = other DNA
ggtgggggagagggaacccgagccaaaggcagaggagctggcgctgagacagggagtctgggatgaaggtggagaaagac

SEQ ID NO: 41767 - DNA, 80 bp, synthetic construct; identical to SEQ ID NO: 11287
  source 1..80: mol_type = other DNA

SEQ ID NO: 41768 - DNA, 80 bp, synthetic construct
  source 1..80: mol_type = other DNA
caagggcaaactggaagctctaaagacagcaggtacagacctttttgacggctccagaagctcttggctataccttgaag

SEQ ID NO: 41769 - DNA, 80 bp, synthetic construct
  source 1..80: mol_type = other DNA
gggaaaaatggtaggaagaaaccaaacactgagagactgactagaattgagattctcaacctccaacccttttttacaat

SEQ ID NO: 41770 - DNA, 80 bp, synthetic construct
  source 1..80: mol_type = other DNA
actaaaaatagaaaaattagcgtggtgtgatggtgtgcgcctgtaatcccagctgagacaccagaatcgcttgaacccgg

SEQ ID NO: 41771 - DNA, 80 bp, synthetic construct; identical to SEQ ID NO: 11288
  source 1..80: mol_type = other DNA

SEQ ID NO: 41772 - DNA, 80 bp, synthetic construct
  source 1..80: mol_type = other DNA
tcaactacctccagcatgttgccatcaatgaagtgatttaacaaaatgttgaacaactcttggtagcaaagttaattttc

SEQ ID NO: 41773 - DNA, 80 bp, synthetic construct
  source 1..80: mol_type = other DNA
ttcttcaacatgtaggtagtgctttgaagaatatcttacacctctgccccaaccataaatgtcaatagtgccccttccct

SEQ ID NO: 41774 - DNA, 80 bp, synthetic construct
  source 1..80: mol_type = other DNA
ttgcagtgagccaagatcatgccatgccattgcacttcagcctgggtgacaagagtcaaactcagtcaaaaaaaaaaaac

SEQ ID NO: 41775 - DNA, 80 bp, synthetic construct; identical to SEQ ID NO: 11289
  source 1..80: mol_type = other DNA

SEQ ID NO: 41776 - DNA, 80 bp, synthetic construct
  source 1..80: mol_type = other DNA
cactaatggagaaagggggtattttcacagaatcagtatttttccgccccgtctccacttgatgtcaatcaaaacatacc

SEQ ID NO: 41777 - DNA, 80 bp, synthetic construct
  source 1..80: mol_type = other DNA
gagaatgtaatcttggtctttaaagaacagagttctggagtaaagaagcaggttcccttttcagtagacacctcccgtct

SEQ ID NO: 41778 - DNA, 80 bp, synthetic construct
  source 1..80: mol_type = other DNA
ttaatcttaaactgcaccacagaaccatcctgccccgccaccttcaaattaatatgatcgttgttctcagtcttgactcc

SEQ ID NO: 41779 - DNA, 80 bp, synthetic construct; identical to SEQ ID NO: 11290
  source 1..80: mol_type = other DNA

SEQ ID NO: 41780 - DNA, 80 bp, synthetic construct
  source 1..80: mol_type = other DNA
tggctggctaaattttgtatttttagtagagacagggtttcacaatattggtcaggctggtctcgaactcctgacctcag

SEQ ID NO: 41781 - DNA, 80 bp, synthetic construct
  source 1..80: mol_type = other DNA
tttaaagaaaaccttcctagcaagttgcatcagtatagctaaaatctgttacttgtttgggaggcagaggcatttgaggg

SEQ ID NO: 41782 - DNA, 80 bp, synthetic construct
  source 1..80: mol_type = other DNA
atatttttcaggatatttgtagaggtccttccagaaccactacttgagtatcctaatttcatcctccccacaatcaatct

SEQ ID NO: 41783 - DNA, 80 bp, synthetic construct; identical to SEQ ID NO: 11291
  source 1..80: mol_type = other DNA

SEQ ID NO: 41784 - DNA, 80 bp, synthetic construct
  source 1..80: mol_type = other DNA
gttcaagcaattctcttgcctcagcctcctgagtagctgggaattaccggcgccccaccaccacgcccagctaatttttt

SEQ ID NO: 41785 - DNA, 80 bp, synthetic construct
  source 1..80: mol_type = other DNA
ctgcctcatcttccatccatccctgagagcatatagcccagaatttaacactctgggagccctgaaaacatattaaccaa

SEQ ID NO: 41786 - DNA, 80 bp, synthetic construct
  source 1..80: mol_type = other DNA
tataaagctgacagagccaacatttgaacttaagttcgttaccctattttcaaattctttctactgcattgagaggctta

SEQ ID NO: 41787 - DNA, 80 bp, synthetic construct
  source 1..80: mol_type = other DNA
ttctcctgcctcagcctcccgagtagctgggactacaggcgcccgccaccatgcccggctaatttttttgtatttttagt

SEQ ID NO: 41788 - DNA, 80 bp, synthetic construct; identical to SEQ ID NO: 11292
  source 1..80: mol_type = other DNA

SEQ ID NO: 41789 - DNA, 80 bp, synthetic construct
  source 1..80: mol_type = other DNA
tttttgtgaaactgtttgatccttcccctcagtttccatttgtgtgttctctttcttcccgtcttgataggcacaggcac

SEQ ID NO: 41790 - DNA, 80 bp, synthetic construct
  source 1..80: mol_type = other DNA
tcctggctaacacggtgaaacaccgtctctactaaaaatacaaaaaaaataattagctgggcgtgatggtgggcgcctgt

SEQ ID NO: 41791 - DNA, 80 bp, synthetic construct
  source 1..80: mol_type = other DNA
tttcgttaataaaccctctctattgctccccacacacaatcctagtttggttgctgtcttcgtctgtttgggctgccata

SEQ ID NO: 41792 - DNA, 80 bp, synthetic construct
  source 1..80: mol_type = other DNA
ctcatagactgccatctgccatctgcgatctagctgtgtcttcacatggtggaagggcaaacaagctccctggggcctct

SEQ ID NO: 41793 - DNA, 80 bp, synthetic construct; identical to SEQ ID NO: 11293
  source 1..80: mol_type = other DNA

SEQ ID NO: 41794 - DNA, 80 bp, synthetic construct
  source 1..80: mol_type = other DNA
ggatcctacccctgtctcaggagtgcacagagccaataaccaaattacaacattgacattgtgaagttgcctctagaaat

SEQ ID NO: 41795 - DNA, 80 bp, synthetic construct
  source 1..80: mol_type = other DNA
gccgggcgccgtggctcatgcctttaatcccagcactttgggaggcctaggcgggcggatcacctgagatcaggagtttg

SEQ ID NO: 41796 - DNA, 80 bp, synthetic construct
  source 1..80: mol_type = other DNA
attgcactccagcctgggcaacaggcaaaactgtctccaaaaaaaaaaaaaaaaaggttcagttctcataaacacaaatt

SEQ ID NO: 41797 - DNA, 80 bp, synthetic construct; identical to SEQ ID NO: 11294
  source 1..80: mol_type = other DNA

SEQ ID NO: 41798 - DNA, 80 bp, synthetic construct
  source 1..80: mol_type = other DNA
ctagatgaggtaaagaaagactataaatagcttcacatctcgttttgtcacagaatgaatgcaagtcaggccaggctttg

SEQ ID NO: 41799 - DNA, 80 bp, synthetic construct
  source 1..80: mol_type = other DNA
tcaaatgaacaaatctgaagcaacagactagaaattctattcatggaaatatgataaaaatgccagtaagagggctgggc

SEQ ID NO: 41800 - DNA, 80 bp, synthetic construct
  source 1..80: mol_type = other DNA
aaccccgtctctaccaaaaatacaaaaaatcagttgggcatggtggcaggtgcctgtaatcccagctacgggggaggctg

SEQ ID NO: 41801 - DNA, 80 bp, synthetic construct; identical to SEQ ID NO: 11295
  source 1..80: mol_type = other DNA

SEQ ID NO: 41802 - DNA, 80 bp, synthetic construct
  source 1..80: mol_type = other DNA
acacaccttcagatgctttcagtatttgttacacctagatctgtgcagaaactgaataccttattggtgcataatttaca

SEQ ID NO: 41803 - DNA, 80 bp, synthetic construct
  source 1..80: mol_type = other DNA
gtccttctgcccttcactaacagtgctccagccatggtcgtctgactgctgttctttaaacttccttaactttcaactca

SEQ ID NO: 41804 - DNA, 80 bp, synthetic construct
  source 1..80: mol_type = other DNA
cccagacttagaacactgtttccccaatcccactagccactctcatatatggcatactgtagtcattgttttgtttgttt

SEQ ID NO: 41805 - DNA, 80 bp, synthetic construct
  source 1..80: mol_type = other DNA
ttgggaggccgaggcaggcagatagctgaggtcaggagttccagaccagcctgaccaatatggtgaaaccccgtctctac

SEQ ID NO: 41806 - DNA, 80 bp, synthetic construct; identical to SEQ ID NO: 11296
  source 1..80: mol_type = other DNA

SEQ ID NO: 41807 - DNA, 80 bp, synthetic construct
  source 1..80: mol_type = other DNA
aaccacaaaacttatctcagtggtaattaaggtaactgtggaatcgtgtatttacatttgccttcctgaccagaccataa

SEQ ID NO: 41808 - DNA, 80 bp, synthetic construct
  source 1..80: mol_type = other DNA
tactaggtattggtaaaatgggttgctttgttccatgggccataatagtgacacattctaaacacatttaagtcattcca

SEQ ID NO: 41809 - DNA, 80 bp, synthetic construct
  source 1..80: mol_type = other DNA
atgtttaataatctgcacagtgtctcacatgtaacaagccaacatgagattagtgattccaaagaccctgctcagcccaa

SEQ ID NO: 41810 - DNA, 80 bp, synthetic construct; identical to SEQ ID NO: 11297
  source 1..80: mol_type = other DNA

SEQ ID NO: 41811 - DNA, 80 bp, synthetic construct
  source 1..80: mol_type = other DNA
ccaccacccatgagcattttgatagcattgcaagtataatctctggtgcatgcacaaattctgctccacatagcagcgct

SEQ ID NO: 41812 - DNA, 80 bp, synthetic construct
  source 1..80: mol_type = other DNA
agtgtagtggcgcaatctcagttcactgcaacctctgcctcccaggcctgtcccagcctcccgagtagctgggactacag

SEQ ID NO: 41813 - DNA, 80 bp, synthetic construct
  source 1..80: mol_type = other DNA
cgctgctcttaagaaagtacttttccaaagatcattctccttggtcttatcttaagatcctgctatgaaatagggacacg

SEQ ID NO: 41814 - DNA, 80 bp, synthetic construct; identical to SEQ ID NO: 11298
  source 1..80: mol_type = other DNA

SEQ ID NO: 41815 - DNA, 80 bp, synthetic construct
  source 1..80: mol_type = other DNA
ggagtgcagtggtgcaagcttggctcactgcaatctccacctcctgggcttaagcaattcttgtgcctctgccacctgag

SEQ ID NO: 41816 - DNA, 80 bp, synthetic construct
  source 1..80: mol_type = other DNA
ccacccccggcctgaatttgttaacttcttaccaacattttacaaagaagattgaaggtaatgtgggttctaagactgaa

SEQ ID NO: 41817 - DNA, 80 bp, synthetic construct
  source 1..80: mol_type = other DNA
ggtggagtttcactcttgttgcccaggctggagtgcaatggtgcgatctcggctcactgcaacttccacctcctggattc

SEQ ID NO: 41818 - DNA, 80 bp, synthetic construct
  source 1..80: mol_type = other DNA
tttaatagagatggggttttgtcatgttgcccaggctggtcttgagctcctgacctcagatgatccgcccacctcggcct

SEQ ID NO: 41819 - DNA, 80 bp, synthetic construct; identical to SEQ ID NO: 11299
  source 1..80: mol_type = other DNA

SEQ ID NO: 41820 - DNA, 80 bp, synthetic construct
  source 1..80: mol_type = other DNA
aaaaaaagaagaagaagaagaagaagaaaagaaaaaaggctaggcgcggtggctcacacctgtaatcccagcactttggg

SEQ ID NO: 41821 - DNA, 80 bp, synthetic construct
  source 1..80: mol_type = other DNA
ccagctactcaggaggctgaggcaggagaatcacttgaaccggagaggcagaggttgcagtaagctgagtttgcgccatt

SEQ ID NO: 41822 - DNA, 80 bp, synthetic construct
  source 1..80: mol_type = other DNA
aatcacccaggttggagtgcagcggtgcaatctcagctcactgcaatatctgcctccagggttcaagcaattcttttgcc

SEQ ID NO: 41823 - DNA, 80 bp, synthetic construct; identical to SEQ ID NO: 11300
  source 1..80: mol_type = other DNA

SEQ ID NO: 41824 - DNA, 80 bp, synthetic construct
  source 1..80: mol_type = other DNA
gtgaaaccctgtctctacaaaatatacaagaaaaaattaaccgggcatggtggcgggtgccagctactcgggaggctgag

SEQ ID NO: 41825 - DNA, 80 bp, synthetic construct
  source 1..80: mol_type = other DNA
aatatttatggaatagggcagtttgggatcacacacatgagctaagcatgatgtcagccttcatagctcctacaatgtgg

SEQ ID NO: 41826 - DNA, 80 bp, synthetic construct
  source 1..80: mol_type = other DNA
ttggccaggctgatctcaaattcctttcctcaagtgatccgcctgccttggcctccaagagtgctgggattacaggcatg

SEQ ID NO: 41827 - DNA, 80 bp, synthetic construct; identical to SEQ ID NO: 11301
  source 1..80: mol_type = other DNA

SEQ ID NO: 41828 - DNA, 80 bp, synthetic construct
  source 1..80: mol_type = other DNA
tatatttataaaagttaagcctgcatatctctgcccccaattgcagcagaaacacctgaaaaagaatgccagtctggtct

SEQ ID NO: 41829 - DNA, 80 bp, synthetic construct
  source 1..80: mol_type = other DNA
aaatgctataggaacacactttttctccagtggctggcataaaagtgttggtatgctataccaccaagtcattagatatg

SEQ ID NO: 41830 - DNA, 80 bp, synthetic construct
  source 1..80: mol_type = other DNA
cagcgcaatagctcagtttgaccattagatggtaccagttacaaggcaaacttaggtcccttcagaaactgagcatttct

SEQ ID NO: 41831 - DNA, 80 bp, synthetic construct; identical to SEQ ID NO: 11302
  source 1..80: mol_type = other DNA

SEQ ID NO: 41832 - DNA, 80 bp, synthetic construct
  source 1..80: mol_type = other DNA
cgaaaccccgtctacttaaaaaaaaatacaaaaattagccgagggtggtggcgggcgcctgaaatcccagctactcagga

SEQ ID NO: 41833 - DNA, 80 bp, synthetic construct
  source 1..80: mol_type = other DNA
agagcaagtaaaggtgtaattatcagcctataggggttagagtggcaagaagatgcctgagggtgagcctacagcctaaa

SEQ ID NO: 41834 - DNA, 80 bp, synthetic construct
  source 1..80: mol_type = other DNA
acaggtgctgcacaagaggtgttatgttttttgggggagccagacacaggcctaagcactttatgtaccttgtctcattt

SEQ ID NO: 41835 - DNA, 80 bp, synthetic construct
  source 1..80: mol_type = other DNA
gaccaacatggagaaaccccatctctactaaaaatacaaaattagccgggcatagtggcgcatagcctgtaatcccagct

SEQ ID NO: 41836 - DNA, 80 bp, synthetic construct; identical to SEQ ID NO: 11303
  source 1..80: mol_type = other DNA

SEQ ID NO: 41837 - DNA, 80 bp, synthetic construct
  source 1..80: mol_type = other DNA
agaataataatgaaaaaaaagtactgtggtggccagaccccaagatgattggcgaagtgaaagttgcccagttccaaaat

SEQ ID NO: 41838 - DNA, 80 bp, synthetic construct
  source 1..80: mol_type = other DNA
ctagcccaggctgggttaaagcagataaacgaagcggacagcggaggaaaagcacgtaaccaagtgcagtgggtctgaag

SEQ ID NO: 41839 - DNA, 80 bp, synthetic construct
  source 1..80: mol_type = other DNA
tcagattgggagagcttcctggtccttacctagcaagattctgccgctaggtggcgaaaagcgaaggggccaaagaaatg

SEQ ID NO: 41840 - DNA, 80 bp, synthetic construct; identical to SEQ ID NO: 11304
  source 1..80: mol_type = other DNA

SEQ ID NO: 41841 - DNA, 80 bp, synthetic construct
  source 1..80: mol_type = other DNA
gaggggcaagcctcagtgcctgactcacttgactcacaagaagctgaatgtttttccttttgaaagataaaaatattggt

SEQ ID NO: 41842 - DNA, 80 bp, synthetic construct
  source 1..80: mol_type = other DNA
gtaggccaggcgcggtggctcacgcctgtaatcccagcactttgggaggccgaggcgggcggatcacgaggtcaggagat

SEQ ID NO: 41843 - DNA, 80 bp, synthetic construct
  source 1..80: mol_type = other DNA
cgtgtcactgcactccagactgggcgacagagcaagactctgtctcaaaaaaaaaaaaaaaaaagaaaaagaaataaacc

SEQ ID NO: 41844 - DNA, 80 bp, synthetic construct
  source 1..80: mol_type = other DNA
ctgtagtcccagctacaaaggagggtgaggcaggagaatcccttgaacccgggaggtggaggttgcagtgagccaagatc

SEQ ID NO: 41845 - DNA, 80 bp, synthetic construct; identical to SEQ ID NO: 11305
  source 1..80: mol_type = other DNA

SEQ ID NO: 41846 - DNA, 80 bp, synthetic construct
  source 1..80: mol_type = other DNA
tatttatgccactagagggagttccagaagaaaatcactgcatgtaagggctaatgactgtatttactgagtggttactg

SEQ ID NO: 41847 - DNA, 80 bp, synthetic construct
  source 1..80: mol_type = other DNA
aaaaacatgctctctgaacaaactattctaccagtgtagaaagcagagtaaacttcatgggtgagtgaccagggcagtca

SEQ ID NO: 41848 - DNA, 80 bp, synthetic construct
  source 1..80: mol_type = other DNA
tttatctttcaatttgtgtcttataatgaagtccgatgagaaagcagaacatgggctagagacttttggagcctggctca

SEQ ID NO: 41849 - DNA, 80 bp, synthetic construct; identical to SEQ ID NO: 11306
  source 1..80: mol_type = other DNA

SEQ ID NO: 41850 - DNA, 80 bp, synthetic construct
  source 1..80: mol_type = other DNA
ctgtagtcccagctacttgggaggctgagacaggagaatggcttgaacccgggaggcggaggttgcagtgaaccgagatt

SEQ ID NO: 41851 - DNA, 80 bp, synthetic construct
  source 1..80: mol_type = other DNA
ttttttaatagatttatttaactagagatggggtctcactatgttgtaaaggctggactcgagaccctgggcccgagcga

SEQ ID NO: 41852 - DNA, 80 bp, synthetic construct
  source 1..80: mol_type = other DNA
gagcaaaaaggttgaaaatgatggcctgacattgatcaatttgtgcctttaggtaacatataactgtaatataactgcaa

SEQ ID NO: 41853 - DNA, 80 bp, synthetic construct; identical to SEQ ID NO: 11307
  source 1..80: mol_type = other DNA

SEQ ID NO: 41854 - DNA, 80 bp, synthetic construct
  source 1..80: mol_type = other DNA
cctctagtggtatatatatacaaacggaaggatttagagaaaatacagatcggctttagctggctgagatttattttcaa

SEQ ID NO: 41855 - DNA, 80 bp, synthetic construct
  source 1..80: mol_type = other DNA
caattttcaaaagtacaaaaaagccatattatgtattaatgtggaattatgaattaagtagacaacaagaatcaaaacag

SEQ ID NO: 41856 - DNA, 80 bp, synthetic construct
  source 1..80: mol_type = other DNA
aaaaaattaccacacacatttactgtattcaatgtgtcactctgaatatattactgtgtacatggtctgtcattggacat

SEQ ID NO: 41857 - DNA, 80 bp, synthetic construct; identical to SEQ ID NO: 11308
  source 1..80: mol_type = other DNA

SEQ ID NO: 41858 - DNA, 80 bp, synthetic construct
  source 1..80: mol_type = other DNA
atcaattaaaataatatttaaatgctgaaagaaatgagcagctcccagggtgatacagggtggtttcacttcttggacac

SEQ ID NO: 41859 - DNA, 80 bp, synthetic construct
  source 1..80: mol_type = other DNA
ggctcaccgcaatctccgcctcctgggttcaagggattaccctgcctcagcctcccgagtagctgggattacaggcgcac

SEQ ID NO: 41860 - DNA, 80 bp, synthetic construct
  source 1..80: mol_type = other DNA
ggattacaggcgtgagcgggcccagcccctataccccagatttctgcaagtggcaacaccactggcttcattttgctggt

SEQ ID NO: 41861 - DNA, 80 bp, synthetic construct
  source 1..80: mol_type = other DNA
gaaagtaaataagctgagctcatcagaggccttgtattgtggtggttaaaagagccagttctaggactagaaagcctggc

SEQ ID NO: 41862 - DNA, 80 bp, synthetic construct; identical to SEQ ID NO: 11309
  source 1..80: mol_type = other DNA

SEQ ID NO: 41863 - DNA, 80 bp, synthetic construct
  source 1..80: mol_type = other DNA
actctcctacctgaatatgcaacagggagaaagagcgtcccaggacattttaggtttttgaagaaaaaaaaacccctttg

SEQ ID NO: 41864 - DNA, 80 bp, synthetic construct
  source 1..80: mol_type = other DNA
ccttaatgtccttctagctccttacgcccatctcggacaaaagcagaaatgtatgtctcagttgtgtttctaccccttgc

SEQ ID NO: 41865 - DNA, 80 bp, synthetic construct
  source 1..80: mol_type = other DNA
ttgtaattaattttaagtggccacatgcagggagtgactgctgcattggacagcacggctctaaattgagccttttttcc

SEQ ID NO: 41866 - DNA, 80 bp, synthetic construct; identical to SEQ ID NO: 11310
  source 1..80: mol_type = other DNA

SEQ ID NO: 41867 - DNA, 80 bp, synthetic construct
  source 1..80: mol_type = other DNA
ggtagaagaaagggaggttagacattaagaagaatggtctggtgatgacagttgtgagataatagaaacaggaaaaagaa

SEQ ID NO: 41868 - DNA, 80 bp, synthetic construct
  source 1..80: mol_type = other DNA
cccttcaaaggttggatctccaggagggagtgggggaggaaagccctgtaccaggcagcctctgctccattgctctgggg

SEQ ID NO: 41869 - DNA, 80 bp, synthetic construct
  source 1..80: mol_type = other DNA
gcttttcagcagtaaggggacatgcaccccaagggcctccacttggcctgaccttgctgcgggggctctctgtccccagg

SEQ ID NO: 41870 - DNA, 80 bp, synthetic construct; identical to SEQ ID NO: 11311
  source 1..80: mol_type = other DNA

SEQ ID NO: 41871 - DNA, 80 bp, synthetic construct
  source 1..80: mol_type = other DNA
tggcctcccaagtagcggagactacaggcgcctgccaccacacccagctaaattttttcttttctttttttttttttttt

SEQ ID NO: 41872 - DNA, 80 bp, synthetic construct
  source 1..80: mol_type = other DNA
cactaggcctaatttttttatttttagtagagatggggtttcaccatgttggccaggctggtctggaacccctgacctca

SEQ ID NO: 41873 - DNA, 80 bp, synthetic construct
  source 1..80: mol_type = other DNA
taataacaacctcttggagttctcatcaggattacatgaaatgagatatgtaacatgcttagcagtgcctgtccatagta

SEQ ID NO: 41874 - DNA, 80 bp, synthetic construct; identical to SEQ ID NO: 11312
  source 1..80: mol_type = other DNA

SEQ ID NO: 41875 - DNA, 80 bp, synthetic construct
  source 1..80: mol_type = other DNA
tagtgagaagtgatggagagacagttaaagtagatggagtgacaaaagcaaaacctctaagggtagaataggcagcaatt

SEQ ID NO: 41876 - DNA, 80 bp, synthetic construct
  source 1..80: mol_type = other DNA
gtccaggacattcacagtatctctataaccagagtcttttttgtcgttgttgttctcaagaaggaaacttgaggccgggt

SEQ ID NO: 41877 - DNA, 80 bp, synthetic construct
  source 1..80: mol_type = other DNA
tactcgggaggctgaggcaggagaatcacttgaacctgggaggcggaggttgcagggaggcggaggttgcagtgagccaa

SEQ ID NO: 41878 - DNA, 80 bp, synthetic construct; identical to SEQ ID NO: 11313
  source 1..80: mol_type = other DNA

SEQ ID NO: 41879 - DNA, 80 bp, synthetic construct
  source 1..80: mol_type = other DNA
aaggaccaagatggagaccaggcacctgaatatcggggccggacagagctgctgaaagatgctattggtgagggaaaggt

SEQ ID NO: 41880 - DNA, 80 bp, synthetic construct
  source 1..80: mol_type = other DNA
tattctctcaactgagatgagatccctcaacccaaacatctcagtcctgggaatgatttccataaaaatgtacacatcaa

SEQ ID NO: 41881 - DNA, 80 bp, synthetic construct
  source 1..80: mol_type = other DNA
taggccagatggtttggaggccttctataaggtattattgagtgataagagcaagctgctgtaggatacaaaaacaaaaa

SEQ ID NO: 41882 - DNA, 80 bp, synthetic construct; identical to SEQ ID NO: 11314
  source 1..80: mol_type = other DNA

SEQ ID NO: 41883 - DNA, 80 bp, synthetic construct
  source 1..80: mol_type = other DNA
aggcgcctgtagtcccagctactcgggaggctgaggcaggagaatggcgtgaacccggaagcggaggttgcagtgagcca

SEQ ID NO: 41884 - DNA, 80 bp, synthetic construct
  source 1..80: mol_type = other DNA
ttatagaaaggagatgtcactttttggctgtacctccactatttcattctgcagaattgcagaatttctttttttttttc

SEQ ID NO: 41885 - DNA, 80 bp, synthetic construct
  source 1..80: mol_type = other DNA
tgtatttttagtagagacagggtttcaccaggttgtcaaggttggtctcaaactcctgacctcaggtgatccactcgcct

SEQ ID NO: 41886 - DNA, 80 bp, synthetic construct; identical to SEQ ID NO: 11315
  source 1..80: mol_type = other DNA

SEQ ID NO: 41887 - DNA, 80 bp, synthetic construct
  source 1..80: mol_type = other DNA
tctcagaatgttcttcatacagctgtttttattggggaaattctacttgccgaaaagtttgatagtgagaccctctccag

SEQ ID NO: 41888 - DNA, 80 bp, synthetic construct
  source 1..80: mol_type = other DNA
cacctgaggtcgggagttcgagactagcctgaccaacatggagaaaccctgtctctactaaaaacacaaaattagcctgg

SEQ ID NO: 41889 - DNA, 80 bp, synthetic construct
  source 1..80: mol_type = other DNA
aaggaagacaaaaagaaaagcagctaaagactttgcctcaggggagaaagttctcttttgggttgctatccacattccaa

SEQ ID NO: 41890 - DNA, 80 bp, synthetic construct; identical to SEQ ID NO: 11316
  source 1..80: mol_type = other DNA

SEQ ID NO: 41891 - DNA, 80 bp, synthetic construct
  source 1..80: mol_type = other DNA
ttgggaggccgaagcgggcagatcacccgaggtcaggagttcgagaccagcctgatcaacatggagaaaccccgtctcta

SEQ ID NO: 41892 - DNA, 80 bp, synthetic construct
  source 1..80: mol_type = other DNA
tctcaaaaaaaaaaaaccacatacaaaccagagataatattataatgagcctccaagtgcctaccaccttgctgcagcac

SEQ ID NO: 41893 - DNA, 80 bp, synthetic construct
  source 1..80: mol_type = other DNA
tggcatatctctgctcactgcagcctctgcctcccgggcagaagccatcctcccacctcagcctacatagtagctgggac

SEQ ID NO: 41894 - DNA, 80 bp, synthetic construct; identical to SEQ ID NO: 11317
  source 1..80: mol_type = other DNA

SEQ ID NO: 41895 - DNA, 80 bp, synthetic construct
  source 1..80: mol_type = other DNA
aggcggagcttgcagtgagctgagatcatgccactgcactccagcctggggcaacagagtgagactcaaaaaaaaaaaaa

SEQ ID NO: 41896 - DNA, 80 bp, synthetic construct
  source 1..80: mol_type = other DNA
tttcttttagcgagattcaaatgagacccacctgttgacctttgcccttagggtttcccagggtctgaattttgttgacg

SEQ ID NO: 41897 - DNA, 80 bp, synthetic construct
  source 1..80: mol_type = other DNA
taatgtctgcttttctctcttttctaattatttgtgaaaggaaaaatgtggggggttgggagaaaaaaacccttaagtac

SEQ ID NO: 41898 - DNA, 80 bp, synthetic construct; identical to SEQ ID NO: 11318
  source 1..80: mol_type = other DNA

SEQ ID NO: 41899 - DNA, 80 bp, synthetic construct
  source 1..80: mol_type = other DNA
aacctactccacatctccaggtctgcacatctgttcagttactgaatcctgtgtaagctaccttctttttcttttttctt

SEQ ID NO: 41900 - DNA, 80 bp, synthetic construct
  source 1..80: mol_type = other DNA
ccctcagccttccaagtagctgggattacaggctgcaccaccatgtctggctaatttttgtattatcagtagagagaggg

SEQ ID NO: 41901 - DNA, 80 bp, synthetic construct
  source 1..80: mol_type = other DNA
taaaagctctagaagagggctcttaaccttttgttgtgtgtcatgcaccttccgcaagctgatgaagttgatagacccat

SEQ ID NO: 41902 - DNA, 80 bp, synthetic construct
  source 1..80: mol_type = other DNA
atgcccaggtaatttttaattttttttcgtagaggcagggtctcacattatgttgcccagtctggcctcgagaactcctg

SEQ ID NO: 41903 - DNA, 80 bp, synthetic construct; identical to SEQ ID NO: 11319
  source 1..80: mol_type = other DNA

SEQ ID NO: 41904 - DNA, 80 bp, synthetic construct
  source 1..80: mol_type = other DNA
gattctcctgcctcagcctcttgagtagctgggattacaggactgtgccaccacgtccagctaattttgtatttttagta

SEQ ID NO: 41905 - DNA, 80 bp, synthetic construct
  source 1..80: mol_type = other DNA
tttgtgatttttattgacgacaaagtcaaaggttctcttcatattattgtggtgtatcgcctacaagcataattaaaata

SEQ ID NO: 41906 - DNA, 80 bp, synthetic construct
  source 1..80: mol_type = other DNA
ttttttactttaattgttatcacagtctcttaacatttctccctatgttctccagtcctgtaggtgctaaatctgacgtg

SEQ ID NO: 41907 - DNA, 80 bp, synthetic construct
  source 1..80: mol_type = other DNA
gtaggcgatacaccacaataatatgaagagaacctttgactttgtcgtcaataaaaagtcccttgagggacttcagatgt

SEQ ID NO: 41908 - DNA, 80 bp, synthetic construct; identical to SEQ ID NO: 11320
  source 1..80: mol_type = other DNA

SEQ ID NO: 41909 - DNA, 80 bp, synthetic construct
  source 1..80: mol_type = other DNA
gtgggtggatcaggatcctttctttaaatgagctggcttcttggagctacaccacttaacatgtatttgtgagtgacttc

SEQ ID NO: 41910 - DNA, 80 bp, synthetic construct
  source 1..80: mol_type = other DNA
acaactgaggccaggagtagttcagtgacttactcaaaccgatataacttataagtggtagagctgaggcctctgtatca

SEQ ID NO: 41911 - DNA, 80 bp, synthetic construct
  source 1..80: mol_type = other DNA
aaaattgtttcctctttctccattcaacactgaggactcaggttcagctgctgatgaagctcctcttttttgcctagagc

SEQ ID NO: 41912 - DNA, 80 bp, synthetic construct; identical to SEQ ID NO: 11321
  source 1..80: mol_type = other DNA

SEQ ID NO: 41913 - DNA, 80 bp, synthetic construct
  source 1..80: mol_type = other DNA
tgccttgtctgtcaaatagagaaaacatccttcgtcctaaattgtagggaggattaaagtcatgcaaagtgcctactaca

SEQ ID NO: 41914 - DNA, 80 bp, synthetic construct
  source 1..80: mol_type = other DNA
attggatgcttgtgctggcttggagcattgctcacattctttattcgctattgtatctagactatagctagagaaagagc

SEQ ID NO: 41915 - DNA, 80 bp, synthetic construct
  source 1..80: mol_type = other DNA
ccagaacatgcaggaactaaaatgttgcctttttctattttaggaaaacttcgagcagagataggtgagttccagtcatc

SEQ ID NO: 41916 - DNA, 80 bp, synthetic construct
  source 1..80: mol_type = other DNA
cctgttttcccctcagtttccctttctctacagtgggtgtgtcgtgcctagaacaagttttaagtaattaaataacaaag

SEQ ID NO: 41917 - DNA, 80 bp, synthetic construct; identical to SEQ ID NO: 11322
  source 1..80: mol_type = other DNA

SEQ ID NO: 41918 - DNA, 80 bp, synthetic construct
  source 1..80: mol_type = other DNA
cctgatgtctggttggggaggtgaaacaaacagaaacaagacacaactgtatcacctgtacttatatttctgctttacaa

SEQ ID NO: 41919 - DNA, 80 bp, synthetic construct
  source 1..80: mol_type = other DNA
cagaagagcacccaaatatttgttagataaatgttgcagacactagaaggtgtcattagggcacagatggtaccttctct

SEQ ID NO: 41920 - DNA, 80 bp, synthetic construct
  source 1..80: mol_type = other DNA
tgttttggaggacttgactatgaaaggtcttaactcctttttgtaccatgaatctctctggcactccagtgaagtctaaa

SEQ ID NO: 41921 - DNA, 80 bp, synthetic construct; identical to SEQ ID NO: 11323
  source 1..80: mol_type = other DNA

SEQ ID NO: 41922 - DNA, 80 bp, synthetic construct
  source 1..80: mol_type = other DNA
catgagccaccgtgcccggccataaatatttctttagccaaagtaatacattaagtaatgtagcagcaagtctaataacc

SEQ ID NO: 41923 - DNA, 80 bp, synthetic construct
  source 1..80: mol_type = other DNA
cctgcctcagcctcccaagttgctggaactacaggcgcatgccaccatgcccagctaatttttgtatttttagtagagac

SEQ ID NO: 41924 - DNA, 80 bp, synthetic construct
  source 1..80: mol_type = other DNA
atttctgcaataactctaatgggaatgaaaacatctgtggcttccattggtaattaagtcacaggtactgctcatattgt

SEQ ID NO: 41925 - DNA, 80 bp, synthetic construct
  source 1..80: mol_type = other DNA
cctgcctcagcctcctgagtagctggcattacaggcatgtgccaccacgcccacctaatttttacatttttagtagagat

SEQ ID NO: 41926 - DNA, 80 bp, synthetic construct; identical to SEQ ID NO: 11324
  source 1..80: mol_type = other DNA

SEQ ID NO: 41927 - DNA, 80 bp, synthetic construct
  source 1..80: mol_type = other DNA
gttaaggaaccaaaaaagacaggtgggtggggcatgagggggaacacatgttaaccctgtttgttctggtgaacaattca

SEQ ID NO: 41928 - DNA, 80 bp, synthetic construct
  source 1..80: mol_type = other DNA
gaccaagtcagctctgaatgggaagccaaaagagaatagaaccaggactcaagattaggggagctgggatttccttattc

SEQ ID NO: 41929 - DNA, 80 bp, synthetic construct
  source 1..80: mol_type = other DNA
gatgtggggaaggtgctattcatcttccactaatcacatatttgtttctttttgttttcagggcaattccttgaagagct

SEQ ID NO: 41930 - DNA, 80 bp, synthetic construct
  source 1..80: mol_type = other DNA
agggcaaagaagccagctgttagagacacatttacaggtggcagagaagctggaggcactcctatctgccacctgatcca

SEQ ID NO: 41931 - DNA, 80 bp, synthetic construct; identical to SEQ ID NO: 11325
  source 1..80: mol_type = other DNA

SEQ ID NO: 41932 - DNA, 80 bp, synthetic construct
  source 1..80: mol_type = other DNA
tcatctaccttttctcttcattttcccatttttattacccttctttccatttctctctccagtcttccacctggaagccc

SEQ ID NO: 41933 - DNA, 80 bp, synthetic construct
  source 1..80: mol_type = other DNA
gtatggtaactttgcaaatggtggttgtttcttccaagactccagccctgattgcgcaaaactgaaaggcatgtgaaggg

SEQ ID NO: 41934 - DNA, 80 bp, synthetic construct; identical to SEQ ID NO: 11326
  source 1..80: mol_type = other DNA

SEQ ID NO: 41935 - DNA, 80 bp, synthetic construct
  source 1..80: mol_type = other DNA
gcactttgggaggccgaggcgggcgaatcacgaggtcaggagttcaagaccagcctggccaacatggtgaaaccccatct

SEQ ID NO: 41936 - DNA, 80 bp, synthetic construct
  source 1..80: mol_type = other DNA
atcgtgccactgcactctagccggagtgacagagtaagactctgtctcaaaaataaataaataaataaataaataaataa

SEQ ID NO: 41937 - DNA, 80 bp, synthetic construct
  source 1..80: mol_type = other DNA
agctcagtcagaaaggccatttatttatgtttcaagatgctcactgcctcctttgttttgtctcctttgcaggccttctc

SEQ ID NO: 41938 - DNA, 80 bp, synthetic construct; identical to SEQ ID NO: 11327
  source 1..80: mol_type = other DNA

SEQ ID NO: 41939 - DNA, 80 bp, synthetic construct
  source 1..80: mol_type = other DNA
aagacattgagtcttgagggcttcactggatgagagttggatctggcatcctgacagagggttccagtgatgggtgcctg

SEQ ID NO: 41940 - DNA, 80 bp, synthetic construct
  source 1..80: mol_type = other DNA
aattcagcctgggtgcctggaatcctcaaagtacactcctggtttccatccactggctcctggttttggtgtatcttctg

SEQ ID NO: 41941 - DNA, 80 bp, synthetic construct
  source 1..80: mol_type = other DNA
atgcgtctgtgatagctgagggacttggggctccgaaacaacttcccacactgactgcagctgttagtcagcttgggatt

SEQ ID NO: 41942 - DNA, 80 bp, synthetic construct; identical to SEQ ID NO: 11328
  source 1..80: mol_type = other DNA

SEQ ID NO: 41943 - DNA, 80 bp, synthetic construct
  source 1..80: mol_type = other DNA
ggttaggagttcgaaaccagcctgaccaacatggtgaaaccctgtctctactacaaatacaaaaattagctgggcgtcat

SEQ ID NO: 41944 - DNA, 80 bp, synthetic construct
  source 1..80: mol_type = other DNA
aagaagaagaagaaggagaaggagaagaaggagaaggagaagagaaggagaagaagaagaagaaggaagaagaagaagaa

SEQ ID NO: 41945 - DNA, 80 bp, synthetic construct
  source 1..80: mol_type = other DNA
ccacccaacacattcatccttacccttgggcctcataggctagaaataagaagaaaaaaagaaaaaattggcttttcaaa

SEQ ID NO: 41946 - DNA, 80 bp, synthetic construct
  source 1..80: mol_type = other DNA
tagacaatccacagacacccacataataatgcatcatgaacactgggccacttgagggtgaaaagaggtgttattaataa

SEQ ID NO: 41947 - DNA, 80 bp, synthetic construct; identical to SEQ ID NO: 11329
  source 1..80: mol_type = other DNA

SEQ ID NO: 41948 - DNA, 80 bp, synthetic construct
  source 1..80: mol_type = other DNA
ctggccaacatggtgaaaccctgtctctactaaaaatacaaaaattatctggacacggtggcacatgcctgtagtcccag

SEQ ID NO: 41949 - DNA, 80 bp, synthetic construct
  source 1..80: mol_type = other DNA
tcaacttgaagtcaagggacttgagcctatgatattaagctctctttcaactccaagtctgaccaggctggacagaggta

SEQ ID NO: 41950 - DNA, 80 bp, synthetic construct
  source 1..80: mol_type = other DNA
cttgctcaagcttggtgattagctctggcttatgcagaaagattctggctgatgtgtgggaatgagaaagagttgagttg

SEQ ID NO: 41951 - DNA, 80 bp, synthetic construct; identical to SEQ ID NO: 11330
  source 1..80: mol_type = other DNA

SEQ ID NO: 41952 - DNA, 80 bp, synthetic construct
  source 1..80: mol_type = other DNA
cccagcctcttacccacagatgttagattcttaaaggtttccgacataacatcctggtaaaggaccctctggctggcatc

SEQ ID NO: 41953 - DNA, 80 bp, synthetic construct
  source 1..80: mol_type = other DNA
ttaaaacctaagagaaagataaaaccatggaaggaagagagaaatattaaaagacagacacaaggccagcaactgtgaag

SEQ ID NO: 41954 - DNA, 80 bp, synthetic construct
  source 1..80: mol_type = other DNA
acctggtctctgctaaaaacacaaaaattagctgggcatggtggcgcatgcctgtaatcccagctactcaggaggctgag

SEQ ID NO: 41955 - DNA, 80 bp, synthetic construct
  source 1..80: mol_type = other DNA
aaaaggaaaggaaagatgaagagaaagggagaaagataagatgtgggggagaggaaagaggatatgcagatatgcagaat

SEQ ID NO: 41956 - DNA, 80 bp, synthetic construct; identical to SEQ ID NO: 11331
  source 1..80: mol_type = other DNA

SEQ ID NO: 41957 - DNA, 80 bp, synthetic construct
  source 1..80: mol_type = other DNA
agcgtcttctgtacaggttcgattggcttcagctgttcaaacatcttctcttctgtggtgtctctttctagctttatcca

SEQ ID NO: 41958 - DNA, 80 bp, synthetic construct
  source 1..80: mol_type = other DNA
atgtatctgctccaagaggctgtcttccttttttgttctgctgtccaaattctcctcttccacaattgagaacaattttg

SEQ ID NO: 41959 - DNA, 80 bp, synthetic construct
  source 1..80: mol_type = other DNA
gagggagggtaagaaacagcttccttatttggtcagggaatgccagcagttactaaacccctacagtgtgccactggatg

SEQ ID NO: 41960 - DNA, 80 bp, synthetic construct; identical to SEQ ID NO: 11332
  source 1..80: mol_type = other DNA

SEQ ID NO: 41961 - DNA, 80 bp, synthetic construct
  source 1..80: mol_type = other DNA
caaccatggttcaaaaatattaaatgaaaaattccggaggacaggcacagtggctcacacctgtaatcccagcattttgg

SEQ ID NO: 41962 - DNA, 80 bp, synthetic construct
  source 1..80: mol_type = other DNA
cttgaaccctggaggtggacgttgccatgagccaagactgcgccactgcactccagcctgggacatagagcgagactccg

SEQ ID NO: 41963 - DNA, 80 bp, synthetic construct
  source 1..80: mol_type = other DNA
gttccttagtagctagccatctcagttaccaggttgactactgtagtatagcagttgcctgtgctcaagaatgccttatt

SEQ ID NO: 41964 - DNA, 80 bp, synthetic construct; identical to SEQ ID NO: 11333
  source 1..80: mol_type = other DNA

SEQ ID NO: 41965 - DNA, 80 bp, synthetic construct
  source 1..80: mol_type = other DNA
ctggccaacatggtgaaaccccgtctctactgaaaatacaaaaattagctgggcgtggtggcacgctgtagtcccagctg

SEQ ID NO: 41966 - DNA, 80 bp, synthetic construct
  source 1..80: mol_type = other DNA
ggataaggggaaccactgtatatacagatctttgtgaagaatactgctaacaacccaagagcaatcacttattcagggct

SEQ ID NO: 41967 - DNA, 80 bp, synthetic construct
  source 1..80: mol_type = other DNA
actattttttcctttcactttttgagaagtgttaatagaactgaaaataccagcaaggaaaaacgccctcgaggaataga

SEQ ID NO: 41968 - DNA, 80 bp, synthetic construct; identical to SEQ ID NO: 11334
  source 1..80: mol_type = other DNA

SEQ ID NO: 41969 - DNA, 80 bp, synthetic construct
  source 1..80: mol_type = other DNA
tgtaatcgtagctactagggaggctgaggcaggagaatcgcttgaacccgggaggcagaggttgcggtgagcggagatcg

SEQ ID NO: 41970 - DNA, 80 bp, synthetic construct
  source 1..80: mol_type = other DNA
gatggcatttgctggaggcggtaggcagaggccctaagtgtggattctaacccccgtggggactgaatctctgcggctgt

SEQ ID NO: 41971 - DNA, 80 bp, synthetic construct
  source 1..80: mol_type = other DNA
ccacccttccagaatgtaaatcctctgagggaatgtgtcgtcgccatctttcagtcctttgagtgcacccagtctctctc

SEQ ID NO: 41972 - DNA, 80 bp, synthetic construct; identical to SEQ ID NO: 11335
  source 1..80: mol_type = other DNA

SEQ ID NO: 41973 - DNA, 80 bp, synthetic construct
  source 1..80: mol_type = other DNA
ttgctcactgtcgcctggcaaagcaggcgcttgttagcacccactgaatgcgcttatgtgctcagaaacggtcccattgg

SEQ ID NO: 41974 - DNA, 80 bp, synthetic construct
  source 1..80: mol_type = other DNA
gggcacctggatacaccccagactaacccacgtttccccggaggaccccagaggttggaagcccctccaagattaggggc

SEQ ID NO: 41975 - DNA, 80 bp, synthetic construct
  source 1..80: mol_type = other DNA
cgcgatttaggggcacagggtctcccggggaccagcggctggagcgctccggccgagcacccgcagtcccggcgccgcgg

SEQ ID NO: 41976 - DNA, 80 bp, synthetic construct; identical to SEQ ID NO: 11336
  source 1..80: mol_type = other DNA

SEQ ID NO: 41977 - DNA, 80 bp, synthetic construct
  source 1..80: mol_type = other DNA
tgtaaccccagctactcaggaggctgaggcaggagaatcgcttgaatccgggaggtggaggttgcagtgagcccagatca

SEQ ID NO: 41978 - DNA, 80 bp, synthetic construct
  source 1..80: mol_type = other DNA
gcactttgggaggctgagggggcggatcacctgaggtcagaagttcgacctcagcgtggccaatatggcgaaaccttgtc

SEQ ID NO: 41979 - DNA, 80 bp, synthetic construct
  source 1..80: mol_type = other DNA
tcctggaatgctaacactttgggaagctgaggagggaggattgctggaggccaggagttcaagaccaacctgggcaacat

SEQ ID NO: 41980 - DNA, 80 bp, synthetic construct; identical to SEQ ID NO: 11337
  source 1..80: mol_type = other DNA

SEQ ID NO: 41981 - DNA, 80 bp, synthetic construct
  source 1..80: mol_type = other DNA
ttaatttttttttttttttttttttttttagtacacacagggtttcaccatgttggtcaggctggtctcaaactcctgac

SEQ ID NO: 41982 - DNA, 80 bp, synthetic construct
  source 1..80: mol_type = other DNA
tacatgtgccatgttggtgtgctgcacccataactcatcatttaacattagatatatctcctaatgctatccctccccac

SEQ ID NO: 41983 - DNA, 80 bp, synthetic construct
  source 1..80: mol_type = other DNA
aagcgattctcctgcctcagcctccctagtagctgggattacaggcatgcaccaccatgcttggctaattttgtattttt

SEQ ID NO: 41984 - DNA, 80 bp, synthetic construct; identical to SEQ ID NO: 11338
  source 1..80: mol_type = other DNA

SEQ ID NO: 41985 - DNA, 80 bp, synthetic construct
  source 1..80: mol_type = other DNA
tggtctcgaactcctgacctcaggtgatccgctcgcctcggcctcccaaagtgctgggattacaagcgtaagccaccgtg

SEQ ID NO: 41986 - DNA, 80 bp, synthetic construct
  source 1..80: mol_type = other DNA
atcatctgggagttgagaccttgagggtataaggaggtagcatgtcaatgcttgttaagaaagaatggcaacaactgtgc

SEQ ID NO: 41987 - DNA, 80 bp, synthetic construct
  source 1..80: mol_type = other DNA
gtcctctaggtaagatttccctgagacaaagtactatgggaaatcaagtgcatattcagcctcttagtactctgggttgg

SEQ ID NO: 41988 - DNA, 80 bp, synthetic construct; identical to SEQ ID NO: 11339
  source 1..80: mol_type = other DNA

SEQ ID NO: 41989 - DNA, 80 bp, synthetic construct
  source 1..80: mol_type = other DNA
agaaactgaaagtaaatgcgtgactttaatggaacagaacttgtttctccctccatgctcccaatccctttagatccctt

SEQ ID NO: 41990 - DNA, 80 bp, synthetic construct
  source 1..80: mol_type = other DNA
actaatcaaagtacagatgctcttcaatttaaaatggggttatgtttcaataaaaccattgtaactgaaaaatattttca

SEQ ID NO: 41991 - DNA, 80 bp, synthetic construct
  source 1..80: mol_type = other DNA
atacagtacagtatagagtacagtatcagttgttaccatcataattgtgtggctgatgggagctgcagctcactactgct

SEQ ID NO: 41992 - DNA, 80 bp, synthetic construct; identical to SEQ ID NO: 11340
  source 1..80: mol_type = other DNA

SEQ ID NO: 41993 - DNA, 80 bp, synthetic construct
  source 1..80: mol_type = other DNA
gcaggtaacttccagaagctgagagcaacccttggttgacagctagcaaggaaacaggaacctaattcctataatcactt

SEQ ID NO: 41994 - DNA, 80 bp, synthetic construct
  source 1..80: mol_type = other DNA
ataattatcatccatgttaaaaacaccatcccagttagaaacctgtgagcctctccccaagcagaacccatttatcctac

SEQ ID NO: 41995 - DNA, 80 bp, synthetic construct
  source 1..80: mol_type = other DNA
ggtccccaggataagccacatttatccctggaagcagcagcagaagtgacagtatgtttgtggggtccacttgtaacctg

SEQ ID NO: 41996 - DNA, 80 bp, synthetic construct
  source 1..80: mol_type = other DNA
tccagttgctgaaagccaaaggtgacaatggggaggtctcaacctgaggaggaggccaaaagagtccggtcttctgttct

SEQ ID NO: 41997 - DNA, 80 bp, synthetic construct; identical to SEQ ID NO: 11341
  source 1..80: mol_type = other DNA

SEQ ID NO: 41998 - DNA, 80 bp, synthetic construct
  source 1..80: mol_type = other DNA
caaaattagccgggcatggtggtgcattcctgtaatcccagctactcaggaggctgaggcaggagaatctcttgagcctg

SEQ ID NO: 41999 - DNA, 80 bp, synthetic construct
  source 1..80: mol_type = other DNA
atgttccacattcagtttcctctattattaatgtcttattttattatacatttgtgacaggttatgaaacaatattgata

SEQ ID NO: 42000 - DNA, 80 bp, synthetic construct
  source 1..80: mol_type = other DNA
tggtatttcttgaggagtactagtgaggcatattgtaaaatgtcccttaatttgagtgtggttgacagggctataggttt

SEQ ID NO: 42001 - DNA, 80 bp, synthetic construct; identical to SEQ ID NO: 11342
  source 1..80: mol_type = other DNA

SEQ ID NO: 42002 - DNA, 80 bp, synthetic construct
  source 1..80: mol_type = other DNA
caaattgagcaatcagaaaaggctgggatgtctgtggtctgagttgggcagaggtggctgaccctggaacctgacatcaa

SEQ ID NO: 42003 - DNA, 80 bp, synthetic construct
  source 1..80: mol_type = other DNA
accctgggaaaactaaaaagtatactgttttttctttaactccctattcctttcctcttctgagggttgttgttgttgtt

SEQ ID NO: 42004 - DNA, 80 bp, synthetic construct
  source 1..80: mol_type = other DNA
tggcacgatttcggctcactgcaacctctgcctccgggtttcaagccattctcctgcctcagcctcctgagtagctagga

SEQ ID NO: 42005 - DNA, 80 bp, synthetic construct; identical to SEQ ID NO: 11343
  source 1..80: mol_type = other DNA

SEQ ID NO: 42006 - DNA, 80 bp, synthetic construct
  source 1..80: mol_type = other DNA
tgccaccgtgcctggctgatttctgtatttttagtagagacaggatttcaccatgttggtcaggctggtctcttactcct

SEQ ID NO: 42007 - DNA, 80 bp, synthetic construct
  source 1..80: mol_type = other DNA
taaggctcctccaggttgactttgttttcaatgactgtcttagtatgttgagtattactataacagaataacttgaaact

SEQ ID NO: 42008 - DNA, 80 bp, synthetic construct
  source 1..80: mol_type = other DNA
acatggggagacagggaagcaagagagagtctaggaaaccaaacttgcttttataacaacctgctttttggtaactaacc

SEQ ID NO: 42009 - DNA, 80 bp, synthetic construct
  source 1..80: mol_type = other DNA
gagaccagcctcaccaacatggataaaccctgtctctactaaaaatagaaaattagccaggtgtgatggcacatgcctgt

SEQ ID NO: 42010 - DNA, 80 bp, synthetic construct; identical to SEQ ID NO: 11344
  source 1..80: mol_type = other DNA

SEQ ID NO: 42011 - DNA, 80 bp, synthetic construct
  source 1..80: mol_type = other DNA
gatgggtgtgtttaaggggcaatgattgtgatggagtctcaaatatttcctgacagattttctgatgtgtaacaattttc

SEQ ID NO: 42012 - DNA, 80 bp, synthetic construct
  source 1..80: mol_type = other DNA
gctgaggcaggagaatcccgtgaaccagggaggcagaagtttgcagtgagccgagatcgcgccattacactccagcctgg

SEQ ID NO: 42013 - DNA, 80 bp, synthetic construct; identical to SEQ ID NO: 11345
  source 1..80: mol_type = other DNA

SEQ ID NO: 42014 - DNA, 80 bp, synthetic construct
  source 1..80: mol_type = other DNA
ctttgtatttttagtagagactgagtttcacctgttagccaggatggtctcgatctcctgacctcgtgatccgccctcct

SEQ ID NO: 42015 - DNA, 80 bp, synthetic construct
  source 1..80: mol_type = other DNA
cgtctgcctcagcctccagagtagctgggactacaggtgcccgccaccacgcccggctaatttttttgtatttttagtag

SEQ ID NO: 42016 - DNA, 80 bp, synthetic construct
  source 1..80: mol_type = other DNA
gcccgatcttggcccaccacaacctctgcctcctgggttcaagtcaagcgattctcctgcctcagccttccgagtagctg

SEQ ID NO: 42017 - DNA, 80 bp, synthetic construct; identical to SEQ ID NO: 11346
  source 1..80: mol_type = other DNA

SEQ ID NO: 42018 - DNA, 80 bp, synthetic construct
  source 1..80: mol_type = other DNA
ctaattattcttatttattttctcatgtgaactttataatctacttgtctagcttgagaaaaaaagtagttgttggcatt

SEQ ID NO: 42019 - DNA, 80 bp, synthetic construct
  source 1..80: mol_type = other DNA
taactcaggaatgggaaaccaaacattgtatgttctcactgatatgtagaagctgagttatgaagacacaaaggcatatg

SEQ ID NO: 42020 - DNA, 80 bp, synthetic construct
  source 1..80: mol_type = other DNA
ccaagaacttacggaaaagaaaaaaaaaagttcttcattttttttttttttttttttttgaaatggactctcattctgtc

SEQ ID NO: 42021 - DNA, 80 bp, synthetic construct
  source 1..80: mol_type = other DNA
cacttggccaggctggtctcaaactcctgatctcaggtgatcctccaacctcagcctgccaaagtgctgagattacaggc

SEQ ID NO: 42022 - DNA, 80 bp, synthetic construct; identical to SEQ ID NO: 11347
  source 1..80: mol_type = other DNA

SEQ ID NO: 42023 - DNA, 80 bp, synthetic construct
  source 1..80: mol_type = other DNA
gcaccaccatacccggctaattttgtatttttaatagaggcaggttttcaccacgttggccaggctggtcttgaattcct

SEQ ID NO: 42024 - DNA, 80 bp, synthetic construct
  source 1..80: mol_type = other DNA
ctctgtcagccaggctggagtgcagtggcacgatctcggctcactgcaagctccgcctcccaggttgaagcgattctcct

SEQ ID NO: 42025 - DNA, 80 bp, synthetic construct
  source 1..80: mol_type = other DNA
acaggtgtgagtcaccgcgcccggccgcaattttttttttttttttttttttttttttttttttttttttttttgagaag

SEQ ID NO: 42026 - DNA, 80 bp, synthetic construct
  source 1..80: mol_type = other DNA
gagcaatttctgtcccttttaagggatcacaactctaagggggtgcgcttgagagggccgtgatcgattgagcaagcagg

SEQ ID NO: 42027 - DNA, 80 bp, synthetic construct; identical to SEQ ID NO: 11348
  source 1..80: mol_type = other DNA

SEQ ID NO: 42028 - DNA, 80 bp, synthetic construct
  source 1..80: mol_type = other DNA
tgatggaatttcctatataggtttttaggacactttttctcttctcttgctcattttaagattttttttcctttacattg

SEQ ID NO: 42029 - DNA, 80 bp, synthetic construct
  source 1..80: mol_type = other DNA
cccttcattctcccttaggaatacctatgattcatgggtacagatgttttacataaccccatacttcctgaaggctttgt

SEQ ID NO: 42030 - DNA, 80 bp, synthetic construct
  source 1..80: mol_type = other DNA
ttaattttttttttttttttcttttgagaaggagtctcgctctgtcgcccaggctggagtgcagtggcgcaatctcggct

SEQ ID NO: 42031 - DNA, 80 bp, synthetic construct; identical to SEQ ID NO: 11349
  source 1..80: mol_type = other DNA

SEQ ID NO: 42032 - DNA, 80 bp, synthetic construct
  source 1..80: mol_type = other DNA
ttaggatctattgctagaaagttagtgtaatgttttggggatgtcataacactcttttttcagagtatgttttcaaaaca

SEQ ID NO: 42033 - DNA, 80 bp, synthetic construct
  source 1..80: mol_type = other DNA
gtgactataatgtatgttgtttaaggtcctttgcatttggttgtgaatgctttcagtggcaaagacgctgtagttgtccc

SEQ ID NO: 42034 - DNA, 80 bp, synthetic construct
  source 1..80: mol_type = other DNA
ttccactcatgtgcccttttgtcaactgatttgtattgaggtgcgtggttcagcctccagaacagtaggtgggcttatgc

SEQ ID NO: 42035 - DNA, 80 bp, synthetic construct; identical to SEQ ID NO: 11350
  source 1..80: mol_type = other DNA

SEQ ID NO: 42036 - DNA, 80 bp, synthetic construct
  source 1..80: mol_type = other DNA
actcattaaagatgtcttctcctcagctcaccatttaaatgtctttggtgcagagcatcctccctcaaccccaaacacat

SEQ ID NO: 42037 - DNA, 80 bp, synthetic construct
  source 1..80: mol_type = other DNA
accacgcctggctaattgtttttgtagttttagtagagacagggtttctccatgttggtcaggctggtctcgaactcctg

SEQ ID NO: 42038 - DNA, 80 bp, synthetic construct
  source 1..80: mol_type = other DNA
gcctggcccaaatggccacactgccagtggaaacacagtcacccctgatagccctagaaaggctcttctctggcacacgt

SEQ ID NO: 42039 - DNA, 80 bp, synthetic construct; identical to SEQ ID NO: 11351
  source 1..80: mol_type = other DNA

SEQ ID NO: 42040 - DNA, 80 bp, synthetic construct
  source 1..80: mol_type = other DNA
aggagcttctgtgatgtgaatatacaaaggttggggttccctgggaaggacacagtcccctgatggctacactcctaata

SEQ ID NO: 42041 - DNA, 80 bp, synthetic construct
  source 1..80: mol_type = other DNA
ggtcttccttagggacgacgggagtcaaaacactcctatcttacctttcaatgaaataccaagtctctcaaggttcctag

SEQ ID NO: 42042 - DNA, 80 bp, synthetic construct
  source 1..80: mol_type = other DNA
atctctgataaggtttgggtgtttgtcccctccaaatctcatgttgaaagatccccagtgttggagctggggcctagtgg

SEQ ID NO: 42043 - DNA, 80 bp, synthetic construct; identical to SEQ ID NO: 11352
  source 1..80: mol_type = other DNA

SEQ ID NO: 42044 - DNA, 80 bp, synthetic construct
  source 1..80: mol_type = other DNA
cttgatcttcactgctttaggcagccttttaccctactttgtagttggagcttcaggggcttaacatcttaaaagtttta

SEQ ID NO: 42045 - DNA, 80 bp, synthetic construct
  source 1..80: mol_type = other DNA
tacaggcgcgcaacaccatgctcggctaatttttgttgttttagtagaaacagtgtttcaccatgttggtcaggctggtc

SEQ ID NO: 42046 - DNA, 80 bp, synthetic construct
  source 1..80: mol_type = other DNA
aataggtaatttgggtaatttcattttgaactctttggctaaatattttatgtacatattgtctcagcaatcaggaatta

SEQ ID NO: 42047 - DNA, 80 bp, synthetic construct; identical to SEQ ID NO: 11353
  source 1..80: mol_type = other DNA

SEQ ID NO: 42048 - DNA, 80 bp, synthetic construct
  source 1..80: mol_type = other DNA
gctaatttttgtatttttggtagaggcggggtttcaccatgttggccaggctggtcttgaacccctgacctcaggtgatc

SEQ ID NO: 42049 - DNA, 80 bp, synthetic construct
  source 1..80: mol_type = other DNA
ctccctccaacctttgataaccattaacctgttttctgtccccatagatctgctttttccagaatggtatatgaattgag

SEQ ID NO: 42050 - DNA, 80 bp, synthetic construct
  source 1..80: mol_type = other DNA
gagtgcaatggcgcgatattagctcgctgcaacctctgcctcccaggttcaaatgattcttctgcttcagcttcctgagt

SEQ ID NO: 42051 - DNA, 80 bp, synthetic construct; identical to SEQ ID NO: 11354
  source 1..80: mol_type = other DNA

SEQ ID NO: 42052 - DNA, 80 bp, synthetic construct
  source 1..80: mol_type = other DNA
attctcctgcctcagcctcccgaggagctgggactacagttgctcgccaccacgcctagctaattttttctttttgtatt

SEQ ID NO: 42053 - DNA, 80 bp, synthetic construct
  source 1..80: mol_type = other DNA
ccacagtttgcttagtcttgcatggctgaaagatatcttggttgtttacagtttttagtgaacatatgtaaagctgctat

SEQ ID NO: 42054 - DNA, 80 bp, synthetic construct
  source 1..80: mol_type = other DNA
gtgggaattcttgttgctctgtatattttcagcattttttattgtaagtttaaaaaattttagctactctaatagtgtag

SEQ ID NO: 42055 - DNA, 80 bp, synthetic construct; identical to SEQ ID NO: 11355
  source 1..80: mol_type = other DNA

SEQ ID NO: 42056 - DNA, 80 bp, synthetic construct
  source 1..80: mol_type = other DNA
ttggtggtgtctgttgagatctttcacccacttctaaaatcaagatttttttccccaattattgtgttttaattttgttc

SEQ ID NO: 42057 - DNA, 80 bp, synthetic construct
  source 1..80: mol_type = other DNA
tttcatggattgtatttttggtgttttatctaaaaactcaaactcaaggttaagattttctcctttatattcttccagaa

SEQ ID NO: 42058 - DNA, 80 bp, synthetic construct
  source 1..80: mol_type = other DNA
tgctcactgcaacctctgcctcccaggttcaagtgattcttctacctcagcctcccgagtagctgggattacaggcatga

SEQ ID NO: 42059 - DNA, 80 bp, synthetic construct; identical to SEQ ID NO: 11356
  source 1..80: mol_type = other DNA

SEQ ID NO: 42060 - DNA, 80 bp, synthetic construct
  source 1..80: mol_type = other DNA
ctttgatccgtaggttatttagaaggaagatttaaaattttcaatacttttttgcccctagacaacttattattgatttc

SEQ ID NO: 42061 - DNA, 80 bp, synthetic construct
  source 1..80: mol_type = other DNA
taaatgtcagatcaagacggttgatagtgttgttcatttgtatttttaaaaaactaagaaaaagctgggcgcggtggctc

SEQ ID NO: 42062 - DNA, 80 bp, synthetic construct
  source 1..80: mol_type = other DNA
ggctgaggcaggataatcgcttgaacccaggaggcagaggttgcagtgagcggagattgtgccattgcactccagcctgg

SEQ ID NO: 42063 - DNA, 80 bp, synthetic construct; identical to SEQ ID NO: 11357
  source 1..80: mol_type = other DNA

SEQ ID NO: 42064 - DNA, 80 bp, synthetic construct
  source 1..80: mol_type = other DNA
tctcatgtatgtaacgtgtcatttttctctgattattctcacgattttctgtgaccataggctgctcagggctggacttg

SEQ ID NO: 42065 - DNA, 80 bp, synthetic construct
  source 1..80: mol_type = other DNA
cacacaacttctaacagggcccttctcgtttttctctcccccctggttccttccactctcccccttctcttatgatccat

SEQ ID NO: 42066 - DNA, 80 bp, synthetic construct
  source 1..80: mol_type = other DNA
ctaggtcatgtggtagcaatggtttgggggtggatgagccccagatatgatcccactgttttggcctggaggtatctctt

SEQ ID NO: 42067 - DNA, 80 bp, synthetic construct; identical to SEQ ID NO: 11358
  source 1..80: mol_type = other DNA

SEQ ID NO: 42068 - DNA, 80 bp, synthetic construct
  source 1..80: mol_type = other DNA
gcaagatctggctctagaattcttatggcaaaatagctgtcatagaatccaactagaatgagagtccagggcctgggttg

SEQ ID NO: 42069 - DNA, 80 bp, synthetic construct
  source 1..80: mol_type = other DNA
aaagaggctgaaaggcccctctgggaattctcaaatctcttttcatagcagtaacttggacctagacagcaaagcctgaa

SEQ ID NO: 42070 - DNA, 80 bp, synthetic construct
  source 1..80: mol_type = other DNA
ctgtctccccactgccccagatcagaagcatgtttccttatcttgttttccacacactccttttctttttctgtcttgtg

SEQ ID NO: 42071 - DNA, 80 bp, synthetic construct
  source 1..80: mol_type = other DNA
catggtgaaaccccatctctacaaaaaaaatcaaaataaaaatacaaaatttagccgggcgtggtggcatgtgcctataa

SEQ ID NO: 42072 - DNA, 80 bp, synthetic construct; identical to SEQ ID NO: 11359
  source 1..80: mol_type = other DNA

SEQ ID NO: 42073 - DNA, 80 bp, synthetic construct
  source 1..80: mol_type = other DNA
tatgccccagcaaaaatctttttttggctcacacctgccctccttcatccagccaactgacatatttgctgaggtcttgc

SEQ ID NO: 42074 - DNA, 80 bp, synthetic construct
  source 1..80: mol_type = other DNA
cacctctctattgacacctgggagactctatcgctactttgaataaagcactgattttcagcatttattctgtatccaca

SEQ ID NO: 42075 - DNA, 80 bp, synthetic construct
  source 1..80: mol_type = other DNA
gttggttgcaaggtggcttccacacccccaagtttatttcaagtagcagaaacacttgcttagaaaacaagtactttggg

SEQ ID NO: 42076 - DNA, 80 bp, synthetic construct; identical to SEQ ID NO: 11360
  source 1..80: mol_type = other DNA

SEQ ID NO: 42077 - DNA, 80 bp, synthetic construct
  source 1..80: mol_type = other DNA
gaaacatcgaagaaggcaaatgtgggtgcccttaaagacaagagaattctctgacctcaaatttcatgtagcagctgtaa

SEQ ID NO: 42078 - DNA, 80 bp, synthetic construct
  source 1..80: mol_type = other DNA
aaaaaccctgaagtcttagaaatccataaagaaaaaagatattcatgtctctgataaagaaaagaaatgccagcaatcca

SEQ ID NO: 42079 - DNA, 80 bp, synthetic construct
  source 1..80: mol_type = other DNA
actaacgggccagtgaagagaaacacttttcgtctgcttgtactgaaataaggctattacaataaatcatctctgtggtt

SEQ ID NO: 42080 - DNA, 80 bp, synthetic construct
  source 1..80: mol_type = other DNA
cttgcgcttctgccatcctgtgtgtccctgtgatggaattttggcccagctagggatggcaagaggccaggtcatcgcag

SEQ ID NO: 42081 - DNA, 80 bp, synthetic construct; identical to SEQ ID NO: 11361
  source 1..80: mol_type = other DNA

SEQ ID NO: 42082 - DNA, 80 bp, synthetic construct
  source 1..80: mol_type = other DNA
ggtataaatgagaatgggtgataatttccctttctctgagctggggagtcccattgcaagggtgggaatagaaatgtcca

SEQ ID NO: 42083 - DNA, 80 bp, synthetic construct
  source 1..80: mol_type = other DNA
gtgctgagcattcagttaaaacgggactcaagggttcctgcattgtcctctgccttaattgcatttgaaaatatattttg

SEQ ID NO: 42084 - DNA, 80 bp, synthetic construct
  source 1..80: mol_type = other DNA
aagagtgggtgttactgagtgaagggtacagtgaaggtcactttactcttctgtctacttctgtgtttgcttaaaatatt

SEQ ID NO: 42085 - DNA, 80 bp, synthetic construct
  source 1..80: mol_type = other DNA
gtcaaaccacagggacaaaatgtttttagatgtctccaaattcctcacttccctcctctaaattcaggtgggtcacttca

SEQ ID NO: 42086 - DNA, 80 bp, synthetic construct; identical to SEQ ID NO: 11362
  source 1..80: mol_type = other DNA

SEQ ID NO: 42087 - DNA, 80 bp, synthetic construct
  source 1..80: mol_type = other DNA
gacccagagtcaatgccaataaacttggctaggacatagtacccagtcatttaatcaaaacctaatctagatgttgctgt

SEQ ID NO: 42088 - DNA, 80 bp, synthetic construct
  source 1..80: mol_type = other DNA
cagtttcccagaaaagaagaaattctgtcttaagactaccatatcaacttctgtctgcattttcagcctgctggcgtatc

SEQ ID NO: 42089 - DNA, 80 bp, synthetic construct
  source 1..80: mol_type = other DNA
tgtttctctgttgaatccagaataatacagattttggtacttagagtgattctagaggaagagaatccttttaaaacgtt

SEQ ID NO: 42090 - DNA, 80 bp, synthetic construct
  source 1..80: mol_type = other DNA
agtaattgggatctcattcactttcagccaccatttgccctagatgtccttcactcaaaacaagtttttagcttgtgttt

SEQ ID NO: 42091 - DNA, 80 bp, synthetic construct; identical to SEQ ID NO: 11363
  source 1..80: mol_type = other DNA

SEQ ID NO: 42092 - DNA, 80 bp, synthetic construct
  source 1..80: mol_type = other DNA
atacaccttgcccttattcaaatggttatgaacaagtggtcttccattttctattgccgctgtaattatttgttcctgat

SEQ ID NO: 42093 - DNA, 80 bp, synthetic construct
  source 1..80: mol_type = other DNA
tgttcatttcaatttgtaacttttttctgaattcatccccacaaggtgagctggaaaactgcaaccataaccaaagctag

SEQ ID NO: 42094 - DNA, 80 bp, synthetic construct
  source 1..80: mol_type = other DNA
gaagaacactgcgggcacaaagaaaaggaaaagtatgtggagctttgctgtgtatctcttagttcattctactcactaga

SEQ ID NO: 42095 - DNA, 80 bp, synthetic construct; identical to SEQ ID NO: 11364
  source 1..80: mol_type = other DNA

SEQ ID NO: 42096 - DNA, 80 bp, synthetic construct
  source 1..80: mol_type = other DNA
tcattacaatagtagcaaacacaactctgagagggaagttaagatgctaatgagacgtaagatgtgtgtgctgatatgta

SEQ ID NO: 42097 - DNA, 80 bp, synthetic construct
  source 1..80: mol_type = other DNA
agcagctgctctgatcagctgtcagagtgtactttcactttgcaataaattctcttgctgacttttactttggacttgct

SEQ ID NO: 42098 - DNA, 80 bp, synthetic construct
  source 1..80: mol_type = other DNA
gcttggcctcgggtcactaagcatagcccatggtaggaggttctgagaatgagtggcactgccttgtgcaacggtcccca

SEQ ID NO: 42099 - DNA, 80 bp, synthetic construct; identical to SEQ ID NO: 11365
  source 1..80: mol_type = other DNA

SEQ ID NO: 42100 - DNA, 80 bp, synthetic construct
  source 1..80: mol_type = other DNA
gtcctcagaatggtttttcctttttgcaggtggtttattgaaaaaggaaaggacagaaaagaaaaagcaggagaaggtgt

SEQ ID NO: 42101 - DNA, 80 bp, synthetic construct
  source 1..80: mol_type = other DNA
gttttgtattgatggaaattaaaaaaaaattatattacataattttatgctttttgaaaatagctaataaacttttatgg

SEQ ID NO: 42102 - DNA, 80 bp, synthetic construct
  source 1..80: mol_type = other DNA
gaaaccacactcttccttgcccagtgagggttggaaaattggatgactaaactcgacgaagatagcaaataacatttgtt

SEQ ID NO: 42103 - DNA, 80 bp, synthetic construct; identical to SEQ ID NO: 11366
  source 1..80: mol_type = other DNA

SEQ ID NO: 42104 - DNA, 80 bp, synthetic construct
  source 1..80: mol_type = other DNA
gaaagtcaaggccttggtgcggaaacctaagattctgcaaactggaacagggttatcctatgggtgccctttagaactct

SEQ ID NO: 42105 - DNA, 80 bp, synthetic construct
  source 1..80: mol_type = other DNA
tgggattggaatttaagggtgtttgatcaaagggccagaatcaagctggataaattaaaaaaaaacacctttggcttggg

SEQ ID NO: 42106 - DNA, 80 bp, synthetic construct
  source 1..80: mol_type = other DNA
ttagttgtcctggaacatgtagaggatggacaatgaggctgagggaagtgggtgtgtgggatggagacatcatgtgaacc

SEQ ID NO: 42107 - DNA, 80 bp, synthetic construct; identical to SEQ ID NO: 11367
  source 1..80: mol_type = other DNA

SEQ ID NO: 42108 - DNA, 80 bp, synthetic construct
  source 1..80: mol_type = other DNA
ggctgagggtgtttaactcaatacaaagtcatgatcccattctcaattcctaaacgtcaaccaagtttcagattcagatc

SEQ ID NO: 42109 - DNA, 80 bp, synthetic construct
  source 1..80: mol_type = other DNA
agtgttgacattgggtgtgagctgatattgatgcctacaggcctacagcaccattatgtccctaccacagtggggcttac

SEQ ID NO: 42110 - DNA, 80 bp, synthetic construct
  source 1..80: mol_type = other DNA
cattgtctgaaagccaaagggaaacctctgcaactgacttcatcctggccaaataaaaaatgatattgagtcccagggtg

SEQ ID NO: 42111 - DNA, 80 bp, synthetic construct; identical to SEQ ID NO: 11368
  source 1..80: mol_type = other DNA

SEQ ID NO: 42112 - DNA, 80 bp, synthetic construct
  source 1..80: mol_type = other DNA
gtgggatccacaacacatttattgataattggcctcagggttattgtaactgacctgccctctatagtatagtcttaaga

SEQ ID NO: 42113 - DNA, 80 bp, synthetic construct
  source 1..80: mol_type = other DNA
tgctctccagcagatggaagataaaccacacagagattcaggagtggccactgtggtgaagttttattcatccagtggtt

SEQ ID NO: 42114 - DNA, 80 bp, synthetic construct
  source 1..80: mol_type = other DNA
ccacatctattgctttgacctacactctaggagaaataggaggggacttgcttcaattaggcctgctgaggaaaggacac

SEQ ID NO: 42115 - DNA, 80 bp, synthetic construct
  source 1..80: mol_type = other DNA
tatgcccctgttagaagcaacttttggtatgttactggccttgataagatagaatccttgccatgggacatcaaacaacc

SEQ ID NO: 42116 - DNA, 80 bp, synthetic construct; identical to SEQ ID NO: 11369
  source 1..80: mol_type = other DNA

SEQ ID NO: 42117 - DNA, 80 bp, synthetic construct
  source 1..80: mol_type = other DNA
aatgatgtgcctcagtggggctatatttctttaggtgactaaagcaacactcgctgctaagtgattagttgagccacttc

SEQ ID NO: 42118 - DNA, 80 bp, synthetic construct
  source 1..80: mol_type = other DNA
gattcacaggcatggcattgctcttagcacactgtcttcctggtggaacccacttgacagggaagcaggtgcagcatttt

SEQ ID NO: 42119 - DNA, 80 bp, synthetic construct
  source 1..80: mol_type = other DNA
taaatcagagacatctctacagtgccgtgttctcagtaggaagaacatgtgggtccagaaactaaggagtgaaagtgggt

SEQ ID NO: 42120 - DNA, 80 bp, synthetic construct; identical to SEQ ID NO: 11370
  source 1..80: mol_type = other DNA

SEQ ID NO: 42121 - DNA, 80 bp, synthetic construct
  source 1..80: mol_type = other DNA
attgtccagcaaccaatcctgagggaatttgatttccaagggcccagaaacctcaggaaggaagatttgaaccatgctcc

SEQ ID NO: 42122 - DNA, 80 bp, synthetic construct
  source 1..80: mol_type = other DNA
gactcctctatggccttgctcaactctccttagattgcctgtggtctaggatgtgtccaacaaacctcctctcctgtccc

SEQ ID NO: 42123 - DNA, 80 bp, synthetic construct
  source 1..80: mol_type = other DNA
atttacacaccagtgacctcttacttttccagtttgtaaaatcctttttattatccaacttcttccacctgctccagttt

SEQ ID NO: 42124 - DNA, 80 bp, synthetic construct; identical to SEQ ID NO: 11371
  source 1..80: mol_type = other DNA

SEQ ID NO: 42125 - DNA, 80 bp, synthetic construct
  source 1..80: mol_type = other DNA
caagtaaagaacaggaagttattaacagagtctgagtaaaaagtgcctggtgtaattctgcggccaagacagtgactttg

SEQ ID NO: 42126 - DNA, 80 bp, synthetic construct
  source 1..80: mol_type = other DNA
tccttggctcattgacatctccatagattttcggtgtacaatgttcggtctgatgtgcaaggtaattccatcttgcaaag

SEQ ID NO: 42127 - DNA, 80 bp, synthetic construct
  source 1..80: mol_type = other DNA
aaaaatactgtagaagtacagaatagcagtgctatttagaatcatagtgatgtccaaatcatgtctaccacgtctcatta

SEQ ID NO: 42128 - DNA, 80 bp, synthetic construct; identical to SEQ ID NO: 11372
  source 1..80: mol_type = other DNA

SEQ ID NO: 42129 - DNA, 80 bp, synthetic construct
  source 1..80: mol_type = other DNA
ggtatttgcaagaaaaacttagagatactatagtatctcctttctctgtctcaaacttttttcccctcaatacccaaggc

SEQ ID NO: 42130 - DNA, 80 bp, synthetic construct
  source 1..80: mol_type = other DNA
ctctccactttgcagaggtgcaggttcattccctccctgtgagtgtggcctggacttaatgattcacttctatctgatgg

SEQ ID NO: 42131 - DNA, 80 bp, synthetic construct
  source 1..80: mol_type = other DNA
aaggaactgaggccttttccaatagccatgtgagtgagccatttttcatgcaaatccccagcccagttgagccctcagat

SEQ ID NO: 42132 - DNA, 80 bp, synthetic construct; identical to SEQ ID NO: 11373
  source 1..80: mol_type = other DNA

SEQ ID NO: 42133 - DNA, 80 bp, synthetic construct
  source 1..80: mol_type = other DNA
gcctggctaaaatttttgtatttttggtagagacaagggttttgccatgctgcctaggctgatctcgaactcatgaaatc

SEQ ID NO: 42134 - DNA, 80 bp, synthetic construct
  source 1..80: mol_type = other DNA
acaattattgctttatttgaacttcaatttccacctgtgtcccaattaaactcaaaagaaagacccaagcctccctctcc

SEQ ID NO: 42135 - DNA, 80 bp, synthetic construct; identical to SEQ ID NO: 11374
  source 1..80: mol_type = other DNA

SEQ ID NO: 42136 - DNA, 80 bp, synthetic construct
  source 1..80: mol_type = other DNA
cagctcctaaccgcgagtgatccgccagcctcggcctcccgaggtgccgggattgcagatggagtctcgttcactcagtg

SEQ ID NO: 42137 - DNA, 80 bp, synthetic construct
  source 1..80: mol_type = other DNA
tctgggatatgaggagcccctctgcctggctgcccagtgtggaaagtggggagcgtctctgcccggccgccatcccatct

SEQ ID NO: 42138 - DNA, 80 bp, synthetic construct
  source 1..80: mol_type = other DNA
ggtgaggagtgtctctgcccggccgctccgtctgagaagtgaggaaaccctctgcctggcaaccgccccgtctgagaagt

SEQ ID NO: 42139 - DNA, 80 bp, synthetic construct; identical to SEQ ID NO: 11375
  source 1..80: mol_type = other DNA

SEQ ID NO: 42140 - DNA, 80 bp, synthetic construct
  source 1..80: mol_type = other DNA
ccggccagccgccccgtccgggaggggggagggggggtcagccccctgcccggccagccgccccgtccgggagggaggtg

SEQ ID NO: 42141 - DNA, 80 bp, synthetic construct
  source 1..80: mol_type = other DNA
gtccgggagggaggtgggggggtcagccccccgcccggccagccgccccgtccgggagggaggtggggggatcagccccc

SEQ ID NO: 42142 - DNA, 80 bp, synthetic construct; identical to SEQ ID NO: 11376
  source 1..80: mol_type = other DNA

SEQ ID NO: 42143 - DNA, 80 bp, synthetic construct
  source 1..80: mol_type = other DNA
cggttttgtggaatagaagggcgggaagggtggggaaaaaattgagaaatcggatggttgcggggtctgtgtggatagaa

SEQ ID NO: 42144 - DNA, 80 bp, synthetic construct
  source 1..80: mol_type = other DNA
gttaaacagatgcttgaaggcagcatgctcgttaagagtcatcaccactccctaatcttaagtacccagggacacaaaca

SEQ ID NO: 42145 - DNA, 80 bp, synthetic construct; identical to SEQ ID NO: 11377
  source 1..80: mol_type = other DNA

SEQ ID NO: 42146 - DNA, 80 bp, synthetic construct
  source 1..80: mol_type = other DNA
aggactgggttcttcctgatcagagagattcacagtgtgagagggattcagtgtgagggggttcctccaatgtggattct

SEQ ID NO: 42147 - DNA, 80 bp, synthetic construct
  source 1..80: mol_type = other DNA
aatgaaaacacagttttgggaaaccctaaacagagaaccctccaatcatgctcagatttctgactaaggaactgtaaata

SEQ ID NO: 42148 - DNA, 80 bp, synthetic construct
  source 1..80: mol_type = other DNA
gaccttcctctctacaaaaaggaattttttttttttttaatttacctgagcacggtggtacttgcctgtagtcccaggta

SEQ ID NO: 42149 - DNA, 80 bp, synthetic construct; identical to SEQ ID NO: 11378
  source 1..80: mol_type = other DNA

SEQ ID NO: 42150 - DNA, 80 bp, synthetic construct
  source 1..80: mol_type = other DNA
caagtgcctgacattctagaagcttcacaagaccgaagtggagccactggagtgttttaggtgaagaaacgacacacttt

SEQ ID NO: 42151 - DNA, 80 bp, synthetic construct
  source 1..80: mol_type = other DNA
tgaggagaaggagcagagggacagaatttgaaagcagcagaattcttagctttaaacacattgttttataaatttttaat

SEQ ID NO: 42152 - DNA, 80 bp, synthetic construct
  source 1..80: mol_type = other DNA
gttccaataaaacatgcacaccacttagatgcggatacttcctaaaaacaggaagtgcatgagcactggtgaggggcatt

SEQ ID NO: 42153 - DNA, 80 bp, synthetic construct; identical to SEQ ID NO: 11379
  source 1..80: mol_type = other DNA

SEQ ID NO: 42154 - DNA, 80 bp, synthetic construct
  source 1..80: mol_type = other DNA
ctctacaaaaaaattagccgggcgtggtggcgggcatctgtagtctcagctactcgggaggctgaagcagaagaatggcg

SEQ ID NO: 42155 - DNA, 80 bp, synthetic construct
  source 1..80: mol_type = other DNA
ctcactgcagctaataaaaaaaaaaaagaaagaaagaaactggtctctgtcctatttcatatgctcaggtacaacttttc

SEQ ID NO: 42156 - DNA, 80 bp, synthetic construct
  source 1..80: mol_type = other DNA
agaagaagaagaagaagaagaagaagaagaagaagaagaagaagaagaagaaaaggaagaagaagaaactgtctctacac

SEQ ID NO: 42157 - DNA, 80 bp, synthetic construct; identical to SEQ ID NO: 11380
  source 1..80: mol_type = other DNA

SEQ ID NO: 42158 - DNA, 80 bp, synthetic construct
  source 1..80: mol_type = other DNA
atactcataacgcggccccatttctcactcccattgggcgtcgcgtttctagagaagccaatcagtgtcgccgcagttcc

SEQ ID NO: 42159 - DNA, 80 bp, synthetic construct
  source 1..80: mol_type = other DNA
gtggggaggagtgaggggcccgcccggtgggggcgcaggactcagggagccgcctccggaggagggtctggcgggtctca

SEQ ID NO: 42160 - DNA, 80 bp, synthetic construct
  source 1..80: mol_type = other DNA
ggagccgtgggtggagcaagaggggccgcagtattgggagtggaccacagggtacgccaaggccaacgcacagactgacc

SEQ ID NO: 42161 - DNA, 80 bp, synthetic construct; identical to SEQ ID NO: 11381
  source 1..80: mol_type = other DNA

SEQ ID NO: 42162 - DNA, 80 bp, synthetic construct
  source 1..80: mol_type = other DNA
aacgaggacctgcgctcctggaccgcggcggacaccgtggctcagatcacccagcgcttctatgaggcagaggaatatgc

SEQ ID NO: 42163 - DNA, 80 bp, synthetic construct
  source 1..80: mol_type = other DNA
gaaagtggacccaatgctaggatatcgccctccctctagtcctgagtaggaagaatcttcctggctttcgagatccggta

SEQ ID NO: 42164 - DNA, 80 bp, synthetic construct
  source 1..80: mol_type = other DNA
aacagccttgggccccgtgacttttctctcaagttttgttctctgcctcacactcaatgtgtttgaggctctgattccag

SEQ ID NO: 42165 - DNA, 80 bp, synthetic construct; identical to SEQ ID NO: 11382
  source 1..80: mol_type = other DNA

SEQ ID NO: 42166 - DNA, 80 bp, synthetic construct
  source 1..80: mol_type = other DNA
aaccttccagaagtgggccgctgtggtggtgcctcctggagaggaacagagatacacatgccatgtgcagcacgaggggc

SEQ ID NO: 42167 - DNA, 80 bp, synthetic construct
  source 1..80: mol_type = other DNA
ttcccagagcagtctccccagcccaccatccccatcgtgggcatcgttgctggccttgttgtccttggagctgtggtcac

SEQ ID NO: 42168 - DNA, 80 bp, synthetic construct
  source 1..80: mol_type = other DNA
acccagcctgggccctgtgtgccagcacctactcatttgtaaagctcctgtgaaaatgaaggacagattcttcacttcga

SEQ ID NO: 42169 - DNA, 80 bp, synthetic construct; identical to SEQ ID NO: 11383
  source 1..80: mol_type = other DNA

SEQ ID NO: 42170 - DNA, 80 bp, synthetic construct
  source 1..80: mol_type = other DNA
acagttcctctagccacatctgtgggctctgaccaggtcctgtttttgttctaccccaatcactgacagtgcccagggct

SEQ ID NO: 42171 - DNA, 80 bp, synthetic construct
  source 1..80: mol_type = other DNA
actgtgactgatacgaatttgttcatgaatattttctctatagtgtgagacagcttccttgtgtgggactgagaagcaag

SEQ ID NO: 42172 - DNA, 80 bp, synthetic construct
  source 1..80: mol_type = other DNA
agagagattaagattcttttaatggtgaaaagatatacatatatttggaactagccagcttgactcagtttaggtgatcc

SEQ ID NO: 42173 - DNA, 80 bp, synthetic construct
  source 1..80: mol_type = other DNA
cagtcgaacatatgccttcctctctccatcagactgaatcagagtgttgactttggccacatcaatgtcacaaacttctt

SEQ ID NO: 42174 - DNA, 80 bp, synthetic construct; identical to SEQ ID NO: 11384
  source 1..80: mol_type = other DNA

SEQ ID NO: 42175 - DNA, 80 bp, synthetic construct
  source 1..80: mol_type = other DNA
cccatgatactagaccactaaatacttcatcacacacctcctaagaataagaaccaacattatcacaccaaagaaaataa

SEQ ID NO: 42176 - DNA, 80 bp, synthetic construct
  source 1..80: mol_type = other DNA
atcttttttcttttagaatggcattacctgtttcagagatgaggccaaatacctgtggaatcttctccacactgaattta

SEQ ID NO: 42177 - DNA, 80 bp, synthetic construct
  source 1..80: mol_type = other DNA
aggactctttctgaccccatacagccaaatttatcctgacttcccagagatgcagaaccatgggctgggtgtttagtggg

SEQ ID NO: 42178 - DNA, 80 bp, synthetic construct; identical to SEQ ID NO: 11385
  source 1..80: mol_type = other DNA

SEQ ID NO: 42179 - DNA, 80 bp, synthetic construct
  source 1..80: mol_type = other DNA
acatcctgcagtgcacaagtcagcccaatcacccacataacagataattatccagccccaataccaagattgccaagggt

SEQ ID NO: 42180 - DNA, 80 bp, synthetic construct
  source 1..80: mol_type = other DNA
cccaccttcccatgagactgcatgcagaagtgatgatatgtgcacacatgacttcattacagggcattggatgttgatat

SEQ ID NO: 42181 - DNA, 80 bp, synthetic construct
  source 1..80: mol_type = other DNA
gaaccacacaggaaggcagagtgtccaccaatgtcaaattccatcaaagaaataatattttgacaaaaaatgcaagtcac

SEQ ID NO: 42182 - DNA, 80 bp, synthetic construct; identical to SEQ ID NO: 11386
  source 1..80: mol_type = other DNA

SEQ ID NO: 42183 - DNA, 80 bp, synthetic construct
  source 1..80: mol_type = other DNA
tgtggcccccttatgcaataaacataagccattgtgagccagcaaaatttaaagcaaggaaagcagtaaaccctccattt

SEQ ID NO: 42184 - DNA, 80 bp, synthetic construct
  source 1..80: mol_type = other DNA
acaagtaaataaatgcatggtgttcccatttatcagtgctcactgcatcttacaagtgtatcagccccacttcagctgat

SEQ ID NO: 42185 - DNA, 80 bp, synthetic construct
  source 1..80: mol_type = other DNA
gaagaaaatcttaggaacattggatgtggcaatggcttcttggctggtgagcaaaagcacaaccaataaaagaaaaacaa

SEQ ID NO: 42186 - DNA, 80 bp, synthetic construct; identical to SEQ ID NO: 11387
  source 1..80: mol_type = other DNA

SEQ ID NO: 42187 - DNA, 80 bp, synthetic construct
  source 1..80: mol_type = other DNA
gagccaacaattccacttttgggcatatacccaaaagaattgaaagcaggaactcacacagataattgtacactcatgct

SEQ ID NO: 42188 - DNA, 80 bp, synthetic construct
  source 1..80: mol_type = other DNA
tgaaattcaggttggatgaaccttgagaacactataagtgaaatgagccagaaacaaaaagacaaatataatatttcact

SEQ ID NO: 42189 - DNA, 80 bp, synthetic construct
  source 1..80: mol_type = other DNA
caacattgtaaatgtgctttaggccaccgaattgtacactgaaaaagtggttagaaggtaaattacatggtatgtatgtt

SEQ ID NO: 42190 - DNA, 80 bp, synthetic construct; identical to SEQ ID NO: 11388
  source 1..80: mol_type = other DNA

SEQ ID NO: 42191 - DNA, 80 bp, synthetic construct
  source 1..80: mol_type = other DNA
acctgctccccgggggtccacatggctcactcctcacaccattcaagtctctgttcaaatgtcccatggtcaagttctca

SEQ ID NO: 42192 - DNA, 80 bp, synthetic construct
  source 1..80: mol_type = other DNA
attctatttgtttattgtctgttggtgtatcagggttaccaagacagaaagacccaatagagtagatggatacatagata

SEQ ID NO: 42193 - DNA, 80 bp, synthetic construct
  source 1..80: mol_type = other DNA
caaaggcctgaggggccagaggaggaggtgggaggataaagggttgactggtgcaacactcaagagtccaaagaccatac

SEQ ID NO: 42194 - DNA, 80 bp, synthetic construct; identical to SEQ ID NO: 11389
  source 1..80: mol_type = other DNA

SEQ ID NO: 42195 - DNA, 80 bp, synthetic construct
  source 1..80: mol_type = other DNA
agtacaatcacagtatgacagtataataaggctttaaaatgtttaaagcagtctctggtttaatatttatcacttgagta

SEQ ID NO: 42196 - DNA, 80 bp, synthetic construct
  source 1..80: mol_type = other DNA
atgcccagctaatttttttttgtattttttgtagagacaggattttgccatgttgcccaggctggtcttgaacttctggg

SEQ ID NO: 42197 - DNA, 80 bp, synthetic construct
  source 1..80: mol_type = other DNA
tgaaagcagatggatctaaaagaactcagttacatcacctccttatctgagatgggatgcagcttgtaaaagtgtgtcaa

SEQ ID NO: 42198 - DNA, 80 bp, synthetic construct; identical to SEQ ID NO: 11390
  source 1..80: mol_type = other DNA

SEQ ID NO: 42199 - DNA, 80 bp, synthetic construct
  source 1..80: mol_type = other DNA
catatgaatgcaaccttgtacaataaagatacctataaaaatatatacatagagaacaacaaaatgggccaggcgccttg

SEQ ID NO: 42200 - DNA, 80 bp, synthetic construct
  source 1..80: mol_type = other DNA
tttgctgggcctggtggcgcatgcgtgtaatctcagctactcaggaggctgaggcatggaaatcacttgaacccgagagg

SEQ ID NO: 42201 - DNA, 80 bp, synthetic construct
  source 1..80: mol_type = other DNA
tgagtccaggaaggttcaacaatacaatagcagtgatatttttgaggggagacctaggtggtatttcttctgtgtatttt

SEQ ID NO: 42202 - DNA, 80 bp, synthetic construct
  source 1..80: mol_type = other DNA
gctgagtgcacacctgtagtcccagctactcaggaggctgagatgggagaatcacttgagcccaggattttgaggctgtc

SEQ ID NO: 42203 - DNA, 80 bp, synthetic construct; identical to SEQ ID NO: 11391
  source 1..80: mol_type = other DNA

SEQ ID NO: 42204 - DNA, 80 bp, synthetic construct
  source 1..80: mol_type = other DNA
tatatatttatgtaaaattaccatcacacctaagacagcgagatggatttttcccttccacagatgaaaatatgagtccc

SEQ ID NO: 42205 - DNA, 80 bp, synthetic construct
  source 1..80: mol_type = other DNA
ggaagagcaactgagaaccctggaaggttcacacttgtagagggtgcacatccagtgaaatgcagttgatggatgggcca

SEQ ID NO: 42206 - DNA, 80 bp, synthetic construct
  source 1..80: mol_type = other DNA
ttaggaaagcaaatgactttcctaacataaggtcaaacatttccctccaaatgaatcatcctagttggataatctcttca

SEQ ID NO: 42207 - DNA, 80 bp, synthetic construct; identical to SEQ ID NO: 11392
  source 1..80: mol_type = other DNA

SEQ ID NO: 42208 - DNA, 80 bp, synthetic construct
  source 1..80: mol_type = other DNA
accattaagcagtcaccctccatttcctcctgccaccagaccctgtcaccacaagtctgctttctttctctatagattgg

SEQ ID NO: 42209 - DNA, 80 bp, synthetic construct
  source 1..80: mol_type = other DNA
acatgttgtttattcattcattagtcaatgggcattttcttttaaaccaaataggaaaaacaaaggaagaattaaacacc

SEQ ID NO: 42210 - DNA, 80 bp, synthetic construct
  source 1..80: mol_type = other DNA
aatttcatagtagtactatatatagttatatatatgtagtactatgtatagtcatatatatgtatatatatgtatatata

SEQ ID NO: 42211 - DNA, 80 bp, synthetic construct; identical to SEQ ID NO: 11393
  source 1..80: mol_type = other DNA

SEQ ID NO: 42212 - DNA, 80 bp, synthetic construct
  source 1..80: mol_type = other DNA
ctctctctcctttctttgaggactcccaaagtgcatgtgcttgatgttgtctcacagatctttaaagttctgtttatttt

SEQ ID NO: 42213 - DNA, 80 bp, synthetic construct
  source 1..80: mol_type = other DNA
tctggtctctttgtaaaatttctacctttttattgatgttctctatttggggaaacctgcaaccaccatcttctgaagct

SEQ ID NO: 42214 - DNA, 80 bp, synthetic construct
  source 1..80: mol_type = other DNA
gcatgggcctttttgggttttgattcctagttcctggctcaacagccatttccaaagctgttcttgcgttagctcccaag

SEQ ID NO: 42215 - DNA, 80 bp, synthetic construct; identical to SEQ ID NO: 11394
  source 1..80: mol_type = other DNA

SEQ ID NO: 42216 - DNA, 80 bp, synthetic construct
  source 1..80: mol_type = other DNA
ataaatcaccctccccaaccctagagcagacactttcttgatttctaatatgatagattagttctgtcagttctggacac

SEQ ID NO: 42217 - DNA, 80 bp, synthetic construct
  source 1..80: mol_type = other DNA
ttgtattcagagtctacaaatcgtgctgctataaataatattttcatatattttgggacacaaatgcatgcatttctatt

SEQ ID NO: 42218 - DNA, 80 bp, synthetic construct
  source 1..80: mol_type = other DNA
agacttttgcaatttgtaatgaattaacagatttagccactgaacagcaatggcaattaacatcacaaaaaagaaataac

SEQ ID NO: 42219 - DNA, 80 bp, synthetic construct
  source 1..80: mol_type = other DNA
cttggggtgcaatctgcaaaatgcaaaggacaggaaactaccagacaatataaatttcaagcaggaatctatggaataaa

SEQ ID NO: 42220 - DNA, 80 bp, synthetic construct; identical to SEQ ID NO: 11395
  source 1..80: mol_type = other DNA

SEQ ID NO: 42221 - DNA, 80 bp, synthetic construct
  source 1..80: mol_type = other DNA
gcagggctaccttacatctgggtgtgtgtccagctcacattgccagaggcaatgtccagggtctattctttgaggcctag

SEQ ID NO: 42222 - DNA, 80 bp, synthetic construct
  source 1..80: mol_type = other DNA
gggacagtgatctctccagaagtggagatgacaccattcctcctctaacatggtccaatctcgtgcttgttctgctttac

SEQ ID NO: 42223 - DNA, 80 bp, synthetic construct
  source 1..80: mol_type = other DNA
gctcagggtggagagatgtcattgctcatcctccaggttccaggtgaaaacccacctgcccagcccatctggttctccct

SEQ ID NO: 42224 - DNA, 80 bp, synthetic construct; identical to SEQ ID NO: 11396
  source 1..80: mol_type = other DNA

SEQ ID NO: 42225 - DNA, 80 bp, synthetic construct
  source 1..80: mol_type = other DNA
ctttttgtattcatagttgttctgaaattgcaggatgatgagacccagcactggtgagttatactgtctctttcttccct

SEQ ID NO: 42226 - DNA, 80 bp, synthetic construct
  source 1..80: mol_type = other DNA
actaaaggattaattccaccaaagtgagggaaggtttgaaaagaaaaacattgtatacccatattcaaagcagcattatt

SEQ ID NO: 42227 - DNA, 80 bp, synthetic construct
  source 1..80: mol_type = other DNA
aaacccaatactgcacatttccatttatatgaggtgtctaaactgaaagtagactaatggctgctaggggctcggtgagg

SEQ ID NO: 42228 - DNA, 80 bp, synthetic construct; identical to SEQ ID NO: 11397
  source 1..80: mol_type = other DNA

SEQ ID NO: 42229 - DNA, 80 bp, synthetic construct
  source 1..80: mol_type = other DNA
ttgacatgttgaatcagtctgcattttggctggaacccaggtggctccactgcatgtaaagcaccttcccagatagtgat

SEQ ID NO: 42230 - DNA, 80 bp, synthetic construct
  source 1..80: mol_type = other DNA
agggacatttccaagaagataaaattaacagaatgtccaaagtgtccaacgtcttgaaagaatcatacaaacaaaagaga

SEQ ID NO: 42231 - DNA, 80 bp, synthetic construct
  source 1..80: mol_type = other DNA
taatcactatataaatatactgggaagagtgaaagagaacaagtactcttaactgttgcatccaccattgcgctgtgcaa

SEQ ID NO: 42232 - DNA, 80 bp, synthetic construct
  source 1..80: mol_type = other DNA
gaaattgagaagaggcagagaggactctcatttttctcaagagattctgcacaaatatttgactctttcaattgtgcaca

SEQ ID NO: 42233 - DNA, 80 bp, synthetic construct; identical to SEQ ID NO: 11398
  source 1..80: mol_type = other DNA

SEQ ID NO: 42234 - DNA, 80 bp, synthetic construct
  source 1..80: mol_type = other DNA
ccaccactgccttacctgagtggagccgaggctaccctgaccaagaagagcaccacccatctgtgccccaaggccagaaa

SEQ ID NO: 42235 - DNA, 80 bp, synthetic construct
  source 1..80: mol_type = other DNA
aaccccagaagcagactgatctctattcttcttaatcaggaaagtccaaagcactccctgtcctctccctcatatcagac

SEQ ID NO: 42236 - DNA, 80 bp, synthetic construct
  source 1..80: mol_type = other DNA
gtgggggaggtggggagatttctttgtgctgtgtcaaggcatgaagacagacctctccttctctcttgaacctcatactc

SEQ ID NO: 42237 - DNA, 80 bp, synthetic construct; identical to SEQ ID NO: 11399
  source 1..80: mol_type = other DNA

SEQ ID NO: 42238 - DNA, 80 bp, synthetic construct
  source 1..80: mol_type = other DNA
ggtgagacctgggcagggagttgaattctggccatctggctgcagagtgtagctgccctcagtggagccagtagacccag

SEQ ID NO: 42239 - DNA, 80 bp, synthetic construct
  source 1..80: mol_type = other DNA
aggatttctccctcctcagtcactccaaaatcagattcaccctttctctgagggaagatgatgctcccacatttttctcc

SEQ ID NO: 42240 - DNA, 80 bp, synthetic construct
  source 1..80: mol_type = other DNA
gcctggccagctcggacacagtgggaggcctccccagagagaggccctggctccacgtacttccaggcctgggctgggtc

SEQ ID NO: 42241 - DNA, 80 bp, synthetic construct; identical to SEQ ID NO: 11400
  source 1..80: mol_type = other DNA

SEQ ID NO: 42242 - DNA, 80 bp, synthetic construct
  source 1..80: mol_type = other DNA
ctagcagggattccacccaggccactgccctcacacccacagaggatcttcttcttctccctatggaataagggatttct

SEQ ID NO: 42243 - DNA, 80 bp, synthetic construct
  source 1..80: mol_type = other DNA
ctattaagaatatccagctgaaattatgaacatctttattggacatcaacattgaaagcaggaattttgagaaattagca

SEQ ID NO: 42244 - DNA, 80 bp, synthetic construct
  source 1..80: mol_type = other DNA
aaacatggtcctggggactgtgttcctgggggctagacaaggtaacacttggacatatgatgaaaatagggaccacagct

SEQ ID NO: 42245 - DNA, 80 bp, synthetic construct; identical to SEQ ID NO: 11401
  source 1..80: mol_type = other DNA

SEQ ID NO: 42246 - DNA, 80 bp, synthetic construct
  source 1..80: mol_type = other DNA
agccgcctttactatttactcccactgaagccatgatcatccaggccctcagcaatcagcacgtgattctcaactcaccc

SEQ ID NO: 42247 - DNA, 80 bp, synthetic construct
  source 1..80: mol_type = other DNA
taggggtgtagatggagatgtggctcccattcccctcccaaataccccaatgtccatcccctgttccaggaccttgttac

SEQ ID NO: 42248 - DNA, 80 bp, synthetic construct
  source 1..80: mol_type = other DNA
actaataataatgacagtagcaatagcagcatacagaatggctgccattgactctgaagcaccagggccttctctaaaaa

SEQ ID NO: 42249 - DNA, 80 bp, synthetic construct; identical to SEQ ID NO: 11402
  source 1..80: mol_type = other DNA

SEQ ID NO: 42250 - DNA, 80 bp, synthetic construct
  source 1..80: mol_type = other DNA
ccagcacatcatggtgacattgccttctaaggccccactgtgcatctcattcactgtgggggtcattggagacaaaaggg

SEQ ID NO: 42251 - DNA, 80 bp, synthetic construct
  source 1..80: mol_type = other DNA
caaatcggtccttacctggggtccaattcccctaggcttgctggaagatgggcctcaggactgtggcctcacactctggg

SEQ ID NO: 42252 - DNA, 80 bp, synthetic construct
  source 1..80: mol_type = other DNA
ctataggaggacccactactttcacagtacctgtttttctgatacctccagaatttcagatatcaccatagcttttgcat

SEQ ID NO: 42253 - DNA, 80 bp, synthetic construct
  source 1..80: mol_type = other DNA
agtctccaggttgggagagaggaagagcttcccatatgtgtagaaatgcctaaagcccctggtgctgctggcttcctgat

SEQ ID NO: 42254 - DNA, 80 bp, synthetic construct; identical to SEQ ID NO: 11403
  source 1..80: mol_type = other DNA

SEQ ID NO: 42255 - DNA, 80 bp, synthetic construct
  source 1..80: mol_type = other DNA
tgccctgcctttctgcctgtcacagagcaggaagagctgaccatccagatgtccctcagcgagaaaccctgactgcacag

SEQ ID NO: 42256 - DNA, 80 bp, synthetic construct
  source 1..80: mol_type = other DNA
ggcaaagggacaagaatgaggatttcagacgcaaggaaaactgggaaggtgggaggatagaggaggggactgaggaacag

SEQ ID NO: 42257 - DNA, 80 bp, synthetic construct
  source 1..80: mol_type = other DNA
ggagagcagaaactgtaagggacccaggctcagagggacccatgaccaccatggctgtggtgcacaggtgagggtgagat

SEQ ID NO: 42258 - DNA, 80 bp, synthetic construct; identical to SEQ ID NO: 11404
  source 1..80: mol_type = other DNA

SEQ ID NO: 42259 - DNA, 80 bp, synthetic construct
  source 1..80: mol_type = other DNA
acaataaaacatagggaattatcttcatgccatagaatttgatagcactttcttggatataacaccaaagatacaacaac

SEQ ID NO: 42260 - DNA, 80 bp, synthetic construct
  source 1..80: mol_type = other DNA
ctcaaacaggagacattcaactaatacaaaagtaggcaaaggacttgcatagccaattccccaaacaagatgtacaaatg

SEQ ID NO: 42261 - DNA, 80 bp, synthetic construct
  source 1..80: mol_type = other DNA
caggttgcgaaactggaacctttgtgtaatgcatttggaaatacaaaatagggcacctgttatggaaaacagtgtgttga

SEQ ID NO: 42262 - DNA, 80 bp, synthetic construct
  source 1..80: mol_type = other DNA
tcaacatggtgaaacccagtctctattaaaatacaaaatattagccgggtgtggtggtgggcacttgtaatcccagctac

SEQ ID NO: 42263 - DNA, 80 bp, synthetic construct; identical to SEQ ID NO: 11405
  source 1..80: mol_type = other DNA

SEQ ID NO: 42264 - DNA, 80 bp, synthetic construct
  source 1..80: mol_type = other DNA
tggtccagcacccgtgggctggagtggggggtcctcaagagggtggggctgaggatgaaggagtagggaaggggccaccg

SEQ ID NO: 42265 - DNA, 80 bp, synthetic construct
  source 1..80: mol_type = other DNA
cagagagttagggtcagggagagttgggagtgggaggcataggggcagccctgggttaaggctgcttctaggaaaggccc

SEQ ID NO: 42266 - DNA, 80 bp, synthetic construct
  source 1..80: mol_type = other DNA
atctggtgtccttagatcactggagttaatagtagcagggaaggatgcaagacaagagaggatccccggcagcgggaggc

SEQ ID NO: 42267 - DNA, 80 bp, synthetic construct; identical to SEQ ID NO: 11406
  source 1..80: mol_type = other DNA

SEQ ID NO: 42268 - DNA, 80 bp, synthetic construct
  source 1..80: mol_type = other DNA
aaatgcagggggcgggtgatgagcgatcccgaggaggactgaaaagagacgtggaagcagggttgaggtgtggcgggaac

SEQ ID NO: 42269 - DNA, 80 bp, synthetic construct
  source 1..80: mol_type = other DNA
gcaaaaagggcagtgcggatcaggaacagcaggactaggctcatctccatggcccagactttgctttcctcgcagtggct

SEQ ID NO: 42270 - DNA, 80 bp, synthetic construct
  source 1..80: mol_type = other DNA
agcggtcaggagacctggagaactttggctggcgggacctggagcccagaaaagggggagcgcgcggaagcgccgccaaa

SEQ ID NO: 42271 - DNA, 80 bp, synthetic construct; identical to SEQ ID NO: 11407
  source 1..80: mol_type = other DNA

SEQ ID NO: 42272 - DNA, 80 bp, synthetic construct
  source 1..80: mol_type = other DNA
tcttagacgtttcagctttacaatctccttctcctcccttttactcaaagctaggtcccctttcttatggtcacttcctg

SEQ ID NO: 42273 - DNA, 80 bp, synthetic construct
  source 1..80: mol_type = other DNA
ttccaatgtgacaggtctacaaggacactctacacgtctcgcatgacatcatcctctcttcctcccctgtttctctttcc

SEQ ID NO: 42274 - DNA, 80 bp, synthetic construct
  source 1..80: mol_type = other DNA
tcccagctatagtcagagtgctctaagacccccacagcaccccatctgctgaatgtcacacgtgaggtctctaccatgga

SEQ ID NO: 42275 - DNA, 80 bp, synthetic construct; identical to SEQ ID NO: 11408
  source 1..80: mol_type = other DNA

SEQ ID NO: 42276 - DNA, 80 bp, synthetic construct
  source 1..80: mol_type = other DNA
ttttttaaccaggaacacatgcactttattgaatgccattgtagaagagtgtgtgaggataaagcgctgatacagaactc

SEQ ID NO: 42277 - DNA, 80 bp, synthetic construct
  source 1..80: mol_type = other DNA
tcagggctcagatgttcaggtacttggcagtggaggcataggcctgggccccagtcaggtctccaaccatcttcctgtcc

SEQ ID NO: 42278 - DNA, 80 bp, synthetic construct
  source 1..80: mol_type = other DNA
gcacagccacctcatgctcctccttgagcatctcatagctggggttggggggcgggggagggcagccactgttggcagga

SEQ ID NO: 42279 - DNA, 80 bp, synthetic construct; identical to SEQ ID NO: 11409
  source 1..80: mol_type = other DNA

SEQ ID NO: 42280 - DNA, 80 bp, synthetic construct
  source 1..80: mol_type = other DNA
gttctagcccatggtttgaacctccctgatgggtaccaactttgcctgcattcttgaactccatctactatttatttatt

SEQ ID NO: 42281 - DNA, 80 bp, synthetic construct
  source 1..80: mol_type = other DNA
tcatctaccatcttgtaccatccctcactacacgatgaacagtccatgatctggaactgtgttcattctatctttgtcac

SEQ ID NO: 42282 - DNA, 80 bp, synthetic construct
  source 1..80: mol_type = other DNA
ttagatttcccatccacattcactgattatttattttgatcatcataatctattgcgcacagcagggactggggtcctgt

SEQ ID NO: 42283 - DNA, 80 bp, synthetic construct; identical to SEQ ID NO: 11410
  source 1..80: mol_type = other DNA

SEQ ID NO: 42284 - DNA, 80 bp, synthetic construct
  source 1..80: mol_type = other DNA
tcccccaccaagtctcccaggccttctgtccaatgccctctccctccaccccacctccagccccttctgctctgccccat

SEQ ID NO: 42285 - DNA, 80 bp, synthetic construct
  source 1..80: mol_type = other DNA
ggcgcccgcgcgcgttttcaagcctgcggcccggagttcactgcgaggactgagatcacccgttaccccgccctggtcta

SEQ ID NO: 42286 - DNA, 80 bp, synthetic construct
  source 1..80: mol_type = other DNA
tagaaacggaataacggcgctgtgggctggggaggacggagttgccttcaggcttctggtctccagccgcggggcactca

SEQ ID NO: 42287 - DNA, 80 bp, synthetic construct
  source 1..80: mol_type = other DNA
ggaaatgcgcctcagcccctcccacgggccgcccacggattccaggatccgaaaacgcttccagctgctccgccacccca

SEQ ID NO: 42288 - DNA, 80 bp, synthetic construct; identical to SEQ ID NO: 11411
  source 1..80: mol_type = other DNA

SEQ ID NO: 42289 - DNA, 80 bp, synthetic construct
  source 1..80: mol_type = other DNA
gggtggggggagcgtgttgaagaaaaaagggaagagagaggaaggaaagaggagaaaaaaggtgaagaagagaataacat

SEQ ID NO: 42290 - DNA, 80 bp, synthetic construct
  source 1..80: mol_type = other DNA
agtaatatatatacacgtaagcctctacctgccgatgtgtcagggtgtgtctcttgggcacaaaaacaaggtttttgttt

SEQ ID NO: 42291 - DNA, 80 bp, synthetic construct; identical to SEQ ID NO: 11412
  source 1..80: mol_type = other DNA

SEQ ID NO: 42292 - DNA, 80 bp, synthetic construct
  source 1..80: mol_type = other DNA
aagttttatttatttatttattttttgagacagagtctagctctgtcgcccaggctggagtgcagtggcgagatctcggc

SEQ ID NO: 42293 - DNA, 80 bp, synthetic construct
  source 1..80: mol_type = other DNA
tgttggccaggatagtctcgatctcctgacctcgtgatctgcccgcctcggcctcccaaagtgctgggattacagtcgtg

SEQ ID NO: 42294 - DNA, 80 bp, synthetic construct
  source 1..80: mol_type = other DNA
agctggaattacagtcactcgccaccatacccatctaattttttgtgtttttagtagagatggggtttcgccatgttgga

SEQ ID NO: 42295 - DNA, 80 bp, synthetic construct; identical to SEQ ID NO: 11413
  source 1..80: mol_type = other DNA

SEQ ID NO: 42296 - DNA, 80 bp, synthetic construct
  source 1..80: mol_type = other DNA
aaaaataaacctgaatttgtatggaggttaaggaagagtatatctcagtttgaaacattatgaagctaagccccaaaccc

SEQ ID NO: 42297 - DNA, 80 bp, synthetic construct
  source 1..80: mol_type = other DNA
agaagggctataataaagagggaaacgcaaaatcgagtctgacacaggagaccctgttccatttatactcaaagcaactt

SEQ ID NO: 42298 - DNA, 80 bp, synthetic construct
  source 1..80: mol_type = other DNA
tccaatggctaaaggctttcggaactagtctgaaaactcaggctctgactttggatctaaagaagtgtcaagaatgtgcg

SEQ ID NO: 42299 - DNA, 80 bp, synthetic construct
  source 1..80: mol_type = other DNA
tggggatcaggtagcggagggaaggcaaggacactcagggaataaatggcagaggaagaaggcgcgcgagggaagaccca

SEQ ID NO: 42300 - DNA, 80 bp, synthetic construct; identical to SEQ ID NO: 11414
  source 1..80: mol_type = other DNA

SEQ ID NO: 42301 - DNA, 80 bp, synthetic construct
  source 1..80: mol_type = other DNA
agtatctcctgctttcttcagaggacttctcatgaagtacagactcctccacctccaggaaaaagagacaaagtccactg

SEQ ID NO: 42302 - DNA, 80 bp, synthetic construct
  source 1..80: mol_type = other DNA
tggagagtcaaagtgctaaactcggcatctatcataggaaactttctcaccttggcactgcatgcaagagtcagtgtatt

SEQ ID NO: 42303 - DNA, 80 bp, synthetic construct
  source 1..80: mol_type = other DNA
tggaggggcccctgactccaaatctcctgatcccccctccacaaagagatgctgaaaaaaagtgctggacaatccattcc

SEQ ID NO: 42304 - DNA, 80 bp, synthetic construct
  source 1..80: mol_type = other DNA
tcacatttttaagcttacacaatggctcaaatagaaccagcatcaaaaatcccgaattcctggttcaggtgggatcactg

SEQ ID NO: 42305 - DNA, 80 bp, synthetic construct; identical to SEQ ID NO: 11415
  source 1..80: mol_type = other DNA

SEQ ID NO: 42306 - DNA, 80 bp, synthetic construct
  source 1..80: mol_type = other DNA
agatgctccttcgtgcctagcaatgtgctagctttaccccagccttaacattctaaagtttatattttccttggtgttgt

SEQ ID NO: 42307 - DNA, 80 bp, synthetic construct
  source 1..80: mol_type = other DNA
ccatcttaaatatttgaccccaaatccaatcacttctcactcctctactactttaccccagagccaatcctctctaggat

SEQ ID NO: 42308 - DNA, 80 bp, synthetic construct
  source 1..80: mol_type = other DNA
tgaaatcccagtctcccaccatttcctactagcccctcaacacagggcatctgtggcctcatcccactactctcaataga

SEQ ID NO: 42309 - DNA, 80 bp, synthetic construct; identical to SEQ ID NO: 11416
  source 1..80: mol_type = other DNA

SEQ ID NO: 42310 - DNA, 80 bp, synthetic construct
  source 1..80: mol_type = other DNA
cagtagaggccagaggttgcagaccctgggagtcagctgtgctgttcactctaagccccagggtgtgggggagggtcctt

SEQ ID NO: 42311 - DNA, 80 bp, synthetic construct
  source 1..80: mol_type = other DNA
gaaatattaaatcaaactaatacaggattaatgtgaagctagcaggtgttttgtggatggattcccctggctgtttatac

SEQ ID NO: 42312 - DNA, 80 bp, synthetic construct
  source 1..80: mol_type = other DNA
cctctcctgaatcctgggtttaccttcctaatttcagctaagtagctatattaaccagttatttaagactcacagggccc

SEQ ID NO: 42313 - DNA, 80 bp, synthetic construct; identical to SEQ ID NO: 11417
  source 1..80: mol_type = other DNA

SEQ ID NO: 42314 - DNA, 80 bp, synthetic construct
  source 1..80: mol_type = other DNA
tgagagtggctgagctgaatctgctcattagcatgttctccactgtttgagagctgccttgtgcagaccagcaagacaca

SEQ ID NO: 42315 - DNA, 80 bp, synthetic construct
  source 1..80: mol_type = other DNA
tatccaggcctggtgtatctccctggaccatcatttcttttctgggaatgaaagggttataatatctgcctcctagattt

SEQ ID NO: 42316 - DNA, 80 bp, synthetic construct
  source 1..80: mol_type = other DNA
caggtggggagagaagggcgggtggagggccaggtgctgagtggtgtgtggcctcgctctgtgctcaacaaagctcctgc

SEQ ID NO: 42317 - DNA, 80 bp, synthetic construct; identical to SEQ ID NO: 11418
  source 1..80: mol_type = other DNA

SEQ ID NO: 42318 - DNA, 80 bp, synthetic construct
  source 1..80: mol_type = other DNA
ctttcctgttccatttccagaatgcttctattgtttcccttttattgtagtaagtcaaatttttgaattaaggcctgggc

SEQ ID NO: 42319 - DNA, 80 bp, synthetic construct
  source 1..80: mol_type = other DNA
ataaataaattcttgtccctttttctgtgggagcaccctgtggtctgggtcctggcaggaaagagatggcacagaaggaa

SEQ ID NO: 42320 - DNA, 80 bp, synthetic construct
  source 1..80: mol_type = other DNA
gggcagcccggcatgcctatggctgtggatagaggcctgaagtgattacagaatcacagagctgcccagagtaagagagg

SEQ ID NO: 42321 - DNA, 80 bp, synthetic construct; identical to SEQ ID NO: 11419
  source 1..80: mol_type = other DNA

SEQ ID NO: 42322 - DNA, 80 bp, synthetic construct
  source 1..80: mol_type = other DNA
aaaccctgtctccactaaaaatgcaaaaattagctgggcatgatggtgggtgcctgtaacctcagctacttgagaggctg

SEQ ID NO: 42323 - DNA, 80 bp, synthetic construct
  source 1..80: mol_type = other DNA
atgtatatatgcttagcaggtagtaacattgaagagtacctaactctccttccctatctccacatgggacgtataactca

SEQ ID NO: 42324 - DNA, 80 bp, synthetic construct
  source 1..80: mol_type = other DNA
cagtctcactggactcacctgtggagtgggagaattgtcactgtttcctgatatcttgtcattgctgagctttaaattct

SEQ ID NO: 42325 - DNA, 80 bp, synthetic construct; identical to SEQ ID NO: 11420
  source 1..80: mol_type = other DNA

SEQ ID NO: 42326 - DNA, 80 bp, synthetic construct
  source 1..80: mol_type = other DNA
aacttcctggaattgagacctccccagcaggcttgggggtgaaaagagaaactagactccaaaagggacccagtgctctg

SEQ ID NO: 42327 - DNA, 80 bp, synthetic construct
  source 1..80: mol_type = other DNA
acatgtctggggccctctcaggccgacatgagttttactgctccacacactcttttgttaagagctagctgtcagtagat

SEQ ID NO: 42328 - DNA, 80 bp, synthetic construct
  source 1..80: mol_type = other DNA
tttccagccactcaccctaggtaatgaagaaagctctctgaactgtgtccttgctgggcacacaggcccctaccacatgt

SEQ ID NO: 42329 - DNA, 80 bp, synthetic construct
  source 1..80: mol_type = other DNA
ttcccacagatgctctgttagcccttaggctgtgagatacacaggcaaatgttatattgaagcctttgtttctcttacac

SEQ ID NO: 42330 - DNA, 80 bp, synthetic construct; identical to SEQ ID NO: 11421
  source 1..80: mol_type = other DNA

SEQ ID NO: 42331 - DNA, 80 bp, synthetic construct
  source 1..80: mol_type = other DNA
gatgccttgaacaaagatatggggtcactggaaagagaggaccggctgtccctccccactaagaaataattaactgttag

SEQ ID NO: 42332 - DNA, 80 bp, synthetic construct
  source 1..80: mol_type = other DNA
ctgtaactacccaaggagctgcaggggtgaggttggtgcagggtgggatttagaggatttcccccagactcctgtgctga

SEQ ID NO: 42333 - DNA, 80 bp, synthetic construct
  source 1..80: mol_type = other DNA
agaggaggcaatagcctcctttaatttggcaacagcttttcgttatcatctccactttccaaggcaggaaaagtgtaggc

SEQ ID NO: 42334 - DNA, 80 bp, synthetic construct; identical to SEQ ID NO: 11422
  source 1..80: mol_type = other DNA

SEQ ID NO: 42335 - DNA, 80 bp, synthetic construct
  source 1..80: mol_type = other DNA
gtttgcagatgaggaaactgactcatatggtttcattcagcactcattcactgtgaaagtgtctgtcagggccaattgtg

SEQ ID NO: 42336 - DNA, 80 bp, synthetic construct
  source 1..80: mol_type = other DNA
gcagccttcagcagccaccttgtgatcagtcagcagtcatcaacattgaggcaagaccctactccagcaaaaacattagt

SEQ ID NO: 42337 - DNA, 80 bp, synthetic construct
  source 1..80: mol_type = other DNA
tgacttgttttgtttgcatgatctgaaaccaaatctgcaatctctctgagatatgtctgtaatttccctttccctcttct

SEQ ID NO: 42338 - DNA, 80 bp, synthetic construct; identical to SEQ ID NO: 11423
  source 1..80: mol_type = other DNA

SEQ ID NO: 42339 - DNA, 80 bp, synthetic construct
  source 1..80: mol_type = other DNA
tcagataaaaacccatgccttagaagacaaaactacccaagagctggcagcagctaaccagcttgctatctgggatatca

SEQ ID NO: 42340 - DNA, 80 bp, synthetic construct
  source 1..80: mol_type = other DNA
tcagtggaaaaagaacccagaacctttgcaaaattttaggagagaaggactttccctcttgtctcttagtgccagggtta

SEQ ID NO: 42341 - DNA, 80 bp, synthetic construct
  source 1..80: mol_type = other DNA
acccccaaccaattaagagtggagataaattatcaatatttgtaaatttaaaacaagatcgacagccctttagaaaaaca

SEQ ID NO: 42342 - DNA, 80 bp, synthetic construct
  source 1..80: mol_type = other DNA
gagtttctgctttaagttacaaattccaaaaggtactaatccccaataatttacagtagggagccctaagccacaaagaa

SEQ ID NO: 42343 - DNA, 80 bp, synthetic construct; identical to SEQ ID NO: 11424
  source 1..80: mol_type = other DNA

SEQ ID NO: 42344 - DNA, 80 bp, synthetic construct
  source 1..80: mol_type = other DNA
aatctggaatcctcagtccatgatcagcaaaacctcctcattctctctcaggatgctccctcacctcgaagctctagcag

SEQ ID NO: 42345 - DNA, 80 bp, synthetic construct
  source 1..80: mol_type = other DNA
tgtcatcagactaaggcgccgctcccctcattgtagccattccctgtgggccccaagccattcctgtcaatcctaactct

SEQ ID NO: 42346 - DNA, 80 bp, synthetic construct
  source 1..80: mol_type = other DNA
acattactcatgtaatgaagataaaggaccttaaagtagggagatcatcctggactctctgtgtgggcccgatcaaatca

SEQ ID NO: 42347 - DNA, 80 bp, synthetic construct; identical to SEQ ID NO: 11425
  source 1..80: mol_type = other DNA

SEQ ID NO: 42348 - DNA, 80 bp, synthetic construct
  source 1..80: mol_type = other DNA
tatacagcagagaagatgccctcactccctggcctctcagatcctggaactccttttcttcattaccatctcctctctct

SEQ ID NO: 42349 - DNA, 80 bp, synthetic construct
  source 1..80: mol_type = other DNA
gggtagccacaggctctgaagacactgatgctataatttgatcatatgctataatgtaacatcagtgaaccactcattgc

SEQ ID NO: 42350 - DNA, 80 bp, synthetic construct
  source 1..80: mol_type = other DNA
tagtaaataatttccatccctcccttgcctctccctttcgttgtcacacttgcctggcaaaactacacagctagtggatt

SEQ ID NO: 42351 - DNA, 80 bp, synthetic construct; identical to SEQ ID NO: 11426
  source 1..80: mol_type = other DNA

SEQ ID NO: 42352 - DNA, 80 bp, synthetic construct
  source 1..80: mol_type = other DNA
gagccagttcctctgctggtgccctgaacatcatcccttctcatctacttaaagtgttagttcatcaattaatacctttt

SEQ ID NO: 42353 - DNA, 80 bp, synthetic construct
  source 1..80: mol_type = other DNA
tgccccagctttttccaaccaatgattgaccaaagcaggaaaactaaggcaagaatattcctactctgaaggctggctga

SEQ ID NO: 42354 - DNA, 80 bp, synthetic construct
  source 1..80: mol_type = other DNA
tctcacaactatttcccctaataaatccttacacatttaatactgtattggggtctaagttcaggaccgcagctatcaca

SEQ ID NO: 42355 - DNA, 80 bp, synthetic construct; identical to SEQ ID NO: 11427
  source 1..80: mol_type = other DNA

SEQ ID NO: 42356 - DNA, 80 bp, synthetic construct
  source 1..80: mol_type = other DNA
aaagagcagatagcatggaatggtagctgaacatcattatggtgggcacagtgctccagagacgtttgatactcagccaa

SEQ ID NO: 42357 - DNA, 80 bp, synthetic construct
  source 1..80: mol_type = other DNA
atgctacagaagcctcactcctacgatgcagcaggaatcccactcaggagctttgcaggaactagccagcatgtccccat

SEQ ID NO: 42358 - DNA, 80 bp, synthetic construct
  source 1..80: mol_type = other DNA
tgagtccatatagactggaaaaaatgatgcccaactctcaacaaggtagatatgacctagttatcctggaacatgtagag

SEQ ID NO: 42359 - DNA, 80 bp, synthetic construct; identical to SEQ ID NO: 11428
  source 1..80: mol_type = other DNA

SEQ ID NO: 42360 - DNA, 80 bp, synthetic construct
  source 1..80: mol_type = other DNA
atatgataagaaagcaagaattgaggagcaggagactgagggtgttcgaccaaatacaaagccatgatccccttctcaat

SEQ ID NO: 42361 - DNA, 80 bp, synthetic construct
  source 1..80: mol_type = other DNA
cattggggaagggaaataggcagaactaggggggatcattttcattgcatgtaagctgatattgatgcccagatgcccac

SEQ ID NO: 42362 - DNA, 80 bp, synthetic construct
  source 1..80: mol_type = other DNA
gtcacccccacactgggtccccagtctgtggtataagggatctcttgatgccaaaggccaaagggaaacctctgaaactg

SEQ ID NO: 42363 - DNA, 80 bp, synthetic construct; identical to SEQ ID NO: 11429
  source 1..80: mol_type = other DNA

SEQ ID NO: 42364 - DNA, 80 bp, synthetic construct
  source 1..80: mol_type = other DNA
acattcatgtgggatccacaacacattgaattatagtttgcctcaggacttttgtaactcccctgtcctctatagtatag

SEQ ID NO: 42365 - DNA, 80 bp, synthetic construct
  source 1..80: mol_type = other DNA
ggcaaaacatttgcacttcagaaggtgaagataaaccttacagagcttcaggaaaggtcactgtagtgaagttttatgag

SEQ ID NO: 42366 - DNA, 80 bp, synthetic construct
  source 1..80: mol_type = other DNA
cgacagcacattccacatgtagaaatgttgctttggcccacactctaggtgacataggaggaggccagcttcaagtgagg

SEQ ID NO: 42367 - DNA, 80 bp, synthetic construct
  source 1..80: mol_type = other DNA
aagatcatgtcatccacagcagagacatggctccccattagaagcaacttttagtgttcctggtcctgattcgatagaat

SEQ ID NO: 42368 - DNA, 80 bp, synthetic construct; identical to SEQ ID NO: 11430
  source 1..80: mol_type = other DNA

SEQ ID NO: 42369 - DNA, 80 bp, synthetic construct
  source 1..80: mol_type = other DNA
tagtggggcactatttctttaggtgactaactagccactatgtaacaagttgactacatttagctacttccatcctagaa

SEQ ID NO: 42370 - DNA, 80 bp, synthetic construct
  source 1..80: mol_type = other DNA
gctaggtggtgctcccaacccagtatctgcctgaaggacccacttggcagggaaagttccagtgtttccgtggctatggg

SEQ ID NO: 42371 - DNA, 80 bp, synthetic construct
  source 1..80: mol_type = other DNA
gccgtttttcaggacatggtgcattgtttgaatcagagacatctctacggtgctgtgttctcaataggaagaatatgtgg

SEQ ID NO: 42372 - DNA, 80 bp, synthetic construct
  source 1..80: mol_type = other DNA
aaaaagagacacatgacagcccattgaactacacattatggttgtcaccagagaagtttggacagtatgtgcccagagac

SEQ ID NO: 42373 - DNA, 80 bp, synthetic construct; identical to SEQ ID NO: 11431
  source 1..80: mol_type = other DNA

SEQ ID NO: 42374 - DNA, 80 bp, synthetic construct
  source 1..80: mol_type = other DNA
gacactgaggcaggacattcctgggagaccagggactcctctgacggacagcagtggctcaaagactcctccatggcttt

SEQ ID NO: 42375 - DNA, 80 bp, synthetic construct
  source 1..80: mol_type = other DNA
atcctgtaactttaatcccatgatggcacttggaatgcaaaatcattttcatctgcacaccagtgacctcttacttactc

SEQ ID NO: 42376 - DNA, 80 bp, synthetic construct
  source 1..80: mol_type = other DNA
tacatttctgttattctatagaggttaaatacatccgttttatttcctcccattttgataatattagccatatattgggt

SEQ ID NO: 42377 - DNA, 80 bp, synthetic construct; identical to SEQ ID NO: 11432
  source 1..80: mol_type = other DNA

SEQ ID NO: 42378 - DNA, 80 bp, synthetic construct
  source 1..80: mol_type = other DNA
actttgggaggcctagacgggcggatcacgaggtcaggggatagagaccatcctggctaacacggtgaaaccctgtcttt

SEQ ID NO: 42379 - DNA, 80 bp, synthetic construct
  source 1..80: mol_type = other DNA
ctccgtcaaaaaaaaaatctgctataattctgcagccaaggcagttgctattaactcttaattccttcaactcagtgttt

SEQ ID NO: 42380 - DNA, 80 bp, synthetic construct
  source 1..80: mol_type = other DNA
attatttagtatggttaaaggccatacaacatatcatccaaccatcccactcctaatcatacactctggcggctttctcg

SEQ ID NO: 42381 - DNA, 80 bp, synthetic construct
  source 1..80: mol_type = other DNA
taaaaatgagtgaatgacagcctcccacacaacagataactcctatacataatgtgcatcatgagaaaagaaatgtagta

SEQ ID NO: 42382 - DNA, 80 bp, synthetic construct; identical to SEQ ID NO: 11433
  source 1..80: mol_type = other DNA

SEQ ID NO: 42383 - DNA, 80 bp, synthetic construct
  source 1..80: mol_type = other DNA
acccttggctaaagggccatatgatccttggctcacaggcatctctctagattttcaggtatacaagattcaatctgatg

SEQ ID NO: 42384 - DNA, 80 bp, synthetic construct
  source 1..80: mol_type = other DNA
aatggaaaacacaacaggattgctcaaaaaaacttgaaagcacaaaattgcagtgccatttagaatcatagtggtgtcca

SEQ ID NO: 42385 - DNA, 80 bp, synthetic construct
  source 1..80: mol_type = other DNA
ggctactgcatccaaccaaagctattgacatcttgctaagctagatgtgttaactgaggtatgagattcacatttttgta

SEQ ID NO: 42386 - DNA, 80 bp, synthetic construct; identical to SEQ ID NO: 11434
  source 1..80: mol_type = other DNA

SEQ ID NO: 42387 - DNA, 80 bp, synthetic construct
  source 1..80: mol_type = other DNA
ctcaaacagttttcgccacaacacccaaggctctgtgatgtctcaaacttttaatcattaatttaaaaagagaagcttat

SEQ ID NO: 42388 - DNA, 80 bp, synthetic construct
  source 1..80: mol_type = other DNA
ctaatggaagagagtagagaactcagaaataaaaccgcatatctaaaaccatctgatcttcaacaaacctgatgaaaaca

SEQ ID NO: 42389 - DNA, 80 bp, synthetic construct; identical to SEQ ID NO: 11435
  source 1..80: mol_type = other DNA

SEQ ID NO: 42390 - DNA, 80 bp, synthetic construct
  source 1..80: mol_type = other DNA
gcaaatttacaagaaaataacaaacaaccccattaaaaagtgggcaaatgacatgaacagacacttctcaaaagaagaca

SEQ ID NO: 42391 - DNA, 80 bp, synthetic construct
  source 1..80: mol_type = other DNA
aatgctttaactgttggtgggaatgtaaattagttcaaccattgtggaagacaatatgacgattcctcaaagatctagaa

SEQ ID NO: 42392 - DNA, 80 bp, synthetic construct
  source 1..80: mol_type = other DNA
ggataaagaaaacatatgacatgtacaccatggaatactatgcagccttaaaaaggaaggagatcatgttttgcagggac

SEQ ID NO: 42393 - DNA, 80 bp, synthetic construct; identical to SEQ ID NO: 11436
  source 1..80: mol_type = other DNA

SEQ ID NO: 42394 - DNA, 80 bp, synthetic construct
  source 1..80: mol_type = other DNA
atgtatgcaaatcccttgatactcctcccttccaatggtgcagcttaattccttccctgtgagttcggcttggacttaat

SEQ ID NO: 42395 - DNA, 80 bp, synthetic construct
  source 1..80: mol_type = other DNA
atggttttgcaagagtcttccctgccacccccgcccccgacaaccttgcatttctctctcccaccaccatgtgaagaatg

SEQ ID NO: 42396 - DNA, 80 bp, synthetic construct
  source 1..80: mol_type = other DNA
gatagagtagtgctgatataacagtttttgactctgggtgtagaacataaaactcactgcagcttctctctctctgtctc

SEQ ID NO: 42397 - DNA, 80 bp, synthetic construct
  source 1..80: mol_type = other DNA
catgtttcttgtaaatcccaagccctagtgaagctctcagatgatgcagccctggactggactgtaaccttgtgagaggc

SEQ ID NO: 42398 - DNA, 80 bp, synthetic construct; identical to SEQ ID NO: 11437
  source 1..80: mol_type = other DNA

SEQ ID NO: 42399 - DNA, 80 bp, synthetic construct
  source 1..80: mol_type = other DNA
ttcctgtgctcaaatatcctctgacctcagcctcctgagtagctggctgggactacaggcatgaaccaccatgcctggat

SEQ ID NO: 42400 - DNA, 80 bp, synthetic construct
  source 1..80: mol_type = other DNA
cctgtcacttgattttaagaggtaaggtgaatctccatggctgaagaggatgtattttattatcattcacaatgatcgct

SEQ ID NO: 42401 - DNA, 80 bp, synthetic construct
  source 1..80: mol_type = other DNA
tttagcagatataatcaaggtcctcaatcagttgacttgaggctgggtttagcctgcttggacactcctaatcaggtgag

SEQ ID NO: 42402 - DNA, 80 bp, synthetic construct; identical to SEQ ID NO: 11438
  source 1..80: mol_type = other DNA

SEQ ID NO: 42403 - DNA, 80 bp, synthetic construct
  source 1..80: mol_type = other DNA
tgaatagagaccccgtctacatcatgcctggatttctgcctaaagaactgtaaacagatcagtggatgttgtttgggcag

SEQ ID NO: 42404 - DNA, 80 bp, synthetic construct
  source 1..80: mol_type = other DNA
agttactctgaagactgagccaggaggatcctttgagcccaggatttcaaggctgcagtgagccatgactgtgtgactgc

SEQ ID NO: 42405 - DNA, 80 bp, synthetic construct
  source 1..80: mol_type = other DNA
tgcacactagttacataaaataaaaactttctcaatcttttccagtattgtttattttataattttctgtgatgaaatta

SEQ ID NO: 42406 - DNA, 80 bp, synthetic construct; identical to SEQ ID NO: 11439
  source 1..80: mol_type = other DNA

SEQ ID NO: 42407 - DNA, 80 bp, synthetic construct
  source 1..80: mol_type = other DNA
cacagagcctcgctcattgccagcacagcagtctgagatcaaactgcaaggcggcagcaaggctgggggaggggtgcccg

SEQ ID NO: 42408 - DNA, 80 bp, synthetic construct
  source 1..80: mol_type = other DNA
ccctgtctgacagctttgaagacagtagtggttctcccgcatgcagcttgagatctgagaacagacagactgcctcctca

SEQ ID NO: 42409 - DNA, 80 bp, synthetic construct
  source 1..80: mol_type = other DNA
cgctgctgatacccaggcaaacagggtctgtagtggacctccagcaaactccaacagacctgcagctgagggtcctgact

SEQ ID NO: 42410 - DNA, 80 bp, synthetic construct
  source 1..80: mol_type = other DNA
aaggaatgcagctactcactagcaatggaacaaagctggaaggagaatgactctgatgagttgagagaagaaggcttcag

SEQ ID NO: 42411 - DNA, 80 bp, synthetic construct; identical to SEQ ID NO: 11440
  source 1..80: mol_type = other DNA

SEQ ID NO: 42412 - DNA, 80 bp, synthetic construct
  source 1..80: mol_type = other DNA
atccaggagaacttccccaatctagcaaggcaggccaacattcaaattcaggaaatagagagaacacaacaaagatactc

SEQ ID NO: 42413 - DNA, 80 bp, synthetic construct
  source 1..80: mol_type = other DNA
agagagtaggggccaatattcaactttcttaaagaaaagaattttcagcccagaatttcaaatccagccaaactaagctt

SEQ ID NO: 42414 - DNA, 80 bp, synthetic construct
  source 1..80: mol_type = other DNA
ttgaggctaggaagaaactgcatcaactaatgagcaaaataaccagctaacatcataatgacaggatcaaattcacacat

SEQ ID NO: 42415 - DNA, 80 bp, synthetic construct
  source 1..80: mol_type = other DNA
atctaccaagcaaatggaaaacaaaaaaaggcaggggttgcaatcctactctctgataaaacagactttaaaccaacaaa

SEQ ID NO: 42416 - DNA, 80 bp, synthetic construct; identical to SEQ ID NO: 11441
  source 1..80: mol_type = other DNA

SEQ ID NO: 42417 - DNA, 80 bp, synthetic construct
  source 1..80: mol_type = other DNA
attataacaaactgtctctcagaccacagtgcaatcaaactagaactcaggattaagaaactcactcaaaactgctcaac

SEQ ID NO: 42418 - DNA, 80 bp, synthetic construct
  source 1..80: mol_type = other DNA
ctaaatgcccacaacagaaagtaggaaagatctaaaatcgacaccctaacatcacaattaaaagaactagagaagcaaga

SEQ ID NO: 42419 - DNA, 80 bp, synthetic construct
  source 1..80: mol_type = other DNA
aagagagaagaatcaaatagatgcaataaaaatgataaaggggatatcaccaccaatcccacagaaatacaaactaccat

SEQ ID NO: 42420 - DNA, 80 bp, synthetic construct
  source 1..80: mol_type = other DNA
ttaccaaccaaaaatagtccaggaccagatggattcacagccgaattctaccagaggtacaaggaggagctggtaccatt

SEQ ID NO: 42421 - DNA, 80 bp, synthetic construct; identical to SEQ ID NO: 11442
  source 1..80: mol_type = other DNA

SEQ ID NO: 42422 - DNA, 80 bp, synthetic construct
  source 1..80: mol_type = other DNA
cgtatctcaaaataataagagctatctatgacaaacccacagccaatatcatactgaatgggcaaaaactggaagcattc

SEQ ID NO: 42423 - DNA, 80 bp, synthetic construct
  source 1..80: mol_type = other DNA
ctgtatgtctagaaaaccccatcatctcagcccaaaatctccttaagctgataagcaacttcagcaaagtctcaggatac

SEQ ID NO: 42424 - DNA, 80 bp, synthetic construct; identical to SEQ ID NO: 11443
  source 1..80: mol_type = other DNA

SEQ ID NO: 42425 - DNA, 80 bp, synthetic construct
  source 1..80: mol_type = other DNA
ctggaggcatgacgctacctgacttcaaactatactacaaggctgcagtaaccaaaacagtatggtactggtaccaaaac

SEQ ID NO: 42426 - DNA, 80 bp, synthetic construct
  source 1..80: mol_type = other DNA
gctgaaactggatcccttccttacaacttacacagaaattaattccagatggattaaagacttcaatgttagacctaaaa

SEQ ID NO: 42427 - DNA, 80 bp, synthetic construct; identical to SEQ ID NO: 11444
  source 1..80: mol_type = other DNA

SEQ ID NO: 42428 - DNA, 80 bp, synthetic construct
  source 1..80: mol_type = other DNA
caacaggtgctggagaggatgtggagaaacaggaacacttttacactgttggtgggactgtaaactagttcaaccattgt

SEQ ID NO: 42429 - DNA, 80 bp, synthetic construct
  source 1..80: mol_type = other DNA
ttggaaccaacccaaatgtccatcaatgatagactagattaagaaaatgtggcacatatacaccatggaatactatgcag

SEQ ID NO: 42430 - DNA, 80 bp, synthetic construct
  source 1..80: mol_type = other DNA
cacacactggggcctgtcgtcaggtggcgggatgggggaaggatagcattaggagaaatacctaatgtaaatgactagtt

SEQ ID NO: 42431 - DNA, 80 bp, synthetic construct; identical to SEQ ID NO: 11445
  source 1..80: mol_type = other DNA

SEQ ID NO: 42432 - DNA, 80 bp, synthetic construct
  source 1..80: mol_type = other DNA
tgatcaaaataaatcaaacaagaaaagaataggaaggaataaccagtgatggaatatcaaatatgaatggaaaacagaat

SEQ ID NO: 42433 - DNA, 80 bp, synthetic construct
  source 1..80: mol_type = other DNA
aaacttgtttctcaatttgagctaaccatttcaggctactgcatcaaaccaaagttattggcatcatgctaagctagatg

SEQ ID NO: 42434 - DNA, 80 bp, synthetic construct
  source 1..80: mol_type = other DNA
gtttagtgaagatgatatttcaataagaaaattggtgcttgggacgtgcttccactaaatttgagatatcttagacaaaa

SEQ ID NO: 42435 - DNA, 80 bp, synthetic construct; identical to SEQ ID NO: 11446
  source 1..80: mol_type = other DNA

SEQ ID NO: 42436 - DNA, 80 bp, synthetic construct
  source 1..80: mol_type = other DNA
tactggtacaaaaacaggcacatagaccaatggaacagaatagagaattcacaaaaaaagtccgcacatctacaaccatt

SEQ ID NO: 42437 - DNA, 80 bp, synthetic construct
  source 1..80: mol_type = other DNA
tgtaaaacacaaaattataaaaaccctgaaagaaaatctaggcaataccattcaggacacaggcatgggcaaagatttta

SEQ ID NO: 42438 - DNA, 80 bp, synthetic construct
  source 1..80: mol_type = other DNA
aatattcagaatctataaagaacttaagcaaatttacatgaaaaaaacttcattaaaaagtgaacaaaggacatgaagag

SEQ ID NO: 42439 - DNA, 80 bp, synthetic construct; identical to SEQ ID NO: 11447
  source 1..80: mol_type = other DNA

SEQ ID NO: 42440 - DNA, 80 bp, synthetic construct
  source 1..80: mol_type = other DNA
tgcccatcaatgatgtactgcattaagaaaatatggtacatatacaccatggaatattatgcagccacaaaaaggaatga

SEQ ID NO: 42441 - DNA, 80 bp, synthetic construct
  source 1..80: mol_type = other DNA
ctgggggagggcagtggtgggaggagtattaggaaaaaatagctaatgcatgccagggttaatacataggtgatggtttg

SEQ ID NO: 42442 - DNA, 80 bp, synthetic construct
  source 1..80: mol_type = other DNA
aaacaagagttttaaatttgcttttaatatatattcaaatcctttaatactgttcccttccagagatgctgcttaatttc

SEQ ID NO: 42443 - DNA, 80 bp, synthetic construct; identical to SEQ ID NO: 11448
  source 1..80: mol_type = other DNA

SEQ ID NO: 42444 - DNA, 80 bp, synthetic construct
  source 1..80: mol_type = other DNA
gtgagaacggactaatacaacttctaactggtaatgctgacataagagtttgtgactctgggtgtagaacataaaactca

SEQ ID NO: 42445 - DNA, 80 bp, synthetic construct
  source 1..80: mol_type = other DNA
gaacagaaaacaaggaactagggcttttccaacagccatgtgacccatccatgtttcatgtgaatcctcagtcccagtga

SEQ ID NO: 42446 - DNA, 80 bp, synthetic construct
  source 1..80: mol_type = other DNA
tttgttatgcaatagtaaataactaacacattttcacaaaagaggatgtagtattacacattaatttgcatttgctctaa

SEQ ID NO: 42447 - DNA, 80 bp, synthetic construct; identical to SEQ ID NO: 11449
  source 1..80: mol_type = other DNA

SEQ ID NO: 42448 - DNA, 80 bp, synthetic construct
  source 1..80: mol_type = other DNA
gtaaggagaatgtccatggctgaagaggatgcattttattaccattcacaatgatcactttacttgaacttcaatttcca

SEQ ID NO: 42449 - DNA, 80 bp, synthetic construct
  source 1..80: mol_type = other DNA
gcctcaattagttgactttaggctgggtttatcctgctttgactgtcctaataaggtgagtccttgaaaggtctgtgttc

SEQ ID NO: 42450 - DNA, 80 bp, synthetic construct
  source 1..80: mol_type = other DNA
cacaaccctgcctattctctgtattgacagccagcaaggaacagaaacctcagtcttacaactgccagaaactgcattct

SEQ ID NO: 42451 - DNA, 80 bp, synthetic construct; identical to SEQ ID NO: 11450
  source 1..80: mol_type = other DNA

SEQ ID NO: 42452 - DNA, 80 bp, synthetic construct
  source 1..80: mol_type = other DNA
aagaccaaggtggagccagtggaatgttttaggtggagaaatgacacactctgactcacaggagcaggaccactgtgcag

SEQ ID NO: 42453 - DNA, 80 bp, synthetic construct
  source 1..80: mol_type = other DNA
cgaaagcagcagaactcaggtttaaacacattgttttatatattttaatacatcaatctacagagccttgcagggtgatc

SEQ ID NO: 42454 - DNA, 80 bp, synthetic construct
  source 1..80: mol_type = other DNA
attgtgactgcattgagtgcttgccactgtgagatgaataaagtccgtactggctcctggttacaacatatagtaacaca

SEQ ID NO: 42455 - DNA, 80 bp, synthetic construct; identical to SEQ ID NO: 11451
  source 1..80: mol_type = other DNA

SEQ ID NO: 42456 - DNA, 80 bp, synthetic construct
  source 1..80: mol_type = other DNA
ctggggtgatttttcttctagaagagtccacggggacaggtaaggagtaggaggcagggagtccagttctgggacgggga

SEQ ID NO: 42457 - DNA, 80 bp, synthetic construct
  source 1..80: mol_type = other DNA
gctctcaggatctcaggccccaaaggcggtgtatggattggggaggcccagcgctgggcattccccatctttgcagggtt

SEQ ID NO: 42458 - DNA, 80 bp, synthetic construct
  source 1..80: mol_type = other DNA
tcttcccagtcgccgaggatggtgtcatggcgccccgaaccctgcttctgctgctctcgggggccctggtcctgacccag

SEQ ID NO: 42459 - DNA, 80 bp, synthetic construct; identical to SEQ ID NO: 11452
  source 1..80: mol_type = other DNA

SEQ ID NO: 42460 - DNA, 80 bp, synthetic construct
  source 1..80: mol_type = other DNA
gagtgaggcctgtgagtgacaccggccgggggcgcaggtcactacccctccacatcccccacggaccgcccgggtctccc

SEQ ID NO: 42461 - DNA, 80 bp, synthetic construct
  source 1..80: mol_type = other DNA
cggggccagggtctcacacccatctagaggatgtctgtctgcgacgtggggtcggacgggcgcctactccgcgggtatca

SEQ ID NO: 42462 - DNA, 80 bp, synthetic construct
  source 1..80: mol_type = other DNA
tggttttcctctctactcttagaccctcagccagtatcactattggcattcctgagccactggctcagaatttcagtaca

SEQ ID NO: 42463 - DNA, 80 bp, synthetic construct; identical to SEQ ID NO: 11453
  source 1..80: mol_type = other DNA

SEQ ID NO: 42464 - DNA, 80 bp, synthetic construct
  source 1..80: mol_type = other DNA
tggcaaggagacatttaaatgagagtccatggaaatatacattatggctgcccccagggatgtttgaatagtatgtgtcc

SEQ ID NO: 42465 - DNA, 80 bp, synthetic construct
  source 1..80: mol_type = other DNA
tttcatattcaagagcccagaaccctcaggaaggaaggattgagtgatactcacaggtaatgtcccaaggctgtgctcct

SEQ ID NO: 42466 - DNA, 80 bp, synthetic construct
  source 1..80: mol_type = other DNA
ctcaactctccttagattgcctgtgctctaggatgcgtcaaacaaactttctctccttctgtccagcacttggggtcaca

SEQ ID NO: 42467 - DNA, 80 bp, synthetic construct; identical to SEQ ID NO: 11454
  source 1..80: mol_type = other DNA

SEQ ID NO: 42468 - DNA, 80 bp, synthetic construct
  source 1..80: mol_type = other DNA
agctatacttgctgtttccaactctttcctcctatttttgaacattttaaattttgtctttctctgtccttccttccttc

SEQ ID NO: 42469 - DNA, 80 bp, synthetic construct
  source 1..80: mol_type = other DNA
tgaaaaaatgcctagggtgattctatagccaagacagtaccttttaacatttaatttctgcctccaactgaatgttttca

SEQ ID NO: 42470 - DNA, 80 bp, synthetic construct
  source 1..80: mol_type = other DNA
gaacacatgagcaacacaagctctttcccattcttggtacaagcacttgagaaatcaaattagccttatctagtatgatt

SEQ ID NO: 42471 - DNA, 80 bp, synthetic construct
  source 1..80: mol_type = other DNA
aataaaaagtaaaacttcagcagcaacagtgaatgaacagcaccctcccacatcagagataactctcctacacataacat

SEQ ID NO: 42472 - DNA, 80 bp, synthetic construct; identical to SEQ ID NO: 11455
  source 1..80: mol_type = other DNA

SEQ ID NO: 42473 - DNA, 80 bp, synthetic construct
  source 1..80: mol_type = other DNA
tctttctttctttctttctttctttctttctttctttctttctttctttctttctttctttctttctttctttctttctt

SEQ ID NO: 42474 - DNA, 80 bp, synthetic construct
  source 1..80: mol_type = other DNA
ctcagcctcctgagtagctggaattataggcatccaccacgacacccaggtaatttttgtatttttagtagagacggggt

SEQ ID NO: 42475 - DNA, 80 bp, synthetic construct
  source 1..80: mol_type = other DNA
gtgtcatttttcaaaatgcaccttgtgtgccattcctgactgattatttggaaatgaaagagaaaagaaaataccaaagt

SEQ ID NO: 42476 - DNA, 80 bp, synthetic construct; identical to SEQ ID NO: 11456
  source 1..80: mol_type = other DNA

SEQ ID NO: 42477 - DNA, 80 bp, synthetic construct
  source 1..80: mol_type = other DNA
aaaacatgaaagagatgcttgtacagcaatgatagcagcacaaaagaacagtgtttttcagaatcatacaggagtccaaa

SEQ ID NO: 42478 - DNA, 80 bp, synthetic construct
  source 1..80: mol_type = other DNA
taccctagccaaacaaattattgtcatgatgctaagctagtgtatagacagaggtgtgagattcacatttttctaactgc

SEQ ID NO: 42479 - DNA, 80 bp, synthetic construct
  source 1..80: mol_type = other DNA
ggcattattgtatggcaccaaagtcttgggacactttaatttagctactgtattttctcaactctgttgcaacttatcaa

SEQ ID NO: 42480 - DNA, 80 bp, synthetic construct; identical to SEQ ID NO: 11457
  source 1..80: mol_type = other DNA

SEQ ID NO: 42481 - DNA, 80 bp, synthetic construct
  source 1..80: mol_type = other DNA
tcataaggaggcctgtggtccatgtgactaggaagtgagtcctcctgggaccagacaataagaagctaaagcctcttcca

SEQ ID NO: 42482 - DNA, 80 bp, synthetic construct
  source 1..80: mol_type = other DNA
tcagagaaacttctcctggattcctgaccatggataactgtgggagatgataaatatttgttgatttgagctgctaagtt

SEQ ID NO: 42483 - DNA, 80 bp, synthetic construct
  source 1..80: mol_type = other DNA
ttattatcattaacaatgatctattttttgatcttcaacttgtatgttctatttaaacatgaaaggaagatccaggctag

SEQ ID NO: 42484 - DNA, 80 bp, synthetic construct; identical to SEQ ID NO: 11458
  source 1..80: mol_type = other DNA

SEQ ID NO: 42485 - DNA, 80 bp, synthetic construct
  source 1..80: mol_type = other DNA
acaaactctacataagcttgggggagaaccccaatcttaagatgaggatacagctttgcgaaactctgaacaaagagtct

SEQ ID NO: 42486 - DNA, 80 bp, synthetic construct
  source 1..80: mol_type = other DNA
tgaactgatatgcatagtagttgcataaaaccaaatatttcctaacttgctttgcattttccatttcatgatttttgtgt

SEQ ID NO: 42487 - DNA, 80 bp, synthetic construct
  source 1..80: mol_type = other DNA
agagtaagatggagccattagaggcttttaagtgaagaaatgacacaatctgactcacattagcaggattgctgaccttt

SEQ ID NO: 42488 - DNA, 80 bp, synthetic construct; identical to SEQ ID NO: 11459
  source 1..80: mol_type = other DNA

SEQ ID NO: 42489 - DNA, 80 bp, synthetic construct
  source 1..80: mol_type = other DNA
gagatcgagaccatcctagctaacatggtgaaaccccgtctctaataaaaaattacaaaaaaattagccgggcgtggtgg

SEQ ID NO: 42490 - DNA, 80 bp, synthetic construct
  source 1..80: mol_type = other DNA
accaaatgtctcaataaaatatacacatagcttagatgtgaataattcataataataggcaagtgcatgggccggccatt

SEQ ID NO: 42491 - DNA, 80 bp, synthetic construct
  source 1..80: mol_type = other DNA
ccagctacttgggaggctgagggaggagcattgatcacatgagccaaggaggtcgaggcttcagtgagtcatgagcgtgc

SEQ ID NO: 42492 - DNA, 80 bp, synthetic construct; identical to SEQ ID NO: 11460
  source 1..80: mol_type = other DNA

SEQ ID NO: 42493 - DNA, 80 bp, synthetic construct
  source 1..80: mol_type = other DNA
ctaccaagattgtgctacccactgtagcacaatcggagacccacgccgaggctgcgggactcgtggagaccctcgacaca

SEQ ID NO: 42494 - DNA, 80 bp, synthetic construct
  source 1..80: mol_type = other DNA
accggagcctcttcgcgcggggatgaacataccctacgatggcgccagttacctcgtcctaaaccaggaactgctctctt

SEQ ID NO: 42495 - DNA, 80 bp, synthetic construct
  source 1..80: mol_type = other DNA
ccctgatctcctgcagatatccctgagccaccttccaaaagaaggggaggaaaatgggaccaacgctaaaatatccctct

SEQ ID NO: 42496 - DNA, 80 bp, synthetic construct; identical to SEQ ID NO: 11461
  source 1..80: mol_type = other DNA

SEQ ID NO: 42497 - DNA, 80 bp, synthetic construct
  source 1..80: mol_type = other DNA
gtcccatccattctcaggatggtcacatgggtgctgtgtctcatgaggaatgcaaagtgcctgaattttctacctcttgc

SEQ ID NO: 42498 - DNA, 80 bp, synthetic construct
  source 1..80: mol_type = other DNA
acttgcagggtacagaaccttccagaagtgggcagctgcagtggtgtcttctggagagaagcagaggtacacatgccatg

SEQ ID NO: 42499 - DNA, 80 bp, synthetic construct
  source 1..80: mol_type = other DNA
tcttagagctgtcttcccagcccatcatccccgttgtgggcatcattgctggcctggttcttctagttgctgtaatcact

SEQ ID NO: 42500 - DNA, 80 bp, synthetic construct; identical to SEQ ID NO: 11462
  source 1..80: mol_type = other DNA

SEQ ID NO: 42501 - DNA, 80 bp, synthetic construct
  source 1..80: mol_type = other DNA
ggatctcatgccctgcctcctccctggcctctcacagtttgttttctttccacagatggaaaaggaggcagttatgctca

SEQ ID NO: 42502 - DNA, 80 bp, synthetic construct
  source 1..80: mol_type = other DNA
gtgggctctgaccagattttgtttttgttccaccccaaacaggaacagtacccagggctctgatgtgtctctcaaggctt

SEQ ID NO: 42503 - DNA, 80 bp, synthetic construct
  source 1..80: mol_type = other DNA
caacttactatgactgacctggattagtttatgactatgttttttctaagattgccttgtgagggactgagatgcaagat

SEQ ID NO: 42504 - DNA, 80 bp, synthetic construct
  source 1..80: mol_type = other DNA
ccaccatgacccctgatattgtttggatctgtgtccccacccaaatctcatgttcaattgtaatccctaattttggaggt

SEQ ID NO: 42505 - DNA, 80 bp, synthetic construct; identical to SEQ ID NO: 11463
  source 1..80: mol_type = other DNA

SEQ ID NO: 42506 - DNA, 80 bp, synthetic construct
  source 1..80: mol_type = other DNA
tttaccctttgcctttttgagcttggcaatgcaaaccacatacttgagacccaggacactgtctccccagtgatggcgga

SEQ ID NO: 42507 - DNA, 80 bp, synthetic construct
  source 1..80: mol_type = other DNA
gaccccattttatgacacaggacaggcaagaagacaaccagcttgatgggatctacatcatgtgcaatcaccaccagctg

SEQ ID NO: 42508 - DNA, 80 bp, synthetic construct
  source 1..80: mol_type = other DNA
gccagcttaagcagcagagtagctgtttggctgtctggtgcctgggtgaactggttaatctcaggaggcactttcagcca

SEQ ID NO: 42509 - DNA, 80 bp, synthetic construct; identical to SEQ ID NO: 11464
  source 1..80: mol_type = other DNA

SEQ ID NO: 42510 - DNA, 80 bp, synthetic construct
  source 1..80: mol_type = other DNA
gaagagtttggagagttcagaagacaagaaaatgggggaaaatttgcaacttcctagagatttgttaagctgttgtgacc

SEQ ID NO: 42511 - DNA, 80 bp, synthetic construct
  source 1..80: mol_type = other DNA
aggcattgttccccctccctagggatctgtagaactttgaacttgagagtgatgtataagggtatctggtggaagaaatt

SEQ ID NO: 42512 - DNA, 80 bp, synthetic construct
  source 1..80: mol_type = other DNA
aagactactaaatcatagagccactggcaatatgcaagctcagcctggaaaagccataagcattcaatgttcacccatga

SEQ ID NO: 42513 - DNA, 80 bp, synthetic construct; identical to SEQ ID NO: 11465
  source 1..80: mol_type = other DNA

SEQ ID NO: 42514 - DNA, 80 bp, synthetic construct
  source 1..80: mol_type = other DNA
cttttgcaatgtgagaagaatgtgagctttggctggctagggacaggatgcaatgatataaatatttatccccagatacc

SEQ ID NO: 42515 - DNA, 80 bp, synthetic construct
  source 1..80: mol_type = other DNA
tgccctattagtttccaaaagagctagttgttaaaagagtctcgcaccttcctactccctctgttcctctcttaccacgt

SEQ ID NO: 42516 - DNA, 80 bp, synthetic construct
  source 1..80: mol_type = other DNA
aaaacggaataagacaaccctctcatcataggtatgtgtctgtggcagccagcccccattctcaaggtatccaggatcct

SEQ ID NO: 42517 - DNA, 80 bp, synthetic construct; identical to SEQ ID NO: 11466
  source 1..80: mol_type = other DNA

SEQ ID NO: 42518 - DNA, 80 bp, synthetic construct
  source 1..80: mol_type = other DNA
tgacctaagagacaacatctcttgctcacaccacttttgaggagataagctaatattgaattttcctcattacataaccc

SEQ ID NO: 42519 - DNA, 80 bp, synthetic construct
  source 1..80: mol_type = other DNA
atagtattctaccatgtcttctcttaatctactcttgatcatagacagtaggttacataggttaggaactagtgcaggct

SEQ ID NO: 42520 - DNA, 80 bp, synthetic construct
  source 1..80: mol_type = other DNA
gttcgatttgcatccctgttcctggtaccactgcaccctgtgtaaaaaaagaaataagaaatgaagtgtagtcattattc

SEQ ID NO: 42521 - DNA, 80 bp, synthetic construct; identical to SEQ ID NO: 11467
  source 1..80: mol_type = other DNA

SEQ ID NO: 42522 - DNA, 80 bp, synthetic construct
  source 1..80: mol_type = other DNA
tgtattttcagtagagacggggtttcaccatattggccaggatagtctcaaactcctaaactcaggtgatccgcccgcct

SEQ ID NO: 42523 - DNA, 80 bp, synthetic construct
  source 1..80: mol_type = other DNA
cagtccaaattggtgtaatctccatttttctggttcttgtatagcctttgaagcattgacatctacccctggttgatcat

SEQ ID NO: 42524 - DNA, 80 bp, synthetic construct
  source 1..80: mol_type = other DNA
acagagctgcctctgtctgttttcttgaccaaaagtcaaaacagacagtatgagaaatgagataaattaccaaaattgtg

SEQ ID NO: 42525 - DNA, 80 bp, synthetic construct; identical to SEQ ID NO: 11468
  source 1..80: mol_type = other DNA

SEQ ID NO: 42526 - DNA, 80 bp, synthetic construct
  source 1..80: mol_type = other DNA
gaaaacatccttaacaaacattggcagacaatagaaagccacgtaaaaaaggattacattccatgaccaatgggattcat

SEQ ID NO: 42527 - DNA, 80 bp, synthetic construct
  source 1..80: mol_type = other DNA
ggggaccttcctcaccctgataaagggcatctataaaaaacccacaactaaaatcatgcttgctgaagaaagactgaatg

SEQ ID NO: 42528 - DNA, 80 bp, synthetic construct
  source 1..80: mol_type = other DNA
ccttgtctgtagaattcacaagcagataaaagcctgctagcactaaaaaatgaatccagaagctcccataggatataaaa

SEQ ID NO: 42529 - DNA, 80 bp, synthetic construct; identical to SEQ ID NO: 11469
  source 1..80: mol_type = other DNA

SEQ ID NO: 42530 - DNA, 80 bp, synthetic construct
  source 1..80: mol_type = other DNA
gtcatataaaactacaataatccagacagtgtgaaagcgagagacacagagattaatgaacagaagtgagaatctagaaa

SEQ ID NO: 42531 - DNA, 80 bp, synthetic construct
  source 1..80: mol_type = other DNA
gagaaaatttttgtgacattgagtagttaggcaaaagattcttacataaaatacaaaaaacatgatctacagatgaaaaa

SEQ ID NO: 42532 - DNA, 80 bp, synthetic construct
  source 1..80: mol_type = other DNA
attacatctgtgatgaagaacatgtatccagaatatgtgaaaagttcttaaactcaatgtaagaagatgagcaactcaac

SEQ ID NO: 42533 - DNA, 80 bp, synthetic construct; identical to SEQ ID NO: 11470
  source 1..80: mol_type = other DNA

SEQ ID NO: 42534 - DNA, 80 bp, synthetic construct
  source 1..80: mol_type = other DNA
agagttcttaaacataacaccaaaagtatgatccataaaagttaataaattggatcttatcaacactaaaaactgttgtt

SEQ ID NO: 42535 - DNA, 80 bp, synthetic construct
  source 1..80: mol_type = other DNA
acatgaacagacatttcactgaagaggataaatactgggctaataagcagatgaataggtgctcaacatcattatccagt

SEQ ID NO: 42536 - DNA, 80 bp, synthetic construct
  source 1..80: mol_type = other DNA
gttttcttcaaaccgaacatgcaatttaccttatgactagcaattgccctcctaggcacttatttcaaacgagggaatac

SEQ ID NO: 42537 - DNA, 80 bp, synthetic construct; identical to SEQ ID NO: 11471
  source 1..80: mol_type = other DNA

SEQ ID NO: 42538 - DNA, 80 bp, synthetic construct
  source 1..80: mol_type = other DNA
agcactatggaaaagtcaacacaatgaaacaggcagatggcatcttggtattactgtgaaaacaagtctgcctccaggac

SEQ ID NO: 42539 - DNA, 80 bp, synthetic construct
  source 1..80: mol_type = other DNA
ttcttccaacttataactgtataaattttcaaatgtgcaaagaagctgaaagaatggtgcggtaaaattcaagctaccac

SEQ ID NO: 42540 - DNA, 80 bp, synthetic construct
  source 1..80: mol_type = other DNA
taggtacaatgtgcttgtctccagtgctggatgctctgaaggccctgactttaccacaaccaatatagcaatgtagcaaa

SEQ ID NO: 42541 - DNA, 80 bp, synthetic construct; identical to SEQ ID NO: 11472
  source 1..80: mol_type = other DNA

SEQ ID NO: 42542 - DNA, 80 bp, synthetic construct
  source 1..80: mol_type = other DNA
ccctcatccttctcttgcatccaggcaggtcctgcatccactctggctgcacagaaggctcccatccctgccttggtctg

SEQ ID NO: 42543 - DNA, 80 bp, synthetic construct
  source 1..80: mol_type = other DNA
agtctgaactgatggcgggagatgctgatgcttgctttactcatcctcaatcccagctcacttattcttcattaattcaa

SEQ ID NO: 42544 - DNA, 80 bp, synthetic construct
  source 1..80: mol_type = other DNA
agggtcagcccctgaacactggctgcaaatgtccccccatcccttcccagccctttcggtgttgctgtgaatctgtccct

SEQ ID NO: 42545 - DNA, 80 bp, synthetic construct; identical to SEQ ID NO: 11473
  source 1..80: mol_type = other DNA

SEQ ID NO: 42546 - DNA, 80 bp, synthetic construct
  source 1..80: mol_type = other DNA
tatatactaacccttttcattcatccaaccacaagaaataaatgctcgtagtttccccatgtcatagatgaggaaaatga

SEQ ID NO: 42547 - DNA, 80 bp, synthetic construct
  source 1..80: mol_type = other DNA
accaggtgttgacccaggccttgcaggctcacgcgctctggaaaaaagagagaaaccaataaatgctcccctgggtgcag

SEQ ID NO: 42548 - DNA, 80 bp, synthetic construct
  source 1..80: mol_type = other DNA
acctgccctgtgtccaccatccattgtgcagtgagtgaaaggacccaggactaaggaacaagacccaggaggaaactcag

SEQ ID NO: 42549 - DNA, 80 bp, synthetic construct; identical to SEQ ID NO: 11474
  source 1..80: mol_type = other DNA

SEQ ID NO: 42550 - DNA, 80 bp, synthetic construct
  source 1..80: mol_type = other DNA
ctgtgcttgctcctgcctgtccactcaaccctggaaatgcagctccaccccagggctgctgcttggtgaggctgcaagcc

SEQ ID NO: 42551 - DNA, 80 bp, synthetic construct
  source 1..80: mol_type = other DNA
ctgtctcccacatggaccctctgagaaacgaagccccaaatttgacttcctgttctattcaacatcctttacaacatcag

SEQ ID NO: 42552 - DNA, 80 bp, synthetic construct
  source 1..80: mol_type = other DNA
agaactgacaatccctctataggagacaccgcaggtgagagcaggagcaaccacagacctgcactgcccgtgctgtggtt

SEQ ID NO: 42553 - DNA, 80 bp, synthetic construct; identical to SEQ ID NO: 11475
  source 1..80: mol_type = other DNA

SEQ ID NO: 42554 - DNA, 80 bp, synthetic construct
  source 1..80: mol_type = other DNA
gggtactatgaccctcgggggctggaaaaagtaacacctggacatgggatgaaaacagggaccacagctgccctgacaga

SEQ ID NO: 42555 - DNA, 80 bp, synthetic construct
  source 1..80: mol_type = other DNA
cagatgaggcatatggggagctgcaaagtggacagaggatggccatgtgcactcaggactctccctgttacaaggggacc

SEQ ID NO: 42556 - DNA, 80 bp, synthetic construct
  source 1..80: mol_type = other DNA
agatcacatctgcctttactatttgctccctctgagatagtgatcatccaggccctcagcaatcagcacgcaattcccaa

SEQ ID NO: 42557 - DNA, 80 bp, synthetic construct; identical to SEQ ID NO: 11476
  source 1..80: mol_type = other DNA

SEQ ID NO: 42558 - DNA, 80 bp, synthetic construct
  source 1..80: mol_type = other DNA
atagataattgtaccctttcttatcaactaagtgcagccattagggacataagtcaaatgtttaaagagtcctgagacaa

SEQ ID NO: 42559 - DNA, 80 bp, synthetic construct
  source 1..80: mol_type = other DNA
ggaataaattgttgaaactctccctggtgtgcctgcattccagacacccaatattgcaaaaccgtcactaacactctcac

SEQ ID NO: 42560 - DNA, 80 bp, synthetic construct
  source 1..80: mol_type = other DNA
ttctatctggatgtcctggctcctcgcagaagccatagacaaacttgaaactgttattcaggacacaatgaaagtgacat

SEQ ID NO: 42561 - DNA, 80 bp, synthetic construct; identical to SEQ ID NO: 11477
  source 1..80: mol_type = other DNA

SEQ ID NO: 42562 - DNA, 80 bp, synthetic construct
  source 1..80: mol_type = other DNA
tatggaatgattcacattcatgtgggatccacaacacatttatttatcatttgcctcagggctattgtaactcctctgcc

SEQ ID NO: 42563 - DNA, 80 bp, synthetic construct
  source 1..80: mol_type = other DNA
tgcactggagtccttggcaaaacaagcacactccagaaggtgaaggtaaaccttacagagcttcaagagtggccactgaa

SEQ ID NO: 42564 - DNA, 80 bp, synthetic construct
  source 1..80: mol_type = other DNA
tgatgagcctctttgagttctgatgacaccacattccacatttaggtgtgttgctttggcccacactctaggtgacatag

SEQ ID NO: 42565 - DNA, 80 bp, synthetic construct
  source 1..80: mol_type = other DNA
cacaatgaagggcctgggattctggagtaagatcatgtcatccacagcagagacatatgccccctgttagaagcaacatt

SEQ ID NO: 42566 - DNA, 80 bp, synthetic construct; identical to SEQ ID NO: 11478
  source 1..80: mol_type = other DNA

SEQ ID NO: 42567 - DNA, 80 bp, synthetic construct
  source 1..80: mol_type = other DNA
agcccatgatgtgccctagtggggcgctatttctttaggcgaccagccactaagtaacaagtgactacatttagctactt

SEQ ID NO: 42568 - DNA, 80 bp, synthetic construct
  source 1..80: mol_type = other DNA
tgaaggacccatttggcctggaaagttttaaagtttccatggctgtgggttccactaatcctatcaccatctgcaccacc

SEQ ID NO: 42569 - DNA, 80 bp, synthetic construct
  source 1..80: mol_type = other DNA
aagtgccatctttcagaacatggtacattgtttgaatcagagatgtctctatggtgctgtgttctcaatggaagaacatg

SEQ ID NO: 42570 - DNA, 80 bp, synthetic construct
  source 1..80: mol_type = other DNA
ctggtttccaaaggagggtacccttaaaagtagacaaaagagagcccattgaactacacattactttagtcaccagagaa

SEQ ID NO: 42571 - DNA, 80 bp, synthetic construct; identical to SEQ ID NO: 11479
  source 1..80: mol_type = other DNA

SEQ ID NO: 42572 - DNA, 80 bp, synthetic construct
  source 1..80: mol_type = other DNA
ttcctgggagacaggggactcctctgatggccaatggtggctccgggtctcctccatggccttgctcaactctccttaga

SEQ ID NO: 42573 - DNA, 80 bp, synthetic construct
  source 1..80: mol_type = other DNA
cccatgatggcacttgctttttggaggatttggactacaaaatcattttcatctacacaccagtgtcctcttattccaat

SEQ ID NO: 42574 - DNA, 80 bp, synthetic construct
  source 1..80: mol_type = other DNA
catttccattattctatacaggttacgtacatctgctttatttccttccattttcataatattggccatacgtagggttt

SEQ ID NO: 42575 - DNA, 80 bp, synthetic construct; identical to SEQ ID NO: 11480
  source 1..80: mol_type = other DNA

SEQ ID NO: 42576 - DNA, 80 bp, synthetic construct
  source 1..80: mol_type = other DNA
ataattctgcagccaagacagcggctttcaactcaattccttcaactcagtgttttcagaacacatcatcaacatcaagt

SEQ ID NO: 42577 - DNA, 80 bp, synthetic construct
  source 1..80: mol_type = other DNA
atataatgaagggggatgaacacagaaataaagacaaagacaaaaagatctgttctaaaagaaggggtcgggggcttctt

SEQ ID NO: 42578 - DNA, 80 bp, synthetic construct
  source 1..80: mol_type = other DNA
aatacaaaaattagctgggcgtggtggtgcatgcctgtaatcccaactactcgggaggctgaggcaggagaattgcttga

SEQ ID NO: 42579 - DNA, 80 bp, synthetic construct; identical to SEQ ID NO: 11481
  source 1..80: mol_type = other DNA

SEQ ID NO: 42580 - DNA, 80 bp, synthetic construct
  source 1..80: mol_type = other DNA
taactcctatatgtaatgtgcatcatgggaaaataaatgcagtaggaatttgctgtactggaagcttaaaaaccatcaaa

SEQ ID NO: 42581 - DNA, 80 bp, synthetic construct
  source 1..80: mol_type = other DNA
acacatctaaataaaggaataataatcacaagactcaggatggagtctccttttgggggatgtgaatgggcagcagccca

SEQ ID NO: 42582 - DNA, 80 bp, synthetic construct
  source 1..80: mol_type = other DNA
tgttctgaaaacattgagttgaaagaattgacttaaattcctaattccttaaacagattttttcaaagtaaaatatgctt

SEQ ID NO: 42583 - DNA, 80 bp, synthetic construct; identical to SEQ ID NO: 11482
  source 1..80: mol_type = other DNA

SEQ ID NO: 42584 - DNA, 80 bp, synthetic construct
  source 1..80: mol_type = other DNA
gcgaaaacaaagaaacaaacaaaaccacttcagaagcacctgatggcatgctatttagaatcatagtggtgtccaaatca

SEQ ID NO: 42585 - DNA, 80 bp, synthetic construct
  source 1..80: mol_type = other DNA
ctgcatcaaaccgaagttattggcatgctagatgtgttgactgaagtatgagattcacatctttgtaaatgaaaagcaat

SEQ ID NO: 42586 - DNA, 80 bp, synthetic construct
  source 1..80: mol_type = other DNA
acgatatttcaataagaaaactggcactaggggcatacttcccctaaatttgagacattttagacaaaacaaagacttat

SEQ ID NO: 42587 - DNA, 80 bp, synthetic construct; identical to SEQ ID NO: 11483
  source 1..80: mol_type = other DNA

SEQ ID NO: 42588 - DNA, 80 bp, synthetic construct
  source 1..80: mol_type = other DNA
aaaaacaggcacatagaccaatggaacagaatagagaactcagaaataagaccacacatctaaaaccctgtgatcttcaa

SEQ ID NO: 42589 - DNA, 80 bp, synthetic construct
  source 1..80: mol_type = other DNA
aaaactataaaaaccctggaagaaaatctaggcaataccaatcaggacatagggatgggcaaagattttatgatgaaaat

SEQ ID NO: 42590 - DNA, 80 bp, synthetic construct
  source 1..80: mol_type = other DNA
agaagctacaaagaacttaagcaaatttacaccaaaaaaaaagcttcattaaaaagtggacaaaggacctaaacagacac

SEQ ID NO: 42591 - DNA, 80 bp, synthetic construct; identical to SEQ ID NO: 11484
  source 1..80: mol_type = other DNA

SEQ ID NO: 42592 - DNA, 80 bp, synthetic construct
  source 1..80: mol_type = other DNA
cccacaaatgaggaactggataaagaaaatatggtacatatacaccacggaatattatgcaaccataaaaaggaatgaga

SEQ ID NO: 42593 - DNA, 80 bp, synthetic construct
  source 1..80: mol_type = other DNA
gttcggggagggcagtgatggggggatcattaggaaaaatagctaatgaatgccagggttaacacctaggtgatgggttg

SEQ ID NO: 42594 - DNA, 80 bp, synthetic construct
  source 1..80: mol_type = other DNA
tacaaaatcctgaaacaatagttttaattttgcttttaacatatacgtaagtcctttagtacagctctctttcagaggtg

SEQ ID NO: 42595 - DNA, 80 bp, synthetic construct; identical to SEQ ID NO: 11485
  source 1..80: mol_type = other DNA

SEQ ID NO: 42596 - DNA, 80 bp, synthetic construct
  source 1..80: mol_type = other DNA
ctcattcctttttatggctgcataatattccatggtgtatatgtaccatataaggggattttccccacttcactctgcat

SEQ ID NO: 42597 - DNA, 80 bp, synthetic construct
  source 1..80: mol_type = other DNA
gtgagaacagactaatacaacttctaactgatagagtaatgttgacataacagtttgtgactctgggtgtagaatgtgaa

SEQ ID NO: 42598 - DNA, 80 bp, synthetic construct
  source 1..80: mol_type = other DNA
atgtgactaagccatgtttcacatgaatccctagccccagtgaagccctcagacgatgcagccctaggctgacaactgga

SEQ ID NO: 42599 - DNA, 80 bp, synthetic construct; identical to SEQ ID NO: 11486
  source 1..80: mol_type = other DNA

SEQ ID NO: 42600 - DNA, 80 bp, synthetic construct
  source 1..80: mol_type = other DNA
aattaacatgcctggctaattttctaatttttttgtagagatgggggtttcaccatgttgcccaggctgatcttgaactt

SEQ ID NO: 42601 - DNA, 80 bp, synthetic construct
  source 1..80: mol_type = other DNA
gagaatttccacggctgaagaggatgtattttattactattcacaatgatcactttacttgaacttcaatttccaactgt

SEQ ID NO: 42602 - DNA, 80 bp, synthetic construct
  source 1..80: mol_type = other DNA
aattagttgactttaggctgagtttatcctgcttggactgtcctaataaggagagtccttgaaaggactgggttcttcct

SEQ ID NO: 42603 - DNA, 80 bp, synthetic construct; identical to SEQ ID NO: 11487
  source 1..80: mol_type = other DNA

SEQ ID NO: 42604 - DNA, 80 bp, synthetic construct
  source 1..80: mol_type = other DNA
actttgagaccagctaggataatatagtgagacactcgtctctacatttctttttaattagctgggcatggtggcacttg

SEQ ID NO: 42605 - DNA, 80 bp, synthetic construct
  source 1..80: mol_type = other DNA
tgtttaaagccaatgtttgtgacaatttgttacccagtcttataaaattcatacacagactcaaaagactcctggaatga

SEQ ID NO: 42606 - DNA, 80 bp, synthetic construct
  source 1..80: mol_type = other DNA
gccctcatatgctcaagtgcctgacattctagaagcttcacaagaatgaggtggagccactggagtgttttaggtggaga

SEQ ID NO: 42607 - DNA, 80 bp, synthetic construct; identical to SEQ ID NO: 11488
  source 1..80: mol_type = other DNA

SEQ ID NO: 42608 - DNA, 80 bp, synthetic construct
  source 1..80: mol_type = other DNA
actaagtattcctaaaaaatatacactccactcacatgtggatacttcctaaaaacaggcagtgcgtgagcactagtgag

SEQ ID NO: 42609 - DNA, 80 bp, synthetic construct
  source 1..80: mol_type = other DNA
ataaaacaagcgggagtcacagatacactgtctgggaaagtgaaacttaagagctttgtgagtcgtgttgtaatgctttt

SEQ ID NO: 42610 - DNA, 80 bp, synthetic construct
  source 1..80: mol_type = other DNA
tctattctatctcatgcactcaggcacaacttttccagatttaagggggaaaaaaaaccctgtctttacacctacaatcc

SEQ ID NO: 42611 - DNA, 80 bp, synthetic construct; identical to SEQ ID NO: 11489
  source 1..80: mol_type = other DNA

SEQ ID NO: 42612 - DNA, 80 bp, synthetic construct
  source 1..80: mol_type = other DNA
tcactcccattaggtgacaggtttttagagaagccaatcagcgtcgccgcggtcctggttctaaagtcctcgctcaccca

SEQ ID NO: 42613 - DNA, 80 bp, synthetic construct
  source 1..80: mol_type = other DNA
gcgggggcgcaggactcggcagccgcgccgggaggagggtcgggcgggtctcaacccctcctcgcccccaggctcccact

SEQ ID NO: 42614 - DNA, 80 bp, synthetic construct
  source 1..80: mol_type = other DNA
ggagtattgggaagaggagacacggaacaccaaggcccacgcacagactgacagaatgaacctgcagaccctgcgcggct

SEQ ID NO: 42615 - DNA, 80 bp, synthetic construct; identical to SEQ ID NO: 11490
  source 1..80: mol_type = other DNA

SEQ ID NO: 42616 - DNA, 80 bp, synthetic construct
  source 1..80: mol_type = other DNA
tctccaagcgcaagtgtgaggcggccaatgtggctgaacaaaggagagcctacctggagggcacgtgcgtggagtggctc

SEQ ID NO: 42617 - DNA, 80 bp, synthetic construct
  source 1..80: mol_type = other DNA
gggagaggaatcctcctgggtttccagatcctgtaccagagagtgattctgagggtccgtcctgctctctgggacaatta

SEQ ID NO: 42618 - DNA, 80 bp, synthetic construct
  source 1..80: mol_type = other DNA
ctgagtcccttggcctccactcaggtcagaaccggaggtccctgctcccccgctcagagactagaactttccaaggaata

SEQ ID NO: 42619 - DNA, 80 bp, synthetic construct; identical to SEQ ID NO: 11491
  source 1..80: mol_type = other DNA

SEQ ID NO: 42620 - DNA, 80 bp, synthetic construct
  source 1..80: mol_type = other DNA
tgccttctggagaggagcagagatacacgtgccatgtgcagcatgaggggctgccggagcccctcatgctgagatggagt

SEQ ID NO: 42621 - DNA, 80 bp, synthetic construct
  source 1..80: mol_type = other DNA
tgctggcctggttgtccttgcagctgtagtcactggagctgcggtcgctgctgtgctgtggagaaagaagagctcaggta

SEQ ID NO: 42622 - DNA, 80 bp, synthetic construct
  source 1..80: mol_type = other DNA
cctgtgacaatgaaggacagatttattaccttgatgattgtagtgatggggacctgatcccagtaatcacaggtcaggag

SEQ ID NO: 42623 - DNA, 80 bp, synthetic construct; identical to SEQ ID NO: 11492
  source 1..80: mol_type = other DNA

SEQ ID NO: 42624 - DNA, 80 bp, synthetic construct
  source 1..80: mol_type = other DNA
tttttgttctactctaggcagtgacagtgcccagggctctaatgtgtctctcacggcttgtaaatgtgacaccccggggg

SEQ ID NO: 42625 - DNA, 80 bp, synthetic construct
  source 1..80: mol_type = other DNA
atatgaatttgttcatgaatatttttctgtagtgtgaaacagctgccctgtgtgggactgagtggcaagtccctttgtga

SEQ ID NO: 42626 - DNA, 80 bp, synthetic construct
  source 1..80: mol_type = other DNA
gctgggatgtctccgtctctgtctcaaatttgtggtccactgagctataacttacttctgtattaaaattagaatctgag

SEQ ID NO: 42627 - DNA, 80 bp, synthetic construct
  source 1..80: mol_type = other DNA
aaaataaatggaagacatgagaactttccacagtacacgtgtttcttgtgctgatttgttgcaggagaggagagtagatg

SEQ ID NO: 42628 - DNA, 80 bp, synthetic construct; identical to SEQ ID NO: 11493
  source 1..80: mol_type = other DNA

SEQ ID NO: 42629 - DNA, 80 bp, synthetic construct
  source 1..80: mol_type = other DNA
tctcagcctccctagtaactgggagtacaggcacatgccacaatacccagctaattttttgtatttttagtaaagacggg

SEQ ID NO: 42630 - DNA, 80 bp, synthetic construct
  source 1..80: mol_type = other DNA
aaaggaagcagattctgaaacttcccgagaggagaggtcccagagtttttcattgtagtttactttctgttggaactcct

SEQ ID NO: 42631 - DNA, 80 bp, synthetic construct
  source 1..80: mol_type = other DNA
aattggagccataagccttgggttatctttcctcaagagacaaatatggttgtgtgctgcagtgtgcaggaggattggtg

SEQ ID NO: 42632 - DNA, 80 bp, synthetic construct
  source 1..80: mol_type = other DNA
ctacattaataaagatattgcctttagaataggggggcgcactacagtaatcatccattcaagtggcatttgttgtctgc

SEQ ID NO: 42633 - DNA, 80 bp, synthetic construct; identical to SEQ ID NO: 11494
  source 1..80: mol_type = other DNA

SEQ ID NO: 42634 - DNA, 80 bp, synthetic construct
  source 1..80: mol_type = other DNA
caggcagatgatatagtataagcagagtaggaacagaaaatgcttgagttagaaggtggcaagtgctgtgtggcaggtga

SEQ ID NO: 42635 - DNA, 80 bp, synthetic construct
  source 1..80: mol_type = other DNA
atgtctcagaaagttcttttcaggcagggaaaccttcagtgcagatgcactagggcaggaaattgtctgtgttcctggaa

SEQ ID NO: 42636 - DNA, 80 bp, synthetic construct
  source 1..80: mol_type = other DNA
ttatcctttgaaagcttctctctggctgctgtgctgagaacagaattgagaggtgggggactagtgaggcagtgggaaaa

SEQ ID NO: 42637 - DNA, 80 bp, synthetic construct; identical to SEQ ID NO: 11495
  source 1..80: mol_type = other DNA

SEQ ID NO: 42638 - DNA, 80 bp, synthetic construct
  source 1..80: mol_type = other DNA
acaggtaggtgaaagtcagggaagttatggtctgctgttggttataataagtcacagattattgtgctttctcagataat

SEQ ID NO: 42639 - DNA, 80 bp, synthetic construct
  source 1..80: mol_type = other DNA
attagaaggcagtaaatgaaaatggacagacttaaacccaatgaggtcaacaatgacattaaacgtaatggactcagaca

SEQ ID NO: 42640 - DNA, 80 bp, synthetic construct
  source 1..80: mol_type = other DNA
cacatggagatgccatttagaaaaattacagcacatgagtctcctgagacatagagtacatgtagacagctcacagtgtc

SEQ ID NO: 42641 - DNA, 80 bp, synthetic construct; identical to SEQ ID NO: 11496
  source 1..80: mol_type = other DNA

SEQ ID NO: 42642 - DNA, 80 bp, synthetic construct
  source 1..80: mol_type = other DNA
atccagagcagaatcgagaacacattccctgtgctaaaggaatcagaactctactaggggtcatagcagatatcatgcaa

SEQ ID NO: 42643 - DNA, 80 bp, synthetic construct
  source 1..80: mol_type = other DNA
gttagaatctttaaagaaacaacatctttttaaagtggccttatgtggaccaaagcagagatgagctcaaatgtcaggtg

SEQ ID NO: 42644 - DNA, 80 bp, synthetic construct
  source 1..80: mol_type = other DNA
aaattcttaatagggctgctgttgagaaacccgcccgagaggtaagtgctgtaatgtcctcaccatttcacagattaaga

SEQ ID NO: 42645 - DNA, 80 bp, synthetic construct
  source 1..80: mol_type = other DNA
cctggtgttgacactgggcctgtggccaaatgaggcttgagggaaaaggaaaacgggtttaggtagcgggatctccttca

SEQ ID NO: 42646 - DNA, 80 bp, synthetic construct; identical to SEQ ID NO: 11497
  source 1..80: mol_type = other DNA

SEQ ID NO: 42647 - DNA, 80 bp, synthetic construct
  source 1..80: mol_type = other DNA
tgacttcattacaggacattggatattaatattcatccgatcaactgggggcccaagataccactcttcccccaacagtt

SEQ ID NO: 42648 - DNA, 80 bp, synthetic construct
  source 1..80: mol_type = other DNA
aagaaatacaactttggcaaaatatccaagtcacttttctaagccccaggcagcagctcaaaacaaacaacaccaaaaac

SEQ ID NO: 42649 - DNA, 80 bp, synthetic construct
  source 1..80: mol_type = other DNA
ttcagcagtgcatagtgaggccatttctgtgtaaaaagatagaatctccttggattcctgatgtttacatttactactca

SEQ ID NO: 42650 - DNA, 80 bp, synthetic construct; identical to SEQ ID NO: 11498
  source 1..80: mol_type = other DNA

SEQ ID NO: 42651 - DNA, 80 bp, synthetic construct
  source 1..80: mol_type = other DNA
acaactgtgaagtaaagacatgtaaataaattcatggtgctcccatgtattcgtgctcattgcatcttacaaatgtgtca

SEQ ID NO: 42652 - DNA, 80 bp, synthetic construct
  source 1..80: mol_type = other DNA
aaaactcttaaaagaaaatactgagggaaagtcttatggtcattagaattggtagtggtttcttggctggtgaccaaaag

SEQ ID NO: 42653 - DNA, 80 bp, synthetic construct
  source 1..80: mol_type = other DNA
ccagcactttgggaggccaaagtgggtggatcacctgaggtcaggagttcgaaatcagcctggccaacatggcaaaaccc

SEQ ID NO: 42654 - DNA, 80 bp, synthetic construct
  source 1..80: mol_type = other DNA
tgagattgcaccattgcactccagctggggcatcagagagagactccgtctcaaaaaaaaaaaaaaaaaaaaaaaaaaaa

SEQ ID NO: 42655 - DNA, 80 bp, synthetic construct; identical to SEQ ID NO: 11499
  source 1..80: mol_type = other DNA

SEQ ID NO: 42656 - DNA, 80 bp, synthetic construct
  source 1..80: mol_type = other DNA
ccccaaaaattgaaagcaggtatgcacacagataattgtacagtcatgctcatagcagtgctattcccaatagccaaaag

SEQ ID NO: 42657 - DNA, 80 bp, synthetic construct
  source 1..80: mol_type = other DNA
atatttcacttatatgaggcacctagaataagcaaattcacaaaaacagaaagtagaatacaggttaccaggggctgaag

SEQ ID NO: 42658 - DNA, 80 bp, synthetic construct
  source 1..80: mol_type = other DNA
gtatagtatgtgtgttttaccacaattttaaaaatatatatcaacaccaaatccaatcacttctcactcctctgccacct

SEQ ID NO: 42659 - DNA, 80 bp, synthetic construct; identical to SEQ ID NO: 11500
  source 1..80: mol_type = other DNA

SEQ ID NO: 42660 - DNA, 80 bp, synthetic construct
  source 1..80: mol_type = other DNA
ttaaatgtcccatggtcaagtgttcagaaatgtcttgtccagtgacctcttctgaaatctatcccctgccattcccacca

SEQ ID NO: 42661 - DNA, 80 bp, synthetic construct
  source 1..80: mol_type = other DNA
atagatgatagatgatagatagatgttagatgatgatagatagatagatagatagatagatagatagatagatagataga

SEQ ID NO: 42662 - DNA, 80 bp, synthetic construct
  source 1..80: mol_type = other DNA
ggataaaggggctcactggtgcaaaagtcagagtccaaagatcatcgaacctggagttttgatgtccaaggcaggagaag

SEQ ID NO: 42663 - DNA, 80 bp, synthetic construct; identical to SEQ ID NO: 11501
  source 1..80: mol_type = other DNA

SEQ ID NO: 42664 - DNA, 80 bp, synthetic construct
  source 1..80: mol_type = other DNA
ggcatgtgccaccaagcccggctaattcttttgaattttttgtagagacagggtttctctatgttgcctaggctggtcac

SEQ ID NO: 42665 - DNA, 80 bp, synthetic construct
  source 1..80: mol_type = other DNA
aaaagacaagatgaaagcacatggatctaaaagaaccctggtgacttctccttgtttgagatgggatgcagcttctagaa

SEQ ID NO: 42666 - DNA, 80 bp, synthetic construct
  source 1..80: mol_type = other DNA
cccatctatattaaaaacacaaaattagccaggcgtggtagtgcacatctgtaatcccagctactcgaggggctgaggca

SEQ ID NO: 42667 - DNA, 80 bp, synthetic construct; identical to SEQ ID NO: 11502
  source 1..80: mol_type = other DNA

SEQ ID NO: 42668 - DNA, 80 bp, synthetic construct
  source 1..80: mol_type = other DNA
gtatttttaacattcaaaataaaacatttgaagtaaaataacaatgaaaagtggctgaacactgtggtgggcacctgtag

SEQ ID NO: 42669 - DNA, 80 bp, synthetic construct
  source 1..80: mol_type = other DNA
atctcaacctaaaacaaatttctcatttgaagtccatatggcagaaatgcctactgatggctcctccagagagtaaaaaa

SEQ ID NO: 42670 - DNA, 80 bp, synthetic construct
  source 1..80: mol_type = other DNA
tataattaccatcacacctgagagagtgagatggattcttttcttccacagatgaaaatctgagtccctgagaacctagg

SEQ ID NO: 42671 - DNA, 80 bp, synthetic construct; identical to SEQ ID NO: 11503
  source 1..80: mol_type = other DNA

SEQ ID NO: 42672 - DNA, 80 bp, synthetic construct
  source 1..80: mol_type = other DNA
ctgtactcactggtaagcaggatcctttttaggaaagcaaaggactttgctgacttaagcaaaacattttctctccaaat

SEQ ID NO: 42673 - DNA, 80 bp, synthetic construct
  source 1..80: mol_type = other DNA
tttgctctgggtaggagatgatgtcctgagaagaaaagacagataggcagattctcaagcaaactcaggagtttactata

SEQ ID NO: 42674 - DNA, 80 bp, synthetic construct
  source 1..80: mol_type = other DNA
aatgttatgtaaccatcatcactctctagttccagagtgtttttatcacctcagggggaactctgcacccattaagcagt

SEQ ID NO: 42675 - DNA, 80 bp, synthetic construct
  source 1..80: mol_type = other DNA
ctggcttccttcacttgtcttgttttcaagattcagcaatgttttagcatatgccagtgctttattcattttatgaccaa

SEQ ID NO: 42676 - DNA, 80 bp, synthetic construct; identical to SEQ ID NO: 11504
  source 1..80: mol_type = other DNA

SEQ ID NO: 42677 - DNA, 80 bp, synthetic construct
  source 1..80: mol_type = other DNA
gtgtagactggttgattataacgtctctcagtgtggacttctaaaattcttgctgcttaaaatgtatcaagtttgttgga

SEQ ID NO: 42678 - DNA, 80 bp, synthetic construct
  source 1..80: mol_type = other DNA
aatttttttttatttctgcacctcaaactggataatttcaattgtcttacctttaagcttgccgattcttcattctgcat

SEQ ID NO: 42679 - DNA, 80 bp, synthetic construct
  source 1..80: mol_type = other DNA
tgatgttctctatttgagttaagatagttcttctgatttcctttagttttttgcccatagtttcctttagctctgtgaac

SEQ ID NO: 42680 - DNA, 80 bp, synthetic construct; identical to SEQ ID NO: 11505
  source 1..80: mol_type = other DNA

SEQ ID NO: 42681 - DNA, 80 bp, synthetic construct
  source 1..80: mol_type = other DNA
cctcaacactctgctgggcagtttacaatactgctttggccttcatttcctacttgtgcagatattgaaagttagcaaga

SEQ ID NO: 42682 - DNA, 80 bp, synthetic construct
  source 1..80: mol_type = other DNA
tcacccagtttctcctccaggcttttctgtatgtctattacctttctcatgtaatatatttttgccccaagggggcagct

SEQ ID NO: 42683 - DNA, 80 bp, synthetic construct
  source 1..80: mol_type = other DNA
gcagttgcacgatcctggctcactgtagcctcaacctcctgggcttaagcaatcctcccacctcagcctcttgagtagct

SEQ ID NO: 42684 - DNA, 80 bp, synthetic construct
  source 1..80: mol_type = other DNA
cccagcccaatgtaagccatttcttatcatccttcacggagtcacccaacaggaaaaggtagacaaccacaacactttga

SEQ ID NO: 42685 - DNA, 80 bp, synthetic construct; identical to SEQ ID NO: 11506
  source 1..80: mol_type = other DNA

SEQ ID NO: 42686 - DNA, 80 bp, synthetic construct
  source 1..80: mol_type = other DNA
tgcaacctctgcctcccgggttcaagcgattctccttcctcacctcccgagtagctgggactacaggcgcgagccaccac

SEQ ID NO: 42687 - DNA, 80 bp, synthetic construct
  source 1..80: mol_type = other DNA
gtgatgttttacaagcacattgtctctgtgcagaggtggcccttggagttcctatgccactatgttctctgatgtcactc

SEQ ID NO: 42688 - DNA, 80 bp, synthetic construct
  source 1..80: mol_type = other DNA
atggagttgagcctcagataaaagactcaaacttccttggacttcatagaagtcaaaggtgggggtgggaagataaataa

SEQ ID NO: 42689 - DNA, 80 bp, synthetic construct; identical to SEQ ID NO: 11507
  source 1..80: mol_type = other DNA

SEQ ID NO: 42690 - DNA, 80 bp, synthetic construct
  source 1..80: mol_type = other DNA
accagttgcttcttagaggatctgtgtttctcctgtggcaaattttaagatatctgtttctctttaacatcttctgttcc

SEQ ID NO: 42691 - DNA, 80 bp, synthetic construct
  source 1..80: mol_type = other DNA
tcacctgttccaccctgactcatcctgattacttgctccagcctgactcattctggttacctgctccaccctgactcatt

SEQ ID NO: 42692 - DNA, 80 bp, synthetic construct
  source 1..80: mol_type = other DNA
agcctgtgcggtctaaccctagccaataggggaataacacagcagcaggggccacgtgcatcagggataagaaccccttc

SEQ ID NO: 42693 - DNA, 80 bp, synthetic construct; identical to SEQ ID NO: 11508
  source 1..80: mol_type = other DNA

SEQ ID NO: 42694 - DNA, 80 bp, synthetic construct
  source 1..80: mol_type = other DNA
ggagattattttgtattatttgagtggccccaatctgattgcatgatttctttaacctggagatgactggagaaatatgg

SEQ ID NO: 42695 - DNA, 80 bp, synthetic construct
  source 1..80: mol_type = other DNA
tccttgcattcttgggctatataccttggtcaagacagtctgtttataacacattggttaatacagtctactaatatttt

SEQ ID NO: 42696 - DNA, 80 bp, synthetic construct
  source 1..80: mol_type = other DNA
ctgagactacaactctttgccatccgtaatgaatgaacagatctagccactgaacagcaatgacaattttcatcaccaaa

SEQ ID NO: 42697 - DNA, 80 bp, synthetic construct
  source 1..80: mol_type = other DNA
aaaatgcaggtaatagagatgcatattaaaccatagtttggggtgcaatccacaaaatacaaacaacaggaaactctacc

SEQ ID NO: 42698 - DNA, 80 bp, synthetic construct; identical to SEQ ID NO: 11509
  source 1..80: mol_type = other DNA

SEQ ID NO: 42699 - DNA, 80 bp, synthetic construct
  source 1..80: mol_type = other DNA
gattttttttcttttatgtcacctgtgttttatgacaaaaaggcgaacgcagaataaaatgagttatggggcacggttcc

SEQ ID NO: 42700 - DNA, 80 bp, synthetic construct
  source 1..80: mol_type = other DNA
ggacactgagcacccagaacaaccggcagccccaggacccctggcagggctgtctcattactgagtgtgcatccagctcc

SEQ ID NO: 42701 - DNA, 80 bp, synthetic construct
  source 1..80: mol_type = other DNA
tcctctctggacactgagcacccagaacaaccggcagccccaggacccctggcagggctgtctcattactgagtgtgcat

SEQ ID NO: 42702 - DNA, 80 bp, synthetic construct
  source 1..80: mol_type = other DNA
gcattcagctccacgtcgctggagacaatgtccacagtttattttttgagtcctggatgaacctgacaggacatagctga

SEQ ID NO: 42703 - DNA, 80 bp, synthetic construct; identical to SEQ ID NO: 11510
  source 1..80: mol_type = other DNA

SEQ ID NO: 42704 - DNA, 80 bp, synthetic construct
  source 1..80: mol_type = other DNA
acagctcatcgcacaggttcccggtaaaaatcctcctgcccagcctagcgggctctcccttaatcaactgtagcgaaaac

SEQ ID NO: 42705 - DNA, 80 bp, synthetic construct
  source 1..80: mol_type = other DNA
ataataaaataacccatgataagccaatgtttataatgtactaacaccactgagccagtgtttataatgtactgacacac

SEQ ID NO: 42706 - DNA, 80 bp, synthetic construct
  source 1..80: mol_type = other DNA
tccccctttctgggcagcactggtttttttaattatttttgcattcacagtagttctgaaattgcaggatgctgagaccc

SEQ ID NO: 42707 - DNA, 80 bp, synthetic construct; identical to SEQ ID NO: 11511
  source 1..80: mol_type = other DNA

SEQ ID NO: 42708 - DNA, 80 bp, synthetic construct
  source 1..80: mol_type = other DNA
ataagccaatcacaaggaaattccaatactgcgcaattcgttatatgcggcgtctaaactcttagaacctgaaagtagaa

SEQ ID NO: 42709 - DNA, 80 bp, synthetic construct
  source 1..80: mol_type = other DNA
ttatataatatggattttggcgcaatgaaaaaaataattagctctgataccaacttaggaaaagagcacatgaatttatt

SEQ ID NO: 42710 - DNA, 80 bp, synthetic construct
  source 1..80: mol_type = other DNA
agaaaactgtgagacaaaaagagagatccttgctaccccagctattatccatgaaccagcagaaccagcatctcatgaaa

SEQ ID NO: 42711 - DNA, 80 bp, synthetic construct
  source 1..80: mol_type = other DNA
gatgggagcagccagaagggcccaagagggacatttccaagaaagtaaaattaatagaaagttcaaagtctctaatttct

SEQ ID NO: 42712 - DNA, 80 bp, synthetic construct; identical to SEQ ID NO: 11512
  source 1..80: mol_type = other DNA

SEQ ID NO: 42713 - DNA, 80 bp, synthetic construct
  source 1..80: mol_type = other DNA
acgggacggctcttctcgttctgcgttccgcttgcggtcggtagtctctcctccccgcccatgggcggtggttggaggca

SEQ ID NO: 42714 - DNA, 80 bp, synthetic construct
  source 1..80: mol_type = other DNA
cggcctgtcacgttgcccttccctgggcttgtgaggattggctccgcttggacctttgcggtgctcccggagccctccag

SEQ ID NO: 42715 - DNA, 80 bp, synthetic construct
  source 1..80: mol_type = other DNA
acaaaaagaaagagaacaagtaatcttaactattgattccaccatcgtgcagtgcaatagtcaatggctgcaactgaaaa

SEQ ID NO: 42716 - DNA, 80 bp, synthetic construct; identical to SEQ ID NO: 11513
  source 1..80: mol_type = other DNA

SEQ ID NO: 42717 - DNA, 80 bp, synthetic construct
  source 1..80: mol_type = other DNA
atacaaacttgaaagaatatgtctataaacaactctggatagatagcccatgaatgaattccccactccagcatctttac

SEQ ID NO: 42718 - DNA, 80 bp, synthetic construct
  source 1..80: mol_type = other DNA
ctgccttacctgggtggagctgaggccgccctgaccaagaagagcaccacccatctatgtgccccaaaaccagaaagtca

SEQ ID NO: 42719 - DNA, 80 bp, synthetic construct
  source 1..80: mol_type = other DNA
cctacccttcataatcaggaaaccccagagcactttttatcccctccagaatataacacttcagctctgcatcatcacat

SEQ ID NO: 42720 - DNA, 80 bp, synthetic construct; identical to SEQ ID NO: 11514
  source 1..80: mol_type = other DNA

SEQ ID NO: 42721 - DNA, 80 bp, synthetic construct
  source 1..80: mol_type = other DNA
ggaaagttggtccttggctccccggaggagccgtcaccaggacactcactcataaagctcacctgtgataatacaactac

SEQ ID NO: 42722 - DNA, 80 bp, synthetic construct
  source 1..80: mol_type = other DNA
gttgttacattccctatttcatagatgagaaagctgagccagcaagagaaaaagtgctggtgagacctgggcagggcgtt

SEQ ID NO: 42723 - DNA, 80 bp, synthetic construct
  source 1..80: mol_type = other DNA
agagaaaaaatagtaagtgctcccctgggtgcacagtgctgctttttactccctgacgacttctccctcctcagtcagtc

SEQ ID NO: 42724 - DNA, 80 bp, synthetic construct; identical to SEQ ID NO: 11515
  source 1..80: mol_type = other DNA

SEQ ID NO: 42725 - DNA, 80 bp, synthetic construct
  source 1..80: mol_type = other DNA
tgcagctcagtgctcctccacttccagccctgagcaggcagctcctaactgggaagcccattaagaatcccatcagcatg

SEQ ID NO: 42726 - DNA, 80 bp, synthetic construct
  source 1..80: mol_type = other DNA
tctccccagggctgctgcttggggaggctgaaaggccttcctctcctgttcctagcagggattcctagcagggattccac

SEQ ID NO: 42727 - DNA, 80 bp, synthetic construct
  source 1..80: mol_type = other DNA
gagctccacatttgagttcctgtttcatttgatatgggttacaacattagtattggtggaaatccttttaagacccagct

SEQ ID NO: 42728 - DNA, 80 bp, synthetic construct; identical to SEQ ID NO: 11516
  source 1..80: mol_type = other DNA

SEQ ID NO: 42729 - DNA, 80 bp, synthetic construct
  source 1..80: mol_type = other DNA
tctcctgcactgtctctgtctttgcagaaacacaaaacttgctgcttgctcttttcccctcccttcaaacaacctgactg

SEQ ID NO: 42730 - DNA, 80 bp, synthetic construct
  source 1..80: mol_type = other DNA
ccttgctgttttcccttaccattgtatcacggagaccatcccatgaagaaatatcaagaactacactatgtctttctttt

SEQ ID NO: 42731 - DNA, 80 bp, synthetic construct
  source 1..80: mol_type = other DNA
tctttcagagaacaatttgacatcatgtagcatcatatgggaagggtgcagtgaccccactcttacatgcatatcctagg

SEQ ID NO: 42732 - DNA, 80 bp, synthetic construct; identical to SEQ ID NO: 11517
  source 1..80: mol_type = other DNA

SEQ ID NO: 42733 - DNA, 80 bp, synthetic construct
  source 1..80: mol_type = other DNA
gccaggcatggtggcgcaaacctctagtcccagctactcaagaggcctagaagggaggaattgcttaagcctggcaggta

SEQ ID NO: 42734 - DNA, 80 bp, synthetic construct
  source 1..80: mol_type = other DNA
ccaacagttcttgctttgctcagtacagtattgactgaaacacatgcataacagaactgtggaaaatcagggctatctac

SEQ ID NO: 42735 - DNA, 80 bp, synthetic construct
  source 1..80: mol_type = other DNA
acagaaattgagcaaaataaaaaggagtcgttgagtgtgaggaaagctacagagaagtaaagacaggtggagacatgaca

SEQ ID NO: 42736 - DNA, 80 bp, synthetic construct; identical to SEQ ID NO: 11518
  source 1..80: mol_type = other DNA

SEQ ID NO: 42737 - DNA, 80 bp, synthetic construct
  source 1..80: mol_type = other DNA
tccattgcctataagaatataaaacatccattttgaaaatcaatttcatatcatctaataaagttaaacaagctagtcct

SEQ ID NO: 42738 - DNA, 80 bp, synthetic construct
  source 1..80: mol_type = other DNA
tattatcagcaatgaaaatgaaagaactactgatacgtgcaccaacatggattgatcacataggtattacaacaagcgca

SEQ ID NO: 42739 - DNA, 80 bp, synthetic construct
  source 1..80: mol_type = other DNA
tggcaagagtaatatgctgtattggtcaaaattcattgataaatttgatgaagatctgattattttggtatatgtacatt

SEQ ID NO: 42740 - DNA, 80 bp, synthetic construct; identical to SEQ ID NO: 11519
  source 1..80: mol_type = other DNA

SEQ ID NO: 42741 - DNA, 80 bp, synthetic construct
  source 1..80: mol_type = other DNA
ttgggaggccaaggcaggcggatcacgaggtcaggagatcgagaccatcctggctaacattgtgaaaccccgtctctact

SEQ ID NO: 42742 - DNA, 80 bp, synthetic construct
  source 1..80: mol_type = other DNA
gacagagcgagactccatctcaaaaaaagaaaaaaaaagaaagaaagaaaaatctaaatattccaccaaataaatggtga

SEQ ID NO: 42743 - DNA, 80 bp, synthetic construct
  source 1..80: mol_type = other DNA
ccccaggaagtaaaacaaaaactataaggcactgatgaaggaaattgaagagtacacaaaactggaagagccaggcgcag

SEQ ID NO: 42744 - DNA, 80 bp, synthetic construct; identical to SEQ ID NO: 11520
  source 1..80: mol_type = other DNA

SEQ ID NO: 42745 - DNA, 80 bp, synthetic construct
  source 1..80: mol_type = other DNA
acaatataaagttatagtaaccaaatcagcatggtgctggcataaaaacagacacatagactaatggaatacaaaagaga

SEQ ID NO: 42746 - DNA, 80 bp, synthetic construct
  source 1..80: mol_type = other DNA
tcaactcaaaatggattaaagatttaaatgtaagtcccaaaactataaaactactagaagaatgcttacaggaaacactc

SEQ ID NO: 42747 - DNA, 80 bp, synthetic construct
  source 1..80: mol_type = other DNA
ttgctatgtattcatccagcaaggaactaacatctagaatatacaaggaacttaaaaaactcagcagtaaaaacacaaat

SEQ ID NO: 42748 - DNA, 80 bp, synthetic construct; identical to SEQ ID NO: 11521
  source 1..80: mol_type = other DNA

SEQ ID NO: 42749 - DNA, 80 bp, synthetic construct
  source 1..80: mol_type = other DNA
cagtagcgaagttatgaaatcaatgggtgaattcatcaatgggtgaatgaataaatggtggtatatatatacacaatgga

SEQ ID NO: 42750 - DNA, 80 bp, synthetic construct
  source 1..80: mol_type = other DNA
agagagagtagaatgacagttcccagaaactgggaagaatgtaggggtgggaaaatatagagatgcaggttaatggatgc

SEQ ID NO: 42751 - DNA, 80 bp, synthetic construct
  source 1..80: mol_type = other DNA
ggtggatcatgaggtcaggagatcgagaccatcctggctaacatggtgaaaccccgtctctactaaaaatacaaaaaaaa

SEQ ID NO: 42752 - DNA, 80 bp, synthetic construct; identical to SEQ ID NO: 11522
  source 1..80: mol_type = other DNA

SEQ ID NO: 42753 - DNA, 80 bp, synthetic construct
  source 1..80: mol_type = other DNA
aaaatttggcaaatattttcctttttattaagatctttttcattccataagtttaaggagaataaagcccataaagcatc

SEQ ID NO: 42754 - DNA, 80 bp, synthetic construct
  source 1..80: mol_type = other DNA
aaactttggttctctttcttgttttttctattgcaagaccaaaattttagaaaaccaagagaaagatttcagccaaaggg

SEQ ID NO: 42755 - DNA, 80 bp, synthetic construct
  source 1..80: mol_type = other DNA
aggcctcagaagagatcaaccctgcagcaccttgaccttgcacctgtggcctctggaactgtgagacaacacatatttat

SEQ ID NO: 42756 - DNA, 80 bp, synthetic construct; identical to SEQ ID NO: 11523
  source 1..80: mol_type = other DNA

SEQ ID NO: 42757 - DNA, 80 bp, synthetic construct
  source 1..80: mol_type = other DNA
agtaagctaaagaggcttcttttgcaggggattgcaggtattatatgtttttctcctacttttaagatacattttcctaa

SEQ ID NO: 42758 - DNA, 80 bp, synthetic construct
  source 1..80: mol_type = other DNA
cacgtaagcggtggaacaatggcaggcacatgactctctaggcccctagtccagttttctgggttctatgagaattgtag

SEQ ID NO: 42759 - DNA, 80 bp, synthetic construct
  source 1..80: mol_type = other DNA
gtcactaagctgaaagcaggaaagtttatcttctgcacttggtccatcagaactaagatggcagaaagccccactatcta

SEQ ID NO: 42760 - DNA, 80 bp, synthetic construct; identical to SEQ ID NO: 11524
  source 1..80: mol_type = other DNA

SEQ ID NO: 42761 - DNA, 80 bp, synthetic construct
  source 1..80: mol_type = other DNA
attcctggaccacatggctccagcctcctgatcacaatggatcagtggtcttagattccgctccaatatttgaagttttt

SEQ ID NO: 42762 - DNA, 80 bp, synthetic construct
  source 1..80: mol_type = other DNA
actctgtccaaggtacctcccggtgttctcttacttatgttggccatgtcctcatgaatttagtgaaatgggcatgttgt

SEQ ID NO: 42763 - DNA, 80 bp, synthetic construct
  source 1..80: mol_type = other DNA
tatcatagccctggccaatgagcactgaactctagagagaccaagagaccttctaaatattgggacactttagttctgaa

SEQ ID NO: 42764 - DNA, 80 bp, synthetic construct; identical to SEQ ID NO: 11525
  source 1..80: mol_type = other DNA

SEQ ID NO: 42765 - DNA, 80 bp, synthetic construct
  source 1..80: mol_type = other DNA
tctttatgtgtaatacatgactatgactctgacagacaaacctgagagcatagtacgacacttatcaccttcactcatga

SEQ ID NO: 42766 - DNA, 80 bp, synthetic construct
  source 1..80: mol_type = other DNA
tcctaggtatgtggtcttttttacatgaaccgtactgtcactggctcactagctgtcacttcaccaacaatcattccatt

SEQ ID NO: 42767 - DNA, 80 bp, synthetic construct
  source 1..80: mol_type = other DNA
gtggaggcctcttgcaggcataatcttccaacagagaatttccctgggaacctagaaagaagagaagaggctcaagcaaa

SEQ ID NO: 42768 - DNA, 80 bp, synthetic construct
  source 1..80: mol_type = other DNA
agctgggtgtagtagcgggcgcctgtaatcccagctactctggaggctgaggcaggagaatcgcttgaactcaggaggtg

SEQ ID NO: 42769 - DNA, 80 bp, synthetic construct; identical to SEQ ID NO: 11526
  source 1..80: mol_type = other DNA

SEQ ID NO: 42770 - DNA, 80 bp, synthetic construct
  source 1..80: mol_type = other DNA
gatcactctgatggttctggggcttctcttccaggagagaagacaaaaattatgtcaccatcaaggaaagtatccaaaat

SEQ ID NO: 42771 - DNA, 80 bp, synthetic construct
  source 1..80: mol_type = other DNA
ggaagagtttcctttcctgagaattctgcaggaatttccctgacctcatggccacctctcatactttgctcttgtttttt

SEQ ID NO: 42772 - DNA, 80 bp, synthetic construct
  source 1..80: mol_type = other DNA
cctgctgctctatgagccctgaccttggggagacctgggctagtgaggagaggatcaagatgaactgggctggggaggca

SEQ ID NO: 42773 - DNA, 80 bp, synthetic construct
  source 1..80: mol_type = other DNA
tggtccctgtccctctgtcccctccccagctccccctacaccgtaagaagctcccaggtaagcggctccagggccgggcg

SEQ ID NO: 42774 - DNA, 80 bp, synthetic construct; identical to SEQ ID NO: 11527
  source 1..80: mol_type = other DNA

SEQ ID NO: 42775 - DNA, 80 bp, synthetic construct
  source 1..80: mol_type = other DNA
gtctgaatttcttggcactgtgtcttttctcacttattcttctgcaaggaaggaattatatcactggttggatgagacaa

SEQ ID NO: 42776 - DNA, 80 bp, synthetic construct
  source 1..80: mol_type = other DNA
ttcaagtccacctgacttgaaaactcatattgaccttacttaagtactgattccccctttataatccatgccataaactt

SEQ ID NO: 42777 - DNA, 80 bp, synthetic construct
  source 1..80: mol_type = other DNA
ttaaattaaggtatgtacatagttctttcatacataatgctattgtacacttactaggctacagtagagtgtgaatataa

SEQ ID NO: 42778 - DNA, 80 bp, synthetic construct; identical to SEQ ID NO: 11528
  source 1..80: mol_type = other DNA

SEQ ID NO: 42779 - DNA, 80 bp, synthetic construct
  source 1..80: mol_type = other DNA
tggctcagaatggaatggatggccccagttttgatcatctgggaacaggaagattctcagataaaaacccatgttttaga

SEQ ID NO: 42780 - DNA, 80 bp, synthetic construct
  source 1..80: mol_type = other DNA
gacaaatacctcatgttcatgattagccaacttgtgcccactcagtggaaaaagaacccagaattttgcaaaattttcag

SEQ ID NO: 42781 - DNA, 80 bp, synthetic construct
  source 1..80: mol_type = other DNA
gttacagatatgtaaaactacacagtataagtttaaacaacccacaaccaattaacagtgaagataaattaacaaccttt

SEQ ID NO: 42782 - DNA, 80 bp, synthetic construct; identical to SEQ ID NO: 11529
  source 1..80: mol_type = other DNA

SEQ ID NO: 42783 - DNA, 80 bp, synthetic construct
  source 1..80: mol_type = other DNA
tggacagagcccaggtgaaagccacccctgctcctcctcccgcatctctcacaggctcagcaccatcgtcggcctggagt

SEQ ID NO: 42784 - DNA, 80 bp, synthetic construct
  source 1..80: mol_type = other DNA
tctcagtccacatcagcaaaacctcctcagcctctctcaggatgttcctgcatctcacagctccagcagcaacctgggtc

SEQ ID NO: 42785 - DNA, 80 bp, synthetic construct
  source 1..80: mol_type = other DNA
attagagccccatttgcctcactgtaaccattccctgtgggccccaggctgttcttctcaatcctgagtcttgtagctcc

SEQ ID NO: 42786 - DNA, 80 bp, synthetic construct; identical to SEQ ID NO: 11530
  source 1..80: mol_type = other DNA

SEQ ID NO: 42787 - DNA, 80 bp, synthetic construct
  source 1..80: mol_type = other DNA
atgtgtgagtatctgagagaaggctctaggagctaaggatggctcttaacaaggaagtggaaacctcttttctatctgca

SEQ ID NO: 42788 - DNA, 80 bp, synthetic construct
  source 1..80: mol_type = other DNA
taaagccatttggtttgtggtaatttttatggcagcaatagacacccacacagcagagaagatgccctcgcttcctggcc

SEQ ID NO: 42789 - DNA, 80 bp, synthetic construct
  source 1..80: mol_type = other DNA
gcaaggtggccacaggctctgaggacacagatactatcattttatcatatgctgtgatgtaatatcagtggaccactcat

SEQ ID NO: 42790 - DNA, 80 bp, synthetic construct; identical to SEQ ID NO: 11531
  source 1..80: mol_type = other DNA

SEQ ID NO: 42791 - DNA, 80 bp, synthetic construct
  source 1..80: mol_type = other DNA
gcctcctcctggcctgggtgactcttccataccttttctttgtgctcacacatccaatctgccttccccattcttacttc

SEQ ID NO: 42792 - DNA, 80 bp, synthetic construct
  source 1..80: mol_type = other DNA
cagagccagaccctcttctggtgccccaattgccaccccttatcatctacttaaaggtgtcagttcatcaattaatacca

SEQ ID NO: 42793 - DNA, 80 bp, synthetic construct
  source 1..80: mol_type = other DNA
cccacccctggctttttccagccaatgattgaggaaagtagggcagaaactaaggcaggacatttctcttctgaaggctg

SEQ ID NO: 42794 - DNA, 80 bp, synthetic construct; identical to SEQ ID NO: 11532
  source 1..80: mol_type = other DNA

SEQ ID NO: 42795 - DNA, 80 bp, synthetic construct
  source 1..80: mol_type = other DNA
gtgctgagctgagaagttgccttggttagggagtgctatggcagatgcagtgatagaatgccctgcataataaggacagg

SEQ ID NO: 42796 - DNA, 80 bp, synthetic construct
  source 1..80: mol_type = other DNA
agcaaaagggcagataccaaggaatggtagctgaacatcattatgagggccacagtgctccagagatgtttgacactcaa

SEQ ID NO: 42797 - DNA, 80 bp, synthetic construct
  source 1..80: mol_type = other DNA
cacccttctctagtaatggttcccactttcaatgctggaagatgctacacaatcctcacccctatgatgccacgggaatc

SEQ ID NO: 42798 - DNA, 80 bp, synthetic construct; identical to SEQ ID NO: 11533
  source 1..80: mol_type = other DNA

SEQ ID NO: 42799 - DNA, 80 bp, synthetic construct
  source 1..80: mol_type = other DNA
agagggacctgcatcactaagaagtgacggggtattgtcctttgtaggctgggggtgatggtagtaaagatagtcccaga

SEQ ID NO: 42800 - DNA, 80 bp, synthetic construct
  source 1..80: mol_type = other DNA
gggtggtgtcccagggttaggacaggcagctgattgatatctatgataagaaagcaagaattgagaagcaggagggtgaa

SEQ ID NO: 42801 - DNA, 80 bp, synthetic construct
  source 1..80: mol_type = other DNA
cggcaaagaaacatatagccatttactcaggaggttgtacactggggaaaggaaacaggcagaactagggggattattga

SEQ ID NO: 42802 - DNA, 80 bp, synthetic construct; identical to SEQ ID NO: 11534
  source 1..80: mol_type = other DNA

SEQ ID NO: 42803 - DNA, 80 bp, synthetic construct
  source 1..80: mol_type = other DNA
gctgtctgttgtctctacgtaatccagcaatctgtccctgaagaagcctgatgaagcctaaagaatgaactagattactc

SEQ ID NO: 42804 - DNA, 80 bp, synthetic construct
  source 1..80: mol_type = other DNA
attcatgtgggatcctcaaaacattgatttatcatttgtctcagggctattgtaactcccctgacctctatagtatagtc

SEQ ID NO: 42805 - DNA, 80 bp, synthetic construct
  source 1..80: mol_type = other DNA
caaaacaagggcactccagaaggtgaagataaaccttacaaagcttcaagagtggccactcggccaggcgcagtggctca

SEQ ID NO: 42806 - DNA, 80 bp, synthetic construct
  source 1..80: mol_type = other DNA
gctgaggcaggagaatcacttgaacccaggaggcagagattgcagtgagccaagatcgtgccattgcactccagagtggg

SEQ ID NO: 42807 - DNA, 80 bp, synthetic construct; identical to SEQ ID NO: 11535
  source 1..80: mol_type = other DNA

SEQ ID NO: 42808 - DNA, 80 bp, synthetic construct
  source 1..80: mol_type = other DNA
gtgggaaagtcacagtgaaaggcctgggattctggagtaaggtcatgtcattcacagcagagacatatgccacctattag

SEQ ID NO: 42809 - DNA, 80 bp, synthetic construct
  source 1..80: mol_type = other DNA
cttgaatcccatgtttacacccacagaaaatacccaagtctgaagtggcactgaacaaccaaacagacaaatggaagtta

SEQ ID NO: 42810 - DNA, 80 bp, synthetic construct
  source 1..80: mol_type = other DNA
caattgaggcccatgatgtgccccagtggggcactatttctttaggtgactaactagccactaagtaacaagttgactac

SEQ ID NO: 42811 - DNA, 80 bp, synthetic construct; identical to SEQ ID NO: 11536
  source 1..80: mol_type = other DNA

SEQ ID NO: 42812 - DNA, 80 bp, synthetic construct
  source 1..80: mol_type = other DNA
tgcattgtttgaatcagagatgtctctagagtgctgtgttctcaataggaagaacatgtgtgtccaggaatcaaaagatg

SEQ ID NO: 42813 - DNA, 80 bp, synthetic construct
  source 1..80: mol_type = other DNA
ttaaaaggatacaaaagacagcccactgaactacacattccgattgtcacgagagaagttttgattagtatgtgcccaga

SEQ ID NO: 42814 - DNA, 80 bp, synthetic construct
  source 1..80: mol_type = other DNA
agtgtgaacagaatcatccagcaattcagcctgagacagcttgatttccaaggacccagacccatcagggcagaaggttt

SEQ ID NO: 42815 - DNA, 80 bp, synthetic construct
  source 1..80: mol_type = other DNA
gatagccaactgtagctcaaggactcctccatggccttgcttaactctccttagattgcctgtggtctagggcacatcca

SEQ ID NO: 42816 - DNA, 80 bp, synthetic construct; identical to SEQ ID NO: 11537
  source 1..80: mol_type = other DNA

SEQ ID NO: 42817 - DNA, 80 bp, synthetic construct
  source 1..80: mol_type = other DNA
agccctcttacatttccattattctatagaagttaactacatctgttttattttctcctattttgataatattagccaca

SEQ ID NO: 42818 - DNA, 80 bp, synthetic construct
  source 1..80: mol_type = other DNA
tgcctcctgggttcatgccattctcctgcctcagcttcccaagtagctgggactacaggcacctgccaccacgcccagct

SEQ ID NO: 42819 - DNA, 80 bp, synthetic construct
  source 1..80: mol_type = other DNA
tagccctccctctctctctttcttctctatttccattcaacctatcaccttccctccttctttctccctttccttcccct

SEQ ID NO: 42820 - DNA, 80 bp, synthetic construct; identical to SEQ ID NO: 11538
  source 1..80: mol_type = other DNA

SEQ ID NO: 42821 - DNA, 80 bp, synthetic construct
  source 1..80: mol_type = other DNA
ttatcattatctagtatggttaaagtccatacaatgtatcatgcaaccaacccattcctaatcatccactctgggagctt

SEQ ID NO: 42822 - DNA, 80 bp, synthetic construct
  source 1..80: mol_type = other DNA
cacagataactcctacacataatgtgcatcatgggaaaatacatgcagtaggaatttgctatacaggaagcttaaaaacc

SEQ ID NO: 42823 - DNA, 80 bp, synthetic construct
  source 1..80: mol_type = other DNA
aggaattaaagacacacacacagaaatatagaggtgtgaagtgggaaatcaggggtctcacagccttcagagctgagagc

SEQ ID NO: 42824 - DNA, 80 bp, synthetic construct
  source 1..80: mol_type = other DNA
cttaagacacagatcgctcatgctattgtttgtggcttaagaatgcctttaagcagttttccgccctgggcaggacaggt

SEQ ID NO: 42825 - DNA, 80 bp, synthetic construct; identical to SEQ ID NO: 11539
  source 1..80: mol_type = other DNA

SEQ ID NO: 42826 - DNA, 80 bp, synthetic construct
  source 1..80: mol_type = other DNA
atgctttacatatttcttcttttaattttaaatccttatgttaagctcctacagtgggccatatcatttcaggttgaggt

SEQ ID NO: 42827 - DNA, 80 bp, synthetic construct
  source 1..80: mol_type = other DNA
taatgattccataggaattattgtgcagcacctctgcctgttctgcaaagcaatcttcctaaacaagtatgttcattttt

SEQ ID NO: 42828 - DNA, 80 bp, synthetic construct
  source 1..80: mol_type = other DNA
atactcacggcagtggtgataaccgctatcatagctgccattaaattattcattgtgactggttgtcctgctttcctcag

SEQ ID NO: 42829 - DNA, 80 bp, synthetic construct; identical to SEQ ID NO: 11540
  source 1..80: mol_type = other DNA

SEQ ID NO: 42830 - DNA, 80 bp, synthetic construct
  source 1..80: mol_type = other DNA
gttaataatgataggttcagttgcatttgtggggttccatattctctgtctctccctttctgcttttgcaactgctgttt

SEQ ID NO: 42831 - DNA, 80 bp, synthetic construct
  source 1..80: mol_type = other DNA
gcaaaacactgcaaaagatgacgtttaacacaggcagaagactctcctgttaggcatgtagcccagacaaagtgagaaaa

SEQ ID NO: 42832 - DNA, 80 bp, synthetic construct
  source 1..80: mol_type = other DNA
gctttagcttctttccaggtaatgctgtatctgcgtttgagaccagaggcattaacatgggttaaattgtgaaagtgtct

SEQ ID NO: 42833 - DNA, 80 bp, synthetic construct; identical to SEQ ID NO: 11541
  source 1..80: mol_type = other DNA

SEQ ID NO: 42834 - DNA, 80 bp, synthetic construct
  source 1..80: mol_type = other DNA
acccatctgtaaaaacattctcagcaccttcaattggtttaagtttattttagggagaatccaattagttaatttgaaaa

SEQ ID NO: 42835 - DNA, 80 bp, synthetic construct
  source 1..80: mol_type = other DNA
ccgagttctcccaatccctatcatagtagtgatttgatctaaataaggagttagagtccataaattagtatgtgaaagaa

SEQ ID NO: 42836 - DNA, 80 bp, synthetic construct
  source 1..80: mol_type = other DNA
tgttaattgctgagggctagtgagactaggatttcctctaaggatagaaaacagattactcatggcataggtaggaatgc

SEQ ID NO: 42837 - DNA, 80 bp, synthetic construct; identical to SEQ ID NO: 11542
  source 1..80: mol_type = other DNA

SEQ ID NO: 42838 - DNA, 80 bp, synthetic construct
  source 1..80: mol_type = other DNA
gttgtttactgcaggaattgtaaatgcaaaccgttcacagtcttgctcagctaaagggatagtaaagaaacagtccttta

SEQ ID NO: 42839 - DNA, 80 bp, synthetic construct
  source 1..80: mol_type = other DNA
tccaaggggaaaatattggagctatgtgcccattttctaattgttcaacaactaatttctctaaagcctccagtttttct

SEQ ID NO: 42840 - DNA, 80 bp, synthetic construct
  source 1..80: mol_type = other DNA
gacataccccatttcatgcattgtttgttgattttcagggatatataattgatctggaattagaacttgtgctctccatt

SEQ ID NO: 42841 - DNA, 80 bp, synthetic construct; identical to SEQ ID NO: 11543
  source 1..80: mol_type = other DNA

SEQ ID NO: 42842 - DNA, 80 bp, synthetic construct
  source 1..80: mol_type = other DNA
ctctcctggctctgctttccagggaacagaagtagatacaagaatttgaatttccccattgtaaactgaatcaatgactc

SEQ ID NO: 42843 - DNA, 80 bp, synthetic construct
  source 1..80: mol_type = other DNA
actaccagctgtggctggggaaggacattgtacaggggtgagggaatggcctgagctggaaatgccctggtttagaatgg

SEQ ID NO: 42844 - DNA, 80 bp, synthetic construct
  source 1..80: mol_type = other DNA
tgactttttctacattcttttttagtatgaatagcttgtttaaattctttgagtaatttaaaagggaaaggctcaaatgt

SEQ ID NO: 42845 - DNA, 80 bp, synthetic construct; identical to SEQ ID NO: 11544
  source 1..80: mol_type = other DNA

SEQ ID NO: 42846 - DNA, 80 bp, synthetic construct
  source 1..80: mol_type = other DNA
ctgacacttccgagctccccttcttacgcacgacagggattgctttaagagtactcgggtgtcctccagctagtttccca

SEQ ID NO: 42847 - DNA, 80 bp, synthetic construct
  source 1..80: mol_type = other DNA
gggtctcacagtcttcagagctgagagccccaaacagatatttacccacatatttattaacagcaaaccggtcattagca

SEQ ID NO: 42848 - DNA, 80 bp, synthetic construct
  source 1..80: mol_type = other DNA
gcggttttccgccctgggcaggccaggtgttccttgccctcattctcgtaaacccgcaaccttccagcttggacgttagg

SEQ ID NO: 42849 - DNA, 80 bp, synthetic construct; identical to SEQ ID NO: 11545
  source 1..80: mol_type = other DNA

SEQ ID NO: 42850 - DNA, 80 bp, synthetic construct
  source 1..80: mol_type = other DNA
gctccctggcatctctctagattttcaatgatacaatgttcaatctgctgtgcaagataatttcatcttgcaaagatttg

SEQ ID NO: 42851 - DNA, 80 bp, synthetic construct
  source 1..80: mol_type = other DNA
aaaaaaaattcagaagcatgtaatagcagcgctatttagaatcacagtggtgtccaaatcacttctatcacatctcattc

SEQ ID NO: 42852 - DNA, 80 bp, synthetic construct
  source 1..80: mol_type = other DNA
attggcatcatgctaagctaggtgtgtttactgaagtatgagattcacatttttgtaaatgaaaagcaatttgattaggc

SEQ ID NO: 42853 - DNA, 80 bp, synthetic construct; identical to SEQ ID NO: 11546
  source 1..80: mol_type = other DNA

SEQ ID NO: 42854 - DNA, 80 bp, synthetic construct
  source 1..80: mol_type = other DNA
atccattgtggaagacagtgacaatgtggtgattcctcagagatttagaatcagaaataccatttgatccagcaattgca

SEQ ID NO: 42855 - DNA, 80 bp, synthetic construct
  source 1..80: mol_type = other DNA
tggaatattatgcagccataaaaaggaatgagatcaagtcctttgcagggatatggatgaagctggaagccattatcctc

SEQ ID NO: 42856 - DNA, 80 bp, synthetic construct
  source 1..80: mol_type = other DNA
gcatgccagggttaatacctaggtgatgagttgacaggtgcagcaaaccaacatggcacatgtttacctatgtaacaaac

SEQ ID NO: 42857 - DNA, 80 bp, synthetic construct; identical to SEQ ID NO: 11547
  source 1..80: mol_type = other DNA

SEQ ID NO: 42858 - DNA, 80 bp, synthetic construct
  source 1..80: mol_type = other DNA
ctcatgcaatctgatggttttataaggggcttttccctgcttcattctgcatttctctctcctgtcatcatgtgaagaag

SEQ ID NO: 42859 - DNA, 80 bp, synthetic construct
  source 1..80: mol_type = other DNA
ttacagaataatgctgacataatggtttgtgactctgggtgtagaacctaaaactcactgtggcttccaccttctctctc

SEQ ID NO: 42860 - DNA, 80 bp, synthetic construct
  source 1..80: mol_type = other DNA
gaaccgaggcgttctgggaacagacaacaaagaactaggccttttccaacagccatatgactgatccatgtttcatgtga

SEQ ID NO: 42861 - DNA, 80 bp, synthetic construct
  source 1..80: mol_type = other DNA
tggaaactgcggcagatgaggaatatttgttgttttgagctaagttttacataatttgttatgcaatagtaaataaataa

SEQ ID NO: 42862 - DNA, 80 bp, synthetic construct; identical to SEQ ID NO: 11548
  source 1..80: mol_type = other DNA

SEQ ID NO: 42863 - DNA, 80 bp, synthetic construct
  source 1..80: mol_type = other DNA
ggtaaggagaatttccatggctgaagaggatgtattttatgaccattcacaatgatcactttacttgaacttcaatttcc

SEQ ID NO: 42864 - DNA, 80 bp, synthetic construct
  source 1..80: mol_type = other DNA
taggtgctgctgtgaagggagttagtggatataattaagggtctcaattagttgactttaggctgggtttatcctgcttg

SEQ ID NO: 42865 - DNA, 80 bp, synthetic construct
  source 1..80: mol_type = other DNA
cactttgggaggatgaggcgggcggatcacgaggtcaggagatcgagaccatcctggctaacacggtgaaaccctgtctc

SEQ ID NO: 42866 - DNA, 80 bp, synthetic construct; identical to SEQ ID NO: 11549
  source 1..80: mol_type = other DNA

SEQ ID NO: 42867 - DNA, 80 bp, synthetic construct
  source 1..80: mol_type = other DNA
ttccatccacattttgcccagatttctgatcaaggaactataagcagataaatgggtgttgtttcgccaggcgtggtagt

SEQ ID NO: 42868 - DNA, 80 bp, synthetic construct
  source 1..80: mol_type = other DNA
aaccagatatcccctcatatgctcacgtgcctgacactccagaagtttcacaagaccgaggtggagacactggagtgttt

SEQ ID NO: 42869 - DNA, 80 bp, synthetic construct
  source 1..80: mol_type = other DNA
ggaagggttggagaagcaggaggtgaagaaaaggagcagaggaaagaattcgaaagcagcagaattcttaggtttaaata

SEQ ID NO: 42870 - DNA, 80 bp, synthetic construct; identical to SEQ ID NO: 11550
  source 1..80: mol_type = other DNA

SEQ ID NO: 42871 - DNA, 80 bp, synthetic construct
  source 1..80: mol_type = other DNA
tacactgcaaaagtgaaacttagaagctttgtgagtcctgttgtaacgcttttgggcacatttatacatcatggggccaa

SEQ ID NO: 42872 - DNA, 80 bp, synthetic construct
  source 1..80: mol_type = other DNA
aacaaaaaacagtttctacacctccattcccagagcaagctcactctctgtcaccaaactccgtgggtgagttttcttct

SEQ ID NO: 42873 - DNA, 80 bp, synthetic construct
  source 1..80: mol_type = other DNA
aggaggagcggggtcagggcgaagtcccagggccccaggcgtggctctcagggtctcaggccccgaaggcggtgtatgga

SEQ ID NO: 42874 - DNA, 80 bp, synthetic construct; identical to SEQ ID NO: 11551
  source 1..80: mol_type = other DNA

SEQ ID NO: 42875 - DNA, 80 bp, synthetic construct
  source 1..80: mol_type = other DNA
agctcctcctcgctcccaggctcccactccatgaggtatttctacaccaccatgtcccggcccggccgcggggagccccg

SEQ ID NO: 42876 - DNA, 80 bp, synthetic construct
  source 1..80: mol_type = other DNA
cgagagaacctgcggatcgcgctccgctactacaaccagagcgagggcggtgagtgaccccggcccggggcgcaggtcac

SEQ ID NO: 42877 - DNA, 80 bp, synthetic construct
  source 1..80: mol_type = other DNA
cggggcagggcggggctcgggggaccgggctgaccgcgggggcggggccaggttctcacaccatgcaggtgatgtatggc

SEQ ID NO: 42878 - DNA, 80 bp, synthetic construct; identical to SEQ ID NO: 11552
  source 1..80: mol_type = other DNA

SEQ ID NO: 42879 - DNA, 80 bp, synthetic construct
  source 1..80: mol_type = other DNA
ctgagggtccgccctgctctctgacacaattaagggatgaaatctgtgaggaaatgaagggaagacaatccctggaatac

SEQ ID NO: 42880 - DNA, 80 bp, synthetic construct
  source 1..80: mol_type = other DNA
cctcttcagggactagaattttccacggaataggagattatcccaggtgcctgtgtccaggctgttgtctgggttctgtg

SEQ ID NO: 42881 - DNA, 80 bp, synthetic construct
  source 1..80: mol_type = other DNA
gccaccctgaggtgctgggccctgggcttctaccctgcggagatcacactgacctggcagcgggatggggaggaccagac

SEQ ID NO: 42882 - DNA, 80 bp, synthetic construct; identical to SEQ ID NO: 11553
  source 1..80: mol_type = other DNA

SEQ ID NO: 42883 - DNA, 80 bp, synthetic construct
  source 1..80: mol_type = other DNA
ttcttgtctcactgagagttccaagccccaggtagaagtgccctgcctggttactgggaagcaccatccacactcatggg

SEQ ID NO: 42884 - DNA, 80 bp, synthetic construct
  source 1..80: mol_type = other DNA
ggttggtccaggacccatatctgctttcttcatgtttcctgatcccaccctgggtctgcagttgcacatttctggaaact

SEQ ID NO: 42885 - DNA, 80 bp, synthetic construct
  source 1..80: mol_type = other DNA
attgtgtttgggagcccatgggggagctcacccaccccacaattcttcctctagccacatctactgtgggatctgaccag

SEQ ID NO: 42886 - DNA, 80 bp, synthetic construct; identical to SEQ ID NO: 11554
  source 1..80: mol_type = other DNA

SEQ ID NO: 42887 - DNA, 80 bp, synthetic construct
  source 1..80: mol_type = other DNA
caccatgaccctcttccccacgctgatctgtgttccctccccaatcatctttcctgttccagagaggaggggctgagatg

SEQ ID NO: 42888 - DNA, 80 bp, synthetic construct
  source 1..80: mol_type = other DNA
atggaacacatgagaaccttccagagtccatgtgtttcttgtgctgatttgttgcaggggaggagaatagatggggctgt

SEQ ID NO: 42889 - DNA, 80 bp, synthetic construct
  source 1..80: mol_type = other DNA
atctcattgtggtatcaagagactaattttcagacctgtccagctcttgccctcctcccagggctctttcctggattgta

SEQ ID NO: 42890 - DNA, 80 bp, synthetic construct; identical to SEQ ID NO: 11555
  source 1..80: mol_type = other DNA

SEQ ID NO: 42891 - DNA, 80 bp, synthetic construct
  source 1..80: mol_type = other DNA
tgccacaaaacagcatttgccctgaggctaccttaacaaagatattggcttcagaatagagaagtgctttacagtgatca

SEQ ID NO: 42892 - DNA, 80 bp, synthetic construct
  source 1..80: mol_type = other DNA
cagttttgaatgtgaggagtttttgcttttctgtggcggacctgagacctggagtgagtgcacccacctccctcaggatc

SEQ ID NO: 42893 - DNA, 80 bp, synthetic construct
  source 1..80: mol_type = other DNA
agccagcgagggcactgcttcatatctatgatgggaatgcaagaattgaggagcaggagactgagggtgtttgactaaat

SEQ ID NO: 42894 - DNA, 80 bp, synthetic construct; identical to SEQ ID NO: 11556
  source 1..80: mol_type = other DNA

SEQ ID NO: 42895 - DNA, 80 bp, synthetic construct
  source 1..80: mol_type = other DNA
gggattgcctattatctccatataattcagcagtctatccctgaagaagcctgataaagaatgaatggaattactccaga

SEQ ID NO: 42896 - DNA, 80 bp, synthetic construct
  source 1..80: mol_type = other DNA
acatggcaaacagccatgcatttggtgagtgcattctttcccattccatttagaaaatggatatggaatgattcacattc

SEQ ID NO: 42897 - DNA, 80 bp, synthetic construct
  source 1..80: mol_type = other DNA
tgagcaagaggaggaaagtatgctgagttctttggcaaaacatgtgcactacagaaggtgaagattaaccttacagagct

SEQ ID NO: 42898 - DNA, 80 bp, synthetic construct
  source 1..80: mol_type = other DNA
tccacatctaagtatattgtttggcccactgtctgggtataatataggaagaggtcagctttgagtgcggactagacagg

SEQ ID NO: 42899 - DNA, 80 bp, synthetic construct; identical to SEQ ID NO: 11557
  source 1..80: mol_type = other DNA

SEQ ID NO: 42900 - DNA, 80 bp, synthetic construct
  source 1..80: mol_type = other DNA
gaatagcaaatacaagactcaagacataggttccttttaggggataggattggacaacagcctagggtggcttcataggt

SEQ ID NO: 42901 - DNA, 80 bp, synthetic construct
  source 1..80: mol_type = other DNA
gattctcctgcctcagcctcctgagcagctgggattgcaggcaaatgccaccactcccagctaatttttgtatttttagt

SEQ ID NO: 42902 - DNA, 80 bp, synthetic construct
  source 1..80: mol_type = other DNA
cattcctgattgattatttggaaatgaaagagaaaagaaaatgccaaagttcatcacaagcatcctttgcgataactact

SEQ ID NO: 42903 - DNA, 80 bp, synthetic construct; identical to SEQ ID NO: 11558
  source 1..80: mol_type = other DNA

SEQ ID NO: 42904 - DNA, 80 bp, synthetic construct
  source 1..80: mol_type = other DNA
aaataggtcatttgatccttggctagttggcgactctctacattttctgatacacagtgttcaatctgataggcaaggca

SEQ ID NO: 42905 - DNA, 80 bp, synthetic construct
  source 1..80: mol_type = other DNA
aatggaaaacacgaaagagctgcttttaaagcaacattagaagcacaaaataacagtgtttttcagaatcatactggagt

SEQ ID NO: 42906 - DNA, 80 bp, synthetic construct
  source 1..80: mol_type = other DNA
agctagttgtacagacaaagatgtgagactcacatttttctaattgcaaagcaccctgattaggcaaatatttttgtaga

SEQ ID NO: 42907 - DNA, 80 bp, synthetic construct
  source 1..80: mol_type = other DNA
atagattaacagcatcccaaggcagaagaatttttcttagtacagaacaaaatggagtctcctatgtctgcttctttcta

SEQ ID NO: 42908 - DNA, 80 bp, synthetic construct; identical to SEQ ID NO: 11559
  source 1..80: mol_type = other DNA

SEQ ID NO: 42909 - DNA, 80 bp, synthetic construct
  source 1..80: mol_type = other DNA
tcacctctcagacggggcggccggggagagacgctccttacctcccagacggggtcgcggccgggcagaggcgctcctca

SEQ ID NO: 42910 - DNA, 80 bp, synthetic construct
  source 1..80: mol_type = other DNA
gtagcgagccgagatcacgccactgcactccagcctgggcaacattgagcactgagtgagtgagactccgtctgcaatcc

SEQ ID NO: 42911 - DNA, 80 bp, synthetic construct
  source 1..80: mol_type = other DNA
tattcaatgcctcagacactaactttccaaggaataggagattatcccaggtgcctgtggccaggaggtgtctgggttct

SEQ ID NO: 42912 - DNA, 80 bp, synthetic construct; identical to SEQ ID NO: 11560
  source 1..80: mol_type = other DNA

SEQ ID NO: 42913 - DNA, 80 bp, synthetic construct
  source 1..80: mol_type = other DNA
tgaatgaggggccatgtctcttctcagggaaagcaggagcctttctggaggccttcagcagggtcagggctgaggcctgg

SEQ ID NO: 42914 - DNA, 80 bp, synthetic construct
  source 1..80: mol_type = other DNA
atttcttcttccattcgtggatttcaagctccagatggaagttggctcatttcctgcctagttgtgagacactatctcca

SEQ ID NO: 42915 - DNA, 80 bp, synthetic construct
  source 1..80: mol_type = other DNA
ggacatttggttcagcttcaacacatcctcttccctcgggtttcctgatcctgacctgggtctgcagtcacagttctgga

SEQ ID NO: 42916 - DNA, 80 bp, synthetic construct; identical to SEQ ID NO: 11561
  source 1..80: mol_type = other DNA

SEQ ID NO: 42917 - DNA, 80 bp, synthetic construct
  source 1..80: mol_type = other DNA
gttcagtgtcaccacttaccatgactgacttgaatttgttcatgactattttctttctaagactgccttgtgagggactg

SEQ ID NO: 42918 - DNA, 80 bp, synthetic construct
  source 1..80: mol_type = other DNA
ctgtgtccccacccaaatctcatgctcacttgtaatccctaatgttggaggtggtgcttggtgggacgtgattggctcat

SEQ ID NO: 42919 - DNA, 80 bp, synthetic construct
  source 1..80: mol_type = other DNA
aattcaggatttggtctggctgcctgtaatagcctatgtgcatatgtgtgagcaaagaaacgacccaaaactggaactga

SEQ ID NO: 42920 - DNA, 80 bp, synthetic construct; identical to SEQ ID NO: 11562
  source 1..80: mol_type = other DNA

SEQ ID NO: 42921 - DNA, 80 bp, synthetic construct
  source 1..80: mol_type = other DNA
ggaaactgcattcatttcttttggcccatttatataccttttggaatggaaatgtacaagaaatgtctcttccactgttg

SEQ ID NO: 42922 - DNA, 80 bp, synthetic construct
  source 1..80: mol_type = other DNA
gcaatgtgagaagaacatgacctttggctggctagggaggggatgcaatgatataaacatttatcccctgatacctcatg

SEQ ID NO: 42923 - DNA, 80 bp, synthetic construct
  source 1..80: mol_type = other DNA
caacttcctactctctctgttcctctgttaccatgtgttctctgcatataccagctcacctttgtcttctgccatgagtg

SEQ ID NO: 42924 - DNA, 80 bp, synthetic construct; identical to SEQ ID NO: 11563
  source 1..80: mol_type = other DNA

SEQ ID NO: 42925 - DNA, 80 bp, synthetic construct
  source 1..80: mol_type = other DNA
attcaaaattaggccagtttatcatcctcttgtatgaatatgtctcccagaatgaaatcactcagctttgctgacaacac

SEQ ID NO: 42926 - DNA, 80 bp, synthetic construct
  source 1..80: mol_type = other DNA
gagttaagctaatattgaatttttctcattatataaccctttgatttattcacttgccctcagccactattcctccctct

SEQ ID NO: 42927 - DNA, 80 bp, synthetic construct
  source 1..80: mol_type = other DNA
tagagggtaggttatataggtaaggaactagtgggggctatcaagaccaccaggctatataactctacttactgttaatc

SEQ ID NO: 42928 - DNA, 80 bp, synthetic construct; identical to SEQ ID NO: 11564
  source 1..80: mol_type = other DNA

SEQ ID NO: 42929 - DNA, 80 bp, synthetic construct
  source 1..80: mol_type = other DNA
tttcaattttctatcaaattttcccctgaggaggacatgtccctctgcattgttggccatttgaggctgtaaagtgtgtt

SEQ ID NO: 42930 - DNA, 80 bp, synthetic construct
  source 1..80: mol_type = other DNA
tcagtgattttcctgtcaagatccattggcagctcctttggggttgctggcatcattctggcttgccaggtattatgatc

SEQ ID NO: 42931 - DNA, 80 bp, synthetic construct
  source 1..80: mol_type = other DNA
ttataagtgaatactctgaaaaacctgaagccaataagttagaccacttggataaaaaggaccaattcgtgcagagatag

SEQ ID NO: 42932 - DNA, 80 bp, synthetic construct
  source 1..80: mol_type = other DNA
ctatcaaatattttgaaagctctttcagacaagaagagaggagggaagactttccagcccatttacagaactggcattac

SEQ ID NO: 42933 - DNA, 80 bp, synthetic construct; identical to SEQ ID NO: 11565
  source 1..80: mol_type = other DNA

SEQ ID NO: 42934 - DNA, 80 bp, synthetic construct
  source 1..80: mol_type = other DNA
taaaatcaaacttaatgaagaaagactgaagactgaatgcttttctcctaagatggggatcaatgcaaggatgtccaatc

SEQ ID NO: 42935 - DNA, 80 bp, synthetic construct
  source 1..80: mol_type = other DNA
ccctgtctgtagaattcacaagcagataaaaactggctagcactaataaatgaatccagaagggcccataggatatcaaa

SEQ ID NO: 42936 - DNA, 80 bp, synthetic construct
  source 1..80: mol_type = other DNA
aggtctaaataaatggagagatgcgagttggaaagctcgataatactgttaagatggcagttctcccccagtagatctat

SEQ ID NO: 42937 - DNA, 80 bp, synthetic construct; identical to SEQ ID NO: 11566
  source 1..80: mol_type = other DNA

SEQ ID NO: 42938 - DNA, 80 bp, synthetic construct
  source 1..80: mol_type = other DNA
aaatgcagaggatgcagaagggccaacacaaatttggaaaaaaaaatggaatgtcatatgaaactacaataatccagaca

SEQ ID NO: 42939 - DNA, 80 bp, synthetic construct
  source 1..80: mol_type = other DNA
acagctaaaatttatgagttaaaactataaaatttctaaaagaaaatacaggagaaaatttttgttactttgggtagtta

SEQ ID NO: 42940 - DNA, 80 bp, synthetic construct
  source 1..80: mol_type = other DNA
atcacaaattacatttgtgttgaaaaacatgtttccagaataatgtggcaagttcttaaactcaatgtaagaagatgagc

SEQ ID NO: 42941 - DNA, 80 bp, synthetic construct; identical to SEQ ID NO: 11567
  source 1..80: mol_type = other DNA

SEQ ID NO: 42942 - DNA, 80 bp, synthetic construct
  source 1..80: mol_type = other DNA
aagccatcagaactaagactagacaaagagttcttacacataacaccaaaagtatgatccgtaaaagaaaaagttactaa

SEQ ID NO: 42943 - DNA, 80 bp, synthetic construct
  source 1..80: mol_type = other DNA
gaaatccaaataaacaataggcaatgagcaagacatgaacagacgtttcactgaagaggataaacaccaggctaacaagc

SEQ ID NO: 42944 - DNA, 80 bp, synthetic construct
  source 1..80: mol_type = other DNA
ggtacagccactctggaaatggatattgcagttttcttcaaactgaacatgcaatttaccatatgactagcaattgccct

SEQ ID NO: 42945 - DNA, 80 bp, synthetic construct; identical to SEQ ID NO: 11568
  source 1..80: mol_type = other DNA

SEQ ID NO: 42946 - DNA, 80 bp, synthetic construct
  source 1..80: mol_type = other DNA
ggttctgctaaggtgctgggtgtgctaccgaccttggcatttgcagcattaatggaaaagtcaacataatgaaacaggca

SEQ ID NO: 42947 - DNA, 80 bp, synthetic construct
  source 1..80: mol_type = other DNA
ctagcctattcagattcagcactctctctcgctcttttttttccctcattcttccaacttataattgtatatattttcaa

SEQ ID NO: 42948 - DNA, 80 bp, synthetic construct
  source 1..80: mol_type = other DNA
gtttcttgttggggtcaatgtatctgtctccagtgctggatgcactgaaggccctgactttaccacaactcaatatagca

SEQ ID NO: 42949 - DNA, 80 bp, synthetic construct; identical to SEQ ID NO: 11569
  source 1..80: mol_type = other DNA

SEQ ID NO: 42950 - DNA, 80 bp, synthetic construct
  source 1..80: mol_type = other DNA
ccaactaggttccctcatcctcttgcttccaggcaggtcctgcatccactcctgctgcacagagggctcccatccctgcc

SEQ ID NO: 42951 - DNA, 80 bp, synthetic construct
  source 1..80: mol_type = other DNA
cccagtcagtctgaactgatggcgggagatgctgatgcttgcttatcctcattccccgtttatttattcttcattaattc

SEQ ID NO: 42952 - DNA, 80 bp, synthetic construct
  source 1..80: mol_type = other DNA
caaagcactcttcatcacctccctgatatcacccttcatctctacgtcatcacatgtgggctctaactctgaaggcaggt

SEQ ID NO: 42953 - DNA, 80 bp, synthetic construct; identical to SEQ ID NO: 11570
  source 1..80: mol_type = other DNA

SEQ ID NO: 42954 - DNA, 80 bp, synthetic construct
  source 1..80: mol_type = other DNA
tgaatccacaccttgccacctgcagaggtggaaaaaggcacctaaatccacgatccaatagttcttcctgcccttaactc

SEQ ID NO: 42955 - DNA, 80 bp, synthetic construct
  source 1..80: mol_type = other DNA
tactgttctgcacttgctggagaatgaccccaaaagataagatcaatttgttgactaccaacttatttggctgagccatg

SEQ ID NO: 42956 - DNA, 80 bp, synthetic construct
  source 1..80: mol_type = other DNA
tatcttttcacactttacatcctcatccttccctctgggagtcttccctctttgggtcttctagtcctatcctaccctct

SEQ ID NO: 42957 - DNA, 80 bp, synthetic construct
  source 1..80: mol_type = other DNA
ctttaggtcttcctagttccttaatatgtttgtcttcaatcctgtcatgggcacctgatgcataatggacacttggctgg

SEQ ID NO: 42958 - DNA, 80 bp, synthetic construct; identical to SEQ ID NO: 11571
  source 1..80: mol_type = other DNA

SEQ ID NO: 42959 - DNA, 80 bp, synthetic construct
  source 1..80: mol_type = other DNA
gcaccactcctgaacccccattcctgattgtcagaatttttaacataactaaaaatgaaacacaagtgcctctgcattat

SEQ ID NO: 42960 - DNA, 80 bp, synthetic construct
  source 1..80: mol_type = other DNA
ctgcagagccctggctcccccactacctgccaattgccagccctttgtggggtctcttctgctttctctggcctgggaga

SEQ ID NO: 42961 - DNA, 80 bp, synthetic construct
  source 1..80: mol_type = other DNA
ggctctctcagtgcctcctcatctgtttctttagcttttggatcttgagcaccagggcccgggcccccacccactccttc

SEQ ID NO: 42962 - DNA, 80 bp, synthetic construct
  source 1..80: mol_type = other DNA
agatctcatggtaagtgaggaattcgacgttgttttctctttttccagcccattagcttaagtccacctgtactgagaat

SEQ ID NO: 42963 - DNA, 80 bp, synthetic construct; identical to SEQ ID NO: 11572
  source 1..80: mol_type = other DNA

SEQ ID NO: 42964 - DNA, 80 bp, synthetic construct
  source 1..80: mol_type = other DNA
tccacccgagcacttggagccacctagggggtggcctcatcttcccactgtcccagaagctgttctgcccttccatactt

SEQ ID NO: 42965 - DNA, 80 bp, synthetic construct
  source 1..80: mol_type = other DNA
ggctctctccaggcctgtcttcactccagtgcctggccctacccaggcccccactcctactctgctctcaacctggcccc

SEQ ID NO: 42966 - DNA, 80 bp, synthetic construct
  source 1..80: mol_type = other DNA
atatcactggttgggtgaggcaactggctcagatgggttcattgagcactcacccgctgggagagtgtctgtcggggcca

SEQ ID NO: 42967 - DNA, 80 bp, synthetic construct; identical to SEQ ID NO: 11573
  source 1..80: mol_type = other DNA

SEQ ID NO: 42968 - DNA, 80 bp, synthetic construct
  source 1..80: mol_type = other DNA
aaaacaaaaatttgtgtgacttgtttgttgccatggtctgaaaccaaatctgcagtgtctctgaggtacgtctgtagttt

SEQ ID NO: 42969 - DNA, 80 bp, synthetic construct
  source 1..80: mol_type = other DNA
ctcctggcatacgacactggtaccaagctctgttggactagtgagcctcctccccacacacctcctgaactagaaccaaa

SEQ ID NO: 42970 - DNA, 80 bp, synthetic construct
  source 1..80: mol_type = other DNA
gggacaagaaggtcctgagataaaaacccatgttttggaaaacaaaactgcctgagactgaaaagtggctaaccaattcg

SEQ ID NO: 42971 - DNA, 80 bp, synthetic construct; identical to SEQ ID NO: 11574
  source 1..80: mol_type = other DNA

SEQ ID NO: 42972 - DNA, 80 bp, synthetic construct
  source 1..80: mol_type = other DNA
caaatttaaaacaagattagcagccttttagaaaaaaaaacaaaacacatgggaggttgcaaaggcaatctaaatgatac

SEQ ID NO: 42973 - DNA, 80 bp, synthetic construct
  source 1..80: mol_type = other DNA
ccctctctcagggtaatgagtaaatcctctaagacccgttctatctcagacagaccatccactcataaggaggtcaaaaa

SEQ ID NO: 42974 - DNA, 80 bp, synthetic construct
  source 1..80: mol_type = other DNA
cctgtttgtgtcagtgacactgggtcccccacatactctgcactcacatccccacaaggctctgaacaccactattctgt

SEQ ID NO: 42975 - DNA, 80 bp, synthetic construct; identical to SEQ ID NO: 11575
  source 1..80: mol_type = other DNA

SEQ ID NO: 42976 - DNA, 80 bp, synthetic construct
  source 1..80: mol_type = other DNA
cttgactgttgatgacttcaacatgtggtgggttgagtaatggtcccgaaagaggtccagtcttagtccttggaacctgt

SEQ ID NO: 42977 - DNA, 80 bp, synthetic construct
  source 1..80: mol_type = other DNA
aggaggaaggcagaggagacatagaagaggggaggtcagacgttccaagcaggaggattggatgtgccttaggcaccatg

SEQ ID NO: 42978 - DNA, 80 bp, synthetic construct
  source 1..80: mol_type = other DNA
cataccttgaccttagccccataagactgtgcggacttgcaacctacaggactgtaacatgataattaggtgctgtttaa

SEQ ID NO: 42979 - DNA, 80 bp, synthetic construct; identical to SEQ ID NO: 11576
  source 1..80: mol_type = other DNA

SEQ ID NO: 42980 - DNA, 80 bp, synthetic construct
  source 1..80: mol_type = other DNA
taccaatccagtgattctgccatctactcactgtccctcatcgttggtgtcttctctaacttcatgacccaaaccacatg

SEQ ID NO: 42981 - DNA, 80 bp, synthetic construct
  source 1..80: mol_type = other DNA
ccattcttatctcagctgacaaccttggttcctacctcactgagaaaactgaacacattagaagacagattccatcacca

SEQ ID NO: 42982 - DNA, 80 bp, synthetic construct
  source 1..80: mol_type = other DNA
tacctttttttctctttatcatcaacctttttcctctctccccactggatcattgtggcagtcatgagaatgcacatccc

SEQ ID NO: 42983 - DNA, 80 bp, synthetic construct; identical to SEQ ID NO: 11577
  source 1..80: mol_type = other DNA

SEQ ID NO: 42984 - DNA, 80 bp, synthetic construct
  source 1..80: mol_type = other DNA
gaccctaactaacacaagtagtatgaagggtgatccatgaaaacaggcaaaaatgagaatttgaaaaaagcttgcccact

SEQ ID NO: 42985 - DNA, 80 bp, synthetic construct
  source 1..80: mol_type = other DNA
ataatgacggggttagggggaaacctacaaagacagtggagttggctggttgctgctcagctgcaatgatgccctatgaa

SEQ ID NO: 42986 - DNA, 80 bp, synthetic construct
  source 1..80: mol_type = other DNA
ggtttgccactcagccaaggcaggcctgttacaggaaagtcaggaccctggtggggaaacctgagattctgcaaacagga

SEQ ID NO: 42987 - DNA, 80 bp, synthetic construct; identical to SEQ ID NO: 11578
  source 1..80: mol_type = other DNA

SEQ ID NO: 42988 - DNA, 80 bp, synthetic construct
  source 1..80: mol_type = other DNA
ctagaaaaaatgatgcctaactctcaacaaggtagacgtgacttagttgccctggaacttgcacaggatggaataacaag

SEQ ID NO: 42989 - DNA, 80 bp, synthetic construct
  source 1..80: mol_type = other DNA
tagtaaagatgacccagagttacatttattaataaccctggggagagtgtggccctgaagacacaaagaccaaatggtgg

SEQ ID NO: 42990 - DNA, 80 bp, synthetic construct
  source 1..80: mol_type = other DNA
acaggaagccaacaagggcgctgcttgatatctatgataagaaagcaagaattgagaagcaggagggtgaaggtgtttga

SEQ ID NO: 42991 - DNA, 80 bp, synthetic construct; identical to SEQ ID NO: 11579
  source 1..80: mol_type = other DNA

SEQ ID NO: 42992 - DNA, 80 bp, synthetic construct
  source 1..80: mol_type = other DNA
taattgacactgatgcactgttaagtggagtcacccccacactgggtccctagtctgtggagtcaggactctcattgtgc

SEQ ID NO: 42993 - DNA, 80 bp, synthetic construct
  source 1..80: mol_type = other DNA
tgtctattgtctctacataatccagcaacctgtccctgaggaaccctgatgaggactaaagaatgaatgagattactcca

SEQ ID NO: 42994 - DNA, 80 bp, synthetic construct
  source 1..80: mol_type = other DNA
tccactccaattagaaaggggatatggagcgattcacatccatgtgggatccacaacacatttatttatagttttttctc

SEQ ID NO: 42995 - DNA, 80 bp, synthetic construct; identical to SEQ ID NO: 11580
  source 1..80: mol_type = other DNA

SEQ ID NO: 42996 - DNA, 80 bp, synthetic construct
  source 1..80: mol_type = other DNA
ctgacaacaccacattccacatctaggtacgtgctttggcaaacactctaggtgatataggaggaggccagcttcaagta

SEQ ID NO: 42997 - DNA, 80 bp, synthetic construct
  source 1..80: mol_type = other DNA
tctggagtaagatcgtatcatccacagcagagacatatgccccctgttagaagcaacttttagtgttccttgtcctgatt

SEQ ID NO: 42998 - DNA, 80 bp, synthetic construct
  source 1..80: mol_type = other DNA
ctgggttgagcttgaatcccacgtttacacccacagaaaacacccaagtctgaagtggcactgaacaaccaaacagacaa

SEQ ID NO: 42999 - DNA, 80 bp, synthetic construct; identical to SEQ ID NO: 11581
  source 1..80: mol_type = other DNA

SEQ ID NO: 43000 - DNA, 80 bp, synthetic construct
  source 1..80: mol_type = other DNA
ctgcctgaaggacccacttggcaagggaaagattcagtgtttccatggctgttccttccactaaccctatcaccagctac

SEQ ID NO: 43001 - DNA, 80 bp, synthetic construct
  source 1..80: mol_type = other DNA
ctaacttccatttgtctgtttcgttgtttaatgacacttcagacttggctgttttctgtgggtgtcaacatgggattcaa

SEQ ID NO: 43002 - DNA, 80 bp, synthetic construct
  source 1..80: mol_type = other DNA
gagggttgcatgccatctttcaggacatggtgcgttgtttaaatcagagatgtctctacagttctgtgttcgcaagagga

SEQ ID NO: 43003 - DNA, 80 bp, synthetic construct; identical to SEQ ID NO: 11582
  source 1..80: mol_type = other DNA

SEQ ID NO: 43004 - DNA, 80 bp, synthetic construct
  source 1..80: mol_type = other DNA
cttctgttttccctcaccccattgcaagtgtgagtagaattatccagcaattcagcctgagaggatttgatttccaaggg

SEQ ID NO: 43005 - DNA, 80 bp, synthetic construct
  source 1..80: mol_type = other DNA
tcccaaccagtgatgggtcacaccagtgacactaaggcaggacattcctggaagacaggggactcctctgatggccagct

SEQ ID NO: 43006 - DNA, 80 bp, synthetic construct
  source 1..80: mol_type = other DNA
tcgtctgacaggtgtgtcccctaataaaatgctgtaactttaatcctatgatggcacttgctttttggagcatttggact

SEQ ID NO: 43007 - DNA, 80 bp, synthetic construct
  source 1..80: mol_type = other DNA
ttgggggtagtgttttacacagcaacagataactaatgcagccttcttacatttccgttattctatagaggttaactacg

SEQ ID NO: 43008 - DNA, 80 bp, synthetic construct; identical to SEQ ID NO: 11583
  source 1..80: mol_type = other DNA

SEQ ID NO: 43009 - DNA, 80 bp, synthetic construct
  source 1..80: mol_type = other DNA
tattatgaaattttcctaacatattaaataacccctacgtgattgtgctatcagtaagcattttctgaatctatatgtca

SEQ ID NO: 43010 - DNA, 80 bp, synthetic construct
  source 1..80: mol_type = other DNA
aatcaccttggaaatcatattatcattatctagtatggttaaagtccatacaacatatcgtccaaccctcccactcctaa

SEQ ID NO: 43011 - DNA, 80 bp, synthetic construct
  source 1..80: mol_type = other DNA
atgacagcctcccacaccacagataactcctgtacgtaatgtgcatcatgggaaaataaacgcagtaggaatttgctgta

SEQ ID NO: 43012 - DNA, 80 bp, synthetic construct; identical to SEQ ID NO: 11584
  source 1..80: mol_type = other DNA

SEQ ID NO: 43013 - DNA, 80 bp, synthetic construct
  source 1..80: mol_type = other DNA
aatgtaagcagccatgtgacagagaggaccaggatgtgatgaaaatggccttggttaataatagttcatttgatccttag

SEQ ID NO: 43014 - DNA, 80 bp, synthetic construct
  source 1..80: mol_type = other DNA
acaagaaaagagtagaaaggaacaaccagtgatggaatagcaaatatgaatggaaagcaaaataagacagctaaaaaaaa

SEQ ID NO: 43015 - DNA, 80 bp, synthetic construct
  source 1..80: mol_type = other DNA
cgagttaagcattttgggctactgcatcaaaccaaagttactggcattatgctaagctagatgtgttgactgaagtatga

SEQ ID NO: 43016 - DNA, 80 bp, synthetic construct; identical to SEQ ID NO: 11585
  source 1..80: mol_type = other DNA

SEQ ID NO: 43017 - DNA, 80 bp, synthetic construct
  source 1..80: mol_type = other DNA
ttctctgcagcacccaaggctctgtcatgtctcaaacatttaatcattaatttaaaaagagaagcttatcacagaattag

SEQ ID NO: 43018 - DNA, 80 bp, synthetic construct
  source 1..80: mol_type = other DNA
gcatatagaccaacagaacagaatagaaaactcagaaataagacctcacatctacaaccatgtgatcttcaacaaacctg

SEQ ID NO: 43019 - DNA, 80 bp, synthetic construct
  source 1..80: mol_type = other DNA
aaaaaccctgaaagaaaatctaggcaataccattcaggacataggcatgggcaaagattttatgatgaaattgccaaaag

SEQ ID NO: 43020 - DNA, 80 bp, synthetic construct; identical to SEQ ID NO: 11586
  source 1..80: mol_type = other DNA

SEQ ID NO: 43021 - DNA, 80 bp, synthetic construct
  source 1..80: mol_type = other DNA
aaagaaataggaatgtttttacactgttggtggaaatgtaaattggttcaaccaatgaggaaggcagtgtggtgattcct

SEQ ID NO: 43022 - DNA, 80 bp, synthetic construct
  source 1..80: mol_type = other DNA
ccaatgagggactagataaagaaaatatgatacatatatgccatggaatattatgcagccataaaaaggaatgagatcaa

SEQ ID NO: 43023 - DNA, 80 bp, synthetic construct
  source 1..80: mol_type = other DNA
ggggagggcggtggtggggggagcattaggaaaaatggctaatgcatgcaggggttaatacctaggttatgggttgattg

SEQ ID NO: 43024 - DNA, 80 bp, synthetic construct; identical to SEQ ID NO: 11587
  source 1..80: mol_type = other DNA

SEQ ID NO: 43025 - DNA, 80 bp, synthetic construct
  source 1..80: mol_type = other DNA
tgagtgaattctcatgagatctgatggttttataaggggcttttccccgcttcgctctgcatttctctctcctgccacca

SEQ ID NO: 43026 - DNA, 80 bp, synthetic construct
  source 1..80: mol_type = other DNA
aacttctgatggagcaatgccgacataacagcttgtgactctgggtgtagaacctaaaactccctgcagcttccaccttc

SEQ ID NO: 43027 - DNA, 80 bp, synthetic construct
  source 1..80: mol_type = other DNA
ctaggccttttccaacagccatgtgactgatccatgtttcatgtgaatcctcagccccagtgaagccctcagatgatgca

SEQ ID NO: 43028 - DNA, 80 bp, synthetic construct; identical to SEQ ID NO: 11588
  source 1..80: mol_type = other DNA

SEQ ID NO: 43029 - DNA, 80 bp, synthetic construct
  source 1..80: mol_type = other DNA
ttttctaattttttgtagagatgggggtttccccatgttgcccaggctgatcttgaacttctggagtcaacaaatctgcc

SEQ ID NO: 43030 - DNA, 80 bp, synthetic construct
  source 1..80: mol_type = other DNA
ttgaacttcaatttgcaactgtgtcccaagtgaacacaaaaagaagatccagcccttgctaggctgattctatgatggcc

SEQ ID NO: 43031 - DNA, 80 bp, synthetic construct
  source 1..80: mol_type = other DNA
tgaaaggattgggttcttcctgagcatagagattcacagtgtgagagggattcagcatgaggggtttcctccactgtggg

SEQ ID NO: 43032 - DNA, 80 bp, synthetic construct; identical to SEQ ID NO: 11589
  source 1..80: mol_type = other DNA

SEQ ID NO: 43033 - DNA, 80 bp, synthetic construct
  source 1..80: mol_type = other DNA
attagctgggcgtggtggcacttgtctgcagtcctatctattctgaagactgaggcaggaagatcccttgagcccaggag

SEQ ID NO: 43034 - DNA, 80 bp, synthetic construct
  source 1..80: mol_type = other DNA
gctcaacagactcggaatgaattgatatgcacactagttacataaaataaaatatttcttaatttttcagtgttttacat

SEQ ID NO: 43035 - DNA, 80 bp, synthetic construct
  source 1..80: mol_type = other DNA
gtgaggaaatgacacactctgactcacaggagcaggaccactgtggagagaacagtcacgtagcaggtaatgggacaatg

SEQ ID NO: 43036 - DNA, 80 bp, synthetic construct; identical to SEQ ID NO: 11590
  source 1..80: mol_type = other DNA

SEQ ID NO: 43037 - DNA, 80 bp, synthetic construct
  source 1..80: mol_type = other DNA
tacacaccacttagacgtgaatacttcctaaaaacaggcagcacatgagcactgctgaggggcattgtgactgcattgaa

SEQ ID NO: 43038 - DNA, 80 bp, synthetic construct
  source 1..80: mol_type = other DNA
acattgtctgcgaaagtcaaacttagtagctttgtgagtcctgttgtaatgctttcagacacatttatgtatcaaggggc

SEQ ID NO: 43039 - DNA, 80 bp, synthetic construct
  source 1..80: mol_type = other DNA
ctgtctctacgcctccattcccagggcgagctccctctctggcatcgagctccctctctggcggcgagctccctctctgg

SEQ ID NO: 43040 - DNA, 80 bp, synthetic construct; identical to SEQ ID NO: 11591
  source 1..80: mol_type = other DNA

SEQ ID NO: 43041 - DNA, 80 bp, synthetic construct
  source 1..80: mol_type = other DNA
ggactcagttctcacccccatttggtgtcgggtttctagcgaagccaatcggcgtcgctggggtccctgttccagaagtc

SEQ ID NO: 43042 - DNA, 80 bp, synthetic construct
  source 1..80: mol_type = other DNA
aggggcccgcgcactggggcgcaggacccggggagcagcgcaaggaggagggtcggacgggtctcagcccctcctcgccc

SEQ ID NO: 43043 - DNA, 80 bp, synthetic construct
  source 1..80: mol_type = other DNA
agcaggagggaccggagtattgggaccggagcacacggaacatcaggcccgcgcacagactgacaagagtgaacctgccc

SEQ ID NO: 43044 - DNA, 80 bp, synthetic construct; identical to SEQ ID NO: 11592
  source 1..80: mol_type = other DNA

SEQ ID NO: 43045 - DNA, 80 bp, synthetic construct
  source 1..80: mol_type = other DNA
gcgctcctggaccgcggcggacatggcggctcagatcaccaagcgcaagtgggaggcagaagaatttgcagagcagatca

SEQ ID NO: 43046 - DNA, 80 bp, synthetic construct
  source 1..80: mol_type = other DNA
caacactagaatgtcgtcctctctctggtcctgagggagaggaatcctcctgggtttccagatcctgtacaagagagtga

SEQ ID NO: 43047 - DNA, 80 bp, synthetic construct
  source 1..80: mol_type = other DNA
cactcaatgtgtgtgggggtctgagtccagctcttctgagtccctcagcctccactcaggtcaggaccagaagtcactgt

SEQ ID NO: 43048 - DNA, 80 bp, synthetic construct; identical to SEQ ID NO: 11593
  source 1..80: mol_type = other DNA

SEQ ID NO: 43049 - DNA, 80 bp, synthetic construct
  source 1..80: mol_type = other DNA
tctggagaggaacagagatacccgtgccatgtgcagcatgaggggttgcccaagcccctcaccctgagatggggtaaggc

SEQ ID NO: 43050 - DNA, 80 bp, synthetic construct
  source 1..80: mol_type = other DNA
ttgctggcctggttctccttggagctgtagtcactggagctgtggtttctgctgtgatgtgcaggaagaagaactcaggt

SEQ ID NO: 43051 - DNA, 80 bp, synthetic construct
  source 1..80: mol_type = other DNA
acctgtgacaatgaaggacagatttatcaccttgatgattatgatgatggggacctgatcccagcagtcacaagtcacag

SEQ ID NO: 43052 - DNA, 80 bp, synthetic construct; identical to SEQ ID NO: 11594
  source 1..80: mol_type = other DNA

SEQ ID NO: 43053 - DNA, 80 bp, synthetic construct
  source 1..80: mol_type = other DNA
tctaccccaggcagcgaccatgcgcagggttctgatgtgtctctcacggcttgtaaaggtgagacactgggggacctgat

SEQ ID NO: 43054 - DNA, 80 bp, synthetic construct
  source 1..80: mol_type = other DNA
cttgtgtgggactgagaggcaagatttgttcacgccttccctttgtgacttcaaaaaccctgactctctttctgcaaagg

SEQ ID NO: 43055 - DNA, 80 bp, synthetic construct
  source 1..80: mol_type = other DNA
atcattcctgctccatagaggtgaggctgagatgtctccatctctgtctcaactttatgtgcactgagctgtaacttctt

SEQ ID NO: 43056 - DNA, 80 bp, synthetic construct
  source 1..80: mol_type = other DNA
gacatgagaaccttccagagtccacatgtttcttatgctgatttgttgcatgagaggagagtagatggggctgtgcccag

SEQ ID NO: 43057 - DNA, 80 bp, synthetic construct; identical to SEQ ID NO: 11595
  source 1..80: mol_type = other DNA

SEQ ID NO: 43058 - DNA, 80 bp, synthetic construct
  source 1..80: mol_type = other DNA
aagactttaagactttcactatttcttctaccgttatctactacaaaattcaaagaggaaccaggagtacaggaggagca

SEQ ID NO: 43059 - DNA, 80 bp, synthetic construct
  source 1..80: mol_type = other DNA
catggtctgctaagtaacaggtgccttcctagacactggtgttaccacttgaccaaggagccctcaagtggcccttatgc

SEQ ID NO: 43060 - DNA, 80 bp, synthetic construct
  source 1..80: mol_type = other DNA
ataattgttcatgatcatctctatatctaatttgtattatgactattcttattctaactattttctttattatactaaaa

SEQ ID NO: 43061 - DNA, 80 bp, synthetic construct; identical to SEQ ID NO: 11596
  source 1..80: mol_type = other DNA

SEQ ID NO: 43062 - DNA, 80 bp, synthetic construct
  source 1..80: mol_type = other DNA
gtaatcctagtgctggctccaatagaaactcatcaatttataaagcagagtctagtttagattcatatgtggttggaaaa

SEQ ID NO: 43063 - DNA, 80 bp, synthetic construct
  source 1..80: mol_type = other DNA
ggtgagaaaagatctggtggcactgatgtcagtgtgagatgatgttgttctgtagctgccacaaaaataaagcatttgtc

SEQ ID NO: 43064 - DNA, 80 bp, synthetic construct
  source 1..80: mol_type = other DNA
aaagtaaaaacagaaaaatttcgggccttatggtgtatatgttctagatgcaagcttgtccaacccgcagctcgtgggct

SEQ ID NO: 43065 - DNA, 80 bp, synthetic construct; identical to SEQ ID NO: 11597
  source 1..80: mol_type = other DNA

SEQ ID NO: 43066 - DNA, 80 bp, synthetic construct
  source 1..80: mol_type = other DNA
tctccctctgccacggtctccctctccctctctttccacggtctccctctgatgccgagccgaagctggactgtactgct

SEQ ID NO: 43067 - DNA, 80 bp, synthetic construct
  source 1..80: mol_type = other DNA
ccgcgagcgatccgccagcctcggcctcccgaggtgccaggattgcagacggagtctcgttcactcagtgctcaatggtg

SEQ ID NO: 43068 - DNA, 80 bp, synthetic construct
  source 1..80: mol_type = other DNA
tgaggagcatctctgcctggccgccatcccatctaggaagtgaggagcgtttctgcccggccgcccatcatctgagatgt

SEQ ID NO: 43069 - DNA, 80 bp, synthetic construct; identical to SEQ ID NO: 11598
  source 1..80: mol_type = other DNA

SEQ ID NO: 43070 - DNA, 80 bp, synthetic construct
  source 1..80: mol_type = other DNA
ggaagtgaggagcccctctgcccggccagccgccccgtccgggagggaggtggggggggtcagccccccgcctggccagc

SEQ ID NO: 43071 - DNA, 80 bp, synthetic construct
  source 1..80: mol_type = other DNA
gagaacgggccatgatgacaatggcggtttagtggaatagaaaggggggaaaggtggggaaaagattgagaaatcggatg

SEQ ID NO: 43072 - DNA, 80 bp, synthetic construct
  source 1..80: mol_type = other DNA
taagggcggtgcaagatgtgctttgttaaacagatgcttgaaggcagcatgctcgttaagagtcatcaccactccctaat

SEQ ID NO: 43073 - DNA, 80 bp, synthetic construct; identical to SEQ ID NO: 11599
  source 1..80: mol_type = other DNA

SEQ ID NO: 43074 - DNA, 80 bp, synthetic construct
  source 1..80: mol_type = other DNA
tcacagtggggcttacagaggccagggaataaacctggacaaattatgccccacggtggaatcactgggtccataaatcc

SEQ ID NO: 43075 - DNA, 80 bp, synthetic construct
  source 1..80: mol_type = other DNA
acctggagggcaggtgcgtggagtggctccgcagatacctggagaacaggaaggagacactgcagcacacctgtaccagg

SEQ ID NO: 43076 - DNA, 80 bp, synthetic construct
  source 1..80: mol_type = other DNA
gttccacactgctctctgacacaattaagggataaaatctctgaggcaatgacgggaagacgcaattaagggataaaatc

SEQ ID NO: 43077 - DNA, 80 bp, synthetic construct; identical to SEQ ID NO: 11600
  source 1..80: mol_type = other DNA

SEQ ID NO: 43078 - DNA, 80 bp, synthetic construct
  source 1..80: mol_type = other DNA
gtagctgggactacaggcacctgccaccatgcccggctaattttttgtatttttagtagagacagggtttcaccatgtta

SEQ ID NO: 43079 - DNA, 80 bp, synthetic construct
  source 1..80: mol_type = other DNA
tcgccttccctccttctttctccctttccttcccctccccttccttcttttcttcttttgctttttcctccattcctcct

SEQ ID NO: 43080 - DNA, 80 bp, synthetic construct
  source 1..80: mol_type = other DNA
taacagagtctgaataaaaatgcctgctataattctacagccaagacagtggcttttaactcaattccttcaacacagtg

SEQ ID NO: 43081 - DNA, 80 bp, synthetic construct; identical to SEQ ID NO: 11601
  source 1..80: mol_type = other DNA

SEQ ID NO: 43082 - DNA, 80 bp, synthetic construct
  source 1..80: mol_type = other DNA
agtaggaacttgctgtacaggaagcttaaaaaccagcaaaacaaactgatatttgttttggggatatatatatatacaca

SEQ ID NO: 43083 - DNA, 80 bp, synthetic construct
  source 1..80: mol_type = other DNA
tgtgtatatatatacttattgcacaaatctttgaagaaatacaaaggaataagtatcacaagactcagcatggagtcttc

SEQ ID NO: 43084 - DNA, 80 bp, synthetic construct
  source 1..80: mol_type = other DNA
attagcattgtttctataaatattaaattagttaaaatatcccttatgggaaacgaagggatgggccgaattaaaggaat

SEQ ID NO: 43085 - DNA, 80 bp, synthetic construct
  source 1..80: mol_type = other DNA
tgccctcattcccgtaaacccacaaccttccagcttgggtgctagggccattatgaacatgttatggtgctgcagaaatt

SEQ ID NO: 43086 - DNA, 80 bp, synthetic construct; identical to SEQ ID NO: 11602
  source 1..80: mol_type = other DNA

SEQ ID NO: 43087 - DNA, 80 bp, synthetic construct
  source 1..80: mol_type = other DNA
atgccatgaaaacggccttggctacatataggtcattcgatccttggctcactggcatctctctagattttcaataatac

SEQ ID NO: 43088 - DNA, 80 bp, synthetic construct
  source 1..80: mol_type = other DNA
aatgaaacatgaaaagagtaggaaggaatacccagtgatggaatagcaaatatgaatggaaacagaataggactgctaaa

SEQ ID NO: 43089 - DNA, 80 bp, synthetic construct
  source 1..80: mol_type = other DNA
aattcaagctaaccatttcgggctacagcatcaagccaaagttattggcatcatgctaagctagatgtgttaactgaagt

SEQ ID NO: 43090 - DNA, 80 bp, synthetic construct; identical to SEQ ID NO: 11603
  source 1..80: mol_type = other DNA

SEQ ID NO: 43091 - DNA, 80 bp, synthetic construct
  source 1..80: mol_type = other DNA
aaataggaatgcttttacactgttggtggaaaagtaaatggttaatccattgtggaagacagtgacagtgtggcgattcc

SEQ ID NO: 43092 - DNA, 80 bp, synthetic construct
  source 1..80: mol_type = other DNA
atcaatgatggtctggataaagaaaatatggtacatatacaccatggaatattatgcagccataaaaaggaaggagatca

SEQ ID NO: 43093 - DNA, 80 bp, synthetic construct
  source 1..80: mol_type = other DNA
gggggagggtggtgatgggaggatcattagcaaaaatagctaatgcatgccagggttaatacctaggtgatgagttgaca

SEQ ID NO: 43094 - DNA, 80 bp, synthetic construct; identical to SEQ ID NO: 11604
  source 1..80: mol_type = other DNA

SEQ ID NO: 43095 - DNA, 80 bp, synthetic construct
  source 1..80: mol_type = other DNA
tgctgttctcctgatgctgagggaattctcatgagatctgatggttttataaggggcttttccctgcttcattgtgcatt

SEQ ID NO: 43096 - DNA, 80 bp, synthetic construct
  source 1..80: mol_type = other DNA
tgagaatggactaatacaacttctaacttatagaatagtgccaacataacagtttgtgactctgggtgtagaacataaaa

SEQ ID NO: 43097 - DNA, 80 bp, synthetic construct
  source 1..80: mol_type = other DNA
ctgggaacagacaacaaggaaccaggccttttccaacagccatgtgactgatccatgtttcttgtgaattcccagcccca

SEQ ID NO: 43098 - DNA, 80 bp, synthetic construct; identical to SEQ ID NO: 11605
  source 1..80: mol_type = other DNA

SEQ ID NO: 43099 - DNA, 80 bp, synthetic construct
  source 1..80: mol_type = other DNA
cctcagcctcctgagtagctgcgactaccatcatgaactaccatgcctggctaattttctaattttttgtatagatggag

SEQ ID NO: 43100 - DNA, 80 bp, synthetic construct
  source 1..80: mol_type = other DNA
tggctgaagaggatgtattttatgaccattcacaatgatcacgttacttgaacttcactttccaactgtgtcccaattaa

SEQ ID NO: 43101 - DNA, 80 bp, synthetic construct
  source 1..80: mol_type = other DNA
ggatttagcagatataattaagggtctcaattagttgactttatgctgggtttatcctgcttggactgtcctaatcaggt

SEQ ID NO: 43102 - DNA, 80 bp, synthetic construct
  source 1..80: mol_type = other DNA
gcgggcggatcatgaggtcaggaggtcgagacaatcctggctaacaaggtgaaaccctgtctctactaagaaaaaaaaaa

SEQ ID NO: 43103 - DNA, 80 bp, synthetic construct; identical to SEQ ID NO: 11606
  source 1..80: mol_type = other DNA

SEQ ID NO: 43104 - DNA, 80 bp, synthetic construct
  source 1..80: mol_type = other DNA
gattctatccacatcttgcccagatttctgaccaaggaactataagcagataaatgtgtgttgttttgccaggcatggta

SEQ ID NO: 43105 - DNA, 80 bp, synthetic construct
  source 1..80: mol_type = other DNA
tcattcattaagtcaacaaaaattaacttagtccctacaatgaacgaggtatcccctcatatgctcaagtgcctgacact

SEQ ID NO: 43106 - DNA, 80 bp, synthetic construct
  source 1..80: mol_type = other DNA
cagtgctagtgtcacaattcatgagtgacagtgtggtgggaactaaggggagaggagggcctgaaggatgagaaggatgg

SEQ ID NO: 43107 - DNA, 80 bp, synthetic construct
  source 1..80: mol_type = other DNA
ctaggagggtgtccttggcagttgtcttttaatacctcatgtgggtctgcctaaaaactattttttatgttaatcaggtt

SEQ ID NO: 43108 - DNA, 80 bp, synthetic construct; identical to SEQ ID NO: 11607
  source 1..80: mol_type = other DNA

SEQ ID NO: 43109 - DNA, 80 bp, synthetic construct
  source 1..80: mol_type = other DNA
aagattctgctacccactgtagttaataaacaaagagcaaattggtctctattctgtctcatgcactcaggcacaacttt

SEQ ID NO: 43110 - DNA, 80 bp, synthetic construct
  source 1..80: mol_type = other DNA
gataatgggatgaaaagtgaaaggagagggacggggcccatgccgagggtttctcccttgtttctcagacagctcctggg

SEQ ID NO: 43111 - DNA, 80 bp, synthetic construct
  source 1..80: mol_type = other DNA
tcttttctccctctcccaacctacgtagggtccttcatcctggatactcacgacgcggacccagttctcactcccattgg

SEQ ID NO: 43112 - DNA, 80 bp, synthetic construct; identical to SEQ ID NO: 11608
  source 1..80: mol_type = other DNA

SEQ ID NO: 43113 - DNA, 80 bp, synthetic construct
  source 1..80: mol_type = other DNA
tgcggttcgacagcgacgccgcgagccagaggatggagccgcgggcgccgtggatagagcaggaggggccggagtattgg

SEQ ID NO: 43114 - DNA, 80 bp, synthetic construct
  source 1..80: mol_type = other DNA
gtctccgggtccgagatccaccccgaagccgcgggaccccgagacccttgccccgggagaggcccaggcgcctttacccg

SEQ ID NO: 43115 - DNA, 80 bp, synthetic construct
  source 1..80: mol_type = other DNA
cggcaggacgcctacgacggcaaggattacatcgccctgaacgaggacctgcgctcttggaccgcggcggacatggcggc

SEQ ID NO: 43116 - DNA, 80 bp, synthetic construct; identical to SEQ ID NO: 11609
  source 1..80: mol_type = other DNA

SEQ ID NO: 43117 - DNA, 80 bp, synthetic construct
  source 1..80: mol_type = other DNA
gcagccttgggcccgtgacttttcctctcaggccttgttctctgcttcacactcaatgtgtgtgggggtctgagtccagc

SEQ ID NO: 43118 - DNA, 80 bp, synthetic construct
  source 1..80: mol_type = other DNA
atgcgtgctggtggagtgtcccatgacagatgcaaaatgcctgaattttctgactcttcccgtcagacccccccaagaca

SEQ ID NO: 43119 - DNA, 80 bp, synthetic construct
  source 1..80: mol_type = other DNA
tccagaagtgggcggctgtggtggtgccttctggagaggagcagagatacacctgccatgtgcagcatgagggtctgccc

SEQ ID NO: 43120 - DNA, 80 bp, synthetic construct; identical to SEQ ID NO: 11610
  source 1..80: mol_type = other DNA

SEQ ID NO: 43121 - DNA, 80 bp, synthetic construct
  source 1..80: mol_type = other DNA
agcacctgttaaaatgaaggacagatttatcaccttgattacggcggtgatgggacctgatcccagcagtcacaagtcac

SEQ ID NO: 43122 - DNA, 80 bp, synthetic construct
  source 1..80: mol_type = other DNA
ctggctcctttctggtatctcacaggacattttcttctcacagatagaaaaggagggagttacactcaggctgcaagtaa

SEQ ID NO: 43123 - DNA, 80 bp, synthetic construct
  source 1..80: mol_type = other DNA
tgatgtgtccctcacagcttgtaaaggtgagagcttggaggacctaatgtgtgttgggtgttgggcggaacagtggacac

SEQ ID NO: 43124 - DNA, 80 bp, synthetic construct; identical to SEQ ID NO: 11611
  source 1..80: mol_type = other DNA

SEQ ID NO: 43125 - DNA, 80 bp, synthetic construct
  source 1..80: mol_type = other DNA
tccatctctgtctcaacttcatggtgcactgagctgtaacttcttccttccctattaaaattagaaccttagtataaatt

SEQ ID NO: 43126 - DNA, 80 bp, synthetic construct
  source 1..80: mol_type = other DNA
cccagtttctgttctggccaccatgggctttatgtggtcacagctcacctgggtcatctttgctgctccattgtccttgg

SEQ ID NO: 43127 - DNA, 80 bp, synthetic construct
  source 1..80: mol_type = other DNA
tttcgatttttctccaatctttttaaaggaaccagattgtgacatttgcagagaggaggggtcccatagtttctcatcat

SEQ ID NO: 43128 - DNA, 80 bp, synthetic construct; identical to SEQ ID NO: 11612
  source 1..80: mol_type = other DNA

SEQ ID NO: 43129 - DNA, 80 bp, synthetic construct
  source 1..80: mol_type = other DNA
tgttgtctgctagggatatgactgcttttgcatttagaaagcatccttaaagtaaaaacagaaaaatgtctggggttatg

SEQ ID NO: 43130 - DNA, 80 bp, synthetic construct
  source 1..80: mol_type = other DNA
ggaaccctccttttcagtgacctgcaaaagatagagggcacatttactgtgataacccagagtatcagccaagggggctt

SEQ ID NO: 43131 - DNA, 80 bp, synthetic construct
  source 1..80: mol_type = other DNA
cttcagattcagaatccagtgactaaggacatatctatatccctaagagaaagaaccttgggacacgatgatggttatat

SEQ ID NO: 43132 - DNA, 80 bp, synthetic construct; identical to SEQ ID NO: 11613
  source 1..80: mol_type = other DNA

SEQ ID NO: 43133 - DNA, 80 bp, synthetic construct
  source 1..80: mol_type = other DNA
actgcaggtattataggggtggcactgccattacagacctgaacgatgtggggtggtgttgggattgcctgttatctcca

SEQ ID NO: 43134 - DNA, 80 bp, synthetic construct
  source 1..80: mol_type = other DNA
tgtggatttggtgagtgcattccctcccatttcatttagaagatggatatggaatgattcacattcacatgggatttata

SEQ ID NO: 43135 - DNA, 80 bp, synthetic construct
  source 1..80: mol_type = other DNA
aaagtacgctgaattccctggcaaaacatgtgcactacagaaggtgaagataaaacttacagagcttcaagagtggccac

SEQ ID NO: 43136 - DNA, 80 bp, synthetic construct; identical to SEQ ID NO: 11614
  source 1..80: mol_type = other DNA

SEQ ID NO: 43137 - DNA, 80 bp, synthetic construct
  source 1..80: mol_type = other DNA
agtccacagcagagaaacatgctccatgttagaagcaacttttagcatgttactggccctgataagatagaatgcttgag

SEQ ID NO: 43138 - DNA, 80 bp, synthetic construct
  source 1..80: mol_type = other DNA
cacccagtcctgatgtggccctgaataaccaaacaaattgaagacaaattgaagttagccagtctgcatcatggatcagc

SEQ ID NO: 43139 - DNA, 80 bp, synthetic construct
  source 1..80: mol_type = other DNA
aatactctgctcgtgagcattgcagaccaatgataggcaccaatagggcactatttcttaaagtaactgactagccccta

SEQ ID NO: 43140 - DNA, 80 bp, synthetic construct; identical to SEQ ID NO: 11615
  source 1..80: mol_type = other DNA

SEQ ID NO: 43141 - DNA, 80 bp, synthetic construct
  source 1..80: mol_type = other DNA
tcaggatgtgatgcatgtattgaatcaaagacgtctctaaggcactgttttcagaaggaagaatacgcgggtccaaaaac

SEQ ID NO: 43142 - DNA, 80 bp, synthetic construct
  source 1..80: mol_type = other DNA
tgtatttattttattcattatattcacccccagggtgattttgctcttcttacttccaaaatctggactctgcagggtag

SEQ ID NO: 43143 - DNA, 80 bp, synthetic construct
  source 1..80: mol_type = other DNA
aggagaagtgtgtgtggaaaccaggaatccacttggggacgtcctggtttcccttgtccgttgtgtgagcggaatcatcc

SEQ ID NO: 43144 - DNA, 80 bp, synthetic construct; identical to SEQ ID NO: 11616
  source 1..80: mol_type = other DNA

SEQ ID NO: 43145 - DNA, 80 bp, synthetic construct
  source 1..80: mol_type = other DNA
tacaggtgtgtcccctcataagatgccgtagactttaagctcatcttggcatctgctccttggaggacttggactaaaaa

SEQ ID NO: 43146 - DNA, 80 bp, synthetic construct
  source 1..80: mol_type = other DNA
tagtttgtgacacagcagttaataactattaaggctttcttaagtttctgttattccatggatgttatctacatctttta

SEQ ID NO: 43147 - DNA, 80 bp, synthetic construct
  source 1..80: mol_type = other DNA
ccctcagagctttctccctccctccactttttcataaactctatgtggttaggctaaaaagaatcactatttgaatctta

SEQ ID NO: 43148 - DNA, 80 bp, synthetic construct; identical to SEQ ID NO: 11617
  source 1..80: mol_type = other DNA

SEQ ID NO: 43149 - DNA, 80 bp, synthetic construct
  source 1..80: mol_type = other DNA
attttagcagtaaaaatgattgaacagcaccctcccacatcagagataactctcctacacataacatgcatcacagaaga

SEQ ID NO: 43150 - DNA, 80 bp, synthetic construct
  source 1..80: mol_type = other DNA
acagtctagggtggcttcataggttctgtttcttatgccaggagaggatgtccaggtaattagttacttgatcataaatc

SEQ ID NO: 43151 - DNA, 80 bp, synthetic construct
  source 1..80: mol_type = other DNA
gccatgatgcccggctaatttttgtatttttcgtacagactgtgcttcaccatgttggccaggctggtctccaactcctg

SEQ ID NO: 43152 - DNA, 80 bp, synthetic construct; identical to SEQ ID NO: 11618
  source 1..80: mol_type = other DNA

SEQ ID NO: 43153 - DNA, 80 bp, synthetic construct
  source 1..80: mol_type = other DNA
ttaccacggatacaagtgaattaaacttttacagaatagaaaaaaagcactgtcgagcaaaataaattaaatgaaaacac

SEQ ID NO: 43154 - DNA, 80 bp, synthetic construct
  source 1..80: mol_type = other DNA
ttaaattgatcaatggatgcacactgaatacccagttattgaaaaatcgtgttcctagattggagttaaccatttccgcc

SEQ ID NO: 43155 - DNA, 80 bp, synthetic construct
  source 1..80: mol_type = other DNA
gtagcttctgaggaaaaagaaagatagttatgattgtaaaggcattattatacggcaccagtcgtgggactctttggtct

SEQ ID NO: 43156 - DNA, 80 bp, synthetic construct; identical to SEQ ID NO: 11619
  source 1..80: mol_type = other DNA

SEQ ID NO: 43157 - DNA, 80 bp, synthetic construct
  source 1..80: mol_type = other DNA
agccctggtgaagggcactttggctgcattgagcacttgcagatttgaggtgattacattctgtacgttacttaacatgc

SEQ ID NO: 43158 - DNA, 80 bp, synthetic construct
  source 1..80: mol_type = other DNA
taatgttgagataatagtttgtgactctgggtgtagatcataagactcactaagtctgggagcggtcactcacgcctgta

SEQ ID NO: 43159 - DNA, 80 bp, synthetic construct
  source 1..80: mol_type = other DNA
gagaatcacttgaacctggaagtcggaggttgcagtgagccaagatccagccactgcattccagcctgggtgacagggtg

SEQ ID NO: 43160 - DNA, 80 bp, synthetic construct; identical to SEQ ID NO: 11620
  source 1..80: mol_type = other DNA

SEQ ID NO: 43161 - DNA, 80 bp, synthetic construct
  source 1..80: mol_type = other DNA
ttgattttagttgctaagttttaagtgacttgttatgcatcagtagataactaacacaccttcacaagagaggatgaatc

SEQ ID NO: 43162 - DNA, 80 bp, synthetic construct
  source 1..80: mol_type = other DNA
aattttttttaccttcaatttgtatgttctattcaaacacaaaaggaagagccaggctatgctagggtgattctatgatg

SEQ ID NO: 43163 - DNA, 80 bp, synthetic construct
  source 1..80: mol_type = other DNA
agatggggattatcctgcttggactgtcctaatcaggtaagctctgaaaaggactgggttcttcctgagaatagagactc

SEQ ID NO: 43164 - DNA, 80 bp, synthetic construct; identical to SEQ ID NO: 11621
  source 1..80: mol_type = other DNA

SEQ ID NO: 43165 - DNA, 80 bp, synthetic construct
  source 1..80: mol_type = other DNA
tcctccaatggaatgaatttatgaactgatatgcatagtagttgcataaaaccaaatgtttcctaacttgctttgcattt

SEQ ID NO: 43166 - DNA, 80 bp, synthetic construct
  source 1..80: mol_type = other DNA
ttttagaggcttcttgagagtgagatggagccattggagtgttttaagtgaagaaatgacacaatctgactcacattagc

SEQ ID NO: 43167 - DNA, 80 bp, synthetic construct
  source 1..80: mol_type = other DNA
gacagggacagagagaagggctggagaagcaggaggtgaggtaaaggaacagagagaaagaattctaaagcaatggaatt

SEQ ID NO: 43168 - DNA, 80 bp, synthetic construct; identical to SEQ ID NO: 11622
  source 1..80: mol_type = other DNA

SEQ ID NO: 43169 - DNA, 80 bp, synthetic construct
  source 1..80: mol_type = other DNA
ccaggagtggtggtacaagcctgtggtgccagatacttggaggctgaaggaggagcattgatcgcatgagcccaggaggt

SEQ ID NO: 43170 - DNA, 80 bp, synthetic construct
  source 1..80: mol_type = other DNA
gaggtgattaaattctgtacaggctcctggttgcaatatacggtaacacattgtgctttgtattgagatgtcctggactc

SEQ ID NO: 43171 - DNA, 80 bp, synthetic construct
  source 1..80: mol_type = other DNA
gacacatttatatataatggggccaaaaatcacctcttttacaaattagattcgtgaccattcaggggctaccaagattg

SEQ ID NO: 43172 - DNA, 80 bp, synthetic construct
  source 1..80: mol_type = other DNA
tcaggcccaaatccccgggggttggtcgaggctgaggcggggctccgtcgaggctgaggcggggctcagcggcctgggct

SEQ ID NO: 43173 - DNA, 80 bp, synthetic construct; identical to SEQ ID NO: 11623
  source 1..80: mol_type = other DNA

SEQ ID NO: 43174 - DNA, 80 bp, synthetic construct
  source 1..80: mol_type = other DNA
atctccttgagtcacattccaaaagaagggaaggaaaatgggaccaacgctaaaatatccctctccctcttgtgaggagg

SEQ ID NO: 43175 - DNA, 80 bp, synthetic construct
  source 1..80: mol_type = other DNA
caccaggaattttcctctcaggccttgttctctgcctcacactcaatgtgtatttgtgggtctgattccagcttttttga

SEQ ID NO: 43176 - DNA, 80 bp, synthetic construct
  source 1..80: mol_type = other DNA
cttccccacttcaggtgtcccgtcaattttcaggatggtcccatgaggtggaatgtcccatgaggaatgcaaagtgcctg

SEQ ID NO: 43177 - DNA, 80 bp, synthetic construct
  source 1..80: mol_type = other DNA
acccagtagtgggatggacaggaccaaatgtaggatgcagaggttgtggagaccacacctgcagggtacagaaccttcca

SEQ ID NO: 43178 - DNA, 80 bp, synthetic construct; identical to SEQ ID NO: 11624
  source 1..80: mol_type = other DNA

SEQ ID NO: 43179 - DNA, 80 bp, synthetic construct
  source 1..80: mol_type = other DNA
agttggcttgtatcctgcctagtcatgaggcaccatctctgtctatcaacacttactcttttgtaaagaacttgtgaaaa

SEQ ID NO: 43180 - DNA, 80 bp, synthetic construct
  source 1..80: mol_type = other DNA
gcagtcacagttctggacactcctctgggatctcatgaccctgcttcctccctggcctttcacagtttattttctttcca

SEQ ID NO: 43181 - DNA, 80 bp, synthetic construct
  source 1..80: mol_type = other DNA
aaaattcctcctttagtcacatcatctgtgggctctgaccagattttgtttttgttccacccgaaacagggacagtaccc

SEQ ID NO: 43182 - DNA, 80 bp, synthetic construct; identical to SEQ ID NO: 11625
  source 1..80: mol_type = other DNA

SEQ ID NO: 43183 - DNA, 80 bp, synthetic construct
  source 1..80: mol_type = other DNA
ctgatattgtttggatctgtgtctccacccaaatctcatgttcacttgtaatcactaaggttggaggtggcacctcaggg

SEQ ID NO: 43184 - DNA, 80 bp, synthetic construct
  source 1..80: mol_type = other DNA
ccccttaaccttccagcatgattgaaaatttcctgaggtcctctcataagttgagcagatgccagaatcatactttcata

SEQ ID NO: 43185 - DNA, 80 bp, synthetic construct
  source 1..80: mol_type = other DNA
actgggtaacaggtagaggttggaagagtttggagagtttagaagacaagaaaatgggggaaaacttgcaacttcctaga

SEQ ID NO: 43186 - DNA, 80 bp, synthetic construct; identical to SEQ ID NO: 11626
  source 1..80: mol_type = other DNA

SEQ ID NO: 43187 - DNA, 80 bp, synthetic construct
  source 1..80: mol_type = other DNA
ccactggcaatgtgcaagctcagcttggaaaatccataggtattcaattttcacccatgagagcagctatatgggttatg

SEQ ID NO: 43188 - DNA, 80 bp, synthetic construct
  source 1..80: mol_type = other DNA
atcttccatgatgagtttcagctttgtgaggacactgcattcatttcttttggcccatttattccttttagaatggaaat

SEQ ID NO: 43189 - DNA, 80 bp, synthetic construct
  source 1..80: mol_type = other DNA
ttgagttgatgctggaacaacctagcacatttgggacaattgggaaattatcatattttgcaatgggagaaaaacatgag

SEQ ID NO: 43190 - DNA, 80 bp, synthetic construct
  source 1..80: mol_type = other DNA
caatcttttatgaataaagagatcctgtcctctctcgcaagtgaatgaattgttactcttttagtttccaagagagacag

SEQ ID NO: 43191 - DNA, 80 bp, synthetic construct; identical to SEQ ID NO: 11627
  source 1..80: mol_type = other DNA

SEQ ID NO: 43192 - DNA, 80 bp, synthetic construct
  source 1..80: mol_type = other DNA
atatccagggtccgctcagccatgagtcctctcatcaatattctaactcttatcactcaagagattctaaggtttttagg

SEQ ID NO: 43193 - DNA, 80 bp, synthetic construct
  source 1..80: mol_type = other DNA
agtctcattcagtcattcaaaattagaacagttcaccatcctctcgtatgaatatgtctcccagaatgaagtcactcagg

SEQ ID NO: 43194 - DNA, 80 bp, synthetic construct
  source 1..80: mol_type = other DNA
cattatataaccctttgatttagtcacttaccctcagccattattcctccttctgtccctttatatcagtcttttccagt

SEQ ID NO: 43195 - DNA, 80 bp, synthetic construct
  source 1..80: mol_type = other DNA
tttactgttaatcctgactttgccagatgaaatgaaggcatagcaccatctttgagttgcttgagaattcttatataaag

SEQ ID NO: 43196 - DNA, 80 bp, synthetic construct; identical to SEQ ID NO: 11628
  source 1..80: mol_type = other DNA

SEQ ID NO: 43197 - DNA, 80 bp, synthetic construct
  source 1..80: mol_type = other DNA
tgcattgttagccatttgaggctgtaaagtgtgttttcttgcgtaaagaaatgggactcagcagtccacattggtgcaat

SEQ ID NO: 43198 - DNA, 80 bp, synthetic construct
  source 1..80: mol_type = other DNA
ccttcccactagagaatcacatagccatctgctgcctctgtctgttttcttgaccaacagtcaaaacagagatgataaga

SEQ ID NO: 43199 - DNA, 80 bp, synthetic construct
  source 1..80: mol_type = other DNA
gaagactctgaaaaacctgaagtcaataagttagaccacttagataaaatggacagattcatacaaagatagaaattgcc

SEQ ID NO: 43200 - DNA, 80 bp, synthetic construct; identical to SEQ ID NO: 11629
  source 1..80: mol_type = other DNA

SEQ ID NO: 43201 - DNA, 80 bp, synthetic construct
  source 1..80: mol_type = other DNA
tgggaggtcatgaaggagctaaacccaatgctcccttaaatccttatccaaacttgaggaaagaattagaacaatgtaag

SEQ ID NO: 43202 - DNA, 80 bp, synthetic construct
  source 1..80: mol_type = other DNA
agacctaaaactgtaaaaaccctagaagaaaacctaggcaataccattcaggacataggcatgggcgaagacttcatgac

SEQ ID NO: 43203 - DNA, 80 bp, synthetic construct; identical to SEQ ID NO: 11630
  source 1..80: mol_type = other DNA

SEQ ID NO: 43204 - DNA, 80 bp, synthetic construct
  source 1..80: mol_type = other DNA
gagaggatgtggagaaataggaacgcttttacactgttggtcggagtgtaaattagttcaaccatcgtggaagataatgt

SEQ ID NO: 43205 - DNA, 80 bp, synthetic construct
  source 1..80: mol_type = other DNA
accaatccaaatgcccatcaatgatagactgaataaagaaaatgtggcacatatacaccatggaatactatgcagccata

SEQ ID NO: 43206 - DNA, 80 bp, synthetic construct
  source 1..80: mol_type = other DNA
tgagaacacatggacacagggaggggaacatcacacactggggcctgtctgagggtagggggctaggggagggatagcat

SEQ ID NO: 43207 - DNA, 80 bp, synthetic construct; identical to SEQ ID NO: 11631
  source 1..80: mol_type = other DNA

SEQ ID NO: 43208 - DNA, 80 bp, synthetic construct
  source 1..80: mol_type = other DNA
aaattcccaaatgcagatcctggatgggataataatgaccccagggatcgggtccaaatgcaagaccatagggagctaat

SEQ ID NO: 43209 - DNA, 80 bp, synthetic construct
  source 1..80: mol_type = other DNA
aaaatattcaggattaaatccagaggacccagtagggcaaggccttttaaaggttaattttgtaactaaaagctgatgta

SEQ ID NO: 43210 - DNA, 80 bp, synthetic construct
  source 1..80: mol_type = other DNA
gtgtgtggcagctggcttctaaaagctgttgataaaggttactgctgagtcatttccgcagagctgcctgtttttgcaga

SEQ ID NO: 43211 - DNA, 80 bp, synthetic construct; identical to SEQ ID NO: 11632
  source 1..80: mol_type = other DNA

SEQ ID NO: 43212 - DNA, 80 bp, synthetic construct
  source 1..80: mol_type = other DNA
taatgggttgcctacagcaaaaactagatggctgtttatcaggaggtggtcaaaaggattcaagttatggaagagtaaat

SEQ ID NO: 43213 - DNA, 80 bp, synthetic construct
  source 1..80: mol_type = other DNA
ctagggctgtaaactcaaatgactacagggccagcaaataataaaaaggagggctgcagggctgggtgggaactgtggcg

SEQ ID NO: 43214 - DNA, 80 bp, synthetic construct
  source 1..80: mol_type = other DNA
gcaatccctgaagtagagagagctcgtgctggggaaaagtctgccaaaatgctttaaggtggaatgtgtaaaagttctgt

SEQ ID NO: 43215 - DNA, 80 bp, synthetic construct; identical to SEQ ID NO: 11633
  source 1..80: mol_type = other DNA

SEQ ID NO: 43216 - DNA, 80 bp, synthetic construct
  source 1..80: mol_type = other DNA
tcgggaggtgactaaactaacaccagccagtttcttatgaaaaggagaggagaataagaaggcgtcagagtataactgtt

SEQ ID NO: 43217 - DNA, 80 bp, synthetic construct
  source 1..80: mol_type = other DNA
ggctgtgctgtcatgaacaaaaacaaacaatccttatgtgaaaaagttaaattactcaataactggtcagcccaaacctg

SEQ ID NO: 43218 - DNA, 80 bp, synthetic construct
  source 1..80: mol_type = other DNA
gaacaagttttagaaagcctcctgtttccagcagagacagccatagttcatgtaaatggccatcagaaaagaaacactat

SEQ ID NO: 43219 - DNA, 80 bp, synthetic construct; identical to SEQ ID NO: 11634
  source 1..80: mol_type = other DNA

SEQ ID NO: 43220 - DNA, 80 bp, synthetic construct
  source 1..80: mol_type = other DNA
ctcgggaggctgaggcaggagaatggcatgaacccaagaggtggagcttgcagtgagccgagatcgtgccactgcactcc

SEQ ID NO: 43221 - DNA, 80 bp, synthetic construct
  source 1..80: mol_type = other DNA
ggaattgtgtgaactcccaggaaacaacttaaggttaaaagaacttgtaacacaaaccccaccccttgagttcacagttc

SEQ ID NO: 43222 - DNA, 80 bp, synthetic construct
  source 1..80: mol_type = other DNA
ggaaggtaaattggaagtgtatagatcacctaagaaaccctttaagctaattctaaggaaaacctaaaagtaagccataa

SEQ ID NO: 43223 - DNA, 80 bp, synthetic construct; identical to SEQ ID NO: 11635
  source 1..80: mol_type = other DNA

SEQ ID NO: 43224 - DNA, 80 bp, synthetic construct
  source 1..80: mol_type = other DNA
gttaaatgggtgaaattttcagcacaagccctcgataaaagtaactgttatgcatgtgctgctggtcaacctcaggcaca

SEQ ID NO: 43225 - DNA, 80 bp, synthetic construct
  source 1..80: mol_type = other DNA
ttctctatagggaatataaatcactcctgttgtcactctagacagaaggtgaggttcgataaacctgtgggaaaactcgc

SEQ ID NO: 43226 - DNA, 80 bp, synthetic construct
  source 1..80: mol_type = other DNA
gccattccgttcaccctgtcattccatgaaacagctaaaaatacacatggtcatagagatcagagtaatttagcaattta

SEQ ID NO: 43227 - DNA, 80 bp, synthetic construct; identical to SEQ ID NO: 11636
  source 1..80: mol_type = other DNA

SEQ ID NO: 43228 - DNA, 80 bp, synthetic construct
  source 1..80: mol_type = other DNA
ttcatcaattacacgcaaaatgcccttaagggagtagccagacaactaaatgccactagctaaatggcttgggaaaacag

SEQ ID NO: 43229 - DNA, 80 bp, synthetic construct
  source 1..80: mol_type = other DNA
gggactaacaactctagtcaacgagctggcagaaaacacaggagtaaatgacctttttactaactggttagaaggttggt

SEQ ID NO: 43230 - DNA, 80 bp, synthetic construct
  source 1..80: mol_type = other DNA
cccaacagaatgacttactattattaaaagccaaactaaacttctcctcctataatgaagaaagtaaaaaacttccagaa

SEQ ID NO: 43231 - DNA, 80 bp, synthetic construct; identical to SEQ ID NO: 11637
  source 1..80: mol_type = other DNA

SEQ ID NO: 43232 - DNA, 80 bp, synthetic construct
  source 1..80: mol_type = other DNA
caaaaagaccctaaagaacatacctgaagtcttaatacaactaccaataggtgatgcccaggaagactataaccccgtag

SEQ ID NO: 43233 - DNA, 80 bp, synthetic construct
  source 1..80: mol_type = other DNA
tgggtttgaatgggtgagtttctttctcacagggatgtagatggcaacgtggctctcattcccctcccaaataccccaac

SEQ ID NO: 43234 - DNA, 80 bp, synthetic construct
  source 1..80: mol_type = other DNA
aggacacagagaataataatactactaataatactaatgatgatgaaagcagcaacagcagcaacatatggaatggctgg

SEQ ID NO: 43235 - DNA, 80 bp, synthetic construct; identical to SEQ ID NO: 11638
  source 1..80: mol_type = other DNA

SEQ ID NO: 43236 - DNA, 80 bp, synthetic construct
  source 1..80: mol_type = other DNA
ccacactcatggtggaggagtgggggactggagaagaaagggcagagacaatgaggcacatggccaaaccctgctcccct

SEQ ID NO: 43237 - DNA, 80 bp, synthetic construct
  source 1..80: mol_type = other DNA
gggatccctgcattgatgctgaggaggggaatgtcagggctgggctcctggtacatggggccagagggaactcttaggga

SEQ ID NO: 43238 - DNA, 80 bp, synthetic construct
  source 1..80: mol_type = other DNA
ctaacaggagagaaaaatcaggatataacacaccaacagaaaacacatgcatccatagcacaaggagggtttccctggac

SEQ ID NO: 43239 - DNA, 80 bp, synthetic construct; identical to SEQ ID NO: 11639
  source 1..80: mol_type = other DNA

SEQ ID NO: 43240 - DNA, 80 bp, synthetic construct
  source 1..80: mol_type = other DNA
cccctccctggccctcctccatgcctttctgtgtgggctgagtgccaggttacctccccaccgagctctgctgaccccta

SEQ ID NO: 43241 - DNA, 80 bp, synthetic construct
  source 1..80: mol_type = other DNA
ccattctctgtcaagtcctcagtctctgtgtcccaggtctcagctcccagaactgcttctgcccactgtccccgggaccc

SEQ ID NO: 43242 - DNA, 80 bp, synthetic construct
  source 1..80: mol_type = other DNA
tcctggaagtaacttcacattgatgtttaacacacaggtctgctgtctcaacctttctgaggaggcaggaaatgtacata

SEQ ID NO: 43243 - DNA, 80 bp, synthetic construct; identical to SEQ ID NO: 11640
  source 1..80: mol_type = other DNA

SEQ ID NO: 43244 - DNA, 80 bp, synthetic construct
  source 1..80: mol_type = other DNA
acaagatgggagtaagggaggatcagtgcatcttttccagaaacagtgccaggaaaacgacattcacatgcaaaaagaaa

SEQ ID NO: 43245 - DNA, 80 bp, synthetic construct
  source 1..80: mol_type = other DNA
gcacagacaacaaagaaaaaattgataagttggacccatcaaaataaaaaaaattgagcattaaaaaacacaatctgcag

SEQ ID NO: 43246 - DNA, 80 bp, synthetic construct
  source 1..80: mol_type = other DNA
aagaattcctgtaacacaaacataagactcaaaaaaactatgtaggcaaagaatttgaatagccaattctccgaagaaga

SEQ ID NO: 43247 - DNA, 80 bp, synthetic construct
  source 1..80: mol_type = other DNA
gagagagagagaaagcaagtttggcaaagaggtagagaaactggaacatttgtgtagtacattgggaaagacaaagtggg

SEQ ID NO: 43248 - DNA, 80 bp, synthetic construct; identical to SEQ ID NO: 11641
  source 1..80: mol_type = other DNA

SEQ ID NO: 43249 - DNA, 80 bp, synthetic construct
  source 1..80: mol_type = other DNA
caaaaaagaaattgtcaccgcgtaccaaacaataatatagaattagaaagaggctggggtcctggtcagagagaaaaaaa

SEQ ID NO: 43250 - DNA, 80 bp, synthetic construct
  source 1..80: mol_type = other DNA
agaggaggggatgaccacagcccactatgtggtaagtgaagattttggatatgaagtctaggaactgacagcccaccggg

SEQ ID NO: 43251 - DNA, 80 bp, synthetic construct
  source 1..80: mol_type = other DNA
aagggaggggttgtctgggggagggtggggtttggggaaggtgagaacttgctgagggccgaaggcagctggtcaagagg

SEQ ID NO: 43252 - DNA, 80 bp, synthetic construct; identical to SEQ ID NO: 11642
  source 1..80: mol_type = other DNA

SEQ ID NO: 43253 - DNA, 80 bp, synthetic construct
  source 1..80: mol_type = other DNA
aggggatgagggcagaggacaccctacaaatggatcagagaactgcagatagaaaggggtagcagggagcagggagggca

SEQ ID NO: 43254 - DNA, 80 bp, synthetic construct
  source 1..80: mol_type = other DNA
caggaagaatcctctgcctggagccggcaggctccaacccctcagcttgagagtcaggagccccatagtccccacagcaa

SEQ ID NO: 43255 - DNA, 80 bp, synthetic construct
  source 1..80: mol_type = other DNA
gagctggaagggccctcgaatgccattcacaggaacagcccaggaacccagggacttcagaagggctggtttgtccgaaa

SEQ ID NO: 43256 - DNA, 80 bp, synthetic construct; identical to SEQ ID NO: 11643
  source 1..80: mol_type = other DNA

SEQ ID NO: 43257 - DNA, 80 bp, synthetic construct
  source 1..80: mol_type = other DNA
gacaatgaaccatccatgatcacgaactgtgtcccttccatcttcgtcagctttaggagcattttttttcccaatggaac

SEQ ID NO: 43258 - DNA, 80 bp, synthetic construct
  source 1..80: mol_type = other DNA
atttatttcgagcattatcatttattgagcacagcagggactggggtcttgtccccaccttagagggattatttacactg

SEQ ID NO: 43259 - DNA, 80 bp, synthetic construct
  source 1..80: mol_type = other DNA
gacttttaatacttcaatgacgatgatactaataataatatgcaaagtttgttccaacgcatttagaggtgatcgcgaca

SEQ ID NO: 43260 - DNA, 80 bp, synthetic construct; identical to SEQ ID NO: 11644
  source 1..80: mol_type = other DNA

SEQ ID NO: 43261 - DNA, 80 bp, synthetic construct
  source 1..80: mol_type = other DNA
catcaccccgccctggtctacggaaaatgacaagtgtttactgatatagaaacggaataacggcgctgtgggctggggag

SEQ ID NO: 43262 - DNA, 80 bp, synthetic construct
  source 1..80: mol_type = other DNA
gagcagggaactgcgcctcagcccctcccacgggccgcccactgattccaggatccgaaaacgcttccagctgctccgtc

SEQ ID NO: 43263 - DNA, 80 bp, synthetic construct
  source 1..80: mol_type = other DNA
aggatcctaatttacaccccgagtgtggccccgtcaaagactagagcgaaggtcactgaaatgacacaagatcagcgagg

SEQ ID NO: 43264 - DNA, 80 bp, synthetic construct; identical to SEQ ID NO: 11645
  source 1..80: mol_type = other DNA

SEQ ID NO: 43265 - DNA, 80 bp, synthetic construct
  source 1..80: mol_type = other DNA
cagatgtgccagggtgcatctcgtgggtgcaagaacaagggttttgttttgttttacaaaatcaaagtacaaatctcaaa

SEQ ID NO: 43266 - DNA, 80 bp, synthetic construct
  source 1..80: mol_type = other DNA
accacaatgaagataaagaaataacatttccatagtcccctaaagaatagccacgcgataaaattccacgcagtccttaa

SEQ ID NO: 43267 - DNA, 80 bp, synthetic construct
  source 1..80: mol_type = other DNA
caaaattttgacagggaccccagggactgggataacgttgtgactttcaccttctctgaaatgttggaattttatattac

SEQ ID NO: 43268 - DNA, 80 bp, synthetic construct; identical to SEQ ID NO: 11646
  source 1..80: mol_type = other DNA

SEQ ID NO: 43269 - DNA, 80 bp, synthetic construct
  source 1..80: mol_type = other DNA
ttctcaaagtatctttgatagagccgtttttagtgcagtagagagatgtgtaacaattttacaaaaggggcgggctgtaa

SEQ ID NO: 43270 - DNA, 80 bp, synthetic construct
  source 1..80: mol_type = other DNA
aactcagaagcaagtctaaaaactcaggctgactttcagatctgaagaaatctcaagaatatttgtgtggaagaacattc

SEQ ID NO: 43271 - DNA, 80 bp, synthetic construct; identical to SEQ ID NO: 11647
  source 1..80: mol_type = other DNA

SEQ ID NO: 43272 - DNA, 80 bp, synthetic construct
  source 1..80: mol_type = other DNA
ctgggaaaactggctatccctatgtagaaagctgaaactggatcccttccttacatgttatacaaaaattaattcaagat

SEQ ID NO: 43273 - DNA, 80 bp, synthetic construct
  source 1..80: mol_type = other DNA
aaagagcttctgcacagcaaaagaaactaccatcagggtgaacaggcaacctacaacatgggagaaaatttttgcaatct

SEQ ID NO: 43274 - DNA, 80 bp, synthetic construct; identical to SEQ ID NO: 11648
  source 1..80: mol_type = other DNA

SEQ ID NO: 43275 - DNA, 80 bp, synthetic construct
  source 1..80: mol_type = other DNA
actgggtatatacccaaaggactataaatcatgctgctataaagacacatgcacacgtatgtttattgcggcactattca

SEQ ID NO: 43276 - DNA, 80 bp, synthetic construct
  source 1..80: mol_type = other DNA
taaactatcgcaaggacaaaaaaccaaacaccacatgttctcactcatagatgggaactgaacaatgagaacacatggac

SEQ ID NO: 43277 - DNA, 80 bp, synthetic construct; identical to SEQ ID NO: 11649
  source 1..80: mol_type = other DNA

SEQ ID NO: 43278 - DNA, 80 bp, synthetic construct
  source 1..80: mol_type = other DNA
gcgcgcaggatgtgctttgttatagtggggttgggatagcggagcggaggcaaggacactctgggaataaatggcgagaa

SEQ ID NO: 43279 - DNA, 80 bp, synthetic construct
  source 1..80: mol_type = other DNA
cttctcctagctactactgatgagttcaaactagcaggagactaagacgtgtcctttgcaatgtagactccatatcttgc

SEQ ID NO: 43280 - DNA, 80 bp, synthetic construct
  source 1..80: mol_type = other DNA
ctgtccatctctggaccccgctcctgagtatctccccccttcttcagaggacttcccctcatggagtacagactcctcca

SEQ ID NO: 43281 - DNA, 80 bp, synthetic construct; identical to SEQ ID NO: 11650
  source 1..80: mol_type = other DNA

SEQ ID NO: 43282 - DNA, 80 bp, synthetic construct
  source 1..80: mol_type = other DNA
ccttggcactgcacgcaggagtcagtgttatgtgcacctgtgcttttatttcaggagctgagacaattgtattaatcaga

SEQ ID NO: 43283 - DNA, 80 bp, synthetic construct
  source 1..80: mol_type = other DNA
ccactgtgcgtgtcaaattccatcaaagaaaaaccattatagcaaaacttccatgtcacagttttaagcctgcacaatga

SEQ ID NO: 43284 - DNA, 80 bp, synthetic construct
  source 1..80: mol_type = other DNA
tctccattcaatagtgcagggtgaggacattttgggggagaaatatagactgtccttagacccctggggtttgtacattt

SEQ ID NO: 43285 - DNA, 80 bp, synthetic construct; identical to SEQ ID NO: 11651
  source 1..80: mol_type = other DNA

SEQ ID NO: 43286 - DNA, 80 bp, synthetic construct
  source 1..80: mol_type = other DNA
gttcaagcgattctcctgcctcagcctccccagtagctgggattacaggggcccgccaccacgcttggctaatttctgta

SEQ ID NO: 43287 - DNA, 80 bp, synthetic construct
  source 1..80: mol_type = other DNA
tggtttgttgtagtaagccatctggaatcaactgtggaaataaatgaatggttctctattaaataactgctgagaccatc

SEQ ID NO: 43288 - DNA, 80 bp, synthetic construct
  source 1..80: mol_type = other DNA
gctttcgaatgggaattagagcccatcctcaccaccacatcccagagacactccagcctcttcccttcctctctccattt

SEQ ID NO: 43289 - DNA, 80 bp, synthetic construct; identical to SEQ ID NO: 11652
  source 1..80: mol_type = other DNA

SEQ ID NO: 43290 - DNA, 80 bp, synthetic construct
  source 1..80: mol_type = other DNA
cttgtatccctagcatctagaacataccagtacagaggaggggcttaacaaataagaggtgaatgatgggtgaatataat

SEQ ID NO: 43291 - DNA, 80 bp, synthetic construct
  source 1..80: mol_type = other DNA
ctagctactcgggaggctgagacacaagaatgacttgaccctgggaggtggaggttgcagtgaaccgagattgtgccact

SEQ ID NO: 43292 - DNA, 80 bp, synthetic construct
  source 1..80: mol_type = other DNA
tatttacaataaggaagaagaacttgtaaaagaagagtagctgggtcattttttggaaatagtatacagccaggaaaagt

SEQ ID NO: 43293 - DNA, 80 bp, synthetic construct; identical to SEQ ID NO: 11653
  source 1..80: mol_type = other DNA

SEQ ID NO: 43294 - DNA, 80 bp, synthetic construct
  source 1..80: mol_type = other DNA
aatacaattttaatgaaaaagtccaaatgtcctgtcccaactcaggtcactttctctttttttagagatagggacttgct

SEQ ID NO: 43295 - DNA, 80 bp, synthetic construct
  source 1..80: mol_type = other DNA
aatgaccatctaattaaaaaaaaaaaattgaacagaatacatctcactgcttcccaggctggtcttgaactcctgggctc

SEQ ID NO: 43296 - DNA, 80 bp, synthetic construct
  source 1..80: mol_type = other DNA
cacaatgcctcatccatccctgggttataggcgtcggctgaatgataaagtcaacactgagaatatgatcattttagatt

SEQ ID NO: 43297 - DNA, 80 bp, synthetic construct; identical to SEQ ID NO: 11654
  source 1..80: mol_type = other DNA

SEQ ID NO: 43298 - DNA, 80 bp, synthetic construct
  source 1..80: mol_type = other DNA
agctattgccttttttctcctgaagaccccacccctgcacacaccaaaactttacattctttgtggagcaattttctttt

SEQ ID NO: 43299 - DNA, 80 bp, synthetic construct
  source 1..80: mol_type = other DNA
gcatgatcacggcttactgcagcctcgaactcctcggccccagagatcctcccacctcagactcctgaatagctgtcact

SEQ ID NO: 43300 - DNA, 80 bp, synthetic construct
  source 1..80: mol_type = other DNA
cagctgagtatttggagctaaggcaggaagttgctgtggagtttgtacccagctaatttgaaaggtggtcctgaaaggta

SEQ ID NO: 43301 - DNA, 80 bp, synthetic construct; identical to SEQ ID NO: 11655
  source 1..80: mol_type = other DNA

SEQ ID NO: 43302 - DNA, 80 bp, synthetic construct
  source 1..80: mol_type = other DNA
tgccagtaaggaaattcttacacaaatggttggcagaatatgcaacttgctttgcggatgcacatgtagaccatctgctc

SEQ ID NO: 43303 - DNA, 80 bp, synthetic construct
  source 1..80: mol_type = other DNA
ctgaggagccaggtgcttcctggcaaggaagtgtgtcccatatatgactatccagaagtcacagctgctcaatattgagt

SEQ ID NO: 43304 - DNA, 80 bp, synthetic construct
  source 1..80: mol_type = other DNA
ttgagaatcaccaccctaaggcaatccatattgatttctaatatcagaagagggctgacaggcaaaggtataggataaac

SEQ ID NO: 43305 - DNA, 80 bp, synthetic construct; identical to SEQ ID NO: 11656
  source 1..80: mol_type = other DNA

SEQ ID NO: 43306 - DNA, 80 bp, synthetic construct
  source 1..80: mol_type = other DNA
tcaatcgtgtgttttccaggagaattaccaagtgttctcttttctaaatatcacatacttgagctcacatggacagtaga

SEQ ID NO: 43307 - DNA, 80 bp, synthetic construct
  source 1..80: mol_type = other DNA
atgaaagacagacacacacataaagaaagatagtgcaatgaaaaagaaaacaacatactgaattaaagtgacaggaaaca

SEQ ID NO: 43308 - DNA, 80 bp, synthetic construct
  source 1..80: mol_type = other DNA
tgacttggctcaaaactcaaaaagttaaaagtctctctcttatgctaccccatcttgacaggcagctatttatatcagtt

SEQ ID NO: 43309 - DNA, 80 bp, synthetic construct; identical to SEQ ID NO: 11657
  source 1..80: mol_type = other DNA

SEQ ID NO: 43310 - DNA, 80 bp, synthetic construct
  source 1..80: mol_type = other DNA
tagtgaccccactcctatatgcatattctagggaaactcacatatctctgagagcaggaggcaatgtcccaggatgttca

SEQ ID NO: 43311 - DNA, 80 bp, synthetic construct
  source 1..80: mol_type = other DNA
caagcaaatgaatgataaaattagccagaaacaatttataagaagtctaaaagcaaagccaggcaaggtggtgtacactt

SEQ ID NO: 43312 - DNA, 80 bp, synthetic construct
  source 1..80: mol_type = other DNA
ggtggagcatagctatacccccagctacttgggtggctgaggtaggtgtatcgcttgagcctgggaggttgaggtacagt

SEQ ID NO: 43313 - DNA, 80 bp, synthetic construct; identical to SEQ ID NO: 11658
  source 1..80: mol_type = other DNA

SEQ ID NO: 43314 - DNA, 80 bp, synthetic construct
  source 1..80: mol_type = other DNA
gagcaaaataagaaaagagttattgagtgtgaggaaagctgcacagaggtacagacagatggagagatgacaatactgag

SEQ ID NO: 43315 - DNA, 80 bp, synthetic construct
  source 1..80: mol_type = other DNA
ttgagtaggccagactgggaagcgtggatggattctaaacattccactttaggtctagcacttagagaaagagaaatcat

SEQ ID NO: 43316 - DNA, 80 bp, synthetic construct
  source 1..80: mol_type = other DNA
atataaatgttgtcaaggatgtgaaacagtctcatccactgcctataagaatataaaacagccactctgaaaatcacttt

SEQ ID NO: 43317 - DNA, 80 bp, synthetic construct; identical to SEQ ID NO: 11659
  source 1..80: mol_type = other DNA

SEQ ID NO: 43318 - DNA, 80 bp, synthetic construct
  source 1..80: mol_type = other DNA
atcagatcaatggctgctggggaaagggggctaatttgaaggcagaaaaatagagaacttcgtgtatcttcatagtggca

SEQ ID NO: 43319 - DNA, 80 bp, synthetic construct
  source 1..80: mol_type = other DNA
aacagatcaaaacaatacaccataatcacgtgagttttatacccaggatgcaaggattgtttgacatatgtgaatcaaaa

SEQ ID NO: 43320 - DNA, 80 bp, synthetic construct
  source 1..80: mol_type = other DNA
cagtctcttaaataaatggtgctgggaaaatgctaccagatgcagaagaatgtaactagacccctgtctctcaccatata

SEQ ID NO: 43321 - DNA, 80 bp, synthetic construct; identical to SEQ ID NO: 11660
  source 1..80: mol_type = other DNA

SEQ ID NO: 43322 - DNA, 80 bp, synthetic construct
  source 1..80: mol_type = other DNA
acaagtggccagcaggtgtgtgaaaaacacccaacatcactaaataccaggaaaatgaaaatcaaactacaatgagatat

SEQ ID NO: 43323 - DNA, 80 bp, synthetic construct
  source 1..80: mol_type = other DNA
ccattatgggaaacagtagagtgatctctcaaaaaaactgaaactattaatagaactactatctgatgcaacaattctac

SEQ ID NO: 43324 - DNA, 80 bp, synthetic construct
  source 1..80: mol_type = other DNA
acaatagcaaagatgtgaaatcaatggtgaatttatcaatgggtgaatgaataaagtaactgtagtatatacacaatgga

SEQ ID NO: 43325 - DNA, 80 bp, synthetic construct
  source 1..80: mol_type = other DNA
agagtagaatgaaaattaccagaggttgggaagaatgtaggggtgggaagatgtagagaggtagattaatgggtacaaat

SEQ ID NO: 43326 - DNA, 80 bp, synthetic construct; identical to SEQ ID NO: 11661
  source 1..80: mol_type = other DNA

SEQ ID NO: 43327 - DNA, 80 bp, synthetic construct
  source 1..80: mol_type = other DNA
ctcctgagagaatcttctccccagttagaaaggcagaaacagaattcctggagaaagtaagactctggagaactgcatag

SEQ ID NO: 43328 - DNA, 80 bp, synthetic construct
  source 1..80: mol_type = other DNA
ttttagaatatccactaccaaggatgatccacgctgttatgagacgaattgtgtccctccccaaccgaaattcatatgtt

SEQ ID NO: 43329 - DNA, 80 bp, synthetic construct
  source 1..80: mol_type = other DNA
tatggtagccctagcaaattaaaacagaaatattaccttttctactctgtcctatgtatgaacatgagactttttaagaa

SEQ ID NO: 43330 - DNA, 80 bp, synthetic construct; identical to SEQ ID NO: 11662
  source 1..80: mol_type = other DNA

SEQ ID NO: 43331 - DNA, 80 bp, synthetic construct
  source 1..80: mol_type = other DNA
ttcctccgcattgatcacttggtcctccctgcatttcagtaaggttgctagaatggaggcatttgtccatgattcacaga

SEQ ID NO: 43332 - DNA, 80 bp, synthetic construct
  source 1..80: mol_type = other DNA
aacctgagaaggagaatgcacctcaggtgactaacagtttttgctcttctgtacttgtctgagaatgaccccaaaagatt

SEQ ID NO: 43333 - DNA, 80 bp, synthetic construct
  source 1..80: mol_type = other DNA
ttttctgtatcttttcacacttcacttcttcattcctccctctggctgtcttccctctttggggtcttctagtcctaacc

SEQ ID NO: 43334 - DNA, 80 bp, synthetic construct; identical to SEQ ID NO: 11663
  source 1..80: mol_type = other DNA

SEQ ID NO: 43335 - DNA, 80 bp, synthetic construct
  source 1..80: mol_type = other DNA
gtgtgttcctgccttgctttgtcctttcatgccttattctcactgtgccatgtctccttctcagttgaacagatgcagta

SEQ ID NO: 43336 - DNA, 80 bp, synthetic construct
  source 1..80: mol_type = other DNA
ttctgcatcagcaccactcccgaaccatcattcctgatcgtcagaatttttaatgtaactaaacatgaaacacaagtgca

SEQ ID NO: 43337 - DNA, 80 bp, synthetic construct
  source 1..80: mol_type = other DNA
ggggtaagattattttagggcatggtccagggtaaattcctgtaaggcctggatgccctgctgtgaggtcaaagggggac

SEQ ID NO: 43338 - DNA, 80 bp, synthetic construct
  source 1..80: mol_type = other DNA
ctggtgggaagcttgagtgtctccacccaggctttcttggtgcctcctcatctattccttcaaattctagaccttgagca

SEQ ID NO: 43339 - DNA, 80 bp, synthetic construct; identical to SEQ ID NO: 11664
  source 1..80: mol_type = other DNA

SEQ ID NO: 43340 - DNA, 80 bp, synthetic construct
  source 1..80: mol_type = other DNA
ggaaagagaggaccggctgtccctctccgctaagaaataattaactgttagatgagggggaatttctgttcaagggctct

SEQ ID NO: 43341 - DNA, 80 bp, synthetic construct
  source 1..80: mol_type = other DNA
gtgctgatccccttcacgtcctccacccccacccttggtgtccgtcaacatgctggggtgacctcatcttcccactgtcc

SEQ ID NO: 43342 - DNA, 80 bp, synthetic construct
  source 1..80: mol_type = other DNA
tctgagttgcctagaagacaccaagagttcgctccctccaggccttggctttgcttcagcacctggtgctgcataggccc

SEQ ID NO: 43343 - DNA, 80 bp, synthetic construct; identical to SEQ ID NO: 11665
  source 1..80: mol_type = other DNA

SEQ ID NO: 43344 - DNA, 80 bp, synthetic construct
  source 1..80: mol_type = other DNA
cttaagtactgattcccgatttacaatccatgccacaaactttattgtcatatctaaagaagttgccacagcagccttta

SEQ ID NO: 43345 - DNA, 80 bp, synthetic construct
  source 1..80: mol_type = other DNA
tcccacatgggggagttttcccagggacttgtacccctgggttcagaggtgaggtggggtccttgctcctcactgtggtt

SEQ ID NO: 43346 - DNA, 80 bp, synthetic construct
  source 1..80: mol_type = other DNA
ctccttgactcttggtgacttcaacatacgcagatgtggtgggctgagtaatggtccccaaagatgtccaggcttaatcg

SEQ ID NO: 43347 - DNA, 80 bp, synthetic construct; identical to SEQ ID NO: 11666
  source 1..80: mol_type = other DNA

SEQ ID NO: 43348 - DNA, 80 bp, synthetic construct
  source 1..80: mol_type = other DNA
taagggtggctcttaacaaggaagtggaaatctctgttctatctgcaaggaagtgaattcagacaagaacttgaatgagc

SEQ ID NO: 43349 - DNA, 80 bp, synthetic construct
  source 1..80: mol_type = other DNA
caacagacacctatacagcagagaagatgcccttgctccctggactctcagatcctgtaactcctctcctccatgacctt

SEQ ID NO: 43350 - DNA, 80 bp, synthetic construct
  source 1..80: mol_type = other DNA
actatcattttatcatatgctgtgatgtaatatcaatgaaccactcatttcctatgtgcctgcattccaggcttggagtc

SEQ ID NO: 43351 - DNA, 80 bp, synthetic construct
  source 1..80: mol_type = other DNA
ttgaattctacagtaaataatttcaatccctcccttgcctctcccttgcattgtcatactcacctggcaaaactacacag

SEQ ID NO: 43352 - DNA, 80 bp, synthetic construct; identical to SEQ ID NO: 11667
  source 1..80: mol_type = other DNA

SEQ ID NO: 43353 - DNA, 80 bp, synthetic construct
  source 1..80: mol_type = other DNA
tcccagtcagagccagtccctcttctggtgccccaaacatcatcccttctcatctacttaaagttgtcagttcatcaact

SEQ ID NO: 43354 - DNA, 80 bp, synthetic construct
  source 1..80: mol_type = other DNA
atcccacacctgccccctgatcttttccagccaatgattgaggaaagcagggcagaaactaaggcaggaatatttctcct

SEQ ID NO: 43355 - DNA, 80 bp, synthetic construct
  source 1..80: mol_type = other DNA
ctctctcctgaatttctctcacaagtatttccctgaataaatccttgcacatttactaccgtattgggctctgctcctca

SEQ ID NO: 43356 - DNA, 80 bp, synthetic construct; identical to SEQ ID NO: 11668
  source 1..80: mol_type = other DNA

SEQ ID NO: 43357 - DNA, 80 bp, synthetic construct
  source 1..80: mol_type = other DNA
cctttatctcctgtagcgaaagggcagatagcgtggaatggcagctgaagacatcattacgagggccacagtgctccaga

SEQ ID NO: 43358 - DNA, 80 bp, synthetic construct
  source 1..80: mol_type = other DNA
acttcctacgctggaagatgctgcaaaagcctcacccccgtgattctgcgggaatcctactcagcagctttgcaggaatt

SEQ ID NO: 43359 - DNA, 80 bp, synthetic construct
  source 1..80: mol_type = other DNA
aagtggagctaaacccaccgctggggtgaatccatatagattggaaaaaaagatgcccaactctcaacaaggtagacatg

SEQ ID NO: 43360 - DNA, 80 bp, synthetic construct; identical to SEQ ID NO: 11669
  source 1..80: mol_type = other DNA

SEQ ID NO: 43361 - DNA, 80 bp, synthetic construct
  source 1..80: mol_type = other DNA
aggcagccaacaagggcgctgcttgatatctatgataggaatgaaagaattgaggagcaggagggtgaaggtgtttgacc

SEQ ID NO: 43362 - DNA, 80 bp, synthetic construct
  source 1..80: mol_type = other DNA
tatatgctggcacaattccctcaatcatttggcaaaggaacctatagacatttacttgggtggttgtacactggggaaag

SEQ ID NO: 43363 - DNA, 80 bp, synthetic construct
  source 1..80: mol_type = other DNA
ggacaaattatggcccacaatgggaccactgggccaacagacccaacgctggatatctttcaattccctgagtgcatgat

SEQ ID NO: 43364 - DNA, 80 bp, synthetic construct
  source 1..80: mol_type = other DNA
aatcaaaaaccatagtgtgtcccagggtgggtcttgtggaagacactgaaagtattatggggtcgcaccaacattagaga

SEQ ID NO: 43365 - DNA, 80 bp, synthetic construct; identical to SEQ ID NO: 11670
  source 1..80: mol_type = other DNA

SEQ ID NO: 43366 - DNA, 80 bp, synthetic construct
  source 1..80: mol_type = other DNA
ccccgtctctattaaaaatacaaaaattagccaggcatcatgtcaggtgcctgtaatcccagctactcggggggccaagg

SEQ ID NO: 43367 - DNA, 80 bp, synthetic construct
  source 1..80: mol_type = other DNA
tcaacgacacatttatttattgtttgcctcagggctattgtaacacctgtgccctctatagtataggcttaagactgtac

SEQ ID NO: 43368 - DNA, 80 bp, synthetic construct
  source 1..80: mol_type = other DNA
accccacaaggtgaagataaaccttatacagcttcaaaggtgggcactgaagtgaagttttatgggtgaacaagtgccaa

SEQ ID NO: 43369 - DNA, 80 bp, synthetic construct; identical to SEQ ID NO: 11671
  source 1..80: mol_type = other DNA

SEQ ID NO: 43370 - DNA, 80 bp, synthetic construct
  source 1..80: mol_type = other DNA
gatcatgtcatccacagcagagacacatgccccctgttagaagcaacttttagtgttccttgtcctgattcaatagaatg

SEQ ID NO: 43371 - DNA, 80 bp, synthetic construct
  source 1..80: mol_type = other DNA
tgaagtggcactgaactaccaaacagacaaatggcagttagccagctttcaccatgggtcagcccaggcctggtaggatg

SEQ ID NO: 43372 - DNA, 80 bp, synthetic construct
  source 1..80: mol_type = other DNA
tttacatgactacccactaagtaacaagttgactacatttagctacttccaacctggaagggccagagtttcatcttcac

SEQ ID NO: 43373 - DNA, 80 bp, synthetic construct; identical to SEQ ID NO: 11672
  source 1..80: mol_type = other DNA

SEQ ID NO: 43374 - DNA, 80 bp, synthetic construct
  source 1..80: mol_type = other DNA
caggtttggctccatgtccaatctcttagattcactcaatggggtatttcgcatattttatctcccaacactgggctgtg

SEQ ID NO: 43375 - DNA, 80 bp, synthetic construct
  source 1..80: mol_type = other DNA
taataaatagatcctcatccccaggagaaggcatggctgtttcacacaagggtagaagtgtgtgtggaaaccagagatcc

SEQ ID NO: 43376 - DNA, 80 bp, synthetic construct
  source 1..80: mol_type = other DNA
ctgacatcctcagtacattggtgctgaggccctcttcccatgggctgttcccaacgactgatgggtcataccagtgacac

SEQ ID NO: 43377 - DNA, 80 bp, synthetic construct; identical to SEQ ID NO: 11673
  source 1..80: mol_type = other DNA

SEQ ID NO: 43378 - DNA, 80 bp, synthetic construct
  source 1..80: mol_type = other DNA
accatgcactgcagtgtcgacctcctgggctcaagggatcctctgaccttagcctcctgagtagctgggactatagtcat

SEQ ID NO: 43379 - DNA, 80 bp, synthetic construct
  source 1..80: mol_type = other DNA
aattataagacattaaacatgtaacttagttttaaaaggaaaggagaagttccatggctgaagaggatgtattttattat

SEQ ID NO: 43380 - DNA, 80 bp, synthetic construct
  source 1..80: mol_type = other DNA
gtgctgctgtgaaggaatttagcagacataataaaggggctcaattagttgacttcaggctgggtttatgctgcttggac

SEQ ID NO: 43381 - DNA, 80 bp, synthetic construct; identical to SEQ ID NO: 11674
  source 1..80: mol_type = other DNA

SEQ ID NO: 43382 - DNA, 80 bp, synthetic construct
  source 1..80: mol_type = other DNA
cagatttgggaagcctggaacagagattccatctacatcatgcccagatttctgactaaggtactataaacagataaatg

SEQ ID NO: 43383 - DNA, 80 bp, synthetic construct
  source 1..80: mol_type = other DNA
cgtctctacacttttttttttaattagctgggtgtggtggcacttgtctgcagtcctgtctactctgaagactgaggcag

SEQ ID NO: 43384 - DNA, 80 bp, synthetic construct
  source 1..80: mol_type = other DNA
taaagccaatgtttgtgataattttttacacagtcttataaaattcatacacaggctcaacagactaatggaatgaactg

SEQ ID NO: 43385 - DNA, 80 bp, synthetic construct
  source 1..80: mol_type = other DNA
tcatatgctcacgtgcctgacattctagaagcttcacaagaccaaggtggagccactggagtgttttaggtggagaaatg

SEQ ID NO: 43386 - DNA, 80 bp, synthetic construct; identical to SEQ ID NO: 11675
  source 1..80: mol_type = other DNA

SEQ ID NO: 43387 - DNA, 80 bp, synthetic construct
  source 1..80: mol_type = other DNA
aagtgttcctaagaaatatacacaccacttagatgtggatacttcctaaaaacaggcagtgcatgagcactggtgatgga

SEQ ID NO: 43388 - DNA, 80 bp, synthetic construct
  source 1..80: mol_type = other DNA
aaactcagggctatggaataaaggtaaatttaaaacaccacaagcgggagtcacagataccttgtttgcaaaagtgaaac

SEQ ID NO: 43389 - DNA, 80 bp, synthetic construct
  source 1..80: mol_type = other DNA
ccactgtagttaatacacaaaaagcaaactggtctctatactatctcatgcacccaggcacaacttttccagatttaaag

SEQ ID NO: 43390 - DNA, 80 bp, synthetic construct
  source 1..80: mol_type = other DNA
caggaattcccggatgaaaagtgaaaggagagggacggggcccaagctgagggtttcttcctggtttctcggacagctcc

SEQ ID NO: 43391 - DNA, 80 bp, synthetic construct; identical to SEQ ID NO: 11676
  source 1..80: mol_type = other DNA

SEQ ID NO: 43392 - DNA, 80 bp, synthetic construct
  source 1..80: mol_type = other DNA
cgagacctgggcgggtgagtgcggggtcaggagggaaacggcctctgccgtgaggagcgaaaggtccacctggctggggc

SEQ ID NO: 43393 - DNA, 80 bp, synthetic construct
  source 1..80: mol_type = other DNA
tcgtgcgggtcgacagtgacgccgtgagtctgaggatgaagacgcgggcgcggtgggtggagcaggaggggccggagtat

SEQ ID NO: 43394 - DNA, 80 bp, synthetic construct
  source 1..80: mol_type = other DNA
tcccctgagtctccgggtccaagatcgaccccgaggctgcgggacctgcagagatcctcgacccgggagagccccaggcg

SEQ ID NO: 43395 - DNA, 80 bp, synthetic construct; identical to SEQ ID NO: 11677
  source 1..80: mol_type = other DNA

SEQ ID NO: 43396 - DNA, 80 bp, synthetic construct
  source 1..80: mol_type = other DNA
tgctcgatctcctgtagatctcccgggctggcctcgcacaaggaggggaagaaaatggaaccaccaccagaatatcgccc

SEQ ID NO: 43397 - DNA, 80 bp, synthetic construct
  source 1..80: mol_type = other DNA
ctttcaccccacagcaaccttgggcaccaggacttttcctcccgggccttgttctctgcctcacactcaatgtgtcggag

SEQ ID NO: 43398 - DNA, 80 bp, synthetic construct
  source 1..80: mol_type = other DNA
aggtgtcctattcatcaggatggtcacatgggcgctgctggggtgtcccatgaggaatgcaaagtgcctgagttttccga

SEQ ID NO: 43399 - DNA, 80 bp, synthetic construct; identical to SEQ ID NO: 11678
  source 1..80: mol_type = other DNA

SEQ ID NO: 43400 - DNA, 80 bp, synthetic construct
  source 1..80: mol_type = other DNA
ctttcccagagccctctccccagcccaccatccccattgtgggtatcattgctggcctggttctccttggagctgtggtc

SEQ ID NO: 43401 - DNA, 80 bp, synthetic construct
  source 1..80: mol_type = other DNA
cctacccagcctgggccctgtgtgccagcacttactcttttgtaagcacctgtgacaatgaaggacagatttctcacctt

SEQ ID NO: 43402 - DNA, 80 bp, synthetic construct
  source 1..80: mol_type = other DNA
tgatcctgcccttggtttgcagtcacacatttctggaaacttctcaaggttccaagactaggaggttcctctaggacctc

SEQ ID NO: 43403 - DNA, 80 bp, synthetic construct; identical to SEQ ID NO: 11679
  source 1..80: mol_type = other DNA

SEQ ID NO: 43404 - DNA, 80 bp, synthetic construct
  source 1..80: mol_type = other DNA
tcagcacatgatgggctgttgaaggtgtgacccctcactgtgagtgatatgaatttgttcatgaatattttttctatagt

SEQ ID NO: 43405 - DNA, 80 bp, synthetic construct
  source 1..80: mol_type = other DNA
gtccaccatgaccctgttccccacactgacctacattccttccccgatcacctttcctgttccagagaagtggtgctggg

SEQ ID NO: 43406 - DNA, 80 bp, synthetic construct
  source 1..80: mol_type = other DNA
aataaatggaagacatgagaaccttccagagtccacgtgtttcttgtgctgatttgttgcaggggaggagagtagatggg

SEQ ID NO: 43407 - DNA, 80 bp, synthetic construct; identical to SEQ ID NO: 11680
  source 1..80: mol_type = other DNA

SEQ ID NO: 43408 - DNA, 80 bp, synthetic construct
  source 1..80: mol_type = other DNA
gctggctccaatccaaactcatgcatttataaagcagagtctgatttagatttatatggggttggaaaattggacccaca

SEQ ID NO: 43409 - DNA, 80 bp, synthetic construct
  source 1..80: mol_type = other DNA
gcactgatgttggtgtgagatgatgttgttctttagctacgttaataaagatattgcctttagaatacagaggtgctcta

SEQ ID NO: 43410 - DNA, 80 bp, synthetic construct
  source 1..80: mol_type = other DNA
ggcccgggacagctttgaatgtaagaagtttttttgcttatctgtggtagcaaatatcatgaaaattatgcacgcacatg

SEQ ID NO: 43411 - DNA, 80 bp, synthetic construct
  source 1..80: mol_type = other DNA
aggcagatgatagatatagtataagcagagtaggaacagaaaatgcttgagttagaaggtggcaagtgctgtgtggcagg

SEQ ID NO: 43412 - DNA, 80 bp, synthetic construct; identical to SEQ ID NO: 11681
  source 1..80: mol_type = other DNA

SEQ ID NO: 43413 - DNA, 80 bp, synthetic construct
  source 1..80: mol_type = other DNA
tcctttgaaagcttctttctggctgctgtgctgagaacagaattgagaggtggggaaccagtgatgcagtggggaaaatg

SEQ ID NO: 43414 - DNA, 80 bp, synthetic construct
  source 1..80: mol_type = other DNA
gtattggactgagtgagcagaagggtggagctgctgtcagtggagatagggagactctggcaggagtacacagaggagag

SEQ ID NO: 43415 - DNA, 80 bp, synthetic construct
  source 1..80: mol_type = other DNA
ggtaggtgaaagtcagggaagttgtggtctgctattggttataataagtcacagatcattatgctttctcagataattaa

SEQ ID NO: 43416 - DNA, 80 bp, synthetic construct; identical to SEQ ID NO: 11682
  source 1..80: mol_type = other DNA

SEQ ID NO: 43417 - DNA, 80 bp, synthetic construct
  source 1..80: mol_type = other DNA
catttagaaaaattacaggatatgagtctcctgagacatagagtacacgtagacagctcacaaggtctttttcccttttt

SEQ ID NO: 43418 - DNA, 80 bp, synthetic construct
  source 1..80: mol_type = other DNA
tcatttgctgtggtgtgaacaaggaaacaataccatgccatgtatttgacttgcagcaggcacacaacaaatgtcaggtg

SEQ ID NO: 43419 - DNA, 80 bp, synthetic construct
  source 1..80: mol_type = other DNA
tcgagaacacattccctgtgctaaaggaatcagagctctactaagggtcatagcagatatcatgcaagtcacatatgtta

SEQ ID NO: 43420 - DNA, 80 bp, synthetic construct
  source 1..80: mol_type = other DNA
aagaaacaacatttttttaaagtggccttatgtggaccaaagcagagatgaactcaagtgtcaggtgggaaaatgcctaa

SEQ ID NO: 43421 - DNA, 80 bp, synthetic construct; identical to SEQ ID NO: 11683
  source 1..80: mol_type = other DNA

SEQ ID NO: 43422 - DNA, 80 bp, synthetic construct
  source 1..80: mol_type = other DNA
gtcagggacccagtagccgaccacaaacaatcccagctgcacggtgccttcatggtctgtggcgccccctggtgttgaca

SEQ ID NO: 43423 - DNA, 80 bp, synthetic construct
  source 1..80: mol_type = other DNA
ccttaattatctctccaaccctgtttttccctgtcccggctagttccctcccttgactccatcaacatcggcacctgcca

SEQ ID NO: 43424 - DNA, 80 bp, synthetic construct
  source 1..80: mol_type = other DNA
tgcgtgaagaagtgatgttacacgcacacatgacttcactacaggacattggatattaatattcatcagatcagctagag

SEQ ID NO: 43425 - DNA, 80 bp, synthetic construct
  source 1..80: mol_type = other DNA
cagagtgtttacggatttcacattccatcaaagaaaatccattttgacaaaatatccaagtcacttttctaagccccagg

SEQ ID NO: 43426 - DNA, 80 bp, synthetic construct; identical to SEQ ID NO: 11684
  source 1..80: mol_type = other DNA

SEQ ID NO: 43427 - DNA, 80 bp, synthetic construct
  source 1..80: mol_type = other DNA
agcagaaaaccagggactggttatgtgagctatcaccccactctgtggctctcttaagcaataagcataagagattgtgg

SEQ ID NO: 43428 - DNA, 80 bp, synthetic construct
  source 1..80: mol_type = other DNA
agtctgtcagtgaaagccttctcaaaacaactgtgaagtaaagacaggtaaataaatgcatggtgctcccatgtattaat

SEQ ID NO: 43429 - DNA, 80 bp, synthetic construct
  source 1..80: mol_type = other DNA
gaactaatcttaagaattgaacctgtaaaaccctcaagaaaatactgaggaaaatcttatggacattagaattggtagtg

SEQ ID NO: 43430 - DNA, 80 bp, synthetic construct; identical to SEQ ID NO: 11685
  source 1..80: mol_type = other DNA

SEQ ID NO: 43431 - DNA, 80 bp, synthetic construct
  source 1..80: mol_type = other DNA
aaccccgtctgtaccaaaaaaatacaaatattagttgggcatggtggcaggtacctgtagtcccagctactcaggaggct

SEQ ID NO: 43432 - DNA, 80 bp, synthetic construct
  source 1..80: mol_type = other DNA
caagtgttggtgaagatatggagaaactggaacacttgtacactgctggtgagagtatacagtggtgcagccaccatgga

SEQ ID NO: 43433 - DNA, 80 bp, synthetic construct
  source 1..80: mol_type = other DNA
agcaaccgagtgtccatcagaggatgactggataaacaacccacggtgcacataagcatggaatattattcagccttaaa

SEQ ID NO: 43434 - DNA, 80 bp, synthetic construct; identical to SEQ ID NO: 11686
  source 1..80: mol_type = other DNA

SEQ ID NO: 43435 - DNA, 80 bp, synthetic construct
  source 1..80: mol_type = other DNA
tcaacaagcacattgccgctgtggaggggaggggtccttggagttcttatgccaccatgttctttggtgtcacttctcag

SEQ ID NO: 43436 - DNA, 80 bp, synthetic construct
  source 1..80: mol_type = other DNA
ggttgcattcttttgagtttccgattagcctttccaaatgagggaatcagacatgtgtttatctcagtgagcagaggggc

SEQ ID NO: 43437 - DNA, 80 bp, synthetic construct
  source 1..80: mol_type = other DNA
ccaaactaccaatttacagaaaatacaggtaatagaaatacattaaaccacaccttggcgtgcaatccacaaaatgcaaa

SEQ ID NO: 43438 - DNA, 80 bp, synthetic construct; identical to SEQ ID NO: 11687
  source 1..80: mol_type = other DNA

SEQ ID NO: 43439 - DNA, 80 bp, synthetic construct
  source 1..80: mol_type = other DNA
tgtatcagctattgcccaagtttccactttacaaaagtgccatgcatacatgcaacaacatagtgccttctccatgcatc

SEQ ID NO: 43440 - DNA, 80 bp, synthetic construct
  source 1..80: mol_type = other DNA
ctgataatgcttggtacttagatgcattgagccaaggtaaccctgtgtatggacagtagtagctgcacaaccacagacag

SEQ ID NO: 43441 - DNA, 80 bp, synthetic construct
  source 1..80: mol_type = other DNA
taagggtcttacaatttggcttgcccaaagggcctgagatgattggtatataatttaaaaatccttatggggagctgata

SEQ ID NO: 43442 - DNA, 80 bp, synthetic construct
  source 1..80: mol_type = other DNA
tgagctagttgattaggtacatatcacagtggggatttcagtgcatgaatgggctgccaaatagcaaagggagcaggatt

SEQ ID NO: 43443 - DNA, 80 bp, synthetic construct; identical to SEQ ID NO: 11688
  source 1..80: mol_type = other DNA

SEQ ID NO: 43444 - DNA, 80 bp, synthetic construct
  source 1..80: mol_type = other DNA
acatagactgggtatttcacttactgtatactcccccaagcaacagggttgattgaaaggaaaaatggtattttgaaggc

SEQ ID NO: 43445 - DNA, 80 bp, synthetic construct
  source 1..80: mol_type = other DNA
caggaccaccacagagatggatccattaaccataatagtaaagaaagtccaaccagatgcatctctgacctgagcagata

SEQ ID NO: 43446 - DNA, 80 bp, synthetic construct
  source 1..80: mol_type = other DNA
gcaaggaattccctaccaactaaagtggtctccattgatcctgctgaagtctgggccaaaacactccacataccaataaa

SEQ ID NO: 43447 - DNA, 80 bp, synthetic construct
  source 1..80: mol_type = other DNA
tggagctaccagtaattctgtttaatggggaagaactgccccaccaaatacctactaaacatttttaattccacccatag

SEQ ID NO: 43448 - DNA, 80 bp, synthetic construct; identical to SEQ ID NO: 11689
  source 1..80: mol_type = other DNA

SEQ ID NO: 43449 - DNA, 80 bp, synthetic construct
  source 1..80: mol_type = other DNA
ctgattcccactttatttaccatccctattgtaagaacatgtcaaccttgatgttatacaaattctaggctatgacacat

SEQ ID NO: 43450 - DNA, 80 bp, synthetic construct
  source 1..80: mol_type = other DNA
aataaaacactctttactgacaactagatttgtctgtcttgttccttggtttattggctcctttggcatttggggggcac

SEQ ID NO: 43451 - DNA, 80 bp, synthetic construct
  source 1..80: mol_type = other DNA
ctgaagtaacgctatggaagagcaggccagtaacagctgaagagcttcagaaactcccacttctaacaaggtcacttcct

SEQ ID NO: 43452 - DNA, 80 bp, synthetic construct; identical to SEQ ID NO: 11690
  source 1..80: mol_type = other DNA

SEQ ID NO: 43453 - DNA, 80 bp, synthetic construct
  source 1..80: mol_type = other DNA
agcatttccagtctaagccctggaatgtgcgtggcatcaaactgttttgcatttgtgagcaggaatacaactgctggaca

SEQ ID NO: 43454 - DNA, 80 bp, synthetic construct
  source 1..80: mol_type = other DNA
actttcgccggagtcaggaaagcatgaataacacaaaatcttcagcttttcctcccttctctctcctgagctttctgcac

SEQ ID NO: 43455 - DNA, 80 bp, synthetic construct
  source 1..80: mol_type = other DNA
gcctggggcgtagtaaattctttagcttgtctagattcaccatgccaagtggggaggttgcttgggtcagactatattaa

SEQ ID NO: 43456 - DNA, 80 bp, synthetic construct; identical to SEQ ID NO: 11691
  source 1..80: mol_type = other DNA

SEQ ID NO: 43457 - DNA, 80 bp, synthetic construct
  source 1..80: mol_type = other DNA
gaggtttacagctgattaaacaacttaataatgcctgcaagaacaaacgcctatgacagacaacagaatgtccacatgtc

SEQ ID NO: 43458 - DNA, 80 bp, synthetic construct
  source 1..80: mol_type = other DNA
attaaacccctacattagaagagtttacaacaaagatggtgcattcttccttttgctttctgaggacacctactctgtat

SEQ ID NO: 43459 - DNA, 80 bp, synthetic construct
  source 1..80: mol_type = other DNA
aataggtagggtgggtggtatggtatagaagaacagagaataatgagacataagaagcaattgcaatgtgtggaccttct

SEQ ID NO: 43460 - DNA, 80 bp, synthetic construct; identical to SEQ ID NO: 11692
  source 1..80: mol_type = other DNA

SEQ ID NO: 43461 - DNA, 80 bp, synthetic construct
  source 1..80: mol_type = other DNA
tgaattcttgatatcatgtaatgaaaatggtacctcacttgtggctttcctccccccgaatccataacctctacttatta

SEQ ID NO: 43462 - DNA, 80 bp, synthetic construct
  source 1..80: mol_type = other DNA
ccatgtaatagggtatcttgaatgggaccttggagtagaaaaatattattaggtaaaactcaaggacacctgagtaatgt

SEQ ID NO: 43463 - DNA, 80 bp, synthetic construct
  source 1..80: mol_type = other DNA
tgttctagaactgaagtctattttttaaaattctcctggaaaaaagtggaaacatatgaaatatgatggacaaatgttag

SEQ ID NO: 43464 - DNA, 80 bp, synthetic construct; identical to SEQ ID NO: 11693
  source 1..80: mol_type = other DNA

SEQ ID NO: 43465 - DNA, 80 bp, synthetic construct
  source 1..80: mol_type = other DNA
aaaaaagtttgaacaagaaataaagaaatatggagataaggataagaagaagctatttaaagcactagagtagctgcttt

SEQ ID NO: 43466 - DNA, 80 bp, synthetic construct
  source 1..80: mol_type = other DNA
actttttcatcttcccaaactaaatgctaggtctattaagcaacatctcctcactctctcctcctccccagcccctgata

SEQ ID NO: 43467 - DNA, 80 bp, synthetic construct
  source 1..80: mol_type = other DNA
aaaaatattccactgtatggatctaccatactttgttcatccatcgatggatgtatactctgttgcttctaccttttggc

SEQ ID NO: 43468 - DNA, 80 bp, synthetic construct; identical to SEQ ID NO: 11694
  source 1..80: mol_type = other DNA

SEQ ID NO: 43469 - DNA, 80 bp, synthetic construct
  source 1..80: mol_type = other DNA
atagaacagtgtgatcacaggtgcaacacagagaagactccaggggcaagcacagaaaatagccatcaagggagattctt

SEQ ID NO: 43470 - DNA, 80 bp, synthetic construct
  source 1..80: mol_type = other DNA
gatcatattgtacaactggccccatctcagcactaacactgtgaaatcttacctttcttatgtcttcaaattgtggccct

SEQ ID NO: 43471 - DNA, 80 bp, synthetic construct
  source 1..80: mol_type = other DNA
tcttgaagaccatattcaggagggaccctaggaactctgtatctcagcatgtgaggcttcaggccaaggggtgctaattt

SEQ ID NO: 43472 - DNA, 80 bp, synthetic construct; identical to SEQ ID NO: 11695
  source 1..80: mol_type = other DNA

SEQ ID NO: 43473 - DNA, 80 bp, synthetic construct
  source 1..80: mol_type = other DNA
aactttccaagtgtcaggtcctggtactttacatttattctacctcctaatccttatactaggtcaaagctcattttatg

SEQ ID NO: 43474 - DNA, 80 bp, synthetic construct
  source 1..80: mol_type = other DNA
cctttttagtcacaagttaataattttaaagaaaagattcaacatgtaaatttatctggaaaggccaggggtgaggctgc

SEQ ID NO: 43475 - DNA, 80 bp, synthetic construct
  source 1..80: mol_type = other DNA
ataaagaaccagagaagatgacctttggaccaatacctgttgttatggagatgtggtacagtgtgggaaactctgattgg

SEQ ID NO: 43476 - DNA, 80 bp, synthetic construct; identical to SEQ ID NO: 11696
  source 1..80: mol_type = other DNA

SEQ ID NO: 43477 - DNA, 80 bp, synthetic construct
  source 1..80: mol_type = other DNA
ggcatcctttatgattaaagctctcagcaaaatcggcatacaaggaacatacctcaatgtaatcaaagccatctatgaga

SEQ ID NO: 43478 - DNA, 80 bp, synthetic construct
  source 1..80: mol_type = other DNA
aatcggtaaagaggaagccaaactgtcactgtttgctgatatgattgtatacctaggaaactctaaagactcctccaaaa

SEQ ID NO: 43479 - DNA, 80 bp, synthetic construct
  source 1..80: mol_type = other DNA
aaacttagaaatatacctagcctaaggaggtgaaagacctctacaaggaaaactacaaaactctgctgaaagaaatcaca

SEQ ID NO: 43480 - DNA, 80 bp, synthetic construct; identical to SEQ ID NO: 11697
  source 1..80: mol_type = other DNA

SEQ ID NO: 43481 - DNA, 80 bp, synthetic construct
  source 1..80: mol_type = other DNA
aaaggacaccttattgaacaaatggtgctgggataattggctagccacatgtaggagaatgaaactggatcctcaactct

SEQ ID NO: 43482 - DNA, 80 bp, synthetic construct
  source 1..80: mol_type = other DNA
gataaatagctgggacccaatgaaactaaagagtgtttgcacggcaaaagaacagtcagcagagtaaacagacaacccac

SEQ ID NO: 43483 - DNA, 80 bp, synthetic construct
  source 1..80: mol_type = other DNA
ggccaacaaacatatgaaaaaatgctcaacatcactaatgatcagggaaacgtaaatcaaaacgccaatgtgataccacc

SEQ ID NO: 43484 - DNA, 80 bp, synthetic construct
  source 1..80: mol_type = other DNA
gctcactgcaagctccgcctcccaggttcacaccattctcctgcctcagcctcccgagtagctgggactacaggcgtcac

SEQ ID NO: 43485 - DNA, 80 bp, synthetic construct; identical to SEQ ID NO: 11698
  source 1..80: mol_type = other DNA

SEQ ID NO: 43486 - DNA, 80 bp, synthetic construct
  source 1..80: mol_type = other DNA
attcacagcaacctggatgcgattgaagattattattccaagtgaagtaactcaggaatggaaaaccaaacatcgtatgt

SEQ ID NO: 43487 - DNA, 80 bp, synthetic construct
  source 1..80: mol_type = other DNA
tgcagtgtgtactgcgtgggtgatgggtgcacatttgctccttttaaaatgatactattattattttgctgttgtttgag

SEQ ID NO: 43488 - DNA, 80 bp, synthetic construct
  source 1..80: mol_type = other DNA
tgtgctttcaaggtcttaatcacaaaatctttcctgcgtccaacactctaaagtgttttctgcatgttttctcccagtag

SEQ ID NO: 43489 - DNA, 80 bp, synthetic construct; identical to SEQ ID NO: 11699
  source 1..80: mol_type = other DNA

SEQ ID NO: 43490 - DNA, 80 bp, synthetic construct
  source 1..80: mol_type = other DNA
tgagccgagatcgcaccactgcactccagcctgggtgacagagcgagactccgtctcaaattaaaaaaaaagaaaaaaga

SEQ ID NO: 43491 - DNA, 80 bp, synthetic construct
  source 1..80: mol_type = other DNA
caagattgttttagctattcagggtcttttgtggttccatacaaattttaagatttctttttctatttctataaagaatg

SEQ ID NO: 43492 - DNA, 80 bp, synthetic construct
  source 1..80: mol_type = other DNA
catacttggttaaatttattcccatgcttttttatagttactgtgaatgagatttctttcttgatttttcatcattttga

SEQ ID NO: 43493 - DNA, 80 bp, synthetic construct; identical to SEQ ID NO: 11700
  source 1..80: mol_type = other DNA

SEQ ID NO: 43494 - DNA, 80 bp, synthetic construct
  source 1..80: mol_type = other DNA
tttgttgttgtcattgctgtaatcttttaaaattttctatccatttccataggaatcagtctagtactatgttaaatttg

SEQ ID NO: 43495 - DNA, 80 bp, synthetic construct
  source 1..80: mol_type = other DNA
aagtgatgttgaattttaccaaatgctttttctgcatctagagatgatcattttatttttgtccttcattctgttgatat

SEQ ID NO: 43496 - DNA, 80 bp, synthetic construct
  source 1..80: mol_type = other DNA
tgttgttgtatccttccctggttttgataacaaggtaatgcttgcttcctagaataaatttgaaagaactccttccccct

SEQ ID NO: 43497 - DNA, 80 bp, synthetic construct; identical to SEQ ID NO: 11701
  source 1..80: mol_type = other DNA

SEQ ID NO: 43498 - DNA, 80 bp, synthetic construct
  source 1..80: mol_type = other DNA
ttagtaacaaatcaatcttttgtttaccagtcttgtttgcttaattagcaaatgtggggagggaagaattttagctgttt

SEQ ID NO: 43499 - DNA, 80 bp, synthetic construct
  source 1..80: mol_type = other DNA
ttactaatttttcaattaagtgtttcattattgtacacagttgttagggaaacctaaatttatatttataaaaggtgtca

SEQ ID NO: 43500 - DNA, 80 bp, synthetic construct
  source 1..80: mol_type = other DNA
gtcccagctactcaggaagctgaggcaggagaatggtgtgaacccgggaggcggcgcttgcagtgagcccagatcaggcc

SEQ ID NO: 43501 - DNA, 80 bp, synthetic construct; identical to SEQ ID NO: 11702
  source 1..80: mol_type = other DNA

SEQ ID NO: 43502 - DNA, 80 bp, synthetic construct
  source 1..80: mol_type = other DNA
aacaaattccatacagaagctcttacagcactactttcagatgaaagcaagtctggattcatcgtaatagatggtagtgg

SEQ ID NO: 43503 - DNA, 80 bp, synthetic construct
  source 1..80: mol_type = other DNA
gtgcagctgtttatttctggggacaaagggaaggtggctggtctagttttagctggatccgctgactttaaaactgaact

SEQ ID NO: 43504 - DNA, 80 bp, synthetic construct
  source 1..80: mol_type = other DNA
cacgaggtcaggagatcgagaccatcctggctaacacggtgaaaccctgtgtctactaaaaatacaaaaacaaaattagc

SEQ ID NO: 43505 - DNA, 80 bp, synthetic construct; identical to SEQ ID NO: 11703
  source 1..80: mol_type = other DNA

SEQ ID NO: 43506 - DNA, 80 bp, synthetic construct
  source 1..80: mol_type = other DNA
tgccaaggcacaaaagaggagaaaattctctaactccagagcaagaacaggataaatctcatttcacagacaaagagacc

SEQ ID NO: 43507 - DNA, 80 bp, synthetic construct
  source 1..80: mol_type = other DNA
aagtggatttccaaagaatggaataccaaggaggagacgatgaatttttttaccttgatgactactaggtagtcgacatg

SEQ ID NO: 43508 - DNA, 80 bp, synthetic construct
  source 1..80: mol_type = other DNA
tacactttggtttgtcacggtgtcagcgtagcagcctacaactaagttcctaaatgccactttggactaatttaaaaaag

SEQ ID NO: 43509 - DNA, 80 bp, synthetic construct; identical to SEQ ID NO: 11704
  source 1..80: mol_type = other DNA

SEQ ID NO: 43510 - DNA, 80 bp, synthetic construct
  source 1..80: mol_type = other DNA
actcatgaagcatttgggccagtgcactgtttacttccatctgtttgcagacacatttgtgcccggtgtttgggagctct

SEQ ID NO: 43511 - DNA, 80 bp, synthetic construct
  source 1..80: mol_type = other DNA
ttgcctgattccatgtctccctccaattaccgccccatttctctgacactccttatagaataattccttagtcaattgtc

SEQ ID NO: 43512 - DNA, 80 bp, synthetic construct
  source 1..80: mol_type = other DNA
gttacatctgtgcctccaaatagtgtgttatagtgccgttttgtttttcactcttatgtatcatccttagtgtatagctc

SEQ ID NO: 43513 - DNA, 80 bp, synthetic construct; identical to SEQ ID NO: 11705
  source 1..80: mol_type = other DNA

SEQ ID NO: 43514 - DNA, 80 bp, synthetic construct
  source 1..80: mol_type = other DNA
agtcatgagcgcagagccctcatgaacaaattaatatcattattatggcagtgagcccataataataatattgtcctctc

SEQ ID NO: 43515 - DNA, 80 bp, synthetic construct
  source 1..80: mol_type = other DNA
aactaagacagtctccatgaatatattcaaccatgccccgtgttctaccaacctcatctttgtgaagacacttcccttgg

SEQ ID NO: 43516 - DNA, 80 bp, synthetic construct
  source 1..80: mol_type = other DNA
atttcatctgtgttcctaagggaacatggaaagtaaaatctgaaagcctaagcttctgaaaatgtcttcgggctacccta

SEQ ID NO: 43517 - DNA, 80 bp, synthetic construct; identical to SEQ ID NO: 11706
  source 1..80: mol_type = other DNA

SEQ ID NO: 43518 - DNA, 80 bp, synthetic construct
  source 1..80: mol_type = other DNA
gcaggaaatccttgactgatagcctagtattcgtatagtttttctgtctttcttgacattgtttttccatttttaatatt

SEQ ID NO: 43519 - DNA, 80 bp, synthetic construct
  source 1..80: mol_type = other DNA
ggtattattgagaatagtggtagtggacctgttagatctcctggttatctgctttcatggtaccatgaacttttcttcac

SEQ ID NO: 43520 - DNA, 80 bp, synthetic construct
  source 1..80: mol_type = other DNA
aatacatgctgaatgaggaaatataagtgtggttaggcagggaaatcagacttccttgatcaattgccccttgatgttct

SEQ ID NO: 43521 - DNA, 80 bp, synthetic construct; identical to SEQ ID NO: 11707
  source 1..80: mol_type = other DNA

SEQ ID NO: 43522 - DNA, 80 bp, synthetic construct
  source 1..80: mol_type = other DNA
tcattttgcttttataaaccaaaattcaagaaacatccttgaacatatattttttagaatgtgtgcagttatcttcttag

SEQ ID NO: 43523 - DNA, 80 bp, synthetic construct
  source 1..80: mol_type = other DNA
gctggagtgcggtggcacgatctcggctcactgtaagctccgcctcctgggttcacaccattctcctgcctcagcctccc

SEQ ID NO: 43524 - DNA, 80 bp, synthetic construct
  source 1..80: mol_type = other DNA
gccttcatgacagtgtattttccctacctctggataatatgcttatcatttactttcacatatgccaaactgacagattt

SEQ ID NO: 43525 - DNA, 80 bp, synthetic construct; identical to SEQ ID NO: 11708
  source 1..80: mol_type = other DNA

SEQ ID NO: 43526 - DNA, 80 bp, synthetic construct
  source 1..80: mol_type = other DNA
ctgctggctaatatgagtgacggctgtttctttaccagccacaactttatccttgctctgctctgcatttattatgggta

SEQ ID NO: 43527 - DNA, 80 bp, synthetic construct
  source 1..80: mol_type = other DNA
ctcttgtgacaatgagtaataaaccccagttgttcagctatagatgttcctggtggtctttggctgaaagacattgaaat

SEQ ID NO: 43528 - DNA, 80 bp, synthetic construct
  source 1..80: mol_type = other DNA
caattgtaaaacttaacatctattttcatctaggtacagatgatatgaagagagggaagtcccagagtgaagagaaacac

SEQ ID NO: 43529 - DNA, 80 bp, synthetic construct; identical to SEQ ID NO: 11709
  source 1..80: mol_type = other DNA

SEQ ID NO: 43530 - DNA, 80 bp, synthetic construct
  source 1..80: mol_type = other DNA
aatatgtctacaaagcctataagatattttatatggcaacttcaataaatactttctcttgggctaagtaatgacttata

SEQ ID NO: 43531 - DNA, 80 bp, synthetic construct
  source 1..80: mol_type = other DNA
atacatattgaactttcttgggcctgctgtattttagggatatgtctaagacccacatagccaaatccatgggttctatg

SEQ ID NO: 43532 - DNA, 80 bp, synthetic construct
  source 1..80: mol_type = other DNA
actctttatcacactagccacattccaagtgctcaataaccacatgtaactagtggctcccatattggacagtgcagata

SEQ ID NO: 43533 - DNA, 80 bp, synthetic construct; identical to SEQ ID NO: 11710
  source 1..80: mol_type = other DNA

SEQ ID NO: 43534 - DNA, 80 bp, synthetic construct
  source 1..80: mol_type = other DNA
ggtatttttgttatagcagcctgatggattaagataactgctcttggtgctatgtgggcctcaagtcaagtgcattagac

SEQ ID NO: 43535 - DNA, 80 bp, synthetic construct
  source 1..80: mol_type = other DNA
ctacaaaatatataatttttaaaattagctggacatgctggcaagtgcctgtagttccaacagcttaagagtctgaggtg

SEQ ID NO: 43536 - DNA, 80 bp, synthetic construct
  source 1..80: mol_type = other DNA
aggagtgaaatctctattttgtgcttttaggcgcaaaccattcccagctccaaaatggaaacacatttgccacctctgtt

SEQ ID NO: 43537 - DNA, 80 bp, synthetic construct; identical to SEQ ID NO: 11711
  source 1..80: mol_type = other DNA

SEQ ID NO: 43538 - DNA, 80 bp, synthetic construct
  source 1..80: mol_type = other DNA
aagacattatttgtactaaagtaaaacttgacaagaagggaggctatggtaccaaactgaaatagtagttattatattct

SEQ ID NO: 43539 - DNA, 80 bp, synthetic construct
  source 1..80: mol_type = other DNA
taaatgagtaagtgggaagtacgcataaggtatttctactacattccaaattaggatgtttgaggccaggcgcagtggct

SEQ ID NO: 43540 - DNA, 80 bp, synthetic construct
  source 1..80: mol_type = other DNA
agggaaactgagtcacaacaatcacttgaacccgggaggtggaggtttcagtgagccaaaatcatgccactgcactccag

SEQ ID NO: 43541 - DNA, 80 bp, synthetic construct
  source 1..80: mol_type = other DNA
gaatatttggctgacactttctcaaaaacgaacataaccctgtcccttccacataatcaactgatggtattattcccaat

SEQ ID NO: 43542 - DNA, 80 bp, synthetic construct; identical to SEQ ID NO: 11712
  source 1..80: mol_type = other DNA

SEQ ID NO: 43543 - DNA, 80 bp, synthetic construct
  source 1..80: mol_type = other DNA
ggcctagcgaggtgacttatacctgtaatcccagcattttgggaggccaaggcaggagaatcatttgagcctaggagttc

SEQ ID NO: 43544 - DNA, 80 bp, synthetic construct
  source 1..80: mol_type = other DNA
acactcaagcctgggtgatagcatgagaccaaaagaaacaaacaaacaaacaaaaccccccaacaaaacccaaaacaaga

SEQ ID NO: 43545 - DNA, 80 bp, synthetic construct
  source 1..80: mol_type = other DNA
tgagacacataagaaaaggatttacaaacatacaaaatgtaaaaagatgcactcttctcactatactgtttactttggga

SEQ ID NO: 43546 - DNA, 80 bp, synthetic construct; identical to SEQ ID NO: 11713
  source 1..80: mol_type = other DNA

SEQ ID NO: 43547 - DNA, 80 bp, synthetic construct
  source 1..80: mol_type = other DNA
gttcattgttttgttttgacagaagactatgcctgttcttcttcttgtatctgagttctggtctccaagtctccaatctc

SEQ ID NO: 43548 - DNA, 80 bp, synthetic construct
  source 1..80: mol_type = other DNA
ttccccaatctttttcaggaaatcaaattctggaattagagatcatatctcggtttctcaccttagataaactcctgtta

SEQ ID NO: 43549 - DNA, 80 bp, synthetic construct
  source 1..80: mol_type = other DNA
ttttttctgaaaagggaactataattgtctgctgtggtatatgaggattggtgtgggagggaggcgagaacagcatttgt

SEQ ID NO: 43550 - DNA, 80 bp, synthetic construct; identical to SEQ ID NO: 11714
  source 1..80: mol_type = other DNA

SEQ ID NO: 43551 - DNA, 80 bp, synthetic construct
  source 1..80: mol_type = other DNA
gctgttttactagggtggtctatggtctcactgggaatgtgaccttaagagaaaagatgaattatctatgaggacgtctg

SEQ ID NO: 43552 - DNA, 80 bp, synthetic construct
  source 1..80: mol_type = other DNA
gggttctgactttgctctgagtgagatgggggagacacaaacagctgtcagcagagtagagacttggcacatcttttaaa

SEQ ID NO: 43553 - DNA, 80 bp, synthetic construct
  source 1..80: mol_type = other DNA
cagacacattctcaatatggacttcacagtacttcctaatagattaagtctggggtatgaaaaagaggagtcaaagagga

SEQ ID NO: 43554 - DNA, 80 bp, synthetic construct; identical to SEQ ID NO: 11715
  source 1..80: mol_type = other DNA

SEQ ID NO: 43555 - DNA, 80 bp, synthetic construct
  source 1..80: mol_type = other DNA
tgacagcagactgcacagttctaacaccacatctagaaagtaagtaaatctgagaatctcaaattttagtgtgcgtagga

SEQ ID NO: 43556 - DNA, 80 bp, synthetic construct
  source 1..80: mol_type = other DNA
gtggcttgttattcctgggatccatgttccacttctgagatggtgggtatggggaaaggcctgagtatttttgtaaaaaa

SEQ ID NO: 43557 - DNA, 80 bp, synthetic construct
  source 1..80: mol_type = other DNA
cattaggctggtgtttattttattttgggaaggtctgtgagaataggcttaaagctacatagctagaagcagcatctata

SEQ ID NO: 43558 - DNA, 80 bp, synthetic construct; identical to SEQ ID NO: 11716
  source 1..80: mol_type = other DNA

SEQ ID NO: 43559 - DNA, 80 bp, synthetic construct
  source 1..80: mol_type = other DNA
tttaagtatgaaatcatactctttaagtatgaaattctccctaacatggagagggttcaggtgctgggacacaggaagat

SEQ ID NO: 43560 - DNA, 80 bp, synthetic construct
  source 1..80: mol_type = other DNA
caactttttcctgatcagtttatactcagataagtagagtggcactgtgggatggtgaaatgattgctcaaaacttatct

SEQ ID NO: 43561 - DNA, 80 bp, synthetic construct
  source 1..80: mol_type = other DNA
tgtgacatttatgtttttgtaaccctattttaggaaaccctctctcaaaccacattttccctctgctctcataccacaac

SEQ ID NO: 43562 - DNA, 80 bp, synthetic construct
  source 1..80: mol_type = other DNA
catcatatcccacagattgggggcttagtccccaagactactccacatcagacaccaatcgcagaagttcccaccaccca

SEQ ID NO: 43563 - DNA, 80 bp, synthetic construct; identical to SEQ ID NO: 11717
  source 1..80: mol_type = other DNA

SEQ ID NO: 43564 - DNA, 80 bp, synthetic construct
  source 1..80: mol_type = other DNA
gaacacacccaatattattacaaaagaccgaaacaagggaatataggagctaggaaccaggaactgtggccaaaaaccaa

SEQ ID NO: 43565 - DNA, 80 bp, synthetic construct
  source 1..80: mol_type = other DNA
tccaagagcaaggtgttggttaatttcatgtctgatgaaggcccctttcctgtttcataaacgtatatcttctccaagtg

SEQ ID NO: 43566 - DNA, 80 bp, synthetic construct
  source 1..80: mol_type = other DNA
tatcatcacactggggattaagttttaaacataggaatttgggtgggggattggagacacaaacattcagtctagagcat

SEQ ID NO: 43567 - DNA, 80 bp, synthetic construct
  source 1..80: mol_type = other DNA
ataaggtatgttctataaggctggtaccaaaagcagacaaaacaatcacaaaaaaactacagatcgctattcatgaatat

SEQ ID NO: 43568 - DNA, 80 bp, synthetic construct; identical to SEQ ID NO: 11718
  source 1..80: mol_type = other DNA

SEQ ID NO: 43569 - DNA, 80 bp, synthetic construct
  source 1..80: mol_type = other DNA
ggataaagggcatctataaaaaagctacagctaacatcatactcgtattagtccatttatgcattgctttaaagaaatac

SEQ ID NO: 43570 - DNA, 80 bp, synthetic construct
  source 1..80: mol_type = other DNA
aagggggaggtggcacacatgtttaaaaagccaaatctcactacaaaatctcaacgaaaattcactatcatgagaacagc

SEQ ID NO: 43571 - DNA, 80 bp, synthetic construct
  source 1..80: mol_type = other DNA
aatggtgaaagactggttgctttcctcctaagatcagcaattaaaacaagaatatccactcccactatgtctattcaaca

SEQ ID NO: 43572 - DNA, 80 bp, synthetic construct; identical to SEQ ID NO: 11719
  source 1..80: mol_type = other DNA

SEQ ID NO: 43573 - DNA, 80 bp, synthetic construct
  source 1..80: mol_type = other DNA
atttccaaactgatagattcagcacaatccctatcagattcctaaatgacttcttcgtagaaatttgcaaactaattgta

SEQ ID NO: 43574 - DNA, 80 bp, synthetic construct
  source 1..80: mol_type = other DNA
gaggattgcttgaggccagaagttcaagaccagcctgggcaacacagcaagatcctgtctctacaaaaaataaaaattag

SEQ ID NO: 43575 - DNA, 80 bp, synthetic construct
  source 1..80: mol_type = other DNA
aggaagaaaagaacaaagtagaactcattctttccagtttcaaaacatcgcataaagtaatggtaatcaagacagtgtgg

SEQ ID NO: 43576 - DNA, 80 bp, synthetic construct; identical to SEQ ID NO: 11720
  source 1..80: mol_type = other DNA

SEQ ID NO: 43577 - DNA, 80 bp, synthetic construct
  source 1..80: mol_type = other DNA
aaagagaaggagatatgacataaacagagaagagacacaggcaagaatgccatgtgaagatgaaggcaaagatttcagtg

SEQ ID NO: 43578 - DNA, 80 bp, synthetic construct
  source 1..80: mol_type = other DNA
tgctgttttaagccatcaaatcttggcaatgtgttacacaaggtctaagaaactaatacaggcctttacttcacactata

SEQ ID NO: 43579 - DNA, 80 bp, synthetic construct
  source 1..80: mol_type = other DNA
caaggtcaggagtttgagaccagcctgaccaacatggtgaaactccgtctctactaaaaatataaaaattagccgggtgt

SEQ ID NO: 43580 - DNA, 80 bp, synthetic construct; identical to SEQ ID NO: 11721
  source 1..80: mol_type = other DNA

SEQ ID NO: 43581 - DNA, 80 bp, synthetic construct
  source 1..80: mol_type = other DNA
atagttttaaaaattaagaatttttttaaaagtgaaaaaaacccacaggaaaggagaaaagatttgcaaatcatacattt

SEQ ID NO: 43582 - DNA, 80 bp, synthetic construct
  source 1..80: mol_type = other DNA
ggagttcgagatcagcctcaccaacatggtaaaaccctgcctccactaaaaatacaaaattagctgggtgtggtggcaca

SEQ ID NO: 43583 - DNA, 80 bp, synthetic construct
  source 1..80: mol_type = other DNA
gatatgaacagtcatttccctaaagaagatatacaaatagccaataagttcataaaaaagatgatcgacattattaggga

SEQ ID NO: 43584 - DNA, 80 bp, synthetic construct
  source 1..80: mol_type = other DNA
ctgggcatggtggcaggtacctgtaatcccagctacttgggaggctgaggcaggagaattgcttgaacctgggaggcaga

SEQ ID NO: 43585 - DNA, 80 bp, synthetic construct; identical to SEQ ID NO: 11722
  source 1..80: mol_type = other DNA

SEQ ID NO: 43586 - DNA, 80 bp, synthetic construct
  source 1..80: mol_type = other DNA
ccagatgtctataaaccgataaataaacaaatgtgatacatctatggaatacagtattatttggccataaaaagcaatga

SEQ ID NO: 43587 - DNA, 80 bp, synthetic construct
  source 1..80: mol_type = other DNA
gatggggaagggggaataagagagtaatagctatagggcatggggtttctttttcaggcgatgataatattctaaaattg

SEQ ID NO: 43588 - DNA, 80 bp, synthetic construct
  source 1..80: mol_type = other DNA
atgtgatattttgatacacacatagtatctaataatgaagttagggtacataggatatccgtcacctcaagcatttattt

SEQ ID NO: 43589 - DNA, 80 bp, synthetic construct; identical to SEQ ID NO: 11723
  source 1..80: mol_type = other DNA

SEQ ID NO: 43590 - DNA, 80 bp, synthetic construct
  source 1..80: mol_type = other DNA
gtatatatgccgtatctttttaatccattcatccattgatggacagttaggttgattccctgtctttgctattgtaaata

SEQ ID NO: 43591 - DNA, 80 bp, synthetic construct
  source 1..80: mol_type = other DNA
ttcccaccaaccgtgtgtaagagtttgtctttatatcctagctaccatttttgtctttttaataatagctattctagcta

SEQ ID NO: 43592 - DNA, 80 bp, synthetic construct
  source 1..80: mol_type = other DNA
ttgaattgtgttccttgtacactctggatattagtcccctgttggataatttgaaaatattgttcccatctacagttggt

SEQ ID NO: 43593 - DNA, 80 bp, synthetic construct; identical to SEQ ID NO: 11724
  source 1..80: mol_type = other DNA

SEQ ID NO: 43594 - DNA, 80 bp, synthetic construct
  source 1..80: mol_type = other DNA
ccggtaccatgatgatttggtttctactataacagttacaaagctattactatagcttaactattggatggggctctttt

SEQ ID NO: 43595 - DNA, 80 bp, synthetic construct
  source 1..80: mol_type = other DNA
tgccaccacacccagctaatttttgtaatttttgtagacatttcaccaggaacaaatagaaaacttgaacagaccaacaa

SEQ ID NO: 43596 - DNA, 80 bp, synthetic construct
  source 1..80: mol_type = other DNA
actcattttatgaagcctgcattgccctgataccaaaagcagagaagaatacaaaaaaaaaagaaaattacaggccaatc

SEQ ID NO: 43597 - DNA, 80 bp, synthetic construct; identical to SEQ ID NO: 11725
  source 1..80: mol_type = other DNA

SEQ ID NO: 43598 - DNA, 80 bp, synthetic construct
  source 1..80: mol_type = other DNA
aaataaaactttcgtgctgcaggtgccttgaggagacgacatgtgggtgatcttttctagaaggcagtggagtgaaagtt

SEQ ID NO: 43599 - DNA, 80 bp, synthetic construct
  source 1..80: mol_type = other DNA
attgtacctggacaagatgagtaaaaagctaaagtggtctgttatcagctatttatgtattttgggcctgtctccagcag

SEQ ID NO: 43600 - DNA, 80 bp, synthetic construct
  source 1..80: mol_type = other DNA
caggcctgtcaaataaatgtaccacaatttatatatcatacatatatctagtacacagtcaccagaacataagattaaac

SEQ ID NO: 43601 - DNA, 80 bp, synthetic construct
  source 1..80: mol_type = other DNA
ctacagtgtcacacatcaacatggatgaatccaaaaataataatgagcaaaagtagtcagtcatatacagtataattcta

SEQ ID NO: 43602 - DNA, 80 bp, synthetic construct; identical to SEQ ID NO: 11726
  source 1..80: mol_type = other DNA

SEQ ID NO: 43603 - DNA, 80 bp, synthetic construct
  source 1..80: mol_type = other DNA
cttttattcttagccgtattaggtgtgaaattgccctgagagcaccagttgcttttatgctagatttggaggggaaagag

SEQ ID NO: 43604 - DNA, 80 bp, synthetic construct
  source 1..80: mol_type = other DNA
ctgatgatccatttctatgcaaaacatagaatctaaagctgagacatagcaatagaggaccagagaacagacacagcaac

SEQ ID NO: 43605 - DNA, 80 bp, synthetic construct
  source 1..80: mol_type = other DNA
ctctttaagggattagggagcctctgaaatgcaaaggaaactaaactgatagtaatgtaaaatgaacagtgacctatcat

SEQ ID NO: 43606 - DNA, 80 bp, synthetic construct; identical to SEQ ID NO: 11727
  source 1..80: mol_type = other DNA

SEQ ID NO: 43607 - DNA, 80 bp, synthetic construct
  source 1..80: mol_type = other DNA
atttgcttctctgcttaccaactctgaacccctgctttcccaactttctggtatctgggaagaaaataaactgactagaa

SEQ ID NO: 43608 - DNA, 80 bp, synthetic construct
  source 1..80: mol_type = other DNA
ataggaagtgacaaaaaaagctggaagaaacatgacagactataatactcccttccctaaccttcctccttttcaccctg

SEQ ID NO: 43609 - DNA, 80 bp, synthetic construct
  source 1..80: mol_type = other DNA
aagggcagagacttctctttattcaccttcagtaactaacataatgcctagcatgtaggaggctctcaaaattaagtttc

SEQ ID NO: 43610 - DNA, 80 bp, synthetic construct; identical to SEQ ID NO: 11728
  source 1..80: mol_type = other DNA

SEQ ID NO: 43611 - DNA, 80 bp, synthetic construct
  source 1..80: mol_type = other DNA
tgtatctgatacaaatgggaatattcactgaaccctggagagaacgagcatttgaaaaaaaaaagggttcacttaagaga

SEQ ID NO: 43612 - DNA, 80 bp, synthetic construct
  source 1..80: mol_type = other DNA
tccgacttctactgcatggttggaaaagaagatacgcaataactctttcaaactcctttatctcttttactctctcatgc

SEQ ID NO: 43613 - DNA, 80 bp, synthetic construct
  source 1..80: mol_type = other DNA
catgcccttctggcataatttttggtaattttgtttcattggggggttgtagtacttgtctaaatggtttgttcttaaat

SEQ ID NO: 43614 - DNA, 80 bp, synthetic construct; identical to SEQ ID NO: 11729
  source 1..80: mol_type = other DNA

SEQ ID NO: 43615 - DNA, 80 bp, synthetic construct
  source 1..80: mol_type = other DNA
aaacaggagccaagcccaccctccctaatgacaccaggaaaagctacatgctctttactttagcttagttgttattttat

SEQ ID NO: 43616 - DNA, 80 bp, synthetic construct
  source 1..80: mol_type = other DNA
catactacctgaatgtgtcacttgggcagaaggattttaaacctaagattccttctctgtgtagttccaaactgtatgat

SEQ ID NO: 43617 - DNA, 80 bp, synthetic construct
  source 1..80: mol_type = other DNA
gaggactacagcagggccatttcccccatgggaaaccactgcattcctatggtagaaaataatgaatgctcttttaataa

SEQ ID NO: 43618 - DNA, 80 bp, synthetic construct; identical to SEQ ID NO: 11730
  source 1..80: mol_type = other DNA

SEQ ID NO: 43619 - DNA, 80 bp, synthetic construct
  source 1..80: mol_type = other DNA
cttcactctaaatccattatgagactattccctgttgaacccctcaggatggcaatttgtggttactctgggtttattta

SEQ ID NO: 43620 - DNA, 80 bp, synthetic construct
  source 1..80: mol_type = other DNA
tatgtcttttataccatttagagttcaaaggatggtctttacagtctgacagagctagatctgaaatctaattctaccac

SEQ ID NO: 43621 - DNA, 80 bp, synthetic construct
  source 1..80: mol_type = other DNA
gagcttggtaagttctcaataaattctatctatctgtccttcacaggtcaagctcctgattataaagtctttccagtcta

SEQ ID NO: 43622 - DNA, 80 bp, synthetic construct
  source 1..80: mol_type = other DNA
gatgctgaaatttaggctcataaggaatgaaaactgtaatttatatctacaaatatgatgcctctatattgttggaaagg

SEQ ID NO: 43623 - DNA, 80 bp, synthetic construct; identical to SEQ ID NO: 11731
  source 1..80: mol_type = other DNA

SEQ ID NO: 43624 - DNA, 80 bp, synthetic construct
  source 1..80: mol_type = other DNA
ctaattattcattcatgttccttgaggtcagagaacacagatttcaactttgcaggctcagcctcagctcaaaacctggc

SEQ ID NO: 43625 - DNA, 80 bp, synthetic construct
  source 1..80: mol_type = other DNA
tttcaaaggagacacacagataagtgagaataaaaactgtctacgacaatcagctcaacaacacgtctccctttgtaaga

SEQ ID NO: 43626 - DNA, 80 bp, synthetic construct
  source 1..80: mol_type = other DNA
gagaaaacagtgatggctccagaacttttatatgaatgaacttagcacagctatcagagtggatggtggtgggagggcta

SEQ ID NO: 43627 - DNA, 80 bp, synthetic construct; identical to SEQ ID NO: 11732
  source 1..80: mol_type = other DNA

SEQ ID NO: 43628 - DNA, 80 bp, synthetic construct
  source 1..80: mol_type = other DNA
ggccttcactctcaccacttgctgtccctcaaaaagccgactcacccctttccaagcgcagtgaaccgtccgcaaagcac

SEQ ID NO: 43629 - DNA, 80 bp, synthetic construct
  source 1..80: mol_type = other DNA
aaagaaatcattatttggcaacgtacggttttcagggggatataccccgcgactgcgttcctgtaggatgtgagacaaag

SEQ ID NO: 43630 - DNA, 80 bp, synthetic construct
  source 1..80: mol_type = other DNA
ttcgcaattaattatgacgtcacagccaatcgtcaacgcgaaagcctgacgctctagccggctctatctcgctgccccgc

SEQ ID NO: 43631 - DNA, 80 bp, synthetic construct; identical to SEQ ID NO: 11733
  source 1..80: mol_type = other DNA

SEQ ID NO: 43632 - DNA, 80 bp, synthetic construct
  source 1..80: mol_type = other DNA
catcaacgttcggggtgagaggcttgtacgcaggggtcctggcggagggcgcagggtcggaagcttggggaactcaagat

SEQ ID NO: 43633 - DNA, 80 bp, synthetic construct
  source 1..80: mol_type = other DNA
agttcttacttgcctgtgcagactttgaggggaaggttgtgaagacttcggttgtgttccaccaactggggacagccatg

SEQ ID NO: 43634 - DNA, 80 bp, synthetic construct
  source 1..80: mol_type = other DNA
atcgacgtttgagaggcgtgatcgcctgattcctgtgggaagtaaggggatatgaccaggcctccctaacccaccagttt

SEQ ID NO: 43635 - DNA, 80 bp, synthetic construct; identical to SEQ ID NO: 11734
  source 1..80: mol_type = other DNA

SEQ ID NO: 43636 - DNA, 80 bp, synthetic construct
  source 1..80: mol_type = other DNA
tcttggctcactgcaacctccgcctcctgggctcaggtaatcctcccacctcagcctccaaagtagctgggaccacagac

SEQ ID NO: 43637 - DNA, 80 bp, synthetic construct
  source 1..80: mol_type = other DNA
gccaccccgcctgacctacttttaggatatttaaaaggaaatgaagaaaaaaaaaacaacataagaagcaggtattgttt

SEQ ID NO: 43638 - DNA, 80 bp, synthetic construct
  source 1..80: mol_type = other DNA
cgattttcttttattctgtttgggatttgttggactttctgaaactgagagtggacttttttttcatcaaccttggaaaa

SEQ ID NO: 43639 - DNA, 80 bp, synthetic construct; identical to SEQ ID NO: 11735
  source 1..80: mol_type = other DNA

SEQ ID NO: 43640 - DNA, 80 bp, synthetic construct
  source 1..80: mol_type = other DNA
tgatatctgcggattttgtgtgtctgatgctgctgtcttttgtttctgctgtctctctcatagtgctttttttctttgtt

SEQ ID NO: 43641 - DNA, 80 bp, synthetic construct
  source 1..80: mol_type = other DNA
gttttttggagcagacagatagtatgaatttgagctgcaaatccatgtaagggctagcttacagttagaaattctcagga

SEQ ID NO: 43642 - DNA, 80 bp, synthetic construct
  source 1..80: mol_type = other DNA
atttcctatgcttccagtgactgtcaaaacagtataaagggcaccatagtgtcactgtcacgtttcatagggacattagt

SEQ ID NO: 43643 - DNA, 80 bp, synthetic construct
  source 1..80: mol_type = other DNA
tttaacttccctgtctggatttctggttttacagaacttttaaccagtgtgcagattgcctttactttcttgccatctca

SEQ ID NO: 43644 - DNA, 80 bp, synthetic construct; identical to SEQ ID NO: 11736
  source 1..80: mol_type = other DNA

SEQ ID NO: 43645 - DNA, 80 bp, synthetic construct
  source 1..80: mol_type = other DNA
tatactactagaaactcatcttttggtgaatataacaagtcctttctttcctcataggttccaggagaaggaagactctt

SEQ ID NO: 43646 - DNA, 80 bp, synthetic construct
  source 1..80: mol_type = other DNA
gatcatcatgtggggattaccattgttcctggagtactcctacccttagttgaatttccttattaaagttatatttttct

SEQ ID NO: 43647 - DNA, 80 bp, synthetic construct
  source 1..80: mol_type = other DNA
aagtattgccatactatttaaatctatttggttcctgagtttaggttaagaaaaactaggaatttggatagtgagacatt

SEQ ID NO: 43648 - DNA, 80 bp, synthetic construct; identical to SEQ ID NO: 11737
  source 1..80: mol_type = other DNA

SEQ ID NO: 43649 - DNA, 80 bp, synthetic construct
  source 1..80: mol_type = other DNA
atatgtattataagtatataatacatatacaaaatatgtgttaatcaacggtttatgttattggtaaggcatctggtcaa

SEQ ID NO: 43650 - DNA, 80 bp, synthetic construct
  source 1..80: mol_type = other DNA
atagaaagaaagaaaaaagtaaagtcacaaggaatcctactccacagagataaccaaattatactgtatatctgtgcttg

SEQ ID NO: 43651 - DNA, 80 bp, synthetic construct
  source 1..80: mol_type = other DNA
aacaaatgcatactcaggtcccgcattccttggctcaaatagtgatcaaggggttactgtaataattatcatataattgt

SEQ ID NO: 43652 - DNA, 80 bp, synthetic construct
  source 1..80: mol_type = other DNA
actttcctgacccactcctgaaatctgaaacaaacctgttcatgtttctaccctactttaagcctttctctggcccataa

SEQ ID NO: 43653 - DNA, 80 bp, synthetic construct; identical to SEQ ID NO: 11738
  source 1..80: mol_type = other DNA

SEQ ID NO: 43654 - DNA, 80 bp, synthetic construct
  source 1..80: mol_type = other DNA
atttgttaatgccccagtgtttcatatttttgttagttttcagcatgcctgtctttcctactagagctaaaaggcagggt

SEQ ID NO: 43655 - DNA, 80 bp, synthetic construct
  source 1..80: mol_type = other DNA
cttcccgttttctttagagaaacccagaccaaacaaggaaagggaaataggccacggtagggtcattactattgctcctt

SEQ ID NO: 43656 - DNA, 80 bp, synthetic construct
  source 1..80: mol_type = other DNA
acgcgtgctgccccagactctccctcctccacccacacccgcagtgacaccccttccgccaaatttgtttctctttcttt

SEQ ID NO: 43657 - DNA, 80 bp, synthetic construct; identical to SEQ ID NO: 11739
  source 1..80: mol_type = other DNA

SEQ ID NO: 43658 - DNA, 80 bp, synthetic construct
  source 1..80: mol_type = other DNA
ggcggtgctgtttaggggtctgggagatactgggagggaggggacagggattagaagagttgttggaggagctaggccta

SEQ ID NO: 43659 - DNA, 80 bp, synthetic construct
  source 1..80: mol_type = other DNA
agttaggatataggtgttgctgcttggggtggttatgtgtgtaagtaataaacgaaagggaaattgaggattaaggagcc

SEQ ID NO: 43660 - DNA, 80 bp, synthetic construct
  source 1..80: mol_type = other DNA
agtggcaggaatgaggaaacaagaaaaggagatgaaaagaggtattttgagaaatcagagagcaaagatgtaaatggaga

SEQ ID NO: 43661 - DNA, 80 bp, synthetic construct
  source 1..80: mol_type = other DNA
agggagggctggagcttgagaatgagagaggttttgtttgtttttttaagagaaaaagaataggggatctggaaaaagga

SEQ ID NO: 43662 - DNA, 80 bp, synthetic construct; identical to SEQ ID NO: 11740
  source 1..80: mol_type = other DNA

SEQ ID NO: 43663 - DNA, 80 bp, synthetic construct
  source 1..80: mol_type = other DNA
gggaaaggttagtaagaggggactagataggtatgctcatccttaaccttctaggagaaccggagccttaccatcaaact

SEQ ID NO: 43664 - DNA, 80 bp, synthetic construct
  source 1..80: mol_type = other DNA
gctttccagaagcccccagatgttcatagttctgtcacttttttggtggtgctgtggtatcagggaaagaggtagggaag

SEQ ID NO: 43665 - DNA, 80 bp, synthetic construct
  source 1..80: mol_type = other DNA
gaattttcactgagtttgagtgggaatggaactgactatatatcttacccttcctcctctttaactgggctcctccctct

SEQ ID NO: 43666 - DNA, 80 bp, synthetic construct; identical to SEQ ID NO: 11741
  source 1..80: mol_type = other DNA

SEQ ID NO: 43667 - DNA, 80 bp, synthetic construct
  source 1..80: mol_type = other DNA
tttttcctcccaatacccacccttctctctcgagggatctaggcaccttggtcccagtgtcttccttttgttctcactgc

SEQ ID NO: 43668 - DNA, 80 bp, synthetic construct
  source 1..80: mol_type = other DNA
agctatcccactaaaatatttaatcctaattcttagtccttgcctgtgagatatgaggtcttacaggagacctcagagct

SEQ ID NO: 43669 - DNA, 80 bp, synthetic construct
  source 1..80: mol_type = other DNA
tgagattggtcacttagagccgactgtctcctctgccttttgtttttcagcttcagagacagatccaatatagtcccagg

SEQ ID NO: 43670 - DNA, 80 bp, synthetic construct; identical to SEQ ID NO: 11742
  source 1..80: mol_type = other DNA

SEQ ID NO: 43671 - DNA, 80 bp, synthetic construct
  source 1..80: mol_type = other DNA
gttcctttccgtgagtatgtgcggggagaagtttcaagaaggttcttatggaaaaaaggctgtgagcatagaaagcagtc

SEQ ID NO: 43672 - DNA, 80 bp, synthetic construct
  source 1..80: mol_type = other DNA
gggaaggccctgagcccttctggagctaggagtggcaagagtgggagtcaagtatttgaccagcagagcctctatgtagg

SEQ ID NO: 43673 - DNA, 80 bp, synthetic construct
  source 1..80: mol_type = other DNA
gtggaaacgtggagaccaggtgaggtctcattattttggggcgaaaatgtgggttgctattaatactcctgcaatgggcg

SEQ ID NO: 43674 - DNA, 80 bp, synthetic construct; identical to SEQ ID NO: 11743
  source 1..80: mol_type = other DNA

SEQ ID NO: 43675 - DNA, 80 bp, synthetic construct
  source 1..80: mol_type = other DNA
ctgattccccggccgcgcccactgcatagtggctctcctcgtcgtccgcatcctccccagaagagtctctgcaggaggcg

SEQ ID NO: 43676 - DNA, 80 bp, synthetic construct
  source 1..80: mol_type = other DNA
ggcggtgtgcggtcccagggtccagggtcaggtcggctggagacggggaggcagggagaggacctcatgagagagttttc

SEQ ID NO: 43677 - DNA, 80 bp, synthetic construct
  source 1..80: mol_type = other DNA
aagagcagacctgggcaatatcagaccttgtactgatgcaccacttctgtagaattggacctggggaaggatcatactgg

SEQ ID NO: 43678 - DNA, 80 bp, synthetic construct; identical to SEQ ID NO: 11744
  source 1..80: mol_type = other DNA

SEQ ID NO: 43679 - DNA, 80 bp, synthetic construct
  source 1..80: mol_type = other DNA
aaatttctggattaggggtgtcagaagcaatctggactgggcaagatggtggatgaccaagatggtggaccaccttctct

SEQ ID NO: 43680 - DNA, 80 bp, synthetic construct
  source 1..80: mol_type = other DNA
atgtatgaaaaaggaagagggaaaatggctggaatatgaggaatcgaggatagacattgttataggctgaactgtgccct

SEQ ID NO: 43681 - DNA, 80 bp, synthetic construct
  source 1..80: mol_type = other DNA
tggacacagagacaaatgcatacaaaagaaaatgtgcagacctatcacccaaagaacatgtgaggctaccagaggctagg

SEQ ID NO: 43682 - DNA, 80 bp, synthetic construct; identical to SEQ ID NO: 11745
  source 1..80: mol_type = other DNA

SEQ ID NO: 43683 - DNA, 80 bp, synthetic construct
  source 1..80: mol_type = other DNA
tgcccccacgcataccccactcacatctctggaggaagaagggatgagactataccccagaaaacctgcctattaatggg

SEQ ID NO: 43684 - DNA, 80 bp, synthetic construct
  source 1..80: mol_type = other DNA
aaacatggatgtgagctctgggcttcattccctggggcatccttccctatctctcccctcctcaggtgagttctgtctga

SEQ ID NO: 43685 - DNA, 80 bp, synthetic construct
  source 1..80: mol_type = other DNA
tttccactccccaagggttctcaattctcttttcccaggctcgtccgtgactgtttcttgtcctcagagcccttgccttc

SEQ ID NO: 43686 - DNA, 80 bp, synthetic construct; identical to SEQ ID NO: 11746
  source 1..80: mol_type = other DNA

SEQ ID NO: 43687 - DNA, 80 bp, synthetic construct
  source 1..80: mol_type = other DNA
atggtggagcgggggagagagaaacaatttgcataattgtgccaattactttcagactaattaggtctatgaagacttca

SEQ ID NO: 43688 - DNA, 80 bp, synthetic construct
  source 1..80: mol_type = other DNA
gatgtggagaggagccagaggccccagcggctgttctcccgcacctcgcctccacccctggccgctcctgcctggggcct

SEQ ID NO: 43689 - DNA, 80 bp, synthetic construct
  source 1..80: mol_type = other DNA
cgcccccaacccaccagcccagcctcctgctcccgctcctctaagcaggttctgccctcgcccaccatcctcccaggacc

SEQ ID NO: 43690 - DNA, 80 bp, synthetic construct; identical to SEQ ID NO: 11747
  source 1..80: mol_type = other DNA

SEQ ID NO: 43691 - DNA, 80 bp, synthetic construct
  source 1..80: mol_type = other DNA
aacctcccgcttccaccaacaactccgcgacgcgcgcccagcctcacctctccgggcaggtccaggcagcccatggtggg

SEQ ID NO: 43692 - DNA, 80 bp, synthetic construct
  source 1..80: mol_type = other DNA
tcggtgccggtcgccggcggagtcccccagcggcgggccagacacgcgcggcagaagctgtgctcgcacgccagaagcac

SEQ ID NO: 43693 - DNA, 80 bp, synthetic construct
  source 1..80: mol_type = other DNA
ccgcccctgctgcttgctgtgtagatgcccttctctccgactcccgcattaacttttgccgctttccgcccctctcctgg

SEQ ID NO: 43694 - DNA, 80 bp, synthetic construct; identical to SEQ ID NO: 11748
  source 1..80: mol_type = other DNA

SEQ ID NO: 43695 - DNA, 80 bp, synthetic construct
  source 1..80: mol_type = other DNA
gggctgggggccggaagcacagatcctggtttgtgtggctttggcaagcctctgagtgttgatgtgtggttttcattcct

SEQ ID NO: 43696 - DNA, 80 bp, synthetic construct
  source 1..80: mol_type = other DNA
tccttactttcttcgtaagtctctctttctggttctttctctctgtttttccccgtgtgtgattttattaccagttttct

SEQ ID NO: 43697 - DNA, 80 bp, synthetic construct
  source 1..80: mol_type = other DNA
ccctgcctttttcagttgcagatccctgggaccccctcctgcttcctgatttttttctggtgttcctttgtgccttcatt

SEQ ID NO: 43698 - DNA, 80 bp, synthetic construct; identical to SEQ ID NO: 11749
  source 1..80: mol_type = other DNA

SEQ ID NO: 43699 - DNA, 80 bp, synthetic construct
  source 1..80: mol_type = other DNA
ctgggataaatgtccagtattatttaggaacagacggacatgctcaaagaaaacaggcaaagagacagatactctatcat

SEQ ID NO: 43700 - DNA, 80 bp, synthetic construct
  source 1..80: mol_type = other DNA
acactcaaatatgacaccctgataaacaaacctacacaaacaaacacacgtacattcatcttggaacaaccctcccggct

SEQ ID NO: 43701 - DNA, 80 bp, synthetic construct
  source 1..80: mol_type = other DNA
gaagccacaagctaaggaagtgggtaacctctggaagctgcaaaagacgagggaatggattctctagcagaccattcaga

SEQ ID NO: 43702 - DNA, 80 bp, synthetic construct
  source 1..80: mol_type = other DNA
tttctcctccagtctctgactctctgagtctgtttgcacttctgtgttgttgcaccttccagtttgtcatattttctgga

SEQ ID NO: 43703 - DNA, 80 bp, synthetic construct; identical to SEQ ID NO: 11750
  source 1..80: mol_type = other DNA

SEQ ID NO: 43704 - DNA, 80 bp, synthetic construct
  source 1..80: mol_type = other DNA
cttttaaaagctttccagatggttgcagtgtttagctaacaggagaaccatggtcttgaatgacggctgttcatgtgggc

SEQ ID NO: 43705 - DNA, 80 bp, synthetic construct
  source 1..80: mol_type = other DNA
tcatgtctcaacccaaaggtaacattcagagaggacttcttttaccacttgtatctcaagtggtctttctcaaaggtatt

SEQ ID NO: 43706 - DNA, 80 bp, synthetic construct
  source 1..80: mol_type = other DNA
tggcacacagtcagccttaataaacttaggtccagttgttgaattgctcattacactgattggacaacctgagagggtca

SEQ ID NO: 43707 - DNA, 80 bp, synthetic construct; identical to SEQ ID NO: 11751
  source 1..80: mol_type = other DNA

SEQ ID NO: 43708 - DNA, 80 bp, synthetic construct
  source 1..80: mol_type = other DNA
atcaccactgagttcattctatttccagagagccagaagggtggatgtgattttacgtgtgtcagcttggcttggcttga

SEQ ID NO: 43709 - DNA, 80 bp, synthetic construct
  source 1..80: mol_type = other DNA
cactagggaatgtcagaggtgggacaggccttgacccatcccttcttttccttctcttcatttttttcttctatcctttc

SEQ ID NO: 43710 - DNA, 80 bp, synthetic construct
  source 1..80: mol_type = other DNA
atcacaggacagtcatggtccctgcccttaggaagtgtgataaggcaggtaaagtgtatccatcatcaacaaaatttagc

SEQ ID NO: 43711 - DNA, 80 bp, synthetic construct; identical to SEQ ID NO: 11752
  source 1..80: mol_type = other DNA

SEQ ID NO: 43712 - DNA, 80 bp, synthetic construct
  source 1..80: mol_type = other DNA
ttggatgtttacactgtgctttaacatagctggaaattctattagaccagagcagttttcctatgcaactactccaagga

SEQ ID NO: 43713 - DNA, 80 bp, synthetic construct
  source 1..80: mol_type = other DNA
tatgttatagaaatgtcaccttcatagtccattctctcatttaaccctataatagccgtgaggccaagtccagccatgtt

SEQ ID NO: 43714 - DNA, 80 bp, synthetic construct; identical to SEQ ID NO: 11753
  source 1..80: mol_type = other DNA

SEQ ID NO: 43715 - DNA, 80 bp, synthetic construct
  source 1..80: mol_type = other DNA
atactttaagttttagggtacatgtgcacaatgtgcaggttagttacatatgtatacacgtgccatgctggtgcgctgca

SEQ ID NO: 43716 - DNA, 80 bp, synthetic construct
  source 1..80: mol_type = other DNA
ttttttgttcttgcgatagtttactgagaatgatgatttccaatttcattcatgtccctacaaaggacatgaactcatca

SEQ ID NO: 43717 - DNA, 80 bp, synthetic construct
  source 1..80: mol_type = other DNA
agtcctctgggtatataaccagtaatgggatggctgggtcaaatggtatttctagttctagatccctgaggaatcgccac

SEQ ID NO: 43718 - DNA, 80 bp, synthetic construct; identical to SEQ ID NO: 11754
  source 1..80: mol_type = other DNA

SEQ ID NO: 43719 - DNA, 80 bp, synthetic construct
  source 1..80: mol_type = other DNA
cttttgctgtgcagaagctctttagtttaattagatcccatttgccaattttggcttttgttgccattgcttttggtgtt

SEQ ID NO: 43720 - DNA, 80 bp, synthetic construct
  source 1..80: mol_type = other DNA
atatggctagccagttttcccagcaccatttattaaatagggaatcctttccccattgcttgtttttctcaggtttgtca

SEQ ID NO: 43721 - DNA, 80 bp, synthetic construct
  source 1..80: mol_type = other DNA
tttggcttaggatagacttgacgatgcgggctcttttttggtcccatatgaactttaaagtagttttttccaattctgtg

SEQ ID NO: 43722 - DNA, 80 bp, synthetic construct
  source 1..80: mol_type = other DNA
tctccttgaagaggtccttcacatcccttataagttggattcctaggtattttattctctttgaagcaattgtgaatggg

SEQ ID NO: 43723 - DNA, 80 bp, synthetic construct; identical to SEQ ID NO: 11755
  source 1..80: mol_type = other DNA

SEQ ID NO: 43724 - DNA, 80 bp, synthetic construct
  source 1..80: mol_type = other DNA
catcaatacctaatttattgagagtttttagcatgaagcgttgttgaattttgtcaaaggccttttctgcatctattgag

SEQ ID NO: 43725 - DNA, 80 bp, synthetic construct
  source 1..80: mol_type = other DNA
tgaggatttttgcatcaatgttcatcaaggatattggtctaaaattctcttttttggttgtgtctctgcccagctttggt

SEQ ID NO: 43726 - DNA, 80 bp, synthetic construct
  source 1..80: mol_type = other DNA
tattgattattgccacaatttcagatcctgttattggtctattcagagattcagcttcttcctggtttagtcttgggaga

SEQ ID NO: 43727 - DNA, 80 bp, synthetic construct
  source 1..80: mol_type = other DNA
tttctttattagtcttgctagcggtttatcaattttgttgatcctttcaaaaaaccagctcctggattcattaatttttt

SEQ ID NO: 43728 - DNA, 80 bp, synthetic construct; identical to SEQ ID NO: 11756
  source 1..80: mol_type = other DNA

SEQ ID NO: 43729 - DNA, 80 bp, synthetic construct
  source 1..80: mol_type = other DNA
ttataatttctgttcttttacatttgctgaggagagctttactttcaagtatgtggtcaattttggaataggtgtggtgt

SEQ ID NO: 43730 - DNA, 80 bp, synthetic construct
  source 1..80: mol_type = other DNA
ccattattaatgcatgggaatctaagtctctttgtaggtcactcaggacttgctttatgaatctgggtgctcctgtattg

SEQ ID NO: 43731 - DNA, 80 bp, synthetic construct
  source 1..80: mol_type = other DNA
ggtagatcttcctccatccttttattttgagcctatgtgtgtctctgcacgtgaaatgggtttcctgaatacagcacact

SEQ ID NO: 43732 - DNA, 80 bp, synthetic construct; identical to SEQ ID NO: 11757
  source 1..80: mol_type = other DNA

SEQ ID NO: 43733 - DNA, 80 bp, synthetic construct
  source 1..80: mol_type = other DNA
actctcttctggcttgtagagtttctgccgagagatccgctgttagtctgatgggcttccctttgagggtaacccgacct

SEQ ID NO: 43734 - DNA, 80 bp, synthetic construct
  source 1..80: mol_type = other DNA
cctggataatatcctgcagagtgttttccaacttggttccattctccccgtcactttcaggtacaccaatcagatgtaga

SEQ ID NO: 43735 - DNA, 80 bp, synthetic construct
  source 1..80: mol_type = other DNA
attcttcacgtagttctcgagccttggttttcagctccatcagctcctttaagcacttctctgtattggttattctagtt

SEQ ID NO: 43736 - DNA, 80 bp, synthetic construct; identical to SEQ ID NO: 11758
  source 1..80: mol_type = other DNA

SEQ ID NO: 43737 - DNA, 80 bp, synthetic construct
  source 1..80: mol_type = other DNA
tgcctcccagttaggctgctcgggggtcaggggtcagggacccacttgaggaggcagtctgcccgttctcagatctccag

SEQ ID NO: 43738 - DNA, 80 bp, synthetic construct
  source 1..80: mol_type = other DNA
gttcgagcttcccggctgttttgtttacctcagcaagcctgggcaatggcgggcgcccctcctccagcctcgctgccacc

SEQ ID NO: 43739 - DNA, 80 bp, synthetic construct; identical to SEQ ID NO: 11759
  source 1..80: mol_type = other DNA

SEQ ID NO: 43740 - DNA, 80 bp, synthetic construct
  source 1..80: mol_type = other DNA
ctcctccccccatcttctcagttttctcaaggccttcttgttctccaagcccttagcagtttccatttttttttttttgt

SEQ ID NO: 43741 - DNA, 80 bp, synthetic construct
  source 1..80: mol_type = other DNA
aatttttgtatttttagtagagatggggttttgtcatgtttgccaggctggtcttgaactccttacctcaggtgatctgc

SEQ ID NO: 43742 - DNA, 80 bp, synthetic construct
  source 1..80: mol_type = other DNA
ggaagagtggagagcaagccagccatagtcccttgtcctctggtaatttagattccattgaaaaaggccaacaataagca

SEQ ID NO: 43743 - DNA, 80 bp, synthetic construct; identical to SEQ ID NO: 11760
  source 1..80: mol_type = other DNA

SEQ ID NO: 43744 - DNA, 80 bp, synthetic construct
  source 1..80: mol_type = other DNA
tcgttgttctaagagcagtggaatgccactgagtagctgtaagtgtgatatttacgtggtctaatggattgattgattga

SEQ ID NO: 43745 - DNA, 80 bp, synthetic construct
  source 1..80: mol_type = other DNA
tgtcctagtagtcttttctctcagttttctttttctaattcctattccccttcacattatttacattcaagacgatcatc

SEQ ID NO: 43746 - DNA, 80 bp, synthetic construct
  source 1..80: mol_type = other DNA
ctagagttgtagggaacattaacaatgtgtagtctagcccttacaacatggataagaaaattgattcccagagagatgat

SEQ ID NO: 43747 - DNA, 80 bp, synthetic construct
  source 1..80: mol_type = other DNA
agttgggcagatcacaaggtcaagagatcgagaccatcctggccaacatggtgaaaccccgtctctactaaaaatacaaa

SEQ ID NO: 43748 - DNA, 80 bp, synthetic construct; identical to SEQ ID NO: 11761
  source 1..80: mol_type = other DNA

SEQ ID NO: 43749 - DNA, 80 bp, synthetic construct
  source 1..80: mol_type = other DNA
ttaattcatgtccagaatcctagctccaaaaattctgagaaatagagttttttacttttcaatctcttcaatagaaagga

SEQ ID NO: 43750 - DNA, 80 bp, synthetic construct
  source 1..80: mol_type = other DNA
agatttaaatggacatcctgtacttttatttgataaatctgacattttgacaaatctccagcacagagactgagagcaga

SEQ ID NO: 43751 - DNA, 80 bp, synthetic construct
  source 1..80: mol_type = other DNA
gcacaggtaacagctttgcaacagcctagaggcaagaacaatttgggctaatttaagcaaagttgacacatgatgagtta

SEQ ID NO: 43752 - DNA, 80 bp, synthetic construct; identical to SEQ ID NO: 11762
  source 1..80: mol_type = other DNA

SEQ ID NO: 43753 - DNA, 80 bp, synthetic construct
  source 1..80: mol_type = other DNA
taattgcaaggctgttacagaaatgggctacatacttaatgagctttggatgttgagatgggatcacaagagagggggta

SEQ ID NO: 43754 - DNA, 80 bp, synthetic construct
  source 1..80: mol_type = other DNA
ctgtcctttctttctgttctgtagtcatcctatttccttgacagaatcgaagcctcagccagtgagatagatggagtgta

SEQ ID NO: 43755 - DNA, 80 bp, synthetic construct
  source 1..80: mol_type = other DNA
gagcaggtatcatcctccagcaaatgggcaatccattagtccaaactcctcattttaaaattgaaaaaactgaagccttt

SEQ ID NO: 43756 - DNA, 80 bp, synthetic construct; identical to SEQ ID NO: 11763
  source 1..80: mol_type = other DNA

SEQ ID NO: 43757 - DNA, 80 bp, synthetic construct
  source 1..80: mol_type = other DNA
tgggaagaaagacacaaatgctagcatagttttctctctttgggatgactgccttatacaactctggggaatgccattag

SEQ ID NO: 43758 - DNA, 80 bp, synthetic construct
  source 1..80: mol_type = other DNA
actcatcatgcgtcaactttgcttaaattagcccaaattgttcttgcctctaggttgatgcaaagctgttacctgtgcct

SEQ ID NO: 43759 - DNA, 80 bp, synthetic construct
  source 1..80: mol_type = other DNA
ttgaaggtggtaagagaagtcgtcaagtgcttatctgaaggaaggatcatccagatgaaaggaaaggcagaggcaaaggc

SEQ ID NO: 43760 - DNA, 80 bp, synthetic construct; identical to SEQ ID NO: 11764
  source 1..80: mol_type = other DNA

SEQ ID NO: 43761 - DNA, 80 bp, synthetic construct
  source 1..80: mol_type = other DNA
gtgctgtgaactgtgcagcccgatgtaagcatatctgacattaggagtggtggagaaacaaaaagaacaaggatagttca

SEQ ID NO: 43762 - DNA, 80 bp, synthetic construct
  source 1..80: mol_type = other DNA
tgcttcctccccaacagtattagaacaccaactcccaggagcacagagacttgaagagagtgtccgggtcgtggactatg

SEQ ID NO: 43763 - DNA, 80 bp, synthetic construct
  source 1..80: mol_type = other DNA
gactctccctccctcccttccttcctctcctctggtgaccagtagctaaaacatcactggcacgctgctggcatccagcc

SEQ ID NO: 43764 - DNA, 80 bp, synthetic construct; identical to SEQ ID NO: 11765
  source 1..80: mol_type = other DNA

SEQ ID NO: 43765 - DNA, 80 bp, synthetic construct
  source 1..80: mol_type = other DNA
ctatgctgaaaggagaaaggcaaaggctacagaaaagtgaacactgaagaggaattaggcaagaacaaagcctaccaagt

SEQ ID NO: 43766 - DNA, 80 bp, synthetic construct
  source 1..80: mol_type = other DNA
ctgtctctactaaaaatacaaaattagctgggtatggtggtgcatgtctgtaatcccagctactcagtgaggctgaggca

SEQ ID NO: 43767 - DNA, 80 bp, synthetic construct
  source 1..80: mol_type = other DNA
ggagagacatgatcttacagaacgggctggacctggggagaggattttgtcagaactatggaaagtttgaaatgaggttg

SEQ ID NO: 43768 - DNA, 80 bp, synthetic construct; identical to SEQ ID NO: 11766
  source 1..80: mol_type = other DNA

SEQ ID NO: 43769 - DNA, 80 bp, synthetic construct
  source 1..80: mol_type = other DNA
ccataggctgagggctcctctgggagagggcagcttagggaagcttttacagcggatgtctgggaagaagggaaccactt

SEQ ID NO: 43770 - DNA, 80 bp, synthetic construct
  source 1..80: mol_type = other DNA
tggaaaagctaaagaaataatggggagaatagtgatattaattaaatttgtgatctgtttaaaaccattgcatagggcaa

SEQ ID NO: 43771 - DNA, 80 bp, synthetic construct
  source 1..80: mol_type = other DNA
aacagttgaggaggaatcttacaactacagtgttaaaggagacaaagggtgtttcttcattatgttgcggtgatggaaac

SEQ ID NO: 43772 - DNA, 80 bp, synthetic construct; identical to SEQ ID NO: 11767
  source 1..80: mol_type = other DNA

SEQ ID NO: 43773 - DNA, 80 bp, synthetic construct
  source 1..80: mol_type = other DNA
tcctgttacactaggcaagtctcagagaattttcaagtggaagtgaaacacactctggtgacacaggttgtagagattgt

SEQ ID NO: 43774 - DNA, 80 bp, synthetic construct
  source 1..80: mol_type = other DNA
gctggtagggggaaaaaaaaggaacacagaacacaattagattattttcaggattttcatcgcagttatatatgcaaata

SEQ ID NO: 43775 - DNA, 80 bp, synthetic construct
  source 1..80: mol_type = other DNA
attattgatttgctgttatcaaagatatagctttttcttgtaaccacaacctcacttgatcccacaaacacatatcctca

SEQ ID NO: 43776 - DNA, 80 bp, synthetic construct
  source 1..80: mol_type = other DNA
gtcctgaaggatcaaatcaaactaggattcaggaagatcatagctaaagaagactttcggcttgcacggtggctcacacc

SEQ ID NO: 43777 - DNA, 80 bp, synthetic construct; identical to SEQ ID NO: 11768
  source 1..80: mol_type = other DNA

SEQ ID NO: 43778 - DNA, 80 bp, synthetic construct
  source 1..80: mol_type = other DNA
agtatgtgtgtggagggcagggatgaggaaaatttcagaacagaatcaattcagccttgtgcagaaaggaataatgaagg

SEQ ID NO: 43779 - DNA, 80 bp, synthetic construct
  source 1..80: mol_type = other DNA
catatccttagagagtatcagagacctcagatgccaggcatctgccatgctgttgttttactctgcagtgagtcactgga

SEQ ID NO: 43780 - DNA, 80 bp, synthetic construct
  source 1..80: mol_type = other DNA
atgagtaggtttgggagttactgggaggctgtgataccaggcaggatgacaaacaaaaacagtcagccaagaaaacaagc

SEQ ID NO: 43781 - DNA, 80 bp, synthetic construct; identical to SEQ ID NO: 11769
  source 1..80: mol_type = other DNA

SEQ ID NO: 43782 - DNA, 80 bp, synthetic construct
  source 1..80: mol_type = other DNA
aaatacaaaaaattagccgggcatggtggcaggcacctgtagtcccagctactgtggaggctgaggcaggagaatggcat

SEQ ID NO: 43783 - DNA, 80 bp, synthetic construct
  source 1..80: mol_type = other DNA
tttttgcattgaactggattctgcacatatctatacacatgctccaatcccactaattcatcttttttcccaatgcccaa

SEQ ID NO: 43784 - DNA, 80 bp, synthetic construct
  source 1..80: mol_type = other DNA
aagtttactcctagaccttgataaagtgagacaatgcaaggctgcttcacaagtttttctgagcacagatccaaaaaaag

SEQ ID NO: 43785 - DNA, 80 bp, synthetic construct
  source 1..80: mol_type = other DNA
tatttgggtattcattcacaggatctgctctgctttctaacagcattaatccagagcaaacccccacttccttagacctt

SEQ ID NO: 43786 - DNA, 80 bp, synthetic construct; identical to SEQ ID NO: 11770
  source 1..80: mol_type = other DNA

SEQ ID NO: 43787 - DNA, 80 bp, synthetic construct
  source 1..80: mol_type = other DNA
gacaatagacaaataaagcaggatccctgaatttttaggaagctctcagttggggtagaggtgagaaacacacataaaca

SEQ ID NO: 43788 - DNA, 80 bp, synthetic construct
  source 1..80: mol_type = other DNA
agctaagaagaaggaacaatgaaagagggtcagggagatgtaaacagtgtggtgagtggggaattttaggcaatttggcc

SEQ ID NO: 43789 - DNA, 80 bp, synthetic construct
  source 1..80: mol_type = other DNA
tgcaacttactttaaaatgcataaaattataagatggatagaaggatgaaggaatgggtcgatggaaacatatttgataa

SEQ ID NO: 43790 - DNA, 80 bp, synthetic construct; identical to SEQ ID NO: 11771
  source 1..80: mol_type = other DNA

SEQ ID NO: 43791 - DNA, 80 bp, synthetic construct
  source 1..80: mol_type = other DNA
aacaatgagtataaaacaggcagcaggatcaggtctgggaagggggacaagatgacttcatgaccccagagtttctatag

SEQ ID NO: 43792 - DNA, 80 bp, synthetic construct
  source 1..80: mol_type = other DNA
cagctcttccaccctcctaatgacttctccactcctgccatgctttttcctcttttagcttttgaaaaccatctttctcc

SEQ ID NO: 43793 - DNA, 80 bp, synthetic construct
  source 1..80: mol_type = other DNA
tcttttccaataccattgtttcttttttatgttctcgctttcctgtgggtgacagattatggagttgtgggttgaatttt

SEQ ID NO: 43794 - DNA, 80 bp, synthetic construct; identical to SEQ ID NO: 11772
  source 1..80: mol_type = other DNA

SEQ ID NO: 43795 - DNA, 80 bp, synthetic construct
  source 1..80: mol_type = other DNA
aaagaaagaaagaaagaaagaaagaaagaaagaaagaaagaagaaagggagggaaagaaggaaggaaggaagcaaggaaa

SEQ ID NO: 43796 - DNA, 80 bp, synthetic construct
  source 1..80: mol_type = other DNA
agaggagggaaattttgacacagacacatgggagacggccatgtgaaaatgctgtcagagattggagtgaggcatctaca

SEQ ID NO: 43797 - DNA, 80 bp, synthetic construct
  source 1..80: mol_type = other DNA
gcttccaaaactgtaagagaatgtgtcattgtttcaagccacacagtctatggtgatgtgttatggaagccctaggaaac

SEQ ID NO: 43798 - DNA, 80 bp, synthetic construct; identical to SEQ ID NO: 11773
  source 1..80: mol_type = other DNA

SEQ ID NO: 43799 - DNA, 80 bp, synthetic construct
  source 1..80: mol_type = other DNA
aacatcgaatgaatggccaggactctctttgagtaaatgagcttctgagaggctcctaaagaggcgacccccatccctca

SEQ ID NO: 43800 - DNA, 80 bp, synthetic construct
  source 1..80: mol_type = other DNA
agagtgaaacgaaaaggagtgagatgctgcttctgttctcgaggacttcacagtcaacttgcggtaagtgctgcagggag

SEQ ID NO: 43801 - DNA, 80 bp, synthetic construct
  source 1..80: mol_type = other DNA
gcatggttttaatttagtaaatatttattaatcaagtaccccattctagggtccgtgctaagtgtctggggttggtagag

SEQ ID NO: 43802 - DNA, 80 bp, synthetic construct; identical to SEQ ID NO: 11774
  source 1..80: mol_type = other DNA

SEQ ID NO: 43803 - DNA, 80 bp, synthetic construct
  source 1..80: mol_type = other DNA
ctcactcccgccccgacacctgggcccgccctcccgctgcgcagccacgcgccgggcagcagcgtgggctggcgggcgac

SEQ ID NO: 43804 - DNA, 80 bp, synthetic construct
  source 1..80: mol_type = other DNA
tttactgtccagaggtcatttcgtctctgcgtttccaacctcctcgcccttttactttttttgggctcactcaggaaact

SEQ ID NO: 43805 - DNA, 80 bp, synthetic construct
  source 1..80: mol_type = other DNA
attaattttggtttctgagtattacgaagaactagaaaagttttgcgtatgtcggttttcaggatggggttcagatgggt

SEQ ID NO: 43806 - DNA, 80 bp, synthetic construct; identical to SEQ ID NO: 11775
  source 1..80: mol_type = other DNA

SEQ ID NO: 43807 - DNA, 80 bp, synthetic construct
  source 1..80: mol_type = other DNA
acatcccaaactggggcgagaagcgagtgaggaggagatgcagaggaaggcaaagaacaactctagcgacccagggtgat

SEQ ID NO: 43808 - DNA, 80 bp, synthetic construct
  source 1..80: mol_type = other DNA
tcccgggaaccgctctcgatgagcgcctggcactgggagccgctgctgtgcagctccacgaagccggtcaagggctccac

SEQ ID NO: 43809 - DNA, 80 bp, synthetic construct
  source 1..80: mol_type = other DNA
ccgcttctgcgaaccgccctgggatgcgaggttcagcgtcactatctcatcctgggaaaggatgagatccgggtgggccg

SEQ ID NO: 43810 - DNA, 80 bp, synthetic construct; identical to SEQ ID NO: 11776
  source 1..80: mol_type = other DNA

SEQ ID NO: 43811 - DNA, 80 bp, synthetic construct
  source 1..80: mol_type = other DNA
tttctgagggccagtaattttctaaagtggagttcctcaaacacagggatgagtgaaagtgttggaatacaaaaggagga

SEQ ID NO: 43812 - DNA, 80 bp, synthetic construct
  source 1..80: mol_type = other DNA
gatttatcaaatctcattaattaatttcccttgctgatatgaggggttgggagagaagggggacgtgggaatgtaaggaa

SEQ ID NO: 43813 - DNA, 80 bp, synthetic construct
  source 1..80: mol_type = other DNA
ccacagccaaagtgataagaagtcaagcgtggggcgggtggctggagattgtctcttcccctccttttgctcaagaattc

SEQ ID NO: 43814 - DNA, 80 bp, synthetic construct; identical to SEQ ID NO: 11777
  source 1..80: mol_type = other DNA

SEQ ID NO: 43815 - DNA, 80 bp, synthetic construct
  source 1..80: mol_type = other DNA
agtgggatggggctgaagagtggtgatttggtggccccgatgtagttctgccgcctttgcgggagaaggaaaggagaaaa

SEQ ID NO: 43816 - DNA, 80 bp, synthetic construct
  source 1..80: mol_type = other DNA
ccctctgtttcctggcagaggtgtaatttggggaggaactgaggaaatggaataaatgaattcattcatttattcattta

SEQ ID NO: 43817 - DNA, 80 bp, synthetic construct
  source 1..80: mol_type = other DNA
tggggagagaaaacctatttggtcttgataaccagaagctgcaaattaaaaacaaaaacaagcaccctgccatcatcaat

SEQ ID NO: 43818 - DNA, 80 bp, synthetic construct; identical to SEQ ID NO: 11778
  source 1..80: mol_type = other DNA

SEQ ID NO: 43819 - DNA, 80 bp, synthetic construct
  source 1..80: mol_type = other DNA
tggaggatagttgtggggttttgaaatattagatgcgcacatagtggtcctttaagaaatggtacttctactgttattgt

SEQ ID NO: 43820 - DNA, 80 bp, synthetic construct
  source 1..80: mol_type = other DNA
ttgtcccactttttcctccctgtctctaggagtgaagaaatacatttgtaattttctattacttctgaatacttcaaagt

SEQ ID NO: 43821 - DNA, 80 bp, synthetic construct
  source 1..80: mol_type = other DNA
agagacacaattcttccccttttctcactttccccaaatggcagaagcaaccaaccatcatttctcacttacagctcttc

SEQ ID NO: 43822 - DNA, 80 bp, synthetic construct; identical to SEQ ID NO: 11779
  source 1..80: mol_type = other DNA

SEQ ID NO: 43823 - DNA, 80 bp, synthetic construct
  source 1..80: mol_type = other DNA
tagaaagaaactagtaaaattaactttaattatatattttatttaactcaatattctcaaaatgttatttcaacatgtat

SEQ ID NO: 43824 - DNA, 80 bp, synthetic construct
  source 1..80: mol_type = other DNA
atgtggctagcagctactaaattggacagtgcagagctagcccctttctcactgcctgacaaaggtaggtgctcaggaca

SEQ ID NO: 43825 - DNA, 80 bp, synthetic construct
  source 1..80: mol_type = other DNA
cagagctcctgcaaggggaggccgagtgccttcatctcccagttcacccctgccagaagagactccttttgcaggtagag

SEQ ID NO: 43826 - DNA, 80 bp, synthetic construct; identical to SEQ ID NO: 11780
  source 1..80: mol_type = other DNA

SEQ ID NO: 43827 - DNA, 80 bp, synthetic construct
  source 1..80: mol_type = other DNA
caaccctcataataagaactgtggagattggacctgtggtataagtagactccctaccacctcctgtatttcctaggctt

SEQ ID NO: 43828 - DNA, 80 bp, synthetic construct
  source 1..80: mol_type = other DNA
tagagcacaccagtctccccaactccaaacctgatgaagtggaaagggctgggctcctttattgaaattccaaactagaa

SEQ ID NO: 43829 - DNA, 80 bp, synthetic construct
  source 1..80: mol_type = other DNA
taaaaatacaaaaaactagctgggcatggtggtgtgcgcctgtaacaccagcgacttgggaagctgaggcaggagaatcg

SEQ ID NO: 43830 - DNA, 80 bp, synthetic construct; identical to SEQ ID NO: 11781
  source 1..80: mol_type = other DNA

SEQ ID NO: 43831 - DNA, 80 bp, synthetic construct
  source 1..80: mol_type = other DNA
agattccatctagctgtctttatgcccaccttagaccaacacagtcttcacattaaggggagtccttacaaatactaacc

SEQ ID NO: 43832 - DNA, 80 bp, synthetic construct
  source 1..80: mol_type = other DNA
tccccagaatgtcactgattttgaatttattttctcttcttctgtaggcaggaggagacaccagtgtgcaccagagaagg

SEQ ID NO: 43833 - DNA, 80 bp, synthetic construct
  source 1..80: mol_type = other DNA
catatcacaaagacagaatataagaaatgcctgggaggaggcatactgatgcgtggaaagtactcagccagaagcctggc

SEQ ID NO: 43834 - DNA, 80 bp, synthetic construct; identical to SEQ ID NO: 11782
  source 1..80: mol_type = other DNA

SEQ ID NO: 43835 - DNA, 80 bp, synthetic construct
  source 1..80: mol_type = other DNA
atcacctgaggtcaggagttcaagactagcctggccaacatggtaaaacctggtctctactaaaaatatgaaaattagcc

SEQ ID NO: 43836 - DNA, 80 bp, synthetic construct
  source 1..80: mol_type = other DNA
aaaaaaaaagaagacctggcggttaagggatagtgagctgggagtcagaaagtcagggctagggatatggggcgggagtg

SEQ ID NO: 43837 - DNA, 80 bp, synthetic construct
  source 1..80: mol_type = other DNA
attcaggaaatagtagaatctgtgctgaagaaggaggaaggctgagaaaacagctggtttctttaacaaccaaccacgtg

SEQ ID NO: 43838 - DNA, 80 bp, synthetic construct; identical to SEQ ID NO: 11783
  source 1..80: mol_type = other DNA

SEQ ID NO: 43839 - DNA, 80 bp, synthetic construct
  source 1..80: mol_type = other DNA
caagaagcactgctctgccagtaagcagaaaagtgttttgacctcaagaagaactgagtgaagaagagaagagtgagatt

SEQ ID NO: 43840 - DNA, 80 bp, synthetic construct
  source 1..80: mol_type = other DNA
gagaatagatgacttgaggaggaatcatctcagcttattttaagcaccagctagacttgcactgtccaatatggtagcca

SEQ ID NO: 43841 - DNA, 80 bp, synthetic construct
  source 1..80: mol_type = other DNA
agatcacttgaggtcaggagttcgagaccatcctggccaacatggtaaaaccccgtgtctgctaagaatacaaaaattag

SEQ ID NO: 43842 - DNA, 80 bp, synthetic construct; identical to SEQ ID NO: 11784
  source 1..80: mol_type = other DNA

SEQ ID NO: 43843 - DNA, 80 bp, synthetic construct
  source 1..80: mol_type = other DNA
gttaaaatattttattaaaattaatttcacttttatcattttaatgtgactaactagaaaaatttgtaattccatatgtg

SEQ ID NO: 43844 - DNA, 80 bp, synthetic construct
  source 1..80: mol_type = other DNA
gtggtccatgctctgacctgagactagggatgggctgctacctctctgcaattctgcccccaagggactcacctccagca

SEQ ID NO: 43845 - DNA, 80 bp, synthetic construct
  source 1..80: mol_type = other DNA
taggacttgatgcaggagttcaaattctgtgaggatcctttgcttctcatgttctacctggtcctaagaaacagggacag

SEQ ID NO: 43846 - DNA, 80 bp, synthetic construct; identical to SEQ ID NO: 11785
  source 1..80: mol_type = other DNA

SEQ ID NO: 43847 - DNA, 80 bp, synthetic construct
  source 1..80: mol_type = other DNA
tcacggctcactgcagcctcatcctcccaggctcaaacaatactttcacctcccagcctctctagtagctgggactacag

SEQ ID NO: 43848 - DNA, 80 bp, synthetic construct
  source 1..80: mol_type = other DNA
tgtcttcattttctaattggggaatccgttgagggcgcagctcggccttaaaaacctgtacttgcgattctaagaccagc

SEQ ID NO: 43849 - DNA, 80 bp, synthetic construct
  source 1..80: mol_type = other DNA
taataggggattccaggagctttggcagagatgtttctgcttccagagatcgtgggatggagtttttcttaccgtgaaga

SEQ ID NO: 43850 - DNA, 80 bp, synthetic construct
  source 1..80: mol_type = other DNA
catcgaccctgtgtacaccttgtgccttcacttgtactgtctccttctccttttgctgcaagacttggatctgctcttga

SEQ ID NO: 43851 - DNA, 80 bp, synthetic construct; identical to SEQ ID NO: 11786
  source 1..80: mol_type = other DNA

SEQ ID NO: 43852 - DNA, 80 bp, synthetic construct
  source 1..80: mol_type = other DNA
ctgggcttgagcccaaaccttctgagtcaaattttcacatcctttccattctccattgcaccttgatttagagagtcagc

SEQ ID NO: 43853 - DNA, 80 bp, synthetic construct
  source 1..80: mol_type = other DNA
ctcaaatgcctacctgataattctgggcagcttcttcgatcaagctgacattatgggatttgtggtccttggattcacga

SEQ ID NO: 43854 - DNA, 80 bp, synthetic construct
  source 1..80: mol_type = other DNA
cgttcttccttacggaagttttgcagaggggacatttgaaaaatccacatgatgtttccccaatctgagtgatgcatttg

SEQ ID NO: 43855 - DNA, 80 bp, synthetic construct; identical to SEQ ID NO: 11787
  source 1..80: mol_type = other DNA

SEQ ID NO: 43856 - DNA, 80 bp, synthetic construct
  source 1..80: mol_type = other DNA
agtcctaccttgctacctcttgagaacaaatggatactttgaatgtgtaataggctgcttataaagtgaaataagttgtc

SEQ ID NO: 43857 - DNA, 80 bp, synthetic construct
  source 1..80: mol_type = other DNA
atgctttgggcatcttgtatgcaaagttcaagccttggtagagcatctggaaagtaggggaagggcaattctctacctca

SEQ ID NO: 43858 - DNA, 80 bp, synthetic construct
  source 1..80: mol_type = other DNA
ttcctttctaaagagttgttctttgtttttgcactttgctcttgcccctggtgatcttctgtctccccacaacacctgta

SEQ ID NO: 43859 - DNA, 80 bp, synthetic construct; identical to SEQ ID NO: 11788
  source 1..80: mol_type = other DNA

SEQ ID NO: 43860 - DNA, 80 bp, synthetic construct
  source 1..80: mol_type = other DNA
atagccagagtgatcatacactctgctttgcctggaaccatcctgggtttcactttgtcctggtgtaattattaatagca

SEQ ID NO: 43861 - DNA, 80 bp, synthetic construct
  source 1..80: mol_type = other DNA
gttttacttacactcctaaactgctggcccctagaagcagaatttaacttttgacaggttttgtttgactggcatgatga

SEQ ID NO: 43862 - DNA, 80 bp, synthetic construct
  source 1..80: mol_type = other DNA
tttattttgcttatattacctcatttaagtctcacctgtaagaaattatctttatcctttctcaaaaaaggaactcagta

SEQ ID NO: 43863 - DNA, 80 bp, synthetic construct; identical to SEQ ID NO: 11789
  source 1..80: mol_type = other DNA

SEQ ID NO: 43864 - DNA, 80 bp, synthetic construct
  source 1..80: mol_type = other DNA
ctggagagtttcaaagaactgtcaccaaacaggtactgatggcttcatgaggaaggaaatttagacataaaaaatgagaa

SEQ ID NO: 43865 - DNA, 80 bp, synthetic construct
  source 1..80: mol_type = other DNA
actggagtgcaatggcgtgatctcggttcactacaacctctgaatccccggttcaagtgattctcctgcctcagcctccc

SEQ ID NO: 43866 - DNA, 80 bp, synthetic construct
  source 1..80: mol_type = other DNA
gccactgtgcccagcccttgaatggatatcttaaactcttagtaggctcagtagtctgaaaccaaatgcctccaatttgc

SEQ ID NO: 43867 - DNA, 80 bp, synthetic construct; identical to SEQ ID NO: 11790
  source 1..80: mol_type = other DNA

SEQ ID NO: 43868 - DNA, 80 bp, synthetic construct
  source 1..80: mol_type = other DNA
gaagcttcccctgcctcaggattcacatttccgggcctatgtgaattggtagaatgtctatggaggaaaataatgtgata

SEQ ID NO: 43869 - DNA, 80 bp, synthetic construct
  source 1..80: mol_type = other DNA
aaatgtttaaataaattatagcccagctttataacagaatagaaataaaaaagaatcagggagttccttatttacatatg

SEQ ID NO: 43870 - DNA, 80 bp, synthetic construct
  source 1..80: mol_type = other DNA
ataagttctttctggaaggataagaatttaataactaacaatggttgtctctaaggagagggactgactagccagggaac

SEQ ID NO: 43871 - DNA, 80 bp, synthetic construct; identical to SEQ ID NO: 11791
  source 1..80: mol_type = other DNA

SEQ ID NO: 43872 - DNA, 80 bp, synthetic construct
  source 1..80: mol_type = other DNA
ggcatggtggcacacacctatagtcccagcttcttggaaggctgatgcaggaggattgcatgaacctgcgagatcgaggc

SEQ ID NO: 43873 - DNA, 80 bp, synthetic construct
  source 1..80: mol_type = other DNA
atcttaagtttaagtctggaatatcaaatatagccaaggacatggagaaataggtactcctataccctactggtgagagt

SEQ ID NO: 43874 - DNA, 80 bp, synthetic construct
  source 1..80: mol_type = other DNA
tttgcgtattaactcatttatatagagaagtattattattcccattttgaggacaagtcaacggagatcaagagagatta

SEQ ID NO: 43875 - DNA, 80 bp, synthetic construct
  source 1..80: mol_type = other DNA
tgggtgcggtggctcccgcctgtaatcccagcactttgggaggctgaggcgggcggatcacgaggtcaggagatcaagac

SEQ ID NO: 43876 - DNA, 80 bp, synthetic construct; identical to SEQ ID NO: 11792
  source 1..80: mol_type = other DNA

SEQ ID NO: 43877 - DNA, 80 bp, synthetic construct
  source 1..80: mol_type = other DNA
gaccaaatgtccctgggggacaaaacctctgatggaaaaccagtgatctgtatgtagtcatatggctaggtctcaaaaca

SEQ ID NO: 43878 - DNA, 80 bp, synthetic construct
  source 1..80: mol_type = other DNA
agagaggaatggaactaagaagagaactaaatggacagagggattctcaaatttttttgagattaaaatttaaaaaatta

SEQ ID NO: 43879 - DNA, 80 bp, synthetic construct
  source 1..80: mol_type = other DNA
atgttgaaaatgaacaatggatagaaataaaaatagaaattcagaggaattctaaaataaattctaaaattaagaaaaag

SEQ ID NO: 43880 - DNA, 80 bp, synthetic construct; identical to SEQ ID NO: 11793
  source 1..80: mol_type = other DNA

SEQ ID NO: 43881 - DNA, 80 bp, synthetic construct
  source 1..80: mol_type = other DNA
tctcccaacaagagagctagattttatttagttaaaaatagaaattagaaacaggaggtagtaaaaacagggttttcttc

SEQ ID NO: 43882 - DNA, 80 bp, synthetic construct
  source 1..80: mol_type = other DNA
ggttgcccaggctggggtgcaatggtgcaatctcagctcactgcaacctccgcctcccaggttcaagcgattctcctgcc

SEQ ID NO: 43883 - DNA, 80 bp, synthetic construct
  source 1..80: mol_type = other DNA
caggcatgagtcacagcacttagccataaaaaagttctgtttaaaataccagaatgattaaaatgtttgctttctgtttg

SEQ ID NO: 43884 - DNA, 80 bp, synthetic construct; identical to SEQ ID NO: 11794
  source 1..80: mol_type = other DNA

SEQ ID NO: 43885 - DNA, 80 bp, synthetic construct
  source 1..80: mol_type = other DNA
ctggccttcacttgactcagttatccagattatttaaattattggattggccggtggaatggttaattttatatgtcaac

SEQ ID NO: 43886 - DNA, 80 bp, synthetic construct
  source 1..80: mol_type = other DNA
atattcttgtaccacagaagtacggtgtccagagcctaacacagagctcttggtaactcactctgggaagcgcattttaa

SEQ ID NO: 43887 - DNA, 80 bp, synthetic construct
  source 1..80: mol_type = other DNA
gtctgtctctcccatggtctcaacacttctatgcagatttccgcgggctgaattgtgtccctctcacccactgctccaaa

SEQ ID NO: 43888 - DNA, 80 bp, synthetic construct; identical to SEQ ID NO: 11795
  source 1..80: mol_type = other DNA

SEQ ID NO: 43889 - DNA, 80 bp, synthetic construct
  source 1..80: mol_type = other DNA
tgtctgggttgagataaagaactgtggagagaaaagagaaaagttcctttttttttttttttttttttgagacaaggtct

SEQ ID NO: 43890 - DNA, 80 bp, synthetic construct
  source 1..80: mol_type = other DNA
ggatttctccatgttggtcaggctggtctcgaactcccgacctcaggtgatctgtctgcctcggcctcccaaagtgctgg

SEQ ID NO: 43891 - DNA, 80 bp, synthetic construct
  source 1..80: mol_type = other DNA
aaggggattctctatagaatgtagatttttcccccacaagagacaactttgcagggcaatttcaagatatggcaaggaaa

SEQ ID NO: 43892 - DNA, 80 bp, synthetic construct; identical to SEQ ID NO: 11796
  source 1..80: mol_type = other DNA

SEQ ID NO: 43893 - DNA, 80 bp, synthetic construct
  source 1..80: mol_type = other DNA
agcggcctcacaggcaacaaccttgatcttggactttcagcctccagaactttgagaaaataaattgctgttgctagagc

SEQ ID NO: 43894 - DNA, 80 bp, synthetic construct
  source 1..80: mol_type = other DNA
agcagtgctcatctcctcttctctctattgcaaacttcagtgcaggcactccacaatcctgcagctgcaatgtgagccag

SEQ ID NO: 43895 - DNA, 80 bp, synthetic construct
  source 1..80: mol_type = other DNA
aagccttaatcagactgcactttgactcacttccttgaaaccaaaagtcatgtaacactagacactgaccagtcatatcc

SEQ ID NO: 43896 - DNA, 80 bp, synthetic construct; identical to SEQ ID NO: 11797
  source 1..80: mol_type = other DNA

SEQ ID NO: 43897 - DNA, 80 bp, synthetic construct
  source 1..80: mol_type = other DNA
ctctttctctgctgcaaccaggtttcagcttactgactttctgtgcctgttgggcaacaaatctgttatggttacataag

SEQ ID NO: 43898 - DNA, 80 bp, synthetic construct
  source 1..80: mol_type = other DNA
aataaagtatacagaagccccacccactgagagccaggcagtaaatcagctaaccaaatgaatcatacattaggaggaaa

SEQ ID NO: 43899 - DNA, 80 bp, synthetic construct
  source 1..80: mol_type = other DNA
ttaacagtaaggtgccaatagttgttattgctggttggtgaaattatgggtaattatattcttttatacttttctgtgct

SEQ ID NO: 43900 - DNA, 80 bp, synthetic construct; identical to SEQ ID NO: 11798
  source 1..80: mol_type = other DNA

SEQ ID NO: 43901 - DNA, 80 bp, synthetic construct
  source 1..80: mol_type = other DNA
cttcccctgtgctggaataatctcttttccatctttccaaatttttccagctaatcagagggtggggaggagggatggat

SEQ ID NO: 43902 - DNA, 80 bp, synthetic construct
  source 1..80: mol_type = other DNA
aacatggtgaaaccttgtctctactaaaatacaaaaattagctggatgtggtggcgcatgcctgtagtcccagttactcg

SEQ ID NO: 43903 - DNA, 80 bp, synthetic construct
  source 1..80: mol_type = other DNA
agggcgggggaacaagggtggggtattgttaaaacatcgtaaaagggctccttttttgatcttgaattatgactttccta

SEQ ID NO: 43904 - DNA, 80 bp, synthetic construct; identical to SEQ ID NO: 11799
  source 1..80: mol_type = other DNA

SEQ ID NO: 43905 - DNA, 80 bp, synthetic construct
  source 1..80: mol_type = other DNA
ctcacatctgaaatcaagcctctgctgagtctgtggagtaaaaggctgatactcccttctctcctgcaagacagctgtgt

SEQ ID NO: 43906 - DNA, 80 bp, synthetic construct
  source 1..80: mol_type = other DNA
ggggtagcagtctaatccctcccaaagccaaattctagaaaaattttccaaatttaaaaaatggaaaagggaaaaatgga

SEQ ID NO: 43907 - DNA, 80 bp, synthetic construct
  source 1..80: mol_type = other DNA
gctaatttttcagttgccatactgaacagccattgtatacaggctctctatattccaatgacaacaatctttaggcaaca

SEQ ID NO: 43908 - DNA, 80 bp, synthetic construct; identical to SEQ ID NO: 11800
  source 1..80: mol_type = other DNA

SEQ ID NO: 43909 - DNA, 80 bp, synthetic construct
  source 1..80: mol_type = other DNA
tctctgtggtcacatagccgctcacgtttaattctttctaagctcacagattgaccaacacagccaccatacttgagttt

SEQ ID NO: 43910 - DNA, 80 bp, synthetic construct
  source 1..80: mol_type = other DNA
cttttatccttttgaagatagcatatacattgttatatagtctatgcccaataaccccagagtctggaagccccatgggt

SEQ ID NO: 43911 - DNA, 80 bp, synthetic construct
  source 1..80: mol_type = other DNA
tagtagctgggactacaggtgtgcaccaccacacccaactgacttttgcattttttgtagaaacggagtttcaccatgtt

SEQ ID NO: 43912 - DNA, 80 bp, synthetic construct; identical to SEQ ID NO: 11801
  source 1..80: mol_type = other DNA

SEQ ID NO: 43913 - DNA, 80 bp, synthetic construct
  source 1..80: mol_type = other DNA
ctttcctttcccaaattttggcccagcaattcctcactaacctttgaatatttaagtaagatacttaaaaatattttacc

SEQ ID NO: 43914 - DNA, 80 bp, synthetic construct
  source 1..80: mol_type = other DNA
agctttcagaaagattctcttgtctgtagtagtaaagtctgtataaagtctgcatggacttttcttgcgtacacacattg

SEQ ID NO: 43915 - DNA, 80 bp, synthetic construct
  source 1..80: mol_type = other DNA
atatattcaggctgggacctctaaaatgcagacacctaagtgctccagctttgagaattctagcttcagtgtgacaacgg

SEQ ID NO: 43916 - DNA, 80 bp, synthetic construct
  source 1..80: mol_type = other DNA
acagaggtgccaaatgctgccttagaaatctgtaagccagctaagagttctgcagtctcaactaaacaaaacttttttat

SEQ ID NO: 43917 - DNA, 80 bp, synthetic construct; identical to SEQ ID NO: 11802
  source 1..80: mol_type = other DNA

SEQ ID NO: 43918 - DNA, 80 bp, synthetic construct
  source 1..80: mol_type = other DNA
ggcccaggtgctgtgatgggtttcgtgcgcagagaggcctgacagcctctgcatcagtgaccgggcgaagagtggggcag

SEQ ID NO: 43919 - DNA, 80 bp, synthetic construct
  source 1..80: mol_type = other DNA
atcctgattacactgtcccaatttcagttgaggtgggcttttaaaagaaatcccaattcacacattcgatcaggttagtt

SEQ ID NO: 43920 - DNA, 80 bp, synthetic construct
  source 1..80: mol_type = other DNA
cccctcgggacggtcacgagcagagctcccaaggggaccgctggggactgggcgggggctctgcttctcacctgttcctt

SEQ ID NO: 43921 - DNA, 80 bp, synthetic construct; identical to SEQ ID NO: 11803
  source 1..80: mol_type = other DNA

SEQ ID NO: 43922 - DNA, 80 bp, synthetic construct
  source 1..80: mol_type = other DNA
gagccaggagaatctcttgaaccagggaggcggaggttgcagtgaggcagtgagccaagatcgttgccactacactcagg

SEQ ID NO: 43923 - DNA, 80 bp, synthetic construct
  source 1..80: mol_type = other DNA
ctgacatatcacaaacatcaaaaaatccccccaaaattctaataactgcttgaaccacccctatattttcccatttatat

SEQ ID NO: 43924 - DNA, 80 bp, synthetic construct
  source 1..80: mol_type = other DNA
gcaaatttttagtgctattaattttggagaagcctctgtgaagagtttcctatgtaagcctgagatttcagggcatttca

SEQ ID NO: 43925 - DNA, 80 bp, synthetic construct; identical to SEQ ID NO: 11804
  source 1..80: mol_type = other DNA

SEQ ID NO: 43926 - DNA, 80 bp, synthetic construct
  source 1..80: mol_type = other DNA
taaagaagagagcttccattttgactagactttgatgagactgagtaatacgcttataattttctacatctaggggttaa

SEQ ID NO: 43927 - DNA, 80 bp, synthetic construct
  source 1..80: mol_type = other DNA
tgggtggtggttcctgtaagccacttctacactgagacgggtagcaataacttgactatacatgaaagtgcttatgaacc

SEQ ID NO: 43928 - DNA, 80 bp, synthetic construct
  source 1..80: mol_type = other DNA
tttacaaaacacttagcatgaccatattgaacacattgcttggaattccagggtcttggaaagaaccagtgcaagggatg

SEQ ID NO: 43929 - DNA, 80 bp, synthetic construct; identical to SEQ ID NO: 11805
  source 1..80: mol_type = other DNA

SEQ ID NO: 43930 - DNA, 80 bp, synthetic construct
  source 1..80: mol_type = other DNA
cttaacaacctggtgaatgcctaatagcctcaatacatttcaggctgttttagttttgtttatttggttttcgtgttttg

SEQ ID NO: 43931 - DNA, 80 bp, synthetic construct
  source 1..80: mol_type = other DNA
gcccagactttggtaaccaccattgtattaatactgtctgcttctaccagttaacctttttacactctaagtgaggtcat

SEQ ID NO: 43932 - DNA, 80 bp, synthetic construct
  source 1..80: mol_type = other DNA
ctgagaactgcctcatcaaacatagagcatagcaactttcctgagatttctctaaatttcctcttattcaggtcactgtg

SEQ ID NO: 43933 - DNA, 80 bp, synthetic construct; identical to SEQ ID NO: 11806
  source 1..80: mol_type = other DNA

SEQ ID NO: 43934 - DNA, 80 bp, synthetic construct
  source 1..80: mol_type = other DNA
tgctatcagtttttaagccaccgtttaaaagacggttgccagtgccctagagtcttggcaacaatgctccaccttccgga

SEQ ID NO: 43935 - DNA, 80 bp, synthetic construct
  source 1..80: mol_type = other DNA
tggtgatggaacacttaagaatgcacagaagtttaaactcaatagggatagtaataccaagctggcatcgggcctcaggg

SEQ ID NO: 43936 - DNA, 80 bp, synthetic construct
  source 1..80: mol_type = other DNA
agccagtggagaggagaattttaaggaggggactgctgatgatctaaagtttgagtcatcagtttggatgtgaactgaga

SEQ ID NO: 43937 - DNA, 80 bp, synthetic construct; identical to SEQ ID NO: 11807
  source 1..80: mol_type = other DNA

SEQ ID NO: 43938 - DNA, 80 bp, synthetic construct
  source 1..80: mol_type = other DNA
agctgggcttccactgatgtgaagggtttggagcagctgtgtgaaagaggtaggagttaggtcttccctgctgggaaatg

SEQ ID NO: 43939 - DNA, 80 bp, synthetic construct
  source 1..80: mol_type = other DNA
tgactcagggaaataaggaccctgacagttgcgcattagtttgtagtttatgaagcacatccatttccagctatgacatt

SEQ ID NO: 43940 - DNA, 80 bp, synthetic construct
  source 1..80: mol_type = other DNA
tttagatagatggcacatttgctggctcaaaattttaaaaacacaggaaaaagtctccctcttgcccctggtttccacac

SEQ ID NO: 43941 - DNA, 80 bp, synthetic construct; identical to SEQ ID NO: 11808
  source 1..80: mol_type = other DNA

SEQ ID NO: 43942 - DNA, 80 bp, synthetic construct
  source 1..80: mol_type = other DNA
aatctcggctcactgcaagctccacctcccgggttcacgccattctcctacttcagcctcccgagtagctgggactacag

SEQ ID NO: 43943 - DNA, 80 bp, synthetic construct
  source 1..80: mol_type = other DNA
atcaatttatgttggagattattccaatagcaaaagttcccttccacaccccaccccctactaatggctgcacaatgttc

SEQ ID NO: 43944 - DNA, 80 bp, synthetic construct
  source 1..80: mol_type = other DNA
cagaattgctggctcaaagagaatgtacatttgtaatcttggaggaaattctcaaattcctactcctctaaaggaggagt

SEQ ID NO: 43945 - DNA, 80 bp, synthetic construct; identical to SEQ ID NO: 11809
  source 1..80: mol_type = other DNA

SEQ ID NO: 43946 - DNA, 80 bp, synthetic construct
  source 1..80: mol_type = other DNA
attgcacttacggttttttttcccccatgcaggtcttttttaatgtggctgaatttatctttctttccttttatggtttc

SEQ ID NO: 43947 - DNA, 80 bp, synthetic construct
  source 1..80: mol_type = other DNA
catctgtctatccatacatctaattatcaatctatctttccatctgtccattaatccatccatttatcaagcttttactg

SEQ ID NO: 43948 - DNA, 80 bp, synthetic construct
  source 1..80: mol_type = other DNA
tcttatactatttcatgagatacgacaggaacgtagattgtggaggggtcaaggattgaaggttaaaaaacagacattgt

SEQ ID NO: 43949 - DNA, 80 bp, synthetic construct; identical to SEQ ID NO: 11810
  source 1..80: mol_type = other DNA

SEQ ID NO: 43950 - DNA, 80 bp, synthetic construct
  source 1..80: mol_type = other DNA
ggctgttggtgattaactcagtccctgggctcctctcccctccccagaggtcagaggtgagactgaaagttccaaccagc

SEQ ID NO: 43951 - DNA, 80 bp, synthetic construct
  source 1..80: mol_type = other DNA
atcccagctactcgggaggctgaggcaggagattcgctggaacctgggaggcagaggttgcagtgagctgagatagtgcc

SEQ ID NO: 43952 - DNA, 80 bp, synthetic construct
  source 1..80: mol_type = other DNA
tatggttgaaaagggcttattatgaataataaaagatacactcatcagaacataaccatgtggtaagttgaggtgcatca

SEQ ID NO: 43953 - DNA, 80 bp, synthetic construct; identical to SEQ ID NO: 11811
  source 1..80: mol_type = other DNA

SEQ ID NO: 43954 - DNA, 80 bp, synthetic construct
  source 1..80: mol_type = other DNA
atcttgagtgggtgccattattctgtgacacctggatcctggggttccataagctggggttctaggatgtccattcttag

SEQ ID NO: 43955 - DNA, 80 bp, synthetic construct
  source 1..80: mol_type = other DNA
caccccccgccctgagatttactgacatatgaacacatatgattggcatgatataagaaccactcatctgctggccatct

SEQ ID NO: 43956 - DNA, 80 bp, synthetic construct
  source 1..80: mol_type = other DNA
acttctttctttgggtcatctttggtggtgatttgacaggaaggaacaaagtggcttcaaacattatacaagtctctagt

SEQ ID NO: 43957 - DNA, 80 bp, synthetic construct; identical to SEQ ID NO: 11812
  source 1..80: mol_type = other DNA

SEQ ID NO: 43958 - DNA, 80 bp, synthetic construct
  source 1..80: mol_type = other DNA
tatgaaaaataatttcaagtttaacaaacacaaggaaaccgcagggtccatgtcaaagctgatgagctatttctgaaact

SEQ ID NO: 43959 - DNA, 80 bp, synthetic construct
  source 1..80: mol_type = other DNA
ccgaagaccagtgaagaaggaggccctgcaaacaggaggctgacagggtaggaacgaggccatgatccctttgcagaagg

SEQ ID NO: 43960 - DNA, 80 bp, synthetic construct
  source 1..80: mol_type = other DNA
ttctgaggaggtgctagggacaggctatatctgccccaaccaccagaagagggtgtgcaggttctgtgaggagagcagac

SEQ ID NO: 43961 - DNA, 80 bp, synthetic construct; identical to SEQ ID NO: 11813
  source 1..80: mol_type = other DNA

SEQ ID NO: 43962 - DNA, 80 bp, synthetic construct
  source 1..80: mol_type = other DNA
taactaatgcaaaaccctttcaggactaaaactgtgtgaactcctggttgatagtactagaaacttggctagaaatgtaa

SEQ ID NO: 43963 - DNA, 80 bp, synthetic construct
  source 1..80: mol_type = other DNA
atcacaaaagttacatgctgtaggtaataaattcagaaagcactgaaaggtataaagtcaagactaaaaatttgtcttcc

SEQ ID NO: 43964 - DNA, 80 bp, synthetic construct
  source 1..80: mol_type = other DNA
aaggattctctctatatttttttctgtaactcatttttgttatctaaaagtgtggcttgaacattttctcatcagcatgt

SEQ ID NO: 43965 - DNA, 80 bp, synthetic construct
  source 1..80: mol_type = other DNA
tctaatgaatatccttcaacatatatattggaggacctagaatatccaagatatattttggtgagagcataaggtagaaa

SEQ ID NO: 43966 - DNA, 80 bp, synthetic construct; identical to SEQ ID NO: 11814
  source 1..80: mol_type = other DNA

SEQ ID NO: 43967 - DNA, 80 bp, synthetic construct
  source 1..80: mol_type = other DNA
tggacaattgacaatattttcacatggcatccttctatccaatagtgaaggctgaacttccaaagctgaggtagctttga

SEQ ID NO: 43968 - DNA, 80 bp, synthetic construct
  source 1..80: mol_type = other DNA
agtggggagggattcctcacctgccgatgaagcagcataagatggagaaatttatttcctcactaaatgattttttcagg

SEQ ID NO: 43969 - DNA, 80 bp, synthetic construct
  source 1..80: mol_type = other DNA
gacacttgttcattaagtaaaaacttagtaagttcctgctgtgtgtgagaaactgcagcatgtgctaggaatcaatgaag

SEQ ID NO: 43970 - DNA, 80 bp, synthetic construct
  source 1..80: mol_type = other DNA
ttctgtcacccaagctggagagcagtggcatgatctcggctcactgcaacctccgtctcccaggttcaagcaattctttg

SEQ ID NO: 43971 - DNA, 80 bp, synthetic construct; identical to SEQ ID NO: 11815
  source 1..80: mol_type = other DNA

SEQ ID NO: 43972 - DNA, 80 bp, synthetic construct
  source 1..80: mol_type = other DNA
atttatcattagagtttgaatcgacaggacttactgagagattagaagtgggttctttgtaagaaaaaaacaaccccatc

SEQ ID NO: 43973 - DNA, 80 bp, synthetic construct
  source 1..80: mol_type = other DNA
aaagtcagtaaacaacagattctggagacgaagtggagaaataggaacgcttttacactgttggtgggagtgtaaattag

SEQ ID NO: 43974 - DNA, 80 bp, synthetic construct
  source 1..80: mol_type = other DNA
aatagcaaagacttggaaccaacccaaatgcccatcaacgatagactggataaagaaaatatggcacatatacaccatgg

SEQ ID NO: 43975 - DNA, 80 bp, synthetic construct
  source 1..80: mol_type = other DNA
cactcgtaagtgagagttgaacaatgagaacacgtggacacagggaggggaatatcacacaccagggcctgtgaggggat

SEQ ID NO: 43976 - DNA, 80 bp, synthetic construct; identical to SEQ ID NO: 11816
  source 1..80: mol_type = other DNA

SEQ ID NO: 43977 - DNA, 80 bp, synthetic construct
  source 1..80: mol_type = other DNA
agtcttattcctagaacctagaacaaagatccatccaggcaaagacaatatttaaatccaagaaaagcgggcacggtggc

SEQ ID NO: 43978 - DNA, 80 bp, synthetic construct
  source 1..80: mol_type = other DNA
caaagtgaaattaacaggatttaaaaaaaagaacgtgacaatttggggctgggtgcagtggctcacgcctgtggtcccag

SEQ ID NO: 43979 - DNA, 80 bp, synthetic construct
  source 1..80: mol_type = other DNA
gaaacaaacaaccaagaaaccaaggaaactgatgtaattgcctcaaaagaggctagacagaaaaagaagttttggggtaa

SEQ ID NO: 43980 - DNA, 80 bp, synthetic construct
  source 1..80: mol_type = other DNA
aagggtattttaagagattataatagattgcattgaacaatgctaacacttcagtaagatggtggcagaggcatgagagc

SEQ ID NO: 43981 - DNA, 80 bp, synthetic construct; identical to SEQ ID NO: 11817
  source 1..80: mol_type = other DNA

SEQ ID NO: 43982 - DNA, 80 bp, synthetic construct
  source 1..80: mol_type = other DNA
tgagtatatttctgaagaagtgattataatggtggaccttatgtgtactcatggatattgacagcgtaattttgaaatta

SEQ ID NO: 43983 - DNA, 80 bp, synthetic construct
  source 1..80: mol_type = other DNA
tgtatacctgtttcctcactgaccagtcaatgtcagtgtcaatcactttaatgtattttgctggtttagtaagtgtgtga

SEQ ID NO: 43984 - DNA, 80 bp, synthetic construct
  source 1..80: mol_type = other DNA
gttgtgtttgtttaacctacatttttttattctgttatttcttcttaattatatttttgggcaactttttagaaatttgc

SEQ ID NO: 43985 - DNA, 80 bp, synthetic construct; identical to SEQ ID NO: 11818
  source 1..80: mol_type = other DNA

SEQ ID NO: 43986 - DNA, 80 bp, synthetic construct
  source 1..80: mol_type = other DNA
gatatttttgctgtcttttaagatgagtgcttttttacaatgtttctaaatttcatagatcattccataagattttaatg

SEQ ID NO: 43987 - DNA, 80 bp, synthetic construct
  source 1..80: mol_type = other DNA
tgagggtagctatgtattttacaacactattttttttgacaatttttacttgtagattcaaatgagattctttgctgagc

SEQ ID NO: 43988 - DNA, 80 bp, synthetic construct
  source 1..80: mol_type = other DNA
agggataggtactttttgtctgttaaccacttttcttttgtacattgtgttagcaagttgtttaagaacaaatttaatgc

SEQ ID NO: 43989 - DNA, 80 bp, synthetic construct; identical to SEQ ID NO: 11819
  source 1..80: mol_type = other DNA

SEQ ID NO: 43990 - DNA, 80 bp, synthetic construct
  source 1..80: mol_type = other DNA
actgccagatgataggactgtggctttttgaactggaccttaataggcctgactttgacaggcagaaaaataaagcactc

SEQ ID NO: 43991 - DNA, 80 bp, synthetic construct
  source 1..80: mol_type = other DNA
ggtgaaggagtttgggcttatctttgttgctgagaagccattttgaagggaggactaacatcaacaaaggtgaaatgtga

SEQ ID NO: 43992 - DNA, 80 bp, synthetic construct
  source 1..80: mol_type = other DNA
ctcacttggaagcatgagatggattgctaggaaaaaagatttggttttggaattctaagatctgaaggctccagaaagga

SEQ ID NO: 43993 - DNA, 80 bp, synthetic construct; identical to SEQ ID NO: 11820
  source 1..80: mol_type = other DNA

SEQ ID NO: 43994 - DNA, 80 bp, synthetic construct
  source 1..80: mol_type = other DNA
atgagcgacatccatgatgcccatttattacttcccactcctatgacttttttatttcgtctctgctgggaaatgcctgc

SEQ ID NO: 43995 - DNA, 80 bp, synthetic construct
  source 1..80: mol_type = other DNA
aactttcagttgtcttcaccatcccctgacttctacctgtacatctccaaaatctcctcaaaaaagattaaaaaaaaaaa

SEQ ID NO: 43996 - DNA, 80 bp, synthetic construct
  source 1..80: mol_type = other DNA
ttttgcttctcttataggtcatcaaaaacctgaaagcaaaatttttttagaaactcaaatcattctttaactccatagct

SEQ ID NO: 43997 - DNA, 80 bp, synthetic construct; identical to SEQ ID NO: 11821
  source 1..80: mol_type = other DNA

SEQ ID NO: 43998 - DNA, 80 bp, synthetic construct
  source 1..80: mol_type = other DNA
ctaaaagcatttctttttaggcagaattttacattagttgcattctgggatcaggccccctaccgtgttccattgactcc

SEQ ID NO: 43999 - DNA, 80 bp, synthetic construct
  source 1..80: mol_type = other DNA
ttttcgggttcctgggaaggactccctggagtgttctcaggagcccttacttaactattctggacatctgtctgtccctg

SEQ ID NO: 44000 - DNA, 80 bp, synthetic construct
  source 1..80: mol_type = other DNA
gtagggatcaaaggagaccagtgtctcgtcaactgaaaattactacacaagccataggcctctgtttctttttattttat

SEQ ID NO: 44001 - DNA, 80 bp, synthetic construct
  source 1..80: mol_type = other DNA
aattttttctatattttagtagagatggggtttcaccatgttagccaggatggtctcgatctcctgacctcgtgatccgc

SEQ ID NO: 44002 - DNA, 80 bp, synthetic construct; identical to SEQ ID NO: 11822
  source 1..80: mol_type = other DNA

SEQ ID NO: 44003 - DNA, 80 bp, synthetic construct
  source 1..80: mol_type = other DNA
aggctgggccggagagccagcaccaaaccagggaacagctgggtgccctccctcagcagtggctgggccagctggagcac

SEQ ID NO: 44004 - DNA, 80 bp, synthetic construct
  source 1..80: mol_type = other DNA
ggaggcagcccatctgcatcacccttctgggaggtgtaagagggaggggcctgtgtgatatgtggtgacttgtggtagat

SEQ ID NO: 44005 - DNA, 80 bp, synthetic construct
  source 1..80: mol_type = other DNA
aaggaatttggaggtgataggaacctgagaaccaattatgattctcactttttctctctcctagaatgctggtgacttac

SEQ ID NO: 44006 - DNA, 80 bp, synthetic construct; identical to SEQ ID NO: 11823
  source 1..80: mol_type = other DNA

SEQ ID NO: 44007 - DNA, 80 bp, synthetic construct
  source 1..80: mol_type = other DNA
atgtcaccatttcttcatgtccacagtcatcacctgatgcctgaccctctgactcttggacgatagccagcctccttcca

SEQ ID NO: 44008 - DNA, 80 bp, synthetic construct
  source 1..80: mol_type = other DNA
tcagcagtgacaccacctcacatgtggagcccagctgagttcctgcagtacttgttgtctgtaccactcacctggcactt

SEQ ID NO: 44009 - DNA, 80 bp, synthetic construct
  source 1..80: mol_type = other DNA
ttctaatgaatggaataaggcaaaggtgatagggtgtcactctggcaactgtgttgcattgtatagaactcctccttgct

SEQ ID NO: 44010 - DNA, 80 bp, synthetic construct; identical to SEQ ID NO: 11824
  source 1..80: mol_type = other DNA

SEQ ID NO: 44011 - DNA, 80 bp, synthetic construct
  source 1..80: mol_type = other DNA
ccctaatagctagggattataggcgcccgccaccacacccggctaattttttgtgtttttagtagagacagggtttaacc

SEQ ID NO: 44012 - DNA, 80 bp, synthetic construct
  source 1..80: mol_type = other DNA
caattgtatattagtcatttttgtataagcctcacttctttgggtgagcagggatcatattctgtctgtgtcctcatgtc

SEQ ID NO: 44013 - DNA, 80 bp, synthetic construct
  source 1..80: mol_type = other DNA
gtcaataccatactgagaggtataaggaataaaacatggccacaattataaaacaagccacgtggtggtgcaaagagtga

SEQ ID NO: 44014 - DNA, 80 bp, synthetic construct; identical to SEQ ID NO: 11825
  source 1..80: mol_type = other DNA

SEQ ID NO: 44015 - DNA, 80 bp, synthetic construct
  source 1..80: mol_type = other DNA
atttacattgggtatttctcctaatgctatccctcccccctccccccaccccaaaacaggccctggtgtgtgatgttccc

SEQ ID NO: 44016 - DNA, 80 bp, synthetic construct
  source 1..80: mol_type = other DNA
ttttttaaaaaaaccacttccccttttgaaatgaaatatggaatgataaaaaaattttaaataaattccacttcaccatc

SEQ ID NO: 44017 - DNA, 80 bp, synthetic construct
  source 1..80: mol_type = other DNA
gaggtggggattggacaagtgggagaggaaggtgagaacattctaggtcacaataaccacatgaatgaaagcatagaggt

SEQ ID NO: 44018 - DNA, 80 bp, synthetic construct; identical to SEQ ID NO: 11826
  source 1..80: mol_type = other DNA

SEQ ID NO: 44019 - DNA, 80 bp, synthetic construct
  source 1..80: mol_type = other DNA
gtgacagctagcaatttctgcatcccagatggagttaatgtcaccaagagaacttgtactaggagtaggaggagactgac

SEQ ID NO: 44020 - DNA, 80 bp, synthetic construct
  source 1..80: mol_type = other DNA
gaagaccttatcaaagagggacaatagtaattaactgaaaccatcaggtcctctcggagattcagaagggatccatgatg

SEQ ID NO: 44021 - DNA, 80 bp, synthetic construct
  source 1..80: mol_type = other DNA
gtaggtcctgggcatacaacataccactgcataatggtcatgagcacagactcgggagccaaaccacaagacttcaaatg

SEQ ID NO: 44022 - DNA, 80 bp, synthetic construct; identical to SEQ ID NO: 11827
  source 1..80: mol_type = other DNA

SEQ ID NO: 44023 - DNA, 80 bp, synthetic construct
  source 1..80: mol_type = other DNA
ttctttgcaatagaaagggttgctaccatgtaagctttgaaaaatgaggtgtaaactgtggatgttacaaatgtgcaaca

SEQ ID NO: 44024 - DNA, 80 bp, synthetic construct
  source 1..80: mol_type = other DNA
ttatcttgaagttaccaggttttaggatctatccacttcccctgtgctgactccatactccgaaagcaagtaaacttcaa

SEQ ID NO: 44025 - DNA, 80 bp, synthetic construct
  source 1..80: mol_type = other DNA
aaattgtatttctgaatccaagtcacctgtgggggtgtagccagcattaaaataatcgccaggacccatgcaggcatcta

SEQ ID NO: 44026 - DNA, 80 bp, synthetic construct
  source 1..80: mol_type = other DNA
agctgcaagccaggatcttcatacacatacattttagaggataatagtcctttcaaaagacacagctaaagccaataaaa

SEQ ID NO: 44027 - DNA, 80 bp, synthetic construct; identical to SEQ ID NO: 11828
  source 1..80: mol_type = other DNA

SEQ ID NO: 44028 - DNA, 80 bp, synthetic construct
  source 1..80: mol_type = other DNA
caaaataaaatacaatagtgacaagaacaagaaaataaaacatggtcactcttccatcccatttctcagatgtcactaca

SEQ ID NO: 44029 - DNA, 80 bp, synthetic construct
  source 1..80: mol_type = other DNA
cagatggtaatcaactgatcaggaagacaatttccctagggttgagtgtggtccctgggttatgatttatggctatacct

SEQ ID NO: 44030 - DNA, 80 bp, synthetic construct
  source 1..80: mol_type = other DNA
gttctctgctgtttcctcttcttaagatgcttcttcccctcttttccctattgaccataggcatcctttagaccaccctt

SEQ ID NO: 44031 - DNA, 80 bp, synthetic construct; identical to SEQ ID NO: 11829
  source 1..80: mol_type = other DNA

SEQ ID NO: 44032 - DNA, 80 bp, synthetic construct
  source 1..80: mol_type = other DNA
ttaaagtcatacaactggttgacaggctggttcaagaacccaggtcttctgacttcaaatccagtgccctttctatgcag

SEQ ID NO: 44033 - DNA, 80 bp, synthetic construct
  source 1..80: mol_type = other DNA
agcagtcatttctattccaagtcatccaggtgattcagccagggatcaagtccacatggtacttgggttgatatgagtcc

SEQ ID NO: 44034 - DNA, 80 bp, synthetic construct
  source 1..80: mol_type = other DNA
cccacctcatagtcaagagacaccctcacctgccggggctgctccttcagggtcagccgtgtggggaaggagcccagagc

SEQ ID NO: 44035 - DNA, 80 bp, synthetic construct; identical to SEQ ID NO: 11830
  source 1..80: mol_type = other DNA

SEQ ID NO: 44036 - DNA, 80 bp, synthetic construct
  source 1..80: mol_type = other DNA
agtgttattattaccaaaaacatgtatagtgcctacgtgggccaacagtgtggaaccacctgggaacttgttagatatac

SEQ ID NO: 44037 - DNA, 80 bp, synthetic construct
  source 1..80: mol_type = other DNA
cgtgccagcttggatctcctggggctgatataccacattctcccctcctcccatctctatcccacagtgcagcgacattt

SEQ ID NO: 44038 - DNA, 80 bp, synthetic construct
  source 1..80: mol_type = other DNA
accaccaaaaactgctgcagagccttgcgttttgttacttttagtattcataaattgagaagcttccataaatttaggtc

SEQ ID NO: 44039 - DNA, 80 bp, synthetic construct; identical to SEQ ID NO: 11831
  source 1..80: mol_type = other DNA

SEQ ID NO: 44040 - DNA, 80 bp, synthetic construct
  source 1..80: mol_type = other DNA
ggactttatcccattctgcattaatctttctatctactcgacatgcgcagatcaggatgtgagcttcataccacgaatgt

SEQ ID NO: 44041 - DNA, 80 bp, synthetic construct
  source 1..80: mol_type = other DNA
ttgttatgactattgtcatagtcataacatagtcatagtgcaaatcctgcaaaattttctctcctttccgaggacttctc

SEQ ID NO: 44042 - DNA, 80 bp, synthetic construct
  source 1..80: mol_type = other DNA
caagaagaagaatgtaagctggaatcctctagaccagtggttccaagcttgcatcagaatcatctggagctcttgttaaa

SEQ ID NO: 44043 - DNA, 80 bp, synthetic construct
  source 1..80: mol_type = other DNA
agcccaggacatagtaaatgctcaagaaatatctgcttagtgaatagagaaatgggttcatttatttattattccacttg

SEQ ID NO: 44044 - DNA, 80 bp, synthetic construct; identical to SEQ ID NO: 11832
  source 1..80: mol_type = other DNA

SEQ ID NO: 44045 - DNA, 80 bp, synthetic construct
  source 1..80: mol_type = other DNA
cagggtcaagataaatactgttgttggctattaattaacaatgttcatcatcaaaaacttatcacatattacaaatgttg

SEQ ID NO: 44046 - DNA, 80 bp, synthetic construct
  source 1..80: mol_type = other DNA
cctaataggcagattttataaaaatctgcaaataaggaaatcaaggcacaggaaggaataaggcttgccaaagtcacacc

SEQ ID NO: 44047 - DNA, 80 bp, synthetic construct
  source 1..80: mol_type = other DNA
gacacagccaccggtttccggcactttctggtttcacatctaggggcacagaaatggctgggtctgggaattatcatcct

SEQ ID NO: 44048 - DNA, 80 bp, synthetic construct; identical to SEQ ID NO: 11833
  source 1..80: mol_type = other DNA

SEQ ID NO: 44049 - DNA, 80 bp, synthetic construct
  source 1..80: mol_type = other DNA
ttttctacttttattttatttattttttatttgcttgtttgtttgtttgagaaagggtctcactctggtgcccaggctgg

SEQ ID NO: 44050 - DNA, 80 bp, synthetic construct
  source 1..80: mol_type = other DNA
tgttatgttgcccaggctcctcccacttttcttatgactggaaaagacaaaatatatttctagccctggacaggaaaagg

SEQ ID NO: 44051 - DNA, 80 bp, synthetic construct
  source 1..80: mol_type = other DNA
agtaagtctcataccaaggtctcctgtttctcagtcctaagagcatcattctaagtcatgctgcctttccaatactttgt

SEQ ID NO: 44052 - DNA, 80 bp, synthetic construct
  source 1..80: mol_type = other DNA
tcaaagtgctactttcacttccatcttactgttggatcctcacaaaagccctgtgaaatatttaaggaaagtatcttccc

SEQ ID NO: 44053 - DNA, 80 bp, synthetic construct; identical to SEQ ID NO: 11834
  source 1..80: mol_type = other DNA

SEQ ID NO: 44054 - DNA, 80 bp, synthetic construct
  source 1..80: mol_type = other DNA
attgtgctaagaggatgctctgctgttcctctagaaacttcctcaggtgtgcgaactcagaaatcacctgttgtctcttg

SEQ ID NO: 44055 - DNA, 80 bp, synthetic construct
  source 1..80: mol_type = other DNA
cttttcacttgtcatcccatttcgagaagcaagactcacagtgttgtctcagcaccatctgctgcagcttctaaaagggg

SEQ ID NO: 44056 - DNA, 80 bp, synthetic construct
  source 1..80: mol_type = other DNA
tttacagataagtaaactgaagttggagagttgcttgaggtcatagagttagtgtcagagtcaggatttaaactcataat

SEQ ID NO: 44057 - DNA, 80 bp, synthetic construct; identical to SEQ ID NO: 11835
  source 1..80: mol_type = other DNA

SEQ ID NO: 44058 - DNA, 80 bp, synthetic construct
  source 1..80: mol_type = other DNA
cttcctcttgatttgtctctaagactttggatcaggactttccccctttatcctgtgccattagaggctgtgacttggtt

SEQ ID NO: 44059 - DNA, 80 bp, synthetic construct
  source 1..80: mol_type = other DNA
tcatcccaaaggaacatgtgtaaataacaaccctcccttgttactgaaatcaattatctgtgtatgactccagaggggag

SEQ ID NO: 44060 - DNA, 80 bp, synthetic construct
  source 1..80: mol_type = other DNA
ctcactatcaactgctaattaactaattaagacatccacacacagacttgtactaaaacataattcataagcacaatgca

SEQ ID NO: 44061 - DNA, 80 bp, synthetic construct
  source 1..80: mol_type = other DNA
acttacacactcaaatatatacatactcagactcccatccaaacacaccagacacacttctaaacatgcaaacattaaca

SEQ ID NO: 44062 - DNA, 80 bp, synthetic construct; identical to SEQ ID NO: 11836
  source 1..80: mol_type = other DNA

SEQ ID NO: 44063 - DNA, 80 bp, synthetic construct
  source 1..80: mol_type = other DNA
gcacaccacgcacaactgcatctcatcatcctcacagaagaagtagatcttctctccgtgctcttggcagacatcctcct

SEQ ID NO: 44064 - DNA, 80 bp, synthetic construct
  source 1..80: mol_type = other DNA
ggtaaggcaggcccggcagaagttgtggccgcagtcgatagtgaccggctccctcagggtaccctgacagatggggcagt

SEQ ID NO: 44065 - DNA, 80 bp, synthetic construct
  source 1..80: mol_type = other DNA
aaatatgcaccagcacccatatcgtcacacacttgcatctctggcagccagggttctattctcctgccaacagcagagat

SEQ ID NO: 44066 - DNA, 80 bp, synthetic construct; identical to SEQ ID NO: 11837
  source 1..80: mol_type = other DNA

SEQ ID NO: 44067 - DNA, 80 bp, synthetic construct
  source 1..80: mol_type = other DNA
atattccctatgatggggaggagaaagaaaactactaacggccagaatttatttacaatgacggtacaacttacattgat

SEQ ID NO: 44068 - DNA, 80 bp, synthetic construct
  source 1..80: mol_type = other DNA
agcttgccctaggcacacaagtaagaaggtgagtgaccataaataatttgctgtcagatctgtcttccgagcaatgctat

SEQ ID NO: 44069 - DNA, 80 bp, synthetic construct
  source 1..80: mol_type = other DNA
attaataagatattttacatttttaaatttgtgaaaagcctttgaaatccggtgtgttggccgggcgcggtggctcacgc

SEQ ID NO: 44070 - DNA, 80 bp, synthetic construct
  source 1..80: mol_type = other DNA
tgaggcaggagaatggtgtgaacccgggaggaggagcttgcagtgagccaagatcgcgctactgcactccatcccgggag

SEQ ID NO: 44071 - DNA, 80 bp, synthetic construct; identical to SEQ ID NO: 11838
  source 1..80: mol_type = other DNA

SEQ ID NO: 44072 - DNA, 80 bp, synthetic construct
  source 1..80: mol_type = other DNA
gccaggagactgggatcgtccttaacgtgatactttctagctttgtgacctttggaaagtcactttacatttggaaagtc

SEQ ID NO: 44073 - DNA, 80 bp, synthetic construct
  source 1..80: mol_type = other DNA
gcattatggtttcttgccttctccccgctacagtaaaaataaataaataaataaataaataaataaataaataaataaat

SEQ ID NO: 44074 - DNA, 80 bp, synthetic construct
  source 1..80: mol_type = other DNA
tcgaaacagcgtcccgcccacacacttccggcagaatctcccgaagtccacacctctcactccagcctggactttgatgc

SEQ ID NO: 44075 - DNA, 80 bp, synthetic construct; identical to SEQ ID NO: 11839
  source 1..80: mol_type = other DNA

SEQ ID NO: 44076 - DNA, 80 bp, synthetic construct
  source 1..80: mol_type = other DNA
cgatttcagggaaagggaactcgcgtgggctgaggagaccggagtggacgggctggggaaggcaccgtgatgcccgcaac

SEQ ID NO: 44077 - DNA, 80 bp, synthetic construct
  source 1..80: mol_type = other DNA
ccgctctgccaagaggaggagcaggcagagactcccatggcccctgtgcccctgggcccgctgggagaaacttactgcga

SEQ ID NO: 44078 - DNA, 80 bp, synthetic construct
  source 1..80: mol_type = other DNA
ttggggcaggatgatgtcctgttatgaggggaggaaatcgggcggggatctggatgaaaggcttccacatcagggaaccc

SEQ ID NO: 44079 - DNA, 80 bp, synthetic construct; identical to SEQ ID NO: 11840
  source 1..80: mol_type = other DNA

SEQ ID NO: 44080 - DNA, 80 bp, synthetic construct
  source 1..80: mol_type = other DNA
gcctctcagatctctctcttgtcatccagtcaccaggtctggaagtggttaccttagaaacatctcccaaatctttaatt

SEQ ID NO: 44081 - DNA, 80 bp, synthetic construct
  source 1..80: mol_type = other DNA
cctcctaaaacacaaagtcactcatctgcacaaaatcctcccatgtatacctagtgcccaaagaaagtccaaggtcttta

SEQ ID NO: 44082 - DNA, 80 bp, synthetic construct
  source 1..80: mol_type = other DNA
ctgagttgtcttattcattcctgcttccaatactttttgcacatagtctcttcctcctagaatactcttctcccttcctc

SEQ ID NO: 44083 - DNA, 80 bp, synthetic construct; identical to SEQ ID NO: 11841
  source 1..80: mol_type = other DNA

SEQ ID NO: 44084 - DNA, 80 bp, synthetic construct
  source 1..80: mol_type = other DNA
ctgcaaaggacatgaacacatcttttttatgcctgcatagtattccatggcatatatgtgccatattttctttatccagt

SEQ ID NO: 44085 - DNA, 80 bp, synthetic construct; identical to SEQ ID NO: 11842
  source 1..80: mol_type = other DNA

SEQ ID NO: 44086 - DNA, 80 bp, synthetic construct
  source 1..80: mol_type = other DNA
gtcttcttttgagaagtgtctgttcatatccttcacctactttttgatggggctgtttgtttttttcttgtaaatttgtt

SEQ ID NO: 44087 - DNA, 80 bp, synthetic construct
  source 1..80: mol_type = other DNA
tgttgccattgcttttggtgttctagtcatgaagtctttgcccatgcctatgtcctgaatggtattgcctaggttttctt

SEQ ID NO: 44088 - DNA, 80 bp, synthetic construct
  source 1..80: mol_type = other DNA
cttgtttttgtcaggtttgtcaaagatcagatggttgtagatgtgtggtgttatttctgaggcccttcttctgttccatt

SEQ ID NO: 44089 - DNA, 80 bp, synthetic construct
  source 1..80: mol_type = other DNA
agtagttttttctaattctgtgaagaaagtcaatggtagcttgatagggataacactgaatctataaattactttgggca

SEQ ID NO: 44090 - DNA, 80 bp, synthetic construct; identical to SEQ ID NO: 11843
  source 1..80: mol_type = other DNA

SEQ ID NO: 44091 - DNA, 80 bp, synthetic construct
  source 1..80: mol_type = other DNA
tgcccaggatgtgatagttaataattgtgagttgaattattaattcagtcacctctatccacccattcttctccccacag

SEQ ID NO: 44092 - DNA, 80 bp, synthetic construct
  source 1..80: mol_type = other DNA
ttttcctttgaaggttttcttaagagactctggggaaacccgttggctggtatctgtttcctggctgaaaagaactgaca

SEQ ID NO: 44093 - DNA, 80 bp, synthetic construct
  source 1..80: mol_type = other DNA
ccacatagcaaagctgaagttcatgaggaacctggatttcttgacccttaattcattgttctttccatcctagtctgttt

SEQ ID NO: 44094 - DNA, 80 bp, synthetic construct; identical to SEQ ID NO: 11844
  source 1..80: mol_type = other DNA

SEQ ID NO: 44095 - DNA, 80 bp, synthetic construct
  source 1..80: mol_type = other DNA
acagtcttccccacctaactctaagaaggcatagtagggttatgatggtattgtagttgtggaaatatttttgaaaagtt

SEQ ID NO: 44096 - DNA, 80 bp, synthetic construct
  source 1..80: mol_type = other DNA
aatcaataataagtatatagatgatcatcctggaagctatctctgagccccttcctaaccatgtctgccttttatccctt

SEQ ID NO: 44097 - DNA, 80 bp, synthetic construct
  source 1..80: mol_type = other DNA
gaagtcacccggcttggagcccaggtcaaggagctggaggagaagtgtcagcagccagcaagtgagcttctacaagtgag

SEQ ID NO: 44098 - DNA, 80 bp, synthetic construct; identical to SEQ ID NO: 11845
  source 1..80: mol_type = other DNA

SEQ ID NO: 44099 - DNA, 80 bp, synthetic construct
  source 1..80: mol_type = other DNA
tcaggtccagctgataactgaaggcaggcccctgctctctaccacctcctaatcattgcagacacaacccacccccacga

SEQ ID NO: 44100 - DNA, 80 bp, synthetic construct
  source 1..80: mol_type = other DNA
gtacagaatccctgacaggaaggacttatggaaactaaatgtatgttcttgtctttcttttgcaggatgtcagagtcaac

SEQ ID NO: 44101 - DNA, 80 bp, synthetic construct
  source 1..80: mol_type = other DNA
ctcactaaagatttgcgttctaaaggttcatttttaaattgattggttggtattggggacacattttttcccctagaagt

SEQ ID NO: 44102 - DNA, 80 bp, synthetic construct; identical to SEQ ID NO: 11846
  source 1..80: mol_type = other DNA

SEQ ID NO: 44103 - DNA, 80 bp, synthetic construct
  source 1..80: mol_type = other DNA
ccatgaatcaggaagtgtctccaaacatgcttttcaaagagcattagaggtttagatctagaagggcttggaggtcttcc

SEQ ID NO: 44104 - DNA, 80 bp, synthetic construct
  source 1..80: mol_type = other DNA
tttacaaatagcagcatacacaagggtagtttaaggctgttttcaaatggtaccctgttgccctctagagaccaaaaggg

SEQ ID NO: 44105 - DNA, 80 bp, synthetic construct
  source 1..80: mol_type = other DNA
actcaatttcattattcaccacagacgccaagatcattctttagtctgattttagcctcacgtggtctcacccgaacatt

SEQ ID NO: 44106 - DNA, 80 bp, synthetic construct
  source 1..80: mol_type = other DNA
tttctcctgaccttgtcaagaagatccgtgatttccacaggaaaatactcaccctcccagagatgatgaggatgttctca

SEQ ID NO: 44107 - DNA, 80 bp, synthetic construct; identical to SEQ ID NO: 11847
  source 1..80: mol_type = other DNA

SEQ ID NO: 44108 - DNA, 80 bp, synthetic construct
  source 1..80: mol_type = other DNA
aaaacttggcgcatcatctggaaatagattcaggtaaacagcttgggatttggggagtcattcttccattcatccattca

SEQ ID NO: 44109 - DNA, 80 bp, synthetic construct
  source 1..80: mol_type = other DNA
acctgtcccataagtagctgtgaggacaaaataaattaatacatgcaaagagcttagtatattacctgactcatagtaag

SEQ ID NO: 44110 - DNA, 80 bp, synthetic construct
  source 1..80: mol_type = other DNA
agaagttgtttccataagcatcacctcactcactctggtataggtaagtgcttttcaaacttaatatgcagaaacgtctc

SEQ ID NO: 44111 - DNA, 80 bp, synthetic construct; identical to SEQ ID NO: 11848
  source 1..80: mol_type = other DNA

SEQ ID NO: 44112 - DNA, 80 bp, synthetic construct
  source 1..80: mol_type = other DNA
agtgaggtacacccggcagaagaagagcctgccagacagccccctgcgcttcgacggcctcccggcggttctgggcttcc

SEQ ID NO: 44113 - DNA, 80 bp, synthetic construct
  source 1..80: mol_type = other DNA
gtgctgggccagcacctccccgggcaccgacctgccgctgagcgagatcccgcgcggcgtgagagtcgccctggactacg

SEQ ID NO: 44114 - DNA, 80 bp, synthetic construct
  source 1..80: mol_type = other DNA
cggagacggcggctctccgggatccagctccgcccctggccagtgtgcggcccgggggctccctgtgcccgcgtgaggcg

SEQ ID NO: 44115 - DNA, 80 bp, synthetic construct; identical to SEQ ID NO: 11849
  source 1..80: mol_type = other DNA

SEQ ID NO: 44116 - DNA, 80 bp, synthetic construct
  source 1..80: mol_type = other DNA
ctggtcatttctctggacttgtagagaatgtcctaagaaagtgtgactcacagacctctggattccatgtgtccaattag

SEQ ID NO: 44117 - DNA, 80 bp, synthetic construct
  source 1..80: mol_type = other DNA
atgacagacagtgggacaatcaccaggccccattgtttaagaaaacgaggcttttgctcaggtctaactaacctctcaaa

SEQ ID NO: 44118 - DNA, 80 bp, synthetic construct
  source 1..80: mol_type = other DNA
aacctctgaaaaaaatctgccttcaactccaatccaggttccctgtagtgtaagacaataccctgtgtacaagaacactt

SEQ ID NO: 44119 - DNA, 80 bp, synthetic construct
  source 1..80: mol_type = other DNA
ttaaaaatataaaaattagctgggcgagatggcaggcgcctgtaatcccagctgctcaggaggctgaggcaggagaatca

SEQ ID NO: 44120 - DNA, 80 bp, synthetic construct; identical to SEQ ID NO: 11850
  source 1..80: mol_type = other DNA

SEQ ID NO: 44121 - DNA, 80 bp, synthetic construct
  source 1..80: mol_type = other DNA
gcgtaagccctgctcctaaagcatgggtcagatgttttaaaagcactcaaagagtttggaccatatgtgaattttattta

SEQ ID NO: 44122 - DNA, 80 bp, synthetic construct
  source 1..80: mol_type = other DNA
ctaacttgactgttggggaaatagaggttcttgatataaaagaagccagacaatgtggggtttcttctgccccccagtgt

SEQ ID NO: 44123 - DNA, 80 bp, synthetic construct
  source 1..80: mol_type = other DNA
cctctttccccacccactcaacacttccccttgccactccccatagttaaacattgatatcaattttttgtatatcctgc

SEQ ID NO: 44124 - DNA, 80 bp, synthetic construct
  source 1..80: mol_type = other DNA
tacaacaagcctgtgaaatacataagacctattttgtttttctcatgtggtggttgagaaaactggcacacagttaaatg

SEQ ID NO: 44125 - DNA, 80 bp, synthetic construct; identical to SEQ ID NO: 11851
  source 1..80: mol_type = other DNA

SEQ ID NO: 44126 - DNA, 80 bp, synthetic construct
  source 1..80: mol_type = other DNA
atattaataaattgttctgcataagaaaggaaagagaaatttagaagccaaaagaaatttgggagtggctaagacctcag

SEQ ID NO: 44127 - DNA, 80 bp, synthetic construct
  source 1..80: mol_type = other DNA
tttttgtaggtgttcctgaattccaagtgctgagttctgtccactactgggcaggaggcaaagagatcccacaaaataat

SEQ ID NO: 44128 - DNA, 80 bp, synthetic construct
  source 1..80: mol_type = other DNA
gatgacagtgagctggttgtaatgggaactagagcctaggcagatgcattgtctctctggtcggcttactttgctctgga

SEQ ID NO: 44129 - DNA, 80 bp, synthetic construct
  source 1..80: mol_type = other DNA
catacctctcagttcttggaacactatcatcatcagtccatgcaaggtcttctggtttcatttgtattttctcctctctc

SEQ ID NO: 44130 - DNA, 80 bp, synthetic construct; identical to SEQ ID NO: 11852
  source 1..80: mol_type = other DNA

SEQ ID NO: 44131 - DNA, 80 bp, synthetic construct
  source 1..80: mol_type = other DNA
tttgctaaggataacaacctccagttccattcatgtccctgcaaaggacatgatctcattcctttttatggctgtaaaat

SEQ ID NO: 44132 - DNA, 80 bp, synthetic construct
  source 1..80: mol_type = other DNA
agtaaatgagattgctgggttgaatggtatttctgcctctaggtttttgaggaattgccacacagtcttccacaatggtt

SEQ ID NO: 44133 - DNA, 80 bp, synthetic construct
  source 1..80: mol_type = other DNA
gatatttgacaaacctgacaaaaatgtctctagtagcaagtattactaatctattaattactaaactccctttaatccaa

SEQ ID NO: 44134 - DNA, 80 bp, synthetic construct; identical to SEQ ID NO: 11853
  source 1..80: mol_type = other DNA

SEQ ID NO: 44135 - DNA, 80 bp, synthetic construct
  source 1..80: mol_type = other DNA
ttgttggctaaatcattactgatgtaaagaaatgctactgacttttgcatattaattttgtagcctgaaactgtactgaa

SEQ ID NO: 44136 - DNA, 80 bp, synthetic construct
  source 1..80: mol_type = other DNA
ttcctcattcagcatgttagctatgggtttgttacatacagctcatttgagtttgaggtttgttccgtctatgcctagtg

SEQ ID NO: 44137 - DNA, 80 bp, synthetic construct
  source 1..80: mol_type = other DNA
attcatattgaaacatctttgcatctctactataaatcccacttgattttgatgtagtatttttcgatgtgctgttgggt

SEQ ID NO: 44138 - DNA, 80 bp, synthetic construct; identical to SEQ ID NO: 11854
  source 1..80: mol_type = other DNA

SEQ ID NO: 44139 - DNA, 80 bp, synthetic construct
  source 1..80: mol_type = other DNA
ttccaattttatctagttgtttataaccgtctctgatgatctttaatatttctgtgatgtcagttgtaatgtctcctttt

SEQ ID NO: 44140 - DNA, 80 bp, synthetic construct
  source 1..80: mol_type = other DNA
ttcttctgctaatttggggtttggtttgttcttgcttttctagctccttcaggtacattgttggatggttaatttgtaat

SEQ ID NO: 44141 - DNA, 80 bp, synthetic construct
  source 1..80: mol_type = other DNA
gttttgctcttgtctcccaggctggagttcaatggtgtaaactcggctaactgcaacctccacctcccgggttcaagcgg

SEQ ID NO: 44142 - DNA, 80 bp, synthetic construct; identical to SEQ ID NO: 11855
  source 1..80: mol_type = other DNA

SEQ ID NO: 44143 - DNA, 80 bp, synthetic construct
  source 1..80: mol_type = other DNA
agaaggttccatgttctgatgaaaagaatatatattctgcagttgttgaatagaatgttccgtaaatgttaggttcattt

SEQ ID NO: 44144 - DNA, 80 bp, synthetic construct
  source 1..80: mol_type = other DNA
tctggtgtttggtgtatatatatttagaactgttgaatcttcttgctggattgatccctttatcattatataatgacatt

SEQ ID NO: 44145 - DNA, 80 bp, synthetic construct
  source 1..80: mol_type = other DNA
ttcttgaaacagcttacaggtgtattatctttttaaataaatccagccattctacatctttcaagtaaagaatttattcc

SEQ ID NO: 44146 - DNA, 80 bp, synthetic construct; identical to SEQ ID NO: 11856
  source 1..80: mol_type = other DNA

SEQ ID NO: 44147 - DNA, 80 bp, synthetic construct
  source 1..80: mol_type = other DNA
atttctttttcctttatactttaatttggctggatctaatattcttggctgacagttattttctttcatcattttgtata

SEQ ID NO: 44148 - DNA, 80 bp, synthetic construct
  source 1..80: mol_type = other DNA
ctttattttgactttagacagtctaattataatgtgctatggagaagaccctttgcattgcatctgcctgggaaacattg

SEQ ID NO: 44149 - DNA, 80 bp, synthetic construct
  source 1..80: mol_type = other DNA
tcatatattcagttgctttatgctgtcccaaatatcatgaaggctttgctaatttttttatctaggcaaagtaaattgaa

SEQ ID NO: 44150 - DNA, 80 bp, synthetic construct; identical to SEQ ID NO: 11857
  source 1..80: mol_type = other DNA

SEQ ID NO: 44151 - DNA, 80 bp, synthetic construct
  source 1..80: mol_type = other DNA
acgccattctcctgcctcagcctcccgagtagctgggactacaggcacccaccaccacacccagctaattttttctattt

SEQ ID NO: 44152 - DNA, 80 bp, synthetic construct
  source 1..80: mol_type = other DNA
tagaatttcatgaatttctttctgattgataactgtagctggagaggtattgtgttcctttgttggtgtcatatttcttt

SEQ ID NO: 44153 - DNA, 80 bp, synthetic construct
  source 1..80: mol_type = other DNA
tatagtagtgtgatccctgtatgatttatttggcagtatacaacatcagtggtatctgtgacttcctcattgacttaagg

SEQ ID NO: 44154 - DNA, 80 bp, synthetic construct; identical to SEQ ID NO: 11858
  source 1..80: mol_type = other DNA

SEQ ID NO: 44155 - DNA, 80 bp, synthetic construct
  source 1..80: mol_type = other DNA
ggtggtattggtagattgagttggactgacctcagatcctgacaggaatgattcagatgccagtggtggtagattgggct

SEQ ID NO: 44156 - DNA, 80 bp, synthetic construct
  source 1..80: mol_type = other DNA
ggctggctgtggtggctgcactgtagtcctgcaaccagggaaggcagggccactctcagctggcgcatcatgagcaagta

SEQ ID NO: 44157 - DNA, 80 bp, synthetic construct
  source 1..80: mol_type = other DNA
aatgcagacccgggtggttgagctctcagaataatgactacaggtttgccaccgggagggcaggacccctctcaggtgga

SEQ ID NO: 44158 - DNA, 80 bp, synthetic construct; identical to SEQ ID NO: 11859
  source 1..80: mol_type = other DNA

SEQ ID NO: 44159 - DNA, 80 bp, synthetic construct
  source 1..80: mol_type = other DNA
ctgtagtcccaggtacttgggaggctgaggcaagagaatcgcttgaacctgggcagcggaggttgccagtaagccaagat

SEQ ID NO: 44160 - DNA, 80 bp, synthetic construct
  source 1..80: mol_type = other DNA
agctgatgtgatcttagaccttccctctcaccattctgatttcagctctcatgccatcttttcagggaactcccttctga

SEQ ID NO: 44161 - DNA, 80 bp, synthetic construct
  source 1..80: mol_type = other DNA
actgttgtaacctagaaacatcctggcacatcacgggtacttaataaatgaattcaggagacatatgaagcctggagata

SEQ ID NO: 44162 - DNA, 80 bp, synthetic construct; identical to SEQ ID NO: 11860
  source 1..80: mol_type = other DNA

SEQ ID NO: 44163 - DNA, 80 bp, synthetic construct
  source 1..80: mol_type = other DNA
taaaaaataaaaagggaaaatttacatgagcccacaacttagagaacagagaggaaatatgctctttgccactagcgtaa

SEQ ID NO: 44164 - DNA, 80 bp, synthetic construct
  source 1..80: mol_type = other DNA
ggctaacatggtgaaaccccgtctctactaaaaatacaaaaaaattagccgggcgtgatggcgggcgcctgtagttccag

SEQ ID NO: 44165 - DNA, 80 bp, synthetic construct
  source 1..80: mol_type = other DNA
tcagaaaggacaagaaaaacagttgactgtgttaggatgcaaggctgaatctctgcacattctatttcctctgaggcagt

SEQ ID NO: 44166 - DNA, 80 bp, synthetic construct; identical to SEQ ID NO: 11861
  source 1..80: mol_type = other DNA

SEQ ID NO: 44167 - DNA, 80 bp, synthetic construct
  source 1..80: mol_type = other DNA
gcactgcactaggtgccatgagaatacaagagtagtataagatgttatccgccctccaggagcttacaaaactagaggca

SEQ ID NO: 44168 - DNA, 80 bp, synthetic construct
  source 1..80: mol_type = other DNA
ggtggaggacttaaaacttggatgaacaggggctggcagagcacttggaatgggtaaggacaagactgggagatcaattt

SEQ ID NO: 44169 - DNA, 80 bp, synthetic construct
  source 1..80: mol_type = other DNA
tgtggcctcctgctgccttcctttccctgtcttcccatctccactctctcctaggaaagtggaacctggatgctggtagg

SEQ ID NO: 44170 - DNA, 80 bp, synthetic construct
  source 1..80: mol_type = other DNA
tgttctggattcttaaaactcccctcacaaggaccaatctagagataatttattgatcagtgatcacagcttgtacccca

SEQ ID NO: 44171 - DNA, 80 bp, synthetic construct; identical to SEQ ID NO: 11862
  source 1..80: mol_type = other DNA

SEQ ID NO: 44172 - DNA, 80 bp, synthetic construct
  source 1..80: mol_type = other DNA
gtgcagagctggggccaaggtcgtggtcaaaaaggaaaggagccctcatggactccagggtcagaagttccctcgggaaa

SEQ ID NO: 44173 - DNA, 80 bp, synthetic construct
  source 1..80: mol_type = other DNA
tcctggaattccaaagaagtgaagcatctgagggttggggctgggggcagatgtcagggctcagggtcttagcaggaggc

SEQ ID NO: 44174 - DNA, 80 bp, synthetic construct
  source 1..80: mol_type = other DNA
aagctcagcctcggggctggtgttggcccagatgccggaggaggagaggcgcagcgcccacacgccatcctctggccgca

SEQ ID NO: 44175 - DNA, 80 bp, synthetic construct; identical to SEQ ID NO: 11863
  source 1..80: mol_type = other DNA

SEQ ID NO: 44176 - DNA, 80 bp, synthetic construct
  source 1..80: mol_type = other DNA
ctgtgggtccagggtgacgctcactgtggggacaagggaaaaaaaaaaaaacagcatcactgttttgttttgttttttaa

SEQ ID NO: 44177 - DNA, 80 bp, synthetic construct
  source 1..80: mol_type = other DNA
attctgctaaatcaccataactaaactgctttataaacatgatatactgaaatttaacttgactgttttcgcttacgctc

SEQ ID NO: 44178 - DNA, 80 bp, synthetic construct
  source 1..80: mol_type = other DNA
taatccagaaaaaaagtcctctttttcaagtaactcttgatatgcttcttggtaatccggatcagctgcagtgaaaggaa

SEQ ID NO: 44179 - DNA, 80 bp, synthetic construct
  source 1..80: mol_type = other DNA
caattactgcactggggttctacaagcttcaagagcatctgtttcatgtctctgccacagcttgcatctataacaacatt

SEQ ID NO: 44180 - DNA, 80 bp, synthetic construct; identical to SEQ ID NO: 11864
  source 1..80: mol_type = other DNA

SEQ ID NO: 44181 - DNA, 80 bp, synthetic construct
  source 1..80: mol_type = other DNA
catctttgaagtagaaattggcggaaggtgctactctctgtgctaactgtcagatgatgtcaggtaattacacaggtgag

SEQ ID NO: 44182 - DNA, 80 bp, synthetic construct
  source 1..80: mol_type = other DNA
ggcatggtggtgggcacctgtagtcccagctacttaggaggctgaggcaggagaatggcgtgaacctgggaggcggggct

SEQ ID NO: 44183 - DNA, 80 bp, synthetic construct
  source 1..80: mol_type = other DNA
gagaccatcctggctaacacggtgaaaccccgtctctactaaaaatacaaaaaattagccgggcgaggtggcgggcgcct

SEQ ID NO: 44184 - DNA, 80 bp, synthetic construct; identical to SEQ ID NO: 11865
  source 1..80: mol_type = other DNA

SEQ ID NO: 44185 - DNA, 80 bp, synthetic construct
  source 1..80: mol_type = other DNA
agacattaataaagaagctacaaccacctaaggtttaaccactgctaactcagttctgctatgggattttatcctgtgaa

SEQ ID NO: 44186 - DNA, 80 bp, synthetic construct
  source 1..80: mol_type = other DNA
tggttggtatgcagtgtacaacctaactgcagggctgagagggggcacaatagtggggcctgtggtggatatggcctctg

SEQ ID NO: 44187 - DNA, 80 bp, synthetic construct
  source 1..80: mol_type = other DNA
ggcctctactgcagactaaagagtaggctgattagaaagtgcaaagagggaggggggcttctattgtgcagctgggaaat

SEQ ID NO: 44188 - DNA, 80 bp, synthetic construct; identical to SEQ ID NO: 11866
  source 1..80: mol_type = other DNA

SEQ ID NO: 44189 - DNA, 80 bp, synthetic construct
  source 1..80: mol_type = other DNA
ttatctgagaattctccggtcttttttttaaccactcgagcaatgggtttcccaacccagaacttcttccgtggatacct

SEQ ID NO: 44190 - DNA, 80 bp, synthetic construct
  source 1..80: mol_type = other DNA
ggcttcagaacatcagtagactccacatccagggcgctctgtctactaagccatgtttctaacctctctgctctgtccca

SEQ ID NO: 44191 - DNA, 80 bp, synthetic construct
  source 1..80: mol_type = other DNA
gggatgtgagtacctctggcaccataccactccccatgaattcaaatgcacctggtcagaagcgggggaacataaacaag

SEQ ID NO: 44192 - DNA, 80 bp, synthetic construct; identical to SEQ ID NO: 11867
  source 1..80: mol_type = other DNA

SEQ ID NO: 44193 - DNA, 80 bp, synthetic construct
  source 1..80: mol_type = other DNA
gcagggctggatatgcatggtaaggagtttcacttttgctccacgtacagtggaaacccaccaagggtttcaagtagggg

SEQ ID NO: 44194 - DNA, 80 bp, synthetic construct
  source 1..80: mol_type = other DNA
tggtcatgagactaagttccagccaatggaatgtgatagaaagcaatgaccataattctgggcattgtcctttaaaaaaa

SEQ ID NO: 44195 - DNA, 80 bp, synthetic construct
  source 1..80: mol_type = other DNA
gtgatagctctagaccctgcacctctgaactgttaactgaggcagaaataaacttctattctgtttgcgtcactgtacag

SEQ ID NO: 44196 - DNA, 80 bp, synthetic construct; identical to SEQ ID NO: 11868
  source 1..80: mol_type = other DNA

SEQ ID NO: 44197 - DNA, 80 bp, synthetic construct
  source 1..80: mol_type = other DNA
ttctgacatgctcagattcccttttgtgagtcaaaagcctccttaataccctgtattaattgatttttgccttcctttca

SEQ ID NO: 44198 - DNA, 80 bp, synthetic construct
  source 1..80: mol_type = other DNA
gctgacattctagcagggggaagcagacaataatcaatgtagcaaatacatcatactacgtgagtgatacgcaccacggg

SEQ ID NO: 44199 - DNA, 80 bp, synthetic construct
  source 1..80: mol_type = other DNA
gaataagacaagaagtcagaggcacatcccaaccccccgctatgaagcaagtgcccagagactggtagcacatttctggc

SEQ ID NO: 44200 - DNA, 80 bp, synthetic construct; identical to SEQ ID NO: 11869
  source 1..80: mol_type = other DNA

SEQ ID NO: 44201 - DNA, 80 bp, synthetic construct
  source 1..80: mol_type = other DNA
acccaagacatctgaagctgtcatgaaacaggcagagccgagcagtggggctgcggcaatgagtcatggcaagctcccgg

SEQ ID NO: 44202 - DNA, 80 bp, synthetic construct
  source 1..80: mol_type = other DNA
atccctttaatgtcttcttgatgctcccagcccataggtttgtctttcctttcctatcacctctatcaaaaggtctcttc

SEQ ID NO: 44203 - DNA, 80 bp, synthetic construct
  source 1..80: mol_type = other DNA
ggtgtgaatcaccacaccagcctcacctgtatttctctatcagacttctggaccctattttaggtctttttcttactata

SEQ ID NO: 44204 - DNA, 80 bp, synthetic construct; identical to SEQ ID NO: 11870
  source 1..80: mol_type = other DNA

SEQ ID NO: 44205 - DNA, 80 bp, synthetic construct
  source 1..80: mol_type = other DNA
tttgtagtatatatatatatatgtatatatacatatatatgtatctatatacatatatatgtgtatatatatatacatat

SEQ ID NO: 44206 - DNA, 80 bp, synthetic construct
  source 1..80: mol_type = other DNA
ctcagcctcccgagtagctgggattataggtgcgcaccatcacgcccagctaatttttgtatttttagtagagatggggt

SEQ ID NO: 44207 - DNA, 80 bp, synthetic construct
  source 1..80: mol_type = other DNA
ggattgctttggccatttggggttttttgtgactccatatgaattttagttttttttctatttttctgaagaatgtcatt

SEQ ID NO: 44208 - DNA, 80 bp, synthetic construct; identical to SEQ ID NO: 11871
  source 1..80: mol_type = other DNA

SEQ ID NO: 44209 - DNA, 80 bp, synthetic construct
  source 1..80: mol_type = other DNA
aaaacagtatgagagtttctcaaaaaactaaaaatagaactaccatatgatccagcaatctcattactaggtatttatcc

SEQ ID NO: 44210 - DNA, 80 bp, synthetic construct
  source 1..80: mol_type = other DNA
taaatttgagttcatggaagtaagacagtagaatagtaatgattagaggttgggaagggggctggggagaggagggtggg

SEQ ID NO: 44211 - DNA, 80 bp, synthetic construct
  source 1..80: mol_type = other DNA
gtgtttgaggtgacagatatactaattactctgagttgattattatatattatatacttgtatcaaagtatcactctagg

SEQ ID NO: 44212 - DNA, 80 bp, synthetic construct; identical to SEQ ID NO: 11872
  source 1..80: mol_type = other DNA

SEQ ID NO: 44213 - DNA, 80 bp, synthetic construct
  source 1..80: mol_type = other DNA
caaaaaaagaaacctaccagtaccaataacatttcctatactagtttcaagctgacaccattttctctcccttcccttga

SEQ ID NO: 44214 - DNA, 80 bp, synthetic construct
  source 1..80: mol_type = other DNA
tgttccacacagtaggcattcacacatggcaggggcgtgaggagaggaaggagaagagaaacgggcaaaaggagatgcag

SEQ ID NO: 44215 - DNA, 80 bp, synthetic construct
  source 1..80: mol_type = other DNA
ccccatggcctgggacaaactcctcccactctctggacctcagtgacttcatcagtaggggctgaactggaaggtctaaa

SEQ ID NO: 44216 - DNA, 80 bp, synthetic construct; identical to SEQ ID NO: 11873
  source 1..80: mol_type = other DNA

SEQ ID NO: 44217 - DNA, 80 bp, synthetic construct
  source 1..80: mol_type = other DNA
ctccctttctcactatcaaagccccctcctctaggaggtgccccgaggcccccttgtctgctttccatcttgttctctgt

SEQ ID NO: 44218 - DNA, 80 bp, synthetic construct
  source 1..80: mol_type = other DNA
aagtgtctgccaatgacttgttaagagggcttgtgatggcagtgatgaggatggaggatggtaaatgatattaataatct

SEQ ID NO: 44219 - DNA, 80 bp, synthetic construct
  source 1..80: mol_type = other DNA
tggcagcagtaaggattatcatctccatgtttcagatgacaaaactgagcccccaagtcttctaaggtcctgcaagtgaa

SEQ ID NO: 44220 - DNA, 80 bp, synthetic construct; identical to SEQ ID NO: 11874
  source 1..80: mol_type = other DNA

SEQ ID NO: 44221 - DNA, 80 bp, synthetic construct
  source 1..80: mol_type = other DNA
attctacaggatctggagtgggaggagctacagagggttcctggtccacactccgcttctcaaagaagactccagtaatg

SEQ ID NO: 44222 - DNA, 80 bp, synthetic construct
  source 1..80: mol_type = other DNA
tctgtcacctcttccaggaagttttgcttgattaatgtcatctaagcctgaccagccctctcttcagcaccccactgttc

SEQ ID NO: 44223 - DNA, 80 bp, synthetic construct
  source 1..80: mol_type = other DNA
tggtgctgagctgggggcagccatgcacactgagggcctggaggggtccttggacttggctgtctctagcttactgtttc

SEQ ID NO: 44224 - DNA, 80 bp, synthetic construct; identical to SEQ ID NO: 11875
  source 1..80: mol_type = other DNA

SEQ ID NO: 44225 - DNA, 80 bp, synthetic construct
  source 1..80: mol_type = other DNA
gttcagtagagacgctttttcttttttctgaatatttctgatccatggttgggtaaattcgccgctacggaacccacaga

SEQ ID NO: 44226 - DNA, 80 bp, synthetic construct
  source 1..80: mol_type = other DNA
ctcaggcaaccttgtctctctctctctctttgaaaggaagaatgaagccacaccttcttcagtcccctggcagaagagaa

SEQ ID NO: 44227 - DNA, 80 bp, synthetic construct
  source 1..80: mol_type = other DNA
actgccaggctgacacccatcctccctgtgagcagcgcctagaaacacctcccagctgccgcctacttgcccaggctcac

SEQ ID NO: 44228 - DNA, 80 bp, synthetic construct; identical to SEQ ID NO: 11876
  source 1..80: mol_type = other DNA

SEQ ID NO: 44229 - DNA, 80 bp, synthetic construct
  source 1..80: mol_type = other DNA
gcagcttctctcggtgtcgctcgcacaactttgcatcctgctgctcccgggtcacctctcccggctgcctgcccttgtcc

SEQ ID NO: 44230 - DNA, 80 bp, synthetic construct
  source 1..80: mol_type = other DNA
caatggtcacagggtcccgcaggtaatcaagacagatggagcaggtcacctcctcttccaggctccgtagtggggctgac

SEQ ID NO: 44231 - DNA, 80 bp, synthetic construct
  source 1..80: mol_type = other DNA
caccagctcctacaaggttcacacaatgtcaacgagaagaggaccttatagatctagtccaacttcctcattgtacagat

SEQ ID NO: 44232 - DNA, 80 bp, synthetic construct; identical to SEQ ID NO: 11877
  source 1..80: mol_type = other DNA

SEQ ID NO: 44233 - DNA, 80 bp, synthetic construct
  source 1..80: mol_type = other DNA
acaccattctcctgcctcagcctcccgagtagctgggactacaggcacccaccaccacacctggctaattttttgtattt

SEQ ID NO: 44234 - DNA, 80 bp, synthetic construct
  source 1..80: mol_type = other DNA
aagagaccccttttgtttgctcctcaaggtttcaggtttcaagaactaagagagggcaatgtgacatggctcaccctgta

SEQ ID NO: 44235 - DNA, 80 bp, synthetic construct
  source 1..80: mol_type = other DNA
ggaggctgtggcagaaggattacttgaatctgggaggtggaggctacagtgagccatgattgtactactacactccagac

SEQ ID NO: 44236 - DNA, 80 bp, synthetic construct; identical to SEQ ID NO: 11878
  source 1..80: mol_type = other DNA

SEQ ID NO: 44237 - DNA, 80 bp, synthetic construct
  source 1..80: mol_type = other DNA
gttccaggctgaggttatgagcctcagcacatctaacccaagagcagcctcctgcccctgactctgtgtgacaatacaga

SEQ ID NO: 44238 - DNA, 80 bp, synthetic construct
  source 1..80: mol_type = other DNA
ctggtttccaaatccagtgagtgtccaaaccacaaacaaagagttaaattcaaaagtggcagcaaaagaggaagtgagca

SEQ ID NO: 44239 - DNA, 80 bp, synthetic construct
  source 1..80: mol_type = other DNA
aacctgaattacaggcaaatcaatactattaatgattatgtatggtgaaagtccatcacaacagagttcagtggcctctg

SEQ ID NO: 44240 - DNA, 80 bp, synthetic construct; identical to SEQ ID NO: 11879
  source 1..80: mol_type = other DNA

SEQ ID NO: 44241 - DNA, 80 bp, synthetic construct
  source 1..80: mol_type = other DNA
caggtgaatcacaatgtcaggagattgagaccatcctggctaacacggtgaaaccccatctctactaaaaatacaaaaat

SEQ ID NO: 44242 - DNA, 80 bp, synthetic construct
  source 1..80: mol_type = other DNA
aaaaagaaagaaatgctaggaattgcctggtccaactccttggctttactgttgaggaaataagcctggctcagcagttt

SEQ ID NO: 44243 - DNA, 80 bp, synthetic construct
  source 1..80: mol_type = other DNA
gggttgggaacttattttgcaatttacttgcaaaataagaacaataaaaggactatgaagagctcagctacagctcttct

SEQ ID NO: 44244 - DNA, 80 bp, synthetic construct; identical to SEQ ID NO: 11880
  source 1..80: mol_type = other DNA

SEQ ID NO: 44245 - DNA, 80 bp, synthetic construct
  source 1..80: mol_type = other DNA
catgtgctttctggcatggcactatatgaatcacacaacattacctatgaagtgtttgtgccaaaaatgtttgacttgaa

SEQ ID NO: 44246 - DNA, 80 bp, synthetic construct
  source 1..80: mol_type = other DNA
ctgaaaaagtaccgatggaggaattaaaccacaccataaggaaagaaccagataaatccagaatgctggacattgcacat

SEQ ID NO: 44247 - DNA, 80 bp, synthetic construct
  source 1..80: mol_type = other DNA
ggatcctgtaaaaagaaaaaaaaggttataaaaatagtcttggaactattgtgggaaatttgtaagtaggctgggtgtta

SEQ ID NO: 44248 - DNA, 80 bp, synthetic construct
  source 1..80: mol_type = other DNA
tgcaacaacaggtgcatactaccacacttggctaatttttaaaggtttttgtagagaagagttgccactatattgcccag

SEQ ID NO: 44249 - DNA, 80 bp, synthetic construct; identical to SEQ ID NO: 11881
  source 1..80: mol_type = other DNA

SEQ ID NO: 44250 - DNA, 80 bp, synthetic construct
  source 1..80: mol_type = other DNA
atccacctgccttggcttcccaaagtgctgggattacaggtgtgagccaccgcgcccggctgagaatacctgtatttcta

SEQ ID NO: 44251 - DNA, 80 bp, synthetic construct
  source 1..80: mol_type = other DNA
ttggctcactgcaaagcaaaataaaaagctagaaaagttttctggggagggagctacagttttctatcacattcttaaag

SEQ ID NO: 44252 - DNA, 80 bp, synthetic construct
  source 1..80: mol_type = other DNA
gccataaccagataaatgaaacacagtaccacttctatgaccaatcccttcccttgcttatacagactccttctgaggaa

SEQ ID NO: 44253 - DNA, 80 bp, synthetic construct; identical to SEQ ID NO: 11882
  source 1..80: mol_type = other DNA

SEQ ID NO: 44254 - DNA, 80 bp, synthetic construct
  source 1..80: mol_type = other DNA
gaaatgaggttgagtatgagagatgtgagcagaccagaataaccgctccccttccccatacacaattctgtcaggtccaa

SEQ ID NO: 44255 - DNA, 80 bp, synthetic construct
  source 1..80: mol_type = other DNA
agaaaccaaaatcagagccaaaaaaaaaaaacctcagagatgacccactccacccccactccctttactcagatgagaat

SEQ ID NO: 44256 - DNA, 80 bp, synthetic construct
  source 1..80: mol_type = other DNA
tggatcacctgagatcgggagtttgagaccagcctgaccaacaaggagaaaccccatctctactaacaatacaaaattag

SEQ ID NO: 44257 - DNA, 80 bp, synthetic construct; identical to SEQ ID NO: 11883
  source 1..80: mol_type = other DNA

SEQ ID NO: 44258 - DNA, 80 bp, synthetic construct
  source 1..80: mol_type = other DNA
acagactggtcaaggtgacaccatgtaatttcaagatgtggatgcatgcacgattattggctccaagaataatcactatg

SEQ ID NO: 44259 - DNA, 80 bp, synthetic construct
  source 1..80: mol_type = other DNA
agtgagacattgtctccaaaaaaagaaattagctgaattagctgggtgcgatggcacatgcctatagttccagctactta

SEQ ID NO: 44260 - DNA, 80 bp, synthetic construct
  source 1..80: mol_type = other DNA
ccagagaggtgccctggtagacagtgaatcccaaatgtggactctggggcccaagaaagtaaatggagaggcctgggttt

SEQ ID NO: 44261 - DNA, 80 bp, synthetic construct
  source 1..80: mol_type = other DNA
gggtcccagattaatccccatattttaatctgagataagcaaactctccatggggtaaacttccgtgagacacctctaac

SEQ ID NO: 44262 - DNA, 80 bp, synthetic construct; identical to SEQ ID NO: 11884
  source 1..80: mol_type = other DNA

SEQ ID NO: 44263 - DNA, 80 bp, synthetic construct
  source 1..80: mol_type = other DNA
gaaccaagctctcttgtctaaaatattcctaagtgtcacttggtgctttgcaccaaatataggaaggaatcctttatcat

SEQ ID NO: 44264 - DNA, 80 bp, synthetic construct
  source 1..80: mol_type = other DNA
ttaaaaaacaaacttcccaggagattctaaagtctatccaggactgtgaatcactagaaccccttatttacagaggagga

SEQ ID NO: 44265 - DNA, 80 bp, synthetic construct
  source 1..80: mol_type = other DNA
catacactgcactttggtgcctggaaaatgaactcttccctgcccatatggagtgctgtggagggttagcctcacaggca

SEQ ID NO: 44266 - DNA, 80 bp, synthetic construct
  source 1..80: mol_type = other DNA
caagactgtgacccaggttaagaattttggactttatcctaacagccctgggaagccattgagggtttaagcagcaggat

SEQ ID NO: 44267 - DNA, 80 bp, synthetic construct; identical to SEQ ID NO: 11885
  source 1..80: mol_type = other DNA

SEQ ID NO: 44268 - DNA, 80 bp, synthetic construct
  source 1..80: mol_type = other DNA
tgtccttcctttcttctgtgaggaggctgtcccaggagatcctagctggattcccagataatcatggcccagcctgtgtc

SEQ ID NO: 44269 - DNA, 80 bp, synthetic construct
  source 1..80: mol_type = other DNA
tagcttgaagtctcagctgaaagccacctcctctggcaattctttcctgacctgtcagattgggtccacatgtagtctag

SEQ ID NO: 44270 - DNA, 80 bp, synthetic construct
  source 1..80: mol_type = other DNA
agagtagacaataaaaactgactgagaaaacaaagcacaagcacagagtatctgacacaaagaagatgcttcctacacat

SEQ ID NO: 44271 - DNA, 80 bp, synthetic construct; identical to SEQ ID NO: 11886
  source 1..80: mol_type = other DNA

SEQ ID NO: 44272 - DNA, 80 bp, synthetic construct
  source 1..80: mol_type = other DNA
catccatgtgattatgagctgattttacttaattgctgctctctaactatacaatttttaatgcagtctactgatagcca

SEQ ID NO: 44273 - DNA, 80 bp, synthetic construct
  source 1..80: mol_type = other DNA
tatgagcactcatgatgccccacagcctcaccaacacctgataatatcagctttaatttttgccactctggaggatggga

SEQ ID NO: 44274 - DNA, 80 bp, synthetic construct
  source 1..80: mol_type = other DNA
gttgtaaatgtttatctttggggagagaaggggaagggcccacccagcttctgttcttctttcccttggtaacttaccat

SEQ ID NO: 44275 - DNA, 80 bp, synthetic construct; identical to SEQ ID NO: 11887
  source 1..80: mol_type = other DNA

SEQ ID NO: 44276 - DNA, 80 bp, synthetic construct
  source 1..80: mol_type = other DNA
ctgttgtttacaatttacccagtctgtggtattctgttacagcaacagaaaatggattaagacaaatagcatcttagatt

SEQ ID NO: 44277 - DNA, 80 bp, synthetic construct
  source 1..80: mol_type = other DNA
gatcccttgaatccaggggttcaagactagcctggccaacatagggagagactgtctctaaaataaaataaataaataaa

SEQ ID NO: 44278 - DNA, 80 bp, synthetic construct
  source 1..80: mol_type = other DNA
ccaacatggtgaaacccagcctctactaaaaatacaaaaattagccgggcatggtggcacgcgcctgtagtcctagctac

SEQ ID NO: 44279 - DNA, 80 bp, synthetic construct; identical to SEQ ID NO: 11888
  source 1..80: mol_type = other DNA

SEQ ID NO: 44280 - DNA, 80 bp, synthetic construct
  source 1..80: mol_type = other DNA
tgcagctttgcatacactgtatttctacaatagcactatcacagtgcttcatacagtagcaccccccatccgctaaagat

SEQ ID NO: 44281 - DNA, 80 bp, synthetic construct
  source 1..80: mol_type = other DNA
ccgtaataaaagttatatgcatgtggtctctctctctctcaaactatcttgtactgtacttacccttcttgtgatgaagg

SEQ ID NO: 44282 - DNA, 80 bp, synthetic construct
  source 1..80: mol_type = other DNA
taattgatatttttatctgtcttctctcccaccagaatgtgaacccaaaggtcatgcctcactgacctttttatctccaa

SEQ ID NO: 44283 - DNA, 80 bp, synthetic construct; identical to SEQ ID NO: 11889
  source 1..80: mol_type = other DNA

SEQ ID NO: 44284 - DNA, 80 bp, synthetic construct
  source 1..80: mol_type = other DNA
ttcccattctctgtgtcttttctattctgatcctgggggggtccaagtctgaagtcattccaagaagcctcaatacagac

SEQ ID NO: 44285 - DNA, 80 bp, synthetic construct
  source 1..80: mol_type = other DNA
gtttaccaggctatttgaggttgaggcaaggtcacataagtacgagtgtctcattagcaaaaagctctataaaaatacta

SEQ ID NO: 44286 - DNA, 80 bp, synthetic construct
  source 1..80: mol_type = other DNA
ggaagagagaaacaaatcttccatgcagaataactgcaaacaataatatgtagatacttgccctcaagaagggggaatat

SEQ ID NO: 44287 - DNA, 80 bp, synthetic construct
  source 1..80: mol_type = other DNA
cccaaatcaatattaagtcataaatcatgttagtacatgcccttgatacgatgggatgataatggcaatctacctctgtg

SEQ ID NO: 44288 - DNA, 80 bp, synthetic construct; identical to SEQ ID NO: 11890
  source 1..80: mol_type = other DNA

SEQ ID NO: 44289 - DNA, 80 bp, synthetic construct
  source 1..80: mol_type = other DNA
taataacaggggatccggtttggagcatgtgggaagtttgtactatcttctcaattcttctgtaaatctaaaagtgttgt

SEQ ID NO: 44290 - DNA, 80 bp, synthetic construct
  source 1..80: mol_type = other DNA
gtcattctcccctcttttgaagtacacacaaatcgtgggtcaaaatttgaaatctactggagatttggaagtgtgtccct

SEQ ID NO: 44291 - DNA, 80 bp, synthetic construct
  source 1..80: mol_type = other DNA
gaaagagaaagaaagcatgacactttggtcagggagctggattagtcgcctatctaccaggctccaagcaaccggacggt

SEQ ID NO: 44292 - DNA, 80 bp, synthetic construct; identical to SEQ ID NO: 11891
  source 1..80: mol_type = other DNA

SEQ ID NO: 44293 - DNA, 80 bp, synthetic construct
  source 1..80: mol_type = other DNA
ccgtaatctcccggctattcggggcccttcgccgagatttctcccggaccagccccgggattggctcctgccgaacttcg

SEQ ID NO: 44294 - DNA, 80 bp, synthetic construct
  source 1..80: mol_type = other DNA
gggtggcctgttacacggtctaagggagtaaatgctaaggcttaggagtcacctacgtaggactcttgagagggcaataa

SEQ ID NO: 44295 - DNA, 80 bp, synthetic construct
  source 1..80: mol_type = other DNA
gcaggattttagcaagcaaatactctcagagacctatttacgaaaattattacttcctaggtaaaataacgttcaaccag

SEQ ID NO: 44296 - DNA, 80 bp, synthetic construct; identical to SEQ ID NO: 11892
  source 1..80: mol_type = other DNA

SEQ ID NO: 44297 - DNA, 80 bp, synthetic construct
  source 1..80: mol_type = other DNA
gcagcaggctgagaagaggcggcgcaggttctccgggtcagccagtgccctgctcctaagggtagagatctagctgggga

SEQ ID NO: 44298 - DNA, 80 bp, synthetic construct
  source 1..80: mol_type = other DNA
gggggtagggaaatttgcactgcatttaagcaatgtatagtggagtgggtgggacattcagaagaaaccacgcccacatt

SEQ ID NO: 44299 - DNA, 80 bp, synthetic construct
  source 1..80: mol_type = other DNA
cctacctagaccctcttgatacctgcttttttagttggtggtgtgggaagaaagtgtgtttaacatgctccttaaataat

SEQ ID NO: 44300 - DNA, 80 bp, synthetic construct
  source 1..80: mol_type = other DNA
ctactaaaaatacaaaaattagccgggcgtggtggcgcgcacctgtagtcccagctactcaggaggctgaggcaagagaa

SEQ ID NO: 44301 - DNA, 80 bp, synthetic construct; identical to SEQ ID NO: 11893
  source 1..80: mol_type = other DNA

SEQ ID NO: 44302 - DNA, 80 bp, synthetic construct
  source 1..80: mol_type = other DNA
ttgtcagtcatgtctacatctcagaaaggtcttcctccctcacccagttgaaaccagttccccatcatgcattattctgt

SEQ ID NO: 44303 - DNA, 80 bp, synthetic construct
  source 1..80: mol_type = other DNA
gtcttccatgcacatggcttccatgtaaataaatgtttgttaaatgaaatgagctcagtgtgggcatttctttttctttt

SEQ ID NO: 44304 - DNA, 80 bp, synthetic construct
  source 1..80: mol_type = other DNA
gtgtccatgtgttctcattgttcaattccccagtgtgggcatttctaaagctgcctggccctgcttggctgggtatcagt

SEQ ID NO: 44305 - DNA, 80 bp, synthetic construct; identical to SEQ ID NO: 11894
  source 1..80: mol_type = other DNA

SEQ ID NO: 44306 - DNA, 80 bp, synthetic construct
  source 1..80: mol_type = other DNA
atggaagtagctagatctgcttcgtacggttattatgaggcttaaatgtaaagctttgaaatagtgaatcagtgctgact

SEQ ID NO: 44307 - DNA, 80 bp, synthetic construct
  source 1..80: mol_type = other DNA
atgccaccccaaaatatggcaccttggaaattgagaaaatagcagaaacaggaaggtttctctgacctcttgctcctttc

SEQ ID NO: 44308 - DNA, 80 bp, synthetic construct
  source 1..80: mol_type = other DNA
agggactgccacacaggtatgccaagaagaaactgaatagacaggcctttccaacttctcagtttatcaccgttagctca

SEQ ID NO: 44309 - DNA, 80 bp, synthetic construct; identical to SEQ ID NO: 11895
  source 1..80: mol_type = other DNA

SEQ ID NO: 44310 - DNA, 80 bp, synthetic construct
  source 1..80: mol_type = other DNA
tggtaaagatgcaaagaatctgtttgaatcttttgtgtgaaggataccttggtattagggccagaatgaataaatgaata

SEQ ID NO: 44311 - DNA, 80 bp, synthetic construct
  source 1..80: mol_type = other DNA
tgtcctttttaaaaggaaaaaaaggcattttgaatgctaatagcattaactactgggttttgaacagaaagcgtaggctg

SEQ ID NO: 44312 - DNA, 80 bp, synthetic construct
  source 1..80: mol_type = other DNA
agggtctcactctgtcacccaggctagagtgcaatggtgcaatcatggctcactacagcctcgacctcctgagctaatgc

SEQ ID NO: 44313 - DNA, 80 bp, synthetic construct; identical to SEQ ID NO: 11896
  source 1..80: mol_type = other DNA

SEQ ID NO: 44314 - DNA, 80 bp, synthetic construct
  source 1..80: mol_type = other DNA
aatgaattttgttcagtggaggtatagaagatgtatgtccagtgtatgtatattcaatcttccaaattctctttgaacta

SEQ ID NO: 44315 - DNA, 80 bp, synthetic construct
  source 1..80: mol_type = other DNA
attttcattccattaatttgctggagaagccagttcatttatcccatagaatgttcccagtactggatttggttgattgc

SEQ ID NO: 44316 - DNA, 80 bp, synthetic construct
  source 1..80: mol_type = other DNA
tctctctctgctatagaggtaagcatcactctgcatttctgtgataatcattccttagcttttatttttatttacttaaa

SEQ ID NO: 44317 - DNA, 80 bp, synthetic construct
  source 1..80: mol_type = other DNA
aggtgcccgccgctatgccaggctaatttttgtatttttagtagaaacggggtttcacaatgttggaccaggctggtctc

SEQ ID NO: 44318 - DNA, 80 bp, synthetic construct; identical to SEQ ID NO: 11897
  source 1..80: mol_type = other DNA

SEQ ID NO: 44319 - DNA, 80 bp, synthetic construct
  source 1..80: mol_type = other DNA
tgcagtgagtgcatggtttagcagcacctgctcctgcagcacccaaaacttacctagtgtccagttacttcagtcacagt

SEQ ID NO: 44320 - DNA, 80 bp, synthetic construct
  source 1..80: mol_type = other DNA
agaaggctagatcccatcctctcttgttttctcaaaaatggactaaccatctataaatatctactctcctgcttcagcaa

SEQ ID NO: 44321 - DNA, 80 bp, synthetic construct
  source 1..80: mol_type = other DNA
caatggcacgatctcagctcactgcaacctccgcctctgggtttcaagtgattctcctgcttcagcctccccagtagctg

SEQ ID NO: 44322 - DNA, 80 bp, synthetic construct; identical to SEQ ID NO: 11898
  source 1..80: mol_type = other DNA

SEQ ID NO: 44323 - DNA, 80 bp, synthetic construct
  source 1..80: mol_type = other DNA
tcatcggtcactctaagcaatcgaatatttccaatatcttttattacgtgctcctaaccaatagatcactctccctctct

SEQ ID NO: 44324 - DNA, 80 bp, synthetic construct
  source 1..80: mol_type = other DNA
cctcagcctcctgagtagctgggactacaggcacgtgccaccactcccagcaaatttttttgtatttttagtagagacag

SEQ ID NO: 44325 - DNA, 80 bp, synthetic construct
  source 1..80: mol_type = other DNA
agtggcacaattatagctcactgcagcatgtgaactcccgagcccaagggatcttcccacctcagctacaggctcatacc

SEQ ID NO: 44326 - DNA, 80 bp, synthetic construct
  source 1..80: mol_type = other DNA
caaacaattctcctgcctcagcctcccaaggtagctgggattacaggtgcccgccaccacgcccagctaatatttttgta

SEQ ID NO: 44327 - DNA, 80 bp, synthetic construct; identical to SEQ ID NO: 11899
  source 1..80: mol_type = other DNA

SEQ ID NO: 44328 - DNA, 80 bp, synthetic construct
  source 1..80: mol_type = other DNA
gtcagcagataaacacgtgaacaaaggtctctggctttcctaggcagaggtccctgcagccttccacagtgtttgtgtcc

SEQ ID NO: 44329 - DNA, 80 bp, synthetic construct
  source 1..80: mol_type = other DNA
taacagcatcccaaggcagaagaatttttctcagtacagaacaaaatggagtctcctgtgtctacttctttctacacaga

SEQ ID NO: 44330 - DNA, 80 bp, synthetic construct
  source 1..80: mol_type = other DNA
cttcccagacggggcgggtgggcagaggtgctcctcacatcccagacgatgggcggccaggcagagatgctcctcacttc

SEQ ID NO: 44331 - DNA, 80 bp, synthetic construct
  source 1..80: mol_type = other DNA
ggggtggcagccaggcagaggctgtaatcttagcactttcggaggccaaggcaggcggctgggaggtggaggttgtagcg

SEQ ID NO: 44332 - DNA, 80 bp, synthetic construct; identical to SEQ ID NO: 11900
  source 1..80: mol_type = other DNA

SEQ ID NO: 44333 - DNA, 80 bp, synthetic construct
  source 1..80: mol_type = other DNA
acaggatattgtctagttttgcctatttttaaactttgtatacgtggaattgtaatgtatgtgttcttctgtgacttgtc

SEQ ID NO: 44334 - DNA, 80 bp, synthetic construct
  source 1..80: mol_type = other DNA
aacttggtttgtcttcatagttttgctgttatgaccaatgatgctatgaacattctcatacatgtaccctggcacatacc

SEQ ID NO: 44335 - DNA, 80 bp, synthetic construct
  source 1..80: mol_type = other DNA
ttccctttagtggcagatgaaattcccattaaaccacatctgcaacttcacttggaattgtcagacttttgactttttgc

SEQ ID NO: 44336 - DNA, 80 bp, synthetic construct
  source 1..80: mol_type = other DNA
ttcttctattggctatttttagttttcttttggatttgttaccaaaatgccaagggtttggtctaggttgctcactgcac

SEQ ID NO: 44337 - DNA, 80 bp, synthetic construct; identical to SEQ ID NO: 11901
  source 1..80: mol_type = other DNA

SEQ ID NO: 44338 - DNA, 80 bp, synthetic construct
  source 1..80: mol_type = other DNA
gaggggtctggtgtcttagcagatgcagtgaaaggtaagtttcagtttcctgatactaccagggagccctgatcatcaat

SEQ ID NO: 44339 - DNA, 80 bp, synthetic construct
  source 1..80: mol_type = other DNA
tctggacactaattccttgttggttatatgtgttacaaacatcttcttggagtttctggcttgttgtttctctctcttta

SEQ ID NO: 44340 - DNA, 80 bp, synthetic construct
  source 1..80: mol_type = other DNA
gctgctatagactgaatgcttgtgtccctcctaaaattcacatgttaaaacctaatcctcagtgtgatggtatttggagg

SEQ ID NO: 44341 - DNA, 80 bp, synthetic construct; identical to SEQ ID NO: 11902
  source 1..80: mol_type = other DNA

SEQ ID NO: 44342 - DNA, 80 bp, synthetic construct
  source 1..80: mol_type = other DNA
ttttttccatatggttaactaattatctcagtgtcatctaatgcacagcctctaattttccccactgttttacactgcaa

SEQ ID NO: 44343 - DNA, 80 bp, synthetic construct
  source 1..80: mol_type = other DNA
agtggagcttgtgttctgttggaggaaggcaaaccacgaacaaagtaataaaaaatttgtaatactccggatgcagtggc

SEQ ID NO: 44344 - DNA, 80 bp, synthetic construct
  source 1..80: mol_type = other DNA
gaggctgaggcaggagaatcgcttgaacctgggaggcagaggttgcagtgagccaagatcctgccactgcactccagcct

SEQ ID NO: 44345 - DNA, 80 bp, synthetic construct; identical to SEQ ID NO: 11903
  source 1..80: mol_type = other DNA

SEQ ID NO: 44346 - DNA, 80 bp, synthetic construct
  source 1..80: mol_type = other DNA
ccaggctgggtaggaccatgtggcccattctaaggactttgattctactttgagtgagatggatggcactaaaaggacaa

SEQ ID NO: 44347 - DNA, 80 bp, synthetic construct
  source 1..80: mol_type = other DNA
tcaagttcagaatacatttgaagatagaattaacacaattaggtatggtgtgataggaacaatagagacaaggattatgc

SEQ ID NO: 44348 - DNA, 80 bp, synthetic construct
  source 1..80: mol_type = other DNA
tctcgactcatttaaactactattagtggctagccttttctcttaccttccagatttctgggcaacactccactcttcct

SEQ ID NO: 44349 - DNA, 80 bp, synthetic construct; identical to SEQ ID NO: 11904
  source 1..80: mol_type = other DNA

SEQ ID NO: 44350 - DNA, 80 bp, synthetic construct
  source 1..80: mol_type = other DNA
accagtggcaaagtgcctgctttagggaaggcagcatgggacagtgaatcagagtggacactgaacctgggtccatttgt

SEQ ID NO: 44351 - DNA, 80 bp, synthetic construct
  source 1..80: mol_type = other DNA
tccagaaagtaagaggaggaacgcgtccaccctaggtacaatgcttatatatatatctttatatatatatcatatatata

SEQ ID NO: 44352 - DNA, 80 bp, synthetic construct
  source 1..80: mol_type = other DNA
aagtgcctttgttctccaggtgtcaggattatctggacattgctaaatctgggtcagtttagtaaacttttttttttttg

SEQ ID NO: 44353 - DNA, 80 bp, synthetic construct; identical to SEQ ID NO: 11905
  source 1..80: mol_type = other DNA

SEQ ID NO: 44354 - DNA, 80 bp, synthetic construct
  source 1..80: mol_type = other DNA
gctctggttggaatgcctctgacagtctttatgaatgataaaagagtgtagtcaatcataaagctctgactcactcccag

SEQ ID NO: 44355 - DNA, 80 bp, synthetic construct
  source 1..80: mol_type = other DNA
actggggaccgaggacattgcagcttctttggtgcttctagggaccagaacatagcttcttttagttatggattaggttt

SEQ ID NO: 44356 - DNA, 80 bp, synthetic construct
  source 1..80: mol_type = other DNA
ttgcaaagtgaaagtacactctgagaggcagagtgggctgctcaaagctagctcaaagctagaggcagtagttagtgcct

SEQ ID NO: 44357 - DNA, 80 bp, synthetic construct
  source 1..80: mol_type = other DNA
gtatcattagcgtataaaatccccacgtggtggtgtgttttttgctattacaatgaggaaaaggtcaccataagctaaac

SEQ ID NO: 44358 - DNA, 80 bp, synthetic construct; identical to SEQ ID NO: 11906
  source 1..80: mol_type = other DNA

SEQ ID NO: 44359 - DNA, 80 bp, synthetic construct
  source 1..80: mol_type = other DNA
cagtgtggttgcatctctttttgaaggctttaggggaaaatttgtttctgttcattctggttgcttgcagaactcaattc

SEQ ID NO: 44360 - DNA, 80 bp, synthetic construct
  source 1..80: mol_type = other DNA
tacattctgcttcttcttctttccacttttattaaagattggtgtgattagattggacctcatacggcctaataacctcc

SEQ ID NO: 44361 - DNA, 80 bp, synthetic construct
  source 1..80: mol_type = other DNA
ggtgctatcataggttctggtgatacagtaatgaaccaaacaaaggccccaaccttcatgagtttatgtctcagtgaaat

SEQ ID NO: 44362 - DNA, 80 bp, synthetic construct; identical to SEQ ID NO: 11907
  source 1..80: mol_type = other DNA

SEQ ID NO: 44363 - DNA, 80 bp, synthetic construct
  source 1..80: mol_type = other DNA
attgtgtgtcacaggggtttgttgtacagattatttcatcacccaggtaataagcgtagtacctgatgggtagttttttg

SEQ ID NO: 44364 - DNA, 80 bp, synthetic construct
  source 1..80: mol_type = other DNA
ctccagttccatccatattgctgcaaaggacacgatctcattcttttttatggctgcatagtattccatggtgtatatgt

SEQ ID NO: 44365 - DNA, 80 bp, synthetic construct
  source 1..80: mol_type = other DNA
atatatctgtcaccccccatagcttttccctgctcctttgaattcaacccatcctataatccatccccaggcaaatactg

SEQ ID NO: 44366 - DNA, 80 bp, synthetic construct; identical to SEQ ID NO: 11908
  source 1..80: mol_type = other DNA

SEQ ID NO: 44367 - DNA, 80 bp, synthetic construct
  source 1..80: mol_type = other DNA
tatggctttagttgcttgtgttaggccaaataatgactgtccccccaccaaaatgtccacattctagtccccagaatctg

SEQ ID NO: 44368 - DNA, 80 bp, synthetic construct
  source 1..80: mol_type = other DNA
tgatgggacaaagggtcagagagatgtgttatattgctgattttgaaggtggagaaacagggccataagccaaagaatgc

SEQ ID NO: 44369 - DNA, 80 bp, synthetic construct
  source 1..80: mol_type = other DNA
ataatatatattatattatcataaatttatatttatagattatacatttatatttaagcaactaagtttgtggtaatttg

SEQ ID NO: 44370 - DNA, 80 bp, synthetic construct; identical to SEQ ID NO: 11909
  source 1..80: mol_type = other DNA

SEQ ID NO: 44371 - DNA, 80 bp, synthetic construct
  source 1..80: mol_type = other DNA
agaagtcaggctgcaaaatctgtacggggcaatcctaagaaatgagtactcctcacttcttcttatattggctatggtag

SEQ ID NO: 44372 - DNA, 80 bp, synthetic construct
  source 1..80: mol_type = other DNA
attgagagggcaaggataatttaggattcctacccagtaagatttaatcattgctgtgggccaatgattgtgtgtttctg

SEQ ID NO: 44373 - DNA, 80 bp, synthetic construct
  source 1..80: mol_type = other DNA
acctaaagatcctggattttgagctggatgtcataactggatgagatatttccctagggggtgaggtgagttttttctaa

SEQ ID NO: 44374 - DNA, 80 bp, synthetic construct; identical to SEQ ID NO: 11910
  source 1..80: mol_type = other DNA

SEQ ID NO: 44375 - DNA, 80 bp, synthetic construct
  source 1..80: mol_type = other DNA
ggaaataaactattttgtttgagtcatctcatttacagttttctccattattacagttttgttttctaccctaacatgca

SEQ ID NO: 44376 - DNA, 80 bp, synthetic construct
  source 1..80: mol_type = other DNA
caaacacttaaatactttaaaaacctgaaatatttctcgaatacatacattgatcatcataaagttatcatccctccggg

SEQ ID NO: 44377 - DNA, 80 bp, synthetic construct
  source 1..80: mol_type = other DNA
gcctcctgagtagctgcgattacaggcacacaccaccaccccagctattttttgtattttagtagagatggggtttcacc

SEQ ID NO: 44378 - DNA, 80 bp, synthetic construct; identical to SEQ ID NO: 11911
  source 1..80: mol_type = other DNA

SEQ ID NO: 44379 - DNA, 80 bp, synthetic construct
  source 1..80: mol_type = other DNA
ctggataactacatgggaaataatatttaaagttgggcacaattccaactgtatagcatgataaactccaaatgggtcaa

SEQ ID NO: 44380 - DNA, 80 bp, synthetic construct
  source 1..80: mol_type = other DNA
aaagcagttccgagtagcagaaaatatcataaaaaatcaaaagacaaatgaaaaacttatagaaatattttcatgcatat

SEQ ID NO: 44381 - DNA, 80 bp, synthetic construct
  source 1..80: mol_type = other DNA
tctgtctgctgaaatcctttttccttttttctgtctcgggaactgtgaagaaactcagaaaaggaaacaaaaatagttat

SEQ ID NO: 44382 - DNA, 80 bp, synthetic construct; identical to SEQ ID NO: 11912
  source 1..80: mol_type = other DNA

SEQ ID NO: 44383 - DNA, 80 bp, synthetic construct
  source 1..80: mol_type = other DNA
cacgaacaatggaatattatgcaatgaaaatctaatcacaacgcaggaggtctctgtgtgcttttggtaagatctccaag

SEQ ID NO: 44384 - DNA, 80 bp, synthetic construct
  source 1..80: mol_type = other DNA
aaactggacagattgtggacaggattctgagtgagatccttcactgttcagtctcctttgcatcagtaagtgtctcttaa

SEQ ID NO: 44385 - DNA, 80 bp, synthetic construct
  source 1..80: mol_type = other DNA
acaatgctgtgcacaatgccgttgactccttctccactttactcattttagctacattctctatcctgaagtgcttacta

SEQ ID NO: 44386 - DNA, 80 bp, synthetic construct; identical to SEQ ID NO: 11913
  source 1..80: mol_type = other DNA

SEQ ID NO: 44387 - DNA, 80 bp, synthetic construct
  source 1..80: mol_type = other DNA
ttatcctctatagcttctcatggtgatgtccctccaccttgtctccataaagcagcagcttccatctttccttatcccct

SEQ ID NO: 44388 - DNA, 80 bp, synthetic construct
  source 1..80: mol_type = other DNA
tgcctcagcctcctgggtagctgggactacaggcacgtgccaccatgcctggctaattttttgtatttttagtagagacg

SEQ ID NO: 44389 - DNA, 80 bp, synthetic construct
  source 1..80: mol_type = other DNA
gtgcagtggtgagatctcggctcactgcaacctctgcctcccaggttcaagcgattctcttgcctcagtctcccgagcag

SEQ ID NO: 44390 - DNA, 80 bp, synthetic construct; identical to SEQ ID NO: 11914
  source 1..80: mol_type = other DNA

SEQ ID NO: 44391 - DNA, 80 bp, synthetic construct
  source 1..80: mol_type = other DNA
ttccatatgaattcaaggacctgcttttccatatctgtttaaaaggctgttgaaattttgatagagattaattgagtctg

SEQ ID NO: 44392 - DNA, 80 bp, synthetic construct
  source 1..80: mol_type = other DNA
ttctcggtctctggtaaccgctattctcctcttcccttctatgagatcagcttttgcagttccacatatgagtgaaatca

SEQ ID NO: 44393 - DNA, 80 bp, synthetic construct
  source 1..80: mol_type = other DNA
actttggttaatttcatatcttggctattgtgaatagcgctgcagtgaacatgggagtgcatgtatctctttgacgtacc

SEQ ID NO: 44394 - DNA, 80 bp, synthetic construct
  source 1..80: mol_type = other DNA
gctattggtacgtgttcctgaggaataggaagaatgagagagatagtggatttggatgtgtgagtttaaggtgcaagatt

SEQ ID NO: 44395 - DNA, 80 bp, synthetic construct; identical to SEQ ID NO: 11915
  source 1..80: mol_type = other DNA

SEQ ID NO: 44396 - DNA, 80 bp, synthetic construct
  source 1..80: mol_type = other DNA
aaattagtttaaaccatgatgaagagatttctcaggcagtgtatgaataacagacctgtggatgaacctagtgcattctt

SEQ ID NO: 44397 - DNA, 80 bp, synthetic construct
  source 1..80: mol_type = other DNA
ggctaatttttgtatttttagtagagacggggtttcaccgtgttagccaggatggtctcgacctcctgactttgtgatcc

SEQ ID NO: 44398 - DNA, 80 bp, synthetic construct
  source 1..80: mol_type = other DNA
caggaaatatattttactgagctgatctactgagaggtgggcacaaatcctttagactttattgaaaaattagttgtcca

SEQ ID NO: 44399 - DNA, 80 bp, synthetic construct; identical to SEQ ID NO: 11916
  source 1..80: mol_type = other DNA

SEQ ID NO: 44400 - DNA, 80 bp, synthetic construct
  source 1..80: mol_type = other DNA
cactgcaagccagaacgtgttctgagtagtgctctggaagggactttggattttgagaaaaaaggttgggagcagtttga

SEQ ID NO: 44401 - DNA, 80 bp, synthetic construct
  source 1..80: mol_type = other DNA
aatctggaggatgaggttctccatctgtcttgactacttgagagacccagtgaccattgactgtggtcatgtcttttgct

SEQ ID NO: 44402 - DNA, 80 bp, synthetic construct
  source 1..80: mol_type = other DNA
atttggagaatgaaggtagatgaggagagacaacccagagaggaaagaccacctgagcaaaaagcagagaagctgtgtag

SEQ ID NO: 44403 - DNA, 80 bp, synthetic construct; identical to SEQ ID NO: 11917
  source 1..80: mol_type = other DNA

SEQ ID NO: 44404 - DNA, 80 bp, synthetic construct
  source 1..80: mol_type = other DNA
tcaaagatctattcttttagtaaatttgaagtatacaatacagtgtttttagctataggcattatgctatatagtaggtc

SEQ ID NO: 44405 - DNA, 80 bp, synthetic construct
  source 1..80: mol_type = other DNA
ctggcatattcacttagcataatgttctcaaggtccatccatgttgttaccaatggcagaatttccttctctttaaggct

SEQ ID NO: 44406 - DNA, 80 bp, synthetic construct
  source 1..80: mol_type = other DNA
tagttctgtttttaattatttgaggagcttcttactgtttttataatggctgtaccagtttgcatttccaccaacagcgt

SEQ ID NO: 44407 - DNA, 80 bp, synthetic construct; identical to SEQ ID NO: 11918
  source 1..80: mol_type = other DNA

SEQ ID NO: 44408 - DNA, 80 bp, synthetic construct
  source 1..80: mol_type = other DNA
gagaccatcctggcacacacagtgaaatcctgtctctactaaaaatacaaaaaattagccgggcgtggtggcgggcgcct

SEQ ID NO: 44409 - DNA, 80 bp, synthetic construct
  source 1..80: mol_type = other DNA
tgtataaaatctatgtaatttttctttcagaatttaacaaggaaaatattatttcctctggggtcctagtatgtttcttc

SEQ ID NO: 44410 - DNA, 80 bp, synthetic construct
  source 1..80: mol_type = other DNA
ggcatggtggcatgcacctgtaatcccagctacttgggaggctgaggcaagagaatcgcttgaacccaggaagcggagct

SEQ ID NO: 44411 - DNA, 80 bp, synthetic construct; identical to SEQ ID NO: 11919
  source 1..80: mol_type = other DNA

SEQ ID NO: 44412 - DNA, 80 bp, synthetic construct
  source 1..80: mol_type = other DNA
cactatgttgccaaggtatgccctcaaagacttgggctcaagagatacttcacccttattttcccaaatagctgggacta

SEQ ID NO: 44413 - DNA, 80 bp, synthetic construct
  source 1..80: mol_type = other DNA
acttctaagaaattgctctaggccattgtatcactcaatggatcttccttattaactagaatggaaattgttccacacaa

SEQ ID NO: 44414 - DNA, 80 bp, synthetic construct
  source 1..80: mol_type = other DNA
ccattattaaactacacatggtcaaatgcagttggatttcactctggaatcactttgcatctcccttttttcattgaggt

SEQ ID NO: 44415 - DNA, 80 bp, synthetic construct
  source 1..80: mol_type = other DNA
tcctgcctcagcctcccaagtagttggaattacaggtgctcaccaccatgcccagctaatttttgtattttttagtagag

SEQ ID NO: 44416 - DNA, 80 bp, synthetic construct; identical to SEQ ID NO: 11920
  source 1..80: mol_type = other DNA

SEQ ID NO: 44417 - DNA, 80 bp, synthetic construct
  source 1..80: mol_type = other DNA
gttctgaactcatcctcagaagatctcacacatgttctggtgttccctagcctctcaaaaaggtcacttttctctttctg

SEQ ID NO: 44418 - DNA, 80 bp, synthetic construct
  source 1..80: mol_type = other DNA
ttgtatcagtgtttgaatagggccatcggtttttgagagaaagggaacagtacctgttggagcagctggtagggctagag

SEQ ID NO: 44419 - DNA, 80 bp, synthetic construct
  source 1..80: mol_type = other DNA
atgactacggtgtggcctatttgcaagagatttggaccaagagtcaagagagacaaggtgttattctcatttactgaatt

SEQ ID NO: 44420 - DNA, 80 bp, synthetic construct
  source 1..80: mol_type = other DNA
acaagaattctggaaacagctagtgtttagtcagagaagccttcaaagaagaggcttttgatgttggccttgaaggaaac

SEQ ID NO: 44421 - DNA, 80 bp, synthetic construct; identical to SEQ ID NO: 11921
  source 1..80: mol_type = other DNA

SEQ ID NO: 44422 - DNA, 80 bp, synthetic construct
  source 1..80: mol_type = other DNA
gggagaagtgaaaattatgatggggccaactgagttgaggccttccaaagcaggctgaaatttgagccttaactgaatag

SEQ ID NO: 44423 - DNA, 80 bp, synthetic construct
  source 1..80: mol_type = other DNA
ctttgggaggccaaggcaggcagatcatgaggtcaggagatcgagaccatcctggctaacacagtgaaaccgcgtctcta

SEQ ID NO: 44424 - DNA, 80 bp, synthetic construct
  source 1..80: mol_type = other DNA
catctcaaaaaaaaaaagaaagaaactgcaggctgggagtagtggctcatgcctataatcccagcactgtgggaggctga

SEQ ID NO: 44425 - DNA, 80 bp, synthetic construct
  source 1..80: mol_type = other DNA
acagaggttgcagtgagccaagatcacaccactgcactccagcctgggtgacagagtgagactccatctcaaatgaaaaa

SEQ ID NO: 44426 - DNA, 80 bp, synthetic construct; identical to SEQ ID NO: 11922
  source 1..80: mol_type = other DNA

SEQ ID NO: 44427 - DNA, 80 bp, synthetic construct
  source 1..80: mol_type = other DNA
atagaggagggagttctagaaaaaaatattgtcatggaacttacgatggtaatgggctgagaaaaataaaatgagaggag

SEQ ID NO: 44428 - DNA, 80 bp, synthetic construct
  source 1..80: mol_type = other DNA
tgatagtgaggtttcctgcattctggttgtccatagaaagcaaacacttctatggctcacagggataatgatttcttcct

SEQ ID NO: 44429 - DNA, 80 bp, synthetic construct
  source 1..80: mol_type = other DNA
cacaacttatctgcagagacacccaggactactggcatatactgagcatttcctgtgggcaaaacactgggtagaaaggc

SEQ ID NO: 44430 - DNA, 80 bp, synthetic construct; identical to SEQ ID NO: 11923
  source 1..80: mol_type = other DNA

SEQ ID NO: 44431 - DNA, 80 bp, synthetic construct
  source 1..80: mol_type = other DNA
tatctgaatgttttcatttcttattttgtgtatttctacctttttctttttcttttgagctggagtctcgcactgttgcc

SEQ ID NO: 44432 - DNA, 80 bp, synthetic construct
  source 1..80: mol_type = other DNA
ctatgttggccaggctggtctcgaactcctgaccttgtgatctgctcgcctcagcctcccaaagtgctgggattacaggc

SEQ ID NO: 44433 - DNA, 80 bp, synthetic construct
  source 1..80: mol_type = other DNA
atactgccacactcagctgtgtagttctattttatctcttctatttgcctgtcccttttttccctcctacttttatggat

SEQ ID NO: 44434 - DNA, 80 bp, synthetic construct; identical to SEQ ID NO: 11924
  source 1..80: mol_type = other DNA

SEQ ID NO: 44435 - DNA, 80 bp, synthetic construct
  source 1..80: mol_type = other DNA
ttatctaggtattttgtactaatacttattttctgacttcttgatatgtcacggactaaaagaagtcagtcacagattcc

SEQ ID NO: 44436 - DNA, 80 bp, synthetic construct
  source 1..80: mol_type = other DNA
tataggtgtgcaccaccacacccagctaatttcggtatttttagtagagacagggtttcaccatgttggccaggctggtc

SEQ ID NO: 44437 - DNA, 80 bp, synthetic construct
  source 1..80: mol_type = other DNA
taattgtgaattataatcttgttttaaaaaacagagacagagttttaaaaaaccgagactcgctcagtcacccagactag

SEQ ID NO: 44438 - DNA, 80 bp, synthetic construct
  source 1..80: mol_type = other DNA
aaaataattgttttagaggggttctcactgttactcagtctgatcttgaactcctggcctcaagtgattctcctgccttg

SEQ ID NO: 44439 - DNA, 80 bp, synthetic construct; identical to SEQ ID NO: 11925
  source 1..80: mol_type = other DNA

SEQ ID NO: 44440 - DNA, 80 bp, synthetic construct
  source 1..80: mol_type = other DNA
acctccatcacctcacatagttacctgcttcccttcccactcccaacccctcattgcaagagcagttataatttactcat

SEQ ID NO: 44441 - DNA, 80 bp, synthetic construct
  source 1..80: mol_type = other DNA
cttgcgagtagctgggactacaggcacgggcaccacatttggctaatttttgtagagacagggtttcaccatgctgctca

SEQ ID NO: 44442 - DNA, 80 bp, synthetic construct
  source 1..80: mol_type = other DNA
atttcctactttgtatcccttgaggtacatctccccatttcttccacccaccctacctctggtaatcactattttattct

SEQ ID NO: 44443 - DNA, 80 bp, synthetic construct; identical to SEQ ID NO: 11926
  source 1..80: mol_type = other DNA

SEQ ID NO: 44444 - DNA, 80 bp, synthetic construct
  source 1..80: mol_type = other DNA
ccctgacccctgacccccgagcagcctaactgggaggcactacccagcaggggcagactgaaacctcacacggccgggta

SEQ ID NO: 44445 - DNA, 80 bp, synthetic construct; identical to SEQ ID NO: 11927
  source 1..80: mol_type = other DNA

SEQ ID NO: 44446 - DNA, 80 bp, synthetic construct
  source 1..80: mol_type = other DNA
tggagctgaaaaccaaggctcgagaactacgtgaagaatgcagaagcctcaggagccgatgcgatcaactggaagaaagg

SEQ ID NO: 44447 - DNA, 80 bp, synthetic construct
  source 1..80: mol_type = other DNA
gaaacaagctggaaaacactctgcaggatattatccaggagaacttccccagtctagcaaggcaggccaacattcagatt

SEQ ID NO: 44448 - DNA, 80 bp, synthetic construct
  source 1..80: mol_type = other DNA
cggatctctcggcagaaactctacaagccagaagagggtgggggccaatattcaacattcttaaagaaaagaattttcaa

SEQ ID NO: 44449 - DNA, 80 bp, synthetic construct; identical to SEQ ID NO: 11928
  source 1..80: mol_type = other DNA

SEQ ID NO: 44450 - DNA, 80 bp, synthetic construct
  source 1..80: mol_type = other DNA
cacataggctcaaaataaaaggatggaggaagatctaccaagccaatggaaaacaaaaaaaagcaggggttgcaatccta

SEQ ID NO: 44451 - DNA, 80 bp, synthetic construct
  source 1..80: mol_type = other DNA
acctacaaagagacttagactcccacacattaataatgggagactttaacaccccactgtcaacattagacagatcaaca

SEQ ID NO: 44452 - DNA, 80 bp, synthetic construct
  source 1..80: mol_type = other DNA
caccacacctattccaaaattgaccacatacttggaagtaaagctctcctcagcaaatgtaaaagaacagaaattataac

SEQ ID NO: 44453 - DNA, 80 bp, synthetic construct
  source 1..80: mol_type = other DNA
gagaacaaagacacaacataccagaatctctgggacacattcaaagcagtgtgtagagggaaatttatagcactaaatgc

SEQ ID NO: 44454 - DNA, 80 bp, synthetic construct; identical to SEQ ID NO: 11929
  source 1..80: mol_type = other DNA

SEQ ID NO: 44455 - DNA, 80 bp, synthetic construct
  source 1..80: mol_type = other DNA
tctcccaagactaaaccaggaagaagttgaatctctgaatagaccaataacaggatctgaaattgtggcaataatcaata

SEQ ID NO: 44456 - DNA, 80 bp, synthetic construct
  source 1..80: mol_type = other DNA
ccaaagcctggcagagacacaacaaaaaaaagaattttagaccaatatccctgatgaacatcgacacaaaaatcctcaat

SEQ ID NO: 44457 - DNA, 80 bp, synthetic construct
  source 1..80: mol_type = other DNA
caatagatgtagaaaaggcctttgacaaaattcaacagcccttcatgctaaaaactctcaataaattaggtattgatggg

SEQ ID NO: 44458 - DNA, 80 bp, synthetic construct
  source 1..80: mol_type = other DNA
caatcaggcaggagaaggaaataaagggtattcaattaggaaaagaggaagtcagattgtctctgtttgcagatggcatg

SEQ ID NO: 44459 - DNA, 80 bp, synthetic construct; identical to SEQ ID NO: 11930
  source 1..80: mol_type = other DNA

SEQ ID NO: 44460 - DNA, 80 bp, synthetic construct
  source 1..80: mol_type = other DNA
tggaaaaaactactttaaagttcatatggaaccaaaaaagagcctgcatcgccaagtcaatcctaagccaaaagaacaaa

SEQ ID NO: 44461 - DNA, 80 bp, synthetic construct
  source 1..80: mol_type = other DNA
ctgacaaaaacaagaaatgaggaaaggattccctatttaataaatggtgctgggaaaactggctagccatatgtagaaag

SEQ ID NO: 44462 - DNA, 80 bp, synthetic construct; identical to SEQ ID NO: 11931
  source 1..80: mol_type = other DNA

SEQ ID NO: 44463 - DNA, 80 bp, synthetic construct
  source 1..80: mol_type = other DNA
tcaaaagaagacatttatgcagccaacagacacatgaaaacatgctcatcatcactggccatcagagaaaaggaaatcaa

SEQ ID NO: 44464 - DNA, 80 bp, synthetic construct
  source 1..80: mol_type = other DNA
cagggatctagaactaggaataccatatgacccagccatcccattactgggtatatacccaaaggattataagtcatgct

SEQ ID NO: 44465 - DNA, 80 bp, synthetic construct
  source 1..80: mol_type = other DNA
ccatggaatactacgcagccataaaaaaggatgagttcatgtcctttgtagggacacagatgaagctggaaaccattatt

SEQ ID NO: 44466 - DNA, 80 bp, synthetic construct
  source 1..80: mol_type = other DNA
acctcatgtaaatgacgagttaatgtttgcagcacaccaacatggcacatgtatacatatgtaacaaacctgcacattgt

SEQ ID NO: 44467 - DNA, 80 bp, synthetic construct; identical to SEQ ID NO: 11932
  source 1..80: mol_type = other DNA

SEQ ID NO: 44468 - DNA, 80 bp, synthetic construct
  source 1..80: mol_type = other DNA
gcaagccacatagtctatggtattcttttataactgcccagattgactaagacagatgatgatgaaaatactaccaagta

SEQ ID NO: 44469 - DNA, 80 bp, synthetic construct
  source 1..80: mol_type = other DNA
gctgaagtagtactagagaaaaaaccaatacccttaaatgcctatattaagaaagaaggtaggtctcaaattagtaaatt

SEQ ID NO: 44470 - DNA, 80 bp, synthetic construct
  source 1..80: mol_type = other DNA
agctagactgatcaagacaaaaagatgcacattaacaatgtcaagaaaaaacgaacatcagtgcacactctctagatctc

SEQ ID NO: 44471 - DNA, 80 bp, synthetic construct; identical to SEQ ID NO: 11933
  source 1..80: mol_type = other DNA

SEQ ID NO: 44472 - DNA, 80 bp, synthetic construct
  source 1..80: mol_type = other DNA
atctaccattctgagatttggagcaccgtggccctcttctcacagctccactgggcagtgccctaataggaactctgtgt

SEQ ID NO: 44473 - DNA, 80 bp, synthetic construct
  source 1..80: mol_type = other DNA
cacctgcaggctcaaaaccatgtggaagctgtcaaggcttaaagcttgcaccctctggagccatgggccaagctgtacca

SEQ ID NO: 44474 - DNA, 80 bp, synthetic construct
  source 1..80: mol_type = other DNA
catgccctggagacattttccccattgtcttgggggatcaacatttggctctttgttacttacgcaaatttctgcagcca

SEQ ID NO: 44475 - DNA, 80 bp, synthetic construct
  source 1..80: mol_type = other DNA
cagataccctaaatcatctctctcaagttcagagtgccacagatctctagggcaggggcaaaatgccaccagtctctttg

SEQ ID NO: 44476 - DNA, 80 bp, synthetic construct; identical to SEQ ID NO: 11934
  source 1..80: mol_type = other DNA

SEQ ID NO: 44477 - DNA, 80 bp, synthetic construct
  source 1..80: mol_type = other DNA
aaggcacttcttacatggcggtaacaagagaaaatgaggaagatgcaaaagcagaaacccctgataaaaccatcagatct

SEQ ID NO: 44478 - DNA, 80 bp, synthetic construct
  source 1..80: mol_type = other DNA
tcaccagcattacccaaataaaaatcccagacaagaacatcacaagaaaaagaatcaagaacaaatattcctcttgaaca

SEQ ID NO: 44479 - DNA, 80 bp, synthetic construct
  source 1..80: mol_type = other DNA
acaatacaattcacccaattaatagaacaaagaacaaatgttgcacaattattatagtcaatgcagaaaaagcacttgca

SEQ ID NO: 44480 - DNA, 80 bp, synthetic construct; identical to SEQ ID NO: 11935
  source 1..80: mol_type = other DNA

SEQ ID NO: 44481 - DNA, 80 bp, synthetic construct
  source 1..80: mol_type = other DNA
gtctttactaaatataaataatttttaaaagaaaaaaaacaatgataggaaaggaagaaataaaatctttctttctcagc

SEQ ID NO: 44482 - DNA, 80 bp, synthetic construct
  source 1..80: mol_type = other DNA
acaatgagaaaccatcacacatcacctagaataagtaaagttcaaaagacatatgataattctaaatactggtatgaata

SEQ ID NO: 44483 - DNA, 80 bp, synthetic construct
  source 1..80: mol_type = other DNA
taaggccatgcaaagacttgtagtcagttatttatagtggtttcattaattacagaccctaaccggaaataacccacgtt

SEQ ID NO: 44484 - DNA, 80 bp, synthetic construct; identical to SEQ ID NO: 11936
  source 1..80: mol_type = other DNA

SEQ ID NO: 44485 - DNA, 80 bp, synthetic construct
  source 1..80: mol_type = other DNA
tacacaaacgccccaattaggaaaaaaaaaggtgggggaagaaggcaaaaatgaagacacttttacataatccaaatcag

SEQ ID NO: 44486 - DNA, 80 bp, synthetic construct
  source 1..80: mol_type = other DNA
gtgacctagatatatagaaagggataattaacaacagaaattatgcacatacacagatcacatacacactcattttctta

SEQ ID NO: 44487 - DNA, 80 bp, synthetic construct
  source 1..80: mol_type = other DNA
caagtgtcctttattttgctggatgcagcttaatattacctgaacttcaccatgaaaagtcaaggaatcgggtttcaatt

SEQ ID NO: 44488 - DNA, 80 bp, synthetic construct
  source 1..80: mol_type = other DNA
accaaaacccaaccattgtaagtgaagaaatgacacgacctgagtcacattagcagaactgctgagcactgtggggagaa

SEQ ID NO: 44489 - DNA, 80 bp, synthetic construct; identical to SEQ ID NO: 11937
  source 1..80: mol_type = other DNA

SEQ ID NO: 44490 - DNA, 80 bp, synthetic construct
  source 1..80: mol_type = other DNA
atacagtaacaaatcctgcttctttgtattgagatgtcctggactcacacagggaaactcgggctatggaatgaagataa

SEQ ID NO: 44491 - DNA, 80 bp, synthetic construct
  source 1..80: mol_type = other DNA
ttttaaatgcaacaacccagagtcatggatccacagtctgggaaagtaaacttagaagctttgtgactcgaattgcaatg

SEQ ID NO: 44492 - DNA, 80 bp, synthetic construct
  source 1..80: mol_type = other DNA
cctggtcactatgagaatctctatcttgtgccttcagccacaacttcaccaggtttaaagagaaaacccctttctctaca

SEQ ID NO: 44493 - DNA, 80 bp, synthetic construct
  source 1..80: mol_type = other DNA
ggttctctccctagtttccacagacagatccttgaccaggactcaggcagtcagtgtgacaaagaggctggcgtaggaaa

SEQ ID NO: 44494 - DNA, 80 bp, synthetic construct; identical to SEQ ID NO: 11938
  source 1..80: mol_type = other DNA

SEQ ID NO: 44495 - DNA, 80 bp, synthetic construct
  source 1..80: mol_type = other DNA
cggtgagtgcggggtcgggagggaaagggcctctgcggggagaagcgagtggcccgcccggcccggggagccgcgccggg

SEQ ID NO: 44496 - DNA, 80 bp, synthetic construct
  source 1..80: mol_type = other DNA
gagtccgaggatggagcggcgggcgccgtgggtggagcaggaggggctggagtattgggaccaggagacacggaacgcca

SEQ ID NO: 44497 - DNA, 80 bp, synthetic construct
  source 1..80: mol_type = other DNA
ccaccccgaggctgcgggacctgcccagaccctcgaccagggaagaaactcgggcgcctttacccggtttaatttcagtt

SEQ ID NO: 44498 - DNA, 80 bp, synthetic construct; identical to SEQ ID NO: 11939
  source 1..80: mol_type = other DNA

SEQ ID NO: 44499 - DNA, 80 bp, synthetic construct
  source 1..80: mol_type = other DNA
ggctggcctcccaccaggagagtaggaaaatgggaccaatgctagaatatcgccctcccactggtcctgaatgggaagaa

SEQ ID NO: 44500 - DNA, 80 bp, synthetic construct
  source 1..80: mol_type = other DNA
ggaattttcctctcaggccttgttctctccctcacactcagtgtgtccgtggctccgattccagctcttctgagtgcctt

SEQ ID NO: 44501 - DNA, 80 bp, synthetic construct
  source 1..80: mol_type = other DNA
acatgtatgctgctggagtgtcctatgaggaatgcaaagtgcctgaattttctgactcttcccctcagatcccccaaagg

SEQ ID NO: 44502 - DNA, 80 bp, synthetic construct; identical to SEQ ID NO: 11940
  source 1..80: mol_type = other DNA

SEQ ID NO: 44503 - DNA, 80 bp, synthetic construct
  source 1..80: mol_type = other DNA
gtgggcatcgttgctggcctgtttctccttggagctgtggtcactggagctgtggttgctgctgcgatgtggaggaagaa

SEQ ID NO: 44504 - DNA, 80 bp, synthetic construct
  source 1..80: mol_type = other DNA
ttgtgaagcacatgtgaaaacgaaggacaaatttatcaccttgatgattgtggtgatggggacctcccagcagtcacagg

SEQ ID NO: 44505 - DNA, 80 bp, synthetic construct
  source 1..80: mol_type = other DNA
ttcctggggtccaggatttgctgtttccttaaggacttcatgccccatgtcctccctgacctctcacaggttgttttttt

SEQ ID NO: 44506 - DNA, 80 bp, synthetic construct; identical to SEQ ID NO: 11941
  source 1..80: mol_type = other DNA

SEQ ID NO: 44507 - DNA, 80 bp, synthetic construct
  source 1..80: mol_type = other DNA
tttctcctgtagcttgagacaactgccttgagtgggactgagagatacaaaatttcttcaggtccttcctctgacacaca

SEQ ID NO: 44508 - DNA, 80 bp, synthetic construct
  source 1..80: mol_type = other DNA
gtcaagttttttttcaacagaggtgaggctgggacatttctattcatgtcttaacttttaagtttcactgagctgccact

SEQ ID NO: 44509 - DNA, 80 bp, synthetic construct
  source 1..80: mol_type = other DNA
gttgtaggtggagacaggagagagagggctgtgaggagctgagtgtggacagcctatgctcagttcatcatggaatttga

SEQ ID NO: 44510 - DNA, 80 bp, synthetic construct; identical to SEQ ID NO: 11942
  source 1..80: mol_type = other DNA

SEQ ID NO: 44511 - DNA, 80 bp, synthetic construct
  source 1..80: mol_type = other DNA
ctgtggtattaagagatgaattttcaagcccgtgcagcttttaccctatttccagggctctttcttggattgtattttct

SEQ ID NO: 44512 - DNA, 80 bp, synthetic construct
  source 1..80: mol_type = other DNA
ctctaatgcaaactcatggatctataaagcaaagtctaacttagatttatatttgtttggaaattgggattcatagtcaa

SEQ ID NO: 44513 - DNA, 80 bp, synthetic construct
  source 1..80: mol_type = other DNA
gtcgttgctgcaaaaccgcatttggcctgaggctatgttaataaagatactgcctttagaataggaggtgctctacagtg

SEQ ID NO: 44514 - DNA, 80 bp, synthetic construct
  source 1..80: mol_type = other DNA
tgggaagaggcagacggtacatacactctaatatatgcagagtaaatgaggaaagtgttagaaggtgataagtgctgtgg

SEQ ID NO: 44515 - DNA, 80 bp, synthetic construct; identical to SEQ ID NO: 11943
  source 1..80: mol_type = other DNA

SEQ ID NO: 44516 - DNA, 80 bp, synthetic construct
  source 1..80: mol_type = other DNA
aacttctcttttaaaaggatcactgtagctgctctgctgagaacagaatccaaaggccggcgatgagcaaggcaggtggg

SEQ ID NO: 44517 - DNA, 80 bp, synthetic construct
  source 1..80: mol_type = other DNA
gagtaaaggataccaaaaatgtcagactgtgactaaaaagagttgccatcagctgagaatgagaagactagcaggagcat

SEQ ID NO: 44518 - DNA, 80 bp, synthetic construct
  source 1..80: mol_type = other DNA
taaagccttgagtctgaatgacgtctccaagggagtgattggctgtagaagagaacaggaacaaggactgaacactaggc

SEQ ID NO: 44519 - DNA, 80 bp, synthetic construct; identical to SEQ ID NO: 11944
  source 1..80: mol_type = other DNA

SEQ ID NO: 44520 - DNA, 80 bp, synthetic construct
  source 1..80: mol_type = other DNA
tatcactgagatcagtagttggagaatgcccaggatggggaggggtctcagacccacatttaagtgttgctttattctgg

SEQ ID NO: 44521 - DNA, 80 bp, synthetic construct
  source 1..80: mol_type = other DNA
tgctgctttctgaaactactctccagaatgatttcacactcactccttggagcaaacaatgacttgcaaatttttctaat

SEQ ID NO: 44522 - DNA, 80 bp, synthetic construct
  source 1..80: mol_type = other DNA
gaggcctcagaatcatggtgggaggcgaaaggcacttcttacatggtggtggcaagagaaaatgaggaagaagcaaatgc

SEQ ID NO: 44523 - DNA, 80 bp, synthetic construct; identical to SEQ ID NO: 11945
  source 1..80: mol_type = other DNA

SEQ ID NO: 44524 - DNA, 80 bp, synthetic construct
  source 1..80: mol_type = other DNA
aatgcagtatttactgtcccagcctctctgtgtcatctcatcctgattagaagcccacatgtggttatctaaattgtgca

SEQ ID NO: 44525 - DNA, 80 bp, synthetic construct
  source 1..80: mol_type = other DNA
ttgctggaggtagaggggtgagggatggaaaaagaatgacaaatttcaattcctagaatcatgttctgagactagaactt

SEQ ID NO: 44526 - DNA, 80 bp, synthetic construct
  source 1..80: mol_type = other DNA
ttgaaagcctttttccctatctttgtctcttgctaggattaaaaacccgtatctgtaagacatcagaggatccatgtata

SEQ ID NO: 44527 - DNA, 80 bp, synthetic construct; identical to SEQ ID NO: 11946
  source 1..80: mol_type = other DNA

SEQ ID NO: 44528 - DNA, 80 bp, synthetic construct
  source 1..80: mol_type = other DNA
tgtcagattaatggcaggaattaatcagtagcgaatggggattccatttccggtaatagggtgaactaggttttaaagct

SEQ ID NO: 44529 - DNA, 80 bp, synthetic construct
  source 1..80: mol_type = other DNA
aaagggaagttgcttttatcttgagggcgtttgccaaatctggaaaaatcttagctttggttttctcagcttcatatggt

SEQ ID NO: 44530 - DNA, 80 bp, synthetic construct
  source 1..80: mol_type = other DNA
tttgcctttgagtcagcaaaacctgtttttgagaatttacaaccaccagccagcactcctgcagatttgttgcccaaact

SEQ ID NO: 44531 - DNA, 80 bp, synthetic construct; identical to SEQ ID NO: 11947
  source 1..80: mol_type = other DNA

SEQ ID NO: 44532 - DNA, 80 bp, synthetic construct
  source 1..80: mol_type = other DNA
gagaccagcctgaccaacatagaaaaaccccgtctctactaaaaatagaaaattagctgggcgtggtggcacatgcctgt

SEQ ID NO: 44533 - DNA, 80 bp, synthetic construct
  source 1..80: mol_type = other DNA
aataataatgacaagcttgaaaatgcctacagaatgtattaacctaaaaatgacctgtttttcaaaagaactaaagttag

SEQ ID NO: 44534 - DNA, 80 bp, synthetic construct
  source 1..80: mol_type = other DNA
tgaaaaaatagctatgtactcagatactagacagcaggtatcccagagactgtgatctctgggagaaggggaatggaaaa

SEQ ID NO: 44535 - DNA, 80 bp, synthetic construct; identical to SEQ ID NO: 11948
  source 1..80: mol_type = other DNA

SEQ ID NO: 44536 - DNA, 80 bp, synthetic construct
  source 1..80: mol_type = other DNA
atttgctgagcattggatagagtattctgaagggtcttatgtcagcagtggtaaataattagccctggactaaacacttt

SEQ ID NO: 44537 - DNA, 80 bp, synthetic construct
  source 1..80: mol_type = other DNA
tgggagttcgagaccagcctgaccaacatggagaaatcccgtctctactaaaaatacaaaattagctgggcatggtggcg

SEQ ID NO: 44538 - DNA, 80 bp, synthetic construct
  source 1..80: mol_type = other DNA
cttatagaatgcaaaaatatctggcacctaacctggtaaagtcatgtctggcattaaataaaaacaatcaccaggcatat

SEQ ID NO: 44539 - DNA, 80 bp, synthetic construct; identical to SEQ ID NO: 11949
  source 1..80: mol_type = other DNA

SEQ ID NO: 44540 - DNA, 80 bp, synthetic construct
  source 1..80: mol_type = other DNA
acatcatactcaatggcgaaagttgcatacttttcctgtaagatcaggaacaagacaatgatgcccactctggccacatc

SEQ ID NO: 44541 - DNA, 80 bp, synthetic construct
  source 1..80: mol_type = other DNA
aaaaaaaaatcagtgaagttgcagcatacaaaatcagcatacaaaaattagtggtacttttatatacttaccaaaaactg

SEQ ID NO: 44542 - DNA, 80 bp, synthetic construct
  source 1..80: mol_type = other DNA
ttcttggatcagaagaatcatattgcgaaaatgtccatactacccaaagcaatcaacagatttaatgtaacccctatcaa

SEQ ID NO: 44543 - DNA, 80 bp, synthetic construct; identical to SEQ ID NO: 11950
  source 1..80: mol_type = other DNA

SEQ ID NO: 44544 - DNA, 80 bp, synthetic construct
  source 1..80: mol_type = other DNA
tgtaagacctgaaaccacaaaacttggagaagaaagcaggtgaaaagctccgagacattggccttggcaatgattttttt

SEQ ID NO: 44545 - DNA, 80 bp, synthetic construct
  source 1..80: mol_type = other DNA
tgtaaagtctatagactccatagaacttaatagcaaaaaacagataacccagttcaaatatgggcaaaagacccgaatag

SEQ ID NO: 44546 - DNA, 80 bp, synthetic construct
  source 1..80: mol_type = other DNA
aaactgtagagaaagggaacccttatacatggttggtaggaatgtgaattggtaaaagcataatggaatacaatatagat

SEQ ID NO: 44547 - DNA, 80 bp, synthetic construct; identical to SEQ ID NO: 11951
  source 1..80: mol_type = other DNA

SEQ ID NO: 44548 - DNA, 80 bp, synthetic construct
  source 1..80: mol_type = other DNA
taactttgacctgaggctgcctgtgtacctaagtaagtaggtaaacaaatcaaaacctaagttaggagtataactgttag

SEQ ID NO: 44549 - DNA, 80 bp, synthetic construct
  source 1..80: mol_type = other DNA
tctgagtgctgccaaatttgtaaattattttttgcttaaataaactcttctaaatttagtttgtctaaagttgatggaat

SEQ ID NO: 44550 - DNA, 80 bp, synthetic construct
  source 1..80: mol_type = other DNA
cccaaaatcactaagccaaagtgatttgggcttacaacaggatggcaactattggtatacttgaaatttactaagagaat

SEQ ID NO: 44551 - DNA, 80 bp, synthetic construct; identical to SEQ ID NO: 11952
  source 1..80: mol_type = other DNA

SEQ ID NO: 44552 - DNA, 80 bp, synthetic construct
  source 1..80: mol_type = other DNA
tgatattaaaatttatatggaaattcagtgaactacaaaagttacaaaacttttgacaaagaacagagtttgaggaacta

SEQ ID NO: 44553 - DNA, 80 bp, synthetic construct
  source 1..80: mol_type = other DNA
gggggaaagaaaaatcttttcgagaaattatacacaactcaatagcaataaaacaaataacctaattcaaaaatggacaa

SEQ ID NO: 44554 - DNA, 80 bp, synthetic construct
  source 1..80: mol_type = other DNA
taagtgttaatgagggtgtagaggaaagggaatccttatacatggttggtgggaatgtaaattggtataagcattatgga

SEQ ID NO: 44555 - DNA, 80 bp, synthetic construct; identical to SEQ ID NO: 11953
  source 1..80: mol_type = other DNA

SEQ ID NO: 44556 - DNA, 80 bp, synthetic construct
  source 1..80: mol_type = other DNA
agagaacacactcctggaagcccttttataaaggcattaaaaccacccccaagggtggaaccctcatggtccaatcacct

SEQ ID NO: 44557 - DNA, 80 bp, synthetic construct
  source 1..80: mol_type = other DNA
accccatctctacaaatatatatatacttcaacccatgttgaaatataaatgggttgaaacaacatgggttttggagggg

SEQ ID NO: 44558 - DNA, 80 bp, synthetic construct
  source 1..80: mol_type = other DNA
ttatataacctcatatttgcaatctaaaacaagtgaaactcctagaaacagaggtagaacggtggttaccaggggcttga

SEQ ID NO: 44559 - DNA, 80 bp, synthetic construct; identical to SEQ ID NO: 11954
  source 1..80: mol_type = other DNA

SEQ ID NO: 44560 - DNA, 80 bp, synthetic construct
  source 1..80: mol_type = other DNA
tgtatgcaaaaaccttcatgacctcggattaagcagtgttttttaaatatgacaccaaaacacaagtaacaataaaccaa

SEQ ID NO: 44561 - DNA, 80 bp, synthetic construct
  source 1..80: mol_type = other DNA
ttaaaagacaaataatacaagtaaaaaatgaacaaagggctgaatagatacttctccacaggagatagaaagatggctaa

SEQ ID NO: 44562 - DNA, 80 bp, synthetic construct
  source 1..80: mol_type = other DNA
gcagtggtgaggatgtggagaaattggaattcttgcacactgctggtaagaatgtaaaatggtgcagcctcttaaagaat

SEQ ID NO: 44563 - DNA, 80 bp, synthetic construct
  source 1..80: mol_type = other DNA
aagcagcattattctcaatggctgaagagtggaaacaatacagatgcccaggaacaaatgaatgaataagatatggtcaa

SEQ ID NO: 44564 - DNA, 80 bp, synthetic construct; identical to SEQ ID NO: 11955
  source 1..80: mol_type = other DNA

SEQ ID NO: 44565 - DNA, 80 bp, synthetic construct
  source 1..80: mol_type = other DNA
tgaaaaatgatggctcacatgaaataaaatcgatgtgccagagctgccatggcagattgtggagaaagagaccaaaaggc

SEQ ID NO: 44566 - DNA, 80 bp, synthetic construct
  source 1..80: mol_type = other DNA
gctggagctgactctatgagatgatattggagaacttggtgccctagcaacaataggacagtaggattccagaaagctag

SEQ ID NO: 44567 - DNA, 80 bp, synthetic construct
  source 1..80: mol_type = other DNA
ttagaatcaatagatgaaaaatagatgagctgaagtctgagattaatttctccaatagaagtttaaaatcccttgcccag

SEQ ID NO: 44568 - DNA, 80 bp, synthetic construct; identical to SEQ ID NO: 11956
  source 1..80: mol_type = other DNA

SEQ ID NO: 44569 - DNA, 80 bp, synthetic construct
  source 1..80: mol_type = other DNA
attagttatttcactcacactttagtcatttcacctgtggaataaaggatttgtagtaagaaaggccaagtggatgcccc

SEQ ID NO: 44570 - DNA, 80 bp, synthetic construct
  source 1..80: mol_type = other DNA
ggatgataacagatgacagtggattaatgaaaatgtaacctataattagccccaacttcagcagctgtgctgaatgtgat

SEQ ID NO: 44571 - DNA, 80 bp, synthetic construct
  source 1..80: mol_type = other DNA
tttcaatttttgtgggtacataatagctgcatatatttatggggtacatgagatgttttgatacaggtatgcaatgtgaa

SEQ ID NO: 44572 - DNA, 80 bp, synthetic construct; identical to SEQ ID NO: 11957
  source 1..80: mol_type = other DNA

SEQ ID NO: 44573 - DNA, 80 bp, synthetic construct
  source 1..80: mol_type = other DNA
catttaacataatgatctccacttccatccatgctgttgcaaatgactggatctcattcctttttatggctgaatagtac

SEQ ID NO: 44574 - DNA, 80 bp, synthetic construct
  source 1..80: mol_type = other DNA
tttgtcacccaggctggagtgcagtggcatgatcttggctcactgcaacctccacctcctaggttcaagtgatcctacct

SEQ ID NO: 44575 - DNA, 80 bp, synthetic construct
  source 1..80: mol_type = other DNA
tacaggtgtgagccaccatgcaaaacgctggttttgtcttttgtggggtatatacccagcagtaggattgttgcatcata

SEQ ID NO: 44576 - DNA, 80 bp, synthetic construct; identical to SEQ ID NO: 11958
  source 1..80: mol_type = other DNA

SEQ ID NO: 44577 - DNA, 80 bp, synthetic construct
  source 1..80: mol_type = other DNA
tgtgcaccaccactcccagctattttttatttttgtattttgcagaattggggtttgaccatattgctcagtctggtctc

SEQ ID NO: 44578 - DNA, 80 bp, synthetic construct
  source 1..80: mol_type = other DNA
ggctggagtgcagtggtgtgatctcggcttactgcaacctctgtctcccaggtttaagcgattctcctgcctcagcctcc

SEQ ID NO: 44579 - DNA, 80 bp, synthetic construct
  source 1..80: mol_type = other DNA
gccaccacgcatggcctgtatgtcttcttttgagaaatgtctattcaaatcttttgcccatttttttacttagactttta

SEQ ID NO: 44580 - DNA, 80 bp, synthetic construct; identical to SEQ ID NO: 11959
  source 1..80: mol_type = other DNA

SEQ ID NO: 44581 - DNA, 80 bp, synthetic construct
  source 1..80: mol_type = other DNA
caacctccacctcctgggttcaagcgattctcctgccccagcctcctgagtagctaggactgcaggcacatgccatcacg

SEQ ID NO: 44582 - DNA, 80 bp, synthetic construct
  source 1..80: mol_type = other DNA
tgtctacagtgagaggtaggggtctagtttcattcttctgcatatggatatccagttttcccagcaccatttcattgaag

SEQ ID NO: 44583 - DNA, 80 bp, synthetic construct
  source 1..80: mol_type = other DNA
gtagcataatttgaagtcaggtaatgtgattcctccagttttgatctttttgcttaatataattttggctattctgggca

SEQ ID NO: 44584 - DNA, 80 bp, synthetic construct; identical to SEQ ID NO: 11960
  source 1..80: mol_type = other DNA

SEQ ID NO: 44585 - DNA, 80 bp, synthetic construct
  source 1..80: mol_type = other DNA
gttttcctgtggagcctttaggttttttccaaatataagttcatatcatctgcaaactagggtaatttaacttctccctt

SEQ ID NO: 44586 - DNA, 80 bp, synthetic construct
  source 1..80: mol_type = other DNA
tgggtctgtcatatctggctattacgttgaggtatatttcttttatacagttttttgagggtttttatcatgaagggatg

SEQ ID NO: 44587 - DNA, 80 bp, synthetic construct
  source 1..80: mol_type = other DNA
ttaatggagtctcactctgtcaccaaggctggagtgcagtgccacaatctcagctcactgcaacctccacctcctgggtt

SEQ ID NO: 44588 - DNA, 80 bp, synthetic construct; identical to SEQ ID NO: 11961
  source 1..80: mol_type = other DNA

SEQ ID NO: 44589 - DNA, 80 bp, synthetic construct
  source 1..80: mol_type = other DNA
cttgagtgggattggtattagttcttctttaaatgtttggtagaattcaacagtgaagccatcgggtccttggttttctt

SEQ ID NO: 44590 - DNA, 80 bp, synthetic construct
  source 1..80: mol_type = other DNA
agcccctaatgatcctttgaatttctgcagtgtcagttgtaatgtctttttcatttctgatttgtatcttgtctcttttt

SEQ ID NO: 44591 - DNA, 80 bp, synthetic construct
  source 1..80: mol_type = other DNA
gcttttctggttaaggttcattgttaaattgcttatttgaagtttttcctcttttttcatgtaggcacttatagctatca

SEQ ID NO: 44592 - DNA, 80 bp, synthetic construct; identical to SEQ ID NO: 11962
  source 1..80: mol_type = other DNA

SEQ ID NO: 44593 - DNA, 80 bp, synthetic construct
  source 1..80: mol_type = other DNA
tattttctgtctggaagatctgtccagtgctgaaaatgtggtgttgaagtctccagctattattgtattggggtcactct

SEQ ID NO: 44594 - DNA, 80 bp, synthetic construct
  source 1..80: mol_type = other DNA
gaaaagaggtttaattggctcacagttctgcaggctgtacaggaagcatggctggggaggcctcagaacacttacaatca

SEQ ID NO: 44595 - DNA, 80 bp, synthetic construct
  source 1..80: mol_type = other DNA
cccccattatccaatcctcttccaccaggctcaacctccaaaatttaggattacaattgaacatgagattttggtgggga

SEQ ID NO: 44596 - DNA, 80 bp, synthetic construct; identical to SEQ ID NO: 11963
  source 1..80: mol_type = other DNA

SEQ ID NO: 44597 - DNA, 80 bp, synthetic construct
  source 1..80: mol_type = other DNA
ggtgggctcccaaggccttgggcagctcagcccctgggactttgcagggtaagccactgtcactgctttcacgggctggc

SEQ ID NO: 44598 - DNA, 80 bp, synthetic construct
  source 1..80: mol_type = other DNA
cactaccctagtagaggttctccatgagggctctgtccctgcagctggcttctgcctggacatccaggctttcccacaca

SEQ ID NO: 44599 - DNA, 80 bp, synthetic construct
  source 1..80: mol_type = other DNA
gctggagcagctgggatttggagagcagtttcctgaggttgtgcagggcagcaggaccctgagcctggcccaggaaacca

SEQ ID NO: 44600 - DNA, 80 bp, synthetic construct; identical to SEQ ID NO: 11964
  source 1..80: mol_type = other DNA

SEQ ID NO: 44601 - DNA, 80 bp, synthetic construct
  source 1..80: mol_type = other DNA
atgtctccaaccacaatgtcctaacaaaagtgaccttcactccaggtcccaataagtccctcatctccatctgagacctc

SEQ ID NO: 44602 - DNA, 80 bp, synthetic construct
  source 1..80: mol_type = other DNA
attttcaggtatctttctagcaatgcctcactcctctttaccaattttctgtattattctgttctcacactgctataaag

SEQ ID NO: 44603 - DNA, 80 bp, synthetic construct
  source 1..80: mol_type = other DNA
agtagaccaaggcaagcgggtggtgtggagaggtgctacacacttttaagcaaccagatttcagaagaactcactatcat

SEQ ID NO: 44604 - DNA, 80 bp, synthetic construct; identical to SEQ ID NO: 11965
  source 1..80: mol_type = other DNA

SEQ ID NO: 44605 - DNA, 80 bp, synthetic construct
  source 1..80: mol_type = other DNA
tatcgataagtaaagacttactcctgccttgttatttatttgttttctggttgttttgtggtcttcttctttcttttctt

SEQ ID NO: 44606 - DNA, 80 bp, synthetic construct
  source 1..80: mol_type = other DNA
cattaacaaacaaaaaactaataaaaactctacatcttaacttcatccccccactttttaactttttgttgtttctaatt

SEQ ID NO: 44607 - DNA, 80 bp, synthetic construct
  source 1..80: mol_type = other DNA
tctttgttgctcattaatgtctgtttctttctgaccaaagtactcccttaagcgtttcttatgggaccagtctagtgttg

SEQ ID NO: 44608 - DNA, 80 bp, synthetic construct; identical to SEQ ID NO: 11966
  source 1..80: mol_type = other DNA

SEQ ID NO: 44609 - DNA, 80 bp, synthetic construct
  source 1..80: mol_type = other DNA
tcctatctctttctctatctcttctttaaggccaataactcctagatttgcccttaagaagttattttctagatcctgtg

SEQ ID NO: 44610 - DNA, 80 bp, synthetic construct
  source 1..80: mol_type = other DNA
caattctcctgccttggcctcccaagtagctgggattacaggcatgagccaccacacctggctaattttgtatttttagt

SEQ ID NO: 44611 - DNA, 80 bp, synthetic construct
  source 1..80: mol_type = other DNA
catgtgtctttatggtggaatgatttatattcctttaggtaaatatccagtaatgggattggtgagtcaaatggtagttg

SEQ ID NO: 44612 - DNA, 80 bp, synthetic construct; identical to SEQ ID NO: 11967
  source 1..80: mol_type = other DNA

SEQ ID NO: 44613 - DNA, 80 bp, synthetic construct
  source 1..80: mol_type = other DNA
ctgttgtttattttgctatgaaaaagctcttaaatccaatttgtccatttttgcttttgttacaattgcttttggtgtct

SEQ ID NO: 44614 - DNA, 80 bp, synthetic construct
  source 1..80: mol_type = other DNA
tcccagcaccatttattgaatagggagacctttccccattgcttgtttttgtcaactttgttgaagatcagatggctgta

SEQ ID NO: 44615 - DNA, 80 bp, synthetic construct
  source 1..80: mol_type = other DNA
tactcaggctttttggttccatatgaattttaagttttttctagttctgtgaaaaatgtaattgatagtttgataggaat

SEQ ID NO: 44616 - DNA, 80 bp, synthetic construct; identical to SEQ ID NO: 11968
  source 1..80: mol_type = other DNA

SEQ ID NO: 44617 - DNA, 80 bp, synthetic construct
  source 1..80: mol_type = other DNA
tcctatttggatgccctttattatttctgttgcctgactgctgtgatcaggactttcaacactatattgaataggagtgg

SEQ ID NO: 44618 - DNA, 80 bp, synthetic construct
  source 1..80: mol_type = other DNA
cttgcttgtgggggagccatcctcagcacatcggccctacccaacccacagtagataccaacatccctatgatggatgag

SEQ ID NO: 44619 - DNA, 80 bp, synthetic construct
  source 1..80: mol_type = other DNA
acttagatcttgtctgtgaagtatccaattgccttccatttctacttggtgtagaatgtagggggcaatgaatgaaactg

SEQ ID NO: 44620 - DNA, 80 bp, synthetic construct; identical to SEQ ID NO: 11969
  source 1..80: mol_type = other DNA

SEQ ID NO: 44621 - DNA, 80 bp, synthetic construct
  source 1..80: mol_type = other DNA
tttagtcaagttgtttaacctccactctgttcatcttgtatatatgggtggggggtgaagactatgagcccacaggtctg

SEQ ID NO: 44622 - DNA, 80 bp, synthetic construct
  source 1..80: mol_type = other DNA
aaatcctctaatgaatttcaaggttaaatataaataaactgtgggattgttctgcctagagtagccacaccctcctcggg

SEQ ID NO: 44623 - DNA, 80 bp, synthetic construct
  source 1..80: mol_type = other DNA
cgtaaaaagccaagcactgctcagccttttattatgcctcttactgatttatgccttcatttggcattcaagaacttgct

SEQ ID NO: 44624 - DNA, 80 bp, synthetic construct; identical to SEQ ID NO: 11970
  source 1..80: mol_type = other DNA

SEQ ID NO: 44625 - DNA, 80 bp, synthetic construct
  source 1..80: mol_type = other DNA
gctctttgaggatacacactaggttatacttttctggttctccaccctaagcacccaaaaggcagatggtaggtacatct

SEQ ID NO: 44626 - DNA, 80 bp, synthetic construct
  source 1..80: mol_type = other DNA
cactgcagcctgaggccacaggtagcagtgttgctgggttgctgcattctttactgtgagatttagaaaaactgtcatta

SEQ ID NO: 44627 - DNA, 80 bp, synthetic construct
  source 1..80: mol_type = other DNA
aagtgacaaactttggatacctttttaacattgtttctaaatattgtaaacatgaatcttctggacctcagagggaacaa

SEQ ID NO: 44628 - DNA, 80 bp, synthetic construct; identical to SEQ ID NO: 11971
  source 1..80: mol_type = other DNA

SEQ ID NO: 44629 - DNA, 80 bp, synthetic construct
  source 1..80: mol_type = other DNA
ccaaatgtgtaattaaatagagcattttacatcattaagtagaggcttttaaacaattatacatagtgcatatcattgca

SEQ ID NO: 44630 - DNA, 80 bp, synthetic construct
  source 1..80: mol_type = other DNA
aggaaaatgggtttttgttgatctgaggaacttataccaaccttactcatcagtgcccaagaaaaatagctttaatgtga

SEQ ID NO: 44631 - DNA, 80 bp, synthetic construct
  source 1..80: mol_type = other DNA
ttgtccacatgggcaactacgaagctggcacaactatacttctttgttcactttggtcaccaccatttgttctgctgttg

SEQ ID NO: 44632 - DNA, 80 bp, synthetic construct; identical to SEQ ID NO: 11972
  source 1..80: mol_type = other DNA

SEQ ID NO: 44633 - DNA, 80 bp, synthetic construct
  source 1..80: mol_type = other DNA
agacttgggataggaggagtgagtgcgctggtaaaaccaattacttagctaaacctttggctaaaactctaggaagggag

SEQ ID NO: 44634 - DNA, 80 bp, synthetic construct
  source 1..80: mol_type = other DNA
atcccaggtgagacccggactttttctcctccctcccttccttttttcaccgtgttcaggataaattatcttggttttgt

SEQ ID NO: 44635 - DNA, 80 bp, synthetic construct
  source 1..80: mol_type = other DNA
ccaaatccaacttcagttttctctccaactctctaaaaccaccaccaatactattatcacatcatgtgtagctacttggg

SEQ ID NO: 44636 - DNA, 80 bp, synthetic construct; identical to SEQ ID NO: 11973
  source 1..80: mol_type = other DNA

SEQ ID NO: 44637 - DNA, 80 bp, synthetic construct
  source 1..80: mol_type = other DNA
acctaatttaatcccttcataactctgtgaagtgggtcagtattgacgggtcagcttaactaacagatattaggaatgag

SEQ ID NO: 44638 - DNA, 80 bp, synthetic construct
  source 1..80: mol_type = other DNA
aagtggctgaatctctttcgtgacagagaactcaccacctaccaaggcagcccattttattaagtctaacttttaaaaaa

SEQ ID NO: 44639 - DNA, 80 bp, synthetic construct
  source 1..80: mol_type = other DNA
atctctagtcatagccagatatattgcatcaaaataaatggctattttctgcaggagggttggtccaaatgtcctagcct

SEQ ID NO: 44640 - DNA, 80 bp, synthetic construct; identical to SEQ ID NO: 11974
  source 1..80: mol_type = other DNA

SEQ ID NO: 44641 - DNA, 80 bp, synthetic construct
  source 1..80: mol_type = other DNA
acaagttcctcacccactacgtgctttagaaccctcactgtgaaatgggagatgtgataggaatgttgtgaggattgttt

SEQ ID NO: 44642 - DNA, 80 bp, synthetic construct
  source 1..80: mol_type = other DNA
ttcctgctaagccttgtaagttaccatggcccagcactgtaaccagagaagtgaggatgagacttccactttgagaaagg

SEQ ID NO: 44643 - DNA, 80 bp, synthetic construct
  source 1..80: mol_type = other DNA
ccacatcctccacctgtcagaaagtcacagttaaggaagagatttccgagcacaccttggacagaagtcatgatgatggg

SEQ ID NO: 44644 - DNA, 80 bp, synthetic construct; identical to SEQ ID NO: 11975
  source 1..80: mol_type = other DNA

SEQ ID NO: 44645 - DNA, 80 bp, synthetic construct
  source 1..80: mol_type = other DNA
tctgtccttttgctgtcttgtctacaccagagaacctttggttgacttgctttaatattggcttcagtcctattacaaaa

SEQ ID NO: 44646 - DNA, 80 bp, synthetic construct
  source 1..80: mol_type = other DNA
agaaacttccatgtcactagaggatttcacaatccatatatgaatcccctgaagacttcttggtgtgaaggaaacatcac

SEQ ID NO: 44647 - DNA, 80 bp, synthetic construct
  source 1..80: mol_type = other DNA
caacacagtgaaaccccatttctactaaaaatacaaaaattagccaggtgtggtggtgcatgcctgtagtcccagctacc

SEQ ID NO: 44648 - DNA, 80 bp, synthetic construct; identical to SEQ ID NO: 11976
  source 1..80: mol_type = other DNA

SEQ ID NO: 44649 - DNA, 80 bp, synthetic construct
  source 1..80: mol_type = other DNA
tagattagctcaattttttgcaacacatttcctgtatgaactataactatagccatttctagattaatacctcttgtcag

SEQ ID NO: 44650 - DNA, 80 bp, synthetic construct
  source 1..80: mol_type = other DNA
aatcaaagaccctaatgtagcagtattgcatcatctatagcctagattatgctgcaatgatatacaactcccgtatctca

SEQ ID NO: 44651 - DNA, 80 bp, synthetic construct
  source 1..80: mol_type = other DNA
gcagttaaattcccagtccagaagaaatacatatcacccctactaacacctcattacagggcacagatgatgacaataat

SEQ ID NO: 44652 - DNA, 80 bp, synthetic construct; identical to SEQ ID NO: 11977
  source 1..80: mol_type = other DNA

SEQ ID NO: 44653 - DNA, 80 bp, synthetic construct
  source 1..80: mol_type = other DNA
aaaataaagaaaattattgagcctctcttggatgccagcaccatgctcagtgctttcatttttttcagtatactcacatt

SEQ ID NO: 44654 - DNA, 80 bp, synthetic construct
  source 1..80: mol_type = other DNA
gatctaacaacgacagcatccatcagtgaactctgagtctaccaaacagaaattgctcttaatgggttcatctaatggca

SEQ ID NO: 44655 - DNA, 80 bp, synthetic construct
  source 1..80: mol_type = other DNA
tggctcaaatgatcctccctccttatcttcctgagtagctgggactatgggcgcatgccaccatacctgctaatgtttaa

SEQ ID NO: 44656 - DNA, 80 bp, synthetic construct; identical to SEQ ID NO: 11978
  source 1..80: mol_type = other DNA

SEQ ID NO: 44657 - DNA, 80 bp, synthetic construct
  source 1..80: mol_type = other DNA
ctcccttgtgtccatgtgtactcgatgtttagctcccatttaaaagtgacaacatacagtatttggttttctgttcctgc

SEQ ID NO: 44658 - DNA, 80 bp, synthetic construct
  source 1..80: mol_type = other DNA
cttgtcacctaggctggagtgcaatggcgcgatctcggctcactgcaacctctgcttcccaggttcaaacgattctcctg

SEQ ID NO: 44659 - DNA, 80 bp, synthetic construct
  source 1..80: mol_type = other DNA
gtgagccaccgaacctgggcatctaggttgattccgtatctttgccattgcgaatagtgccgcagtgaacatacatgtgc

SEQ ID NO: 44660 - DNA, 80 bp, synthetic construct; identical to SEQ ID NO: 11979
  source 1..80: mol_type = other DNA

SEQ ID NO: 44661 - DNA, 80 bp, synthetic construct
  source 1..80: mol_type = other DNA
gatgcacagtttgcagatgttttctcccattctgtaggctgtttactctgttgacagttccattttctgtgcaggagttc

SEQ ID NO: 44662 - DNA, 80 bp, synthetic construct
  source 1..80: mol_type = other DNA
tccactttgagttgatttttatatatggcgaaagataggggttcagtgtcattcttctgcctatggctatccagttatcc

SEQ ID NO: 44663 - DNA, 80 bp, synthetic construct
  source 1..80: mol_type = other DNA
ttactgtaacctcataatttgaagacaggtagtgtgatgcctccagctttgttctttttgcttaggattgctttggctat

SEQ ID NO: 44664 - DNA, 80 bp, synthetic construct; identical to SEQ ID NO: 11980
  source 1..80: mol_type = other DNA

SEQ ID NO: 44665 - DNA, 80 bp, synthetic construct
  source 1..80: mol_type = other DNA
gaagccctcaggaagagaccatggagttttctaggtatagaatcattatctatgaagagagataatttgacttcctctct

SEQ ID NO: 44666 - DNA, 80 bp, synthetic construct
  source 1..80: mol_type = other DNA
ttgggtttgtcagagatagcttttattattttgaggactataacttcaaacctagtttgttgagggtttttaacatgaat

SEQ ID NO: 44667 - DNA, 80 bp, synthetic construct
  source 1..80: mol_type = other DNA
ctttttggtgtgttgctggatttcatttggtagtattttgtggaggatttttgcatatatgttcatcagggatattggcc

SEQ ID NO: 44668 - DNA, 80 bp, synthetic construct; identical to SEQ ID NO: 11981
  source 1..80: mol_type = other DNA

SEQ ID NO: 44669 - DNA, 80 bp, synthetic construct
  source 1..80: mol_type = other DNA
ttcctgattgtgtttatttagattatctcccccctcctttttttattagtctagttagtgcctatcaaccttatttattc

SEQ ID NO: 44670 - DNA, 80 bp, synthetic construct
  source 1..80: mol_type = other DNA
tctatctttttgatgtgggcatttagcactatagttttcccttaacactgctttagctgtgtcccagattctggtatgtt

SEQ ID NO: 44671 - DNA, 80 bp, synthetic construct
  source 1..80: mol_type = other DNA
tggttggtatttcagggtttttttgtttttttgagatgagtctcactctgtcaaccagactggagtgcaatggcgtgatc

SEQ ID NO: 44672 - DNA, 80 bp, synthetic construct; identical to SEQ ID NO: 11982
  source 1..80: mol_type = other DNA

SEQ ID NO: 44673 - DNA, 80 bp, synthetic construct
  source 1..80: mol_type = other DNA
tccatcccttactttgaggctattggtgtccctgcatatgagatgggtctcttgaagacatacagttgggtcttgcttct

SEQ ID NO: 44674 - DNA, 80 bp, synthetic construct
  source 1..80: mol_type = other DNA
tactcgagtatatttttgtgatggccagtattggtctgtacatctcagggtggcttaaagcactaggagaaagcatgcaa

SEQ ID NO: 44675 - DNA, 80 bp, synthetic construct
  source 1..80: mol_type = other DNA
tgtggtagattcctggcacttgaactctctacaggcccaggagagaacagctttcttgaggtcctaaggatacctgagaa

SEQ ID NO: 44676 - DNA, 80 bp, synthetic construct; identical to SEQ ID NO: 11983
  source 1..80: mol_type = other DNA

SEQ ID NO: 44677 - DNA, 80 bp, synthetic construct
  source 1..80: mol_type = other DNA
aacttccgtgggccaggttccttcacacataatttcaagtcatgctaaaatgaatgcatccaaggaaaattttatcatac

SEQ ID NO: 44678 - DNA, 80 bp, synthetic construct
  source 1..80: mol_type = other DNA
tgtgttatccccactccatcatgctgcctctccaacctgcagcccagtgcccagggcacaggggtcaggccaagatcaga

SEQ ID NO: 44679 - DNA, 80 bp, synthetic construct
  source 1..80: mol_type = other DNA
agttgtaaatacggggtaaggtacatggatgacaccatctccatatgtgtatgtgatagagtggcaggccagaagttaat

SEQ ID NO: 44680 - DNA, 80 bp, synthetic construct
  source 1..80: mol_type = other DNA
ttataatggggtcatatcaagataattcaagagggaaaataagacaaggtggctccttccctgaattggtgacacaacac

SEQ ID NO: 44681 - DNA, 80 bp, synthetic construct; identical to SEQ ID NO: 11984
  source 1..80: mol_type = other DNA

SEQ ID NO: 44682 - DNA, 80 bp, synthetic construct
  source 1..80: mol_type = other DNA
tttagaaatcattccaaatttcatgagggtaaatcaattgtaagggccattaaggttggcaagtggcagaatatggatgc

SEQ ID NO: 44683 - DNA, 80 bp, synthetic construct
  source 1..80: mol_type = other DNA
tggaagctacaggtctgtttcagatggatctattctttttcctgggttcagtgaagttatttggccataaagccctaagc

SEQ ID NO: 44684 - DNA, 80 bp, synthetic construct
  source 1..80: mol_type = other DNA
tatagcaatgggggtttcaggacaatttacctcttgaacataagtagatatgctcaagaaagctatcccaaggacagggt

SEQ ID NO: 44685 - DNA, 80 bp, synthetic construct
  source 1..80: mol_type = other DNA
cctcaaaggtctgtgttagagcaactgtggttaaaatacgagagtaggaaaagtgagattctccagttaagttactaata

SEQ ID NO: 44686 - DNA, 80 bp, synthetic construct; identical to SEQ ID NO: 11985
  source 1..80: mol_type = other DNA

SEQ ID NO: 44687 - DNA, 80 bp, synthetic construct
  source 1..80: mol_type = other DNA
tggatttcaagaaggagcaaattacctctgctaatgcagataaagacgccaccatttttggttttcaggatttcacaggg

SEQ ID NO: 44688 - DNA, 80 bp, synthetic construct
  source 1..80: mol_type = other DNA
tgttgcccaggctggagtgcaatgatgcgatctcagcttactgcaacctccacctcctgggttcaagtgtttctcctgtc

SEQ ID NO: 44689 - DNA, 80 bp, synthetic construct
  source 1..80: mol_type = other DNA
ggcgtgagccactgtgcccggccacaataagtttttaattaccagagtcagtggttcctgtcattgattgagcttactga

SEQ ID NO: 44690 - DNA, 80 bp, synthetic construct; identical to SEQ ID NO: 11986
  source 1..80: mol_type = other DNA

SEQ ID NO: 44691 - DNA, 80 bp, synthetic construct
  source 1..80: mol_type = other DNA
tttaatacgtaagcaaattaagagcagcttgttaaaatgcagacgtttaaaaacttggtgcaggcctgaaattctgcact

SEQ ID NO: 44692 - DNA, 80 bp, synthetic construct
  source 1..80: mol_type = other DNA
cacagttttaaccttccctgattctctgtggagtagaatcttctcccttacttccagtcagacaggtccccatggataag

SEQ ID NO: 44693 - DNA, 80 bp, synthetic construct
  source 1..80: mol_type = other DNA
tccatctgtagatatcaagaaatgagtatgaactgttaggcattccccaagattgttgttcaaagatcctcccaagtttg

SEQ ID NO: 44694 - DNA, 80 bp, synthetic construct; identical to SEQ ID NO: 11987
  source 1..80: mol_type = other DNA

SEQ ID NO: 44695 - DNA, 80 bp, synthetic construct
  source 1..80: mol_type = other DNA
ggtggagtgcagagatgaccactaaatgaaagaatcactcgtactggttgaaacaataccaataaataccttaggttctg

SEQ ID NO: 44696 - DNA, 80 bp, synthetic construct
  source 1..80: mol_type = other DNA
gtatgagcagcagtacaagcctttgaaggctgtgtgctgttcagaacttggagctggttgggggcctccgatgccctgtg

SEQ ID NO: 44697 - DNA, 80 bp, synthetic construct
  source 1..80: mol_type = other DNA
attcccacttaatatagcccaccttctgtcatttgacattttctaacactggagtggtggttcccaatctcttcaccatc

SEQ ID NO: 44698 - DNA, 80 bp, synthetic construct; identical to SEQ ID NO: 11988
  source 1..80: mol_type = other DNA

SEQ ID NO: 44699 - DNA, 80 bp, synthetic construct
  source 1..80: mol_type = other DNA
tccttcagaatcacacccccgagatatatgattcataaccttatggctagaaaaaagaggacatgatcattctacaggtc

SEQ ID NO: 44700 - DNA, 80 bp, synthetic construct
  source 1..80: mol_type = other DNA
ggcctgcccacctgaatcactgttgtctacataatgcaacttaaccatcctgttctgcgtttagctattcaagacttttg

SEQ ID NO: 44701 - DNA, 80 bp, synthetic construct
  source 1..80: mol_type = other DNA
ctcctacgtggcaatgggtgccagatacccttcctcagctaggatataggggtccagatttccataatatctatagattg

SEQ ID NO: 44702 - DNA, 80 bp, synthetic construct
  source 1..80: mol_type = other DNA
agatatattatacatatcactccatgtaatcctcccaacaaaatgatgtcatctaagagatgagaaactgggacccagac

SEQ ID NO: 44703 - DNA, 80 bp, synthetic construct; identical to SEQ ID NO: 11989
  source 1..80: mol_type = other DNA

SEQ ID NO: 44704 - DNA, 80 bp, synthetic construct
  source 1..80: mol_type = other DNA
gaggggaattaagaagattctggataggtttgtaggagaggcaaggtgtgtagggtatatgtggggacaaagggagcaat

SEQ ID NO: 44705 - DNA, 80 bp, synthetic construct
  source 1..80: mol_type = other DNA
ggactgcagaagttcaagaatgatgagaactgaggaaacgaagataaacacagagataaacacagacaacttcactgcag

SEQ ID NO: 44706 - DNA, 80 bp, synthetic construct
  source 1..80: mol_type = other DNA
cctggttcaagtctcctgcctcagcctcccgagtagctgggattacatgcacgcgccaccatgcctggctaatttttgta

SEQ ID NO: 44707 - DNA, 80 bp, synthetic construct; identical to SEQ ID NO: 11990
  source 1..80: mol_type = other DNA

SEQ ID NO: 44708 - DNA, 80 bp, synthetic construct
  source 1..80: mol_type = other DNA
cagacataagccatcgtgccaggccaagaaatggcttttaaaaatgctgatttgaaagcaaaagagaaggaagtagagga

SEQ ID NO: 44709 - DNA, 80 bp, synthetic construct
  source 1..80: mol_type = other DNA
cttcctcacaagtctctcatccataaccttagtccagcccaatggacaaaaccatgaggaacctcaaacacccttccaaa

SEQ ID NO: 44710 - DNA, 80 bp, synthetic construct
  source 1..80: mol_type = other DNA
agggaggcaattgttatagtccagaactgaaataggacagtggaagtggaaatggagggaggggacaacaaagacatgtt

SEQ ID NO: 44711 - DNA, 80 bp, synthetic construct; identical to SEQ ID NO: 11991
  source 1..80: mol_type = other DNA

SEQ ID NO: 44712 - DNA, 80 bp, synthetic construct
  source 1..80: mol_type = other DNA
tgatcgatgataacactgtgttgatcccagagatgacaaaggggctgagtgtgagataatggagttcctgaaacccctac

SEQ ID NO: 44713 - DNA, 80 bp, synthetic construct
  source 1..80: mol_type = other DNA
tgactcaacaagacagccacaggaggcagggcaaggtggctcacgcttgtaatcccagcactttggaaggccgaggcagg

SEQ ID NO: 44714 - DNA, 80 bp, synthetic construct
  source 1..80: mol_type = other DNA
gcagtgagccgagatcatgccactgcactccagcctggcgatagagcaagacaatgtcaaaaaaaaaaaaaaaaaaaaaa

SEQ ID NO: 44715 - DNA, 80 bp, synthetic construct; identical to SEQ ID NO: 11992
  source 1..80: mol_type = other DNA

SEQ ID NO: 44716 - DNA, 80 bp, synthetic construct
  source 1..80: mol_type = other DNA
acaccatcacctgggtagttccctccattctcctatgacttccaataagtcattagcagatcacctatcatctctttaat

SEQ ID NO: 44717 - DNA, 80 bp, synthetic construct
  source 1..80: mol_type = other DNA
ccagcaagactgctgaggaaatgtgacacctcaacatgctgatgagggaaaggataaataaagggctatatagtcatcaa

SEQ ID NO: 44718 - DNA, 80 bp, synthetic construct
  source 1..80: mol_type = other DNA
aacttcctaatactctgagccagagaaggacattctctacacctacattacaacttccctcttcagacattgatttttaa

SEQ ID NO: 44719 - DNA, 80 bp, synthetic construct
  source 1..80: mol_type = other DNA
tttcacaaaggtaaaatatctcatcaaggtagagtaacacaagagctgttgacccagtattagtccttggacatcctgac

SEQ ID NO: 44720 - DNA, 80 bp, synthetic construct; identical to SEQ ID NO: 11993
  source 1..80: mol_type = other DNA

SEQ ID NO: 44721 - DNA, 80 bp, synthetic construct
  source 1..80: mol_type = other DNA
agacattagatttaggaaaccatcaataatttagttttgatggatggcaatggtggtggggagagacatggggtaatgaa

SEQ ID NO: 44722 - DNA, 80 bp, synthetic construct
  source 1..80: mol_type = other DNA
cccttcctaaagaaatagagccagtttgagaaacaggaaaatcaagttccatactttcctagcctatgaaataccagtca

SEQ ID NO: 44723 - DNA, 80 bp, synthetic construct
  source 1..80: mol_type = other DNA
caagcaaggtggtaacataagagtcagacttgataaaagtccatttcccaggaccacttgacaataagggcacagaaaag

SEQ ID NO: 44724 - DNA, 80 bp, synthetic construct; identical to SEQ ID NO: 11994
  source 1..80: mol_type = other DNA

SEQ ID NO: 44725 - DNA, 80 bp, synthetic construct
  source 1..80: mol_type = other DNA
aattaagggtggacccttaattcaatgactagtttccttgtaagagggacacttggatgcaaagagacccacccatagag

SEQ ID NO: 44726 - DNA, 80 bp, synthetic construct
  source 1..80: mol_type = other DNA
gacttctggcctccagaattttgaccaaataaatttctgttgttttaaaccacccagtttttggtagcttgttaaagcag

SEQ ID NO: 44727 - DNA, 80 bp, synthetic construct
  source 1..80: mol_type = other DNA
actgagcagaacagcaggagaatgaacaattagtatcagattagcaacttcacaggtaaggtaaagggcatgggaattta

SEQ ID NO: 44728 - DNA, 80 bp, synthetic construct
  source 1..80: mol_type = other DNA
tgacagatgtgacttctgaaattaggccattaaaaacaatgtagctttctccctgctctcgctctcaaatcacttgctct

SEQ ID NO: 44729 - DNA, 80 bp, synthetic construct; identical to SEQ ID NO: 11995
  source 1..80: mol_type = other DNA

SEQ ID NO: 44730 - DNA, 80 bp, synthetic construct
  source 1..80: mol_type = other DNA
ataagaacctttaacatagtcttcaagtcctagtaagtactcttcctgcctacaagacacccgctatgtgatttcttcct

SEQ ID NO: 44731 - DNA, 80 bp, synthetic construct
  source 1..80: mol_type = other DNA
atcagtagctgggagcaaaagacacttgcggtaagggtcctcgggtttttcactgcaagacttttacctgtcaaaaaaat

SEQ ID NO: 44732 - DNA, 80 bp, synthetic construct
  source 1..80: mol_type = other DNA
tattcccttagaccaagatctggctacagaatttgtgaatccctgtgcaaaacaaaaacgtggggtcccttgttcaagaa

SEQ ID NO: 44733 - DNA, 80 bp, synthetic construct; identical to SEQ ID NO: 11996
  source 1..80: mol_type = other DNA

SEQ ID NO: 44734 - DNA, 80 bp, synthetic construct
  source 1..80: mol_type = other DNA
cattcttatctcacagtctgcttcttggtaaacccaaaccatgacatctttcatctttcaagccaactctaacttggaat

SEQ ID NO: 44735 - DNA, 80 bp, synthetic construct
  source 1..80: mol_type = other DNA
accttgtgtttggactttgagacaaaaagctgttaatgaaggctgttaagcagcagttacagggtcttattttagagcta

SEQ ID NO: 44736 - DNA, 80 bp, synthetic construct
  source 1..80: mol_type = other DNA
aagaataaatcaatctgtgtcacataagtggccacaagtactgggatcacctacccattgagcccctgaatttaactagc

SEQ ID NO: 44737 - DNA, 80 bp, synthetic construct; identical to SEQ ID NO: 11997
  source 1..80: mol_type = other DNA

SEQ ID NO: 44738 - DNA, 80 bp, synthetic construct
  source 1..80: mol_type = other DNA
gtctgctgcacactggaatcacttgatttttttaaacaatgatgtctggcttccaccctgagacattctcatttgattgg

SEQ ID NO: 44739 - DNA, 80 bp, synthetic construct
  source 1..80: mol_type = other DNA
ttaccgccatacctgtactgcactccaaacagtgggacaaagcaaggggcatgaaccagaagctgcacacaccatctctg

SEQ ID NO: 44740 - DNA, 80 bp, synthetic construct
  source 1..80: mol_type = other DNA
gcttgtctttttcaaacagaagcagcccaatctggcaaaagtaccgatccttagatctggagacaaaactcaacaacggg

SEQ ID NO: 44741 - DNA, 80 bp, synthetic construct; identical to SEQ ID NO: 11998
  source 1..80: mol_type = other DNA

SEQ ID NO: 44742 - DNA, 80 bp, synthetic construct
  source 1..80: mol_type = other DNA
ctagatatgcttggtgctgcctttgcattcaagtcctgttttccagacgaaatacagacataatccaattgtaatttcat

SEQ ID NO: 44743 - DNA, 80 bp, synthetic construct
  source 1..80: mol_type = other DNA
tcacttaatgacactctagtattatatactgtttacagattaaaaacttaagtttaaaaaggtaatttgtttgaagtcac

SEQ ID NO: 44744 - DNA, 80 bp, synthetic construct
  source 1..80: mol_type = other DNA
agctatattactttgcagggtttttatgtctaagttattttctcctcctgttccacttccaccctcccattcactctctt

SEQ ID NO: 44745 - DNA, 80 bp, synthetic construct; identical to SEQ ID NO: 11999
  source 1..80: mol_type = other DNA

SEQ ID NO: 44746 - DNA, 80 bp, synthetic construct
  source 1..80: mol_type = other DNA
gatcaccagaagctccctactatcaacacaaattggaaaatctctggtgtgattatgaggagaccattcagtattttctt

SEQ ID NO: 44747 - DNA, 80 bp, synthetic construct
  source 1..80: mol_type = other DNA
tgtttacttaggtaaagcatatacaggaagatgcgggaatcataataaatgcttatgaagcaaaactaaatgcacctgta

SEQ ID NO: 44748 - DNA, 80 bp, synthetic construct
  source 1..80: mol_type = other DNA
acagtggcttctgcttctgaggaggcctcaggaaatttacaatcatggccgaaggtgaacagaaagcaggcacatcttaa

SEQ ID NO: 44749 - DNA, 80 bp, synthetic construct; identical to SEQ ID NO: 12000
  source 1..80: mol_type = other DNA

SEQ ID NO: 44750 - DNA, 80 bp, synthetic construct
  source 1..80: mol_type = other DNA
atagagtcaagggtgattattccccagctttgagatttaatgtctgccctcttaggctttggacttgcttggggcttatt

SEQ ID NO: 44751 - DNA, 80 bp, synthetic construct
  source 1..80: mol_type = other DNA
ggggattaagtatagttgtatgtgagaagaacatgggtttgggggaccacaggcagaatgcaatggtttgaatgtttgtc

SEQ ID NO: 44752 - DNA, 80 bp, synthetic construct
  source 1..80: mol_type = other DNA
tgtgatgccccataccacctcaggattctgcagagttcccatgagtaaggaggctctgaccagatgcatccccttgacct

SEQ ID NO: 44753 - DNA, 80 bp, synthetic construct; identical to SEQ ID NO: 12001
  source 1..80: mol_type = other DNA

SEQ ID NO: 44754 - DNA, 80 bp, synthetic construct
  source 1..80: mol_type = other DNA
tctaacaagggagggcaagaaaaaacaacagttctctttggtgggtgtagatcttaggcagataaagaaacttcaactta

SEQ ID NO: 44755 - DNA, 80 bp, synthetic construct
  source 1..80: mol_type = other DNA
attccaaagacttagtatacaaaagaacataaaatatcttatttgtaattgtttaaaactgattacatgttaaaatgata

SEQ ID NO: 44756 - DNA, 80 bp, synthetic construct
  source 1..80: mol_type = other DNA
gtcacccagtttggagtacagtcgcgcgatctgggcttactgcaacctctgcctcccgggttcaagcgattctcctgcct

SEQ ID NO: 44757 - DNA, 80 bp, synthetic construct; identical to SEQ ID NO: 12002
  source 1..80: mol_type = other DNA

SEQ ID NO: 44758 - DNA, 80 bp, synthetic construct
  source 1..80: mol_type = other DNA
cacacggatagggcaagcacacatacatgtgtgcatatgtatgagactgataaacaatccaataggaaaaatgggcaaag

SEQ ID NO: 44759 - DNA, 80 bp, synthetic construct
  source 1..80: mol_type = other DNA
gagcaggatcatacattgttgtaaggaaatgtaaaggttaacagcctactgagaaagcaatatggcaacatccatcaaat

SEQ ID NO: 44760 - DNA, 80 bp, synthetic construct
  source 1..80: mol_type = other DNA
aggttaaaaacattacctgcaaaacaagacctgttatggaattattaaggattataaataaaaatatcagcaaattttta

SEQ ID NO: 44761 - DNA, 80 bp, synthetic construct; identical to SEQ ID NO: 12003
  source 1..80: mol_type = other DNA

SEQ ID NO: 44762 - DNA, 80 bp, synthetic construct
  source 1..80: mol_type = other DNA
tctcttttgtatatccaagttgccatcattagtactcctgcactttggggccactgtcatgtaaaataagggttccatga

SEQ ID NO: 44763 - DNA, 80 bp, synthetic construct
  source 1..80: mol_type = other DNA
atggagtggtatggcatgagatttcatcatgttcatcagaatggtgcagcgcccaatttaaaacaggaattgtttaggtg

SEQ ID NO: 44764 - DNA, 80 bp, synthetic construct
  source 1..80: mol_type = other DNA
tcatgatatgctggtgtggataaaaataggtgcaaccttactgaagttgaccatgaggttgatcacctgttgaccactga

SEQ ID NO: 44765 - DNA, 80 bp, synthetic construct; identical to SEQ ID NO: 12004
  source 1..80: mol_type = other DNA

SEQ ID NO: 44766 - DNA, 80 bp, synthetic construct
  source 1..80: mol_type = other DNA
gtgatagagaaagagtacttcacgcagaaccagctgtgtgggagatcagtctccccgagcacgggggagcagagttttaa

SEQ ID NO: 44767 - DNA, 80 bp, synthetic construct
  source 1..80: mol_type = other DNA
caccggaggtcgggaattggaaaccagcctggccaacattgtgaaaccctgtctctactaaaaaacaaaaaaaaaaaaac

SEQ ID NO: 44768 - DNA, 80 bp, synthetic construct
  source 1..80: mol_type = other DNA
aaaaaaaaaaaaaaaaaaaaaaagagccagtttattgatgtgggtagtgccagctgacccatcaagtacggggtctgcaa

SEQ ID NO: 44769 - DNA, 80 bp, synthetic construct; identical to SEQ ID NO: 12005
  source 1..80: mol_type = other DNA

SEQ ID NO: 44770 - DNA, 80 bp, synthetic construct
  source 1..80: mol_type = other DNA
ccggtgccagggctctgacaccttgccaggcacttacggaaagataattgtaaaaatctaatagaattttaaatttccat

SEQ ID NO: 44771 - DNA, 80 bp, synthetic construct
  source 1..80: mol_type = other DNA
gtctacaaaatgaataatgcagactttaaaaagagtgaggtagctctatgtcaccaaactggaacaataaaagccactat

SEQ ID NO: 44772 - DNA, 80 bp, synthetic construct
  source 1..80: mol_type = other DNA
tatctgacctcaaccagtttcctacctacactgcttatatgcccatttgctctatatgactcagtcatttcaagattgct

SEQ ID NO: 44773 - DNA, 80 bp, synthetic construct; identical to SEQ ID NO: 12006
  source 1..80: mol_type = other DNA

SEQ ID NO: 44774 - DNA, 80 bp, synthetic construct
  source 1..80: mol_type = other DNA
ccggatatttcattattatcctgtccggagtcggcaaactacggtctactatctgtcttcgtatacgtcaaaagctaaga

SEQ ID NO: 44775 - DNA, 80 bp, synthetic construct
  source 1..80: mol_type = other DNA
cagagtctcgctctgtcgcccaggctggagtgcagtggcgagatctcggctcactgcaacctctgcctcctgctttcaag

SEQ ID NO: 44776 - DNA, 80 bp, synthetic construct
  source 1..80: mol_type = other DNA
ctcggcctcccaaagtgataggattacaggcgtgagccaccgcgcccagccttcatttagtactgtctaatgatgttttc

SEQ ID NO: 44777 - DNA, 80 bp, synthetic construct; identical to SEQ ID NO: 12007
  source 1..80: mol_type = other DNA

SEQ ID NO: 44778 - DNA, 80 bp, synthetic construct
  source 1..80: mol_type = other DNA
tcaaactacccttacaagtgagacatcttgtgaattagaacaagtgctgctgctaaaatccctaacggctacatagcaat

SEQ ID NO: 44779 - DNA, 80 bp, synthetic construct
  source 1..80: mol_type = other DNA
tggctcccaagatgagaggttaaataatgcagggtgtttgtaaacagcagcacaatttacaccggaaattagggcccttt

SEQ ID NO: 44780 - DNA, 80 bp, synthetic construct
  source 1..80: mol_type = other DNA
ctagcactaacccctcctcctcagccttttcacacctctacccactactagcccctccccagccccatcacctcttcccg

SEQ ID NO: 44781 - DNA, 80 bp, synthetic construct; identical to SEQ ID NO: 12008
  source 1..80: mol_type = other DNA

SEQ ID NO: 44782 - DNA, 80 bp, synthetic construct
  source 1..80: mol_type = other DNA
accgcggggagaacttacctaatccttgaatgttaaaaggctaaaaactccactagtcggaagtgacgtgccagcttagc

SEQ ID NO: 44783 - DNA, 80 bp, synthetic construct
  source 1..80: mol_type = other DNA
cggggcctggagcctggactagacagcctcgccggccggggcgccagtccagcgccctgcgggcaatgggcttcagcgct

SEQ ID NO: 44784 - DNA, 80 bp, synthetic construct
  source 1..80: mol_type = other DNA
agacccggccgcggccgcccgccgacaccccagcttccactgacacgagcctcggcgcggcttccgcttccggcgagtat

SEQ ID NO: 44785 - DNA, 80 bp, synthetic construct; identical to SEQ ID NO: 12009
  source 1..80: mol_type = other DNA

SEQ ID NO: 44786 - DNA, 80 bp, synthetic construct
  source 1..80: mol_type = other DNA
cacacctctttctcacctggacacgcatcccttcctaccctgccagccacgacgtttcctctttcccctctccaatgccc

SEQ ID NO: 44787 - DNA, 80 bp, synthetic construct
  source 1..80: mol_type = other DNA
aagaggaaggactaacgcagaggcactcaaggtctcactatgactgtagttgagagtcctctcccttcttccctaaccct

SEQ ID NO: 44788 - DNA, 80 bp, synthetic construct
  source 1..80: mol_type = other DNA
aaatcatctgactgaacttctctcctattgctgacagaagaaattcaaatccaaagaagttatcagttcctactccaaat

SEQ ID NO: 44789 - DNA, 80 bp, synthetic construct; identical to SEQ ID NO: 12010
  source 1..80: mol_type = other DNA

SEQ ID NO: 44790 - DNA, 80 bp, synthetic construct
  source 1..80: mol_type = other DNA
tcactacaaatagactcgttgctctcttttcaagaagtcgttggcctgagctcagcaatatttaatatggttgccataat

SEQ ID NO: 44791 - DNA, 80 bp, synthetic construct
  source 1..80: mol_type = other DNA
gcctcattcattccatttgttagcctttagagcagtggtatctaaccctttcaatatgaggactctctttgcttatctgt

SEQ ID NO: 44792 - DNA, 80 bp, synthetic construct
  source 1..80: mol_type = other DNA
gttggatattgtgatttagaagaatgagagaacagtgtcagagaatcaagcttagactccagtggattaatcataaagct

SEQ ID NO: 44793 - DNA, 80 bp, synthetic construct
  source 1..80: mol_type = other DNA
ggatcaggagaagtatgctgagctagagttgaaggaagcttctctttctaacaagagaaagcagaggtaagagacaagat

SEQ ID NO: 44794 - DNA, 80 bp, synthetic construct; identical to SEQ ID NO: 12011
  source 1..80: mol_type = other DNA

SEQ ID NO: 44795 - DNA, 80 bp, synthetic construct
  source 1..80: mol_type = other DNA
gaaaaaacctccaattaatatttttattttctctgtcctcttccccactcccaagttaaattatggcagagacaagtctg

SEQ ID NO: 44796 - DNA, 80 bp, synthetic construct
  source 1..80: mol_type = other DNA
tagagagggacttcccttgtcctgtctgtcgaaagacatcccgctaccgcagtctccgacctaatcggcaactaggcagt

SEQ ID NO: 44797 - DNA, 80 bp, synthetic construct
  source 1..80: mol_type = other DNA
ttgtgccactggacgatgctacacaggagtacaaggtggggaagcagacacacgatgtcagtgtgggtaaaaagggagaa

SEQ ID NO: 44798 - DNA, 80 bp, synthetic construct; identical to SEQ ID NO: 12012
  source 1..80: mol_type = other DNA

SEQ ID NO: 44799 - DNA, 80 bp, synthetic construct
  source 1..80: mol_type = other DNA
atacctaccggactaagctgaaccattcaattgtttgcagcttctctaggtaatgggtaacatggcatatcatttaactt

SEQ ID NO: 44800 - DNA, 80 bp, synthetic construct
  source 1..80: mol_type = other DNA
atgggaggacaggtttaaagagagatattagggtacagaaggttgcttggatggtaataggcagttgcctcagtaagaaa

SEQ ID NO: 44801 - DNA, 80 bp, synthetic construct
  source 1..80: mol_type = other DNA
atcaagaggcagtaagatggctaggaagcaaataaatggtttaaaacaaatggtttaatctctgaatggtaggtatacca

SEQ ID NO: 44802 - DNA, 80 bp, synthetic construct; identical to SEQ ID NO: 12013
  source 1..80: mol_type = other DNA

SEQ ID NO: 44803 - DNA, 80 bp, synthetic construct
  source 1..80: mol_type = other DNA
gcacatgcctgtagtcccagcgacttgggcggctgaggcaggagaattgcttgaacctgggaggcggaggttgcagtgag

SEQ ID NO: 44804 - DNA, 80 bp, synthetic construct
  source 1..80: mol_type = other DNA
tgtcatgaattaagtattaagagggatttaagagatgaagaacagacagaatatcttacatctggtgagctgagagagtt

SEQ ID NO: 44805 - DNA, 80 bp, synthetic construct
  source 1..80: mol_type = other DNA
aaagggaaaaggagctgaccaagagtctcagaagaactatctaatgacattaggaccacattcttaaaactcaagtaagc

SEQ ID NO: 44806 - DNA, 80 bp, synthetic construct
  source 1..80: mol_type = other DNA
cttaattttcatacaattttgcacctcttttatagcattgccttatttgtagcatggtattttggtgtctgtctgtcttc

SEQ ID NO: 44807 - DNA, 80 bp, synthetic construct; identical to SEQ ID NO: 12014
  source 1..80: mol_type = other DNA

SEQ ID NO: 44808 - DNA, 80 bp, synthetic construct
  source 1..80: mol_type = other DNA
ggaatactagttcttcgtgaatcagtaaatatttgttaagctcctggtttaggccaaacccggtatttgacactggggaa

SEQ ID NO: 44809 - DNA, 80 bp, synthetic construct
  source 1..80: mol_type = other DNA
tcattaaaggtttcccgaagaagtaatgagtttttaagagttgacatgtagagatcaccagaagctaaatccaagttttg

SEQ ID NO: 44810 - DNA, 80 bp, synthetic construct
  source 1..80: mol_type = other DNA
tttagaggccttccaagaaacctaaaaatatgaaaatggtgcttattgctagtcattaactttcttcttcatgttgatca

SEQ ID NO: 44811 - DNA, 80 bp, synthetic construct
  source 1..80: mol_type = other DNA
caccaacattcctcttgtgaccatttgaattctccctccttctccctcatcagactcaatgcccctttaaaaaataattt

SEQ ID NO: 44812 - DNA, 80 bp, synthetic construct; identical to SEQ ID NO: 12015
  source 1..80: mol_type = other DNA

SEQ ID NO: 44813 - DNA, 80 bp, synthetic construct
  source 1..80: mol_type = other DNA
tgtgtttatactatataaaatggcattcaagcccaggcctatgtttttgtttttgtggtttttttttttttttttttttt

SEQ ID NO: 44814 - DNA, 80 bp, synthetic construct
  source 1..80: mol_type = other DNA
tatttttagtagagacagggtttcaccgtgttatccaggatggtctcgatctcctgaccttgtgatctgcccacctcggc

SEQ ID NO: 44815 - DNA, 80 bp, synthetic construct
  source 1..80: mol_type = other DNA
ccccaaccatggaaaacaagaagatgtgcctatttccaaaatatcctcagagtgtgttaacagcttcatcaagaaccact

SEQ ID NO: 44816 - DNA, 80 bp, synthetic construct; identical to SEQ ID NO: 12016
  source 1..80: mol_type = other DNA

SEQ ID NO: 44817 - DNA, 80 bp, synthetic construct
  source 1..80: mol_type = other DNA
cagtctctgcttctcactttgcttcatcatcagtcacatgatgcttggggaattctttagggagatcactatttgttgta

SEQ ID NO: 44818 - DNA, 80 bp, synthetic construct
  source 1..80: mol_type = other DNA
gaaagcatgtttcaaatttcaagaaactaaattactaacaaacttctgtaacctgttcctggggtaggaattgccagttc

SEQ ID NO: 44819 - DNA, 80 bp, synthetic construct
  source 1..80: mol_type = other DNA
ggtgcatgtgttgcaatatgcaaaggatgacaatcttatttttaactttttattatttgtactttcctttttgtttcgtt

SEQ ID NO: 44820 - DNA, 80 bp, synthetic construct; identical to SEQ ID NO: 12017
  source 1..80: mol_type = other DNA

SEQ ID NO: 44821 - DNA, 80 bp, synthetic construct
  source 1..80: mol_type = other DNA
cttaaattaaaacaaatatatatatccgcagtggtcttcactaccaagtcatcagtaggggggtgatagtgatggagcca

SEQ ID NO: 44822 - DNA, 80 bp, synthetic construct
  source 1..80: mol_type = other DNA
tggtgcaacaatttcagcttactccaacctctgccttctttgctcaagccatcatcccacctcagcctctccagtagctg

SEQ ID NO: 44823 - DNA, 80 bp, synthetic construct
  source 1..80: mol_type = other DNA
cccagcctttgttaaaccattttcaatgaaactggaagtctgtgttaattcatacatatggtgggtgagagaaaggcttc

SEQ ID NO: 44824 - DNA, 80 bp, synthetic construct; identical to SEQ ID NO: 12018
  source 1..80: mol_type = other DNA

SEQ ID NO: 44825 - DNA, 80 bp, synthetic construct
  source 1..80: mol_type = other DNA
tgccaggtgtactcaaagggtctttgctacggaaaagtgatttctcccatccccttctaaccatttttgtgttcttatct

SEQ ID NO: 44826 - DNA, 80 bp, synthetic construct
  source 1..80: mol_type = other DNA
aaaaggacagaaacatagtttaaaggatacaggcatacctcagagatattgtgggttcagttccataccacttcaataaa

SEQ ID NO: 44827 - DNA, 80 bp, synthetic construct
  source 1..80: mol_type = other DNA
gtttactttcaactcttccttttatgaaagatatctctgagcatgtgatgctgtttaatagcattttactcaccagtaga

SEQ ID NO: 44828 - DNA, 80 bp, synthetic construct; identical to SEQ ID NO: 12019
  source 1..80: mol_type = other DNA

SEQ ID NO: 44829 - DNA, 80 bp, synthetic construct
  source 1..80: mol_type = other DNA
agtaatattttgaaaggaatctttttttctgagcagtaggtctcaacttaaaattttcagtaaagggttgggcacggtgg

SEQ ID NO: 44830 - DNA, 80 bp, synthetic construct
  source 1..80: mol_type = other DNA
tcgggaggctgagggaggagaatcgcttgaacccgagaggcagaggttgcagtgagccaagatcatgcagttgcactcct

SEQ ID NO: 44831 - DNA, 80 bp, synthetic construct
  source 1..80: mol_type = other DNA
ccatctctacaaaaggtaattttttttaattaaaaacattcagtataccatgctgtatacaggtgtactgtcatgtaggc

SEQ ID NO: 44832 - DNA, 80 bp, synthetic construct; identical to SEQ ID NO: 12020
  source 1..80: mol_type = other DNA

SEQ ID NO: 44833 - DNA, 80 bp, synthetic construct
  source 1..80: mol_type = other DNA
tctgcagcttccttacctctctcagctttcatagaactgaaggagttaacagccttgctctggattgggctttggcttaa

SEQ ID NO: 44834 - DNA, 80 bp, synthetic construct
  source 1..80: mol_type = other DNA
aagaggcctagctttcagcccatcttggctttcaatgtgcctttctcactaagcttaaacatttttaggttttgatttaa

SEQ ID NO: 44835 - DNA, 80 bp, synthetic construct
  source 1..80: mol_type = other DNA
gatgagggaatagctggtagtggatcagttagaacacataaaatatatttatcgattaagttgttcgtcttatatggatg

SEQ ID NO: 44836 - DNA, 80 bp, synthetic construct; identical to SEQ ID NO: 12021
  source 1..80: mol_type = other DNA

SEQ ID NO: 44837 - DNA, 80 bp, synthetic construct
  source 1..80: mol_type = other DNA
gttagcaaaactagggaacatattttttatcttagagattagattaccagcatttgaagcagtgaggcttcattgtacat

SEQ ID NO: 44838 - DNA, 80 bp, synthetic construct
  source 1..80: mol_type = other DNA
ggaaatccttgtgggacagagatttgtcttctttgtcttctggaccccaagtattcacaaatcagtattagcacacagtt

SEQ ID NO: 44839 - DNA, 80 bp, synthetic construct
  source 1..80: mol_type = other DNA
ctcctgcctcagcctcctgagtagctggggttacaggcgcacaccaccacacctggctaatttttgtatttttagtaaag

SEQ ID NO: 44840 - DNA, 80 bp, synthetic construct
  source 1..80: mol_type = other DNA
gatgtttattaactaatgcaagacaggggataccaaaccgtaacaggaatgtgtgatttgttcctatgccaccagtctgg

SEQ ID NO: 44841 - DNA, 80 bp, synthetic construct; identical to SEQ ID NO: 12022
  source 1..80: mol_type = other DNA

SEQ ID NO: 44842 - DNA, 80 bp, synthetic construct
  source 1..80: mol_type = other DNA
ccttccttctaggatgtcaaaagtaccctggaaaagtaagtgattgttgtatctctctgagtgagttaggtcttggctta

SEQ ID NO: 44843 - DNA, 80 bp, synthetic construct
  source 1..80: mol_type = other DNA
acttcttgagaaggagaatgataaggtagaatcagattctacttgtgccagtgggtggaattgtgtccaaacaagatggc

SEQ ID NO: 44844 - DNA, 80 bp, synthetic construct
  source 1..80: mol_type = other DNA
gaggaggaagaaagtgggaagatggagaattttaatttctccctaaaaatgttaacatctgaatagtcacttggctggag

SEQ ID NO: 44845 - DNA, 80 bp, synthetic construct; identical to SEQ ID NO: 12023
  source 1..80: mol_type = other DNA

SEQ ID NO: 44846 - DNA, 80 bp, synthetic construct
  source 1..80: mol_type = other DNA
cagaacttggagtgagaggaagccttaagcgttatctactcttaggtccattcttttctaaatagagacccagaaaggtt

SEQ ID NO: 44847 - DNA, 80 bp, synthetic construct
  source 1..80: mol_type = other DNA
tggccaacacggtgaaaccccatctctactaaaaatataaaaattagccagatgtggtgttgggcgcctgtaatcccagc

SEQ ID NO: 44848 - DNA, 80 bp, synthetic construct
  source 1..80: mol_type = other DNA
tgtgaatatgcagggaaaatagtcataaaccaggccagttcctggaaaacacacatggtcaccctatccctagaccatat

SEQ ID NO: 44849 - DNA, 80 bp, synthetic construct; identical to SEQ ID NO: 12024
  source 1..80: mol_type = other DNA

SEQ ID NO: 44850 - DNA, 80 bp, synthetic construct
  source 1..80: mol_type = other DNA
tggcttctcccgccagcggatgtgaccctggaccctgagacagctcatcctaacctagtcctgtcagaggatcgtaagag

SEQ ID NO: 44851 - DNA, 80 bp, synthetic construct
  source 1..80: mol_type = other DNA
ggtgggcgacaagacccactgggcagtgggtgtatgccgggactccgtgagccgaaagggcgagttgactccactccctg

SEQ ID NO: 44852 - DNA, 80 bp, synthetic construct
  source 1..80: mol_type = other DNA
aggccggcacactgtctttctacaatgtcacagaccgctctcatatctacaccttcactgatacttttactgagaaactt

SEQ ID NO: 44853 - DNA, 80 bp, synthetic construct
  source 1..80: mol_type = other DNA
gtcttcgtgtccacctgggtccagtcctgaatcatcttggagaaacaccttggtttctaggatggttttgtgtggagggg

SEQ ID NO: 44854 - DNA, 80 bp, synthetic construct; identical to SEQ ID NO: 12025
  source 1..80: mol_type = other DNA

SEQ ID NO: 44855 - DNA, 80 bp, synthetic construct
  source 1..80: mol_type = other DNA
aaaggaacagattcctagagattaatgaagaggagggaggtttctttggtcttctattccaagggtaaggttgcgattat

SEQ ID NO: 44856 - DNA, 80 bp, synthetic construct
  source 1..80: mol_type = other DNA
aagagatcctgcaagacacatctatcctttcacagtgttcccaagggaacttggaaaggagagtcaggtattagaggaaa

SEQ ID NO: 44857 - DNA, 80 bp, synthetic construct
  source 1..80: mol_type = other DNA
agtctttctcaccctaaggacagggtggaagagggtggtatatagggaagggccagataggcaacttcatttggcttgtg

SEQ ID NO: 44858 - DNA, 80 bp, synthetic construct; identical to SEQ ID NO: 12026
  source 1..80: mol_type = other DNA

SEQ ID NO: 44859 - DNA, 80 bp, synthetic construct
  source 1..80: mol_type = other DNA
aaaataatatggaacaaaggatccactgaagtgatctctgtgttgtgtggtaatttggtgacagccttgtactgatgtgt

SEQ ID NO: 44860 - DNA, 80 bp, synthetic construct
  source 1..80: mol_type = other DNA
cgcctcccaggttcaagcaattctcctgcctcagcctccagagtagctgggattactatggactatagccatgcaccacc

SEQ ID NO: 44861 - DNA, 80 bp, synthetic construct
  source 1..80: mol_type = other DNA
gccaccgtgcccagcctacatctacattttaaacacaccactctcatttgagtccgaaaacccttgtgaaactagttcca

SEQ ID NO: 44862 - DNA, 80 bp, synthetic construct
  source 1..80: mol_type = other DNA
tcagggttcattgatcttctacccctccaattcatgtccctctgcttctgacttcagtaactgatagtcactatgagtca

SEQ ID NO: 44863 - DNA, 80 bp, synthetic construct; identical to SEQ ID NO: 12027
  source 1..80: mol_type = other DNA

SEQ ID NO: 44864 - DNA, 80 bp, synthetic construct
  source 1..80: mol_type = other DNA
agtagggcagaagctctagctgggtataaattgcacataaccatctccccaacgtagctacataaagagaccagccttct

SEQ ID NO: 44865 - DNA, 80 bp, synthetic construct
  source 1..80: mol_type = other DNA
gattgctggggttgtgtttagaaaccgatgagtttgtgaggcctccgggaggctcccgagggcgcggggactacgtttcc

SEQ ID NO: 44866 - DNA, 80 bp, synthetic construct
  source 1..80: mol_type = other DNA
gacggtgctcggcgtcccagagtgactgctcccctcccgcaggccgcccattgtgtccttgcccaggaccccgagaacca

SEQ ID NO: 44867 - DNA, 80 bp, synthetic construct; identical to SEQ ID NO: 12028
  source 1..80: mol_type = other DNA

SEQ ID NO: 44868 - DNA, 80 bp, synthetic construct
  source 1..80: mol_type = other DNA
ctaacgccacttgcacaaactagggtttgggctcggctgttttttttttttttcttccagtgtgggcaataaataataac

SEQ ID NO: 44869 - DNA, 80 bp, synthetic construct
  source 1..80: mol_type = other DNA
gacagactaagaaacaaaatggtgtagaaaaagattaactgggggagtagaatgctcacttactcatgccagtggtggcg

SEQ ID NO: 44870 - DNA, 80 bp, synthetic construct
  source 1..80: mol_type = other DNA
gttcttgaagtcttgttagggagtttgaactttatcttaaagagttccaggaaatcgatggagcttatgccgaggcctga

SEQ ID NO: 44871 - DNA, 80 bp, synthetic construct; identical to SEQ ID NO: 12029
  source 1..80: mol_type = other DNA

SEQ ID NO: 44872 - DNA, 80 bp, synthetic construct
  source 1..80: mol_type = other DNA
agaagtaccacagtcagaaaactaattctgtttctctgattctgctcatttactcagattccaaaccactacaacccttg

SEQ ID NO: 44873 - DNA, 80 bp, synthetic construct
  source 1..80: mol_type = other DNA
tttcttctgtttctgtctgtgtttcttggtcacctttgtaatcccaccatgcagggagatcgtgatttccatagaccact

SEQ ID NO: 44874 - DNA, 80 bp, synthetic construct
  source 1..80: mol_type = other DNA
tatggggcagcggagagtgtttgtatcctctaggcccactcatagtcagaaaagactcaggtcttttcccagtctcaaag

SEQ ID NO: 44875 - DNA, 80 bp, synthetic construct; identical to SEQ ID NO: 12030
  source 1..80: mol_type = other DNA

SEQ ID NO: 44876 - DNA, 80 bp, synthetic construct
  source 1..80: mol_type = other DNA
taatgatttattatttcctctggttctgtgaactaggaattctgaaagactttggctgggtggttctcctgttacatatg

SEQ ID NO: 44877 - DNA, 80 bp, synthetic construct
  source 1..80: mol_type = other DNA
ctttgatgttcccacagcatggctgactcagggtagttgtatttcttacatcccctctggcttctacaaaagcatcccaa

SEQ ID NO: 44878 - DNA, 80 bp, synthetic construct
  source 1..80: mol_type = other DNA
ccctgtctgtacttaaaatacaaaaaaattagcagggcgtggtagcaggcacctgtaattccagctactcgggaggctga

SEQ ID NO: 44879 - DNA, 80 bp, synthetic construct
  source 1..80: mol_type = other DNA
aaggcacagtgccaatgccagattcaatgtggaaggggctacactggagtttgaacgctgggaggttcattagttccctg

SEQ ID NO: 44880 - DNA, 80 bp, synthetic construct; identical to SEQ ID NO: 12031
  source 1..80: mol_type = other DNA

SEQ ID NO: 44881 - DNA, 80 bp, synthetic construct
  source 1..80: mol_type = other DNA
ttgtccctgacttggtctctccactgcctccttcacatgtcagtaaattatttgcgtagaaaatactaaacagtgtacat

SEQ ID NO: 44882 - DNA, 80 bp, synthetic construct
  source 1..80: mol_type = other DNA
taagtttaatttgggatgactgagctcgactcttgcacacttaatctgatctttggctaagtttgtcttgagtgtgttat

SEQ ID NO: 44883 - DNA, 80 bp, synthetic construct
  source 1..80: mol_type = other DNA
tcacttgtgagtctttgtggtttctttatttgttgtgggtttctatcaatatataactctaaagatcacagccctcttcc

SEQ ID NO: 44884 - DNA, 80 bp, synthetic construct; identical to SEQ ID NO: 12032
  source 1..80: mol_type = other DNA

SEQ ID NO: 44885 - DNA, 80 bp, synthetic construct
  source 1..80: mol_type = other DNA
aactagtgaaaaccagtatcgttattgtcaggaggcaaaagagagaaggattgagagactgttattttgaattcaagtag

SEQ ID NO: 44886 - DNA, 80 bp, synthetic construct
  source 1..80: mol_type = other DNA
atagattcactggaagctgcaaagagcatactgaaatgtcccctacatcctcacccagtgccccccagtggttcctcttt

SEQ ID NO: 44887 - DNA, 80 bp, synthetic construct
  source 1..80: mol_type = other DNA
acagtcacttccaatttttccctattccagcccttagcaaccactaatctgtttctgcctttacggatttgtctattctg

SEQ ID NO: 44888 - DNA, 80 bp, synthetic construct; identical to SEQ ID NO: 12033
  source 1..80: mol_type = other DNA

SEQ ID NO: 44889 - DNA, 80 bp, synthetic construct
  source 1..80: mol_type = other DNA
gttctaatttctctccatcctaatctacacttactttcagtttgttttgttgtttattatagccatcctataataacatt

SEQ ID NO: 44890 - DNA, 80 bp, synthetic construct
  source 1..80: mol_type = other DNA
gttggctatttgtatattttctttggaaaaaggtcctttcaagacctttgcccatttaaaaaaaataggttgcctttatg

SEQ ID NO: 44891 - DNA, 80 bp, synthetic construct
  source 1..80: mol_type = other DNA
tcctcaagaaccaaactgtctctctcagaccttatcttctgcctccatcctgattctttttggagcttgttctaaccctg

SEQ ID NO: 44892 - DNA, 80 bp, synthetic construct; identical to SEQ ID NO: 12034
  source 1..80: mol_type = other DNA

SEQ ID NO: 44893 - DNA, 80 bp, synthetic construct
  source 1..80: mol_type = other DNA
gatctggcagcaggatggggaggactatacctaggacatggagcttgcagagaccattttatctttttgacaactttttt

SEQ ID NO: 44894 - DNA, 80 bp, synthetic construct
  source 1..80: mol_type = other DNA
tgaatagctgggactacaggcacccgccaccatgcccggctaattttttgtatttttagtagagacggggtttcaccgtg

SEQ ID NO: 44895 - DNA, 80 bp, synthetic construct
  source 1..80: mol_type = other DNA
ccaccgcacccggctgacaacgttttttaagctctctgtactgtatatacatctaattcagtgttttggactgccataga

SEQ ID NO: 44896 - DNA, 80 bp, synthetic construct
  source 1..80: mol_type = other DNA
ctaggtttgtgtgtatggaaattacctgaggaaagtcaaattttccttcagcttccacagtctatactccctagcaatat

SEQ ID NO: 44897 - DNA, 80 bp, synthetic construct; identical to SEQ ID NO: 12035
  source 1..80: mol_type = other DNA

SEQ ID NO: 44898 - DNA, 80 bp, synthetic construct
  source 1..80: mol_type = other DNA
tttaagaagagggagattggagctctctttccctaccttgtgaggacaccgaaagaaggcagtcatctgtatgccaggaa

SEQ ID NO: 44899 - DNA, 80 bp, synthetic construct
  source 1..80: mol_type = other DNA
gtaatggaaaagaattcttttagagttttacctggtacatttgtgcctttaatacattttgagttgatttctacagattg

SEQ ID NO: 44900 - DNA, 80 bp, synthetic construct
  source 1..80: mol_type = other DNA
agtctcctgacaaacagcatgctggaagcatcagcccttcccactgcctttgctttctgttgatgacccattcttcatgg

SEQ ID NO: 44901 - DNA, 80 bp, synthetic construct; identical to SEQ ID NO: 12036
  source 1..80: mol_type = other DNA

SEQ ID NO: 44902 - DNA, 80 bp, synthetic construct
  source 1..80: mol_type = other DNA
tgagtccaggctctgacattggccagctgtgcgactgggcaatattttgtttcactctctagcctcattttcaataggta

SEQ ID NO: 44903 - DNA, 80 bp, synthetic construct
  source 1..80: mol_type = other DNA
catacaaatggtagaatactattctatgggtcatatactgctttttatttagcaaaaaaacttagtgctcttaccatttt

SEQ ID NO: 44904 - DNA, 80 bp, synthetic construct
  source 1..80: mol_type = other DNA
ataaacaatatgtaaagcttaggtatggctatacatccagcatggatgagtcttcaaaacatactattcagtggctgggt

SEQ ID NO: 44905 - DNA, 80 bp, synthetic construct
  source 1..80: mol_type = other DNA
ctactcaggaggctgaggcaggagaatcgcttgaacccgggaggcagaggttgcagtgagccgagatcacgccattgctc

SEQ ID NO: 44906 - DNA, 80 bp, synthetic construct; identical to SEQ ID NO: 12037
  source 1..80: mol_type = other DNA

SEQ ID NO: 44907 - DNA, 80 bp, synthetic construct
  source 1..80: mol_type = other DNA
cacgataaaaacgactttaaagtgaagtgaaaagagtactatgcttaagctttttgctcacattttattttacacctggg

SEQ ID NO: 44908 - DNA, 80 bp, synthetic construct
  source 1..80: mol_type = other DNA
accagcacaataaggcatcatcaaatctttgggttttgatcacctgataaataacggtttctgtgtatgtgtgtgtgtgt

SEQ ID NO: 44909 - DNA, 80 bp, synthetic construct
  source 1..80: mol_type = other DNA
ctgcacaaatgtgatttatgggtattgtatcccaaacggtcccatctctacttaacaaatggattgacccatcctgatat

SEQ ID NO: 44910 - DNA, 80 bp, synthetic construct; identical to SEQ ID NO: 12038
  source 1..80: mol_type = other DNA

SEQ ID NO: 44911 - DNA, 80 bp, synthetic construct
  source 1..80: mol_type = other DNA
cagtcttgaagtcctttgcctgaaaccaaggagagatcaaggcctagggagaagaaggggaacattctctttggaatgct

SEQ ID NO: 44912 - DNA, 80 bp, synthetic construct
  source 1..80: mol_type = other DNA
gttacaaaattgtcaggacttgtatgtggttggatgctattgtttttatcttctttcattcactgttttctgcagtatca

SEQ ID NO: 44913 - DNA, 80 bp, synthetic construct
  source 1..80: mol_type = other DNA
tagcactttggggggctgaggctaaagaatcgcttgaggccaggagtttagaaccaatctgggcaacatattgaggcgct

SEQ ID NO: 44914 - DNA, 80 bp, synthetic construct; identical to SEQ ID NO: 12039
  source 1..80: mol_type = other DNA

SEQ ID NO: 44915 - DNA, 80 bp, synthetic construct
  source 1..80: mol_type = other DNA
atttacaggacaacctccacaataaagagttatgtggcctgaaacatcaagtactcactgtaacgctgaggttgagaatc

SEQ ID NO: 44916 - DNA, 80 bp, synthetic construct
  source 1..80: mol_type = other DNA
attgtctcctctttacaactgtgggttcctggaaagcaggggctctgtctgatagctatgttttgtaactatgtgtttta

SEQ ID NO: 44917 - DNA, 80 bp, synthetic construct
  source 1..80: mol_type = other DNA
attagtgagataaagagaaggttattaataaagccctccctttattacatcggtccttcctaaaaccccagtgtggatgg

SEQ ID NO: 44918 - DNA, 80 bp, synthetic construct
  source 1..80: mol_type = other DNA
tttaaaacttcaattctcctattattatgcaaagactgccccttaaatatactcctactaaaagactatgagtggccggg

SEQ ID NO: 44919 - DNA, 80 bp, synthetic construct; identical to SEQ ID NO: 12040
  source 1..80: mol_type = other DNA

SEQ ID NO: 44920 - DNA, 80 bp, synthetic construct
  source 1..80: mol_type = other DNA
caaattgtaaagaaggatgagtccagtggtgaaaattttccacaaatattagaaatagaaaaaaacccttactgacctat

SEQ ID NO: 44921 - DNA, 80 bp, synthetic construct
  source 1..80: mol_type = other DNA
cgcagctcctgcattccttctttggaagactccccccttcaccgaggttacctaccaaatccgccatagggtgtggtcca

SEQ ID NO: 44922 - DNA, 80 bp, synthetic construct
  source 1..80: mol_type = other DNA
gccttcctttccgcccgcccccgacggctggacgcccctctgtcgattggagcggtccttagtgctacgtgtcctgggat

SEQ ID NO: 44923 - DNA, 80 bp, synthetic construct; identical to SEQ ID NO: 12041
  source 1..80: mol_type = other DNA

SEQ ID NO: 44924 - DNA, 80 bp, synthetic construct
  source 1..80: mol_type = other DNA
tttcgactgttttcaaggacagtactgaggcagcacgtttgcagagtgatatttttcaaaaatgctgtaagaaactataa

SEQ ID NO: 44925 - DNA, 80 bp, synthetic construct
  source 1..80: mol_type = other DNA
ttgcttacacaaaaaatattccaatgtcccaatatgcaacattgctgaacaaatatggagctaaacaagtggcttctaat

SEQ ID NO: 44926 - DNA, 80 bp, synthetic construct
  source 1..80: mol_type = other DNA
tgaaacaaccacctcgagtaaaacagcatttcttctcaccacacaacaaaacaaaaaccccacttgctgcatttcagttt

SEQ ID NO: 44927 - DNA, 80 bp, synthetic construct
  source 1..80: mol_type = other DNA
ttaattactaagtaaccccaattcctattgcttttagaacttcccagtttgcttcagagttcaacggcccagtgtgcaaa

SEQ ID NO: 44928 - DNA, 80 bp, synthetic construct; identical to SEQ ID NO: 12042
  source 1..80: mol_type = other DNA

SEQ ID NO: 44929 - DNA, 80 bp, synthetic construct
  source 1..80: mol_type = other DNA
tgggtaatctgtggggtttcagttacctattgcaagacattgtttactcttctcactccatgtcctttatatggtgcagt

SEQ ID NO: 44930 - DNA, 80 bp, synthetic construct
  source 1..80: mol_type = other DNA
tcaggaaggaggcagatgaagcagatgaataatcaccagcgtgtctggaaagagtgagacactctggagactcaagggac

SEQ ID NO: 44931 - DNA, 80 bp, synthetic construct
  source 1..80: mol_type = other DNA
aatgtatttttcctcaagttcttctgctgtcactttcactgcagatctcagctttgctcttccagagtccctcctttggc

SEQ ID NO: 44932 - DNA, 80 bp, synthetic construct; identical to SEQ ID NO: 12043
  source 1..80: mol_type = other DNA

SEQ ID NO: 44933 - DNA, 80 bp, synthetic construct
  source 1..80: mol_type = other DNA
acacatttctttgccttcagtcttgttctcctccaaagactgcctgcaaccagagaggtctttgtaaaggaaaatgtcat

SEQ ID NO: 44934 - DNA, 80 bp, synthetic construct
  source 1..80: mol_type = other DNA
cccatcactaacatcatattcaaggagaaagaatgaggaaggctttttctctaccatcagaaacaagacaaatataccta

SEQ ID NO: 44935 - DNA, 80 bp, synthetic construct
  source 1..80: mol_type = other DNA
atgatcatatatgcagaaaaccctaaggattacacacacacacacacacacacacacacacacacacacagaggaagaga

SEQ ID NO: 44936 - DNA, 80 bp, synthetic construct
  source 1..80: mol_type = other DNA
caagttgacccagtccaggtagagcaccgacttagaaagagaaagaaggaaacagctgaaaaaatctgagaaggcatatc

SEQ ID NO: 44937 - DNA, 80 bp, synthetic construct; identical to SEQ ID NO: 12044
  source 1..80: mol_type = other DNA

SEQ ID NO: 44938 - DNA, 80 bp, synthetic construct
  source 1..80: mol_type = other DNA
aataattttactcacaaattactacctgagtaatctcgttaatcgtccctaatctcatcctaatccccagaaactgtgag

SEQ ID NO: 44939 - DNA, 80 bp, synthetic construct
  source 1..80: mol_type = other DNA
gagagactgaagtgattcattttgaaggtggaggaagggcttacaagccaagtaacataaacagccttagaagctggaca

SEQ ID NO: 44940 - DNA, 80 bp, synthetic construct
  source 1..80: mol_type = other DNA
tattaagtcaccaaatttgtggtaatttgttataacagccataggaaactaatgtactactttggtagtctggaagacaa

SEQ ID NO: 44941 - DNA, 80 bp, synthetic construct; identical to SEQ ID NO: 12045
  source 1..80: mol_type = other DNA

SEQ ID NO: 44942 - DNA, 80 bp, synthetic construct
  source 1..80: mol_type = other DNA
caaggaatgcctgcagccaccagaatatgacagatgcaaggaactgattctcccctagatcctctggaaggggcatagcc

SEQ ID NO: 44943 - DNA, 80 bp, synthetic construct
  source 1..80: mol_type = other DNA
tgtaaggcaaaattatgtatctcaaatttaaaagttgatacctgtttgcaagaaactcattaaatgccaaagaagtactt

SEQ ID NO: 44944 - DNA, 80 bp, synthetic construct
  source 1..80: mol_type = other DNA
tttgttttaaaaaaacagaaacatcgctgtgctacagtattccaaaacttccaaagatcctactacccacttatgttgtt

SEQ ID NO: 44945 - DNA, 80 bp, synthetic construct; identical to SEQ ID NO: 12046
  source 1..80: mol_type = other DNA

SEQ ID NO: 44946 - DNA, 80 bp, synthetic construct
  source 1..80: mol_type = other DNA
aattgtggatcaatgattaagttaaacttctcatgaagtggcagattatatgctgtgcctggtggtgaggtttcaggttt

SEQ ID NO: 44947 - DNA, 80 bp, synthetic construct
  source 1..80: mol_type = other DNA
cataggaaaactgatcacattcaactgaggaaacattgctcactaaggaaacggatggatccccaccaaactttcttgaa

SEQ ID NO: 44948 - DNA, 80 bp, synthetic construct
  source 1..80: mol_type = other DNA
atccagaggataaagctgaatctaatatctagatttctatgtatcaactggcaatgtttgggaaccggcaatacttaaga

SEQ ID NO: 44949 - DNA, 80 bp, synthetic construct; identical to SEQ ID NO: 12047
  source 1..80: mol_type = other DNA

SEQ ID NO: 44950 - DNA, 80 bp, synthetic construct
  source 1..80: mol_type = other DNA
aaagtcttgctctgttgccaggctggagtgcagtggcatgatcttggctcactgcaacctctgcctcccaggttcaagtg

SEQ ID NO: 44951 - DNA, 80 bp, synthetic construct
  source 1..80: mol_type = other DNA
agtgtcttttgatcttgggctccacagagtggcatctacaggtcatagttgtcagtgactcagggagaccaggaggtggc

SEQ ID NO: 44952 - DNA, 80 bp, synthetic construct
  source 1..80: mol_type = other DNA
acagactgcttccaggctctctgtggtcacaatcacaattagaattggattataattaaatccaagtctctctgagcatt

SEQ ID NO: 44953 - DNA, 80 bp, synthetic construct; identical to SEQ ID NO: 12048
  source 1..80: mol_type = other DNA

SEQ ID NO: 44954 - DNA, 80 bp, synthetic construct
  source 1..80: mol_type = other DNA
ctttcctaaggagaaaggatggaggaaaggagcctggtctcttcaggatttttttcatatttaggcccttctagcctggg

SEQ ID NO: 44955 - DNA, 80 bp, synthetic construct
  source 1..80: mol_type = other DNA
aatcaattacagagtagaccaaatgcctgcaagtgtgcagaggttctgagccaggggttattgtcttgtgcatcttctag

SEQ ID NO: 44956 - DNA, 80 bp, synthetic construct
  source 1..80: mol_type = other DNA
cctagtgccagaaacatggaaaatcccagcccaggggctcccttgttcactcccattctgccccttcactggggtgtgca

SEQ ID NO: 44957 - DNA, 80 bp, synthetic construct
  source 1..80: mol_type = other DNA
acagccctagatcttgtcactctttctgttgttcagagttcttcaaaatctcccaactcattttattgcctccagtcttg

SEQ ID NO: 44958 - DNA, 80 bp, synthetic construct; identical to SEQ ID NO: 12049
  source 1..80: mol_type = other DNA

SEQ ID NO: 44959 - DNA, 80 bp, synthetic construct
  source 1..80: mol_type = other DNA
ttttttttttatacttggattcctgttggaagtttagcctgctttcctgaaactggctttgctcttcctcctttcttttc

SEQ ID NO: 44960 - DNA, 80 bp, synthetic construct
  source 1..80: mol_type = other DNA
tcactgttctattttcaaggaggagcacagaagctggcatattctgggccttcaagctgtatttgttggatagatgaaaa

SEQ ID NO: 44961 - DNA, 80 bp, synthetic construct
  source 1..80: mol_type = other DNA
caatgaagacagctacactggcttacttacttttccctcaaacagtctacgtttgatccctgtttgttgaaatagtgatt

SEQ ID NO: 44962 - DNA, 80 bp, synthetic construct; identical to SEQ ID NO: 12050
  source 1..80: mol_type = other DNA

SEQ ID NO: 44963 - DNA, 80 bp, synthetic construct
  source 1..80: mol_type = other DNA
gaaaccttgacctattgacagatgtaagagggtggcctttgagagttctgaatccctacctcataggattctggatatct

SEQ ID NO: 44964 - DNA, 80 bp, synthetic construct
  source 1..80: mol_type = other DNA
agtgactgtgtgagttgctagaagcaatcttatactttcatagccaccccacacttcacagtgatactcatctctaagaa

SEQ ID NO: 44965 - DNA, 80 bp, synthetic construct
  source 1..80: mol_type = other DNA
tagtcaggctattctagacagctcctgtgagccactaggattcagagaatacaacacatcttttccaatttaaatatgta

SEQ ID NO: 44966 - DNA, 80 bp, synthetic construct; identical to SEQ ID NO: 12051
  source 1..80: mol_type = other DNA

SEQ ID NO: 44967 - DNA, 80 bp, synthetic construct
  source 1..80: mol_type = other DNA
tcctaagcaaaaagaacaaagctggaggcattatgctatctgacttcaaactatactgcagtgctacaataaccaaaaca

SEQ ID NO: 44968 - DNA, 80 bp, synthetic construct
  source 1..80: mol_type = other DNA
gctagtcatatgcaaagattgaaacggggcccccttccttacaccatatacaaaaattaactcaagatagattaaagact

SEQ ID NO: 44969 - DNA, 80 bp, synthetic construct; identical to SEQ ID NO: 12052
  source 1..80: mol_type = other DNA

SEQ ID NO: 44970 - DNA, 80 bp, synthetic construct
  source 1..80: mol_type = other DNA
aaatcaaaaccacaatgaaataccatctcacaccagtcataatggttattattaaaaagtcaaaaaataacaggtgctgg

SEQ ID NO: 44971 - DNA, 80 bp, synthetic construct
  source 1..80: mol_type = other DNA
aatcattctgttataaagacatatacatgtgtatgttcattgcagcactattcacaacagcaaagacgtggaatcaacct

SEQ ID NO: 44972 - DNA, 80 bp, synthetic construct
  source 1..80: mol_type = other DNA
aataccacatattctcacttataagtggaagttagattataacacatggacacaaagaggggaacaacagagactggggc

SEQ ID NO: 44973 - DNA, 80 bp, synthetic construct; identical to SEQ ID NO: 12053
  source 1..80: mol_type = other DNA

SEQ ID NO: 44974 - DNA, 80 bp, synthetic construct
  source 1..80: mol_type = other DNA
ggtcaacaagcccatctacacttgccatcattaactaatgtgcaggattgtgtcttatcaaatcagcagccaccttctct

SEQ ID NO: 44975 - DNA, 80 bp, synthetic construct
  source 1..80: mol_type = other DNA
tgtcaggttctcagtggcttctgtgctaggccaaagacccatctgctttgcctgtgcagaccgagatgaatggtgggagc

SEQ ID NO: 44976 - DNA, 80 bp, synthetic construct
  source 1..80: mol_type = other DNA
agagctacaatggtgactggtattagtattctgtttctgctgtaacaaattactgctatgaagtggcttaaaacaacgca

SEQ ID NO: 44977 - DNA, 80 bp, synthetic construct
  source 1..80: mol_type = other DNA
gttccttcctccatcttctaaagtcagcagtcccatcactttgacctctgattctgttgtcacatctccctctccaattc

SEQ ID NO: 44978 - DNA, 80 bp, synthetic construct; identical to SEQ ID NO: 12054
  source 1..80: mol_type = other DNA

SEQ ID NO: 44979 - DNA, 80 bp, synthetic construct
  source 1..80: mol_type = other DNA
cctaaaatgttatactagagtgtggtggttttcctggaaaaagctacactaatacacttccttacctcagaagagctcaa

SEQ ID NO: 44980 - DNA, 80 bp, synthetic construct
  source 1..80: mol_type = other DNA
tacaggcgcccgccaccatgcctggctaatttttttttttttttttttttgtatttttagtagagatggggtttcaccgt

SEQ ID NO: 44981 - DNA, 80 bp, synthetic construct
  source 1..80: mol_type = other DNA
taagcaacgactttgcgggggtgatggagggagacaaaaagaaatgactggaaagcacttctgattccatgccctgtccc

SEQ ID NO: 44982 - DNA, 80 bp, synthetic construct; identical to SEQ ID NO: 12055
  source 1..80: mol_type = other DNA

SEQ ID NO: 44983 - DNA, 80 bp, synthetic construct
  source 1..80: mol_type = other DNA
attttaaaatatcttctatctctaaatctatgcccactttactaaggtaatttatgttatcaatctactctctatgtgtc

SEQ ID NO: 44984 - DNA, 80 bp, synthetic construct
  source 1..80: mol_type = other DNA
attatatacaagtcagtggtttttagtatattcacatagttgtgccaacattatcattatcaattccagaacattttcat

SEQ ID NO: 44985 - DNA, 80 bp, synthetic construct
  source 1..80: mol_type = other DNA
ggcttctttcacttaccgtaacattttcatggttcgtctgggttgtagcatgtggcagtacttcacgtcttttttattac

SEQ ID NO: 44986 - DNA, 80 bp, synthetic construct; identical to SEQ ID NO: 12056
  source 1..80: mol_type = other DNA

SEQ ID NO: 44987 - DNA, 80 bp, synthetic construct
  source 1..80: mol_type = other DNA
ttatttggaaatcttactgaggactatagacggaggcctacaacccaagaacagccctttagagaggctctatcagactg

SEQ ID NO: 44988 - DNA, 80 bp, synthetic construct
  source 1..80: mol_type = other DNA
tcagacattatcttatgtgcagggaaaagcaagggcattcatcttttaaggaatatagtggcttaggcaagagacgttgg

SEQ ID NO: 44989 - DNA, 80 bp, synthetic construct
  source 1..80: mol_type = other DNA
gtgaaatactatcgcattgtagggccgatttgcattttcctgatggttaatgatgttgaacatgtttccacgtgcttatt

SEQ ID NO: 44990 - DNA, 80 bp, synthetic construct; identical to SEQ ID NO: 12057
  source 1..80: mol_type = other DNA

SEQ ID NO: 44991 - DNA, 80 bp, synthetic construct
  source 1..80: mol_type = other DNA
ttccttctttccttccttccttccttactttctttccttttttttccttgagacacagtctcactctgtcacccaggctg

SEQ ID NO: 44992 - DNA, 80 bp, synthetic construct
  source 1..80: mol_type = other DNA
cagtttggtctaccaactcctgggctcaagcaatctgcccactttggcctcccaaaatgctgggattacagacatgagcc

SEQ ID NO: 44993 - DNA, 80 bp, synthetic construct
  source 1..80: mol_type = other DNA
ttgattttgtatcctgccaatgtgataaaattctttagttgtaatgcttttttaaagtaaattcttttggatttctatgt

SEQ ID NO: 44994 - DNA, 80 bp, synthetic construct; identical to SEQ ID NO: 12058
  source 1..80: mol_type = other DNA

SEQ ID NO: 44995 - DNA, 80 bp, synthetic construct
  source 1..80: mol_type = other DNA
tgactgactgacaatcccattgcttctgtatataaagtcagtaactacatttggaactcagcttctctaggcccagccac

SEQ ID NO: 44996 - DNA, 80 bp, synthetic construct
  source 1..80: mol_type = other DNA
accaaatcttccatctagctcagtcaggttgagttgaaaacatcttgactttagtcatttagccactgagcacatcatag

SEQ ID NO: 44997 - DNA, 80 bp, synthetic construct
  source 1..80: mol_type = other DNA
tccatcactctgtccgtttctgcgcctttgctcattctgaacttcttgtcaattctcaagtgtcagcagccacctctagt

SEQ ID NO: 44998 - DNA, 80 bp, synthetic construct; identical to SEQ ID NO: 12059
  source 1..80: mol_type = other DNA

SEQ ID NO: 44999 - DNA, 80 bp, synthetic construct
  source 1..80: mol_type = other DNA
caaacattcctctacattcttagccccactggtctcccctcacttatggaccttttatcattttatctaacggataaagg

SEQ ID NO: 45000 - DNA, 80 bp, synthetic construct
  source 1..80: mol_type = other DNA
tatttaaaaaaccactgcatcggggtgacagaataaggttttaaaattctaatattagactgtccactacattgtctcag

SEQ ID NO: 45001 - DNA, 80 bp, synthetic construct
  source 1..80: mol_type = other DNA
gataccatcaatctgatttttcccccatatttttaaaggagaggagagagaacaatttggaaggtcaagaagttggtatg

SEQ ID NO: 45002 - DNA, 80 bp, synthetic construct
  source 1..80: mol_type = other DNA
agaataatgagttcttctctgacaactgtacaggattgtaaggatcaagtgtgtttatgtgtatgaagcaccatgaatat

SEQ ID NO: 45003 - DNA, 80 bp, synthetic construct; identical to SEQ ID NO: 12060
  source 1..80: mol_type = other DNA

SEQ ID NO: 45004 - DNA, 80 bp, synthetic construct
  source 1..80: mol_type = other DNA
caaatgtgtgctcaccacatctcatcaaagcaaagtgtaaaacgttctcagggacctgtagagctaaaatgtcaccttct

SEQ ID NO: 45005 - DNA, 80 bp, synthetic construct
  source 1..80: mol_type = other DNA
ttttttgcggaggcctttaaagatatttattcagaagaatgtaccacatgaggcatttgactaataaaaacactgttatt

SEQ ID NO: 45006 - DNA, 80 bp, synthetic construct
  source 1..80: mol_type = other DNA
cttttcccaaaacaccagactacactcaaactccagaagatgcccctaaccaagactaatattctgacatcaaaggaaat

SEQ ID NO: 45007 - DNA, 80 bp, synthetic construct; identical to SEQ ID NO: 12061
  source 1..80: mol_type = other DNA

SEQ ID NO: 45008 - DNA, 80 bp, synthetic construct
  source 1..80: mol_type = other DNA
caagcctggctaacatggtgaaatcctgtctctactaaaaatacaaaattagctgggcttggtggcgggtgcctgtaatt

SEQ ID NO: 45009 - DNA, 80 bp, synthetic construct
  source 1..80: mol_type = other DNA
aggaaggaaggaaggaaggaaggaaggaaggaaggaagtaagtcaagaagtctacaaagtataggtaacttgctcaagaa

SEQ ID NO: 45010 - DNA, 80 bp, synthetic construct
  source 1..80: mol_type = other DNA
aggtccttctatggcaatgaccatgaaatacatggctaataaagtattaggggcaggaagagggggaagaagaatgcagt

SEQ ID NO: 45011 - DNA, 80 bp, synthetic construct; identical to SEQ ID NO: 12062
  source 1..80: mol_type = other DNA

SEQ ID NO: 45012 - DNA, 80 bp, synthetic construct
  source 1..80: mol_type = other DNA
atgtaaagaaaagaaatccagcattattgtatggacaagagagaatggatatagattttaactaactatatattccctca

SEQ ID NO: 45013 - DNA, 80 bp, synthetic construct
  source 1..80: mol_type = other DNA
tttcgccttttgcctgaagcatattctttagaactcccttcagtaaaagcgtgtttgtgtcaaattgtctttgcttggaa

SEQ ID NO: 45014 - DNA, 80 bp, synthetic construct
  source 1..80: mol_type = other DNA
aagcctgttttttaatcacaggaagcagggctattttatgtcttattcttattattctgctgtatggtgtttctgcttga

SEQ ID NO: 45015 - DNA, 80 bp, synthetic construct; identical to SEQ ID NO: 12063
  source 1..80: mol_type = other DNA

SEQ ID NO: 45016 - DNA, 80 bp, synthetic construct
  source 1..80: mol_type = other DNA
agatttcccactttgagtgctacttgagacttgcctcctattccaaattccttatgaggccatggaaactaaagcttaac

SEQ ID NO: 45017 - DNA, 80 bp, synthetic construct
  source 1..80: mol_type = other DNA
cctaatatgccacattagtggttcacaccttatccttaaagctccttatcacaaaccttcccatcttgttcctttgaagt

SEQ ID NO: 45018 - DNA, 80 bp, synthetic construct
  source 1..80: mol_type = other DNA
ggtactttcctttccactcttctttatgacaattcctgaaaagggctgtaatgctgcaaagtacacttttgggtattcaa

SEQ ID NO: 45019 - DNA, 80 bp, synthetic construct
  source 1..80: mol_type = other DNA
atattatgaggcaacttagctggccttgctaaggaccagctcaggtctgatactgtatgtatatacagtatatatatcca

SEQ ID NO: 45020 - DNA, 80 bp, synthetic construct; identical to SEQ ID NO: 12064
  source 1..80: mol_type = other DNA

SEQ ID NO: 45021 - DNA, 80 bp, synthetic construct
  source 1..80: mol_type = other DNA
atttaggccaaatggcagatatgtttgatgcctgcctggatcagaatgacatttccatttcttatggaatgttttgaact

SEQ ID NO: 45022 - DNA, 80 bp, synthetic construct
  source 1..80: mol_type = other DNA
tcaaagagcttgtactccaatcttggaggaattccttgagttgaaaagcccagggcctgaataatgagggagtctcattt

SEQ ID NO: 45023 - DNA, 80 bp, synthetic construct
  source 1..80: mol_type = other DNA
agagtcagaaatttcctaggtatggaatgtgctgtcttaaatagtaatgagtccaatctatgtagagtgtccttctttat

SEQ ID NO: 45024 - DNA, 80 bp, synthetic construct; identical to SEQ ID NO: 12065
  source 1..80: mol_type = other DNA

SEQ ID NO: 45025 - DNA, 80 bp, synthetic construct
  source 1..80: mol_type = other DNA
cccagcaggtaactgcagccctaatggatcaatagggcagtttatagagttaaaagcccaaataagctaaaaatgtttac

SEQ ID NO: 45026 - DNA, 80 bp, synthetic construct
  source 1..80: mol_type = other DNA
cctagagtgaggtctacccttgaaagagtgaaataatcctggcaatatctgaaagtctgcagtaacatagactgcttgca

SEQ ID NO: 45027 - DNA, 80 bp, synthetic construct
  source 1..80: mol_type = other DNA
gttagtccatgttgtgttgctataaatacctgagagtgggtaatttataaagaaaagaggtttatttggctcatggctat

SEQ ID NO: 45028 - DNA, 80 bp, synthetic construct; identical to SEQ ID NO: 12066
  source 1..80: mol_type = other DNA

SEQ ID NO: 45029 - DNA, 80 bp, synthetic construct
  source 1..80: mol_type = other DNA
tgagccaagatcgcaccactgctctccaggctgggcaacagagcgagactctgtctcaaaataataataataataataat

SEQ ID NO: 45030 - DNA, 80 bp, synthetic construct
  source 1..80: mol_type = other DNA
atgcagagtagacacccagagccccctgctgaaaatgcagcaactggatatcggtaaacagagcagagacatcagctgta

SEQ ID NO: 45031 - DNA, 80 bp, synthetic construct
  source 1..80: mol_type = other DNA
caaataggatcagacatagaaagaaaagaaagaaatgtgtgactataataaggaggaaattaaaaataaatgggtttcaa

SEQ ID NO: 45032 - DNA, 80 bp, synthetic construct; identical to SEQ ID NO: 12067
  source 1..80: mol_type = other DNA

SEQ ID NO: 45033 - DNA, 80 bp, synthetic construct
  source 1..80: mol_type = other DNA
ttggagtcccaaaagaagatagacacaggatcagaaaaaaaattcaaaaaaatctatggctgaaagattcccaaatttga

SEQ ID NO: 45034 - DNA, 80 bp, synthetic construct
  source 1..80: mol_type = other DNA
gagctcccagcacagcctttgggcaggtgggaccgccgatcattttaaaataattttttattgatttaacttatattttg

SEQ ID NO: 45035 - DNA, 80 bp, synthetic construct
  source 1..80: mol_type = other DNA
tgtgtgcagttcccttctatatgtccatgtgttctcatcatttagctcccacttataagtgagaacatgtggtattcggt

SEQ ID NO: 45036 - DNA, 80 bp, synthetic construct; identical to SEQ ID NO: 12068
  source 1..80: mol_type = other DNA

SEQ ID NO: 45037 - DNA, 80 bp, synthetic construct
  source 1..80: mol_type = other DNA
tcaagacacaaagtcaacaaagaaacaatgatcttaaaccatatcctacaacaaatggacttaacagatatttacagaac

SEQ ID NO: 45038 - DNA, 80 bp, synthetic construct
  source 1..80: mol_type = other DNA
aatcaactccaaaatgaaacttaaaaactgtatgagtacatggaaattaaataacctattcttggatgatttttcagtta

SEQ ID NO: 45039 - DNA, 80 bp, synthetic construct
  source 1..80: mol_type = other DNA
gcttatgcctgtaatcccagcactttgagaggctgaggcaggtggatcagttaaggtcaggggtttgagaccagcctgac

SEQ ID NO: 45040 - DNA, 80 bp, synthetic construct; identical to SEQ ID NO: 12069
  source 1..80: mol_type = other DNA

SEQ ID NO: 45041 - DNA, 80 bp, synthetic construct
  source 1..80: mol_type = other DNA
ccattggtgaggttaaccaagaaaaggagagaagatccaaataagctcaattagaaaacaaactggagatattacaacta

SEQ ID NO: 45042 - DNA, 80 bp, synthetic construct
  source 1..80: mol_type = other DNA
gactgaaacagtaataaaaaaaactgtcaacaaaaaaaagcctaggaccagatgggttcccagacaaattccattagaca

SEQ ID NO: 45043 - DNA, 80 bp, synthetic construct
  source 1..80: mol_type = other DNA
acatgcaaaaatgttcaacacaatactagctaaccaaatccagtagcctatcaaaaaaataatacaccatgttgaagtgg

SEQ ID NO: 45044 - DNA, 80 bp, synthetic construct; identical to SEQ ID NO: 12070
  source 1..80: mol_type = other DNA

SEQ ID NO: 45045 - DNA, 80 bp, synthetic construct
  source 1..80: mol_type = other DNA
ctgttcactgatgatatgatcgtatacctagaaaatactaagactcatccaaaagacccatagatctgataaacaaattt

SEQ ID NO: 45046 - DNA, 80 bp, synthetic construct
  source 1..80: mol_type = other DNA
cccccaaaacctaggaatatacttaaccaaggaggtgaaagatctctgcaaggaaaactaaaaaacactgctgaaagaaa

SEQ ID NO: 45047 - DNA, 80 bp, synthetic construct
  source 1..80: mol_type = other DNA
aaaattcatgtggaaccaaaaaagagcccacgtatccaaagcaatactaagcaaaaataacaaatctggaagcgacccat

SEQ ID NO: 45048 - DNA, 80 bp, synthetic construct
  source 1..80: mol_type = other DNA
gcctagccaacatgataaaacaccatctctactaaaaatacaaaaaaaattatctgggcgtggtggtgggcacctgtaat

SEQ ID NO: 45049 - DNA, 80 bp, synthetic construct; identical to SEQ ID NO: 12071
  source 1..80: mol_type = other DNA

SEQ ID NO: 45050 - DNA, 80 bp, synthetic construct
  source 1..80: mol_type = other DNA
gataacatgataacattaaaaaactcttctggacattggcttaggcaaaaaattcatgactaagaccccgaaaacaaaca

SEQ ID NO: 45051 - DNA, 80 bp, synthetic construct
  source 1..80: mol_type = other DNA
acgcaaagaaatcagcaagaaaaaaacaaataatcccatcaaaaactgggcaaaggacatgaattgacagttctcaaaag

SEQ ID NO: 45052 - DNA, 80 bp, synthetic construct
  source 1..80: mol_type = other DNA
aaagggaacacttttgcactgctggtgggaatgtagattagtaaaaccactttggaaagcagtatggacattatttaaag

SEQ ID NO: 45053 - DNA, 80 bp, synthetic construct; identical to SEQ ID NO: 12072
  source 1..80: mol_type = other DNA

SEQ ID NO: 45054 - DNA, 80 bp, synthetic construct
  source 1..80: mol_type = other DNA
agaggggagtgagataaaagactacatattgggtacagtgtatattgcttgggtgacaggtgcactaaagtctcagaatt

SEQ ID NO: 45055 - DNA, 80 bp, synthetic construct
  source 1..80: mol_type = other DNA
cactagaaatcaagagacactgtggaaagagtacatagaagacctaaataaatagatcccctgttcatggggagcaagat

SEQ ID NO: 45056 - DNA, 80 bp, synthetic construct
  source 1..80: mol_type = other DNA
cataaaaggtctagaataactcatgcaatttattttttaaaaattttagagaaagagtctttctatattaccccatgttg

SEQ ID NO: 45057 - DNA, 80 bp, synthetic construct; identical to SEQ ID NO: 12073
  source 1..80: mol_type = other DNA

SEQ ID NO: 45058 - DNA, 80 bp, synthetic construct
  source 1..80: mol_type = other DNA
accttgggcttagtggatttcccaggaaagaaatgcttccaccaaataagaacctcagctggccattttatatttccata

SEQ ID NO: 45059 - DNA, 80 bp, synthetic construct
  source 1..80: mol_type = other DNA
atgatgttgagtatcttttcctgtgtatattggcggtttatgtatcttctttgaagaaatgacttttcaatttctttgcc

SEQ ID NO: 45060 - DNA, 80 bp, synthetic construct
  source 1..80: mol_type = other DNA
agttttggtttgatgaagttcaatttatctattcgactctataaccatacccagggcaggatcaggaaaacaaggacagg

SEQ ID NO: 45061 - DNA, 80 bp, synthetic construct
  source 1..80: mol_type = other DNA
gatgactggtcctttattttcacaagtgctttacgttacagaaatttcagcaagcagggactatgactgggtaagcatga

SEQ ID NO: 45062 - DNA, 80 bp, synthetic construct; identical to SEQ ID NO: 12074
  source 1..80: mol_type = other DNA

SEQ ID NO: 45063 - DNA, 80 bp, synthetic construct
  source 1..80: mol_type = other DNA
ttatcagttcatagtatcaagtcttcataaatgcacatcactgttgccaatccatgtctatatttcactggaaatctggc

SEQ ID NO: 45064 - DNA, 80 bp, synthetic construct
  source 1..80: mol_type = other DNA
ttagtaatctttacttttccacaacttgaaacaattctatgtccttcaactctcggacccctttcctcatcgtctcttcc

SEQ ID NO: 45065 - DNA, 80 bp, synthetic construct
  source 1..80: mol_type = other DNA
atctctttggcatccacaaacacagaaatgtacaaacactttcccataatcaacctcaaagacatgtaaacagttgatgg

SEQ ID NO: 45066 - DNA, 80 bp, synthetic construct; identical to SEQ ID NO: 12075
  source 1..80: mol_type = other DNA

SEQ ID NO: 45067 - DNA, 80 bp, synthetic construct
  source 1..80: mol_type = other DNA
ctaatgtggtttttaggggaatgaatgagcaaggcagggtaagcagtgtagacatgttcagtattgatgagtctgaataa

SEQ ID NO: 45068 - DNA, 80 bp, synthetic construct
  source 1..80: mol_type = other DNA
actcattctgagtttgggctctggtttggttagtttgcataagaaaggcgcatttgcggtcaatccctttagtatctgta

SEQ ID NO: 45069 - DNA, 80 bp, synthetic construct
  source 1..80: mol_type = other DNA
attgctctagatttagtactgtcagtaagcagaggcaattctacaattcggtatttcaataaatcttacctttagggagg

SEQ ID NO: 45070 - DNA, 80 bp, synthetic construct
  source 1..80: mol_type = other DNA
gagagtgatccagtgtggtgttggtattttgtgatataatttatgtcccagagggactaatatggcccagtagtgaagac

SEQ ID NO: 45071 - DNA, 80 bp, synthetic construct; identical to SEQ ID NO: 12076
  source 1..80: mol_type = other DNA

SEQ ID NO: 45072 - DNA, 80 bp, synthetic construct
  source 1..80: mol_type = other DNA
tgcagtggcacaatcttgacttattgaagcctccacctcctgggttcaagcgattctcctgcctcagcctcccgcgtagc

SEQ ID NO: 45073 - DNA, 80 bp, synthetic construct
  source 1..80: mol_type = other DNA
gccgggcctaagtgttctgacattttgacatgaaaatttctcttttaggaatttatcccaaggaaataattacatatctt

SEQ ID NO: 45074 - DNA, 80 bp, synthetic construct
  source 1..80: mol_type = other DNA
gtggtggcagacacctgtggttccggctactcgggaggctgaggcagaagaattgcttgaacccgggaggtggaggttgc

SEQ ID NO: 45075 - DNA, 80 bp, synthetic construct; identical to SEQ ID NO: 12077
  source 1..80: mol_type = other DNA

SEQ ID NO: 45076 - DNA, 80 bp, synthetic construct
  source 1..80: mol_type = other DNA
acacaagtgaactgttttgatgtcccagaatgttctatggacaggaggccactggctcagagctcaggaagacaagaagg

SEQ ID NO: 45077 - DNA, 80 bp, synthetic construct
  source 1..80: mol_type = other DNA
aaaaattgccccaagattgtgaaattgctaatgagcgtaagggaaaagtttgtgatatcatgaaagcaggttacaaggag

SEQ ID NO: 45078 - DNA, 80 bp, synthetic construct
  source 1..80: mol_type = other DNA
aactgaaatgaaagttgtgtgctgcaaggtagtacaaaataaaaacgtgatgccaagcatgatagaactttaagaatatt

SEQ ID NO: 45079 - DNA, 80 bp, synthetic construct; identical to SEQ ID NO: 12078
  source 1..80: mol_type = other DNA

SEQ ID NO: 45080 - DNA, 80 bp, synthetic construct
  source 1..80: mol_type = other DNA
tggcctcttgccatccctagctgggcaaactccatcatggtgacacacgggatggcagaagtgcaaggcctcgtttctgc

SEQ ID NO: 45081 - DNA, 80 bp, synthetic construct
  source 1..80: mol_type = other DNA
tttattttaatagccttattgcaggagaggaaggtgaaaagtgtttctattcattggcccattagttacaatgggcagag

SEQ ID NO: 45082 - DNA, 80 bp, synthetic construct
  source 1..80: mol_type = other DNA
ggtctcgtagcttcccttctcagtgctggattgctggcatttcattttccttatcagagacatgaatatctttgttcttc

SEQ ID NO: 45083 - DNA, 80 bp, synthetic construct
  source 1..80: mol_type = other DNA
cagctccatcttataacttccacatgaaatttgaggtcaggaacttctcttaactcgtcttaaagggcctcatacttaca

SEQ ID NO: 45084 - DNA, 80 bp, synthetic construct; identical to SEQ ID NO: 12079
  source 1..80: mol_type = other DNA

SEQ ID NO: 45085 - DNA, 80 bp, synthetic construct
  source 1..80: mol_type = other DNA
gtgtttctgcttgttgcattatgtcaggggatatggaagccacttttcatccagccaaacacagatgcaaatgagatgtt

SEQ ID NO: 45086 - DNA, 80 bp, synthetic construct
  source 1..80: mol_type = other DNA
gtcagtgtttgatgaaagatactggtgttccaggatgtcagagtctcctgggtgccagtagggaggtggtcagggacttt

SEQ ID NO: 45087 - DNA, 80 bp, synthetic construct
  source 1..80: mol_type = other DNA
catcagttggctggatgaaggagggcaggtgtgagccgacaaggaaaatcttgtgatttttgttgggaaatgaatgtaaa

SEQ ID NO: 45088 - DNA, 80 bp, synthetic construct; identical to SEQ ID NO: 12080
  source 1..80: mol_type = other DNA

SEQ ID NO: 45089 - DNA, 80 bp, synthetic construct
  source 1..80: mol_type = other DNA
ctgctgaacacagaggggaaacgcgctcagacagccctgcccgtgctgatcagaagggagggttgcgcctccagatcctt

SEQ ID NO: 45090 - DNA, 80 bp, synthetic construct
  source 1..80: mol_type = other DNA
aggagcctttcagcctctttccatggctctttatgccctttcaaaggcacagccagagacatcagaaatgaaattgtata

SEQ ID NO: 45091 - DNA, 80 bp, synthetic construct
  source 1..80: mol_type = other DNA
gttggattctataagaaccgcattcgcggtgagaattctagagccagatcttgctgctccacaattgcctcacgttgcaa

SEQ ID NO: 45092 - DNA, 80 bp, synthetic construct; identical to SEQ ID NO: 12081
  source 1..80: mol_type = other DNA

SEQ ID NO: 45093 - DNA, 80 bp, synthetic construct
  source 1..80: mol_type = other DNA
gggcaaaacagtgggatcagatgtggggatgacacacccccaaatccttgctgccacaggacccagtccctcagcctcca

SEQ ID NO: 45094 - DNA, 80 bp, synthetic construct
  source 1..80: mol_type = other DNA
aaatggaccataagagaagggggcaaggggggagaaagagagtgaaaggagccagggaggagagaaaaatggaaaacatc

SEQ ID NO: 45095 - DNA, 80 bp, synthetic construct
  source 1..80: mol_type = other DNA
aggccctatcagagtccacccccaggaagcctgcagtcatagcactgggctagctggacggctgcctcttctttgccttt

SEQ ID NO: 45096 - DNA, 80 bp, synthetic construct; identical to SEQ ID NO: 12082
  source 1..80: mol_type = other DNA

SEQ ID NO: 45097 - DNA, 80 bp, synthetic construct
  source 1..80: mol_type = other DNA
cttgataatacagtgattctattttcagtgttttgaaaactctgtatactgttttttacagttgctgtactagttttaca

SEQ ID NO: 45098 - DNA, 80 bp, synthetic construct
  source 1..80: mol_type = other DNA
atttttcatgtacctgctggccatttgtatgtcttcttttgagaaatgtctattcatgtcgtttgtccactttttaatag

SEQ ID NO: 45099 - DNA, 80 bp, synthetic construct
  source 1..80: mol_type = other DNA
tcccatttgtctattttgtttgggttgtctgtgcttctgaagtcttagccataaaatcgttacccagaccaatgtcctag

SEQ ID NO: 45100 - DNA, 80 bp, synthetic construct; identical to SEQ ID NO: 12083
  source 1..80: mol_type = other DNA

SEQ ID NO: 45101 - DNA, 80 bp, synthetic construct
  source 1..80: mol_type = other DNA
gtgctgtgttttgattcatcgttatctcctaagccctttcccagcattgatattttactaaacaccctatgattaaatta

SEQ ID NO: 45102 - DNA, 80 bp, synthetic construct
  source 1..80: mol_type = other DNA
ggaatggaaaatatttcttaaatgagacaaatatatgaaagtgaaaatgcttaaacttcaaaggacttacattacatata

SEQ ID NO: 45103 - DNA, 80 bp, synthetic construct
  source 1..80: mol_type = other DNA
ctacgctatatcataaagcctattgctcctaggctacaaacttggatagcacattactatactgagtactgtaggcaatt

SEQ ID NO: 45104 - DNA, 80 bp, synthetic construct; identical to SEQ ID NO: 12084
  source 1..80: mol_type = other DNA

SEQ ID NO: 45105 - DNA, 80 bp, synthetic construct
  source 1..80: mol_type = other DNA
gttccttatattttcattctagaaacttatttctatttaattttttttttacttttaaatcttttctgttaaaaaaaaaa

SEQ ID NO: 45106 - DNA, 80 bp, synthetic construct
  source 1..80: mol_type = other DNA
acctggccgaggctgtttcaagtttttttaataattagaaggagcacactctaaaataacaataaaaagtatagtaaata

SEQ ID NO: 45107 - DNA, 80 bp, synthetic construct
  source 1..80: mol_type = other DNA
tcacctacaatgtcactacagagaagaaacccccaaaatctgcactcctaagctgcatatgctttaggtgatactctaag

SEQ ID NO: 45108 - DNA, 80 bp, synthetic construct; identical to SEQ ID NO: 12085
  source 1..80: mol_type = other DNA

SEQ ID NO: 45109 - DNA, 80 bp, synthetic construct
  source 1..80: mol_type = other DNA
gataaaataatcaacagaagccgactcagatgatctggatactgaagccagcgagcaaggacattcttcaatatatttat

SEQ ID NO: 45110 - DNA, 80 bp, synthetic construct
  source 1..80: mol_type = other DNA
acacaacttcatgacaataccttttaaaatttaggtgcaatgaaatgagttcttgaaaaacacagttgaacaaagccaac

SEQ ID NO: 45111 - DNA, 80 bp, synthetic construct
  source 1..80: mol_type = other DNA
atccttttgggctgggttctaggacccctgtggataccaaaatctgtggattctctggtcccatgtataaaatggcctac

SEQ ID NO: 45112 - DNA, 80 bp, synthetic construct; identical to SEQ ID NO: 12086
  source 1..80: mol_type = other DNA

SEQ ID NO: 45113 - DNA, 80 bp, synthetic construct
  source 1..80: mol_type = other DNA
tgaaacctcatctctactaaaaatacaaaaaaattagctgggcgtgatgacaggtgcctgtaatcccagctactcaagag

SEQ ID NO: 45114 - DNA, 80 bp, synthetic construct
  source 1..80: mol_type = other DNA
ggtttgtgtacagcatttgcaagatgagtggacaacatcctgtttggaagtctacccctttgatcaaagaagttaaaaac

SEQ ID NO: 45115 - DNA, 80 bp, synthetic construct
  source 1..80: mol_type = other DNA
ggcctatgaaaagaatacccgtataggacacagtcctgtggaaatcactatggtaatttgaggggtgcattaatgtaagg

SEQ ID NO: 45116 - DNA, 80 bp, synthetic construct; identical to SEQ ID NO: 12087
  source 1..80: mol_type = other DNA

SEQ ID NO: 45117 - DNA, 80 bp, synthetic construct
  source 1..80: mol_type = other DNA
gtgaaataagtagacactgagggctgcagcaatgcagagataggctgaatcaagatatattccttttacatcctccaact

SEQ ID NO: 45118 - DNA, 80 bp, synthetic construct
  source 1..80: mol_type = other DNA
ggaatagatactgaccctggagtaagcattgcttagctggtggtagatgtgttatcaaactgaactggggcccactcacc

SEQ ID NO: 45119 - DNA, 80 bp, synthetic construct
  source 1..80: mol_type = other DNA
cagcaaagccgagttgcaggcaacatcaaaaatcaatgcatagaaattacacactggtttggcctaaaaaggtgggatat

SEQ ID NO: 45120 - DNA, 80 bp, synthetic construct; identical to SEQ ID NO: 12088
  source 1..80: mol_type = other DNA

SEQ ID NO: 45121 - DNA, 80 bp, synthetic construct
  source 1..80: mol_type = other DNA
acctgcttgcttataaggtcactcacttgcttttcagggctggctaggtgcctggaatttctcttgaaggaactcaacat

SEQ ID NO: 45122 - DNA, 80 bp, synthetic construct
  source 1..80: mol_type = other DNA
tgcatcactgagtcacatttcttcacaccaggaaacacatttgcccaaaatgtccaacaatgttcagaaaaatattttgc

SEQ ID NO: 45123 - DNA, 80 bp, synthetic construct
  source 1..80: mol_type = other DNA
gtatcctcttttttcctgctggatcagggaaaggtgctagtatgacctgacatacgatttttcccatgacaagaggacac

SEQ ID NO: 45124 - DNA, 80 bp, synthetic construct
  source 1..80: mol_type = other DNA
atatattttaaaaccattatgcaagaattcctcagggcctggaggagtaggttgtgccttcactgcatctggcaaagttg

SEQ ID NO: 45125 - DNA, 80 bp, synthetic construct; identical to SEQ ID NO: 12089
  source 1..80: mol_type = other DNA

SEQ ID NO: 45126 - DNA, 80 bp, synthetic construct
  source 1..80: mol_type = other DNA
ttcatctgcctgctcatttgtatcctttacaactgctattgtttgaatgtttccccagaaaagcgtctgttggaaactta

SEQ ID NO: 45127 - DNA, 80 bp, synthetic construct
  source 1..80: mol_type = other DNA
cctctcttgcgcttctcccttctgccagatacattcccttgattttggaattcccatcctcgacaaccatgagccaatta

SEQ ID NO: 45128 - DNA, 80 bp, synthetic construct
  source 1..80: mol_type = other DNA
gagcatgaccgcctgagctccgcctctggtcagatcagtggtggcattagattctcatgggagcacgaaccctattgtaa

SEQ ID NO: 45129 - DNA, 80 bp, synthetic construct; identical to SEQ ID NO: 12090
  source 1..80: mol_type = other DNA

SEQ ID NO: 45130 - DNA, 80 bp, synthetic construct
  source 1..80: mol_type = other DNA
ttcttttgttcctaaacaaatacctgcaaagatagaggaccacatatctccccaagtggcctccctcacaatctgctcac

SEQ ID NO: 45131 - DNA, 80 bp, synthetic construct
  source 1..80: mol_type = other DNA
atcatcccttcacccacccggagacaaacacatattttactactctatgtttactttagcttatgtaaaattcagattta

SEQ ID NO: 45132 - DNA, 80 bp, synthetic construct
  source 1..80: mol_type = other DNA
acccttttaggaaaaagcgtgggccacagatgctagtgatttttgtctctttttccaaggtgcatcttggaatgggagac

SEQ ID NO: 45133 - DNA, 80 bp, synthetic construct
  source 1..80: mol_type = other DNA
agaaactgctggagtgccagggtgtcaccttttgctggaactcagaagtacaatcgatgtttaacggaccagtgctttct

SEQ ID NO: 45134 - DNA, 80 bp, synthetic construct; identical to SEQ ID NO: 12091
  source 1..80: mol_type = other DNA

SEQ ID NO: 45135 - DNA, 80 bp, synthetic construct
  source 1..80: mol_type = other DNA
aaacaaaaaggagtagatgttggaggccgcacgaatgtttcttatgatttgccacaattgaagcctgccagtaacaatat

SEQ ID NO: 45136 - DNA, 80 bp, synthetic construct
  source 1..80: mol_type = other DNA
cctttccttaaaatgatgtagggtatctggcagataaaatttctaagcagcaaagcattcaaagagtgacttgggtgctc

SEQ ID NO: 45137 - DNA, 80 bp, synthetic construct
  source 1..80: mol_type = other DNA
acaagggggaaaatgtctccagggcatgccataggtcttcatggcagcccctctcatcacagacccagaagcataggagg

SEQ ID NO: 45138 - DNA, 80 bp, synthetic construct
  source 1..80: mol_type = other DNA
catgtggttttgagcctgcaggtgcacagaagtcaagaatggaggtttgggaacctccacctagatttcagaagatgtat

SEQ ID NO: 45139 - DNA, 80 bp, synthetic construct; identical to SEQ ID NO: 12092
  source 1..80: mol_type = other DNA

SEQ ID NO: 45140 - DNA, 80 bp, synthetic construct
  source 1..80: mol_type = other DNA
taggacttgcatgggccctgtaactcctttgttttggccaatttctcccatttggaatggctgtatttacccaatacctg

SEQ ID NO: 45141 - DNA, 80 bp, synthetic construct
  source 1..80: mol_type = other DNA
ggttttgaaatgtgaggacatgagatttggaggggccaggggtggaatgatatggtttggctctgtgtccccacccaaat

SEQ ID NO: 45142 - DNA, 80 bp, synthetic construct
  source 1..80: mol_type = other DNA
ttactcattttctcttgccactgctacgtaaaaaaaaaattcacctcctgccatgattctgagaccatcgagccatgtgg

SEQ ID NO: 45143 - DNA, 80 bp, synthetic construct; identical to SEQ ID NO: 12093
  source 1..80: mol_type = other DNA

SEQ ID NO: 45144 - DNA, 80 bp, synthetic construct
  source 1..80: mol_type = other DNA
gatgttctctcttttattgctgaccttgttaatgtgtatgtttttgtcttgatcagtctggctagaaatttataaggtgt

SEQ ID NO: 45145 - DNA, 80 bp, synthetic construct
  source 1..80: mol_type = other DNA
ttctttcttaatataggcatttaaggatatcagttttttcttcagtactgcttgttgggaacaaatgctcagtgttgtaa

SEQ ID NO: 45146 - DNA, 80 bp, synthetic construct
  source 1..80: mol_type = other DNA
tgtctccattggctggagctggactgcacaatctaagctgaacctggctggctaacttgaaaagtgcaggaatgtggtta

SEQ ID NO: 45147 - DNA, 80 bp, synthetic construct; identical to SEQ ID NO: 12094
  source 1..80: mol_type = other DNA

SEQ ID NO: 45148 - DNA, 80 bp, synthetic construct
  source 1..80: mol_type = other DNA
ttccaatccttggtattttcatgatcgtccgtcttagtcaatctgggcagttataaaagaattccatagtctatgtggct

SEQ ID NO: 45149 - DNA, 80 bp, synthetic construct
  source 1..80: mol_type = other DNA
ccttttataagggcattcattttattaatgagggttttgccttcactgcatgatcactttctaatggcacaacctccaaa

SEQ ID NO: 45150 - DNA, 80 bp, synthetic construct
  source 1..80: mol_type = other DNA
tggcctgaaatatggtttctcctggtaaatgtatcattcatacttcagataatttgtgtttttcattgatgtgcatatgc

SEQ ID NO: 45151 - DNA, 80 bp, synthetic construct; identical to SEQ ID NO: 12095
  source 1..80: mol_type = other DNA

SEQ ID NO: 45152 - DNA, 80 bp, synthetic construct
  source 1..80: mol_type = other DNA
catgcagatgtatgttcattgcagcacttgtcacaatagaaaagacatggaatcaacctaaatgcccatcaatggtgaac

SEQ ID NO: 45153 - DNA, 80 bp, synthetic construct
  source 1..80: mol_type = other DNA
tgagtgggagctaaatgatgagaacatatggacatatagaagggaacaacacacaccggggcctacttgaaggcaacggg

SEQ ID NO: 45154 - DNA, 80 bp, synthetic construct
  source 1..80: mol_type = other DNA
aatacttaaaataaaaatagttgtattagacataaaatatagatatggttatgtataaatattactaatcattagtttat

SEQ ID NO: 45155 - DNA, 80 bp, synthetic construct; identical to SEQ ID NO: 12096
  source 1..80: mol_type = other DNA

SEQ ID NO: 45156 - DNA, 80 bp, synthetic construct
  source 1..80: mol_type = other DNA
tggctcagccttctaaatagcagtagcaaaaattagtgaaagtactaaagtctttgaaatacatagaagaaataatgaca

SEQ ID NO: 45157 - DNA, 80 bp, synthetic construct
  source 1..80: mol_type = other DNA
cattcgaggccactatcagtctccgtgccttggtggtagtggtcccctgggcccaactctcttttcttctctttgtcttg

SEQ ID NO: 45158 - DNA, 80 bp, synthetic construct
  source 1..80: mol_type = other DNA
aaataaagttcatgtcttgaaaagagcatatggttgggttattttttttaatccagtcacagaatctctgcccttaattg

SEQ ID NO: 45159 - DNA, 80 bp, synthetic construct; identical to SEQ ID NO: 12097
  source 1..80: mol_type = other DNA

SEQ ID NO: 45160 - DNA, 80 bp, synthetic construct
  source 1..80: mol_type = other DNA
aaagatgaagaatgtgagaagtggtaaatattaagtgcgaaaggctatcttgctcccccacccccatttaatcttacttc

SEQ ID NO: 45161 - DNA, 80 bp, synthetic construct
  source 1..80: mol_type = other DNA
tggttgcaagatttctatatttatgtgaactagtacattattaactgaaagtgggctgtgaaatgttaagaatgagttaa

SEQ ID NO: 45162 - DNA, 80 bp, synthetic construct
  source 1..80: mol_type = other DNA
ttaccactgactctgcagaagtaaaaataaccatcaaaagctactatgaacacctgtatgcacacaaactagaaaaccta

SEQ ID NO: 45163 - DNA, 80 bp, synthetic construct; identical to SEQ ID NO: 12098
  source 1..80: mol_type = other DNA

SEQ ID NO: 45164 - DNA, 80 bp, synthetic construct
  source 1..80: mol_type = other DNA
taggcttcatatccaggatgcaagattggttcaacacgtgcaaatcaataaatgtgattcatcacatacatagaactaaa

SEQ ID NO: 45165 - DNA, 80 bp, synthetic construct
  source 1..80: mol_type = other DNA
atgggggaagcattccccttgaaacccagcacaagacaaagatgccttctctcaccactcctattcaacagagtattgga

SEQ ID NO: 45166 - DNA, 80 bp, synthetic construct
  source 1..80: mol_type = other DNA
aatgtataatgtgtttcacttgtgtattagtatgttttcacactgctggtaaagacatacctgagactgggcaatttaca

SEQ ID NO: 45167 - DNA, 80 bp, synthetic construct; identical to SEQ ID NO: 12099
  source 1..80: mol_type = other DNA

SEQ ID NO: 45168 - DNA, 80 bp, synthetic construct
  source 1..80: mol_type = other DNA
tctatgtgaagttatttccaggaagaagtttcatctgtggtttcttcttccccaggtcccacagtcttcattacaacctc

SEQ ID NO: 45169 - DNA, 80 bp, synthetic construct
  source 1..80: mol_type = other DNA
accgaggacttgacagagaatgggcaggacctcaggaggaccctgactcatatcaagggccagaaaggaggtgagagtcg

SEQ ID NO: 45170 - DNA, 80 bp, synthetic construct
  source 1..80: mol_type = other DNA
catggaggagggccagggaggggtcccagctgggctgagttcctcacttgggtgggaagatgaggggttcaggaatgaac

SEQ ID NO: 45171 - DNA, 80 bp, synthetic construct; identical to SEQ ID NO: 12100
  source 1..80: mol_type = other DNA

SEQ ID NO: 45172 - DNA, 80 bp, synthetic construct
  source 1..80: mol_type = other DNA
ggcgtttcctgttggcgtattgtgtcctgactttcctctcttgttagagccactggataaagacagtgggttggggactg

SEQ ID NO: 45173 - DNA, 80 bp, synthetic construct
  source 1..80: mol_type = other DNA
ccaggagtccaatcctgacatccctccccttcagcatcaatgtggggatctcagagcctgaggccatagtctgaggccca

SEQ ID NO: 45174 - DNA, 80 bp, synthetic construct
  source 1..80: mol_type = other DNA
tggctctgccctttcctatccagtgcctaccatggtgaatgccaggcctcagagaacaaagtcacccccacatgctgggc

SEQ ID NO: 45175 - DNA, 80 bp, synthetic construct; identical to SEQ ID NO: 12101
  source 1..80: mol_type = other DNA

SEQ ID NO: 45176 - DNA, 80 bp, synthetic construct
  source 1..80: mol_type = other DNA
aaccgttccgtatgttgcggctgctgctgtttttgttatcattattattattctctgtgtcctttggtgcaagaagaaaa

SEQ ID NO: 45177 - DNA, 80 bp, synthetic construct
  source 1..80: mol_type = other DNA
tttggaacagggtttggaagttggggtatttgggaggggaataggagctacaatttcatctagacccctaagtcctgccc

SEQ ID NO: 45178 - DNA, 80 bp, synthetic construct
  source 1..80: mol_type = other DNA
gaatcatgtgctgattgctgagggcctggatgatgatggcttcagagggggcaaatagtaaagacggctgtgatctgggg

SEQ ID NO: 45179 - DNA, 80 bp, synthetic construct; identical to SEQ ID NO: 12102
  source 1..80: mol_type = other DNA

SEQ ID NO: 45180 - DNA, 80 bp, synthetic construct
  source 1..80: mol_type = other DNA
ggcagctgtcatccctgttttcatcctacttctaggtgtttccttgtccaggccctgaaggacacagtccctcagggaca

SEQ ID NO: 45181 - DNA, 80 bp, synthetic construct
  source 1..80: mol_type = other DNA
agagaaaacaggaagttttgtgtttctgcaaagacagaggcagtgcaggggacagtgagaggctgggtgtccaggaaact

SEQ ID NO: 45182 - DNA, 80 bp, synthetic construct
  source 1..80: mol_type = other DNA
ccacagcaggggcagtgcaggtttgtggtcgctcctgctttcacctgcactgtctcctatagaggggttgtcacttctgg

SEQ ID NO: 45183 - DNA, 80 bp, synthetic construct; identical to SEQ ID NO: 12103
  source 1..80: mol_type = other DNA

SEQ ID NO: 45184 - DNA, 80 bp, synthetic construct
  source 1..80: mol_type = other DNA
ggcaggaaggtcttgcagcctcagcaagcagcagccctggggtggaggtgcatttccaggggtgagtggaccaggcagga

SEQ ID NO: 45185 - DNA, 80 bp, synthetic construct
  source 1..80: mol_type = other DNA
tgcagttaggggctggctgctcagggctcggagggtggaacgctgagctgcaggtggagcggggagcccagtgtgcaggg

SEQ ID NO: 45186 - DNA, 80 bp, synthetic construct
  source 1..80: mol_type = other DNA
ggaggaggggagggccccgggttccctcctggatctgattcttgtcctttagtcatgaggccctttcattccccacatgg

SEQ ID NO: 45187 - DNA, 80 bp, synthetic construct; identical to SEQ ID NO: 12104
  source 1..80: mol_type = other DNA

SEQ ID NO: 45188 - DNA, 80 bp, synthetic construct
  source 1..80: mol_type = other DNA
cctcatatattaaatgggaaactaacagcacttatttcttgtggtcagggattgacaactgttagttgctatgaggtgtt

SEQ ID NO: 45189 - DNA, 80 bp, synthetic construct
  source 1..80: mol_type = other DNA
gtgtgtcctgttgacggttcctcctggcaagcctgggaccagcctttttggcaccttgaggtcccctcacccttcgcaca

SEQ ID NO: 45190 - DNA, 80 bp, synthetic construct
  source 1..80: mol_type = other DNA
cacagcatgaagaaatctctccctcttcctacctctccctgccagttcccagtgattgacagattcacagcaaaacagaa

SEQ ID NO: 45191 - DNA, 80 bp, synthetic construct; identical to SEQ ID NO: 12105
  source 1..80: mol_type = other DNA

SEQ ID NO: 45192 - DNA, 80 bp, synthetic construct
  source 1..80: mol_type = other DNA
aattaattcaggtaaccaaacaccacccacccctaaaaaccttgaaataaaaaataattttttaaaaaagtggccgggca

SEQ ID NO: 45193 - DNA, 80 bp, synthetic construct
  source 1..80: mol_type = other DNA
actcaggaggctgaggcaggcgattctcctgaacctgggaggcggagttttcagtgagccgagatcgcaccactgcagtc

SEQ ID NO: 45194 - DNA, 80 bp, synthetic construct
  source 1..80: mol_type = other DNA
ttattagcttaaggaagttctcttttatttctggtttattgagtttttataatgaatagttgttgaattttatcaaatga

SEQ ID NO: 45195 - DNA, 80 bp, synthetic construct; identical to SEQ ID NO: 12106
  source 1..80: mol_type = other DNA

SEQ ID NO: 45196 - DNA, 80 bp, synthetic construct
  source 1..80: mol_type = other DNA
gtatactatgtagttaggcctacctacagcggttacatctgtactgaagatatatagactttttcttatcattatttcct

SEQ ID NO: 45197 - DNA, 80 bp, synthetic construct
  source 1..80: mol_type = other DNA
acagggggccctagatcccatcccaaaaggataccaagagatgactgaataagactgacttttttaaaaaaagttttgga

SEQ ID NO: 45198 - DNA, 80 bp, synthetic construct
  source 1..80: mol_type = other DNA
ttgttcaattgtcgttttcaagaactcatttcattgcacctaaattttaaaaggtattgtcaggaagttgtgtctaatat

SEQ ID NO: 45199 - DNA, 80 bp, synthetic construct; identical to SEQ ID NO: 12107
  source 1..80: mol_type = other DNA

SEQ ID NO: 45200 - DNA, 80 bp, synthetic construct
  source 1..80: mol_type = other DNA
cccaccccacaacagtccccggtgtgtgatgttccccttcctgtgtccacgtgttctcattgttcaattcccacctatga

SEQ ID NO: 45201 - DNA, 80 bp, synthetic construct; identical to SEQ ID NO: 12108
  source 1..80: mol_type = other DNA

SEQ ID NO: 45202 - DNA, 80 bp, synthetic construct
  source 1..80: mol_type = other DNA
atactttaagttttagggtacatgtgcacaatgtgcaggttagttacataggtatacatgtgccatgctggtgtgctgca

SEQ ID NO: 45203 - DNA, 80 bp, synthetic construct; identical to SEQ ID NO: 12109
  source 1..80: mol_type = other DNA

SEQ ID NO: 45204 - DNA, 80 bp, synthetic construct
  source 1..80: mol_type = other DNA
aacatacgtgtacatgtgtctatatagcagcatgatttatagccctttgggtatatacccagtaatgggatggctgggtc

SEQ ID NO: 45205 - DNA, 80 bp, synthetic construct
  source 1..80: mol_type = other DNA
actggtgtgagatgatatctcatagtggttttgatttgcatttctctgatggccagtgatggtgagcattttttcatgtg

SEQ ID NO: 45206 - DNA, 80 bp, synthetic construct
  source 1..80: mol_type = other DNA
cccatgttgtaggttgcctgctcactctgatggtagtttcttttgctgtgcagaagctctttagtttaattagatcccat

SEQ ID NO: 45207 - DNA, 80 bp, synthetic construct
  source 1..80: mol_type = other DNA
ataaggtgtaaggaaaggatccagtttcagctttctacatatggctagccagttttctcagcaccatttattaaataggg

SEQ ID NO: 45208 - DNA, 80 bp, synthetic construct; identical to SEQ ID NO: 12110
  source 1..80: mol_type = other DNA

SEQ ID NO: 45209 - DNA, 80 bp, synthetic construct
  source 1..80: mol_type = other DNA
ctgagattgattctctctgcttgggttccatttcccttcattgaattttgaaaaaaatcctcttagaaagaaagctgatg

SEQ ID NO: 45210 - DNA, 80 bp, synthetic construct
  source 1..80: mol_type = other DNA
tgggaggatgagttttaaatgagctagtctatcacagttcaagtcagaagacctctaatccttcaatagtcattgcattt

SEQ ID NO: 45211 - DNA, 80 bp, synthetic construct
  source 1..80: mol_type = other DNA
acacacacacatcactgtgttatacagtcatgcactgcttaatgatgtttctgtcaatgattgatcacgtatacgactgt

SEQ ID NO: 45212 - DNA, 80 bp, synthetic construct
  source 1..80: mol_type = other DNA
cactgccaatcctataaaagtctaccccatacagttaaaaacagcatgtaatacttgatgataataaatatgttactggt

SEQ ID NO: 45213 - DNA, 80 bp, synthetic construct; identical to SEQ ID NO: 12111
  source 1..80: mol_type = other DNA

SEQ ID NO: 45214 - DNA, 80 bp, synthetic construct
  source 1..80: mol_type = other DNA
gtttataaatatgaaaaagttcaagacttgaactcagctttggatcaagtggatctgatagacacctacagagctttcca

SEQ ID NO: 45215 - DNA, 80 bp, synthetic construct
  source 1..80: mol_type = other DNA
aagtaagaaattcgctcaaaaccatacaactacatggaaattgaacaacctgctcctgaatgactgttgggtaaattatt

SEQ ID NO: 45216 - DNA, 80 bp, synthetic construct
  source 1..80: mol_type = other DNA
atcacaactaaaagaactagagaaacaaaaacaaatcccaaagctagcagaagacaagaaataaccaagatcggagctga

SEQ ID NO: 45217 - DNA, 80 bp, synthetic construct
  source 1..80: mol_type = other DNA
cactggccccacagaaatacaaacaacaatcagagaatactacgaacacctctatgcaaataaactagaaaatctagaag

SEQ ID NO: 45218 - DNA, 80 bp, synthetic construct; identical to SEQ ID NO: 12112
  source 1..80: mol_type = other DNA

SEQ ID NO: 45219 - DNA, 80 bp, synthetic construct
  source 1..80: mol_type = other DNA
agttggcttcatccccaggatgcaaggttggttcaacatacacaaatcaataaatgcgattcataacataaacagaacta

SEQ ID NO: 45220 - DNA, 80 bp, synthetic construct
  source 1..80: mol_type = other DNA
gaatgggcaaaagctggaaacattccccttgaaaaccggcaccagacaagcctctcaccacttatattagtttcaccatc

SEQ ID NO: 45221 - DNA, 80 bp, synthetic construct
  source 1..80: mol_type = other DNA
aggaatacagctaacaagggaagtgaaggacctcttcaaggagaactacaaaccactgctcaaagaaaaatcagagagga

SEQ ID NO: 45222 - DNA, 80 bp, synthetic construct
  source 1..80: mol_type = other DNA
tttttaagatagagtcttgctctgtcacccaggctggagtgcagtggcgtgatctcggctcactgcaacctccgcgtccc

SEQ ID NO: 45223 - DNA, 80 bp, synthetic construct; identical to SEQ ID NO: 12113
  source 1..80: mol_type = other DNA

SEQ ID NO: 45224 - DNA, 80 bp, synthetic construct
  source 1..80: mol_type = other DNA
taaagaactgtgaaataagatcacacacctacaaccatctgatctttgacaagtctgaccaaaacaagtaatggggaaag

SEQ ID NO: 45225 - DNA, 80 bp, synthetic construct
  source 1..80: mol_type = other DNA
gcaatactcttcagaacataggcatgggcaaagatttcatgatgaagactccaaaagcaattgcaacaaaagcaaaaatt

SEQ ID NO: 45226 - DNA, 80 bp, synthetic construct
  source 1..80: mol_type = other DNA
gaaaaaaacaaacaaccccattaaaaagtaggcaaaggacatgagcagacacctctcaaaaaaagacatacatgcagcca

SEQ ID NO: 45227 - DNA, 80 bp, synthetic construct; identical to SEQ ID NO: 12114
  source 1..80: mol_type = other DNA

SEQ ID NO: 45228 - DNA, 80 bp, synthetic construct
  source 1..80: mol_type = other DNA
atgcgatgcagccacataaaggaataagaccatgtcctttgcagggacatgaatggagtgggaagccattatcctcagca

SEQ ID NO: 45229 - DNA, 80 bp, synthetic construct
  source 1..80: mol_type = other DNA
gatgttggccttaatacctaggtgatgggacgatctctgcagcaaaccaccatggcacacatttacctacgtaacaaacc

SEQ ID NO: 45230 - DNA, 80 bp, synthetic construct
  source 1..80: mol_type = other DNA
agtgtatagtaatgccctagacttcacattcactcgccactcactgacacccagagcaatttccagtcctgtaagctcca

SEQ ID NO: 45231 - DNA, 80 bp, synthetic construct; identical to SEQ ID NO: 12115
  source 1..80: mol_type = other DNA

SEQ ID NO: 45232 - DNA, 80 bp, synthetic construct
  source 1..80: mol_type = other DNA
tgatttgctagaatggctcatagcatgccaggaaacacttacatacattaaccagtttatttaaaaggatattttaaagg

SEQ ID NO: 45233 - DNA, 80 bp, synthetic construct
  source 1..80: mol_type = other DNA
tgttcagccatacagaagctctctgactcttcccttttgggttttgatggaagccatatttcttaggcatgattcattac

SEQ ID NO: 45234 - DNA, 80 bp, synthetic construct
  source 1..80: mol_type = other DNA
aatgtctacacattagtaatgaagtagctaagaaagaaatttaaaagcagtcccatttatgatagcgacaaaaacccccc

SEQ ID NO: 45235 - DNA, 80 bp, synthetic construct; identical to SEQ ID NO: 12116
  source 1..80: mol_type = other DNA

SEQ ID NO: 45236 - DNA, 80 bp, synthetic construct
  source 1..80: mol_type = other DNA
ttatatcctgcacctggctcggagggtcccaagcccatggagcctccctcattgctagcacagcagtctgagatcaaact

SEQ ID NO: 45237 - DNA, 80 bp, synthetic construct
  source 1..80: mol_type = other DNA
acaaaaggcagtagaaacctctgcagacttaaatgtgcctgtctgacagctttgaagagggtagtggttcttccggcatg

SEQ ID NO: 45238 - DNA, 80 bp, synthetic construct
  source 1..80: mol_type = other DNA
ctctgagacaaaacttccacaggaacgatcaggcagcaacatttgctgttcagcaatattcactgttctgcagcctctgc

SEQ ID NO: 45239 - DNA, 80 bp, synthetic construct
  source 1..80: mol_type = other DNA
ataaaaccacaaagatggggaaaaaacagagcagaaaaattgaaaattctaaaactcagagtgcctctcctcctccaaag

SEQ ID NO: 45240 - DNA, 80 bp, synthetic construct; identical to SEQ ID NO: 12117
  source 1..80: mol_type = other DNA

SEQ ID NO: 45241 - DNA, 80 bp, synthetic construct
  source 1..80: mol_type = other DNA
caaatctacgttggcttggtgtacctgaaagtgacagggagaatggaaccaagttggaaaacactctgcaggatattatc

SEQ ID NO: 45242 - DNA, 80 bp, synthetic construct
  source 1..80: mol_type = other DNA
gagaaaggttgggttacccacaaagggaagcccatcagactaacagcggatctctcagcagaaactctacaagccagaag

SEQ ID NO: 45243 - DNA, 80 bp, synthetic construct
  source 1..80: mol_type = other DNA
ctcctgaaggaagcactaaacatggaaaggaacaactggtaccagccactgcaaaaacatgccaaattgtaaagaccatc

SEQ ID NO: 45244 - DNA, 80 bp, synthetic construct; identical to SEQ ID NO: 12118
  source 1..80: mol_type = other DNA

SEQ ID NO: 45245 - DNA, 80 bp, synthetic construct
  source 1..80: mol_type = other DNA
gcacccaatacaggagcacccagatccataaagcaagtcctgagtgacctacaaagagacttagactcccacacaataat

SEQ ID NO: 45246 - DNA, 80 bp, synthetic construct
  source 1..80: mol_type = other DNA
gcaccacaccgcacttattccaaaattgaccacatagttggaagtaaagcactcctcagcaaatataaaagaacagaaat

SEQ ID NO: 45247 - DNA, 80 bp, synthetic construct
  source 1..80: mol_type = other DNA
accaatgagaacaaagacacagcataccagaatctctgggacacatttaaagcaatgtgtagagggaaatttatagcact

SEQ ID NO: 45248 - DNA, 80 bp, synthetic construct; identical to SEQ ID NO: 12119
  source 1..80: mol_type = other DNA

SEQ ID NO: 45249 - DNA, 80 bp, synthetic construct
  source 1..80: mol_type = other DNA
acatacaccctcccaagactaaaccaggaagaagttgaatctctgaatagaccaataacaggctctgaaattgagtcaat

SEQ ID NO: 45250 - DNA, 80 bp, synthetic construct; identical to SEQ ID NO: 12120
  source 1..80: mol_type = other DNA

SEQ ID NO: 45251 - DNA, 80 bp, synthetic construct
  source 1..80: mol_type = other DNA
catgattatctcaatagatgcagaaaaggcctttgacaaaattcaacagcccttcatgctaaaaactctcaatacactag

SEQ ID NO: 45252 - DNA, 80 bp, synthetic construct
  source 1..80: mol_type = other DNA
tctggccagggcaatcaggcaagagaaagaaataaagggtattcaattaggaaaagaggaagtcaaattgtccctgtttg

SEQ ID NO: 45253 - DNA, 80 bp, synthetic construct
  source 1..80: mol_type = other DNA
gagtgaactcccattcacgattgctgcaaagagaataaaatacctaggaatccaacttacaaaggatatgaaggacctct

SEQ ID NO: 45254 - DNA, 80 bp, synthetic construct; identical to SEQ ID NO: 12121
  source 1..80: mol_type = other DNA

SEQ ID NO: 45255 - DNA, 80 bp, synthetic construct
  source 1..80: mol_type = other DNA
atctgatctttgacaaacctgacaaaaacaagaaatggggaaatgattccgtatttaataaatggtgctgggaaaactgg

SEQ ID NO: 45256 - DNA, 80 bp, synthetic construct
  source 1..80: mol_type = other DNA
tcatgactaaaacaccaaaagcaacggcaacaaaagccaaaatagacaaatgggatctaattaaactaaagagcttctgc

SEQ ID NO: 45257 - DNA, 80 bp, synthetic construct; identical to SEQ ID NO: 12122
  source 1..80: mol_type = other DNA

SEQ ID NO: 45258 - DNA, 80 bp, synthetic construct
  source 1..80: mol_type = other DNA
aagtcagtgtggcaattcctcaaggatctagaactagaaataccatttgacccagtgatcccattactgggtatataccc

SEQ ID NO: 45259 - DNA, 80 bp, synthetic construct
  source 1..80: mol_type = other DNA
ataaaaaaggatgagttcatgtcctttgcagggacatggatgaagttggaaaccatcattctgaggaaactatcacaagg

SEQ ID NO: 45260 - DNA, 80 bp, synthetic construct; identical to SEQ ID NO: 12123
  source 1..80: mol_type = other DNA

SEQ ID NO: 45261 - DNA, 80 bp, synthetic construct
  source 1..80: mol_type = other DNA
atactaagagggaagtttatagctataagtagctacatcaaaaaaaaaagaaaaacttcaaataaacaatacaacaatgc

SEQ ID NO: 45262 - DNA, 80 bp, synthetic construct
  source 1..80: mol_type = other DNA
gacaaatcattagccagactaacagaaaaagacagaagacccaaataaataaaatcaaacatgaaaaaagagacattaca

SEQ ID NO: 45263 - DNA, 80 bp, synthetic construct
  source 1..80: mol_type = other DNA
agtaatcagataaaagtcataacaaaaagtctcccagcaaagaaaagccctgatggcttcactgctgaattctaccaaac

SEQ ID NO: 45264 - DNA, 80 bp, synthetic construct; identical to SEQ ID NO: 12124
  source 1..80: mol_type = other DNA

SEQ ID NO: 45265 - DNA, 80 bp, synthetic construct
  source 1..80: mol_type = other DNA
caaaaaactgagtatagaaggaacataccttaacataataagccattatgtacaacaaacccacagctagtatcatacta

SEQ ID NO: 45266 - DNA, 80 bp, synthetic construct
  source 1..80: mol_type = other DNA
ataatcttatatttggaaaaatctacaagactccaccaaagaactattagaactgataaacaaattcagtaaagttgcat

SEQ ID NO: 45267 - DNA, 80 bp, synthetic construct
  source 1..80: mol_type = other DNA
aaaaaattgtaattagctgagtgtggtgacatgtgcctgtggtcccaactacttggcaggctgaggttgtaggttgagac

SEQ ID NO: 45268 - DNA, 80 bp, synthetic construct; identical to SEQ ID NO: 12125
  source 1..80: mol_type = other DNA

SEQ ID NO: 45269 - DNA, 80 bp, synthetic construct
  source 1..80: mol_type = other DNA
tactgagcattggtttcttaatatataaactgggagtaatatccccaattaataacaatgggacatagcaggatggggtt

SEQ ID NO: 45270 - DNA, 80 bp, synthetic construct
  source 1..80: mol_type = other DNA
tttaagatgcctactctaaagatatgaagagctaggaaaatggtaattgctgcccttaagcaagcacttggtgcagtggc

SEQ ID NO: 45271 - DNA, 80 bp, synthetic construct
  source 1..80: mol_type = other DNA
gagtatattcttgatcagccagtgattattccactctctactgcctttaattggagatctacattaagctacacacacaa

SEQ ID NO: 45272 - DNA, 80 bp, synthetic construct; identical to SEQ ID NO: 12126
  source 1..80: mol_type = other DNA

SEQ ID NO: 45273 - DNA, 80 bp, synthetic construct
  source 1..80: mol_type = other DNA
ttaaattaaatagcaatagggcttgtaacacatttgacacaattgctggtactgcaatttgtggtgctaatgacaacgtt

SEQ ID NO: 45274 - DNA, 80 bp, synthetic construct
  source 1..80: mol_type = other DNA
tatggggatccgagttgggttggggaaagaggcaattatttttattcccttcagtatgttctatcctctctgatatttct

SEQ ID NO: 45275 - DNA, 80 bp, synthetic construct
  source 1..80: mol_type = other DNA
gtggtttcatttccttctagtcagttatatattttcctgctgctgccccattactggatgtgtgccattctctctctctc

SEQ ID NO: 45276 - DNA, 80 bp, synthetic construct; identical to SEQ ID NO: 12127
  source 1..80: mol_type = other DNA

SEQ ID NO: 45277 - DNA, 80 bp, synthetic construct
  source 1..80: mol_type = other DNA
aagatcaatccttccttcccctatatcatcaatttccactctctactggcccatcatttctacaggcagacgtgctgtaa

SEQ ID NO: 45278 - DNA, 80 bp, synthetic construct
  source 1..80: mol_type = other DNA
ggcagtcttcataggacaatctctgagtctattcttcatgtagtcttttgaaacattgcattttttgttgtttgtttgtt

SEQ ID NO: 45279 - DNA, 80 bp, synthetic construct
  source 1..80: mol_type = other DNA
acttggcctgatagtataatgttcttacactttttctttcttttttgcaaacatttttccattttattatgacttttgtc

SEQ ID NO: 45280 - DNA, 80 bp, synthetic construct
  source 1..80: mol_type = other DNA
gggacttgttgggtctccttgttatcttctttcacgatattatgaaattttctctcagaattcataaatgtagtggtttc

SEQ ID NO: 45281 - DNA, 80 bp, synthetic construct; identical to SEQ ID NO: 12128
  source 1..80: mol_type = other DNA

SEQ ID NO: 45282 - DNA, 80 bp, synthetic construct
  source 1..80: mol_type = other DNA
ttcaccacctcctcaacctctctgagtcacatagtagattcctgatgggttttctctgatgattaaattatatattgtct

SEQ ID NO: 45283 - DNA, 80 bp, synthetic construct
  source 1..80: mol_type = other DNA
tcttcttaggctacatttttagaagataagttttttgcatcaacatgatcttcttgagacattttccaaaaatgctcttt

SEQ ID NO: 45284 - DNA, 80 bp, synthetic construct
  source 1..80: mol_type = other DNA
actacaggagggtgccaccatgcctaattttttttgtattttttgtagagatggggtttcgccatgttgccctggctggt

SEQ ID NO: 45285 - DNA, 80 bp, synthetic construct; identical to SEQ ID NO: 12129
  source 1..80: mol_type = other DNA

SEQ ID NO: 45286 - DNA, 80 bp, synthetic construct
  source 1..80: mol_type = other DNA
cacttatggctgggactccttgttatatgaagctggcccaatgttcattgttaagccatgttattctcctattggaccac

SEQ ID NO: 45287 - DNA, 80 bp, synthetic construct
  source 1..80: mol_type = other DNA
tcactagagctaagatttgttgagacattcaattacagaattgcccctgcttcctgacgagtacccaatctagagtgaag

SEQ ID NO: 45288 - DNA, 80 bp, synthetic construct
  source 1..80: mol_type = other DNA
tcctagtggactttggaagaaagcttcggacgcattattattttgtctataaattttttatgtgtctttgaggttgatta

SEQ ID NO: 45289 - DNA, 80 bp, synthetic construct; identical to SEQ ID NO: 12130
  source 1..80: mol_type = other DNA

SEQ ID NO: 45290 - DNA, 80 bp, synthetic construct
  source 1..80: mol_type = other DNA
acaataacaacagaattccagtgcaatatagacaatgattagccctggcaatgggcatttttgaacacttaaaatgttga

SEQ ID NO: 45291 - DNA, 80 bp, synthetic construct
  source 1..80: mol_type = other DNA
gagagtcccaccatatattttgggggagattgaaaactatgagcactctagatatgcactgttaaatatggtaactactg

SEQ ID NO: 45292 - DNA, 80 bp, synthetic construct
  source 1..80: mol_type = other DNA
ctaggacttccagtactatgttgaaagaagtggtgaaagtgggcgtcctcgtcttgttccagttctcagggggaatgctt

SEQ ID NO: 45293 - DNA, 80 bp, synthetic construct; identical to SEQ ID NO: 12131
  source 1..80: mol_type = other DNA

SEQ ID NO: 45294 - DNA, 80 bp, synthetic construct
  source 1..80: mol_type = other DNA
gcttctttcgctgaagaattccagaagggacagaactaaggatgaagtgtggcatttgaacagggtttacggctagatcc

SEQ ID NO: 45295 - DNA, 80 bp, synthetic construct
  source 1..80: mol_type = other DNA
gaaggaaactgaagcccagggttctgcagaggcttgcccaggctacacagatcttcagctagattcgaatagttaaaaat

SEQ ID NO: 45296 - DNA, 80 bp, synthetic construct
  source 1..80: mol_type = other DNA
tgttggaggggatcttgaatccagaatctgttcccaaaaaagagaaagaaaagcagatttgggtgacctcaaaagtttca

SEQ ID NO: 45297 - DNA, 80 bp, synthetic construct; identical to SEQ ID NO: 12132
  source 1..80: mol_type = other DNA

SEQ ID NO: 45298 - DNA, 80 bp, synthetic construct
  source 1..80: mol_type = other DNA
atgaataaaataagaaatagaaataacaccacatgctggatgtggagaaaatggctgaatcactcattgctggtgggaat

SEQ ID NO: 45299 - DNA, 80 bp, synthetic construct
  source 1..80: mol_type = other DNA
cagcatacagcatataaaggttcgtagcagagcagagacctgagcaggaaaaaaaaaaaaaaaaaaaaaacccactgtca

SEQ ID NO: 45300 - DNA, 80 bp, synthetic construct
  source 1..80: mol_type = other DNA
agaccaaaattgagaagcaatcttttaatcacagtgtttgcaaacacatagccaggaaagaatgttagcacagaggtcag

SEQ ID NO: 45301 - DNA, 80 bp, synthetic construct
  source 1..80: mol_type = other DNA
ctgcatatattttatatctcacaaaaaaagaaaagagatcagactcctcccagaaaaacaatgaaagaaggaggtgtcac

SEQ ID NO: 45302 - DNA, 80 bp, synthetic construct; identical to SEQ ID NO: 12133
  source 1..80: mol_type = other DNA

SEQ ID NO: 45303 - DNA, 80 bp, synthetic construct
  source 1..80: mol_type = other DNA
cagactccagggcctgtttcagggtcaggatcatagttcccttcttcagagaggaactcttaatgaagctgacccaattt

SEQ ID NO: 45304 - DNA, 80 bp, synthetic construct
  source 1..80: mol_type = other DNA
actcaccactgcaaggaaacttcaaactgagttctactaaaaagcaatttcggctcttacacttcctctttagtgttctt

SEQ ID NO: 45305 - DNA, 80 bp, synthetic construct
  source 1..80: mol_type = other DNA
gagggcaatgtacattagtcaattccactgatttaaatgtaaatcatttttcgaacacactcatgggaatacctagaata

SEQ ID NO: 45306 - DNA, 80 bp, synthetic construct; identical to SEQ ID NO: 12134
  source 1..80: mol_type = other DNA

SEQ ID NO: 45307 - DNA, 80 bp, synthetic construct
  source 1..80: mol_type = other DNA
tttggcatttggagccagttttgtcacactataggaaaactaaaccgttatttaagaacttccctgccagctctcacgtt

SEQ ID NO: 45308 - DNA, 80 bp, synthetic construct
  source 1..80: mol_type = other DNA
tgctcatccctgggatagaaaatccattggacttggagactcagtgagttgtattcccgatctcaccactggagggaggt

SEQ ID NO: 45309 - DNA, 80 bp, synthetic construct
  source 1..80: mol_type = other DNA
agaggcagactgaaggaagcccaagactacaaagtgaaagaaaatgccttttagtcactcaagacattgtcagacacaga

SEQ ID NO: 45310 - DNA, 80 bp, synthetic construct; identical to SEQ ID NO: 12135
  source 1..80: mol_type = other DNA

SEQ ID NO: 45311 - DNA, 80 bp, synthetic construct
  source 1..80: mol_type = other DNA
ctcctccatacttactaggaatcccaggcccttccctgaagtgacaccatcctgcattctttgtacctctctttccactt

SEQ ID NO: 45312 - DNA, 80 bp, synthetic construct
  source 1..80: mol_type = other DNA
aataacattgtttccggtctcaatgcactttcaccacatctgattttcagctatgtggggaaggccatctatctgatcaa

SEQ ID NO: 45313 - DNA, 80 bp, synthetic construct
  source 1..80: mol_type = other DNA
acagcagcccctcgtgttggattctcctgcctgcccaggaaactgggtgggaaccattcagattcttcctgcatgaaaag

SEQ ID NO: 45314 - DNA, 80 bp, synthetic construct; identical to SEQ ID NO: 12136
  source 1..80: mol_type = other DNA

SEQ ID NO: 45315 - DNA, 80 bp, synthetic construct
  source 1..80: mol_type = other DNA
gaagatgaccttgacaagagccaccataagtttaaaggtatggagaagacatttactcaactaagggacagttggtgaat

SEQ ID NO: 45316 - DNA, 80 bp, synthetic construct
  source 1..80: mol_type = other DNA
gagtagcattcacgtaagtcagtaattttaactctggctctcaatgcactcaaaatctccacctgcctacatgaggagga

SEQ ID NO: 45317 - DNA, 80 bp, synthetic construct
  source 1..80: mol_type = other DNA
ataaagaacaacatatgaagtaaaaggcttctatgtggttgtttgccaggaagctggtggctaggaaggattgagaggga

SEQ ID NO: 45318 - DNA, 80 bp, synthetic construct
  source 1..80: mol_type = other DNA
gagtctactgaaatgtgggcagggagaagaggaggccttcggaccttttacctgagcagcctggtttactctaggctctg

SEQ ID NO: 45319 - DNA, 80 bp, synthetic construct; identical to SEQ ID NO: 12137
  source 1..80: mol_type = other DNA

SEQ ID NO: 45320 - DNA, 80 bp, synthetic construct
  source 1..80: mol_type = other DNA
aggcatagagaaaaaggaagaaattatagggaaatgtgcttatttagggggaggcaatactgcgggaggggtacaacaga

SEQ ID NO: 45321 - DNA, 80 bp, synthetic construct
  source 1..80: mol_type = other DNA
ttaataaataaaaacaggctgcatgtggtaaaatcaatagtcagccctgggacttgtgtttgcaaaatgctttatccagg

SEQ ID NO: 45322 - DNA, 80 bp, synthetic construct
  source 1..80: mol_type = other DNA
ctccagcacagagattccatcccagctcagtatttagtatttagagatgtagtatttagtatttagagattcctaaacac

SEQ ID NO: 45323 - DNA, 80 bp, synthetic construct; identical to SEQ ID NO: 12138
  source 1..80: mol_type = other DNA

SEQ ID NO: 45324 - DNA, 80 bp, synthetic construct
  source 1..80: mol_type = other DNA
ctgaaaaactaagctgaagtactaagtacattcagctttcactaagctgaaacagcaaagcgctgaaacagcaaaccgca

SEQ ID NO: 45325 - DNA, 80 bp, synthetic construct
  source 1..80: mol_type = other DNA
ccgaggctcgcggcctgagaaaccttccgctccgaatgcgggctggcctctccgggaagccttgaaactcaactcctggg

SEQ ID NO: 45326 - DNA, 80 bp, synthetic construct
  source 1..80: mol_type = other DNA
gcctggggcgggatagcccaatcggatgctggggggtccgtttggaaaccactctctgctttgaggacacgcgcggagct

SEQ ID NO: 45327 - DNA, 80 bp, synthetic construct; identical to SEQ ID NO: 12139
  source 1..80: mol_type = other DNA

SEQ ID NO: 45328 - DNA, 80 bp, synthetic construct
  source 1..80: mol_type = other DNA
aggaagcccggggcgttctgtggactgggtggtcaaaaatggtgtgtggaggagggagtcaattgagattagacgtgaaa

SEQ ID NO: 45329 - DNA, 80 bp, synthetic construct
  source 1..80: mol_type = other DNA
agctttatccttgatgagttctgaaggcccctgaggagagctgagcccaagagactttttaattccacggaggtacttcg

SEQ ID NO: 45330 - DNA, 80 bp, synthetic construct
  source 1..80: mol_type = other DNA
ctcctggttcctatccagcccttcccccataaaggcagaatcctgtcttcttggaacagtgaatccccagcagaggacct

SEQ ID NO: 45331 - DNA, 80 bp, synthetic construct; identical to SEQ ID NO: 12140
  source 1..80: mol_type = other DNA

SEQ ID NO: 45332 - DNA, 80 bp, synthetic construct
  source 1..80: mol_type = other DNA
tgcagcctcagtggcagaaatcccagcgggccccctcctgctgcagaccccgctcctcctgcgaggccccagacgaagcc

SEQ ID NO: 45333 - DNA, 80 bp, synthetic construct
  source 1..80: mol_type = other DNA
gaccagaaattagatttggttccgggatcaagaacctttaatcagggaatggagatggcaggggacgaggcctaagagat

SEQ ID NO: 45334 - DNA, 80 bp, synthetic construct
  source 1..80: mol_type = other DNA
ccgacggattggggacaaatgctctgcccagtctgatcccagacatccttgtaacccaatatagttacagctccgacgcc

SEQ ID NO: 45335 - DNA, 80 bp, synthetic construct; identical to SEQ ID NO: 12141
  source 1..80: mol_type = other DNA

SEQ ID NO: 45336 - DNA, 80 bp, synthetic construct
  source 1..80: mol_type = other DNA
tgcagctggaaaccgaacgggaccctgtggaagtcgcgggtggggaagcgaaaggggagctgagcgtctgtcctcagtcc

SEQ ID NO: 45337 - DNA, 80 bp, synthetic construct
  source 1..80: mol_type = other DNA
gaagccctggactgcgcggggttccggctctgcggaacagaggagggctctggagcggcctgtctctgaggtttccaact

SEQ ID NO: 45338 - DNA, 80 bp, synthetic construct
  source 1..80: mol_type = other DNA
gtacagagttgccatccgctccacagtcagtttcccctgatgttaacatctctcattactatggtccatttgtcacagct

SEQ ID NO: 45339 - DNA, 80 bp, synthetic construct; identical to SEQ ID NO: 12142
  source 1..80: mol_type = other DNA

SEQ ID NO: 45340 - DNA, 80 bp, synthetic construct
  source 1..80: mol_type = other DNA
ctgttgatgttgaagttgatcacctggtatattagcttcctgtagctgccacaacaaatgccctcaaagttggcaactta

SEQ ID NO: 45341 - DNA, 80 bp, synthetic construct
  source 1..80: mol_type = other DNA
cccattgctctagtctctgcctcattcttcacatcaccttctcctcttctgactctctcttctgtgtacctgttagaaag

SEQ ID NO: 45342 - DNA, 80 bp, synthetic construct
  source 1..80: mol_type = other DNA
accattcaacccactacatctggctaagctaatatttccagaatggcaatccatcagtgcaccctaggttacaatcctca

SEQ ID NO: 45343 - DNA, 80 bp, synthetic construct; identical to SEQ ID NO: 12143
  source 1..80: mol_type = other DNA

SEQ ID NO: 45344 - DNA, 80 bp, synthetic construct
  source 1..80: mol_type = other DNA
acaggatagacaattagatcacaggctgcctgcacatcaagtaaaaacaaaaatcctatgctaggcacacactattaaaa

SEQ ID NO: 45345 - DNA, 80 bp, synthetic construct
  source 1..80: mol_type = other DNA
tgtcagtggctcatgcctgtaatcccagcaccttgggaggccgaggtggaaagattgcttaagctcatgagtttgaaacc

SEQ ID NO: 45346 - DNA, 80 bp, synthetic construct
  source 1..80: mol_type = other DNA
tctaataaaaatacaaattcagccagatgtggttgcgcatacctgtaatcccagctactcgggaggctgcggcaggagta

SEQ ID NO: 45347 - DNA, 80 bp, synthetic construct; identical to SEQ ID NO: 12144
  source 1..80: mol_type = other DNA

SEQ ID NO: 45348 - DNA, 80 bp, synthetic construct
  source 1..80: mol_type = other DNA
caggtgcctgtagtcccagctactctgggaggctgaggcagaagaatggtgtgaatccgggaggcggagcttgcagtgag

SEQ ID NO: 45349 - DNA, 80 bp, synthetic construct
  source 1..80: mol_type = other DNA
gcttttcttcaaaacatgctgaacttggtaaaagagccagcaatttagggaaactatgtgcacttctgatcttgtccatt

SEQ ID NO: 45350 - DNA, 80 bp, synthetic construct
  source 1..80: mol_type = other DNA
agcaattatcctgcctcagcctcccgagtagctgggattacaggtgcccaccaccatgcccagctaattttttgtatttt

SEQ ID NO: 45351 - DNA, 80 bp, synthetic construct; identical to SEQ ID NO: 12145
  source 1..80: mol_type = other DNA

SEQ ID NO: 45352 - DNA, 80 bp, synthetic construct
  source 1..80: mol_type = other DNA
ggacgccacacacttttaaacaaccagctctcactatttcaaagacagcaccaaggggacggtgctaaaccattcctgag

SEQ ID NO: 45353 - DNA, 80 bp, synthetic construct
  source 1..80: mol_type = other DNA
ctgaatctaatacctgtctctgtataggcaaaactgttgatattggcaaactttataatatacctcctataaaaatccag

SEQ ID NO: 45354 - DNA, 80 bp, synthetic construct
  source 1..80: mol_type = other DNA
acaactgggattaaaggtttgctcaggaattctgagcaataaactatatagtgattccaagacatcagtggttccaaatc

SEQ ID NO: 45355 - DNA, 80 bp, synthetic construct; identical to SEQ ID NO: 12146
  source 1..80: mol_type = other DNA

SEQ ID NO: 45356 - DNA, 80 bp, synthetic construct
  source 1..80: mol_type = other DNA
aacttcagaaaatggattacatttagacccagattggcactttgtaatttcttcagtcaagaaccaagtgccacagaaaa

SEQ ID NO: 45357 - DNA, 80 bp, synthetic construct
  source 1..80: mol_type = other DNA
attgagaggctgaagtgaacagatcatttgaactcaggagtttcagactagcctgggcaacatggcaaaacccagtctct

SEQ ID NO: 45358 - DNA, 80 bp, synthetic construct
  source 1..80: mol_type = other DNA
ctcatctaaaaaaagacatagatggtataagaagatataaatagaaacaacaaaaagttaaaaagaaagaggatggagtt

SEQ ID NO: 45359 - DNA, 80 bp, synthetic construct; identical to SEQ ID NO: 12147
  source 1..80: mol_type = other DNA

SEQ ID NO: 45360 - DNA, 80 bp, synthetic construct
  source 1..80: mol_type = other DNA
tataaacacacacatagactgaaaataaagggatggaaaaagattggtcatgccaatggaaatcaaaaaagtgcaggagt

SEQ ID NO: 45361 - DNA, 80 bp, synthetic construct
  source 1..80: mol_type = other DNA
tattattagagctaaagagaaagatagatctcagtacaatcatagccagagacttcagcagcccccgtttcagcatagga

SEQ ID NO: 45362 - DNA, 80 bp, synthetic construct
  source 1..80: mol_type = other DNA
tttggtcacaaaacaagtcttagaacattcaaaaaattgaaataatatcaaacatcttctctgacaacaatggaatagaa

SEQ ID NO: 45363 - DNA, 80 bp, synthetic construct; identical to SEQ ID NO: 12148
  source 1..80: mol_type = other DNA

SEQ ID NO: 45364 - DNA, 80 bp, synthetic construct
  source 1..80: mol_type = other DNA
gagaacacagcgattgtgacacattgcgttgaactcagtggtgccctgatatagagttatattggaagaatggagcaatg

SEQ ID NO: 45365 - DNA, 80 bp, synthetic construct
  source 1..80: mol_type = other DNA
gatcagctacatctgggcttccaaaggtaatctcaggtgccacctctcctccatacttactaggaatcccaggcccttcc

SEQ ID NO: 45366 - DNA, 80 bp, synthetic construct
  source 1..80: mol_type = other DNA
cagctgtggtcaggtgttttaaaaatttattcagtgctctctgggcatgcatttcaggacaataacattgtttctggtct

SEQ ID NO: 45367 - DNA, 80 bp, synthetic construct; identical to SEQ ID NO: 12149
  source 1..80: mol_type = other DNA

SEQ ID NO: 45368 - DNA, 80 bp, synthetic construct
  source 1..80: mol_type = other DNA
tcatgaaaaattttctcctgatagcaaagttgaaggataacaaaactgaaggagggaacataccaaacagaggaggaagg

SEQ ID NO: 45369 - DNA, 80 bp, synthetic construct
  source 1..80: mol_type = other DNA
gggaagccatctccaagaagatgaccttgacaacagccaacataagtttaaaggtattgagaagacatttactcaactaa

SEQ ID NO: 45370 - DNA, 80 bp, synthetic construct
  source 1..80: mol_type = other DNA
tcagcatatgtggaaagaaaaactaagagagtttaccatgtggctcaggtctgagtagcagtcacgtaagtcagtaattt

SEQ ID NO: 45371 - DNA, 80 bp, synthetic construct; identical to SEQ ID NO: 12150
  source 1..80: mol_type = other DNA

SEQ ID NO: 45372 - DNA, 80 bp, synthetic construct
  source 1..80: mol_type = other DNA
gcccttggcactgagtctactgaaatgtgaggagggagaagaggaggccttcagatatttgacctgagcagcctggctta

SEQ ID NO: 45373 - DNA, 80 bp, synthetic construct
  source 1..80: mol_type = other DNA
agtgttattgtgaacatgttctcggatttgtttttatcagtggagaaacagaagacagaagagcactcacccagcagagc

SEQ ID NO: 45374 - DNA, 80 bp, synthetic construct
  source 1..80: mol_type = other DNA
aacatgatgggaaggcatagagaaaaagtaagaaattatagggaaacgtgcttatttagggggaggcgatactgcgggag

SEQ ID NO: 45375 - DNA, 80 bp, synthetic construct; identical to SEQ ID NO: 12151
  source 1..80: mol_type = other DNA

SEQ ID NO: 45376 - DNA, 80 bp, synthetic construct
  source 1..80: mol_type = other DNA
cctaacctttctgaacctcatgcggaaaaaatgtttgcaccactagcctccagcacagagattccatcccagctcagtat

SEQ ID NO: 45377 - DNA, 80 bp, synthetic construct
  source 1..80: mol_type = other DNA
cgtggacaccactccatccgacatggcaacacttttgatccagccgctttgacaacctcgttcagtctcctctggagaca

SEQ ID NO: 45378 - DNA, 80 bp, synthetic construct
  source 1..80: mol_type = other DNA
agcctctctacactaagctgaaacactaaatacactaagtgttgattaagtagactaggtacactaagtggtaaacttgg

SEQ ID NO: 45379 - DNA, 80 bp, synthetic construct; identical to SEQ ID NO: 12152
  source 1..80: mol_type = other DNA

SEQ ID NO: 45380 - DNA, 80 bp, synthetic construct
  source 1..80: mol_type = other DNA
gccttcttcaaagccgagctgttcgccgccctcgaggcccaggcgagcctggaggagggaccgggtgcgctcagatgggg

SEQ ID NO: 45381 - DNA, 80 bp, synthetic construct
  source 1..80: mol_type = other DNA
gccagccgcgcctcgggtccaggcctccctgtgtccacatctggtctcccggcttttcacaacagtgaccttgacagcgc

SEQ ID NO: 45382 - DNA, 80 bp, synthetic construct
  source 1..80: mol_type = other DNA
ggctaggtcaggccccagattcgggtttgcccagcgggcgctcggcgtccacgctccctctccaccttcttgcctctcta

SEQ ID NO: 45383 - DNA, 80 bp, synthetic construct; identical to SEQ ID NO: 12153
  source 1..80: mol_type = other DNA

SEQ ID NO: 45384 - DNA, 80 bp, synthetic construct
  source 1..80: mol_type = other DNA
gaaaaaagttacacagagaaaaggtcaagtccatttttgctatcctgtactgaacacagatcaattaactggtcccagga

SEQ ID NO: 45385 - DNA, 80 bp, synthetic construct
  source 1..80: mol_type = other DNA
gagctgtcaacacctggagtgcagtgcaggaagaatgcaggggcgcttgatggggaggtgagtgagtgcagatggggttc

SEQ ID NO: 45386 - DNA, 80 bp, synthetic construct
  source 1..80: mol_type = other DNA
tatggggtcccttgcatttgcggcaaaatggagagggagatgagaggcaaggagtactggccctcacatggaaacctata

SEQ ID NO: 45387 - DNA, 80 bp, synthetic construct; identical to SEQ ID NO: 12154
  source 1..80: mol_type = other DNA

SEQ ID NO: 45388 - DNA, 80 bp, synthetic construct
  source 1..80: mol_type = other DNA
aaacataaatggaatgatgtttatggaaccaattgattaacgtggaaaagtatgggcttcccagttttctgcccttcgtg

SEQ ID NO: 45389 - DNA, 80 bp, synthetic construct
  source 1..80: mol_type = other DNA
tggacttccagtgtccttcctgagtcacaccgaggtgaattgcatagaccagaaacccacattttaaaaagaataaaata

SEQ ID NO: 45390 - DNA, 80 bp, synthetic construct
  source 1..80: mol_type = other DNA
agtttttgccctgctccgcggcgctcctccggggcgggagccgcgaggcccgggcgagctcgggcgggaccggaggctgc

SEQ ID NO: 45391 - DNA, 80 bp, synthetic construct; identical to SEQ ID NO: 12155
  source 1..80: mol_type = other DNA

SEQ ID NO: 45392 - DNA, 80 bp, synthetic construct
  source 1..80: mol_type = other DNA
gcttgcgaggtataaagagaaacctagtcctactggagaacaaccaggaagcgatgtgagaaaaaaaccttgaaaccgaa

SEQ ID NO: 45393 - DNA, 80 bp, synthetic construct
  source 1..80: mol_type = other DNA
tttttttttttttttttttttttttttttttttttttgtatttttggtagggacgggctttccccgtgttgtccaggctg

SEQ ID NO: 45394 - DNA, 80 bp, synthetic construct
  source 1..80: mol_type = other DNA
aaagggcagagcaaagactccagtaacactgaagaaaagaagacttgagatagtcagagctattctcacgctggaataac

SEQ ID NO: 45395 - DNA, 80 bp, synthetic construct; identical to SEQ ID NO: 12156
  source 1..80: mol_type = other DNA

SEQ ID NO: 45396 - DNA, 80 bp, synthetic construct
  source 1..80: mol_type = other DNA
aggcaggccattagaactcactgagttcaggatggcagaatctttttcatctaaatatgttcctaagtgtgttcccttgg

SEQ ID NO: 45397 - DNA, 80 bp, synthetic construct
  source 1..80: mol_type = other DNA
accaaacaaggaaatcttttctctaacgttcttcctgatgactctagaaacccaactgaatggaatccatctggcacatt

SEQ ID NO: 45398 - DNA, 80 bp, synthetic construct
  source 1..80: mol_type = other DNA
ttttgaactctggactagcaggagatcacttcatgccatatgaaaatcttttatagctctgaaacttttttgtaggcttt

SEQ ID NO: 45399 - DNA, 80 bp, synthetic construct; identical to SEQ ID NO: 12157
  source 1..80: mol_type = other DNA

SEQ ID NO: 45400 - DNA, 80 bp, synthetic construct
  source 1..80: mol_type = other DNA
catatatacatatatacacatatacatatatacacatatatacatatatacatatatatacatatatacatatatacgta

SEQ ID NO: 45401 - DNA, 80 bp, synthetic construct
  source 1..80: mol_type = other DNA
acatggaagacaatgaaatttggtaagagaaaaagtaacatggttgtactttttgtaactgcaacgaaatttgatggtgt

SEQ ID NO: 45402 - DNA, 80 bp, synthetic construct
  source 1..80: mol_type = other DNA
tgtttaataaccatggactccaagtacagcagcaacagcaaaggaatctctcactacatgaatacatgagtatggaatta

SEQ ID NO: 45403 - DNA, 80 bp, synthetic construct; identical to SEQ ID NO: 12158
  source 1..80: mol_type = other DNA

SEQ ID NO: 45404 - DNA, 80 bp, synthetic construct
  source 1..80: mol_type = other DNA
ctgagactcctgaagcaataattaaagtacctattgatattgtagaaggtatcaaagaggaataagctctccagcttgca

SEQ ID NO: 45405 - DNA, 80 bp, synthetic construct
  source 1..80: mol_type = other DNA
ttgactctaattcagcctatcgccaaaagaaaatgtttgatctacaggactggacccaggaagatgaaaggaacaaagat

SEQ ID NO: 45406 - DNA, 80 bp, synthetic construct
  source 1..80: mol_type = other DNA
cagaagcatttaagcctatcacttcagataaaaaggtactggctattctggtcaacatttgtggaggaatcatgcactgt

SEQ ID NO: 45407 - DNA, 80 bp, synthetic construct; identical to SEQ ID NO: 12159
  source 1..80: mol_type = other DNA

SEQ ID NO: 45408 - DNA, 80 bp, synthetic construct
  source 1..80: mol_type = other DNA
gtgtggagattgtagttgccatctaggcacacaaacatttaaaagcatttggtttgcatttaattctaccattcagaatg

SEQ ID NO: 45409 - DNA, 80 bp, synthetic construct
  source 1..80: mol_type = other DNA
gataaagctttattcttcagtgttaacatacagtatatctaataactagcctcattagtagaccagtatattaaaacact

SEQ ID NO: 45410 - DNA, 80 bp, synthetic construct
  source 1..80: mol_type = other DNA
aggaaacgctgataactgcaagaattcatgattccatggtattaagaagcacctgtaggtttgtttcaaatagaggcata

SEQ ID NO: 45411 - DNA, 80 bp, synthetic construct; identical to SEQ ID NO: 12160
  source 1..80: mol_type = other DNA

SEQ ID NO: 45412 - DNA, 80 bp, synthetic construct
  source 1..80: mol_type = other DNA
tttaaaagtacaaaaagtgtttgctctcaaattgcatcataagcaagtgttaatactctgggcttttttatgtttgtttg

SEQ ID NO: 45413 - DNA, 80 bp, synthetic construct
  source 1..80: mol_type = other DNA
taattttttgtatttttagtagagacggggtttcaccgttttagccgggatggtctcgatctcctgacctcgtgatccgc

SEQ ID NO: 45414 - DNA, 80 bp, synthetic construct
  source 1..80: mol_type = other DNA
taactctgacaaaaacaaagaaaaaagaatcaaatgaacaaagcctccaagaagtttgggatcatgttaaatgaccaaac

SEQ ID NO: 45415 - DNA, 80 bp, synthetic construct; identical to SEQ ID NO: 12161
  source 1..80: mol_type = other DNA

SEQ ID NO: 45416 - DNA, 80 bp, synthetic construct
  source 1..80: mol_type = other DNA
gtatttttctttttttttttttttgggacggagtcttgctgtcacccaggctggggtgcagtggcacaatctcagctcac

SEQ ID NO: 45417 - DNA, 80 bp, synthetic construct
  source 1..80: mol_type = other DNA
tgatccgcctgcctcagcctcccaaagtgctaggattacaggcatgagccactgtgcccagcggaaagataaagtatttt

SEQ ID NO: 45418 - DNA, 80 bp, synthetic construct
  source 1..80: mol_type = other DNA
aaaaaaaaaaaaaggtatttaggcaacaactagcataatgaatagaatagtacctcacatctcaatactaacactcaatg

SEQ ID NO: 45419 - DNA, 80 bp, synthetic construct; identical to SEQ ID NO: 12162
  source 1..80: mol_type = other DNA

SEQ ID NO: 45420 - DNA, 80 bp, synthetic construct
  source 1..80: mol_type = other DNA
tctactgacagcactagacaggtcatcaagatagaaagtcaacaaagaaacaatggacttaaactctaccctagaacaaa

SEQ ID NO: 45421 - DNA, 80 bp, synthetic construct
  source 1..80: mol_type = other DNA
agaccacagtgaaataaaattggaaatcaacaccaaaaggagccctcaaaaccatgcacatacgtggaaattaagtaacc

SEQ ID NO: 45422 - DNA, 80 bp, synthetic construct
  source 1..80: mol_type = other DNA
tatggtgaaaccttgtctatactaaaaatacaaaaattagcttggtgtggtggtgggtacctgtagtcccagctactcag

SEQ ID NO: 45423 - DNA, 80 bp, synthetic construct
  source 1..80: mol_type = other DNA
acctatcaaaacctctgggatacagaaaaagcagtgctaagaggaaagttcatagcattaaatgcctacatcaaaaagtc

SEQ ID NO: 45424 - DNA, 80 bp, synthetic construct; identical to SEQ ID NO: 12163
  source 1..80: mol_type = other DNA

SEQ ID NO: 45425 - DNA, 80 bp, synthetic construct
  source 1..80: mol_type = other DNA
aagaaatggaaaccctgaacaggccaataacaagcagtgagattgaaatggtaatttaggctctacctctccccctcccc

SEQ ID NO: 45426 - DNA, 80 bp, synthetic construct
  source 1..80: mol_type = other DNA
caattgcaggcgcgcgccgccacgcctgactagttttcgtatttttttggtggagacggggtttcgctgtgttggccggg

SEQ ID NO: 45427 - DNA, 80 bp, synthetic construct
  source 1..80: mol_type = other DNA
ccctggcctcccaaagtgctgagattgcagcctctgcccggccgccaccccatctgggaagtgaggagtgtctctgcctg

SEQ ID NO: 45428 - DNA, 80 bp, synthetic construct
  source 1..80: mol_type = other DNA
gcccatcgtctgagatgtggggagcacctctgccccgccgccccgtctgggatgtgaggagcgcctctgccctgccgcga

SEQ ID NO: 45429 - DNA, 80 bp, synthetic construct; identical to SEQ ID NO: 12164
  source 1..80: mol_type = other DNA

SEQ ID NO: 45430 - DNA, 80 bp, synthetic construct
  source 1..80: mol_type = other DNA
ggatggttgccgtgtctgtgtagaaagaagtagacatgggagacttttcattttgttctgtactaagaaaaattcttctg

SEQ ID NO: 45431 - DNA, 80 bp, synthetic construct
  source 1..80: mol_type = other DNA
ctaatctcaagtacccagggacacaaacactgcggaaggccgcagagtcctctgcctaggaaaaccagagacctttgttc

SEQ ID NO: 45432 - DNA, 80 bp, synthetic construct
  source 1..80: mol_type = other DNA
ctttgggaggcctaggcgggcagatcacctgaggtcgggagtttgagaccagcctgaccaacatggagaaactccgtctc

SEQ ID NO: 45433 - DNA, 80 bp, synthetic construct; identical to SEQ ID NO: 12165
  source 1..80: mol_type = other DNA

SEQ ID NO: 45434 - DNA, 80 bp, synthetic construct
  source 1..80: mol_type = other DNA
atgagcatagatgcaaaaatcctcaaaacatactagtggccgggcgtggtggctcacacctgtaatcccagcactttggg

SEQ ID NO: 45435 - DNA, 80 bp, synthetic construct
  source 1..80: mol_type = other DNA
cccaagaggcggaggttggggtgagccgagatctcgccattgcattccagcctgggcaacaagagcgaaactccgtctgg

SEQ ID NO: 45436 - DNA, 80 bp, synthetic construct
  source 1..80: mol_type = other DNA
tgatcatctcaatagatgcagaaaaatcatttcacaaaatccagcatccctttatgattaaaaccctcagcagggttggg

SEQ ID NO: 45437 - DNA, 80 bp, synthetic construct; identical to SEQ ID NO: 12166
  source 1..80: mol_type = other DNA

SEQ ID NO: 45438 - DNA, 80 bp, synthetic construct
  source 1..80: mol_type = other DNA
agaactgggacaagtcaaggattcccactttcaccacttctattcaacatagtactggaagtcctaaccagagcaatcag

SEQ ID NO: 45439 - DNA, 80 bp, synthetic construct
  source 1..80: mol_type = other DNA
tgtacaaaatcagtagctctgctatacaccaacagccaccaagctgagaatcaaatcaagaactcaaccccttttacttt

SEQ ID NO: 45440 - DNA, 80 bp, synthetic construct
  source 1..80: mol_type = other DNA
atgaccatactgccaaaaaaaaactacaaattcaatgcaattttcatcaaaataccatcatcattcttcacagaactaga

SEQ ID NO: 45441 - DNA, 80 bp, synthetic construct; identical to SEQ ID NO: 12167
  source 1..80: mol_type = other DNA

SEQ ID NO: 45442 - DNA, 80 bp, synthetic construct
  source 1..80: mol_type = other DNA
aaaattttaaaagacaacataaaaaaataaccttctagacattgccttaggcaaagacttcatgaccaggaacccaaaag

SEQ ID NO: 45443 - DNA, 80 bp, synthetic construct
  source 1..80: mol_type = other DNA
gaattcaaacaaatcagaaagaacaaaacaaacaatcccatcaaaaaacgcactaaggacatgaatagaaaattctcaaa

SEQ ID NO: 45444 - DNA, 80 bp, synthetic construct
  source 1..80: mol_type = other DNA
acgaaaagggaacacttttacactgctggtgggaatgtaaactagtacaacaattacggaaaacagtatggagaatcctt

SEQ ID NO: 45445 - DNA, 80 bp, synthetic construct; identical to SEQ ID NO: 12168
  source 1..80: mol_type = other DNA

SEQ ID NO: 45446 - DNA, 80 bp, synthetic construct
  source 1..80: mol_type = other DNA
aagaggggtagggaggtgagagataaaagactacacattgggtactttgtatgctgctcaagtgatgggtgcaccaaaat

SEQ ID NO: 45447 - DNA, 80 bp, synthetic construct
  source 1..80: mol_type = other DNA
attggaatattcagtattgttgaggtaccaagtctcccacaactgacctgtggattaagtgcaattccaatcaaaatcat

SEQ ID NO: 45448 - DNA, 80 bp, synthetic construct
  source 1..80: mol_type = other DNA
gaatcaaggttgtgttactggcataaggatagccatgaatcggtggaatagaataaagagtagatgaataaaaccacaca

SEQ ID NO: 45449 - DNA, 80 bp, synthetic construct; identical to SEQ ID NO: 12169
  source 1..80: mol_type = other DNA

SEQ ID NO: 45450 - DNA, 80 bp, synthetic construct
  source 1..80: mol_type = other DNA
gcctccagggcttagaaattccttaattttacatcctgccatgtcaagatttcttccagttccggggattctaggatttg

SEQ ID NO: 45451 - DNA, 80 bp, synthetic construct
  source 1..80: mol_type = other DNA
gtgccaggcactggtgggaagtggtcaggagataacacaaaccctgatctccgcaaccagcctcaggaagtccttctgaa

SEQ ID NO: 45452 - DNA, 80 bp, synthetic construct
  source 1..80: mol_type = other DNA
actctcatgataataacttcaaattgcacctggctcctttcatcttccgtgccttgcttttctcttaatcatcctttatt

SEQ ID NO: 45453 - DNA, 80 bp, synthetic construct; identical to SEQ ID NO: 12170
  source 1..80: mol_type = other DNA

SEQ ID NO: 45454 - DNA, 80 bp, synthetic construct
  source 1..80: mol_type = other DNA
agggcgcagtctccagggcggagtcccggggcgcttcgggcagggagtctgggccaaagcgccaaaatccgccgctgtcg

SEQ ID NO: 45455 - DNA, 80 bp, synthetic construct
  source 1..80: mol_type = other DNA
gatggcagggggccaggattaagggatatagacagcaggtcctgtctgcttaggttgcaaatgggaagaagaggccggat

SEQ ID NO: 45456 - DNA, 80 bp, synthetic construct
  source 1..80: mol_type = other DNA
attggggacaaatgctcagcccagtctgattccagaaatccttgtaacccaatatagtctccagctccgatgccatgtcc

SEQ ID NO: 45457 - DNA, 80 bp, synthetic construct; identical to SEQ ID NO: 12171
  source 1..80: mol_type = other DNA

SEQ ID NO: 45458 - DNA, 80 bp, synthetic construct
  source 1..80: mol_type = other DNA
gccgctctacgcttgggttctgatgagctgctctggagaggacggggcggtggtctgagtaagacacagattgttgatcc

SEQ ID NO: 45459 - DNA, 80 bp, synthetic construct
  source 1..80: mol_type = other DNA
ccagccttttcatggcaacactccaggaaaatggaaagttgatcatttttttcttccactccttaatcctttcctgactg

SEQ ID NO: 45460 - DNA, 80 bp, synthetic construct
  source 1..80: mol_type = other DNA
ttattattactaaactgcagactttatttggagttcattagcgttcccctaatgtcctttctgtgtttcaggattccatg

SEQ ID NO: 45461 - DNA, 80 bp, synthetic construct; identical to SEQ ID NO: 12172
  source 1..80: mol_type = other DNA

SEQ ID NO: 45462 - DNA, 80 bp, synthetic construct
  source 1..80: mol_type = other DNA
ttctggaggcccagggcattggtcagcgttctttggcttgtagccccattgctccagtctctgcctccttcttcacattg

SEQ ID NO: 45463 - DNA, 80 bp, synthetic construct
  source 1..80: mol_type = other DNA
catctgcaaagaccctttttttccaaacaacttgaaattcacagcttctggggactaggacagaaacatatctttgtggg

SEQ ID NO: 45464 - DNA, 80 bp, synthetic construct
  source 1..80: mol_type = other DNA
tatcagaagtgatcctgaagaaagattacctttggaagagacttatgctgagttcattgcttgatttcttgcctctgttt

SEQ ID NO: 45465 - DNA, 80 bp, synthetic construct
  source 1..80: mol_type = other DNA
ttatctgttgtcaggataaactggtacatgaataaacaaaattgccattaggggtcgcaccagtctcaagaaaaatctgg

SEQ ID NO: 45466 - DNA, 80 bp, synthetic construct; identical to SEQ ID NO: 12173
  source 1..80: mol_type = other DNA

SEQ ID NO: 45467 - DNA, 80 bp, synthetic construct
  source 1..80: mol_type = other DNA
gtcctctcctgtgtacgttttgaaatcaatgggtagagtacgccaaagttaatttggatcttcaatggccatccttgggg

SEQ ID NO: 45468 - DNA, 80 bp, synthetic construct
  source 1..80: mol_type = other DNA
cgggattcaaacattgcctccctctaagattctatcacaaaattaactgagaccagcaaacagttaaggaaggacaacaa

SEQ ID NO: 45469 - DNA, 80 bp, synthetic construct
  source 1..80: mol_type = other DNA
cgggcaccatagctcacgcctgtaatcccagcactttgggaggctgaggcaggcagatcacgaggtcaggagatcgagac

SEQ ID NO: 45470 - DNA, 80 bp, synthetic construct
  source 1..80: mol_type = other DNA
gcactccagcctgggtgacagagcgagactccgtctcaaaaaaaaaaaaaaagaaaagaaaagaaaagaaaaaagaagaa

SEQ ID NO: 45471 - DNA, 80 bp, synthetic construct; identical to SEQ ID NO: 12174
  source 1..80: mol_type = other DNA

SEQ ID NO: 45472 - DNA, 80 bp, synthetic construct
  source 1..80: mol_type = other DNA
tgtgtacagtgtacactaatcaggtgctggatgcgccaaaatcttggaaatcaccactaaagaacttatccatgtaaaca

SEQ ID NO: 45473 - DNA, 80 bp, synthetic construct
  source 1..80: mol_type = other DNA
tttatgtaatgtgaaatatgaatatccacaattacatgaaaagctgttaaaaataatcctcccagtccgggcatggtagc

SEQ ID NO: 45474 - DNA, 80 bp, synthetic construct
  source 1..80: mol_type = other DNA
gaccctgtctctaaacaacagcaataataatccttccttcctgagtcagacgggcatggagacgcttctggaaggaacac

SEQ ID NO: 45475 - DNA, 80 bp, synthetic construct
  source 1..80: mol_type = other DNA
tgtagccaccttgggtgttgaggttcatcccctagtgttccataccaacagaggacctgttaagttcaatgtatgggaca

SEQ ID NO: 45476 - DNA, 80 bp, synthetic construct; identical to SEQ ID NO: 12175
  source 1..80: mol_type = other DNA

SEQ ID NO: 45477 - DNA, 80 bp, synthetic construct
  source 1..80: mol_type = other DNA
aagttgtcatggacccagctttggcagcacagtatgagcacgacttagaggttgctcagacaactgctctcccggacgag

SEQ ID NO: 45478 - DNA, 80 bp, synthetic construct
  source 1..80: mol_type = other DNA
ggcttcgcagtgaatgtggcagttcaaaaaataccttcattgtttggacctgcatatttagctgttttggaacacagttg

SEQ ID NO: 45479 - DNA, 80 bp, synthetic construct
  source 1..80: mol_type = other DNA
atttgtgtaaggctagattttttaacatatacacttcaatcaaagtaagaaaatggctgggatgcagctggaggccataa

SEQ ID NO: 45480 - DNA, 80 bp, synthetic construct; identical to SEQ ID NO: 12176
  source 1..80: mol_type = other DNA

SEQ ID NO: 45481 - DNA, 80 bp, synthetic construct
  source 1..80: mol_type = other DNA
tgagtaggtgggattacaggtatgcgccaccacctccagctaattttgtatttttagtagacatggggtttctccatatt

SEQ ID NO: 45482 - DNA, 80 bp, synthetic construct
  source 1..80: mol_type = other DNA
acacttatgaaaatgaaaaataatcactcttcttgttaccaaaaatcttggtagctgcagaaggtgggatctttcctcac

SEQ ID NO: 45483 - DNA, 80 bp, synthetic construct
  source 1..80: mol_type = other DNA
gctctaatgaaggggttgggcattaaaagtgagggggaggaatattcatatgttttatgggaacaggcagtgaacttctc

SEQ ID NO: 45484 - DNA, 80 bp, synthetic construct; identical to SEQ ID NO: 12177
  source 1..80: mol_type = other DNA

SEQ ID NO: 45485 - DNA, 80 bp, synthetic construct
  source 1..80: mol_type = other DNA
acacccggctaatttttgtattgttagtagagacagggtttcatcatgttggccaggttagtcttgaactcctgacctcg

SEQ ID NO: 45486 - DNA, 80 bp, synthetic construct
  source 1..80: mol_type = other DNA
ggtgaaaccccgtctctactaaaaacacaaaaattagctgggtgtggtggcacacgcctgtagttccagttactggggag

SEQ ID NO: 45487 - DNA, 80 bp, synthetic construct
  source 1..80: mol_type = other DNA
gaattaatatttttaatattttgttttaatatcttttaatttatatatgataaaaattgatacaatccacagaaacaaaa

SEQ ID NO: 45488 - DNA, 80 bp, synthetic construct
  source 1..80: mol_type = other DNA
taattttttggacttttagtagagacagggtttctccatattggtcgggctggtctcgaactcccaacctcaggtgatca

SEQ ID NO: 45489 - DNA, 80 bp, synthetic construct; identical to SEQ ID NO: 12178
  source 1..80: mol_type = other DNA

SEQ ID NO: 45490 - DNA, 80 bp, synthetic construct
  source 1..80: mol_type = other DNA
gaaacggcctctaccgggagtagagaggggccggcccggcgggggcgaaggactcggggagccgcgccgggaggagggtc

SEQ ID NO: 45491 - DNA, 80 bp, synthetic construct
  source 1..80: mol_type = other DNA
gatggtgccgcgggcgccgtggatggagcaggaggggtcagagtattgggaccgggagacacggagcgccagggacaccg

SEQ ID NO: 45492 - DNA, 80 bp, synthetic construct
  source 1..80: mol_type = other DNA
ctgcggaacccgcccagaccctagaccggggagagtctcaggcgcctttacccggttctttttcagtttaggccaaaatg

SEQ ID NO: 45493 - DNA, 80 bp, synthetic construct; identical to SEQ ID NO: 12179
  source 1..80: mol_type = other DNA

SEQ ID NO: 45494 - DNA, 80 bp, synthetic construct
  source 1..80: mol_type = other DNA
ctgacagacctcaaacagtagaagaaacagggatggaggccagaataccactcctcccttggatcaggagagggagctgt

SEQ ID NO: 45495 - DNA, 80 bp, synthetic construct
  source 1..80: mol_type = other DNA
gtttctctcgtgcctgattctcagccccacaccaagagtttttggaggtctgactccagcttttctcagtcactcagcat

SEQ ID NO: 45496 - DNA, 80 bp, synthetic construct
  source 1..80: mol_type = other DNA
tctcaggatggtcacatgggtgctgctggagtgtcccatgagagatacaaagtgcctgaattttctgactcttcccctca

SEQ ID NO: 45497 - DNA, 80 bp, synthetic construct; identical to SEQ ID NO: 12180
  source 1..80: mol_type = other DNA

SEQ ID NO: 45498 - DNA, 80 bp, synthetic construct
  source 1..80: mol_type = other DNA
gagccggcttcccagcccaccatccccatcgtgggcatcattgctggcctggttctccttggatctgtggtctctggagc

SEQ ID NO: 45499 - DNA, 80 bp, synthetic construct
  source 1..80: mol_type = other DNA
cctggggccctgtgtgccagcacctactctttttttttgagacggagtcttggctctgtcacccaggctggagtgcaatg

SEQ ID NO: 45500 - DNA, 80 bp, synthetic construct
  source 1..80: mol_type = other DNA
tggtctcgaactcctgactttgtgatctgcctgcctcggcctcccaaagtgctgggattacagtcgtgagccaccgcacc

SEQ ID NO: 45501 - DNA, 80 bp, synthetic construct; identical to SEQ ID NO: 12181
  source 1..80: mol_type = other DNA

SEQ ID NO: 45502 - DNA, 80 bp, synthetic construct
  source 1..80: mol_type = other DNA
gtggaggagctcgcccaccctataattcctcctgcaccacatctcctgtgggctctgaccaggtcttgtttttgttctac

SEQ ID NO: 45503 - DNA, 80 bp, synthetic construct
  source 1..80: mol_type = other DNA
tcatcacttaccgtgactgacctgaatttgttcatgactattttcttctgtagcctgagacagctgccttgtgtgcgact

SEQ ID NO: 45504 - DNA, 80 bp, synthetic construct
  source 1..80: mol_type = other DNA
tgtctaccatgacccccttcctcacactgacctgtgttccttccctgttctcttttctattaaaaataagaacctgggca

SEQ ID NO: 45505 - DNA, 80 bp, synthetic construct; identical to SEQ ID NO: 12182
  source 1..80: mol_type = other DNA

SEQ ID NO: 45506 - DNA, 80 bp, synthetic construct
  source 1..80: mol_type = other DNA
acatctctagcaaatttagcctattcctattctctagcctattccttaccacctgtaatcttgaccatataccttggagt

SEQ ID NO: 45507 - DNA, 80 bp, synthetic construct
  source 1..80: mol_type = other DNA
acaggaatgggactggtggctttataagaagaggaaaagagaactgagctagcatgcccagcccacagagagcctccact

SEQ ID NO: 45508 - DNA, 80 bp, synthetic construct
  source 1..80: mol_type = other DNA
tggcagcatgcagcgcccccttgggaaagctttaggcaccagcctgcaacccattcgagcagccacgtaggctgcaccca

SEQ ID NO: 45509 - DNA, 80 bp, synthetic construct; identical to SEQ ID NO: 12183
  source 1..80: mol_type = other DNA

SEQ ID NO: 45510 - DNA, 80 bp, synthetic construct
  source 1..80: mol_type = other DNA
ttcactggcccatgttctagttctggtcatgccgactttcccgttttcctggtgaatccctgtaatcacctgagtctcat

SEQ ID NO: 45511 - DNA, 80 bp, synthetic construct
  source 1..80: mol_type = other DNA
ctgagctccagttcctcatcttgtacgtggcactgttttcttgggagagtcattataaagctaatataaagtacctgtac

SEQ ID NO: 45512 - DNA, 80 bp, synthetic construct
  source 1..80: mol_type = other DNA
taatactgattataaaagggcttgaggttgaggcaagttcaacctcttgccctcactcacccacttgcctttaccaagag

SEQ ID NO: 45513 - DNA, 80 bp, synthetic construct; identical to SEQ ID NO: 12184
  source 1..80: mol_type = other DNA

SEQ ID NO: 45514 - DNA, 80 bp, synthetic construct
  source 1..80: mol_type = other DNA
tgctaccacgcccagctaatttttgtatttttagtagagacagagtttcatcatgttggccagctggtctcgaactcctg

SEQ ID NO: 45515 - DNA, 80 bp, synthetic construct
  source 1..80: mol_type = other DNA
actactcataaggagtatagaactattttccttctctacttggtctgcccatttctacttcctgccatatcggcaggcta

SEQ ID NO: 45516 - DNA, 80 bp, synthetic construct
  source 1..80: mol_type = other DNA
cgctgaaggaatctaagatttagtaacaatgaataaacagacttgaagataactattgtggttagcgctgaaagaaacgt

SEQ ID NO: 45517 - DNA, 80 bp, synthetic construct
  source 1..80: mol_type = other DNA
tacattataatacataatgaaataattatacaactcaccataatgtagagtcagtaggagccctgagcttgttttcctgc

SEQ ID NO: 45518 - DNA, 80 bp, synthetic construct; identical to SEQ ID NO: 12185
  source 1..80: mol_type = other DNA

SEQ ID NO: 45519 - DNA, 80 bp, synthetic construct
  source 1..80: mol_type = other DNA
ggaattgggttattaccaaaaaaaaaatgttggaagatgaaagagcaggttctttatgcctcctggcttgaccctggaac

SEQ ID NO: 45520 - DNA, 80 bp, synthetic construct
  source 1..80: mol_type = other DNA
gattcagtcaagatactgttgggaaaacagcccatgccatgggacttccccatggtcggaaaagtcttgaatagctaaaa

SEQ ID NO: 45521 - DNA, 80 bp, synthetic construct
  source 1..80: mol_type = other DNA
acccaagggaaggaggaacccgagtgatcttgtcctcttttgacatctcatttctagccacaaggttatgaatcatagat

SEQ ID NO: 45522 - DNA, 80 bp, synthetic construct; identical to SEQ ID NO: 12186
  source 1..80: mol_type = other DNA

SEQ ID NO: 45523 - DNA, 80 bp, synthetic construct
  source 1..80: mol_type = other DNA
ctcaggaggctgaggcaggagaatcgcttgaacccaggaggctgaggttgtgcagtgagccaagatcacaccattgcact

SEQ ID NO: 45524 - DNA, 80 bp, synthetic construct
  source 1..80: mol_type = other DNA
aagaaaggcaaatgatcacttagaggattttgtttggtagttaaaaccattttgaaacagagggagggaagaaatcacct

SEQ ID NO: 45525 - DNA, 80 bp, synthetic construct
  source 1..80: mol_type = other DNA
cattgcctgtgtgtccaggagagactgtgcccaccttgagagactgagagaagaccctagtgaggagaagcccccaggcc

SEQ ID NO: 45526 - DNA, 80 bp, synthetic construct; identical to SEQ ID NO: 12187
  source 1..80: mol_type = other DNA

SEQ ID NO: 45527 - DNA, 80 bp, synthetic construct
  source 1..80: mol_type = other DNA
ttagcagggtcataggacaatagtggagggaaggtcagcagataaacatgtgaacaaaggtctctggttttcctaggcag

SEQ ID NO: 45528 - DNA, 80 bp, synthetic construct
  source 1..80: mol_type = other DNA
cccttaatccatttaaccctgagtggacacagcacatgtttcagagagcacggggttgggggtaaggctatagatcaaca

SEQ ID NO: 45529 - DNA, 80 bp, synthetic construct; identical to SEQ ID NO: 12188
  source 1..80: mol_type = other DNA

SEQ ID NO: 45530 - DNA, 80 bp, synthetic construct
  source 1..80: mol_type = other DNA
ggcggaggggctcctcacttctcagacagggcggcccggcagagacgcccctcacctcccagacggggtggcggtcgggc

SEQ ID NO: 45531 - DNA, 80 bp, synthetic construct
  source 1..80: mol_type = other DNA
gctgcagtctcggcactttgggaggccaaggcaggcggctgggaggtggaggctgtagcgagccgagatcacgccactgc

SEQ ID NO: 45532 - DNA, 80 bp, synthetic construct; identical to SEQ ID NO: 12189
  source 1..80: mol_type = other DNA

SEQ ID NO: 45533 - DNA, 80 bp, synthetic construct
  source 1..80: mol_type = other DNA
agtagctgggattacaggcatgtgccatcacgccccggctgattttgtacctttagtaaagacggggtttctccatgttg

SEQ ID NO: 45534 - DNA, 80 bp, synthetic construct
  source 1..80: mol_type = other DNA
tgactgcacggaattctgaatgaattgaattggataatacatgtaaatccttgtggtgggaatttgggtgccattttctt

SEQ ID NO: 45535 - DNA, 80 bp, synthetic construct
  source 1..80: mol_type = other DNA
gcaaactctgcctcctgggttcatgccattctcctgcctcagcctcctgagtagctgggattacaggtgcatgccaccac

SEQ ID NO: 45536 - DNA, 80 bp, synthetic construct; identical to SEQ ID NO: 12190
  source 1..80: mol_type = other DNA

SEQ ID NO: 45537 - DNA, 80 bp, synthetic construct
  source 1..80: mol_type = other DNA
aagttgaatttggataagagaaaaatcaagggcactcactcttcccaaccccagcctgtctgactctctccccatcatcc

SEQ ID NO: 45538 - DNA, 80 bp, synthetic construct
  source 1..80: mol_type = other DNA
ctggtgttagagccaggtgactctgtccaaagagtaggttctttttccccacagaggcaaacaggaaacgtttcctttcc

SEQ ID NO: 45539 - DNA, 80 bp, synthetic construct
  source 1..80: mol_type = other DNA
agttagtggtggcaaccaaagcgaacagaggacttggcttcctgaaaacagaggcaaagaagtatagctatccaaccttc

SEQ ID NO: 45540 - DNA, 80 bp, synthetic construct; identical to SEQ ID NO: 12191
  source 1..80: mol_type = other DNA

SEQ ID NO: 45541 - DNA, 80 bp, synthetic construct
  source 1..80: mol_type = other DNA
tttttctgtcctaactaaatgattataaaactacttaccaagtgacacagttgaaatataaataatttcttaaatagtta

SEQ ID NO: 45542 - DNA, 80 bp, synthetic construct
  source 1..80: mol_type = other DNA
cgtatgtaatcaactatattgttcatggtgccaaatcctctctcactttagcagctatgttaaagattttttagcccttg

SEQ ID NO: 45543 - DNA, 80 bp, synthetic construct
  source 1..80: mol_type = other DNA
tgggattgcaggcacatgccaccacgcccagctactttttgtatttttagtaaagagggggtttcaccacgtaggccaag

SEQ ID NO: 45544 - DNA, 80 bp, synthetic construct
  source 1..80: mol_type = other DNA
gctcactgcaagctcctcctcccgggttcacgccattctcctgcctcagcctcctgagtagctgggactacaggcgcctg

SEQ ID NO: 45545 - DNA, 80 bp, synthetic construct; identical to SEQ ID NO: 12192
  source 1..80: mol_type = other DNA

SEQ ID NO: 45546 - DNA, 80 bp, synthetic construct
  source 1..80: mol_type = other DNA
actttttctcttgaagttgacatttttctttcaaatggtatatcatatttttaaacaatactatctactttttccccttt

SEQ ID NO: 45547 - DNA, 80 bp, synthetic construct
  source 1..80: mol_type = other DNA
atgtcctaaacacttactactcccatttcacaacttctattaaagtgaatataaaaggtttggtacaattccctaatgct

SEQ ID NO: 45548 - DNA, 80 bp, synthetic construct
  source 1..80: mol_type = other DNA
ttaaacattttactgcatcatcctgacatcactgaatacagtaacttatatagtaccaatttaaaatataaagagacttt

SEQ ID NO: 45549 - DNA, 80 bp, synthetic construct
  source 1..80: mol_type = other DNA
ctaatttttgtatttttttgtagagacagggtttcaccatgttggccaggatggtctcaatctcttgacctcgtgatctg

SEQ ID NO: 45550 - DNA, 80 bp, synthetic construct; identical to SEQ ID NO: 12193
  source 1..80: mol_type = other DNA

SEQ ID NO: 45551 - DNA, 80 bp, synthetic construct
  source 1..80: mol_type = other DNA
ccccgtctctactaaaaatacaaaaaattagccgggcatggtggcaggcgcctgtagtcccagctgctcgggaggctgag

SEQ ID NO: 45552 - DNA, 80 bp, synthetic construct
  source 1..80: mol_type = other DNA
tttataaatttactaaaaagttgtctcatcatggtagatatacgttttgtgaccattgtaaccattaatgtagactgcaa

SEQ ID NO: 45553 - DNA, 80 bp, synthetic construct
  source 1..80: mol_type = other DNA
gaagctcattcataatattcttcaaattcttcttattactagtttttccctgaattctgagcaccgacaatatgctagaa

SEQ ID NO: 45554 - DNA, 80 bp, synthetic construct
  source 1..80: mol_type = other DNA
aggctggagtgcaatggcgccatctcagctcactgcaacctccacctcctgggttcaaatgattatcctgcctcagcctc

SEQ ID NO: 45555 - DNA, 80 bp, synthetic construct; identical to SEQ ID NO: 12194
  source 1..80: mol_type = other DNA

SEQ ID NO: 45556 - DNA, 80 bp, synthetic construct
  source 1..80: mol_type = other DNA
ggtttcatgatttgtctcagattcagaagagtcatgtttacagtatctaaaagcaatgtttaaaatgtatgtaggcctgg

SEQ ID NO: 45557 - DNA, 80 bp, synthetic construct
  source 1..80: mol_type = other DNA
agcactttgggaggccaaggcaggtggctcacctgaagtcaggagttcaagaccagcctgaccaacatcgtgaaactccg

SEQ ID NO: 45558 - DNA, 80 bp, synthetic construct
  source 1..80: mol_type = other DNA
aactctgtctcaaaaaaaaaaaaaaaaaaaaaacccttctgtctcaaaaaaaaaaaaaaaaacccttctgtctcaaaaaa

SEQ ID NO: 45559 - DNA, 80 bp, synthetic construct; identical to SEQ ID NO: 12195
  source 1..80: mol_type = other DNA

SEQ ID NO: 45560 - DNA, 80 bp, synthetic construct
  source 1..80: mol_type = other DNA
ctaaaccacaaaacaatgaatgtacaatggtgacatggctgaaccagccggtggtgccataaatgattctcagatgctgc

SEQ ID NO: 45561 - DNA, 80 bp, synthetic construct
  source 1..80: mol_type = other DNA
actggctggatgccagtgtgtaagacaatgccataaagggctatatgagcattagctactatgctatgacttttaacatt

SEQ ID NO: 45562 - DNA, 80 bp, synthetic construct
  source 1..80: mol_type = other DNA
tcccaagttcaagcaatcctcccacctcagcctcttgagtagcagggattacaggcatctgccaccacgcctggctaatt

SEQ ID NO: 45563 - DNA, 80 bp, synthetic construct; identical to SEQ ID NO: 12196
  source 1..80: mol_type = other DNA

SEQ ID NO: 45564 - DNA, 80 bp, synthetic construct
  source 1..80: mol_type = other DNA
tagagacggggtttcaccatgttggccaggctggtctcaaactcctgacctcaggtgatcagcccaccttggcctcccaa

SEQ ID NO: 45565 - DNA, 80 bp, synthetic construct
  source 1..80: mol_type = other DNA
ttgtatttttagtagagtagagctgtgatcatgccactgtactctagcctgggtgacagagtgagatgagaccctgtctc

SEQ ID NO: 45566 - DNA, 80 bp, synthetic construct
  source 1..80: mol_type = other DNA
ggtagagggcgtcagtaattccaactacttgggaggatgaggcaggagaatcgcttgaagccaggaggcggaggttgtag

SEQ ID NO: 45567 - DNA, 80 bp, synthetic construct; identical to SEQ ID NO: 12197
  source 1..80: mol_type = other DNA

SEQ ID NO: 45568 - DNA, 80 bp, synthetic construct
  source 1..80: mol_type = other DNA
tcttccactcaggctggggtcccaggagcagatggtgggcaaagggcaggaataacctgtgcctcaagctgcaaacagga

SEQ ID NO: 45569 - DNA, 80 bp, synthetic construct
  source 1..80: mol_type = other DNA
agccagaatatcgcatgctatgggttaagaaataggcttttgagggaattttcaattcagtgtcagcaagtaaagagaaa

SEQ ID NO: 45570 - DNA, 80 bp, synthetic construct
  source 1..80: mol_type = other DNA
agagcagccttatcaatgaagaggcacacaaacagcgtaggcacctagcactcttgattagagtgtcagttattgacagg

SEQ ID NO: 45571 - DNA, 80 bp, synthetic construct
  source 1..80: mol_type = other DNA
gaatatgacaaaggtgaaagtctatcatatccatgagtagacaataagagtttgtggcttttatcttgctagcagactca

SEQ ID NO: 45572 - DNA, 80 bp, synthetic construct; identical to SEQ ID NO: 12198
  source 1..80: mol_type = other DNA

SEQ ID NO: 45573 - DNA, 80 bp, synthetic construct
  source 1..80: mol_type = other DNA
tgctgtaatgataactaatatacaggagatgttcaaaaatacaagctacccaggaactggagacctaggggcccatggct

SEQ ID NO: 45574 - DNA, 80 bp, synthetic construct
  source 1..80: mol_type = other DNA
tgtggctcctgacatcacaaatatagtagaataacaccaaactgagtaaataggacagtaggctgcagaccccctcatgt

SEQ ID NO: 45575 - DNA, 80 bp, synthetic construct
  source 1..80: mol_type = other DNA
tgaccacaaaggggaggaaccaggaagttgtggtaaactgtagcggaagttaaagctaaaaaaaaaaatgagagagaacc

SEQ ID NO: 45576 - DNA, 80 bp, synthetic construct
  source 1..80: mol_type = other DNA
tgacactcaatcttctcttgggaactaattatggcaatgtaccacgaggtactgttcctcagactaaacgtggttttttg

SEQ ID NO: 45577 - DNA, 80 bp, synthetic construct; identical to SEQ ID NO: 12199
  source 1..80: mol_type = other DNA

SEQ ID NO: 45578 - DNA, 80 bp, synthetic construct
  source 1..80: mol_type = other DNA
tgcccagcgtaaacgtggtttcttatgtttttaaattccccttgaaaatattctcttgtgaccaaaaaagacccttgggt

SEQ ID NO: 45579 - DNA, 80 bp, synthetic construct
  source 1..80: mol_type = other DNA
tcgtagtccccttcagtgctaagaacagaaaagaagctgttgcttttctctgctataggtgttgctgttgaaaattcatc

SEQ ID NO: 45580 - DNA, 80 bp, synthetic construct
  source 1..80: mol_type = other DNA
ttaagttttcaataataaaaagttaaaaaccaaaaattaaaagaatctgacaggccagatatggtggttcacgcctgtaa

SEQ ID NO: 45581 - DNA, 80 bp, synthetic construct; identical to SEQ ID NO: 12200
  source 1..80: mol_type = other DNA

SEQ ID NO: 45582 - DNA, 80 bp, synthetic construct
  source 1..80: mol_type = other DNA
ttcttaaataaataaatgggaagatgtggcagtactttttcacagaagaattcattagcaaagcctaacggtgtggctag

SEQ ID NO: 45583 - DNA, 80 bp, synthetic construct
  source 1..80: mol_type = other DNA
gtagtttaaaaagctatgtgcagcacacagggttataactgcttagaagagagacttgagaaggctataggaagctactc

SEQ ID NO: 45584 - DNA, 80 bp, synthetic construct
  source 1..80: mol_type = other DNA
tcactggctgaccattaagctatgctgatccaggggcaacccctaagaattcaggcttaaaaataaaaataagaattaaa

SEQ ID NO: 45585 - DNA, 80 bp, synthetic construct
  source 1..80: mol_type = other DNA
tgaagcctcatactgcatactgcaagggaaaaggactccactgaattagtacaggcaagtcactataaaaatatctgaac

SEQ ID NO: 45586 - DNA, 80 bp, synthetic construct; identical to SEQ ID NO: 12201
  source 1..80: mol_type = other DNA

SEQ ID NO: 45587 - DNA, 80 bp, synthetic construct
  source 1..80: mol_type = other DNA
gcatggtgatgcacacctgtaatcccagctactcgggaggctgaggcaggagaattgcttgaaccacggagtcagaggtt

SEQ ID NO: 45588 - DNA, 80 bp, synthetic construct
  source 1..80: mol_type = other DNA
aaaaactcatctcatacaaatacactcatacacacagacacaataatcttaatagctaacctcatcagtaacaatggagg

SEQ ID NO: 45589 - DNA, 80 bp, synthetic construct
  source 1..80: mol_type = other DNA
aaaccccatctctactaagaatataaaaattagctgggtgtggtggtacatgcctgtaatcccagctactcgggaggctg

SEQ ID NO: 45590 - DNA, 80 bp, synthetic construct; identical to SEQ ID NO: 12202
  source 1..80: mol_type = other DNA

SEQ ID NO: 45591 - DNA, 80 bp, synthetic construct
  source 1..80: mol_type = other DNA
ccatgtgtggtagtgcacacctgtagtcctagctactcaggaggctgaggcaggaggctctcttaggcccgagagattga

SEQ ID NO: 45592 - DNA, 80 bp, synthetic construct
  source 1..80: mol_type = other DNA
tatgtcttacaagaaacactaatgtaatactaaagtaagttcttcagactgagaagaaatgacaccagataataatccca

SEQ ID NO: 45593 - DNA, 80 bp, synthetic construct
  source 1..80: mol_type = other DNA
gtccagcctgggcaacagagcaagactccatctcaaaaatattacattaaaaaaagtaaaatttgtaaaagaaacaaaca

SEQ ID NO: 45594 - DNA, 80 bp, synthetic construct; identical to SEQ ID NO: 12203
  source 1..80: mol_type = other DNA

SEQ ID NO: 45595 - DNA, 80 bp, synthetic construct
  source 1..80: mol_type = other DNA
gaaacaaaggaaccacatcagattgtaagtccaatccacaagaacaaatcatcagaaacactaaataagtttcatacgaa

SEQ ID NO: 45596 - DNA, 80 bp, synthetic construct
  source 1..80: mol_type = other DNA
caaaaccccgtctctactaaaaatacaaaaattagctgggcatggttgtgctcacctgaaatcccagttactcaggaggc

SEQ ID NO: 45597 - DNA, 80 bp, synthetic construct
  source 1..80: mol_type = other DNA
atcactaagctaaagggaaaagtcaagttgggaactgctgagagcaaacctacgtctcattctattcggtcactcctctg

SEQ ID NO: 45598 - DNA, 80 bp, synthetic construct
  source 1..80: mol_type = other DNA
atggtgaaaccccgtctctactaaaaatacaaaaattagctcagcgtggtggcacatgcctgtaatcccagctattcggg

SEQ ID NO: 45599 - DNA, 80 bp, synthetic construct; identical to SEQ ID NO: 12204
  source 1..80: mol_type = other DNA

SEQ ID NO: 45600 - DNA, 80 bp, synthetic construct
  source 1..80: mol_type = other DNA
tctcagatattcagggttcacactcccctggaccccctgactttcttcagggcactggccactttcttgtctgtctttgg

SEQ ID NO: 45601 - DNA, 80 bp, synthetic construct
  source 1..80: mol_type = other DNA
aggaattttgctctgtgtgaccctagtcgtagttcttcacagagggctccatttcacttgcctttccttctgcttttttc

SEQ ID NO: 45602 - DNA, 80 bp, synthetic construct
  source 1..80: mol_type = other DNA
acttccttatcccaacctcatcatcttccccgatccctaccaacccactgcaggcatatgagccctaaaatctgggaaag

SEQ ID NO: 45603 - DNA, 80 bp, synthetic construct
  source 1..80: mol_type = other DNA
ttttttttttttttttttttgagacggagtttcgctcttgccgctgcccaggctatagtgcaatggcgccatctcggctc

SEQ ID NO: 45604 - DNA, 80 bp, synthetic construct; identical to SEQ ID NO: 12205
  source 1..80: mol_type = other DNA

SEQ ID NO: 45605 - DNA, 80 bp, synthetic construct
  source 1..80: mol_type = other DNA
ggtccctatttcctctctgggatctgtagccaatcattcacgaggtaaacagaacgaccgagtttctctcagccgagaac

SEQ ID NO: 45606 - DNA, 80 bp, synthetic construct
  source 1..80: mol_type = other DNA
agaaaaaatgtaaataatccgttgagaatatttaatgaaaaatgttggtcgtatctttatctggtctgcggctctgtccc

SEQ ID NO: 45607 - DNA, 80 bp, synthetic construct
  source 1..80: mol_type = other DNA
ctggaacagctcacttattgccccagatgtatgtggagtaaccgccttcagtttcctggttctgagtttccgtgttactc

SEQ ID NO: 45608 - DNA, 80 bp, synthetic construct; identical to SEQ ID NO: 12206
  source 1..80: mol_type = other DNA

SEQ ID NO: 45609 - DNA, 80 bp, synthetic construct
  source 1..80: mol_type = other DNA
ggaatgcaatggcgtgatctcggctcactgctacctccacgccccaagtttaaacaattctcctgcctcagcctcccgag

SEQ ID NO: 45610 - DNA, 80 bp, synthetic construct
  source 1..80: mol_type = other DNA
ctgcacctggttgaatttctccttttaattggaggtttcattttatttttctttatttatttttttgagacgaagttgca

SEQ ID NO: 45611 - DNA, 80 bp, synthetic construct
  source 1..80: mol_type = other DNA
ggttttgccatgttggccagggtggtctcaaactcctgagctcgtgatctgcccacctcagcctcccaaagtgctgggat

SEQ ID NO: 45612 - DNA, 80 bp, synthetic construct; identical to SEQ ID NO: 12207
  source 1..80: mol_type = other DNA

SEQ ID NO: 45613 - DNA, 80 bp, synthetic construct
  source 1..80: mol_type = other DNA
gggtgggggaggagcgccctctgggctgccggagtgccccactaggcgcggcaaagtcccgggagtgccattgagaggtg

SEQ ID NO: 45614 - DNA, 80 bp, synthetic construct
  source 1..80: mol_type = other DNA
agcactctgtgtctagctaaaagtttgtaaatgcaccaatcaccactctgtgtctagctaatctggtggggatttagaga

SEQ ID NO: 45615 - DNA, 80 bp, synthetic construct
  source 1..80: mol_type = other DNA
tgtaaaatagaacaatcagcaggatgtgggtggggccggatgggggaataaaagcaggccacccaagccagcggcggcaa

SEQ ID NO: 45616 - DNA, 80 bp, synthetic construct; identical to SEQ ID NO: 12208
  source 1..80: mol_type = other DNA

SEQ ID NO: 45617 - DNA, 80 bp, synthetic construct
  source 1..80: mol_type = other DNA
aaggaagaaactctggacacatctgaacatctgaaggaacaaactctggacacaccatctttaagaactgtaacactcac

SEQ ID NO: 45618 - DNA, 80 bp, synthetic construct
  source 1..80: mol_type = other DNA
atgccccactaatttttgtatttattgtagagacggtttcagcatgttgcccaggctggtctccaactcctggactcaag

SEQ ID NO: 45619 - DNA, 80 bp, synthetic construct
  source 1..80: mol_type = other DNA
gtagagggtgtggggaaccactcaaattcagaatatcaaaacagaactttattttttgtgtatttgttgccaatcttttt

SEQ ID NO: 45620 - DNA, 80 bp, synthetic construct
  source 1..80: mol_type = other DNA
caggctggagtgcagtggcagatctcagctcactacaacctctgcctgctgggttcaagtgattctccagcctcagcctc

SEQ ID NO: 45621 - DNA, 80 bp, synthetic construct; identical to SEQ ID NO: 12209
  source 1..80: mol_type = other DNA

SEQ ID NO: 45622 - DNA, 80 bp, synthetic construct
  source 1..80: mol_type = other DNA
ctttacatttctctggagggacttttcattttctctggaaaccaactccaagtgcacttttccagaaggcatttttgtaa

SEQ ID NO: 45623 - DNA, 80 bp, synthetic construct
  source 1..80: mol_type = other DNA
tggcagtggggccagtgggctgggaagagttgcaggagaaacccagtgggagagaaagactccaacctgggaacctcggg

SEQ ID NO: 45624 - DNA, 80 bp, synthetic construct
  source 1..80: mol_type = other DNA
gtatttctggtctttaaagacacttggaaaagacagacttgttgaatacttagaaaggccaagccacagccagaagcttg

SEQ ID NO: 45625 - DNA, 80 bp, synthetic construct
  source 1..80: mol_type = other DNA
gtgcagcccatggagggcgagccaaagcagggcagggcatcgcctcacctgggaagtgcaaggggtcaggggatttccct

SEQ ID NO: 45626 - DNA, 80 bp, synthetic construct; identical to SEQ ID NO: 12210
  source 1..80: mol_type = other DNA

SEQ ID NO: 45627 - DNA, 80 bp, synthetic construct
  source 1..80: mol_type = other DNA
cccctgtctgacagttctgaagagagcagtggttctcccagcatggcatttgagctccgaaaatggacagactgcctcct

SEQ ID NO: 45628 - DNA, 80 bp, synthetic construct
  source 1..80: mol_type = other DNA
ggcaaacagggtctggagtggacctccagcaaattccaacagacctgcagctgagggtcctgactgttagaaggaaaact

SEQ ID NO: 45629 - DNA, 80 bp, synthetic construct
  source 1..80: mol_type = other DNA
ttctcctccaaaggatcacagctcctcaccagcaagggaacaaaactggatggagaatgagtttgacaagttgacagaag

SEQ ID NO: 45630 - DNA, 80 bp, synthetic construct
  source 1..80: mol_type = other DNA
ggcacgagaactacatgactcatgcacaagcttcagtagctgattcaatcaagtggaagaaagggtatcagtgattgaag

SEQ ID NO: 45631 - DNA, 80 bp, synthetic construct; identical to SEQ ID NO: 12211
  source 1..80: mol_type = other DNA

SEQ ID NO: 45632 - DNA, 80 bp, synthetic construct
  source 1..80: mol_type = other DNA
aaccttacaagccagaagagagtgggggccaatattcaacatttttaagaaaagaattttcaaaccagaatttcatatcc

SEQ ID NO: 45633 - DNA, 80 bp, synthetic construct
  source 1..80: mol_type = other DNA
catgccaaagtgtaaagaccattgacactatgaagaaactgcatcaattaatgggcaaaataaccagctaacatcatagt

SEQ ID NO: 45634 - DNA, 80 bp, synthetic construct; identical to SEQ ID NO: 12212
  source 1..80: mol_type = other DNA

SEQ ID NO: 45635 - DNA, 80 bp, synthetic construct
  source 1..80: mol_type = other DNA
cctacaaagagatttagactcccacacagtaataatgggagactttaataccccactgtcaatattagacagatcaatga

SEQ ID NO: 45636 - DNA, 80 bp, synthetic construct; identical to SEQ ID NO: 12213
  source 1..80: mol_type = other DNA

SEQ ID NO: 45637 - DNA, 80 bp, synthetic construct
  source 1..80: mol_type = other DNA
aacaaagacacaacataccagaatctctgggacacatttaaagcagtgtgtagagggaaatttagagcactaaatgccca

SEQ ID NO: 45638 - DNA, 80 bp, synthetic construct
  source 1..80: mol_type = other DNA
agaactgatggagatagagacacaaaaaacccttccaaaaaatcagtgaatctaggagctggttttttgaaaagatcaac

SEQ ID NO: 45639 - DNA, 80 bp, synthetic construct
  source 1..80: mol_type = other DNA
tctagaagaaatgaataaattcctggacacatacaccctcccaagactaaaccaggaagaagttgaatccctgaatagac

SEQ ID NO: 45640 - DNA, 80 bp, synthetic construct; identical to SEQ ID NO: 12214
  source 1..80: mol_type = other DNA

SEQ ID NO: 45641 - DNA, 80 bp, synthetic construct
  source 1..80: mol_type = other DNA
ataaacagaaccaacgacaaaaaccacatgattatctcaatagatgtagaaaaggccttcgacaaaaattcaacaaccct

SEQ ID NO: 45642 - DNA, 80 bp, synthetic construct
  source 1..80: mol_type = other DNA
tcctagtcaacatagtggtggaagttctggccagggcaatcaagcaagagaaagaaataaagggtattcaattaggaaaa

SEQ ID NO: 45643 - DNA, 80 bp, synthetic construct
  source 1..80: mol_type = other DNA
acagacaaacagagagccaaatcatgaatggactcccattcacaattactacaaagaaaataaaatacctaggaatccaa

SEQ ID NO: 45644 - DNA, 80 bp, synthetic construct
  source 1..80: mol_type = other DNA
gccatccccatcaagctaccaatgactttcttcacagaattggaaaaaactactttaaagttcatatggaacaaaaaaag

SEQ ID NO: 45645 - DNA, 80 bp, synthetic construct; identical to SEQ ID NO: 12215
  source 1..80: mol_type = other DNA

SEQ ID NO: 45646 - DNA, 80 bp, synthetic construct
  source 1..80: mol_type = other DNA
acataggcatggataaatgcttcatgactaaaacaccaaaagcaatggcaacaaaagccaaaatagacaaatgggatcta

SEQ ID NO: 45647 - DNA, 80 bp, synthetic construct
  source 1..80: mol_type = other DNA
accccatcaacaagtgggcgaaggatatgaacagacacttctcaaaagaagacatttatgcagccaaaagacatatgaaa

SEQ ID NO: 45648 - DNA, 80 bp, synthetic construct
  source 1..80: mol_type = other DNA
gtaaatcagttcaaccattgtggaagacaatgcagcgattcctcaaggatctagaactagaaataccatttgacccagcc

SEQ ID NO: 45649 - DNA, 80 bp, synthetic construct; identical to SEQ ID NO: 12216
  source 1..80: mol_type = other DNA

SEQ ID NO: 45650 - DNA, 80 bp, synthetic construct
  source 1..80: mol_type = other DNA
ctaatgtaaatcaccagttgatgggtgcagcaaaccaccatggcacaggtatacctatgtaacaaacatgcatgttgtgc

SEQ ID NO: 45651 - DNA, 80 bp, synthetic construct; identical to SEQ ID NO: 12217
  source 1..80: mol_type = other DNA

SEQ ID NO: 45652 - DNA, 80 bp, synthetic construct
  source 1..80: mol_type = other DNA
cggaggttgcagtgagccgagatcgcaccactgcactccagcctaggcgacagagtgagactgtgtctcaaaaaagaaaa

SEQ ID NO: 45653 - DNA, 80 bp, synthetic construct
  source 1..80: mol_type = other DNA
gttgagttcatgttgatacttggtcttaaggacagttagagctgataaaaataacttgtgcatagaccaggcgcggtggc

SEQ ID NO: 45654 - DNA, 80 bp, synthetic construct
  source 1..80: mol_type = other DNA
ggaaggctgaggcaggagaatggtgtgaaccttgcagtgagccgagatcacgccactgcactacagcctgggcaacagag

SEQ ID NO: 45655 - DNA, 80 bp, synthetic construct; identical to SEQ ID NO: 12218
  source 1..80: mol_type = other DNA

SEQ ID NO: 45656 - DNA, 80 bp, synthetic construct
  source 1..80: mol_type = other DNA
gaaaattaaataaacccatgacatttgtagccagcagctcgggtgttttgtagggttttccctgagaagtggggactaat

SEQ ID NO: 45657 - DNA, 80 bp, synthetic construct
  source 1..80: mol_type = other DNA
gtggctcacgcctgtaatcccagcactttgggaggccgaggcggacggatcacgaggtcaggagatcgagaccatcctgg

SEQ ID NO: 45658 - DNA, 80 bp, synthetic construct
  source 1..80: mol_type = other DNA
agcctgggcgacagagcaagactccgtctcaaaaaaaaaaaaaaaaaaaaaaaaaaaaaaaaaaaaagccaggcatggtt

SEQ ID NO: 45659 - DNA, 80 bp, synthetic construct; identical to SEQ ID NO: 12219
  source 1..80: mol_type = other DNA

SEQ ID NO: 45660 - DNA, 80 bp, synthetic construct
  source 1..80: mol_type = other DNA
tttctcttgcccttgttttcttcctggccacagtcatgccctggatttcagtgtctctaaacatctagcagcctctcacc

SEQ ID NO: 45661 - DNA, 80 bp, synthetic construct
  source 1..80: mol_type = other DNA
ggttggatcacctgaggtcaggagtttgagaccagcctggccaacatggtgaaacaacgtctctactaaaaatacaaaaa

SEQ ID NO: 45662 - DNA, 80 bp, synthetic construct
  source 1..80: mol_type = other DNA
aaaaaaaagaagaagaacttcttgacttgactcagcaggactttttccatgggtctaaagctaggtgtgaagagagtgag

SEQ ID NO: 45663 - DNA, 80 bp, synthetic construct; identical to SEQ ID NO: 12220
  source 1..80: mol_type = other DNA

SEQ ID NO: 45664 - DNA, 80 bp, synthetic construct
  source 1..80: mol_type = other DNA
aatgatgaaaggccaccaggttagggaggatgagaggggcctgaatgcaggcttagataaacaattacccgccattgttt

SEQ ID NO: 45665 - DNA, 80 bp, synthetic construct
  source 1..80: mol_type = other DNA
tctctatctcctgggctcaagtgaaccttccacctcagccttccaagtagctgggactgcaggtgcatgccaccatgcct

SEQ ID NO: 45666 - DNA, 80 bp, synthetic construct
  source 1..80: mol_type = other DNA
gttacaggcacgagccaccttgcccagctcaggcttttccattttggaaaaccagatgactccacccagatccaagaccg

SEQ ID NO: 45667 - DNA, 80 bp, synthetic construct; identical to SEQ ID NO: 12221
  source 1..80: mol_type = other DNA

SEQ ID NO: 45668 - DNA, 80 bp, synthetic construct
  source 1..80: mol_type = other DNA
tcttgaaaaagccttcaaatttgagaggaggctgatataagtaataataagacttcagtctcctgtttaactggctctat

SEQ ID NO: 45669 - DNA, 80 bp, synthetic construct
  source 1..80: mol_type = other DNA
ttgggtggttacaacagtatcagcatatacagtagaattgtaatatccatcatataccaactgcaaattaattttaaaag

SEQ ID NO: 45670 - DNA, 80 bp, synthetic construct
  source 1..80: mol_type = other DNA
tggagtgcagtggcgcgatctcagcccaccgaaacctctgcctcctgggttcaagcgattctcctgcctcagcctcctga

SEQ ID NO: 45671 - DNA, 80 bp, synthetic construct; identical to SEQ ID NO: 12222
  source 1..80: mol_type = other DNA

SEQ ID NO: 45672 - DNA, 80 bp, synthetic construct
  source 1..80: mol_type = other DNA
atcaaggcactggcagttaaggtgcttggtgaaggtcctttttctgttcccagttcacagatgtcccaccttcattttct

SEQ ID NO: 45673 - DNA, 80 bp, synthetic construct
  source 1..80: mol_type = other DNA
ctctgtcacccaggtggctggagtgcaatggtgtaagcttggctcactgcagcctcaacctcctgggctcaactgatctt

SEQ ID NO: 45674 - DNA, 80 bp, synthetic construct
  source 1..80: mol_type = other DNA
gattacagacgtgagccaccacacccggcccatcccaccgccttgctgtggcagggagagcaatagcctctcttcatctc

SEQ ID NO: 45675 - DNA, 80 bp, synthetic construct; identical to SEQ ID NO: 12223
  source 1..80: mol_type = other DNA

SEQ ID NO: 45676 - DNA, 80 bp, synthetic construct
  source 1..80: mol_type = other DNA
gctaggactataggcatacaccaccacacccagctaattttttttttttttttgagatggagtctcgctctgtcacccag

SEQ ID NO: 45677 - DNA, 80 bp, synthetic construct
  source 1..80: mol_type = other DNA
ggccaggctggtctcgaactcctgacctcgtgatccacctgcctcagcctcccaaagtgctgggattacaggtgtgagcc

SEQ ID NO: 45678 - DNA, 80 bp, synthetic construct
  source 1..80: mol_type = other DNA
tttgaggcattatgtctactagtgaataatgggggggggggccgtggggggagtaccagaatagttaaagtaggctgtgt

SEQ ID NO: 45679 - DNA, 80 bp, synthetic construct; identical to SEQ ID NO: 12224
  source 1..80: mol_type = other DNA

SEQ ID NO: 45680 - DNA, 80 bp, synthetic construct
  source 1..80: mol_type = other DNA
accatgcccggctaatttttgtgtgtgtgtgtttttttcagtagagacggagtttcactatgttggccaggctggtcttg

SEQ ID NO: 45681 - DNA, 80 bp, synthetic construct
  source 1..80: mol_type = other DNA
cttgcagagagagaaagagagagtgtgacttattttaaggaattagttcacaaaattgtggaggcttggtgagtccaaag

SEQ ID NO: 45682 - DNA, 80 bp, synthetic construct
  source 1..80: mol_type = other DNA
gttgcagttcaagtccaaaggtggtgtgctggaaacttctgaccagaacaaaagagagaggacagccttttgttctaacc

SEQ ID NO: 45683 - DNA, 80 bp, synthetic construct
  source 1..80: mol_type = other DNA
acatcgtaatgagatctgctgctatctatgaatttatgtttctagtgtatttgtaaggtacatggatcattcctttattt

SEQ ID NO: 45684 - DNA, 80 bp, synthetic construct; identical to SEQ ID NO: 12225
  source 1..80: mol_type = other DNA

SEQ ID NO: 45685 - DNA, 80 bp, synthetic construct
  source 1..80: mol_type = other DNA
ctgcagattttggatttgccaacccctatgatagcatgaaacagttctttcatctgattggttctaactctctggaacac

SEQ ID NO: 45686 - DNA, 80 bp, synthetic construct
  source 1..80: mol_type = other DNA
taggttgaaaggaggggaatcaggcacatattcccctctgaggaatatgtcagcagagactggatgtggcaagactacag

SEQ ID NO: 45687 - DNA, 80 bp, synthetic construct
  source 1..80: mol_type = other DNA
gccctaaaagattttgtttcccaatttttttttttttttgacaagatcttgctctgttgcccaggctagagtgcagtggc

SEQ ID NO: 45688 - DNA, 80 bp, synthetic construct
  source 1..80: mol_type = other DNA
tggcataatcttggctcactgcaacctccacttcccaagttcaagctattctcctgcctcagcctccctagtagctggga

SEQ ID NO: 45689 - DNA, 80 bp, synthetic construct; identical to SEQ ID NO: 12226
  source 1..80: mol_type = other DNA

SEQ ID NO: 45690 - DNA, 80 bp, synthetic construct
  source 1..80: mol_type = other DNA
ctctcccagcactaaagaccattcctcactaaaacgaatcaatgttccttagaaagatggctgattttggccaggtgcag

SEQ ID NO: 45691 - DNA, 80 bp, synthetic construct
  source 1..80: mol_type = other DNA
ttgggaggctgaggcaggagaatggcatgaacctggggacagagcttgcagtgcgctgagatcacgccactgcattccag

SEQ ID NO: 45692 - DNA, 80 bp, synthetic construct
  source 1..80: mol_type = other DNA
gcctggccaacataatgaaaccccatctctactaaaagtacaaaaattagccaggcgtagtggcaatgcctataatccca

SEQ ID NO: 45693 - DNA, 80 bp, synthetic construct; identical to SEQ ID NO: 12227
  source 1..80: mol_type = other DNA

SEQ ID NO: 45694 - DNA, 80 bp, synthetic construct
  source 1..80: mol_type = other DNA
aaatacaaaaattagctggccatggtggcatgcacctgtagtcccagctactcaggaggctgaggcaggagaattgcttg

SEQ ID NO: 45695 - DNA, 80 bp, synthetic construct
  source 1..80: mol_type = other DNA
gtacagttcgagcacaaaaaaataatgactgtaaccaattgtgaaatattaaatggatacctggcatggtgtagtcccag

SEQ ID NO: 45696 - DNA, 80 bp, synthetic construct
  source 1..80: mol_type = other DNA
aggaggctgaggtaggaggatcacttgagcctggcaggttgaggctgcagtgagtggtaattgcgccactgcactccagc

SEQ ID NO: 45697 - DNA, 80 bp, synthetic construct
  source 1..80: mol_type = other DNA
cataccaataccttattctgaaaactggtaaagggaaataagcatttaccttgccttttagaaggaccctactttggccg

SEQ ID NO: 45698 - DNA, 80 bp, synthetic construct; identical to SEQ ID NO: 12228
  source 1..80: mol_type = other DNA

SEQ ID NO: 45699 - DNA, 80 bp, synthetic construct
  source 1..80: mol_type = other DNA
gatgtgaggcaatgtgacatatatagcaagtttgaggaattagtcccaagactgggtaacctgaatctaaccaagaaatt

SEQ ID NO: 45700 - DNA, 80 bp, synthetic construct
  source 1..80: mol_type = other DNA
taaaaagaaaggggtgagaaaaggacataaaaaaatgcaatgttgaaacttgattggttcctgttctgggagttttttaa

SEQ ID NO: 45701 - DNA, 80 bp, synthetic construct; identical to SEQ ID NO: 12229
  source 1..80: mol_type = other DNA

SEQ ID NO: 45702 - DNA, 80 bp, synthetic construct
  source 1..80: mol_type = other DNA
taggcatgtaccaccatgcccggctaattttttgtatttttagtagagacggggtttcaccatgttggccaggctggtct

SEQ ID NO: 45703 - DNA, 80 bp, synthetic construct
  source 1..80: mol_type = other DNA
cctgaggtcaggagtttgaggccaccttggccaacgtggtgtaatctcgtctccactaaaaatacaaaaattagccaggc

SEQ ID NO: 45704 - DNA, 80 bp, synthetic construct
  source 1..80: mol_type = other DNA
atggttgagaaaagacaacacttgtatactgttggtaggaatgtaaattagtacagctattatggaaaactgtatggcgg

SEQ ID NO: 45705 - DNA, 80 bp, synthetic construct
  source 1..80: mol_type = other DNA
cagcctggccaatatggtgaaaccccatttctactaaaaatacaaaaattagttgggcgtggtggtgggcgcctgtaatc

SEQ ID NO: 45706 - DNA, 80 bp, synthetic construct; identical to SEQ ID NO: 12230
  source 1..80: mol_type = other DNA

SEQ ID NO: 45707 - DNA, 80 bp, synthetic construct
  source 1..80: mol_type = other DNA
ggctaacacggtgaaaccccatctctactaaaagtacaaaagaattagctgggcgtggtggcaggcgcctgtagtcccag

SEQ ID NO: 45708 - DNA, 80 bp, synthetic construct
  source 1..80: mol_type = other DNA
accgtggaatgctattcagcctttaaaaagaaattttgtcatttgagacagcgttaatggaattggagaacattatgctg

SEQ ID NO: 45709 - DNA, 80 bp, synthetic construct
  source 1..80: mol_type = other DNA
tggggtaaatggggatatgatggttaaaggttacaaagcttcattggactggaaaaataagcttttctttttctttgaga

SEQ ID NO: 45710 - DNA, 80 bp, synthetic construct; identical to SEQ ID NO: 12231
  source 1..80: mol_type = other DNA

SEQ ID NO: 45711 - DNA, 80 bp, synthetic construct
  source 1..80: mol_type = other DNA
aagaatcacttgaacccgggaggcggaagttgcagtgagccgagattgcaccactgcactccagcctgggcaacaagagt

SEQ ID NO: 45712 - DNA, 80 bp, synthetic construct
  source 1..80: mol_type = other DNA
aggtaatgacaacaaaaaaaatggataagtagacagaaaaatcgattaatacagaagctggcaaaaactagtaaagcaaa

SEQ ID NO: 45713 - DNA, 80 bp, synthetic construct
  source 1..80: mol_type = other DNA
acacagtaacagaaaacattcctggctgcagctcattaatatttcttctttgttctcctgaggaatcaaaagattctcat

SEQ ID NO: 45714 - DNA, 80 bp, synthetic construct; identical to SEQ ID NO: 12232
  source 1..80: mol_type = other DNA

SEQ ID NO: 45715 - DNA, 80 bp, synthetic construct
  source 1..80: mol_type = other DNA
ttttactgcatattgcagttactcgtatattactgacactggaacagacatgttttaacaaactggttgagccgtatcag

SEQ ID NO: 45716 - DNA, 80 bp, synthetic construct
  source 1..80: mol_type = other DNA
tcatcactaagccccaccttccagcattttcacctttctccttcacttgatccttcttcctaacatcgtgttaacacact

SEQ ID NO: 45717 - DNA, 80 bp, synthetic construct
  source 1..80: mol_type = other DNA
ctccaaattattccttaaccctctgacatctggggcttctgattccacctctccaaagaaatgctcccaccaagaccatg

SEQ ID NO: 45718 - DNA, 80 bp, synthetic construct
  source 1..80: mol_type = other DNA
tttatatgtttcctgctttcttcctcagccttctctgctccccacacctatatgttgatgatgcccaaatctctgtctcc

SEQ ID NO: 45719 - DNA, 80 bp, synthetic construct; identical to SEQ ID NO: 12233
  source 1..80: mol_type = other DNA

SEQ ID NO: 45720 - DNA, 80 bp, synthetic construct
  source 1..80: mol_type = other DNA
caaaccagtctccacactgcaaccatagtgatctaaggcacaattctcaccttttcagtcttaggcttaaagttcaacat

SEQ ID NO: 45721 - DNA, 80 bp, synthetic construct
  source 1..80: mol_type = other DNA
agttacagtcttccaaagttgtcatgtttcttgacctttgctgtctcctctgcccagaatgcaatttccctgtctggcta

SEQ ID NO: 45722 - DNA, 80 bp, synthetic construct
  source 1..80: mol_type = other DNA
actactgattttttgtgtttgttttgttttggcagtctgacataactttatactaatgcagcttctagccctgtccccca

SEQ ID NO: 45723 - DNA, 80 bp, synthetic construct
  source 1..80: mol_type = other DNA
tcacttaccacttggaagtgactggcaggtagtaattgctcaacaaatgttctatgagtgaatgaatccttgggataatt

SEQ ID NO: 45724 - DNA, 80 bp, synthetic construct; identical to SEQ ID NO: 12234
  source 1..80: mol_type = other DNA

SEQ ID NO: 45725 - DNA, 80 bp, synthetic construct
  source 1..80: mol_type = other DNA
cccatctggaaaaagggaaacttggaagttgacatctaaatgaaattccagcatggatgagagaagccctgatttctctc

SEQ ID NO: 45726 - DNA, 80 bp, synthetic construct
  source 1..80: mol_type = other DNA
agcctcaggcactggtgttggggccctattcatcctcatctgcacgtccctcagttcttttcctgttgctattatcctat

SEQ ID NO: 45727 - DNA, 80 bp, synthetic construct
  source 1..80: mol_type = other DNA
ctgaggtggaaaaagataaagacaagcaaagataaacagcacaggaagcagaggtacaaatagaattctgatttttctcc

SEQ ID NO: 45728 - DNA, 80 bp, synthetic construct; identical to SEQ ID NO: 12235
  source 1..80: mol_type = other DNA

SEQ ID NO: 45729 - DNA, 80 bp, synthetic construct
  source 1..80: mol_type = other DNA
attagagaaactgcccagtgactcagatcctgaaaggatctgctttagagaaaaaaggagtctggtacttctcactccat

SEQ ID NO: 45730 - DNA, 80 bp, synthetic construct
  source 1..80: mol_type = other DNA
tcccatttctaaaagaattcaatctaggagtctagctgctggcttaacaaagggatatacagcaaagcctaaggtgccct

SEQ ID NO: 45731 - DNA, 80 bp, synthetic construct
  source 1..80: mol_type = other DNA
ctatgtacctcaaatactcgtagctgccaagcttttaaacaatgaaacttaacactgtacttaaagggctgttctgctca

SEQ ID NO: 45732 - DNA, 80 bp, synthetic construct
  source 1..80: mol_type = other DNA
tgccttaactaaaaatttgtatcaacatgaagtcctagaattatactgcatgagcccccaggatttggagaacatcattc

SEQ ID NO: 45733 - DNA, 80 bp, synthetic construct; identical to SEQ ID NO: 12236
  source 1..80: mol_type = other DNA

SEQ ID NO: 45734 - DNA, 80 bp, synthetic construct
  source 1..80: mol_type = other DNA
ttcagagactgagaacctactaaactcctaagagaactttcccttgcaaagagaatgcatgaaaaaagaagggagaagag

SEQ ID NO: 45735 - DNA, 80 bp, synthetic construct
  source 1..80: mol_type = other DNA
gcgctgggcgaggaactcagcactcatcctcacccagcagggcataagggtttcggccagccaggctggaccctggagcc

SEQ ID NO: 45736 - DNA, 80 bp, synthetic construct
  source 1..80: mol_type = other DNA
gatgggactcccaggtgcctggggaaccaaaacaagaaaaaaatggaggagagttttgagcaagaactaaagccaaggaa

SEQ ID NO: 45737 - DNA, 80 bp, synthetic construct; identical to SEQ ID NO: 12237
  source 1..80: mol_type = other DNA

SEQ ID NO: 45738 - DNA, 80 bp, synthetic construct
  source 1..80: mol_type = other DNA
gctctgtacacatcattccgagccgccttggctgtcttgtaaccacgtttctctgcccaggctggaggaagaaaagaata

SEQ ID NO: 45739 - DNA, 80 bp, synthetic construct
  source 1..80: mol_type = other DNA
gaggagaggaaaggagacagggaagggtaaaaggcgaggcaggtaaggaagagcagctgaaaccaggtggggcgaagcca

SEQ ID NO: 45740 - DNA, 80 bp, synthetic construct
  source 1..80: mol_type = other DNA
ggtagatccctgccagaacctgagggaaatgagcactcagtactttcctcaatgtcccaccttctctctttcccttaccc

SEQ ID NO: 45741 - DNA, 80 bp, synthetic construct; identical to SEQ ID NO: 12238
  source 1..80: mol_type = other DNA

SEQ ID NO: 45742 - DNA, 80 bp, synthetic construct
  source 1..80: mol_type = other DNA
gcctctgtttcttcattttacagtgtggacacctccctacctcagggtggtcaggattaaatgagataaccaatacaact

SEQ ID NO: 45743 - DNA, 80 bp, synthetic construct
  source 1..80: mol_type = other DNA
gaccagcctggccaacatggtgaaaccccatctctactaaaaatacaaaaattagctgggcgtggtggtgggcgcctgta

SEQ ID NO: 45744 - DNA, 80 bp, synthetic construct
  source 1..80: mol_type = other DNA
caaaaaataataataataattacgatgacttgtccaaggagaaaactggaagccttggggctcactgccactctgctcac

SEQ ID NO: 45745 - DNA, 80 bp, synthetic construct; identical to SEQ ID NO: 12239
  source 1..80: mol_type = other DNA

SEQ ID NO: 45746 - DNA, 80 bp, synthetic construct
  source 1..80: mol_type = other DNA
tccagctctgcccattcagcactgctcctgggcagctgactgtggctaagaaaagatgtaccactgtgctcactctttac

SEQ ID NO: 45747 - DNA, 80 bp, synthetic construct
  source 1..80: mol_type = other DNA
ctgtaaactacaacatacaaaaaaatgcacagaacatacatgtgcagcctgatgaaccccataccacccaatgtgtgaca

SEQ ID NO: 45748 - DNA, 80 bp, synthetic construct
  source 1..80: mol_type = other DNA
caagcgattctcgtgcctcaacctcctgagtagctgagaccacaggcgtgcggctccacacctggctaactttttgtatt

SEQ ID NO: 45749 - DNA, 80 bp, synthetic construct
  source 1..80: mol_type = other DNA
ccgccactcatccttcttgatcataatcctctccctctatacatgcaagctttatccttttaaggaaatcaactccttac

SEQ ID NO: 45750 - DNA, 80 bp, synthetic construct; identical to SEQ ID NO: 12240
  source 1..80: mol_type = other DNA

SEQ ID NO: 45751 - DNA, 80 bp, synthetic construct
  source 1..80: mol_type = other DNA
ctaaatgctggcttgtcctaaggctcagtccttgacctcctcttctccaactatttcctttctctcctacatctcatcca

SEQ ID NO: 45752 - DNA, 80 bp, synthetic construct
  source 1..80: mol_type = other DNA
accacacacggctaattttctgtattttttggtagagacagggtttcaccatgttggccaggctggtctcaaactcctgg

SEQ ID NO: 45753 - DNA, 80 bp, synthetic construct
  source 1..80: mol_type = other DNA
ttaaatctttcccaaattcaaatttccgtcctcttctctcccctaagctgctgactacttacccactgcctattcaacat

SEQ ID NO: 45754 - DNA, 80 bp, synthetic construct; identical to SEQ ID NO: 12241
  source 1..80: mol_type = other DNA

SEQ ID NO: 45755 - DNA, 80 bp, synthetic construct
  source 1..80: mol_type = other DNA
aggtaaacttataagaaacaaaatcagatcctatcattcccctgttcaaaacctacccttggcttctcatgagacttgga

SEQ ID NO: 45756 - DNA, 80 bp, synthetic construct
  source 1..80: mol_type = other DNA
accctttccccacagttctgaatggctcacttcatctcatcatccagttctctcctcagggaggttttccctgagcacct

SEQ ID NO: 45757 - DNA, 80 bp, synthetic construct
  source 1..80: mol_type = other DNA
tctggcacctggttaagtgttcagtacatatttgttgaatgggtaaatgaatgagagctggagggaaatccaaactcagg

SEQ ID NO: 45758 - DNA, 80 bp, synthetic construct; identical to SEQ ID NO: 12242
  source 1..80: mol_type = other DNA

SEQ ID NO: 45759 - DNA, 80 bp, synthetic construct
  source 1..80: mol_type = other DNA
gtgagctgagacaaagcccttaagaggagattctccttggcaacaaacttaaagggttaaaacctagaagaatactaatt

SEQ ID NO: 45760 - DNA, 80 bp, synthetic construct
  source 1..80: mol_type = other DNA
atttgtcaggcattcttacactctcttaacactattcccatcattcctcacatccattctttttttttaaagacagggtc

SEQ ID NO: 45761 - DNA, 80 bp, synthetic construct
  source 1..80: mol_type = other DNA
ccacacttggctagttttctttatcttttgtaaagatggggtttcactatgttgcccagactagtcttgagctcctggtc

SEQ ID NO: 45762 - DNA, 80 bp, synthetic construct; identical to SEQ ID NO: 12243
  source 1..80: mol_type = other DNA

SEQ ID NO: 45763 - DNA, 80 bp, synthetic construct
  source 1..80: mol_type = other DNA
ttgtagcgctcttgggttgggccagttggctccattgctgaatcagtctgctgctccaccaggactgctgggccatcctc

SEQ ID NO: 45764 - DNA, 80 bp, synthetic construct
  source 1..80: mol_type = other DNA
acagattatgtaactggcaccctctggagttgtacagtgccaacctaaataagagcaggtcagagaatctcccaaaagtc

SEQ ID NO: 45765 - DNA, 80 bp, synthetic construct
  source 1..80: mol_type = other DNA
gcacatatccaccatagaggggttggcttcaggaaaggtgagcaaaatgattctgcatctttggtctcccccatgtcctc

SEQ ID NO: 45766 - DNA, 80 bp, synthetic construct; identical to SEQ ID NO: 12244
  source 1..80: mol_type = other DNA

SEQ ID NO: 45767 - DNA, 80 bp, synthetic construct
  source 1..80: mol_type = other DNA
aagagctggcggggccagatccaccttgttcaaaaccagcaccagggccagtccaagttctccagtcacatactcataaa

SEQ ID NO: 45768 - DNA, 80 bp, synthetic construct
  source 1..80: mol_type = other DNA
caaactgaaaaacaaagacaaaacaggggttagtaatacttctgagtctcagagggcttcctataggtcatgattagaga

SEQ ID NO: 45769 - DNA, 80 bp, synthetic construct
  source 1..80: mol_type = other DNA
caagtacgtgcacatgtgtgcatgtttgtgtgttaatgtgactgtgaacatgtgtgcaaacatgcctgtgtatattgatg

SEQ ID NO: 45770 - DNA, 80 bp, synthetic construct; identical to SEQ ID NO: 12245
  source 1..80: mol_type = other DNA

SEQ ID NO: 45771 - DNA, 80 bp, synthetic construct
  source 1..80: mol_type = other DNA
aataaaaaactgagttcctaactgcggacatcagcactaggtagagattagaaagacaggaagatagatacctctctgtc

SEQ ID NO: 45772 - DNA, 80 bp, synthetic construct
  source 1..80: mol_type = other DNA
caggatcaggaagagaaactgaaaacagagtccctctccagcctgatcccaaaccaatttgaccataggtcactatgccc

SEQ ID NO: 45773 - DNA, 80 bp, synthetic construct
  source 1..80: mol_type = other DNA
acgtcgaggaaagtccagaactgggaattcaggaaaaagtccaagtgtgaggaaatcttcaggattcaagagtacatccc

SEQ ID NO: 45774 - DNA, 80 bp, synthetic construct; identical to SEQ ID NO: 12246
  source 1..80: mol_type = other DNA

SEQ ID NO: 45775 - DNA, 80 bp, synthetic construct
  source 1..80: mol_type = other DNA
aactctctccagcccctctggaaaggaagactgtggcccgctgtggggagccgagtggctagcggagaactgtggcatcc

SEQ ID NO: 45776 - DNA, 80 bp, synthetic construct
  source 1..80: mol_type = other DNA
tatgatgggtcacagactccccgtccgaggtgtcggtctgttcctctcgccgctcccggctcccgctgcggctgttggaa

SEQ ID NO: 45777 - DNA, 80 bp, synthetic construct
  source 1..80: mol_type = other DNA
accctcccggatgtgcgtggggggagtcactccttcagggagcagtggggacggcgccccgtgctagctggagggattcc

SEQ ID NO: 45778 - DNA, 80 bp, synthetic construct; identical to SEQ ID NO: 12247
  source 1..80: mol_type = other DNA

SEQ ID NO: 45779 - DNA, 80 bp, synthetic construct
  source 1..80: mol_type = other DNA
gggcccgacagaattaccgccgcggcggcgatggaaggcggacgggggagatatagtcacttccctccaggagcgaggcg

SEQ ID NO: 45780 - DNA, 80 bp, synthetic construct
  source 1..80: mol_type = other DNA
cttgcgctcccgggagaacctaccactcacctggagggggcggcggagcggagggcggggcctactacctaggggagagg

SEQ ID NO: 45781 - DNA, 80 bp, synthetic construct
  source 1..80: mol_type = other DNA
aaattccttgtgggaacgatgataaggagcaggtttacagatcataagtgcaaaagcgggcgagaagggaaacccaagcg

SEQ ID NO: 45782 - DNA, 80 bp, synthetic construct; identical to SEQ ID NO: 12248
  source 1..80: mol_type = other DNA

SEQ ID NO: 45783 - DNA, 80 bp, synthetic construct
  source 1..80: mol_type = other DNA
ccttcctcactaccctccaaatcccgctgcagccattgccgcagacacgatgccgaaacgaaagaagcagaatcatcacc

SEQ ID NO: 45784 - DNA, 80 bp, synthetic construct
  source 1..80: mol_type = other DNA
ctgtaacggaaggaggaagggcgcacgcgctggggagggatggaagtggggctctcccaaatggagccttgaaccaggag

SEQ ID NO: 45785 - DNA, 80 bp, synthetic construct
  source 1..80: mol_type = other DNA
gatgttgcagattgcgatgactgggatgacagtttgtatccagactttgactgaaaaggtacaggtgcagctttctctaa

SEQ ID NO: 45786 - DNA, 80 bp, synthetic construct; identical to SEQ ID NO: 12249
  source 1..80: mol_type = other DNA

SEQ ID NO: 45787 - DNA, 80 bp, synthetic construct
  source 1..80: mol_type = other DNA
aggaggaaggggccctgatccttgtattaggtcgtagagaagacagcaagggaggggataaaacccaggaaggacttaaa

SEQ ID NO: 45788 - DNA, 80 bp, synthetic construct
  source 1..80: mol_type = other DNA
cattattatagggaaatgcaaaatatcaaggcgactatcaagacaatcttgaagtgggagggcttactatgaatatcaag

SEQ ID NO: 45789 - DNA, 80 bp, synthetic construct
  source 1..80: mol_type = other DNA
tacaatagttacaacgatgcagtttggaaacaatgatagacataagtcaataggacttatgtcccgaagagtccaataac

SEQ ID NO: 45790 - DNA, 80 bp, synthetic construct; identical to SEQ ID NO: 12250
  source 1..80: mol_type = other DNA

SEQ ID NO: 45791 - DNA, 80 bp, synthetic construct
  source 1..80: mol_type = other DNA
gggaggccgaggcgggcgaatcacgaggtcagcagttcaagaccagcctgaccaacatggtgaaacccctgtctctacta

SEQ ID NO: 45792 - DNA, 80 bp, synthetic construct
  source 1..80: mol_type = other DNA
aaaaaaagaaaaaacaaaatacaaacttgccaaataataccattaagaaattaacaggaagccatacaatagaagatatt

SEQ ID NO: 45793 - DNA, 80 bp, synthetic construct
  source 1..80: mol_type = other DNA
gtcaagtaaatgcaagataaaaatataccactttgaaattagaactcttgtgtactgctgctgggattataaaatggtga

SEQ ID NO: 45794 - DNA, 80 bp, synthetic construct; identical to SEQ ID NO: 12251
  source 1..80: mol_type = other DNA

SEQ ID NO: 45795 - DNA, 80 bp, synthetic construct
  source 1..80: mol_type = other DNA
actttatgttaagtaaagacatagtgtattattccacttatctgaggtgtctaaagtcaaattcaggggctgggcatggt

SEQ ID NO: 45796 - DNA, 80 bp, synthetic construct
  source 1..80: mol_type = other DNA
ttagctgggcatggtggtgcacacctgtaatcccagctactcgggtagctgaggcatgagaattgcttgaacctgggagg

SEQ ID NO: 45797 - DNA, 80 bp, synthetic construct
  source 1..80: mol_type = other DNA
tttaatgggtacagagtttcagttttgcaagataaaaaacttttggaggtcgggcatggtggctcgtgcctgtaatccca

SEQ ID NO: 45798 - DNA, 80 bp, synthetic construct
  source 1..80: mol_type = other DNA
gcctgtaatcccagctacttgggaggctgaggcaggagaatcacttgaacccaggaggcagaggttgcagtgagccaaga

SEQ ID NO: 45799 - DNA, 80 bp, synthetic construct; identical to SEQ ID NO: 12252
  source 1..80: mol_type = other DNA

SEQ ID NO: 45800 - DNA, 80 bp, synthetic construct
  source 1..80: mol_type = other DNA
ggacaactgctggtgagagtgcaaattggtataaccactgtgaaaaaaaagtttggcattatgtatgaaacttgagcata

SEQ ID NO: 45801 - DNA, 80 bp, synthetic construct
  source 1..80: mol_type = other DNA
ataaattgttgtgtatgcatgcaatgggactacactgcaacgaaaatgaatgaactgctgctacaggcaacctggatgaa

SEQ ID NO: 45802 - DNA, 80 bp, synthetic construct
  source 1..80: mol_type = other DNA
aggggaggatcttttgaggtgctaataaggctttatctcttcacctggtggtggaaactcaagtgtgtctactttgtgag

SEQ ID NO: 45803 - DNA, 80 bp, synthetic construct; identical to SEQ ID NO: 12253
  source 1..80: mol_type = other DNA

SEQ ID NO: 45804 - DNA, 80 bp, synthetic construct
  source 1..80: mol_type = other DNA
gcccaaggatgacccccaggttatggaaggtgaggtccattttgttatgcccattactcccagagtgacctaattttcag

SEQ ID NO: 45805 - DNA, 80 bp, synthetic construct
  source 1..80: mol_type = other DNA
ttgttttctttgttgctcaaatttttaactgttccattttcacttgttcacagacaaatccgaccgccctgtctgccgac

SEQ ID NO: 45806 - DNA, 80 bp, synthetic construct
  source 1..80: mol_type = other DNA
actgtgaggctcttctaacaccctcagtcagtgacacacccatcccatccaccacttcccccgtgtggggtccagagtgg

SEQ ID NO: 45807 - DNA, 80 bp, synthetic construct; identical to SEQ ID NO: 12254
  source 1..80: mol_type = other DNA

SEQ ID NO: 45808 - DNA, 80 bp, synthetic construct
  source 1..80: mol_type = other DNA
ttctctgtcagtagcatgatccccaccgctatggtctatctatgatcaccgtgctttgtgaaactgtgcatccccttgta

SEQ ID NO: 45809 - DNA, 80 bp, synthetic construct
  source 1..80: mol_type = other DNA
cttctcctgttggttattctgagtctgacacagacccatgacatgtcttataaagcctccaatggctttatcctacctag

SEQ ID NO: 45810 - DNA, 80 bp, synthetic construct
  source 1..80: mol_type = other DNA
tcttccaatcctcttcccctacatccctggcactggttgttttctgtgaaaacagcagtgaacaggttcagttttgaact

SEQ ID NO: 45811 - DNA, 80 bp, synthetic construct; identical to SEQ ID NO: 12255
  source 1..80: mol_type = other DNA

SEQ ID NO: 45812 - DNA, 80 bp, synthetic construct
  source 1..80: mol_type = other DNA
ggaaaggccaggtgtccgtggagttatttttaaatattttactttgcagagtttgtgtttatggagtggtaatgatgaag

SEQ ID NO: 45813 - DNA, 80 bp, synthetic construct
  source 1..80: mol_type = other DNA
ggaagaagacagggaagaaaagagggtgaaagagagttgtgtaataaagggagtcagggtaggagatgcaactgagacaa

SEQ ID NO: 45814 - DNA, 80 bp, synthetic construct
  source 1..80: mol_type = other DNA
atttggctcttttcttagaacagaagcctttgaagaattttagacaggagtatcatggcttaggctggcttttcaaaaaa

SEQ ID NO: 45815 - DNA, 80 bp, synthetic construct; identical to SEQ ID NO: 12256
  source 1..80: mol_type = other DNA

SEQ ID NO: 45816 - DNA, 80 bp, synthetic construct
  source 1..80: mol_type = other DNA
tactcgggaggctgacgcaggagaatggcgtgaacccaggaggcggagcttgcagtgagccgagatcgcaccactgcact

SEQ ID NO: 45817 - DNA, 80 bp, synthetic construct
  source 1..80: mol_type = other DNA
gtccctgagtattcagaacctcaacccccaactttcagattcacaaccacaagcttctattcactgtccaaagtgaagct

SEQ ID NO: 45818 - DNA, 80 bp, synthetic construct
  source 1..80: mol_type = other DNA
caagctccgcctcccaggttcacgccattctcctgcctcagcctcccgagtagctgggactacaggcgcccaccaccatg

SEQ ID NO: 45819 - DNA, 80 bp, synthetic construct; identical to SEQ ID NO: 12257
  source 1..80: mol_type = other DNA

SEQ ID NO: 45820 - DNA, 80 bp, synthetic construct
  source 1..80: mol_type = other DNA
aatgaaatatggctaaagctgtaaggtaaaaaagccaacacattttagctgacagggaactgtgtggtgtttttgtgctt

SEQ ID NO: 45821 - DNA, 80 bp, synthetic construct
  source 1..80: mol_type = other DNA
aggccagttcccaattctcagggactgtttttcttaaaagtatgcaaacatataattacaggttgagatgaatcatatga

SEQ ID NO: 45822 - DNA, 80 bp, synthetic construct
  source 1..80: mol_type = other DNA
tgaaaccctgtctctactaaaataacaacaactagcgaggcgtggtggtgggcatttataaataatcccagctacttggg

SEQ ID NO: 45823 - DNA, 80 bp, synthetic construct; identical to SEQ ID NO: 12258
  source 1..80: mol_type = other DNA

SEQ ID NO: 45824 - DNA, 80 bp, synthetic construct
  source 1..80: mol_type = other DNA
gcgattctcctgcctcagcctcccgagtagctggaattacaggtgcccaccaccacacccggctaattttttgtatttta

SEQ ID NO: 45825 - DNA, 80 bp, synthetic construct
  source 1..80: mol_type = other DNA
agctttgcatactttcagtgaacactttagtgcctactgtagggcaagcactgttttaggagctggagctacatcaataa

SEQ ID NO: 45826 - DNA, 80 bp, synthetic construct
  source 1..80: mol_type = other DNA
aagagagagctgctttgaggaggtaacacatagagagaaaattaaacgagggaacaaaccatatgaacacacagagaaag

SEQ ID NO: 45827 - DNA, 80 bp, synthetic construct; identical to SEQ ID NO: 12259
  source 1..80: mol_type = other DNA

SEQ ID NO: 45828 - DNA, 80 bp, synthetic construct
  source 1..80: mol_type = other DNA
aaaaaaaaagcccagtgtggctagactgtgggagatgggatcaagatgtttaacagagggcatattgtacagagccctat

SEQ ID NO: 45829 - DNA, 80 bp, synthetic construct
  source 1..80: mol_type = other DNA
cacccaggttggagtgcagtggcatgatctcagctcactgcaacctccacctcccgggttcaagtgattctcctgcctca

SEQ ID NO: 45830 - DNA, 80 bp, synthetic construct
  source 1..80: mol_type = other DNA
gtgagccaccgcgattggcccatggatttacattttaaaaccacctctgactgtaggtgtgaaggatagactagagaatg

SEQ ID NO: 45831 - DNA, 80 bp, synthetic construct
  source 1..80: mol_type = other DNA
ccagaaatattggagtcatccttaattctatttgtcaaacatgacctccaatccattaacaaaacttgttggctcttttc

SEQ ID NO: 45832 - DNA, 80 bp, synthetic construct; identical to SEQ ID NO: 12260
  source 1..80: mol_type = other DNA

SEQ ID NO: 45833 - DNA, 80 bp, synthetic construct
  source 1..80: mol_type = other DNA
tgtaatcccagctactcaggagactgaggcaggagaattgcttgaacccaggaggcagaggttgcagggagccgagatca

SEQ ID NO: 45834 - DNA, 80 bp, synthetic construct
  source 1..80: mol_type = other DNA
gcctcccaaagtactggcattacaggtgtgagccactgcacctggccaggtcatccttttatttattttattttattttt

SEQ ID NO: 45835 - DNA, 80 bp, synthetic construct
  source 1..80: mol_type = other DNA
ttttgtatttttagtagagatggggtttcaccatgttagccaggatggtctcaatctcctgacctcgtgatccacccatc

SEQ ID NO: 45836 - DNA, 80 bp, synthetic construct; identical to SEQ ID NO: 12261
  source 1..80: mol_type = other DNA

SEQ ID NO: 45837 - DNA, 80 bp, synthetic construct
  source 1..80: mol_type = other DNA
ctagaaaggcccttctcctggaaatccatgtggccaaaactaatcttctttaatgatttgcttgaatttcactttactga

SEQ ID NO: 45838 - DNA, 80 bp, synthetic construct
  source 1..80: mol_type = other DNA
tacactcaataaatatatttgttgaacagatgaatgaaaaaatgaggcagacttagctggctgatggattgattagggga

SEQ ID NO: 45839 - DNA, 80 bp, synthetic construct
  source 1..80: mol_type = other DNA
gctccattttgtacgtatgagagagatttattaaagatctcagagaagatgtcccataagcagttgaattcatgagcctg

SEQ ID NO: 45840 - DNA, 80 bp, synthetic construct; identical to SEQ ID NO: 12262
  source 1..80: mol_type = other DNA

SEQ ID NO: 45841 - DNA, 80 bp, synthetic construct
  source 1..80: mol_type = other DNA
agaagtgaaccaaagtcttgattgtggtgatagtttactgggtttatgcaggtcaaaacttatttaagtgatactttgca

SEQ ID NO: 45842 - DNA, 80 bp, synthetic construct
  source 1..80: mol_type = other DNA
attttgtgacacatttcaacactggaccgatcagacctctcccttagccattggtctgcactgtcttttctgcccatgac

SEQ ID NO: 45843 - DNA, 80 bp, synthetic construct
  source 1..80: mol_type = other DNA
cttcggcatcgcggtggcagaactagaaacgagttacagatagaaactagaatatgctttttaaaaaaacaaaaaacaaa

SEQ ID NO: 45844 - DNA, 80 bp, synthetic construct; identical to SEQ ID NO: 12263
  source 1..80: mol_type = other DNA

SEQ ID NO: 45845 - DNA, 80 bp, synthetic construct
  source 1..80: mol_type = other DNA
gacggagagagcacgagcccatcaggtgaggctggtaggcaaggaagaaacgagcagagggggaagagagaggagactgc

SEQ ID NO: 45846 - DNA, 80 bp, synthetic construct
  source 1..80: mol_type = other DNA
agactgggcgagataaaagaaagagcatatggcaccgagggagagatggggagaaatgggaaaaccttgcttaaaaaatt

SEQ ID NO: 45847 - DNA, 80 bp, synthetic construct
  source 1..80: mol_type = other DNA
cccctctcactcaactggagcaagagtgtagatttttgatgttggaatgagggttaaggtttacttaaaaagcagcgaaa

SEQ ID NO: 45848 - DNA, 80 bp, synthetic construct; identical to SEQ ID NO: 12264
  source 1..80: mol_type = other DNA

SEQ ID NO: 45849 - DNA, 80 bp, synthetic construct
  source 1..80: mol_type = other DNA
ctcagacaggtaagggagtgtcagcaaagcctcccaagaatatgtaatagctgagtatttttttttgaggcacattgtag

SEQ ID NO: 45850 - DNA, 80 bp, synthetic construct
  source 1..80: mol_type = other DNA
tggctatgttgcctaggctggtctcaaactcctgggctcaagtaattctcctgcctcagcctccaaaagtgctgggatta

SEQ ID NO: 45851 - DNA, 80 bp, synthetic construct
  source 1..80: mol_type = other DNA
tcagaaagatgctcaggagacagataatgaaaggctttagatgccattccgaggagtttaatcctaaagacattaagaag

SEQ ID NO: 45852 - DNA, 80 bp, synthetic construct; identical to SEQ ID NO: 12265
  source 1..80: mol_type = other DNA

SEQ ID NO: 45853 - DNA, 80 bp, synthetic construct
  source 1..80: mol_type = other DNA
tttctaaaaggaaatggcaagaagagagtttgtttagtcactgtggagagacaactatactaggagtaaagacacaggca

SEQ ID NO: 45854 - DNA, 80 bp, synthetic construct
  source 1..80: mol_type = other DNA
agagaaactggaggcaaaccaggagtgagcaagatcccagaaattaaataatgatagaagagaataaaaaaggtgtggag

SEQ ID NO: 45855 - DNA, 80 bp, synthetic construct
  source 1..80: mol_type = other DNA
ataccagattgcagtatgtttcaaaggtatgggagaagagaaagtgaagcttgtgaattacgattttgagacccaatgag

SEQ ID NO: 45856 - DNA, 80 bp, synthetic construct; identical to SEQ ID NO: 12266
  source 1..80: mol_type = other DNA

SEQ ID NO: 45857 - DNA, 80 bp, synthetic construct
  source 1..80: mol_type = other DNA
tttgtttttgttttttgttttctgtagagatgaggtcttgctatgttgcccaggctaatcttgaacctctggcctcaacc

SEQ ID NO: 45858 - DNA, 80 bp, synthetic construct
  source 1..80: mol_type = other DNA
agctgatcaggtttttccttcttaggtacttcagtagatccttcctcctaatgcctttaggattaaactccttggaatag

SEQ ID NO: 45859 - DNA, 80 bp, synthetic construct
  source 1..80: mol_type = other DNA
tggaggatgcagattaagcaaagacagacataagcgtgcctgggacttcataaaggaacagaaagaagccagtatcgaga

SEQ ID NO: 45860 - DNA, 80 bp, synthetic construct; identical to SEQ ID NO: 12267
  source 1..80: mol_type = other DNA

SEQ ID NO: 45861 - DNA, 80 bp, synthetic construct
  source 1..80: mol_type = other DNA
tgctctgccacgcccagctaatttttgtatttttagtagagatggggtttcaccatgttggccaagctggtctcaatctc

SEQ ID NO: 45862 - DNA, 80 bp, synthetic construct
  source 1..80: mol_type = other DNA
tagatagcagtgaatggaagggatgttttggaagagaagataataaataggcctaagcctgaagggaaatcatgaggctg

SEQ ID NO: 45863 - DNA, 80 bp, synthetic construct
  source 1..80: mol_type = other DNA
tctctcaggttactctctagaatgaaagcacacagacaggtaaatatgacacaatgtgatttgtgctataatattcaagc

SEQ ID NO: 45864 - DNA, 80 bp, synthetic construct; identical to SEQ ID NO: 12268
  source 1..80: mol_type = other DNA

SEQ ID NO: 45865 - DNA, 80 bp, synthetic construct
  source 1..80: mol_type = other DNA
gagggtgtgtgtgtgttgtatacatgtgtgtgtatctacacatatctcccaaattgaatttataatatcttcttccttcc

SEQ ID NO: 45866 - DNA, 80 bp, synthetic construct
  source 1..80: mol_type = other DNA
gcagtacaatagcgtgatctcagctcactgcaacctccgcctcctgggttcaagcaattctcctgtcttagcctcctgag

SEQ ID NO: 45867 - DNA, 80 bp, synthetic construct
  source 1..80: mol_type = other DNA
accgcgcccggccgggtgctctttattccccacctctagccccatcctatgaattcttctttatgtccgcttgtcaccac

SEQ ID NO: 45868 - DNA, 80 bp, synthetic construct; identical to SEQ ID NO: 12269
  source 1..80: mol_type = other DNA

SEQ ID NO: 45869 - DNA, 80 bp, synthetic construct
  source 1..80: mol_type = other DNA
ccttttcttttggaaccttcagtacacctggaattacctatttaaaaatctctcttcctatagcctgcaagctccagagg

SEQ ID NO: 45870 - DNA, 80 bp, synthetic construct
  source 1..80: mol_type = other DNA
ttaagctagaaaaataataaaataggatagaggctacagagatctttgcaggggggatcagactgctttggaatttgcag

SEQ ID NO: 45871 - DNA, 80 bp, synthetic construct
  source 1..80: mol_type = other DNA
ggtccaagggaggagaaaagatcttgtcaagagaggagataggcagggcacggtggcttacacctgtaatcccagcgctt

SEQ ID NO: 45872 - DNA, 80 bp, synthetic construct; identical to SEQ ID NO: 12270
  source 1..80: mol_type = other DNA

SEQ ID NO: 45873 - DNA, 80 bp, synthetic construct
  source 1..80: mol_type = other DNA
aggcagaaatacagcaggggcctgggcttcattttctcactgttcttttgctctcagcagcaaaaaaaaaagcgagatac

SEQ ID NO: 45874 - DNA, 80 bp, synthetic construct
  source 1..80: mol_type = other DNA
atacctcataccctgatcttcaagttggattcaattggggggccagacattgtaattctttcctatctcatgttctcccc

SEQ ID NO: 45875 - DNA, 80 bp, synthetic construct
  source 1..80: mol_type = other DNA
ctttcattctctagggtggtaatgtttttgcagccctgattcaggatcagagtgaggaagaggaggaggaagaaaaacat

SEQ ID NO: 45876 - DNA, 80 bp, synthetic construct; identical to SEQ ID NO: 12271
  source 1..80: mol_type = other DNA

SEQ ID NO: 45877 - DNA, 80 bp, synthetic construct
  source 1..80: mol_type = other DNA
caggcgtggtggcgtgcgcctgtaatcccagctacttggaaggctgaggcaggagaatcacttgaacttgggaggtggaa

SEQ ID NO: 45878 - DNA, 80 bp, synthetic construct
  source 1..80: mol_type = other DNA
attctgttgctttaagcacagaacctgaaacaaagccccaggtccttgctcttctacttgtgactcttctgcgtgtgcat

SEQ ID NO: 45879 - DNA, 80 bp, synthetic construct
  source 1..80: mol_type = other DNA
ctcatttttcgtcagcagcactcaatacagatggtctccaacttctgcttcggtgtacgatttttctactttatgatggt

SEQ ID NO: 45880 - DNA, 80 bp, synthetic construct
  source 1..80: mol_type = other DNA
caacctccgcctcccgggttcaagtgattctcctgcctcagcttcctgagtagctgagattacaggcacgtgccaccacg

SEQ ID NO: 45881 - DNA, 80 bp, synthetic construct; identical to SEQ ID NO: 12272
  source 1..80: mol_type = other DNA

SEQ ID NO: 45882 - DNA, 80 bp, synthetic construct
  source 1..80: mol_type = other DNA
aaggaagagaagtcaaaagggaaggctaaggtgagagagtaactagcaggaggaggtattggggcccaggaattaaaaca

SEQ ID NO: 45883 - DNA, 80 bp, synthetic construct
  source 1..80: mol_type = other DNA
tctactaaaaatacaaaaaaaattagccgggcgtggtggcgggcgcctgtagtcccagctactcgggaggctgaggcagg

SEQ ID NO: 45884 - DNA, 80 bp, synthetic construct
  source 1..80: mol_type = other DNA
atttcatcagacctgtcttttccctattagcctcaaaataaattcgctgctctggacaatgaagaggaggataaagaaga

SEQ ID NO: 45885 - DNA, 80 bp, synthetic construct
  source 1..80: mol_type = other DNA
gcaaacctttattcttttctttttttgggggagtagttggggtggtggttcgtttgtttttgtttttgtttttgtttaca

SEQ ID NO: 45886 - DNA, 80 bp, synthetic construct; identical to SEQ ID NO: 12273
  source 1..80: mol_type = other DNA

SEQ ID NO: 45887 - DNA, 80 bp, synthetic construct
  source 1..80: mol_type = other DNA
tataaagttcaggagctatataaaaataaatgtcaggtcagccttggcccatgggctgtagtttgcaacacctaatccag

SEQ ID NO: 45888 - DNA, 80 bp, synthetic construct
  source 1..80: mol_type = other DNA
agaaggaggagtccggagatctctagggtccctatgcgtctggcacttcctaattctgtgattctgctggattcctctga

SEQ ID NO: 45889 - DNA, 80 bp, synthetic construct
  source 1..80: mol_type = other DNA
tgggactacaggcacgtgccaccatgaccggctgattttttgtgtttttagtagagacaggatttcaccatgttagccag

SEQ ID NO: 45890 - DNA, 80 bp, synthetic construct; identical to SEQ ID NO: 12274
  source 1..80: mol_type = other DNA

SEQ ID NO: 45891 - DNA, 80 bp, synthetic construct
  source 1..80: mol_type = other DNA
agtagtgaaggaaagagctggggcagggacagggggcagatgatgtgaaatctgagttctagaaggagtccctagttttt

SEQ ID NO: 45892 - DNA, 80 bp, synthetic construct
  source 1..80: mol_type = other DNA
ccggctaattttttgtatttttagtagagatggggtttcaccatgttagccaggatggtcttgatctcctgaccttggga

SEQ ID NO: 45893 - DNA, 80 bp, synthetic construct
  source 1..80: mol_type = other DNA
tgatccctatgctcatcttagcaaaaaggagaagaaaaagctgaaaaaacaggtaagaccttggttcttagcggtcaaaa

SEQ ID NO: 45894 - DNA, 80 bp, synthetic construct; identical to SEQ ID NO: 12275
  source 1..80: mol_type = other DNA

SEQ ID NO: 45895 - DNA, 80 bp, synthetic construct
  source 1..80: mol_type = other DNA
ctaatttttgtattttttgtagagacagtattttagcatgttggccaggctggtctcaaactcctgagctcaagagatcc

SEQ ID NO: 45896 - DNA, 80 bp, synthetic construct
  source 1..80: mol_type = other DNA
accttctcagatggagtatgagcgccaagtggcttcattaaaagcagccaatgcagctgaaaatgacttctccgtgtccc

SEQ ID NO: 45897 - DNA, 80 bp, synthetic construct
  source 1..80: mol_type = other DNA
aagattggaggcattttccacaccttaggttctgccaacttgagcaagaagatagaaaaaccagtagaagtggggtccac

SEQ ID NO: 45898 - DNA, 80 bp, synthetic construct; identical to SEQ ID NO: 12276
  source 1..80: mol_type = other DNA

SEQ ID NO: 45899 - DNA, 80 bp, synthetic construct
  source 1..80: mol_type = other DNA
gccaggtcctaatagcttttattccccagcaagggcaagaccacactcctcaagcacattgccaaccgagccctgagcat

SEQ ID NO: 45900 - DNA, 80 bp, synthetic construct
  source 1..80: mol_type = other DNA
ggaaagggatgctaaggaaaggaggggagggtcaatgaggaacttgagagtgttttatttggaacaagtacaaagagctg

SEQ ID NO: 45901 - DNA, 80 bp, synthetic construct
  source 1..80: mol_type = other DNA
cagtccaggctgttcttcgagctgacaccaagcgattgaagctgctggaagaggagcggcggcttcagggacagctggaa

SEQ ID NO: 45902 - DNA, 80 bp, synthetic construct; identical to SEQ ID NO: 12277
  source 1..80: mol_type = other DNA

SEQ ID NO: 45903 - DNA, 80 bp, synthetic construct
  source 1..80: mol_type = other DNA
gggaggctcaaggcttacctctccctccttactatctgtgttgtgagaacttagggtctttctctatttatctccctact

SEQ ID NO: 45904 - DNA, 80 bp, synthetic construct
  source 1..80: mol_type = other DNA
agaaaacatatcctagcctgggcaacatagggagaccctgtctctacaaaaaatttaaagatcagctggatatggtggcg

SEQ ID NO: 45905 - DNA, 80 bp, synthetic construct
  source 1..80: mol_type = other DNA
ttctctgaggagagcttgggaaggagtgttcatggtctcaggctctatctccgagttttctctggggttgtctgagcaag

SEQ ID NO: 45906 - DNA, 80 bp, synthetic construct; identical to SEQ ID NO: 12278
  source 1..80: mol_type = other DNA

SEQ ID NO: 45907 - DNA, 80 bp, synthetic construct
  source 1..80: mol_type = other DNA
gatgatgtctgcactgatatcatccacctcgatgcccagcggctccactactataggggcaattacagtaagtaggattg

SEQ ID NO: 45908 - DNA, 80 bp, synthetic construct
  source 1..80: mol_type = other DNA
cctggtcccctcttctgccccagtgaccttcaaaaagatgtaccagcagaagcagaaagaactgctgaaacagtatgaga

SEQ ID NO: 45909 - DNA, 80 bp, synthetic construct
  source 1..80: mol_type = other DNA
cagggctcaggtttctcttttttcctcttcctctccaggaaaaacaaacgaaggaagccctgactcggaagcagcagaaa

SEQ ID NO: 45910 - DNA, 80 bp, synthetic construct; identical to SEQ ID NO: 12279
  source 1..80: mol_type = other DNA

SEQ ID NO: 45911 - DNA, 80 bp, synthetic construct
  source 1..80: mol_type = other DNA
gtgtagcaggagccacagggagagtctctggggacctctttgaccacctgtcttccatcttgcagtttgcattgtgggcc

SEQ ID NO: 45912 - DNA, 80 bp, synthetic construct
  source 1..80: mol_type = other DNA
gctggaatcagggagcctctcgagaatgtagagttaaatacagaactcatgatagatgattcatttccctaagaggggca

SEQ ID NO: 45913 - DNA, 80 bp, synthetic construct
  source 1..80: mol_type = other DNA
tataatcccagcagggatcacctaaggtcaagagttccagaccagcctagccaacatagtgaaccccgcctctactaaaa

SEQ ID NO: 45914 - DNA, 80 bp, synthetic construct; identical to SEQ ID NO: 12280
  source 1..80: mol_type = other DNA

SEQ ID NO: 45915 - DNA, 80 bp, synthetic construct
  source 1..80: mol_type = other DNA
tggttgcacatgcctgtaatcccagctattttgggaggctgaggcaggagaatcacttgaacccaggaggcagaggttgc

SEQ ID NO: 45916 - DNA, 80 bp, synthetic construct
  source 1..80: mol_type = other DNA
ctactcgggaggctgaggtaggagaattgcttgagtccagggggcagaggttccagttagccgaggtcgtgccactgcac

SEQ ID NO: 45917 - DNA, 80 bp, synthetic construct
  source 1..80: mol_type = other DNA
cactgcaacctccacctcccaggttcaagatattctcctgcctcagcctcctgaatagctgggattataggtacgcccca

SEQ ID NO: 45918 - DNA, 80 bp, synthetic construct; identical to SEQ ID NO: 12281
  source 1..80: mol_type = other DNA

SEQ ID NO: 45919 - DNA, 80 bp, synthetic construct
  source 1..80: mol_type = other DNA
ggttcacgcgattctcctgccttagcctcccgagtagctgggacaacaggcgcgtgctaccacgcccagctaattttttg

SEQ ID NO: 45920 - DNA, 80 bp, synthetic construct
  source 1..80: mol_type = other DNA
ccatctagtgtgttagaaagtttgtagccatttctgctctctctagcagtgttgagaggccattttctcatatccagaga

SEQ ID NO: 45921 - DNA, 80 bp, synthetic construct
  source 1..80: mol_type = other DNA
ttaactccccttttgtcccttaactcttttactttgctcaccatgcctttgtcatattaggggaacatccctgttccttt

SEQ ID NO: 45922 - DNA, 80 bp, synthetic construct
  source 1..80: mol_type = other DNA
ttataggcatgtcccactatgcccagctaattattgtatttttagtagagacagggtttcacaatgttggccagcctggt

SEQ ID NO: 45923 - DNA, 80 bp, synthetic construct; identical to SEQ ID NO: 12282
  source 1..80: mol_type = other DNA

SEQ ID NO: 45924 - DNA, 80 bp, synthetic construct
  source 1..80: mol_type = other DNA
aaaagttgatgtatggagctgcagcacctttttcccttgccctcctcttaactactttgtcttcccttgcagacccatgg

SEQ ID NO: 45925 - DNA, 80 bp, synthetic construct
  source 1..80: mol_type = other DNA
tcttcaaccagcagtatgcagagcagctgcgcatggaggagacgcccactgagtacctgcagcggggcttcaacctgccc

SEQ ID NO: 45926 - DNA, 80 bp, synthetic construct
  source 1..80: mol_type = other DNA
attcatgtctacaaactgtacctagaggaaccgagaatgagggagcctcagctcacaaactggcacatcttgagggtttg

SEQ ID NO: 45927 - DNA, 80 bp, synthetic construct; identical to SEQ ID NO: 12283
  source 1..80: mol_type = other DNA

SEQ ID NO: 45928 - DNA, 80 bp, synthetic construct
  source 1..80: mol_type = other DNA
tttcttcctgccctctgttgttgctatctttcttcaaagctgtgatcgttgtcagccatgatgcccgactcatcacagaa

SEQ ID NO: 45929 - DNA, 80 bp, synthetic construct
  source 1..80: mol_type = other DNA
ttgtgtggcctagaagtcctctgtggtctcccctcctctgaagactgcctctggcctgcagctgacctggcaaccattca

SEQ ID NO: 45930 - DNA, 80 bp, synthetic construct
  source 1..80: mol_type = other DNA
aggttccatccagccaagtttatgtggcctattgtctcaggactctcatcactcagaagcctgcctctgatttaccctac

SEQ ID NO: 45931 - DNA, 80 bp, synthetic construct; identical to SEQ ID NO: 12284
  source 1..80: mol_type = other DNA

SEQ ID NO: 45932 - DNA, 80 bp, synthetic construct
  source 1..80: mol_type = other DNA
taaggatcataggattcctttcccccaacccttcacgcaaggaaaaagcaaagtgattcataccttctatcttggaacat

SEQ ID NO: 45933 - DNA, 80 bp, synthetic construct
  source 1..80: mol_type = other DNA
acacaccaccaggcccagctaattttagtgtttttaatagagacagggttttaccatgttggtcaggctggtctcgaact

SEQ ID NO: 45934 - DNA, 80 bp, synthetic construct
  source 1..80: mol_type = other DNA
caatccttccacctcagcctcctgagtagctgggactacaggcatgtgccgccacactcaactaatttttttttttttaa

SEQ ID NO: 45935 - DNA, 80 bp, synthetic construct; identical to SEQ ID NO: 12285
  source 1..80: mol_type = other DNA

SEQ ID NO: 45936 - DNA, 80 bp, synthetic construct
  source 1..80: mol_type = other DNA
gtctaatatgtcgtactctagattctaagttgccacatactcaaaaaagggaaagattatccagggcctgattatttgac

SEQ ID NO: 45937 - DNA, 80 bp, synthetic construct
  source 1..80: mol_type = other DNA
ggagttaatggatgatagctgctgtggccatttttcttaagagttagactggggagatgggtttggaaagtaaaatgcaa

SEQ ID NO: 45938 - DNA, 80 bp, synthetic construct
  source 1..80: mol_type = other DNA
gtgacaggagatatatccagttccagagggaatagggagagctgtgtggctaagatttaactgtttggacatttaatttg

SEQ ID NO: 45939 - DNA, 80 bp, synthetic construct; identical to SEQ ID NO: 12286
  source 1..80: mol_type = other DNA

SEQ ID NO: 45940 - DNA, 80 bp, synthetic construct
  source 1..80: mol_type = other DNA
ctcaaacaaaaaccaaaagacatcaggaaacatgcctcttatggaatttgagggggaaaagtcagggtcttggcagtgac

SEQ ID NO: 45941 - DNA, 80 bp, synthetic construct
  source 1..80: mol_type = other DNA
tatatatattttttttttttttttttgagatggagtcttactctgttgccaggctggagtgctgtggcgtgatcttggct

SEQ ID NO: 45942 - DNA, 80 bp, synthetic construct
  source 1..80: mol_type = other DNA
ttttgccatgttggccagtctggtctcaaactcctgacctcaggtgatctgcccacttcggcctcccaaagtgctgggat

SEQ ID NO: 45943 - DNA, 80 bp, synthetic construct; identical to SEQ ID NO: 12287
  source 1..80: mol_type = other DNA

SEQ ID NO: 45944 - DNA, 80 bp, synthetic construct
  source 1..80: mol_type = other DNA
tgttttaacttctgtgatccctgtagccgatcatatgtgctgttaatggaattaataattcacctaaatgtgggcaaaag

SEQ ID NO: 45945 - DNA, 80 bp, synthetic construct
  source 1..80: mol_type = other DNA
tgtgttttttgttgttttgagatgtggtctccctctgtttcccaggctggagtgcagtggcacaatcatggctcactgca

SEQ ID NO: 45946 - DNA, 80 bp, synthetic construct
  source 1..80: mol_type = other DNA
atcctcccacctcagcctcattaaagccaaagcctgaaggtaggaaaggaagagccttcagggaagggaccaaaatgtgc

SEQ ID NO: 45947 - DNA, 80 bp, synthetic construct; identical to SEQ ID NO: 12288
  source 1..80: mol_type = other DNA

SEQ ID NO: 45948 - DNA, 80 bp, synthetic construct
  source 1..80: mol_type = other DNA
gagataatgtagactcagatatttccatgtgaagggaagggaaaatgttgctcacagtggatgggactcactttttccca

SEQ ID NO: 45949 - DNA, 80 bp, synthetic construct
  source 1..80: mol_type = other DNA
tgaccaacttggcaaaacaccgtctctactaaaaatgcaaaaattagccaggagtagtggcacgcatttgtaatcccagc

SEQ ID NO: 45950 - DNA, 80 bp, synthetic construct
  source 1..80: mol_type = other DNA
ctaacattaatttgtactgggctaagatagtaggattttgtgatttttcaacattaggtctactgcccaggagtaggaat

SEQ ID NO: 45951 - DNA, 80 bp, synthetic construct; identical to SEQ ID NO: 12289
  source 1..80: mol_type = other DNA

SEQ ID NO: 45952 - DNA, 80 bp, synthetic construct
  source 1..80: mol_type = other DNA
catggtaaaaccccatctctactaaaaatacagaaattagccaggcgtggtggcaggtgcctacaatcccagctactcag

SEQ ID NO: 45953 - DNA, 80 bp, synthetic construct
  source 1..80: mol_type = other DNA
ccaggctggagtgcaatggcacgatctcagctcactgcaacctccgcctcctgggttcaaacgattcttctgcctcagcc

SEQ ID NO: 45954 - DNA, 80 bp, synthetic construct; identical to SEQ ID NO: 12290
  source 1..80: mol_type = other DNA

SEQ ID NO: 45955 - DNA, 80 bp, synthetic construct
  source 1..80: mol_type = other DNA
agtcttgctctgtcgcccaggctggagtgcagtggcgcgatctctgctcgctgcaagctccacctcccgggttcatgcca

SEQ ID NO: 45956 - DNA, 80 bp, synthetic construct
  source 1..80: mol_type = other DNA
ctgggattacaggcgtgagccaccgcgcctggcaatttttgtatttttaatagagacggggtttcaccatgttggctagg

SEQ ID NO: 45957 - DNA, 80 bp, synthetic construct
  source 1..80: mol_type = other DNA
agaaaggtgagaagcaggcagtaaatggaagcagaaagagacacaaagttgtgaccactaggttgtgacatgtttgggtt

SEQ ID NO: 45958 - DNA, 80 bp, synthetic construct; identical to SEQ ID NO: 12291
  source 1..80: mol_type = other DNA

SEQ ID NO: 45959 - DNA, 80 bp, synthetic construct
  source 1..80: mol_type = other DNA
ccaatctgtctgttttttctttttgttttgtttttgttttttgagatggagatggagtctggctctgtcacccaagctga

SEQ ID NO: 45960 - DNA, 80 bp, synthetic construct
  source 1..80: mol_type = other DNA
ttgtatttttagtagagatgggatttcaccatgttggccaggctggtcacaaactcctcacctcaggtgatccatccgcc

SEQ ID NO: 45961 - DNA, 80 bp, synthetic construct
  source 1..80: mol_type = other DNA
tccacctcccgggttcaagcaattctcctgcctcggcctcccgagtagctgggattacaggcatgcgccaccacgcccgg

SEQ ID NO: 45962 - DNA, 80 bp, synthetic construct; identical to SEQ ID NO: 12292
  source 1..80: mol_type = other DNA

SEQ ID NO: 45963 - DNA, 80 bp, synthetic construct
  source 1..80: mol_type = other DNA
gggataacaggcgccagtaaccacacccagctaatttttgtatttttagtagagatggggtttcttcatgttggccaggc

SEQ ID NO: 45964 - DNA, 80 bp, synthetic construct
  source 1..80: mol_type = other DNA
gttttgaactcctgggttcaagtgatcgtcccatgtgggcctcccaaagtgctgggattacaggcgtgagccaacatgcc

SEQ ID NO: 45965 - DNA, 80 bp, synthetic construct
  source 1..80: mol_type = other DNA
ctggccagagccactttgggaagagcagtctatacttaccctttgtttttttgtgacggaattttgccctgtcactcagg

SEQ ID NO: 45966 - DNA, 80 bp, synthetic construct; identical to SEQ ID NO: 12293
  source 1..80: mol_type = other DNA

SEQ ID NO: 45967 - DNA, 80 bp, synthetic construct
  source 1..80: mol_type = other DNA
ctaatattttttgtattttttgtacagacctggtctccctatgttgctcaggctggtctcaaactcctgggctcaagtag

SEQ ID NO: 45968 - DNA, 80 bp, synthetic construct
  source 1..80: mol_type = other DNA
tctgactccagcatcctcaggatttcctcccttatctgtagaatgtggataagatgaccaagaacacatcctagagggca

SEQ ID NO: 45969 - DNA, 80 bp, synthetic construct
  source 1..80: mol_type = other DNA
aactgttagatcaagcattagctccagaggagtaaaaatcagattccacagatttgtactaatgtatctaacacaggtgg

SEQ ID NO: 45970 - DNA, 80 bp, synthetic construct
  source 1..80: mol_type = other DNA
atacaaaaaaattagccaggcatggtggcaggtgcctggaatcccagctactcagaagactgaggcagaagaatcccttg

SEQ ID NO: 45971 - DNA, 80 bp, synthetic construct; identical to SEQ ID NO: 12294
  source 1..80: mol_type = other DNA

SEQ ID NO: 45972 - DNA, 80 bp, synthetic construct
  source 1..80: mol_type = other DNA
acctggaagcctccttcacgctggcaaggttccaggtgggagcagggagtgagctgactcccaaaggcagtgcatgtagt

SEQ ID NO: 45973 - DNA, 80 bp, synthetic construct
  source 1..80: mol_type = other DNA
tcgccatcatcgaacctagcagacccaggacgcagactgggtgttcacagaaagttgaaggtcccacttgagaaaggact

SEQ ID NO: 45974 - DNA, 80 bp, synthetic construct
  source 1..80: mol_type = other DNA
accccatgaggaataatgaacttagctgggatgatttcttaagtgcagctgatcctgtgtcagagttctgtgtgcatgtg

SEQ ID NO: 45975 - DNA, 80 bp, synthetic construct; identical to SEQ ID NO: 12295
  source 1..80: mol_type = other DNA

SEQ ID NO: 45976 - DNA, 80 bp, synthetic construct
  source 1..80: mol_type = other DNA
cgggtggtagaaggcacagttgttctcatagcggcagttgcccttcatcatgaaatgtcggcagacagggcggtttgaca

SEQ ID NO: 45977 - DNA, 80 bp, synthetic construct
  source 1..80: mol_type = other DNA
catcaaagagacgggtacctcacgttctgcctagctaccaacagtagtgactctcacccactccccaaaagcttgtatgg

SEQ ID NO: 45978 - DNA, 80 bp, synthetic construct
  source 1..80: mol_type = other DNA
ggacatcatgaggccggtggccatggggccccccgtgtccagggccttcatggggacgatgtccaccacttccacccatg

SEQ ID NO: 45979 - DNA, 80 bp, synthetic construct; identical to SEQ ID NO: 12296
  source 1..80: mol_type = other DNA

SEQ ID NO: 45980 - DNA, 80 bp, synthetic construct
  source 1..80: mol_type = other DNA
tatggtatggtccaggacctggtcctggacccccccgcattgggccaccccgcatagggtcgcccgggccatcccagaag

SEQ ID NO: 45981 - DNA, 80 bp, synthetic construct
  source 1..80: mol_type = other DNA
tcaatcctatactattatcagactgaaattaagcagataagcccattccaaccttttactcaccacctacctggcatagg

SEQ ID NO: 45982 - DNA, 80 bp, synthetic construct
  source 1..80: mol_type = other DNA
gagtaacacagcatgagcactctagaagactagcatgatctcccatttaggtgcaaccaactgaccctctcaaaccaacc

SEQ ID NO: 45983 - DNA, 80 bp, synthetic construct; identical to SEQ ID NO: 12297
  source 1..80: mol_type = other DNA

SEQ ID NO: 45984 - DNA, 80 bp, synthetic construct
  source 1..80: mol_type = other DNA
agagcgagcttaaggaggctccacagaaggtggaaaaggggaaggagggtgcgtaccatgatggaggtgaggatctcttg

SEQ ID NO: 45985 - DNA, 80 bp, synthetic construct
  source 1..80: mol_type = other DNA
ccccccaggttccagagtctcaacatacggagtctcatccatggaacactcctgaaagaagaacaaaaaaaatcaggatt

SEQ ID NO: 45986 - DNA, 80 bp, synthetic construct
  source 1..80: mol_type = other DNA
gtagggctcaggatcaggctcatgaggactatcaggaacaacacaggtgagagaaaaaagaatgatagtcaagttattaa

SEQ ID NO: 45987 - DNA, 80 bp, synthetic construct
  source 1..80: mol_type = other DNA
gcctggatatatcgctcctgactattgcttccaggggtgacaagaggtgagggcagaaccaggggccgggggcacaccca

SEQ ID NO: 45988 - DNA, 80 bp, synthetic construct; identical to SEQ ID NO: 12298
  source 1..80: mol_type = other DNA

SEQ ID NO: 45989 - DNA, 80 bp, synthetic construct
  source 1..80: mol_type = other DNA
ccagatccctcctttcagaaaaccccccaaactgaaccagtttctagattacctgtatccatgagctccgggacttcaac

SEQ ID NO: 45990 - DNA, 80 bp, synthetic construct
  source 1..80: mol_type = other DNA
gccaagggcaaggcaattagtccagggtcccaggcacagtcccccaacagttcctatataaaggaagactctgtctccac

SEQ ID NO: 45991 - DNA, 80 bp, synthetic construct
  source 1..80: mol_type = other DNA
actttttttttcttcttaattttgatgcctggaacaggggctgaattaagagcatccagaaagcccaggccctccatagc

SEQ ID NO: 45992 - DNA, 80 bp, synthetic construct; identical to SEQ ID NO: 12299
  source 1..80: mol_type = other DNA

SEQ ID NO: 45993 - DNA, 80 bp, synthetic construct
  source 1..80: mol_type = other DNA
aggaaaatggagggaaataataaaagagaagggaaaaaacttctcgttcccagggacattcattcccataagagtttgct

SEQ ID NO: 45994 - DNA, 80 bp, synthetic construct
  source 1..80: mol_type = other DNA
taaaaatacaaaaaattagccgggcgtggtggcgggcaccagtagtcccagctactcgggaggctgaggcaggagaatgg

SEQ ID NO: 45995 - DNA, 80 bp, synthetic construct
  source 1..80: mol_type = other DNA
gatcttcactttgatctctttggtggcattaggtgttgtgttgagtggcttgtatttcttctctgcagggggagtggcat

SEQ ID NO: 45996 - DNA, 80 bp, synthetic construct
  source 1..80: mol_type = other DNA
acctctgacgtttgagggggatgggtttaaggttgtacttgtcagaaaccaccactgtgctggcattcttcttcacaggc

SEQ ID NO: 45997 - DNA, 80 bp, synthetic construct; identical to SEQ ID NO: 12300
  source 1..80: mol_type = other DNA

SEQ ID NO: 45998 - DNA, 80 bp, synthetic construct
  source 1..80: mol_type = other DNA
tcaaaggtcgctcaggaagggtagttcgactttttccttcatctttacgtttcttcttatctttctctgttgtgaaaaaa

SEQ ID NO: 45999 - DNA, 80 bp, synthetic construct
  source 1..80: mol_type = other DNA
catccagtcgctgacaaggactgaggccaatttccggagctctgcaggtgacagaaaggggaaatgcctaaataatgtaa

SEQ ID NO: 46000 - DNA, 80 bp, synthetic construct
  source 1..80: mol_type = other DNA
cttaaaaaatggaacaatgaattagagttgtgttctacttggataactttcaactctgatgtcatcacaccactctggag

SEQ ID NO: 46001 - DNA, 80 bp, synthetic construct; identical to SEQ ID NO: 12301
  source 1..80: mol_type = other DNA

SEQ ID NO: 46002 - DNA, 80 bp, synthetic construct
  source 1..80: mol_type = other DNA
tatcatttagtaataggagtttcacagatgagacacgctaggatgatactatttcccacagcaaattttaagtgtatgtg

SEQ ID NO: 46003 - DNA, 80 bp, synthetic construct
  source 1..80: mol_type = other DNA
ctttctctttaaaagaaggaaaaaaagcaaggtgaggtagaaagagaaaagtgaagggacaatccaaggatgggaaaaga

SEQ ID NO: 46004 - DNA, 80 bp, synthetic construct
  source 1..80: mol_type = other DNA
gagagatgggagcagcagaaaggtaaatgccaggaggcaaataattccacttagagctaaaaacgacaaaagttacagtc

SEQ ID NO: 46005 - DNA, 80 bp, synthetic construct; identical to SEQ ID NO: 12302
  source 1..80: mol_type = other DNA

SEQ ID NO: 46006 - DNA, 80 bp, synthetic construct
  source 1..80: mol_type = other DNA
acaataacctccacctcctgggttcaagcgattctccagcctcagcctcctgattagctgggactacaggcgcatgccac

SEQ ID NO: 46007 - DNA, 80 bp, synthetic construct
  source 1..80: mol_type = other DNA
aaggagataaattcaaaccaagtcttcttcttctaaattcctattttttttctgctgttctacctcacaggcccaagatt

SEQ ID NO: 46008 - DNA, 80 bp, synthetic construct
  source 1..80: mol_type = other DNA
agggtcagtagaatttgctggaggaggggaatgttgttggttgtctttgaatacgtcagccaattgttaagaagtttgta

SEQ ID NO: 46009 - DNA, 80 bp, synthetic construct; identical to SEQ ID NO: 12303
  source 1..80: mol_type = other DNA

SEQ ID NO: 46010 - DNA, 80 bp, synthetic construct
  source 1..80: mol_type = other DNA
tgacttgggactttgctccagagaaggggagtcacatatacctctaggaagatgggatggatccagtgtgacatggaaac

SEQ ID NO: 46011 - DNA, 80 bp, synthetic construct
  source 1..80: mol_type = other DNA
cccctgaaaaacctgagaatccctgaaggaaaataacattatgggtaggtggaacacgaaccaaaacaatctagaattct

SEQ ID NO: 46012 - DNA, 80 bp, synthetic construct
  source 1..80: mol_type = other DNA
cctttcctttccaggatcattccagtgtgcctcaactgcagccatgttttaacacacaatattctctactcacagtgaat

SEQ ID NO: 46013 - DNA, 80 bp, synthetic construct; identical to SEQ ID NO: 12304
  source 1..80: mol_type = other DNA

SEQ ID NO: 46014 - DNA, 80 bp, synthetic construct
  source 1..80: mol_type = other DNA
gtccctccctcccagcagcatccttcctaggatggctgaacttcactagatcgtattaaagctaagatcagttcccataa

SEQ ID NO: 46015 - DNA, 80 bp, synthetic construct
  source 1..80: mol_type = other DNA
cttagcccattaagagtcataatcactacacatggcaagatatgtatcagctgaagtggtagatgatggagaacaaaaca

SEQ ID NO: 46016 - DNA, 80 bp, synthetic construct
  source 1..80: mol_type = other DNA
gccaaacactacacaagtttttactgtctctaagttaaaaggaagctagtggtttgtgctttcaaaagcaaagatgcgaa

SEQ ID NO: 46017 - DNA, 80 bp, synthetic construct; identical to SEQ ID NO: 12305
  source 1..80: mol_type = other DNA

SEQ ID NO: 46018 - DNA, 80 bp, synthetic construct
  source 1..80: mol_type = other DNA
cgcaggagtttgaaaccagccttggcaacatggcgaaacctcatctctacaaaacataagtcgagtgtgatggtgtgcac

SEQ ID NO: 46019 - DNA, 80 bp, synthetic construct
  source 1..80: mol_type = other DNA
aaaaagaaagccacttcagcaatatctgcctttgggcaataaggcccacactgagtagcaaggaagaggcaagaacaaaa

SEQ ID NO: 46020 - DNA, 80 bp, synthetic construct
  source 1..80: mol_type = other DNA
aaaacatagcataacaatctcagcctttttgtcctcccaacaaaaacgtcagtaagtttccaaatgtgtaggtcctaaca

SEQ ID NO: 46021 - DNA, 80 bp, synthetic construct; identical to SEQ ID NO: 12306
  source 1..80: mol_type = other DNA

SEQ ID NO: 46022 - DNA, 80 bp, synthetic construct
  source 1..80: mol_type = other DNA
agatatcacatctgttggagactggaaaagcaatgtatgggttccaataacaacatatcataagcaatcaagagactaag

SEQ ID NO: 46023 - DNA, 80 bp, synthetic construct
  source 1..80: mol_type = other DNA
ttgactgattcaaacccagagttgaatatatataaccctggagaattcctttttgcatatccaactacaagctaagccaa

SEQ ID NO: 46024 - DNA, 80 bp, synthetic construct
  source 1..80: mol_type = other DNA
gagtacaaagctaaattctgtccagtgccctctgctggaaatgggatccagggacttttttattcccacatgtataaaca

SEQ ID NO: 46025 - DNA, 80 bp, synthetic construct
  source 1..80: mol_type = other DNA
tccttcaggaagattagttcttatttaaaattaaggaccccaagtgtcttataacctagtttccttgctttgaagtcagt

SEQ ID NO: 46026 - DNA, 80 bp, synthetic construct; identical to SEQ ID NO: 12307
  source 1..80: mol_type = other DNA

SEQ ID NO: 46027 - DNA, 80 bp, synthetic construct
  source 1..80: mol_type = other DNA
tttaccagagataaacgtctgtgacaccaactcctgccttcaaaatgaattttacttgagggttattcaattaaataggg

SEQ ID NO: 46028 - DNA, 80 bp, synthetic construct
  source 1..80: mol_type = other DNA
aggcacttctggaaatgaaaatgatttgtacctaaccccttatgttccccttcctttcttcagtgttttaggcacttcct

SEQ ID NO: 46029 - DNA, 80 bp, synthetic construct
  source 1..80: mol_type = other DNA
cctacccctcagtcattttgcaaacctgatacatgagctcctcaaaagcttatctgccttccaataaagatgcaaaatga

SEQ ID NO: 46030 - DNA, 80 bp, synthetic construct
  source 1..80: mol_type = other DNA
tctcccatgttaaggaagatcttctttattaatcccctggctcactagagatcaggaaccccagtgggtagaatgttcag

SEQ ID NO: 46031 - DNA, 80 bp, synthetic construct; identical to SEQ ID NO: 12308
  source 1..80: mol_type = other DNA

SEQ ID NO: 46032 - DNA, 80 bp, synthetic construct
  source 1..80: mol_type = other DNA
gcaccaaatgccacagcactgcatgagttgaaaaatgaagaggacatcattttttcattaatgcttttaggaatttcttt

SEQ ID NO: 46033 - DNA, 80 bp, synthetic construct
  source 1..80: mol_type = other DNA
tcacttcttatcctagtaccaatgtacaggaactaatcaagtgcagaacgtgatacagcactgaatacagtttatcccca

SEQ ID NO: 46034 - DNA, 80 bp, synthetic construct
  source 1..80: mol_type = other DNA
ctcttgcaagcccttgtgtctttcccatctccctctacacacatatatacatacacacacgctcacacacatcctcaaag

SEQ ID NO: 46035 - DNA, 80 bp, synthetic construct; identical to SEQ ID NO: 12309
  source 1..80: mol_type = other DNA

SEQ ID NO: 46036 - DNA, 80 bp, synthetic construct
  source 1..80: mol_type = other DNA
ggacgccattttgtaatggagaaagaggacttaaactaaaaagccacccggctctgccggtagcttcagttacattataa

SEQ ID NO: 46037 - DNA, 80 bp, synthetic construct
  source 1..80: mol_type = other DNA
ggaggttcaaccggctaccatcgaccacccccatcctccctatagagggaaagggggaggaaggacttggacccctctca

SEQ ID NO: 46038 - DNA, 80 bp, synthetic construct
  source 1..80: mol_type = other DNA
ttgcactaaatggcttttaaaattatactcctaaattccacatttcccaacctttccaccctctatttaactgtacctcc

SEQ ID NO: 46039 - DNA, 80 bp, synthetic construct; identical to SEQ ID NO: 12310
  source 1..80: mol_type = other DNA

SEQ ID NO: 46040 - DNA, 80 bp, synthetic construct
  source 1..80: mol_type = other DNA
tgtgagctcattaacccttttgaagactgctgctaaccagaggaaggtaaccattcctccttatataaacacatatggct

SEQ ID NO: 46041 - DNA, 80 bp, synthetic construct
  source 1..80: mol_type = other DNA
ggagattaagtgaccagattggtccttctccagttctctatttgttctatggtctcatttcttcctctcattatttttgg

SEQ ID NO: 46042 - DNA, 80 bp, synthetic construct
  source 1..80: mol_type = other DNA
ggaggaaaaaaaataaaacaaccaaccaggacccaaaactcaattatttagggggcctcattggatcaaaaagtctttta

SEQ ID NO: 46043 - DNA, 80 bp, synthetic construct; identical to SEQ ID NO: 12311
  source 1..80: mol_type = other DNA

SEQ ID NO: 46044 - DNA, 80 bp, synthetic construct
  source 1..80: mol_type = other DNA
tctttctccgagaaaattcaaacctgggataaaaggaacacaagggagaaagatgtaatcagtacgggttgcttcaaaac

SEQ ID NO: 46045 - DNA, 80 bp, synthetic construct
  source 1..80: mol_type = other DNA
gctctccgcaaaattttacccactagacgacaaagtaggcaaacttacctctaaacgaaccccagaatggcggccgcccg

SEQ ID NO: 46046 - DNA, 80 bp, synthetic construct
  source 1..80: mol_type = other DNA
cccctttccctggcactctcttccgcctccttcctgcctccctgtcgcgtgcgcgtgaccaggagcctagcacctccctt

SEQ ID NO: 46047 - DNA, 80 bp, synthetic construct; identical to SEQ ID NO: 12312
  source 1..80: mol_type = other DNA

SEQ ID NO: 46048 - DNA, 80 bp, synthetic construct
  source 1..80: mol_type = other DNA
aggcggcttcctatgctatctctcttccgaggttctcacagagttcaggtaactcttcgaaagacattttgcacaacctc

SEQ ID NO: 46049 - DNA, 80 bp, synthetic construct
  source 1..80: mol_type = other DNA
taggtatcatcctttttccaaaatgccatttcagtaaaataacttaagtgatggaattgacccctgtccaccctcagtca

SEQ ID NO: 46050 - DNA, 80 bp, synthetic construct
  source 1..80: mol_type = other DNA
cttggggaaattagggatcccaatttctaccaaccttgctatttctcaataaggtcaggatatattcttacgacctgagg

SEQ ID NO: 46051 - DNA, 80 bp, synthetic construct; identical to SEQ ID NO: 12313
  source 1..80: mol_type = other DNA

SEQ ID NO: 46052 - DNA, 80 bp, synthetic construct
  source 1..80: mol_type = other DNA
acacatcttagttccaagaacctagatatccttcctcttactttattcttccaccagagtcaatttatttccaaaaagca

SEQ ID NO: 46053 - DNA, 80 bp, synthetic construct
  source 1..80: mol_type = other DNA
tacaggcgcatgccaccacgccgaactaatttttgtatttttagtagagataaggtttcaccatgttggccaggatggtc

SEQ ID NO: 46054 - DNA, 80 bp, synthetic construct
  source 1..80: mol_type = other DNA
tttttaggcatatatcccctaacttagcttttctttcaggatccaattgtagaaaaggagagtggttgttgatttatgtc

SEQ ID NO: 46055 - DNA, 80 bp, synthetic construct
  source 1..80: mol_type = other DNA
taaactcattcttttatttttttcttctcctttgtaggttcccctccagactctttgcaccaaagctccctctgaggaag

SEQ ID NO: 46056 - DNA, 80 bp, synthetic construct; identical to SEQ ID NO: 12314
  source 1..80: mol_type = other DNA

SEQ ID NO: 46057 - DNA, 80 bp, synthetic construct
  source 1..80: mol_type = other DNA
actgctgttttttttctctctacagcgtcggaataaagttgttgggaatccctgccccatctgtcgagatcacaagttgc

SEQ ID NO: 46058 - DNA, 80 bp, synthetic construct
  source 1..80: mol_type = other DNA
tgaaaccccgtctctactaaaaatacaaaaaattagccggttgtggtggcgggcgcctgtagtcccagctactcaggagg

SEQ ID NO: 46059 - DNA, 80 bp, synthetic construct
  source 1..80: mol_type = other DNA
tttgcagtgccaaagagattactgtaggtgccccacacttcgtatatccaggaggccctacagtccgttttatagtaact

SEQ ID NO: 46060 - DNA, 80 bp, synthetic construct
  source 1..80: mol_type = other DNA
ctggagtgcagtggcgtgatctcagctcactgcaacctccgccttctgggttcaagcgattctcccgcctcagcctccca

SEQ ID NO: 46061 - DNA, 80 bp, synthetic construct; identical to SEQ ID NO: 12315
  source 1..80: mol_type = other DNA

SEQ ID NO: 46062 - DNA, 80 bp, synthetic construct
  source 1..80: mol_type = other DNA
ttcaaaaagccttcaatatgtgagaaggacaggatttgctccttaaagaatttgaaaacatattggctgggtgcggcggc

SEQ ID NO: 46063 - DNA, 80 bp, synthetic construct
  source 1..80: mol_type = other DNA
ggaggctgaggcaggagaattgcttgaacccgggaggcggaggttgcagtgagctgagattgcaccactgcactccagcc

SEQ ID NO: 46064 - DNA, 80 bp, synthetic construct
  source 1..80: mol_type = other DNA
gaagctatatggctgatcatcagggaagtagtagagcatttggataacagtcagaaaatgggggtatttgactgcaataa

SEQ ID NO: 46065 - DNA, 80 bp, synthetic construct
  source 1..80: mol_type = other DNA
gagtttgagaccagcctggccaacaaggtgaaacgccgtctctactaaaaatacaaaaaaaattagctgggtgtgatggc

SEQ ID NO: 46066 - DNA, 80 bp, synthetic construct; identical to SEQ ID NO: 12316
  source 1..80: mol_type = other DNA

SEQ ID NO: 46067 - DNA, 80 bp, synthetic construct
  source 1..80: mol_type = other DNA
ttatacatacacattacaatatcattttttgggtgatttctgggatttccaatgaccagccccagtttttcacctaaagg

SEQ ID NO: 46068 - DNA, 80 bp, synthetic construct
  source 1..80: mol_type = other DNA
gatggtgaaaccgcatctctactaaagatacaaaataattagccaggtgtggtggcaggcgcctgtaaccccagctactc

SEQ ID NO: 46069 - DNA, 80 bp, synthetic construct
  source 1..80: mol_type = other DNA
aaaaaaaaaaaagaacttaacctctgcataagagatttctatgggagcacagtgacagaatatgggatgtgcaaggatgg

SEQ ID NO: 46070 - DNA, 80 bp, synthetic construct
  source 1..80: mol_type = other DNA
tcctgctgctctccctgcctcttttcctcacgtttctctaccactttcccccacagaacgtgaagctcttggagcaattt

SEQ ID NO: 46071 - DNA, 80 bp, synthetic construct; identical to SEQ ID NO: 12317
  source 1..80: mol_type = other DNA

SEQ ID NO: 46072 - DNA, 80 bp, synthetic construct
  source 1..80: mol_type = other DNA
gaacccaggaggcacaggttgtggtgagccaacattgcgccattgcactccagcctgggcatcaagtgaagctccatctc

SEQ ID NO: 46073 - DNA, 80 bp, synthetic construct
  source 1..80: mol_type = other DNA
gtcaattggattagattttccaaacttggaatcgtaaatttaacaattcagaattatatttattccctaactacagtcac

SEQ ID NO: 46074 - DNA, 80 bp, synthetic construct
  source 1..80: mol_type = other DNA
tatttactatatgactctagacagaaaaattttgctaacccctgctctgaagcaagacaaatttgcagagaataattttt

SEQ ID NO: 46075 - DNA, 80 bp, synthetic construct; identical to SEQ ID NO: 12318
  source 1..80: mol_type = other DNA

SEQ ID NO: 46076 - DNA, 80 bp, synthetic construct
  source 1..80: mol_type = other DNA
tccacctcctgggttcaagcagttctcctgcctcagcctcccaagtagctgggattacaggcacgtgccactgtgcctgg

SEQ ID NO: 46077 - DNA, 80 bp, synthetic construct
  source 1..80: mol_type = other DNA
tcaccattgttgggggtggcagtacaatcagtgttcagtttgtcaagagtttcttatagtcaagctgtaaaggctgaagg

SEQ ID NO: 46078 - DNA, 80 bp, synthetic construct
  source 1..80: mol_type = other DNA
caactcaaccctctaattaaccacacttgcccattaaattgtgttctccctgtcttggaggttttaccattaaatggctt

SEQ ID NO: 46079 - DNA, 80 bp, synthetic construct
  source 1..80: mol_type = other DNA
ttaggtaaagccaatccttcccaatctacccctctgtcaccatatggaagcagttgtgttctattatttactgtgcctta

SEQ ID NO: 46080 - DNA, 80 bp, synthetic construct; identical to SEQ ID NO: 12319
  source 1..80: mol_type = other DNA

SEQ ID NO: 46081 - DNA, 80 bp, synthetic construct
  source 1..80: mol_type = other DNA
caatgccttaggaagttctttatataaatgtctggccctggactacatggcactgctgcataagttagtaaaaagtatac

SEQ ID NO: 46082 - DNA, 80 bp, synthetic construct
  source 1..80: mol_type = other DNA
tatacaacatgcataaatgtacctggtggctctgactggtccttccctttataatcctttttcttacttcatctaaacca

SEQ ID NO: 46083 - DNA, 80 bp, synthetic construct
  source 1..80: mol_type = other DNA
ggtacccatggtacaactggaaacagccaccggagagagaactgtctcgccttcgccggctttaccagggtcatctccaa

SEQ ID NO: 46084 - DNA, 80 bp, synthetic construct; identical to SEQ ID NO: 12320
  source 1..80: mol_type = other DNA

SEQ ID NO: 46085 - DNA, 80 bp, synthetic construct
  source 1..80: mol_type = other DNA
caaaaaaaaaaaaaaagactgggaagagagctagagggactaggagataatgtgtatgtaggtttatgtgatgggatatc

SEQ ID NO: 46086 - DNA, 80 bp, synthetic construct
  source 1..80: mol_type = other DNA
cgtttcatacttctaccaactcagcttttacacaataaagctctactgtctctggtttgctttgggctgtttccgatgaa

SEQ ID NO: 46087 - DNA, 80 bp, synthetic construct
  source 1..80: mol_type = other DNA
gggcccccactccacagcatggcccactgttcactgaggggataaaaggttggacagtgagacactgggccaaggaagac

SEQ ID NO: 46088 - DNA, 80 bp, synthetic construct; identical to SEQ ID NO: 12321
  source 1..80: mol_type = other DNA

SEQ ID NO: 46089 - DNA, 80 bp, synthetic construct
  source 1..80: mol_type = other DNA
ggcccttttctcccggttcctctccaaacctggtccaggcaccacgcccccttctcactgactagtgatcgccccttttg

SEQ ID NO: 46090 - DNA, 80 bp, synthetic construct
  source 1..80: mol_type = other DNA
tggcctttctgcttcctcacaataaccttaagggaggagggagtgtgccaccttgaaaggtgtgacagaagtttgggttt

SEQ ID NO: 46091 - DNA, 80 bp, synthetic construct
  source 1..80: mol_type = other DNA
ctagtgttgatctacagcagcaaattatgaccattatagatgaactgggcaaggcttctgccaaggtactggagagtttt

SEQ ID NO: 46092 - DNA, 80 bp, synthetic construct; identical to SEQ ID NO: 12322
  source 1..80: mol_type = other DNA

SEQ ID NO: 46093 - DNA, 80 bp, synthetic construct
  source 1..80: mol_type = other DNA
ttcgtataccttggtttctgagaacaaaagtgctggaggttagggggcagcagagatgccggggttcctaaaacattttt

SEQ ID NO: 46094 - DNA, 80 bp, synthetic construct
  source 1..80: mol_type = other DNA
aactaggggctcctttgccctgagcccttccagaagccctgcctcccaccccccatgttcccatgtcattctattccctt

SEQ ID NO: 46095 - DNA, 80 bp, synthetic construct
  source 1..80: mol_type = other DNA
accacagtcccacaggttagaggtttcagagaatagatccccactgagcattcccattgaatttatttgttatttatggc

SEQ ID NO: 46096 - DNA, 80 bp, synthetic construct
  source 1..80: mol_type = other DNA
gtacagtggcgcaatctcagctcactgcaacctccacttcctggtttcaagcgattctcctgcttcagcctcctgagtag

SEQ ID NO: 46097 - DNA, 80 bp, synthetic construct; identical to SEQ ID NO: 12323
  source 1..80: mol_type = other DNA

SEQ ID NO: 46098 - DNA, 80 bp, synthetic construct
  source 1..80: mol_type = other DNA
agatccacctgcctcagcctcccaaagtgctgggattataggcgtgagccactgtacccagacttattttgattctttac

SEQ ID NO: 46099 - DNA, 80 bp, synthetic construct
  source 1..80: mol_type = other DNA
agggattacaggcatgcaccatcatgcccagctaatttttgtatttttagtagagatggagtttcaccatgttggacaga

SEQ ID NO: 46100 - DNA, 80 bp, synthetic construct
  source 1..80: mol_type = other DNA
ctcactgcaagctccgcctcccaggttcacggcattctcctgcctcagcctcccgagtagctgggactacaggtgcccac

SEQ ID NO: 46101 - DNA, 80 bp, synthetic construct; identical to SEQ ID NO: 12324
  source 1..80: mol_type = other DNA

SEQ ID NO: 46102 - DNA, 80 bp, synthetic construct
  source 1..80: mol_type = other DNA
ataaacattgagtgcctggcagtgttctgggcactaggaatggtttactcaatgaaacagacaacagcctgggcaacata

SEQ ID NO: 46103 - DNA, 80 bp, synthetic construct
  source 1..80: mol_type = other DNA
gggcaacagagagagaccctgtctccaaaaatgaaaacaaaaacagaaaaaaaggccaggtgcggtgcggtggcccatgc

SEQ ID NO: 46104 - DNA, 80 bp, synthetic construct
  source 1..80: mol_type = other DNA
tgaggcaggagaatcacttgaacccgggaggcagaggttgcagtgaaccaagattgcaccactgcactccagcctgagcg

SEQ ID NO: 46105 - DNA, 80 bp, synthetic construct
  source 1..80: mol_type = other DNA
aaaaatataaaaattaactgggcatgatggcgtgcgcctgtaatcccagctactcgggaggctgaggcaggagaattgct

SEQ ID NO: 46106 - DNA, 80 bp, synthetic construct; identical to SEQ ID NO: 12325
  source 1..80: mol_type = other DNA

SEQ ID NO: 46107 - DNA, 80 bp, synthetic construct
  source 1..80: mol_type = other DNA
cgcggatcacgaggtcaggagatctagaccatcctggctaacatggtgaaaccctgtctccactaaaaaaaatacaaaaa

SEQ ID NO: 46108 - DNA, 80 bp, synthetic construct
  source 1..80: mol_type = other DNA
aggctgggcgtggtgacttacatctgcaatcctagtacttagggaggccgaggtgggtggatcacttgagcccaggagtt

SEQ ID NO: 46109 - DNA, 80 bp, synthetic construct
  source 1..80: mol_type = other DNA
accactgcactgcagcctgggtaacaacgtgagactgtctcaaaacaaacaaacaaaaaaaaagagtaagagccaagaaa

SEQ ID NO: 46110 - DNA, 80 bp, synthetic construct; identical to SEQ ID NO: 12326
  source 1..80: mol_type = other DNA

SEQ ID NO: 46111 - DNA, 80 bp, synthetic construct
  source 1..80: mol_type = other DNA
agaatcactagaaccgggaggcggaggttgcagtgagccgctgaaattgtaccactgcactcctgcctgggcgacagagc

SEQ ID NO: 46112 - DNA, 80 bp, synthetic construct
  source 1..80: mol_type = other DNA
acaaaaattagccgggtgtggtggcgggcacctgtagccccagctacttgggaggctgagatagaagaatcgcttgaacc

SEQ ID NO: 46113 - DNA, 80 bp, synthetic construct
  source 1..80: mol_type = other DNA
agccgggcacagtggctcacacctgtaatcctagcactttgggaggccgaggcaggtggattgcctgaggacttcaagac

SEQ ID NO: 46114 - DNA, 80 bp, synthetic construct; identical to SEQ ID NO: 12327
  source 1..80: mol_type = other DNA

SEQ ID NO: 46115 - DNA, 80 bp, synthetic construct
  source 1..80: mol_type = other DNA
aaggtaaagcaagtaagatttcctgacagattgtatgtggagaaagaggactttaggacaatgccaaagcctgagcagct

SEQ ID NO: 46116 - DNA, 80 bp, synthetic construct
  source 1..80: mol_type = other DNA
ggagagttttcagcatacatctggtatctaaagccaacagacaggatgcgatcaccatagaaagattatagatagagaag

SEQ ID NO: 46117 - DNA, 80 bp, synthetic construct
  source 1..80: mol_type = other DNA
ctctgctgcctcagagtctggcagcttaatcgacatagtccccaaactctcactttcttcttaatcccttgcatcggatc

SEQ ID NO: 46118 - DNA, 80 bp, synthetic construct
  source 1..80: mol_type = other DNA
aggtagatgaagaagaggaacagggtggggagaaagaggagaaggaagaggaaggtgatggtgaagaaaagaacggagat

SEQ ID NO: 46119 - DNA, 80 bp, synthetic construct; identical to SEQ ID NO: 12328
  source 1..80: mol_type = other DNA

SEQ ID NO: 46120 - DNA, 80 bp, synthetic construct
  source 1..80: mol_type = other DNA
ggcactcaccaccacccaacccaaaccagagaatttgcaacagaggaggaaaaaagaaccaaaacttccaaggtcttgct

SEQ ID NO: 46121 - DNA, 80 bp, synthetic construct
  source 1..80: mol_type = other DNA
cacctcctgggttcaagtgattctcctgcctcagcctcctgagtagctgggattacaggcgcccgccaccacacccagct

SEQ ID NO: 46122 - DNA, 80 bp, synthetic construct
  source 1..80: mol_type = other DNA
gatgaccaagccagcctttggagggttctctgtcttacttctgactttacttgtggtgtgaccatattcattataatctc

SEQ ID NO: 46123 - DNA, 80 bp, synthetic construct
  source 1..80: mol_type = other DNA
cagaagatcgagaccatcctggctaacatggtgaaaccccctgtctactaaaaatacaaaaaattagccaggcgtggtgg

SEQ ID NO: 46124 - DNA, 80 bp, synthetic construct; identical to SEQ ID NO: 12329
  source 1..80: mol_type = other DNA

SEQ ID NO: 46125 - DNA, 80 bp, synthetic construct
  source 1..80: mol_type = other DNA
attttgctgagttgttctaacagcaacaaaaagaagttaaggaagagaagaagaccagcaaatgcaaccacagagtgact

SEQ ID NO: 46126 - DNA, 80 bp, synthetic construct
  source 1..80: mol_type = other DNA
gctcatgcctgtaatcccagctacttgggaggctgaggcaggacaatcacttgaatctgggaggtggaggttgcagtaag

SEQ ID NO: 46127 - DNA, 80 bp, synthetic construct
  source 1..80: mol_type = other DNA
atcaaggagcaaagaggtctgagaagttaccattggatttatctgcgttaggccattggtgatcttaatgagcagttttg

SEQ ID NO: 46128 - DNA, 80 bp, synthetic construct; identical to SEQ ID NO: 12330
  source 1..80: mol_type = other DNA

SEQ ID NO: 46129 - DNA, 80 bp, synthetic construct
  source 1..80: mol_type = other DNA
ataaggacatggatttgagtgctatcttgggctgggggttgggtaaagaaagatgacatgtctaatcttgaaaggcaagt

SEQ ID NO: 46130 - DNA, 80 bp, synthetic construct
  source 1..80: mol_type = other DNA
agatcgagaccatcctggctaacacggtaaaaccccgtctctactaaaaatacaaaaaaaattagctgggcgtggtggca

SEQ ID NO: 46131 - DNA, 80 bp, synthetic construct
  source 1..80: mol_type = other DNA
ccacctttcaggacactacaagcagtgtggtgtggttggagtgctgggcatgtgcttgttggggggtgggggtgatgagg

SEQ ID NO: 46132 - DNA, 80 bp, synthetic construct
  source 1..80: mol_type = other DNA
ggctggagtgcagtggcacaatctcagctcactggaacctctgcctcctgagtccaagcaattctcttgcctcagcctcc

SEQ ID NO: 46133 - DNA, 80 bp, synthetic construct; identical to SEQ ID NO: 12331
  source 1..80: mol_type = other DNA

SEQ ID NO: 46134 - DNA, 80 bp, synthetic construct
  source 1..80: mol_type = other DNA
ttaaccaaattcacacagccagtaaatagtagagtccacatttgaacccatagccatttgcacccagtgaactttttttt

SEQ ID NO: 46135 - DNA, 80 bp, synthetic construct
  source 1..80: mol_type = other DNA
aacatggcgaaaccccatctctattaaaaatacaaaaataagccgggcgtggtggcatgtgcctgtaatcccagctactc

SEQ ID NO: 46136 - DNA, 80 bp, synthetic construct
  source 1..80: mol_type = other DNA
ggaaggccaaggcgggcggatcacgaggtcaagagatcaagaccatcctggccaacatggtgaaaccctgtctctactga

SEQ ID NO: 46137 - DNA, 80 bp, synthetic construct
  source 1..80: mol_type = other DNA
aaaaagatcttcccacctcaacctcccaagtagttgggactacaggcgcccaccactatggctggctgattttttgtatt

SEQ ID NO: 46138 - DNA, 80 bp, synthetic construct; identical to SEQ ID NO: 12332
  source 1..80: mol_type = other DNA

SEQ ID NO: 46139 - DNA, 80 bp, synthetic construct
  source 1..80: mol_type = other DNA
ctgagtagctaggattacaggcgcacgtcaccacacccagctaatttttgtatttttagtagagacagggtctcgaactc

SEQ ID NO: 46140 - DNA, 80 bp, synthetic construct
  source 1..80: mol_type = other DNA
ctctcctcttgagtaaactcttaatggctacactattttcctggctaaaacactgcagctggaatcagaagtctgaaagt

SEQ ID NO: 46141 - DNA, 80 bp, synthetic construct
  source 1..80: mol_type = other DNA
ttactagttatcaaagtagcatcctggcctccagcatgtcttcccctgactttccccaccccttggaaccctgctgaatt

SEQ ID NO: 46142 - DNA, 80 bp, synthetic construct
  source 1..80: mol_type = other DNA
atgcctggctaattttttgtatttataatagacacagggtttcaccatcttggccagaccggtcttgaactcctgacctc

SEQ ID NO: 46143 - DNA, 80 bp, synthetic construct; identical to SEQ ID NO: 12333
  source 1..80: mol_type = other DNA

SEQ ID NO: 46144 - DNA, 80 bp, synthetic construct
  source 1..80: mol_type = other DNA
acaggcgcccgccaccacatccggctaatttttttgtatttttagtagagatggggtttcaccatgttagccaggatggt

SEQ ID NO: 46145 - DNA, 80 bp, synthetic construct
  source 1..80: mol_type = other DNA
gagcatggtggctcacgtctataatcccaggacttttggaggctgaggcagaaggatcacatgagccctggagtttgaga

SEQ ID NO: 46146 - DNA, 80 bp, synthetic construct
  source 1..80: mol_type = other DNA
ccactgcactccagcctaggcaacagagcgagactctgcctctcaaaaaaaaaaaaaaattgcctacagcattcagtaca

SEQ ID NO: 46147 - DNA, 80 bp, synthetic construct; identical to SEQ ID NO: 12334
  source 1..80: mol_type = other DNA

SEQ ID NO: 46148 - DNA, 80 bp, synthetic construct
  source 1..80: mol_type = other DNA
gctgctgcagtcgatcccacgcccgctggtaaagcctgtattgaaggggtggaactgtagtgcagtgatggctacttact

SEQ ID NO: 46149 - DNA, 80 bp, synthetic construct
  source 1..80: mol_type = other DNA
tttggcaagacttttaactaagcaagctcattgggagcctgtttgacagctgatatcaatggaccctcttgccagttcag

SEQ ID NO: 46150 - DNA, 80 bp, synthetic construct
  source 1..80: mol_type = other DNA
agtttataacatttccaaccagataatgaaattgatatggagaaaccaaacctcagaggcactaaaatgctgtccagatt

SEQ ID NO: 46151 - DNA, 80 bp, synthetic construct; identical to SEQ ID NO: 12335
  source 1..80: mol_type = other DNA

SEQ ID NO: 46152 - DNA, 80 bp, synthetic construct
  source 1..80: mol_type = other DNA
ggtgctgtggataaagcttaagtgaatttgctgagaagtctttcatttgccacacatacatgatggagaatctcttgaga

SEQ ID NO: 46153 - DNA, 80 bp, synthetic construct
  source 1..80: mol_type = other DNA
ttttaacctaataaaacttcagtctcttcccattttcgtataggaaggagagattgtgccctccttccaaacctcccctg

SEQ ID NO: 46154 - DNA, 80 bp, synthetic construct
  source 1..80: mol_type = other DNA
ccttctcctgcatctcccaggcccccagagtctccccttcgatctttctccctagctctgtgtttggcctactccttctg

SEQ ID NO: 46155 - DNA, 80 bp, synthetic construct
  source 1..80: mol_type = other DNA
gttggggtatagtggctgggaggaggggtgcaaagtatgtctcctaacgcttaccctgcctatgtcccctccactgccag

SEQ ID NO: 46156 - DNA, 80 bp, synthetic construct; identical to SEQ ID NO: 12336
  source 1..80: mol_type = other DNA

SEQ ID NO: 46157 - DNA, 80 bp, synthetic construct
  source 1..80: mol_type = other DNA
gggaggctgaggcaggagaatggcttgaacccaggaggcggaagttgcagtgagccaagatcgtgccactgcactccagc

SEQ ID NO: 46158 - DNA, 80 bp, synthetic construct
  source 1..80: mol_type = other DNA
gtagctgtggagcctccttggcccctaaacagggcccctcgccgcgccacacctccagcccacccacccccccgctccag

SEQ ID NO: 46159 - DNA, 80 bp, synthetic construct
  source 1..80: mol_type = other DNA
taggagttgaagggctaaggagcctcacagctataaaagaggatgttagaaatggcaaagggcaatttgaatccatcaga

SEQ ID NO: 46160 - DNA, 80 bp, synthetic construct; identical to SEQ ID NO: 12337
  source 1..80: mol_type = other DNA

SEQ ID NO: 46161 - DNA, 80 bp, synthetic construct
  source 1..80: mol_type = other DNA
tcccttcctcccatccataacatccttccacagctcccttccccgctctgaggagagtcgatactaacagctaccctctc

SEQ ID NO: 46162 - DNA, 80 bp, synthetic construct
  source 1..80: mol_type = other DNA
taacactttgtagcttttcttaacacaaaagcaccccttctctcctaacttgggctctgaatactttcccaacaggaagt

SEQ ID NO: 46163 - DNA, 80 bp, synthetic construct
  source 1..80: mol_type = other DNA
aactttttaaggaattttatctatgggataaaccccatattccctctagtgtctactggtggctctaatactgctttgtg

SEQ ID NO: 46164 - DNA, 80 bp, synthetic construct; identical to SEQ ID NO: 12338
  source 1..80: mol_type = other DNA

SEQ ID NO: 46165 - DNA, 80 bp, synthetic construct
  source 1..80: mol_type = other DNA
cctctctcctttcctccatagcaaggacgaccttccctgctccatgcccagagtatagctagatcccttcccctccctac

SEQ ID NO: 46166 - DNA, 80 bp, synthetic construct
  source 1..80: mol_type = other DNA
aaaaaaagaatcacaaaaaaaaaagttgtcagcctcatttgtgcgtcatcccttattttcctgggatctcaggacctctg

SEQ ID NO: 46167 - DNA, 80 bp, synthetic construct
  source 1..80: mol_type = other DNA
tatctactccctcattccctccaggaacctccagctctccccagtgacttctaccctttactctgggcgtgcctttgcca

SEQ ID NO: 46168 - DNA, 80 bp, synthetic construct; identical to SEQ ID NO: 12339
  source 1..80: mol_type = other DNA

SEQ ID NO: 46169 - DNA, 80 bp, synthetic construct
  source 1..80: mol_type = other DNA
ctcccaagtagctgggattacagaagtgcaccaccgtgcccagctagtttgtgtatttttagtagagacagggtttcacc

SEQ ID NO: 46170 - DNA, 80 bp, synthetic construct
  source 1..80: mol_type = other DNA
aaggtaaccctgttttccaaaccaaacaccagagtacccgatccaacacatttttgaccacatgtgagtctgttcttctg

SEQ ID NO: 46171 - DNA, 80 bp, synthetic construct
  source 1..80: mol_type = other DNA
ttctggggcacagctttgattaaaacctgttaggaatgataattacccccttctctttgttcctgtgctattccttttac

SEQ ID NO: 46172 - DNA, 80 bp, synthetic construct
  source 1..80: mol_type = other DNA
taagtattcactcctccctaccctcaaatcaagtaggccacattcactgtctactcctgccttcccattcacatgcctga

SEQ ID NO: 46173 - DNA, 80 bp, synthetic construct; identical to SEQ ID NO: 12340
  source 1..80: mol_type = other DNA

SEQ ID NO: 46174 - DNA, 80 bp, synthetic construct
  source 1..80: mol_type = other DNA
taatttcctctttagtattcctataacccactctccatctccccacctaccaggtctgccagtgaggagcaggccttgtc

SEQ ID NO: 46175 - DNA, 80 bp, synthetic construct
  source 1..80: mol_type = other DNA
caaacatcttcaaagtattatttctccctcactacaggaaagagccaaagcccaaccctcataatagatggatacattca

SEQ ID NO: 46176 - DNA, 80 bp, synthetic construct
  source 1..80: mol_type = other DNA
ccctgtttttgctcagctttttgctcaaaggcctcagctgtgaatacagcgcttgggggggcgggggaggctgtaacttg

SEQ ID NO: 46177 - DNA, 80 bp, synthetic construct; identical to SEQ ID NO: 12341
  source 1..80: mol_type = other DNA

SEQ ID NO: 46178 - DNA, 80 bp, synthetic construct
  source 1..80: mol_type = other DNA
gagcgcgcgctgggttccgcgcaggcgcagagacacccgccgccccttcccacctgtgccctgcagcgcgtggacaggct

SEQ ID NO: 46179 - DNA, 80 bp, synthetic construct
  source 1..80: mol_type = other DNA
aagggcaggggccgagagattcgtagccctgctgcggcgccgtcccggagttccccggcccagaccagacccgcggggcg

SEQ ID NO: 46180 - DNA, 80 bp, synthetic construct
  source 1..80: mol_type = other DNA
cggtccgcccgccttccctgcagtgagacgatcccctggggggttccttgggagcggagggactcgggtgaggcctaact

SEQ ID NO: 46181 - DNA, 80 bp, synthetic construct; identical to SEQ ID NO: 12342
  source 1..80: mol_type = other DNA

SEQ ID NO: 46182 - DNA, 80 bp, synthetic construct
  source 1..80: mol_type = other DNA
atttaatccacagtacaataaaacctgttattcgttaactcatcaagtatgtattacatgattcttgcgataagagaggt

SEQ ID NO: 46183 - DNA, 80 bp, synthetic construct
  source 1..80: mol_type = other DNA
ctacaggctcccgccaccacacccggctaattgttttgtatctttagtagagatggggtgtcaccatattggccaggctg

SEQ ID NO: 46184 - DNA, 80 bp, synthetic construct
  source 1..80: mol_type = other DNA
gtgggcggattacctgaggtcaggagttcgagaacagcctggccaacatggtgaaaccccatctgtaactaaaaatacaa

SEQ ID NO: 46185 - DNA, 80 bp, synthetic construct; identical to SEQ ID NO: 12343
  source 1..80: mol_type = other DNA

SEQ ID NO: 46186 - DNA, 80 bp, synthetic construct
  source 1..80: mol_type = other DNA
aggaggctgaggcaggaaaatcacttgaacccgggaggcggaggttgcagtgagctgagatcgtgctactgcactccagc

SEQ ID NO: 46187 - DNA, 80 bp, synthetic construct
  source 1..80: mol_type = other DNA
gggatcaaggggtgttagacaagtggattcttatctttctcccttctgttctttctccttaggaccagctttatccaggg

SEQ ID NO: 46188 - DNA, 80 bp, synthetic construct
  source 1..80: mol_type = other DNA
tggttctccctccaggaaagggggaggagggaccaggacctgagttgcatagcggctgcctggatgggcttagaagcctt

SEQ ID NO: 46189 - DNA, 80 bp, synthetic construct; identical to SEQ ID NO: 12344
  source 1..80: mol_type = other DNA

SEQ ID NO: 46190 - DNA, 80 bp, synthetic construct
  source 1..80: mol_type = other DNA
aaaccccatctctactaaaaacacaaaaatcagccaggcatggtggcagacgcctataatcccagctactcaggaggctg

SEQ ID NO: 46191 - DNA, 80 bp, synthetic construct
  source 1..80: mol_type = other DNA
tctttcactccaagatgggagtaaggaggccttaaaaatagaaaactgggcctggcacatggctcacgcttataatccta

SEQ ID NO: 46192 - DNA, 80 bp, synthetic construct
  source 1..80: mol_type = other DNA
tcgcttgaacctgggaggcggaggttgcagtgagccgagattgtacctctgcactccagcctgggcgacagagctagact

SEQ ID NO: 46193 - DNA, 80 bp, synthetic construct; identical to SEQ ID NO: 12345
  source 1..80: mol_type = other DNA

SEQ ID NO: 46194 - DNA, 80 bp, synthetic construct
  source 1..80: mol_type = other DNA
gcttctcacagctgttccccattccttagaagccagtttggttttctaattctgccatcatgagatttctttcccatccc

SEQ ID NO: 46195 - DNA, 80 bp, synthetic construct
  source 1..80: mol_type = other DNA
ccacttgctctttttgcggttctacaagcgtgacaaagacgagcattaccggtaagagagaaatgagaaaggacccaaac

SEQ ID NO: 46196 - DNA, 80 bp, synthetic construct
  source 1..80: mol_type = other DNA
ccagcctcagcctcctgggtagctggaattacaggcacaccatcacacccggctaatttttgtatttttagtagacagag

SEQ ID NO: 46197 - DNA, 80 bp, synthetic construct; identical to SEQ ID NO: 12346
  source 1..80: mol_type = other DNA

SEQ ID NO: 46198 - DNA, 80 bp, synthetic construct
  source 1..80: mol_type = other DNA
gcctggccaacatggtaaaacccaaaaaaatacaaaaattagcccagtgtggtggtacacacctgtagttccagctactt

SEQ ID NO: 46199 - DNA, 80 bp, synthetic construct
  source 1..80: mol_type = other DNA
aaatgaaaagtcctgtctcatatgttgagccttacaacctggtaaatttccgcctgggagtagaatcccaataaattgtt

SEQ ID NO: 46200 - DNA, 80 bp, synthetic construct
  source 1..80: mol_type = other DNA
caggtgatctaatatgtagcagaatttagggactactcgtttaaacaaatgcttgaattcagctttgggaccagtcacct

SEQ ID NO: 46201 - DNA, 80 bp, synthetic construct; identical to SEQ ID NO: 12347
  source 1..80: mol_type = other DNA

SEQ ID NO: 46202 - DNA, 80 bp, synthetic construct
  source 1..80: mol_type = other DNA
tctctccttccttcctttccatctcatgctgtgtaaagctgctgtgtaatttaacttgtaaataataaagtttaactgac

SEQ ID NO: 46203 - DNA, 80 bp, synthetic construct
  source 1..80: mol_type = other DNA
tgtcaggttctgtttacgtccttctcttaccctagctcttctcgtgttttgcctatttttttgggcattttcttagcatg

SEQ ID NO: 46204 - DNA, 80 bp, synthetic construct
  source 1..80: mol_type = other DNA
agagtcttgctctattgcccaggctggactgcagtggcgtatcatggctcaaagcagtcctactgcctcagcctcccaag

SEQ ID NO: 46205 - DNA, 80 bp, synthetic construct; identical to SEQ ID NO: 12348
  source 1..80: mol_type = other DNA

SEQ ID NO: 46206 - DNA, 80 bp, synthetic construct
  source 1..80: mol_type = other DNA
atggtgaaacccagtctctactaaaaatataaaattagctgggcgtggtggtgggcacctgtaatcccagctacactgga

SEQ ID NO: 46207 - DNA, 80 bp, synthetic construct
  source 1..80: mol_type = other DNA
tcattatagccccagcacctatacagtagccattcaaatatttattgaataagtgtctagttctcagatcttggaagatg

SEQ ID NO: 46208 - DNA, 80 bp, synthetic construct
  source 1..80: mol_type = other DNA
ggcttgcgcctgtaatctcagctacttgggaggctgaggcatgagaatctcttgaaccccagaggcagaggttgcagtga

SEQ ID NO: 46209 - DNA, 80 bp, synthetic construct; identical to SEQ ID NO: 12349
  source 1..80: mol_type = other DNA

SEQ ID NO: 46210 - DNA, 80 bp, synthetic construct
  source 1..80: mol_type = other DNA
aaagaaaatcaatggaaaaggcagacatctggggaccctaagaatgcactacctttttagttcaggcttcaggaaaacta

SEQ ID NO: 46211 - DNA, 80 bp, synthetic construct
  source 1..80: mol_type = other DNA
tactgggggtggaaagcaggaggctgaagaaatgctgaccttgcgtacacggatatagtccccctggcaggaactgagac

SEQ ID NO: 46212 - DNA, 80 bp, synthetic construct
  source 1..80: mol_type = other DNA
atacagcaggactaaagtcccccagtgtctctcattcccactcacccaagcccagtgacctgtgtgtaaacatttagcag

SEQ ID NO: 46213 - DNA, 80 bp, synthetic construct; identical to SEQ ID NO: 12350
  source 1..80: mol_type = other DNA

SEQ ID NO: 46214 - DNA, 80 bp, synthetic construct
  source 1..80: mol_type = other DNA
tctgcagaaagtgtgcattcactatgtgcatttggaaaagatctctgacagcagaggaatggcatttaaaggtcatccct

SEQ ID NO: 46215 - DNA, 80 bp, synthetic construct
  source 1..80: mol_type = other DNA
gggcaatcagagttatctaatactttattatgtgttaagggatagtatgatgaacagaaaaagacagacaaaggggaccc

SEQ ID NO: 46216 - DNA, 80 bp, synthetic construct
  source 1..80: mol_type = other DNA
gtcctccctcaggtttcccgctactactacaggggtccctggagccatcctgacccctatcatcctgcctccacccatgc

SEQ ID NO: 46217 - DNA, 80 bp, synthetic construct; identical to SEQ ID NO: 12351
  source 1..80: mol_type = other DNA

SEQ ID NO: 46218 - DNA, 80 bp, synthetic construct
  source 1..80: mol_type = other DNA
acaggctggctgacaatttggtcagggaaaagaaaaaggcagtatttatgcaagaaatctggaaggatgcaaactgctca

SEQ ID NO: 46219 - DNA, 80 bp, synthetic construct
  source 1..80: mol_type = other DNA
cagaaccctggatccagcacataaatgatgccctcaatggtgagtgatgtctcagcaatgttcgttgccacaaccacctg

SEQ ID NO: 46220 - DNA, 80 bp, synthetic construct
  source 1..80: mol_type = other DNA
ggggacagggaagtgggggctgggagtcagcagggccataggaggaaaggaaatggagaagaggatttagggtttttttt

SEQ ID NO: 46221 - DNA, 80 bp, synthetic construct; identical to SEQ ID NO: 12352
  source 1..80: mol_type = other DNA

SEQ ID NO: 46222 - DNA, 80 bp, synthetic construct
  source 1..80: mol_type = other DNA
ttgctctgcccaagtaagtgcactcctcactggatcatttgcatcagctattccctctgtctggcatactcttctcccag

SEQ ID NO: 46223 - DNA, 80 bp, synthetic construct
  source 1..80: mol_type = other DNA
cagagtcaagttccatcctactatgctgccttgtatctcttcatagcactggccacaaattgacaatatgtatttatgca

SEQ ID NO: 46224 - DNA, 80 bp, synthetic construct
  source 1..80: mol_type = other DNA
gttgaatgaaagttatatctctgctcaaaatcctttgactgctactcagctgtctaaagtccaaacttcgccaagcacag

SEQ ID NO: 46225 - DNA, 80 bp, synthetic construct
  source 1..80: mol_type = other DNA
actttgggaggccaaggtgggcagatcacctgaggtcaggagtttgagaccaacctggccaaaatagcgaaacctcatct

SEQ ID NO: 46226 - DNA, 80 bp, synthetic construct; identical to SEQ ID NO: 12353
  source 1..80: mol_type = other DNA

SEQ ID NO: 46227 - DNA, 80 bp, synthetic construct
  source 1..80: mol_type = other DNA
aaattgtttttagccttgtctcctactccttcaccacatgaacctcccactaagcctactagctcacactctgacctcaa

SEQ ID NO: 46228 - DNA, 80 bp, synthetic construct
  source 1..80: mol_type = other DNA
aggtgggattataggcgcacgccaccatgccctgctgatttttgtattttcagtggaggcagggtttcaccacgttaggc

SEQ ID NO: 46229 - DNA, 80 bp, synthetic construct
  source 1..80: mol_type = other DNA
tgaatctactgtgcatactttccagatcacatatttggctctctcttggttcacaccatatttctcctctcttcagtccc

SEQ ID NO: 46230 - DNA, 80 bp, synthetic construct; identical to SEQ ID NO: 12354
  source 1..80: mol_type = other DNA

SEQ ID NO: 46231 - DNA, 80 bp, synthetic construct
  source 1..80: mol_type = other DNA
ctgtcctgtcaggaacaccaggatatccccagggggctgggtcacatggatctgcaacacagatactacacaagcttcca

SEQ ID NO: 46232 - DNA, 80 bp, synthetic construct
  source 1..80: mol_type = other DNA
aaccttccattccatctttccctccacaggataaccttctccaaaggcctcagcttttctgccacagacttaagcccatc

SEQ ID NO: 46233 - DNA, 80 bp, synthetic construct
  source 1..80: mol_type = other DNA
cttgatcaatccaaagagaatgtctgtgtgtagggtcctttcgtgtgcctcatccaccatcaccacgctggggagggaat

SEQ ID NO: 46234 - DNA, 80 bp, synthetic construct; identical to SEQ ID NO: 12355
  source 1..80: mol_type = other DNA

SEQ ID NO: 46235 - DNA, 80 bp, synthetic construct
  source 1..80: mol_type = other DNA
ggatcacaaggtcaggagttcgagaccagtctggccaatacagtgaaaccccgtctcttctaaaaatacaaaaaaaatta

SEQ ID NO: 46236 - DNA, 80 bp, synthetic construct
  source 1..80: mol_type = other DNA
aaaaagtggaaggattttttttttgagacagtcttgctctgttgcaggctggagtgtagtggcatgatctcagctcactg

SEQ ID NO: 46237 - DNA, 80 bp, synthetic construct
  source 1..80: mol_type = other DNA
ggcacgatctcggctcaccgcaagctccgcctcctgggttgcgttcacgccattctcctgcctcagcctcctgagtagct

SEQ ID NO: 46238 - DNA, 80 bp, synthetic construct; identical to SEQ ID NO: 12356
  source 1..80: mol_type = other DNA

SEQ ID NO: 46239 - DNA, 80 bp, synthetic construct
  source 1..80: mol_type = other DNA
tggtttcctcctaactcagttatgtgcatgacaccttctttctctttgttctttggcttttctgggtggcagccaagtcc

SEQ ID NO: 46240 - DNA, 80 bp, synthetic construct
  source 1..80: mol_type = other DNA
tgggttcttagagatcttttgcaagggatatgaaggataaaatcctatctgtccaattgctccactgtgatcttccaaga

SEQ ID NO: 46241 - DNA, 80 bp, synthetic construct
  source 1..80: mol_type = other DNA
ttggccatttccagcactaagagctcattattcacagaccaagctacccaagacttgtgtggagggccaagacccagagt

SEQ ID NO: 46242 - DNA, 80 bp, synthetic construct; identical to SEQ ID NO: 12357
  source 1..80: mol_type = other DNA

SEQ ID NO: 46243 - DNA, 80 bp, synthetic construct
  source 1..80: mol_type = other DNA
cgtggtacctggaggtcagttcaaggaccatttgaaccacaaagattcaagaacgggtggattaatcagaagacaatggc

SEQ ID NO: 46244 - DNA, 80 bp, synthetic construct
  source 1..80: mol_type = other DNA
agccaacctggtcaagggaaccattagcaaccaagtgtgggctggtgtgccctgaaaggaacttggggaaaggtgaagtg

SEQ ID NO: 46245 - DNA, 80 bp, synthetic construct
  source 1..80: mol_type = other DNA
tccggggttgggtgcaggcaatcttcatacccttgtttgtataaccctgaatgacaaagaaaaaagaagaagtttgccct

SEQ ID NO: 46246 - DNA, 80 bp, synthetic construct; identical to SEQ ID NO: 12358
  source 1..80: mol_type = other DNA

SEQ ID NO: 46247 - DNA, 80 bp, synthetic construct
  source 1..80: mol_type = other DNA
aaaaaattaaaaattcaaaattttgaccaggcacagtggctcacacctgcaattccagcactttgggaggccgaggcaga

SEQ ID NO: 46248 - DNA, 80 bp, synthetic construct
  source 1..80: mol_type = other DNA
gaggctgaggcaggagagtcgcttgaacctgggagacagaggttgcagtaagccaagatcatgccaccgcactccagcct

SEQ ID NO: 46249 - DNA, 80 bp, synthetic construct
  source 1..80: mol_type = other DNA
ggagattgagaccatcctggccaacatggtgaaaccccatctctactaaaaatacaaaaattagctgggtgtggtggtac

SEQ ID NO: 46250 - DNA, 80 bp, synthetic construct
  source 1..80: mol_type = other DNA
tccacctcaaaaaaaaacaaaaaatgtttaatatgggcatggtggtgtgcacctcccagatactcaggaggctgaggtgg

SEQ ID NO: 46251 - DNA, 80 bp, synthetic construct; identical to SEQ ID NO: 12359
  source 1..80: mol_type = other DNA

SEQ ID NO: 46252 - DNA, 80 bp, synthetic construct
  source 1..80: mol_type = other DNA
ctaacaaaaaggcaggaaaatagtcctttaactccttgttttttggccacgttggagcatagggaggtccacatttatac

SEQ ID NO: 46253 - DNA, 80 bp, synthetic construct
  source 1..80: mol_type = other DNA
ctctgacaggaatgaggacattgatgccaggtgccctggcaagctgaagggtgagatgactgtacctcctcaaagagata

SEQ ID NO: 46254 - DNA, 80 bp, synthetic construct
  source 1..80: mol_type = other DNA
ggtggagctgacggctcctaaggaaagagaaggaggtgtgagctaaatagctcgctacgggtcttcctcagaaagtctcc

SEQ ID NO: 46255 - DNA, 80 bp, synthetic construct; identical to SEQ ID NO: 12360
  source 1..80: mol_type = other DNA

SEQ ID NO: 46256 - DNA, 80 bp, synthetic construct
  source 1..80: mol_type = other DNA
aagcagacgccgcttcacctcacctgtcctcgggtttccttgggcatgtggtagcgattggtggcctccagcttctcctg

SEQ ID NO: 46257 - DNA, 80 bp, synthetic construct
  source 1..80: mol_type = other DNA
aggtactctcggcgagatttcttccgcagctcagggacctgagttgggaaaggacagtcgaatcctcatcttgctggagg

SEQ ID NO: 46258 - DNA, 80 bp, synthetic construct
  source 1..80: mol_type = other DNA
tcgtatcttcctgcagcagaatccagctggaaagtcctcttaggcagcattatcatctttgttaatatagatgcactagg

SEQ ID NO: 46259 - DNA, 80 bp, synthetic construct; identical to SEQ ID NO: 12361
  source 1..80: mol_type = other DNA

SEQ ID NO: 46260 - DNA, 80 bp, synthetic construct
  source 1..80: mol_type = other DNA
actggcaatatctataaggccctttcctgccaggagtcctcccactatgacatcatcctctctgtgatcacaacttcctc

SEQ ID NO: 46261 - DNA, 80 bp, synthetic construct
  source 1..80: mol_type = other DNA
aaattagctgggcatggtagtgggcacctgtaatcccagctactcgggaggctgaggcaggagaatcatttgaacccggg

SEQ ID NO: 46262 - DNA, 80 bp, synthetic construct
  source 1..80: mol_type = other DNA
taaaatgcagtttatgatcatgacctaatctgggtaccacagtcaaatattccttccatggaagagccagatagattttt

SEQ ID NO: 46263 - DNA, 80 bp, synthetic construct; identical to SEQ ID NO: 12362
  source 1..80: mol_type = other DNA

SEQ ID NO: 46264 - DNA, 80 bp, synthetic construct
  source 1..80: mol_type = other DNA
atcgagaccatcctggctaacatggtgagaccccatctctactaaaaatacaaaaaattagccgggcgtggcagcaggcg

SEQ ID NO: 46265 - DNA, 80 bp, synthetic construct
  source 1..80: mol_type = other DNA
cccaataaaaataacatgttcaggaaaggattaccagtggcttctaaaagcatttgatgaaaggctattggtagaaagga

SEQ ID NO: 46266 - DNA, 80 bp, synthetic construct
  source 1..80: mol_type = other DNA
taagctttagacccaattcctgcttcaaagaaagcacagggcagagaagtacttaacaccacaagataagaatcaggcaa

SEQ ID NO: 46267 - DNA, 80 bp, synthetic construct; identical to SEQ ID NO: 12363
  source 1..80: mol_type = other DNA

SEQ ID NO: 46268 - DNA, 80 bp, synthetic construct
  source 1..80: mol_type = other DNA
cccatagtattaaccatttttcaatctgaatagtgtctatgagtgttctttgttctattctttcaacttccctatgtgct

SEQ ID NO: 46269 - DNA, 80 bp, synthetic construct
  source 1..80: mol_type = other DNA
gactggccaacatggtgaaaccctatctctactaaacatacaaaaatcagccaggcatgctagtgcatgtctgtagtccc

SEQ ID NO: 46270 - DNA, 80 bp, synthetic construct
  source 1..80: mol_type = other DNA
aaacccgaaaaattaaattcaggccaaaacagtaacaccactaccaccacaactgcactgagatgtcccagaagcctaac

SEQ ID NO: 46271 - DNA, 80 bp, synthetic construct
  source 1..80: mol_type = other DNA
aggagttcaagaccagcctgaccaacatggagaaaccccatctctactaaaaatacaaaattagccaggcgaggtggctc

SEQ ID NO: 46272 - DNA, 80 bp, synthetic construct; identical to SEQ ID NO: 12364
  source 1..80: mol_type = other DNA

SEQ ID NO: 46273 - DNA, 80 bp, synthetic construct
  source 1..80: mol_type = other DNA
tgagatcgcaccaccacactccagcctggcaacagagtgagactccatctcaaaaataaataaataaaaataaaaaataa

SEQ ID NO: 46274 - DNA, 80 bp, synthetic construct
  source 1..80: mol_type = other DNA
tgaaaccccgtctctactaaaggtacaaaaaattagccaggcgtggtggtgtgcgcctgtaatcccagctactcaggagg

SEQ ID NO: 46275 - DNA, 80 bp, synthetic construct
  source 1..80: mol_type = other DNA
tgtgactttacttgacaagaccaggcctttggaaaacagcttaccctacctagtttcacaccataaaaagtccagtttat

SEQ ID NO: 46276 - DNA, 80 bp, synthetic construct; identical to SEQ ID NO: 12365
  source 1..80: mol_type = other DNA

SEQ ID NO: 46277 - DNA, 80 bp, synthetic construct
  source 1..80: mol_type = other DNA
ccaccccatcagcatccacactgtgcttcctctgtatcctctctccctatacactctatcagaaagtctttccttttgtc

SEQ ID NO: 46278 - DNA, 80 bp, synthetic construct
  source 1..80: mol_type = other DNA
agaatcacaaggatcattcagatgcgccctaacacaaaaaatgtcccctctcagtgaggaatctctctgattgcaggtac

SEQ ID NO: 46279 - DNA, 80 bp, synthetic construct
  source 1..80: mol_type = other DNA
tcagatttcaccctgggatcttggggatttacagaacatgctgctcctattcaccttcttgtctgaccgttccaggacat

SEQ ID NO: 46280 - DNA, 80 bp, synthetic construct; identical to SEQ ID NO: 12366
  source 1..80: mol_type = other DNA

SEQ ID NO: 46281 - DNA, 80 bp, synthetic construct
  source 1..80: mol_type = other DNA
gtcttccagtaacctataagatcggttcttctccagcagggcccgggcctctcgctctgctgcccgagctggcttttcta

SEQ ID NO: 46282 - DNA, 80 bp, synthetic construct
  source 1..80: mol_type = other DNA
cggctcacttcaacctccgcctcccaggttcaagcaattctcctgcctcagcctcccaagtagctgagattacaggcaca

SEQ ID NO: 46283 - DNA, 80 bp, synthetic construct
  source 1..80: mol_type = other DNA
gttttaaaccagctaaccagcattcattctctttcttcctcatggcttcaccccatcttcatcatcctgaatggggtttt

SEQ ID NO: 46284 - DNA, 80 bp, synthetic construct
  source 1..80: mol_type = other DNA
tggtctcgaactcctgggctcaagtaatcctcctgcctcagcctcccggggtgctgggattacaggtgtgagccactgca

SEQ ID NO: 46285 - DNA, 80 bp, synthetic construct; identical to SEQ ID NO: 12367
  source 1..80: mol_type = other DNA

SEQ ID NO: 46286 - DNA, 80 bp, synthetic construct
  source 1..80: mol_type = other DNA
tcgcaatctgcattttaacaagaaccttggatgcatgttaagagttcgagaaacaccgttctattgcgcttaacccgaca

SEQ ID NO: 46287 - DNA, 80 bp, synthetic construct
  source 1..80: mol_type = other DNA
tccccacccctgccgacaccttgttccagagtctcagggcgaagtcccgggccggcccactgagatccaaggtatcagtg

SEQ ID NO: 46288 - DNA, 80 bp, synthetic construct
  source 1..80: mol_type = other DNA
cctgctcccggccctgaagcgtcgggcagccgcgctcactgctgggccggtcagaggcctggagccctcggctggagcct

SEQ ID NO: 46289 - DNA, 80 bp, synthetic construct; identical to SEQ ID NO: 12368
  source 1..80: mol_type = other DNA

SEQ ID NO: 46290 - DNA, 80 bp, synthetic construct
  source 1..80: mol_type = other DNA
aattttatagagccaaaaactatacaaagtaagggaggaatgaaattctatttcagattggaagatcgggtccatgctca

SEQ ID NO: 46291 - DNA, 80 bp, synthetic construct
  source 1..80: mol_type = other DNA
ggcgtggtggtgtgcgcctgtagtcccagccactcgggaggctgaggcaggagaatcatttgaacatgggaagcagagtt

SEQ ID NO: 46292 - DNA, 80 bp, synthetic construct
  source 1..80: mol_type = other DNA
ggggaactggggaaagttgttaaagacaaaatctccaaactaaggaacaggcaaactgtgttctgcatttttgcttaaca

SEQ ID NO: 46293 - DNA, 80 bp, synthetic construct; identical to SEQ ID NO: 12369
  source 1..80: mol_type = other DNA

SEQ ID NO: 46294 - DNA, 80 bp, synthetic construct
  source 1..80: mol_type = other DNA
ccagctagtttttgtatttttaatacagatggggttttaccatgttggtcaggctggtctcaaactcctgacctcatgat

SEQ ID NO: 46295 - DNA, 80 bp, synthetic construct
  source 1..80: mol_type = other DNA
aaaacaaacaaaacaaaaagctgaatttgttactcgatgctctgctgtctgatttgtttgatcctgcatcatacttttgt

SEQ ID NO: 46296 - DNA, 80 bp, synthetic construct
  source 1..80: mol_type = other DNA
ttggctcactgcagcctccacctcctgggttcaagcaattctcctgcctcagcctcctgagtaggcgggactacaggtgc

SEQ ID NO: 46297 - DNA, 80 bp, synthetic construct; identical to SEQ ID NO: 12370
  source 1..80: mol_type = other DNA

SEQ ID NO: 46298 - DNA, 80 bp, synthetic construct
  source 1..80: mol_type = other DNA
caatttgtctcatatattttgttttatagtaaaggtgtggggcctcctctgaccagtctgagaggagcaacttgtagtgg

SEQ ID NO: 46299 - DNA, 80 bp, synthetic construct
  source 1..80: mol_type = other DNA
atgggaaaattccaaatatcaactacatgggcaccaaagccatgcactatcaagatggtttttaaacctttttttttttt

SEQ ID NO: 46300 - DNA, 80 bp, synthetic construct
  source 1..80: mol_type = other DNA
gactacaggtgcccaccactatgccccgctaattttttgtatttttagtagagacggggtttcaccgtgttagccaggat

SEQ ID NO: 46301 - DNA, 80 bp, synthetic construct
  source 1..80: mol_type = other DNA
ttacttcattttgcagcaatttcagatttagtattcgtagccccagctctttaagtaagtatccctggattagccacatg

SEQ ID NO: 46302 - DNA, 80 bp, synthetic construct; identical to SEQ ID NO: 12371
  source 1..80: mol_type = other DNA

SEQ ID NO: 46303 - DNA, 80 bp, synthetic construct
  source 1..80: mol_type = other DNA
gagcctcccctcacataccctttttttttcccaaagaaggagaagcagacgagttgaagagaactccattttattatgga

SEQ ID NO: 46304 - DNA, 80 bp, synthetic construct
  source 1..80: mol_type = other DNA
taggagaaacagaattaaataactatcaaggggtacagagttaagagttccagccttccctcttggggaaaactaaggca

SEQ ID NO: 46305 - DNA, 80 bp, synthetic construct
  source 1..80: mol_type = other DNA
aaaccaggctgtggtcaagggaggaggcaggagctgtaaacaaaggggcagtgacctaggaaatgaaggagatgtgccta

SEQ ID NO: 46306 - DNA, 80 bp, synthetic construct; identical to SEQ ID NO: 12372
  source 1..80: mol_type = other DNA

SEQ ID NO: 46307 - DNA, 80 bp, synthetic construct
  source 1..80: mol_type = other DNA
tgttggaagatggtcaccgccggcaggactcatctgtgggagagggggcaataatgttagagaatgagtgagagcctctg

SEQ ID NO: 46308 - DNA, 80 bp, synthetic construct
  source 1..80: mol_type = other DNA
caccataactccaggagagattaagtaatatgatatccagctgtggctcttggtgcttcacaaaaaattacttaatcttg

SEQ ID NO: 46309 - DNA, 80 bp, synthetic construct
  source 1..80: mol_type = other DNA
actagagaggctgaggcacaagaatcgcttgaatttgggaggcagaggttgcagtgagccaaggttgtgccactgcattc

SEQ ID NO: 46310 - DNA, 80 bp, synthetic construct
  source 1..80: mol_type = other DNA
tctcggctcactgcaacctctgcttcccgggttcaagtgattctcctgcctcagactcccgagtagcagggattacaggt

SEQ ID NO: 46311 - DNA, 80 bp, synthetic construct; identical to SEQ ID NO: 12373
  source 1..80: mol_type = other DNA

SEQ ID NO: 46312 - DNA, 80 bp, synthetic construct
  source 1..80: mol_type = other DNA
agctccgcctcccaggttcacgccattctcctgcctcagcctcccaagtagttgggactacaggtgcccgccaccacgcc

SEQ ID NO: 46313 - DNA, 80 bp, synthetic construct
  source 1..80: mol_type = other DNA
caatttttttgtagagacaggattttgccatgttgcccagggtggtcttgaactcctgggctcaagcgatccacccgtct

SEQ ID NO: 46314 - DNA, 80 bp, synthetic construct
  source 1..80: mol_type = other DNA
accctgtgattttgaccagattacagcactcaggaagagttctcgttttgaaacctgaagactcaatgtgtacttcactg

SEQ ID NO: 46315 - DNA, 80 bp, synthetic construct; identical to SEQ ID NO: 12374
  source 1..80: mol_type = other DNA

SEQ ID NO: 46316 - DNA, 80 bp, synthetic construct
  source 1..80: mol_type = other DNA
ggaggggtattggtacgtggtctccagggctgtctcgctgaaggagatcttaagctgaaggagggagaaaaagggggcag

SEQ ID NO: 46317 - DNA, 80 bp, synthetic construct
  source 1..80: mol_type = other DNA
gttttcctttccatactggctctccaattctagagtttccctcttcgatcatatcatttcaaaacatcagactttgccct

SEQ ID NO: 46318 - DNA, 80 bp, synthetic construct
  source 1..80: mol_type = other DNA
gggtaaaaagaaattaaaatacatggcgataagtcttgtgatcagaaccgagtctttgggcaccttgggggcaatcgagt

SEQ ID NO: 46319 - DNA, 80 bp, synthetic construct
  source 1..80: mol_type = other DNA
tcctatccatagcaaagggagtctagggcctaggaagagatgggagatgaacagaaaggccgagaggaaccaagagactc

SEQ ID NO: 46320 - DNA, 80 bp, synthetic construct; identical to SEQ ID NO: 12375
  source 1..80: mol_type = other DNA

SEQ ID NO: 46321 - DNA, 80 bp, synthetic construct
  source 1..80: mol_type = other DNA
ctgagtcccctaatgaactgaggtatgaaaagagagaagccagaagggtggctgggcaggtggttgttaagagctgcatc

SEQ ID NO: 46322 - DNA, 80 bp, synthetic construct
  source 1..80: mol_type = other DNA
ctgggtccccatgggaaggtagaactcaggaactgtatatgttactccttgttggctctgaaccctgcagtgtctcccca

SEQ ID NO: 46323 - DNA, 80 bp, synthetic construct
  source 1..80: mol_type = other DNA
ttagctgggcatggtggcgtgcacctgtagtcccagctactcgagaggacgaggcaggagaattgcttgaacccgggagg

SEQ ID NO: 46324 - DNA, 80 bp, synthetic construct; identical to SEQ ID NO: 12376
  source 1..80: mol_type = other DNA

SEQ ID NO: 46325 - DNA, 80 bp, synthetic construct
  source 1..80: mol_type = other DNA
accttctaacttactagataatttactaatatattatactcatgtctgctgttgaaaggagcttggggccgggtaaggtg

SEQ ID NO: 46326 - DNA, 80 bp, synthetic construct
  source 1..80: mol_type = other DNA
caggaggctgaggctggagaatcacttgaacccgggaggtggaggttgcagtgagccgaaatctcaccattgaactccag

SEQ ID NO: 46327 - DNA, 80 bp, synthetic construct
  source 1..80: mol_type = other DNA
agcctgtacacatttgacccccagttcatgtctgtggaactgctggtagaatctagtgacagcagccagactgcttatat

SEQ ID NO: 46328 - DNA, 80 bp, synthetic construct; identical to SEQ ID NO: 12377
  source 1..80: mol_type = other DNA

SEQ ID NO: 46329 - DNA, 80 bp, synthetic construct
  source 1..80: mol_type = other DNA
ccagccacagccatcccctgggctccagtggcagggctgggatttctctcctgatggcagggataaatttgatggaatta

SEQ ID NO: 46330 - DNA, 80 bp, synthetic construct
  source 1..80: mol_type = other DNA
tctgggtcagaggaactctgtgctgcctcctccccacccccacccaagcagcggctgcttccttattctctcaccacatc

SEQ ID NO: 46331 - DNA, 80 bp, synthetic construct
  source 1..80: mol_type = other DNA
cacttgcttcctggctcccctgggatgctccctgggctttgggccccaaagcttcatgcttccctctgctcattcttccc

SEQ ID NO: 46332 - DNA, 80 bp, synthetic construct; identical to SEQ ID NO: 12378
  source 1..80: mol_type = other DNA

SEQ ID NO: 46333 - DNA, 80 bp, synthetic construct
  source 1..80: mol_type = other DNA
ggacttcctaagtctgagatgtctgagtgtgggacctctgtctccctagagattttcaagctggaaacagatggatgtgc

SEQ ID NO: 46334 - DNA, 80 bp, synthetic construct
  source 1..80: mol_type = other DNA
aactgtctccaaattcacttctctcttttgctaccctaaggggagggaaagtccaggatggcaggaaaagaggggaaaac

SEQ ID NO: 46335 - DNA, 80 bp, synthetic construct
  source 1..80: mol_type = other DNA
aggtcacccacttcaaatggcctctctgtgtctctcccatggggcagactcggggttcaaaagccttctctctgatcttt

SEQ ID NO: 46336 - DNA, 80 bp, synthetic construct; identical to SEQ ID NO: 12379
  source 1..80: mol_type = other DNA

SEQ ID NO: 46337 - DNA, 80 bp, synthetic construct
  source 1..80: mol_type = other DNA
tgggctcaaaatggaaaaggagggctctgagaaggaagggtgtatgtgcagagcgaggaagggtggtggcaggaattaac

SEQ ID NO: 46338 - DNA, 80 bp, synthetic construct
  source 1..80: mol_type = other DNA
gagacggaggtagccccccagaaccaagatctcctcggcagttgggtaccgcttcttcccagcccccgggactgcagcat

SEQ ID NO: 46339 - DNA, 80 bp, synthetic construct
  source 1..80: mol_type = other DNA
gggggcagttggggctgggggtgggggagacagaggggctggtggtgggggctggagctccactgcttcctcttcctgct

SEQ ID NO: 46340 - DNA, 80 bp, synthetic construct; identical to SEQ ID NO: 12380
  source 1..80: mol_type = other DNA

SEQ ID NO: 46341 - DNA, 80 bp, synthetic construct
  source 1..80: mol_type = other DNA
ctcttcttttctcccacattcttccgagtagtcttgtctttcttctcctgacctcagcctccactctgttgcctccagtt

SEQ ID NO: 46342 - DNA, 80 bp, synthetic construct
  source 1..80: mol_type = other DNA
ctctggagtttctccaggactcagcctccatttccatgcctctgacagtcgggagctcctgtctcccacctctcctgggc

SEQ ID NO: 46343 - DNA, 80 bp, synthetic construct
  source 1..80: mol_type = other DNA
ctcccgggcctccagaggcccaggctttctctctgctagcagctcttcactccgttgttgttgctgctgctgctgctgcc

SEQ ID NO: 46344 - DNA, 80 bp, synthetic construct; identical to SEQ ID NO: 12381
  source 1..80: mol_type = other DNA

SEQ ID NO: 46345 - DNA, 80 bp, synthetic construct
  source 1..80: mol_type = other DNA
agaggtgggacacaaagcagggcagaggggctaaggatgaggacagagggaaagacggaaggcagagaactggggaaatg

SEQ ID NO: 46346 - DNA, 80 bp, synthetic construct
  source 1..80: mol_type = other DNA
attaaagaccgtctctaggatgtgagaaagagagagaagggcgaaaaggaaagttggcgtgagggagaagagagaaatgt

SEQ ID NO: 46347 - DNA, 80 bp, synthetic construct
  source 1..80: mol_type = other DNA
ctagaggagaagggaaaccagggaagaggggaaaggagggcggcggcagcagccgggcgcgtctcagcgcgggccccaaa

SEQ ID NO: 46348 - DNA, 80 bp, synthetic construct; identical to SEQ ID NO: 12382
  source 1..80: mol_type = other DNA

SEQ ID NO: 46349 - DNA, 80 bp, synthetic construct
  source 1..80: mol_type = other DNA
caaggacaggggcgaggagacacccactccccaagtctgagcccctcagtcaactcacaggccgcgggacccccggggga

SEQ ID NO: 46350 - DNA, 80 bp, synthetic construct
  source 1..80: mol_type = other DNA
gcggcgaccgctttgtctaaggacaatgaggagagggaagggggcgcagggcggagccgaggagagggcggggcctagat

SEQ ID NO: 46351 - DNA, 80 bp, synthetic construct
  source 1..80: mol_type = other DNA
gactcaggcccctcgtgggactttgggaggaagcggcagctgctccgagcggggcccgcccttcccatctcctgccgctc

SEQ ID NO: 46352 - DNA, 80 bp, synthetic construct; identical to SEQ ID NO: 12383
  source 1..80: mol_type = other DNA

SEQ ID NO: 46353 - DNA, 80 bp, synthetic construct
  source 1..80: mol_type = other DNA
agcttgggagacactgacagactgcatgccatatgtagaaaaaggctgacttttattttcctgcagagcatcttcctcgg

SEQ ID NO: 46354 - DNA, 80 bp, synthetic construct
  source 1..80: mol_type = other DNA
caaggttggggcctggagggacagctatgaccgttgaacttgcagaccctggtccaccttcttggagtggaagccagcgg

SEQ ID NO: 46355 - DNA, 80 bp, synthetic construct
  source 1..80: mol_type = other DNA
gaagtggaccttggagttcagtggctgaaactcagaatttagggtatggagctggacccagagaataaagtctcaagtag

SEQ ID NO: 46356 - DNA, 80 bp, synthetic construct; identical to SEQ ID NO: 12384
  source 1..80: mol_type = other DNA

SEQ ID NO: 46357 - DNA, 80 bp, synthetic construct
  source 1..80: mol_type = other DNA
agtatacctaagagagggagaagagcttagaaatggagtcaagcccttttctcatcttgggcacttctttcctcctcttc

SEQ ID NO: 46358 - DNA, 80 bp, synthetic construct
  source 1..80: mol_type = other DNA
gggagacagtagaagagcatgggaggagggaaacccttgaaagggaacgaggagttctaaaatgggtcagaggtcatagg

SEQ ID NO: 46359 - DNA, 80 bp, synthetic construct
  source 1..80: mol_type = other DNA
ggcctttgggtatgggctcccagtaccgcatcaccagctgtggaaggataaggggctgggtatcccagtggcctagtctg

SEQ ID NO: 46360 - DNA, 80 bp, synthetic construct; identical to SEQ ID NO: 12385
  source 1..80: mol_type = other DNA

SEQ ID NO: 46361 - DNA, 80 bp, synthetic construct
  source 1..80: mol_type = other DNA
aaggacaagtacacccttcttgataaaaagtaggatatgtgctgtggaggaatggaagctgagattagttcctcaattct

SEQ ID NO: 46362 - DNA, 80 bp, synthetic construct
  source 1..80: mol_type = other DNA
ccaaagtaccgggatgtccatgccttcactctttcagctgccatgaggctgtgctgcccaacaaatagaagcaggagccc

SEQ ID NO: 46363 - DNA, 80 bp, synthetic construct
  source 1..80: mol_type = other DNA
tcccttactgctttcaagagccttaatgcttcctctctaggctgtgcccatctcacttttccatccctagtttctgccct

SEQ ID NO: 46364 - DNA, 80 bp, synthetic construct
  source 1..80: mol_type = other DNA
aatgctccttctttttaacactctcctctcaacagtcctctctacaaaacactttacttagaatactccggtcaccgccc

SEQ ID NO: 46365 - DNA, 80 bp, synthetic construct; identical to SEQ ID NO: 12386
  source 1..80: mol_type = other DNA

SEQ ID NO: 46366 - DNA, 80 bp, synthetic construct
  source 1..80: mol_type = other DNA
gcgagaaatggaggggtggggaaaggggcggggtcgggattcccgctgccacaggccccgcccgcggccccgcccccggc

SEQ ID NO: 46367 - DNA, 80 bp, synthetic construct
  source 1..80: mol_type = other DNA
ctgttaagggtagcggctctgcagccgctcacgtgggttgaatctcagctcgtctagttttcccatctaaaatgaaaagt

SEQ ID NO: 46368 - DNA, 80 bp, synthetic construct
  source 1..80: mol_type = other DNA
caaataacttctctgtaaatactgaaaggtttgttgtaatagtgccagagattgttgattagtaaccacgagaataaaca

SEQ ID NO: 46369 - DNA, 80 bp, synthetic construct
  source 1..80: mol_type = other DNA
ttatagatagaagaaacaggtccagagagataattgcctgagttaggaagctgctaatcctgtaggctaagggaccagat

SEQ ID NO: 46370 - DNA, 80 bp, synthetic construct; identical to SEQ ID NO: 12387
  source 1..80: mol_type = other DNA

SEQ ID NO: 46371 - DNA, 80 bp, synthetic construct
  source 1..80: mol_type = other DNA
gtagtcacagctgctcaggaggctgaggcagaagaatggcgtgaacccgggaggcagagcttgcagtgagccgagatcgc

SEQ ID NO: 46372 - DNA, 80 bp, synthetic construct
  source 1..80: mol_type = other DNA
aggcactgcactattctttctgatttccctacaccctgcctacttctttgtaattatcactttattaaactctcccccaa

SEQ ID NO: 46373 - DNA, 80 bp, synthetic construct
  source 1..80: mol_type = other DNA
gtgggtggatcactttagaccagaagctggagaccagaatggccaacgtggtgaaaccccatttctactaaaaaatttta

SEQ ID NO: 46374 - DNA, 80 bp, synthetic construct; identical to SEQ ID NO: 12388
  source 1..80: mol_type = other DNA

SEQ ID NO: 46375 - DNA, 80 bp, synthetic construct
  source 1..80: mol_type = other DNA
catggtgaaacctcgtctccacttaaaagacaaaaattagccaggtgtggtggcaggagcctgtaatcccagcttctcgg

SEQ ID NO: 46376 - DNA, 80 bp, synthetic construct
  source 1..80: mol_type = other DNA
atgggaggcctaggtgggtggatcacgaggtcaggggttagagaccagcctgaccaacatggcgaaaccccgtctctact

SEQ ID NO: 46377 - DNA, 80 bp, synthetic construct
  source 1..80: mol_type = other DNA
tcaacaacaacaacaaaaaaaaaaggagccgggtgcagtggctcacgcctgtaatcccagcactttgcgaggccaaggtg

SEQ ID NO: 46378 - DNA, 80 bp, synthetic construct
  source 1..80: mol_type = other DNA
gaggctgcagtgagccgagatcacgccattgaacccagcctgggcaacaagagtgaaactctgtctcaaaaaaaaaaaaa

SEQ ID NO: 46379 - DNA, 80 bp, synthetic construct; identical to SEQ ID NO: 12389
  source 1..80: mol_type = other DNA

SEQ ID NO: 46380 - DNA, 80 bp, synthetic construct
  source 1..80: mol_type = other DNA
ctcagcctcctgagtagttgggactacaggcatgcgccaccacattcagctaactttttattttttgtagtgatggggtc

SEQ ID NO: 46381 - DNA, 80 bp, synthetic construct
  source 1..80: mol_type = other DNA
caatggcgcgatcttggctcactgcaacctccgcctcttgggttcatgtgattctcctgcctcagcctcccaagtagctg

SEQ ID NO: 46382 - DNA, 80 bp, synthetic construct
  source 1..80: mol_type = other DNA
acacccggcctagcctaaccactttaaagagaataatataatggtatttagtacattagtatattagtaataggtacaac

SEQ ID NO: 46383 - DNA, 80 bp, synthetic construct
  source 1..80: mol_type = other DNA
caattctcctgctcagcctcccaagtagctgggattacaggcatgtgccaccacgcctggctaattttgtatttttagta

SEQ ID NO: 46384 - DNA, 80 bp, synthetic construct; identical to SEQ ID NO: 12390
  source 1..80: mol_type = other DNA

SEQ ID NO: 46385 - DNA, 80 bp, synthetic construct
  source 1..80: mol_type = other DNA
tatatcacaattgtttatccactcatttgctgatgaatatttgtgttgtttccacctttttggctattgtaaaaagtgct

SEQ ID NO: 46386 - DNA, 80 bp, synthetic construct
  source 1..80: mol_type = other DNA
caagtagctgggattacaggcatgtgccaccacacctggctaaattttttttttttttttgagagagagtctttctctgt

SEQ ID NO: 46387 - DNA, 80 bp, synthetic construct
  source 1..80: mol_type = other DNA
gacagagtctccctctatagccaggctcgagtgcagtggcatgatcttggctcactgcaaactctgactctctggttcaa

SEQ ID NO: 46388 - DNA, 80 bp, synthetic construct; identical to SEQ ID NO: 12391
  source 1..80: mol_type = other DNA

SEQ ID NO: 46389 - DNA, 80 bp, synthetic construct
  source 1..80: mol_type = other DNA
cgaactcctgacctcaggtgatccaaccaccttcggcctcccaaaatgctgggattacaggcatgagccaccacacccgg

SEQ ID NO: 46390 - DNA, 80 bp, synthetic construct
  source 1..80: mol_type = other DNA
cagggttttgccatgttgcccagactggttgcccgtgaagtcctgggctcatgcaatcctcccactttggcctcccaaac

SEQ ID NO: 46391 - DNA, 80 bp, synthetic construct
  source 1..80: mol_type = other DNA
tagattagaaaaacaatcacagtagacaccttagctcattcttctaataagtctgttgatccggttctccctgttgccag

SEQ ID NO: 46392 - DNA, 80 bp, synthetic construct; identical to SEQ ID NO: 12392
  source 1..80: mol_type = other DNA

SEQ ID NO: 46393 - DNA, 80 bp, synthetic construct
  source 1..80: mol_type = other DNA
cactgatacctctgatcctgatgacaaacggcaatttgggttttgcaggtacatagaagttgccagcttttctggccatc

SEQ ID NO: 46394 - DNA, 80 bp, synthetic construct
  source 1..80: mol_type = other DNA
gggcctttgatcttcagctctgggaaattccttcgctttttaagggtttctggcatagcaagaacctccttctttttctc

SEQ ID NO: 46395 - DNA, 80 bp, synthetic construct
  source 1..80: mol_type = other DNA
ctaattttgttttgaatttttagtagagacggggttttgtcatgttggccagcctggtcttgaactcctgacctcaggtg

SEQ ID NO: 46396 - DNA, 80 bp, synthetic construct
  source 1..80: mol_type = other DNA
tcgccaggctggagtacagtggagcagtcttggctcactgcaacctccacctcccgggttcaagcgattctcctgcctca

SEQ ID NO: 46397 - DNA, 80 bp, synthetic construct; identical to SEQ ID NO: 12393
  source 1..80: mol_type = other DNA

SEQ ID NO: 46398 - DNA, 80 bp, synthetic construct
  source 1..80: mol_type = other DNA
tgacctcaggtgatccacctgtcttgacttcccaaagtgctgggattacaggcatgagctgccgtgactggccttttatt

SEQ ID NO: 46399 - DNA, 80 bp, synthetic construct
  source 1..80: mol_type = other DNA
ttttggtagagacgaggttttgtcatgttgcccggctggccgtgaacttctgagctcaagtgatctgccagccttggcct

SEQ ID NO: 46400 - DNA, 80 bp, synthetic construct
  source 1..80: mol_type = other DNA
ttttaaaatttaaatctggctgggcacggtggctcaagcctgtaatcccagcacttttggaggctgaggtgggtggctca

SEQ ID NO: 46401 - DNA, 80 bp, synthetic construct; identical to SEQ ID NO: 12394
  source 1..80: mol_type = other DNA

SEQ ID NO: 46402 - DNA, 80 bp, synthetic construct
  source 1..80: mol_type = other DNA
ctcgggaggctgaggtgggtggatcacttgaggtcagaagttagagaccagcctgggcaacatgacaaaacctcatctct

SEQ ID NO: 46403 - DNA, 80 bp, synthetic construct
  source 1..80: mol_type = other DNA
tggtgccactgcactccagcctaggtgacagagatgagaccctgtctcaagaaaaaaaaaaaaatcttaagaaatgtcat

SEQ ID NO: 46404 - DNA, 80 bp, synthetic construct
  source 1..80: mol_type = other DNA
taattttataaatcctggaaaagctggccagaaaagtacagagacttgcccaaagtcaaagctaaagatgcttccagagg

SEQ ID NO: 46405 - DNA, 80 bp, synthetic construct; identical to SEQ ID NO: 12395
  source 1..80: mol_type = other DNA

SEQ ID NO: 46406 - DNA, 80 bp, synthetic construct
  source 1..80: mol_type = other DNA
tgtggcttccaaatcccttatcttttcatttattcataaagatttctggtcccacccatgttccaggacaagttgtatca

SEQ ID NO: 46407 - DNA, 80 bp, synthetic construct
  source 1..80: mol_type = other DNA
acaaaggcctctggcttggcttcctgcttcagcactccagtcagcaggaactcaggcgagaggaggggcagcccaacccg

SEQ ID NO: 46408 - DNA, 80 bp, synthetic construct
  source 1..80: mol_type = other DNA
cactaaccagtcttaccatcactaaaataatacctcctaatatgaagccaagtgaagcacaccgcatactgtctatgaaa

SEQ ID NO: 46409 - DNA, 80 bp, synthetic construct; identical to SEQ ID NO: 12396
  source 1..80: mol_type = other DNA

SEQ ID NO: 46410 - DNA, 80 bp, synthetic construct
  source 1..80: mol_type = other DNA
gtggatcacgaggtcaagagatcgagaccatcctggccaacatggtgaaaccccgtctttagtaaaaataaaaaaattag

SEQ ID NO: 46411 - DNA, 80 bp, synthetic construct
  source 1..80: mol_type = other DNA
tgctagaaagatgaacctgaatttattcaagcttttacaattatctgcaatttccaggaaatatggagtacagaggaaca

SEQ ID NO: 46412 - DNA, 80 bp, synthetic construct
  source 1..80: mol_type = other DNA
atgctctagagtaaagataattaagaagataataggtgtggcagtatgtggaccttatttgaatcctgatttgaacaact

SEQ ID NO: 46413 - DNA, 80 bp, synthetic construct; identical to SEQ ID NO: 12397
  source 1..80: mol_type = other DNA

SEQ ID NO: 46414 - DNA, 80 bp, synthetic construct
  source 1..80: mol_type = other DNA
atcaagaccatcctggctaacacagtgaaaccccatctctactaaaaatacaaaagaattagccgggcgtggtggcgggc

SEQ ID NO: 46415 - DNA, 80 bp, synthetic construct
  source 1..80: mol_type = other DNA
aaaagggatagatggagcaaatgtagcataatctaaattaagctgctgctgaatctcggtgattgttatatgggggtatc

SEQ ID NO: 46416 - DNA, 80 bp, synthetic construct
  source 1..80: mol_type = other DNA
aggtcttttcccccaccctctcactactttatattcctttctgaacctccatttttttccctccaatctttgccattcca

SEQ ID NO: 46417 - DNA, 80 bp, synthetic construct
  source 1..80: mol_type = other DNA
tcatagccctaagagaaagaaatgatggagatggtattgtagattgggaagcactggagggagggctgaagcacaggtta

SEQ ID NO: 46418 - DNA, 80 bp, synthetic construct; identical to SEQ ID NO: 12398
  source 1..80: mol_type = other DNA

SEQ ID NO: 46419 - DNA, 80 bp, synthetic construct
  source 1..80: mol_type = other DNA
ttccccgccccagggcacacaggaacttgactgtccggcggatgcgatcagtgaccaggtgggaagcctctgccgctgaa

SEQ ID NO: 46420 - DNA, 80 bp, synthetic construct
  source 1..80: mol_type = other DNA
tcatctctgtctcccacaaagtcccatgcctttgtctcttactttgggggctgttgattcttggttaagtttggtccgtc

SEQ ID NO: 46421 - DNA, 80 bp, synthetic construct
  source 1..80: mol_type = other DNA
ctgaagtcatttttcccagctttgtggtcccaaccctctcctcacctcttccttccctggcttctctgcagtatcttctt

SEQ ID NO: 46422 - DNA, 80 bp, synthetic construct; identical to SEQ ID NO: 12399
  source 1..80: mol_type = other DNA

SEQ ID NO: 46423 - DNA, 80 bp, synthetic construct
  source 1..80: mol_type = other DNA
tcttgatgcaactgggttgagtaataggctcaggggaaataggctggtctgtggtgacaggagattggaattcaggggtg

SEQ ID NO: 46424 - DNA, 80 bp, synthetic construct
  source 1..80: mol_type = other DNA
gctggttcaactggtttgggagtcttgacagaggacctatttgtctttctcctagtggccctagatgtgagcttgggggt

SEQ ID NO: 46425 - DNA, 80 bp, synthetic construct
  source 1..80: mol_type = other DNA
ggggctatagggacaattgattcaggggtcttgacagaggacctatttgtcctgcccctagtggcccgagatgtgggctc

SEQ ID NO: 46426 - DNA, 80 bp, synthetic construct; identical to SEQ ID NO: 12400
  source 1..80: mol_type = other DNA

SEQ ID NO: 46427 - DNA, 80 bp, synthetic construct
  source 1..80: mol_type = other DNA
ggctcgagcttaggggctgtggggacaagtgtttcaggggtcttgccagaggatctattttttcttcccctagtagcccg

SEQ ID NO: 46428 - DNA, 80 bp, synthetic construct
  source 1..80: mol_type = other DNA
gtggaaatctggagctcaggggctgtggggacaactgtttcaggggtcttgacagaggacatatttgtcctgctcctagt

SEQ ID NO: 46429 - DNA, 80 bp, synthetic construct
  source 1..80: mol_type = other DNA
gtggaggtggaaggctggagctcaggggctgtggggacaactggttcaggggtcttgacagaggatctattttttcttcc

SEQ ID NO: 46430 - DNA, 80 bp, synthetic construct; identical to SEQ ID NO: 12401
  source 1..80: mol_type = other DNA

SEQ ID NO: 46431 - DNA, 80 bp, synthetic construct
  source 1..80: mol_type = other DNA
gaggacaagggagcctctggagcttcctgactcccatcttgcctggtcttacgaacggttggcttgatagaaggtaaaag

SEQ ID NO: 46432 - DNA, 80 bp, synthetic construct
  source 1..80: mol_type = other DNA
gagaaaagagatagaacttggatactgttcttgatacttgtttatggttagataggcttaccagatttccaccgggcgtg

SEQ ID NO: 46433 - DNA, 80 bp, synthetic construct
  source 1..80: mol_type = other DNA
ctttgggaggccgaggcgggtggatcacaaggtcaggaaaccgagaccatcctggctaacacggtgaaaccccgtctcta

SEQ ID NO: 46434 - DNA, 80 bp, synthetic construct; identical to SEQ ID NO: 12402
  source 1..80: mol_type = other DNA

SEQ ID NO: 46435 - DNA, 80 bp, synthetic construct
  source 1..80: mol_type = other DNA
ttgggaggctgcggcaggaaaattgtttgaacccaagagacggaggttacagtaagctgagatcacgccactgcacactc

SEQ ID NO: 46436 - DNA, 80 bp, synthetic construct
  source 1..80: mol_type = other DNA
agtgttctccacacgtggatgatggtaaggaaaaggatggctggggcaaagaaagaagaaacacgaagggtctttctttt

SEQ ID NO: 46437 - DNA, 80 bp, synthetic construct
  source 1..80: mol_type = other DNA
gatatagagatgacttgtggaataggaggtagaaaaagtagctctcaccctggaaaccttctcagcagctctgatcctgg

SEQ ID NO: 46438 - DNA, 80 bp, synthetic construct; identical to SEQ ID NO: 12403
  source 1..80: mol_type = other DNA

SEQ ID NO: 46439 - DNA, 80 bp, synthetic construct
  source 1..80: mol_type = other DNA
tctctctacttctctctcaaatgctttgcttggaagggtctgcttctgtacttgtttctcttgtatttcctcagatgtct

SEQ ID NO: 46440 - DNA, 80 bp, synthetic construct
  source 1..80: mol_type = other DNA
ccttggttaattcttcctctcctgtcacatctgtctgtctttctggtagcagtttctcagtttctctctccaatggccct

SEQ ID NO: 46441 - DNA, 80 bp, synthetic construct
  source 1..80: mol_type = other DNA
aggcctcaaggtgcgtgtcaaaaggctgggtctcagagtcctcagactctctcagacagaatggctgtgtagccaggacc

SEQ ID NO: 46442 - DNA, 80 bp, synthetic construct; identical to SEQ ID NO: 12404
  source 1..80: mol_type = other DNA

SEQ ID NO: 46443 - DNA, 80 bp, synthetic construct
  source 1..80: mol_type = other DNA
atacaaaaaaattaggtgtggggacggggacctgtagtcctgtagtctcagctacccgggaggctgaggtaggagaacta

SEQ ID NO: 46444 - DNA, 80 bp, synthetic construct
  source 1..80: mol_type = other DNA
ataccactgcattccagcctgagtgacagagaccctgtctcaaaaaaagaaagaaagaaagaaagaaagaaaaacatcat

SEQ ID NO: 46445 - DNA, 80 bp, synthetic construct
  source 1..80: mol_type = other DNA
ggcatgtgccaaagtgcccggctaattttttgtatttgttgtagagatggggtttggtcttgaactcttagactcaagtg

SEQ ID NO: 46446 - DNA, 80 bp, synthetic construct; identical to SEQ ID NO: 12405
  source 1..80: mol_type = other DNA

SEQ ID NO: 46447 - DNA, 80 bp, synthetic construct
  source 1..80: mol_type = other DNA
tgcattctgtccctctacccttcctagcctttggtaaccaccattctactctctacttccatgagatccatgtttttagc

SEQ ID NO: 46448 - DNA, 80 bp, synthetic construct
  source 1..80: mol_type = other DNA
tttttagattgagtcttgctctgtcacccagtttggagtgcagtggcatgacctcagctcactgcaacctctgcgtctta

SEQ ID NO: 46449 - DNA, 80 bp, synthetic construct
  source 1..80: mol_type = other DNA
tggagtgcagtggtgtgaccttggctcactgcaacctctgcctccggggttcaaatgagtctcctgcttcagtctcccga

SEQ ID NO: 46450 - DNA, 80 bp, synthetic construct; identical to SEQ ID NO: 12406
  source 1..80: mol_type = other DNA

SEQ ID NO: 46451 - DNA, 80 bp, synthetic construct
  source 1..80: mol_type = other DNA
caagctcccgatctcaggtgatctgcctgccttggcctcccaaagtgttgggattagaggtgtgagccactgtgcccgac

SEQ ID NO: 46452 - DNA, 80 bp, synthetic construct
  source 1..80: mol_type = other DNA
actgatcttcccatcctggcctcccatgtaactgggactacaggtgctcactactatgctgggctaattttttcattttt

SEQ ID NO: 46453 - DNA, 80 bp, synthetic construct
  source 1..80: mol_type = other DNA
cgggcgcagtggcttacgcctgcaattccagcattttgggaggccgaggcaggcggatcacttgaggtcgggagtttgtg

SEQ ID NO: 46454 - DNA, 80 bp, synthetic construct; identical to SEQ ID NO: 12407
  source 1..80: mol_type = other DNA

SEQ ID NO: 46455 - DNA, 80 bp, synthetic construct
  source 1..80: mol_type = other DNA
ctacccatactagcctttacccttcaaggaccaccagtctaatctcccagctcccactggtacaggattcaaataacaca

SEQ ID NO: 46456 - DNA, 80 bp, synthetic construct
  source 1..80: mol_type = other DNA
actaaactccttaaataatctctacctttctctccccaaccccagctgttagaaccctggttgatttcagaggtctagga

SEQ ID NO: 46457 - DNA, 80 bp, synthetic construct
  source 1..80: mol_type = other DNA
tcttgagatagggaggtcctgctccacttgtgccacaggtggcccaccctgggcccccacctcatgagctctctcctgct

SEQ ID NO: 46458 - DNA, 80 bp, synthetic construct; identical to SEQ ID NO: 12408
  source 1..80: mol_type = other DNA

SEQ ID NO: 46459 - DNA, 80 bp, synthetic construct
  source 1..80: mol_type = other DNA
cactgtccccaaaaggaggttggtccttttctgaatgtgctctaacaagggctctaatctttgtgtgatccttgaggaca

SEQ ID NO: 46460 - DNA, 80 bp, synthetic construct
  source 1..80: mol_type = other DNA
ctgttccatatagcaggctggctctctttcagatgtgccaaagtcagcgctgctgagacttcttcctcgtcatctgtatc

SEQ ID NO: 46461 - DNA, 80 bp, synthetic construct
  source 1..80: mol_type = other DNA
ttcttcataggaatgacaactggggttgctgggatcctctcttcttccgcatcagtgtcgctgtcgatgaagccaaaagg

SEQ ID NO: 46462 - DNA, 80 bp, synthetic construct
  source 1..80: mol_type = other DNA
tccctctccttcactaaaggctgatccttttcaagctggatttcagttacaacttcagcttcagactgctttgcctctac

SEQ ID NO: 46463 - DNA, 80 bp, synthetic construct; identical to SEQ ID NO: 12409
  source 1..80: mol_type = other DNA

SEQ ID NO: 46464 - DNA, 80 bp, synthetic construct
  source 1..80: mol_type = other DNA
gatgtgctccataaaaattcagctgagtgaatgaatatgtatggttccccagccccaactctcatgataatcatctcttt

SEQ ID NO: 46465 - DNA, 80 bp, synthetic construct
  source 1..80: mol_type = other DNA
aatgagttgacaattgtacactcattattcctgtctcctcattctccctgccaatatacaaacttacctacttcctcctc

SEQ ID NO: 46466 - DNA, 80 bp, synthetic construct
  source 1..80: mol_type = other DNA
gcagagcaagtcagcaaagagaatcaattcctggtccctcagacggtgactcaccccagggctcaaaaccttaggaggtc

SEQ ID NO: 46467 - DNA, 80 bp, synthetic construct
  source 1..80: mol_type = other DNA
tgggaaatctaagaattagagaggtagataagctccaagatcagagtcctggcctgtcattaggaaaaagtgcctattag

SEQ ID NO: 46468 - DNA, 80 bp, synthetic construct; identical to SEQ ID NO: 12410
  source 1..80: mol_type = other DNA

SEQ ID NO: 46469 - DNA, 80 bp, synthetic construct
  source 1..80: mol_type = other DNA
gtgaaatgaaccaccacacctggctaatttttaaatttttcgtagagacagggttttgctatgctacccaggctggtctc

SEQ ID NO: 46470 - DNA, 80 bp, synthetic construct
  source 1..80: mol_type = other DNA
tcaatcggccccatctcttccattcatgaaaaaaaaaaattcacatctcattgaaacatacataagcttcttgcaaccct

SEQ ID NO: 46471 - DNA, 80 bp, synthetic construct
  source 1..80: mol_type = other DNA
cttcttcaacatcccagtcaatagcctgggtgtcctccatgatctgggaaggatacacattatcaattatcctcattatt

SEQ ID NO: 46472 - DNA, 80 bp, synthetic construct; identical to SEQ ID NO: 12411
  source 1..80: mol_type = other DNA

SEQ ID NO: 46473 - DNA, 80 bp, synthetic construct
  source 1..80: mol_type = other DNA
ggcgtgagccactgcgccccgttgtttttctttcttttttagcccatgctttttatacttttaccagaccacctcagttt

SEQ ID NO: 46474 - DNA, 80 bp, synthetic construct
  source 1..80: mol_type = other DNA
gaaactgcaacatagctgggttaagattttcagatctccttgaaacatacataagcatatataaggttaagacttgcccc

SEQ ID NO: 46475 - DNA, 80 bp, synthetic construct
  source 1..80: mol_type = other DNA
agtcttcgaacacactgttcttgtcttcccacatcttcatgccttagcccaattccttggctttttcccacctagttttc

SEQ ID NO: 46476 - DNA, 80 bp, synthetic construct
  source 1..80: mol_type = other DNA
gcctcagcctcccgagcagctgggattacaggcgcccggcatcacgcctggctaatttttgtatttttagtagagacggg

SEQ ID NO: 46477 - DNA, 80 bp, synthetic construct; identical to SEQ ID NO: 12412
  source 1..80: mol_type = other DNA

SEQ ID NO: 46478 - DNA, 80 bp, synthetic construct
  source 1..80: mol_type = other DNA
tcatcaccgagcctactgatgaaggaacaaatgagatggaaagaaaatagcataaatggaattcacctgaaaatatgcca

SEQ ID NO: 46479 - DNA, 80 bp, synthetic construct
  source 1..80: mol_type = other DNA
ggcccgacgtctccctgtgtcttcatacctaaactcggagcggggcgccaggtaaggatgagtattacagtccgagaagc

SEQ ID NO: 46480 - DNA, 80 bp, synthetic construct
  source 1..80: mol_type = other DNA
gcgactgcgtgtgccgaaaaagagcttatttgctgattggcttctgccgctgtctttcacaaccgcagccagtcgagcgg

SEQ ID NO: 46481 - DNA, 80 bp, synthetic construct; identical to SEQ ID NO: 12413
  source 1..80: mol_type = other DNA

SEQ ID NO: 46482 - DNA, 80 bp, synthetic construct
  source 1..80: mol_type = other DNA
gctgcagtttggagaacagcccgtaggcgtggcagttcactcctgttgcattggaatttcatttccttttgatttggttt

SEQ ID NO: 46483 - DNA, 80 bp, synthetic construct
  source 1..80: mol_type = other DNA
gtcttaaaggctgtccccacctttcgaggggcgagggaaggatcataaaatcatttatttttattttttaattaactaat

SEQ ID NO: 46484 - DNA, 80 bp, synthetic construct
  source 1..80: mol_type = other DNA
ttatttttgtatttttagtagagacgtggtttctccatgttggtcaggctggtctcgaacttctgacctcaggtgatccg

SEQ ID NO: 46485 - DNA, 80 bp, synthetic construct
  source 1..80: mol_type = other DNA
aattctcctgtctcagcctcccgagtagctgggattacaggcatgcgctaccacgcccggctaattttgtatttttagta

SEQ ID NO: 46486 - DNA, 80 bp, synthetic construct; identical to SEQ ID NO: 12414
  source 1..80: mol_type = other DNA

SEQ ID NO: 46487 - DNA, 80 bp, synthetic construct
  source 1..80: mol_type = other DNA
tgtgttcatttccctaaaacgtaaagcattatattttaagtgggtagagagggcttacacaagttgatgttccctcattt

SEQ ID NO: 46488 - DNA, 80 bp, synthetic construct
  source 1..80: mol_type = other DNA
aaaaaaagaaatacattgatctgtgtgatcgaatgtgaattaacaatgacgttgacttgatactacatttctgagtggtt

SEQ ID NO: 46489 - DNA, 80 bp, synthetic construct
  source 1..80: mol_type = other DNA
ataagtgaataataaatctatgggaagaagcagatggactccgtcttgaacccactcaatttttcccccatcaattaccc

SEQ ID NO: 46490 - DNA, 80 bp, synthetic construct
  source 1..80: mol_type = other DNA
aaactgaaaatctatcaggcatctcattccatagttccctgtttgacaagaagaccaaggtgtcttcaaagtctgcccta

SEQ ID NO: 46491 - DNA, 80 bp, synthetic construct; identical to SEQ ID NO: 12415
  source 1..80: mol_type = other DNA

SEQ ID NO: 46492 - DNA, 80 bp, synthetic construct
  source 1..80: mol_type = other DNA
tcctgtacccccaagaactgctcactttttgtacaaaaacctcaggcatagaggaaaggaatcttgcgcaaggtcgtttt

SEQ ID NO: 46493 - DNA, 80 bp, synthetic construct
  source 1..80: mol_type = other DNA
cgactaatcagggccaggctcgatgaggctttgtctccctaccgcgcgcggggccgattctcccgcctcccagccccggc

SEQ ID NO: 46494 - DNA, 80 bp, synthetic construct
  source 1..80: mol_type = other DNA
tttcttgccccatacataccttgaggcgagcaaaaaaattaaattttaaccatgagggaaatcgtgcacatccaggctgg

SEQ ID NO: 46495 - DNA, 80 bp, synthetic construct; identical to SEQ ID NO: 12416
  source 1..80: mol_type = other DNA

SEQ ID NO: 46496 - DNA, 80 bp, synthetic construct
  source 1..80: mol_type = other DNA
cccctgcggggtacttagggccaaaccggagcgggaaggggtgaggccatcgggcggctgcagagagctccagcgcaagg

SEQ ID NO: 46497 - DNA, 80 bp, synthetic construct
  source 1..80: mol_type = other DNA
aagagagacttttttagggcgtgaacagatatgtcgagaaaatgggggtgtgtggttttctttaatgagtccctcaggac

SEQ ID NO: 46498 - DNA, 80 bp, synthetic construct
  source 1..80: mol_type = other DNA
ggccctgcggggcggggccggggcgccgtgggcgcgcggggacaatgcggcgttgcccgccggcaggggcgcgctacctt

SEQ ID NO: 46499 - DNA, 80 bp, synthetic construct; identical to SEQ ID NO: 12417
  source 1..80: mol_type = other DNA

SEQ ID NO: 46500 - DNA, 80 bp, synthetic construct
  source 1..80: mol_type = other DNA
gaggtgggcgaattgggatccctccaggtcaggggttcgagaccatcctgggcaacaaagcgagaccctcccccatgcca

SEQ ID NO: 46501 - DNA, 80 bp, synthetic construct
  source 1..80: mol_type = other DNA
ggaagaccctgtcttaaaaattagaagaagctgggcgcggtggctcacccttgtaatcccagcactttgggaggccaagg

SEQ ID NO: 46502 - DNA, 80 bp, synthetic construct
  source 1..80: mol_type = other DNA
gaggttgcagtgagccgagatagcgccactgcactccagcctggtgacagagcgagactccgtctcaaaaaaaattaaga

SEQ ID NO: 46503 - DNA, 80 bp, synthetic construct; identical to SEQ ID NO: 12418
  source 1..80: mol_type = other DNA

SEQ ID NO: 46504 - DNA, 80 bp, synthetic construct
  source 1..80: mol_type = other DNA
cagtatatctataaaccttcccttctgccagatttcacagctcttaactttattctctgtaggtggcaaatatgttcctc

SEQ ID NO: 46505 - DNA, 80 bp, synthetic construct
  source 1..80: mol_type = other DNA
tgatataccatcgtgttcaacttatttgggtgcaaggacacagcaaaagttaggagatgattgttgtattggagtgctaa

SEQ ID NO: 46506 - DNA, 80 bp, synthetic construct
  source 1..80: mol_type = other DNA
gaattatttgaaaagttgaaagatggaaacatcatgtatcttccataccctgttaattgagcttttctcctgactgcatt

SEQ ID NO: 46507 - DNA, 80 bp, synthetic construct; identical to SEQ ID NO: 12419
  source 1..80: mol_type = other DNA

SEQ ID NO: 46508 - DNA, 80 bp, synthetic construct
  source 1..80: mol_type = other DNA
tgaaccaccttgtctcagccaccatgagtggtgtcaccacctgcctccgtttccctggccagctcaatgctgacctccgc

SEQ ID NO: 46509 - DNA, 80 bp, synthetic construct
  source 1..80: mol_type = other DNA
cccgccacggccgatacctcaccgtggctgctgtcttccgtggtcggatgtccatgaaggaggtcgatgagcagatgctt

SEQ ID NO: 46510 - DNA, 80 bp, synthetic construct
  source 1..80: mol_type = other DNA
tcactgccatgttccgccggaaggccttcctccactggtacacaggcgagggcatggacgagatggagttcaccgaggct

SEQ ID NO: 46511 - DNA, 80 bp, synthetic construct; identical to SEQ ID NO: 12420
  source 1..80: mol_type = other DNA

SEQ ID NO: 46512 - DNA, 80 bp, synthetic construct
  source 1..80: mol_type = other DNA
attccatttgtccagttaatacttcctcttaaaaatctccaagaagctgggtctccagatcccatttagaaccaaccagg

SEQ ID NO: 46513 - DNA, 80 bp, synthetic construct
  source 1..80: mol_type = other DNA
ggagagggaaatccaggctattaaagtcactaaatttctaagtatgtccatttcccatctcagcttcaagggaggtgtca

SEQ ID NO: 46514 - DNA, 80 bp, synthetic construct
  source 1..80: mol_type = other DNA
agaccagccttggtccctaagcctccagaaacgtcttcttaatccccaccttttcttactcccaaaaaagaatgaacacc

SEQ ID NO: 46515 - DNA, 80 bp, synthetic construct
  source 1..80: mol_type = other DNA
tttgcaacatctcatttcttccttttgctgttgcttcccccctcacacacttggttttgttctatcctacatttgagatt

SEQ ID NO: 46516 - DNA, 80 bp, synthetic construct; identical to SEQ ID NO: 12421
  source 1..80: mol_type = other DNA

SEQ ID NO: 46517 - DNA, 80 bp, synthetic construct
  source 1..80: mol_type = other DNA
cgatttggtatctcagggaggtactggtaaggacactgactgctttatagaccctcacatcattgtttctggtacccaaa

SEQ ID NO: 46518 - DNA, 80 bp, synthetic construct
  source 1..80: mol_type = other DNA
gggaaggcataggcttagatgcaggatccagggatggaaaatggaagctgagaagaatgacaaatcacgtgtaactggtt

SEQ ID NO: 46519 - DNA, 80 bp, synthetic construct
  source 1..80: mol_type = other DNA
tttgggttatgtgtacccatggccatttcctgtgatcctgtgggcttagtcaacctatgacaccaagataactagtgaag

SEQ ID NO: 46520 - DNA, 80 bp, synthetic construct; identical to SEQ ID NO: 12422
  source 1..80: mol_type = other DNA

SEQ ID NO: 46521 - DNA, 80 bp, synthetic construct
  source 1..80: mol_type = other DNA
tcaaggaattctgcctcagcttcccaagtagctgggattacaggcacccaccatcacgccgggctaatttttgtatttta

SEQ ID NO: 46522 - DNA, 80 bp, synthetic construct
  source 1..80: mol_type = other DNA
actaggcgggattgctaccttatggtcccattctaaaacaatctgtaccatctactacctcatacttttaagttcacaat

SEQ ID NO: 46523 - DNA, 80 bp, synthetic construct
  source 1..80: mol_type = other DNA
tataagtaacttgcttttctcccattctagaaagcctattgtatgcaagaaagcctattgtatgcaagggaagaagctac

SEQ ID NO: 46524 - DNA, 80 bp, synthetic construct; identical to SEQ ID NO: 12423
  source 1..80: mol_type = other DNA

SEQ ID NO: 46525 - DNA, 80 bp, synthetic construct
  source 1..80: mol_type = other DNA
gtatttttggtagagacaaggtttcgtcatgttggccaggctggtcttgaactcctgacctcagatgatctgcctgcctt

SEQ ID NO: 46526 - DNA, 80 bp, synthetic construct
  source 1..80: mol_type = other DNA
tctagacaacaggctcaaacagtctgatttaattaggaagttaaataagttgaggtggggtggagtgggatcatcagaag

SEQ ID NO: 46527 - DNA, 80 bp, synthetic construct
  source 1..80: mol_type = other DNA
gtcaatggacatgctcagggaggccagtgggttacatgcaacaggaggatcattcaggcaacttcagctatgaggctggg

SEQ ID NO: 46528 - DNA, 80 bp, synthetic construct; identical to SEQ ID NO: 12424
  source 1..80: mol_type = other DNA

SEQ ID NO: 46529 - DNA, 80 bp, synthetic construct
  source 1..80: mol_type = other DNA
atctcactctatcacccaggctagaatgcagtggtgcgatcttggcttactgcagcctccgcctcctgagttcaagtgat

SEQ ID NO: 46530 - DNA, 80 bp, synthetic construct
  source 1..80: mol_type = other DNA
tgggattacaagtgtgagccacagcacccagcccgaatatgcatttctttctctttttttttttgagacagagtcttgct

SEQ ID NO: 46531 - DNA, 80 bp, synthetic construct
  source 1..80: mol_type = other DNA
cacgcccggctgttttgtatttttagtagagacggggtttcactgtgttagccaggatggtctcaatctcctgacctcgt

SEQ ID NO: 46532 - DNA, 80 bp, synthetic construct
  source 1..80: mol_type = other DNA
gcaattctcctgcctcagcttcccgagtagctgagattacaggcatgcaccaccaagcctggctaatttttttttgtatt

SEQ ID NO: 46533 - DNA, 80 bp, synthetic construct; identical to SEQ ID NO: 12425
  source 1..80: mol_type = other DNA

SEQ ID NO: 46534 - DNA, 80 bp, synthetic construct
  source 1..80: mol_type = other DNA
ccatgatctacaggtgaattaactggggcgctgagaaaagcagtgatatgccctagaattaattaactgtcaataggctg

SEQ ID NO: 46535 - DNA, 80 bp, synthetic construct
  source 1..80: mol_type = other DNA
taaaacaactcatttatgtagaagcttagcactgtgtctggcacacagaaagtgattaataaacatcaatgactcccagg

SEQ ID NO: 46536 - DNA, 80 bp, synthetic construct
  source 1..80: mol_type = other DNA
tcactttggctgcccccatggtcccactgccgctggacaccagtgtgatcttattggctgaagtcaagggaccactgatc

SEQ ID NO: 46537 - DNA, 80 bp, synthetic construct; identical to SEQ ID NO: 12426
  source 1..80: mol_type = other DNA

SEQ ID NO: 46538 - DNA, 80 bp, synthetic construct
  source 1..80: mol_type = other DNA
aggatgcttgtgagattgacggaaatcattaagaacaagaaatccccgatcaagcagcaacccccaccctctccacaagc

SEQ ID NO: 46539 - DNA, 80 bp, synthetic construct
  source 1..80: mol_type = other DNA
aacctgaaatccataggagtccaggtggtgaaggcttcagcactccatcttggggtgcctaggtggcaagtgagctaggc

SEQ ID NO: 46540 - DNA, 80 bp, synthetic construct
  source 1..80: mol_type = other DNA
cacctgcacccgctgctcctcaatctgctgcttagtcttggccacctgggtaggagggtgaagtcaggttcacgctctga

SEQ ID NO: 46541 - DNA, 80 bp, synthetic construct
  source 1..80: mol_type = other DNA
ccaacatggtgaaaccctgtctctactaaaatacaaaaaattagccaggtgtggtggcgaatgcctgtagtcccagccac

SEQ ID NO: 46542 - DNA, 80 bp, synthetic construct; identical to SEQ ID NO: 12427
  source 1..80: mol_type = other DNA

SEQ ID NO: 46543 - DNA, 80 bp, synthetic construct
  source 1..80: mol_type = other DNA
ttttttgtcttttgcacatggtgcagatttaacagaaaaaaaagtgaaccacgaggcttcttcctcattctccaaaccac

SEQ ID NO: 46544 - DNA, 80 bp, synthetic construct
  source 1..80: mol_type = other DNA
ggagtgcagtggcacgatcagctcagtgcaaccttcacctcccaggttcaagctaatctcttgcctcagcctctcaagta

SEQ ID NO: 46545 - DNA, 80 bp, synthetic construct
  source 1..80: mol_type = other DNA
atcgcacccagcctagatttcatcttcttattccttgcagtgtgagggaatcagaaggctcttatcaagatgctagtgag

SEQ ID NO: 46546 - DNA, 80 bp, synthetic construct; identical to SEQ ID NO: 12428
  source 1..80: mol_type = other DNA

SEQ ID NO: 46547 - DNA, 80 bp, synthetic construct
  source 1..80: mol_type = other DNA
cacatgccttcgttgtcccattgctcaggctcagccatgcaccatcatcattgtaggtctcatcaatacatgtgatgctt

SEQ ID NO: 46548 - DNA, 80 bp, synthetic construct
  source 1..80: mol_type = other DNA
tgtcccttaggcaaccatttgtctgtttctttttccttcctgtctatgcccaccttttggtgaaactcaacctccagaag

SEQ ID NO: 46549 - DNA, 80 bp, synthetic construct
  source 1..80: mol_type = other DNA
agcaattctcctgcctcagcctcccatgtatctgggattataggtgcctgccaccacgctcagctaatttttgtgttttt

SEQ ID NO: 46550 - DNA, 80 bp, synthetic construct; identical to SEQ ID NO: 12429
  source 1..80: mol_type = other DNA

SEQ ID NO: 46551 - DNA, 80 bp, synthetic construct
  source 1..80: mol_type = other DNA
ctgtagtcccagctacttgggaagctgaggtaggagaatcgcttgaacccaggaggcagaggttgcagtagctgagatca

SEQ ID NO: 46552 - DNA, 80 bp, synthetic construct
  source 1..80: mol_type = other DNA
gcctgtgcaatatggcaagatctcacctctagaaaaaaatttaaaaattagctgggcgtggtggtgtgcccctgtggtcc

SEQ ID NO: 46553 - DNA, 80 bp, synthetic construct
  source 1..80: mol_type = other DNA
ctgcctctttgagatctctctctctctagaagctttcatattttttgtcctcagcattcttaagtttcacagtgttatgt

SEQ ID NO: 46554 - DNA, 80 bp, synthetic construct
  source 1..80: mol_type = other DNA
tctcgctctgtcacccaggctggagtgcagtggcatgatctcatctcactgcaacctctgcctcccaggttcaagtgatt

SEQ ID NO: 46555 - DNA, 80 bp, synthetic construct; identical to SEQ ID NO: 12430
  source 1..80: mol_type = other DNA

SEQ ID NO: 46556 - DNA, 80 bp, synthetic construct
  source 1..80: mol_type = other DNA
ttcaagtgattctcctgcctcagcctcctgagtagctgggattacagtcaccatttcagctaatttttgtgtttttagta

SEQ ID NO: 46557 - DNA, 80 bp, synthetic construct
  source 1..80: mol_type = other DNA
tgagcttcaccctacggtgatctggataggccatgtacggagaaacatctgattcaggattttaagttatttctttttgg

SEQ ID NO: 46558 - DNA, 80 bp, synthetic construct
  source 1..80: mol_type = other DNA
gttggggttggggttggctctcagtatttagcattcatgaaagttatagtcatttcatgcccctgttactggtaaactat

SEQ ID NO: 46559 - DNA, 80 bp, synthetic construct
  source 1..80: mol_type = other DNA
agcctggccgacatggtgaaacccctctctactaaaaaaaaaaaaaaaaatacaaaaattacctgggcgtggtggtgggc

SEQ ID NO: 46560 - DNA, 80 bp, synthetic construct; identical to SEQ ID NO: 12431
  source 1..80: mol_type = other DNA

SEQ ID NO: 46561 - DNA, 80 bp, synthetic construct
  source 1..80: mol_type = other DNA
cttccagtttccaaaatgatgctctggtttccgttcctattttctccatcttttttttttttaaagcctagtcagctggg

SEQ ID NO: 46562 - DNA, 80 bp, synthetic construct
  source 1..80: mol_type = other DNA
aagctactcaggaagctgaggtgggagtattgcttgagcccaggcagttgaagctgtagtgagctgagattgtaccgctg

SEQ ID NO: 46563 - DNA, 80 bp, synthetic construct
  source 1..80: mol_type = other DNA
aacaatcaattgagataactcactacctttggacaagcctctatctttaccttaaaaaaaatcattttagatcgcgccac

SEQ ID NO: 46564 - DNA, 80 bp, synthetic construct
  source 1..80: mol_type = other DNA
cagagtctcactctgtcatccaggctggagtgcagtggcgcgatctcggctcactgcaagctccgcctcccgggtttatg

SEQ ID NO: 46565 - DNA, 80 bp, synthetic construct; identical to SEQ ID NO: 12432
  source 1..80: mol_type = other DNA

SEQ ID NO: 46566 - DNA, 80 bp, synthetic construct
  source 1..80: mol_type = other DNA
agcgcccccagatcagaaacctcctttctgactccacctcacagcctttgcacttactggtcccctgcctagccacaagc

SEQ ID NO: 46567 - DNA, 80 bp, synthetic construct
  source 1..80: mol_type = other DNA
tcactgtgccttctggattcaagcgattctcacgcctcagcctcccaagtagctggaactgcaggctcaaaccaccacac

SEQ ID NO: 46568 - DNA, 80 bp, synthetic construct
  source 1..80: mol_type = other DNA
cttaaaaagcacaggctagaatattcttggctcagaactgtacattgttccttcttatctccaagtctgatctcaaacac

SEQ ID NO: 46569 - DNA, 80 bp, synthetic construct; identical to SEQ ID NO: 12433
  source 1..80: mol_type = other DNA

SEQ ID NO: 46570 - DNA, 80 bp, synthetic construct
  source 1..80: mol_type = other DNA
ccttaatctgcagacaagtaaggtcatgtttagaaggttaagaaccttatccatagcttcactgcaagctagcagtttcc

SEQ ID NO: 46571 - DNA, 80 bp, synthetic construct
  source 1..80: mol_type = other DNA
tgctgggtagaacacagtttgagttgcaaagctgtatgccatgttcaacctgtcaagtcacccaggaatttaacataata

SEQ ID NO: 46572 - DNA, 80 bp, synthetic construct
  source 1..80: mol_type = other DNA
cttggtagttctgttctataaagtagccatgaatgctgaattagttaatacctaatttgttcctagaagaaatacaggct

SEQ ID NO: 46573 - DNA, 80 bp, synthetic construct
  source 1..80: mol_type = other DNA
gaactcacagctaacagcagtataacttatgcatgaacgaagcttacctaacacatgtatttctcccataaggcacatca

SEQ ID NO: 46574 - DNA, 80 bp, synthetic construct; identical to SEQ ID NO: 12434
  source 1..80: mol_type = other DNA

SEQ ID NO: 46575 - DNA, 80 bp, synthetic construct
  source 1..80: mol_type = other DNA
actatacttcctggcaatatcaagggctgcccatatctcactttgcaggattcaatgtccaagtccatgttttccttctt

SEQ ID NO: 46576 - DNA, 80 bp, synthetic construct
  source 1..80: mol_type = other DNA
gcctttgcacgggcacagcctgctccaaacatatgatcagccttattgatcatatcccttcttggccttctctttttttt

SEQ ID NO: 46577 - DNA, 80 bp, synthetic construct
  source 1..80: mol_type = other DNA
atttttgtatttttagtagaaacagggtttcactatgttggccaggctagtctcgaactcttgaccttgtgatccacctg

SEQ ID NO: 46578 - DNA, 80 bp, synthetic construct; identical to SEQ ID NO: 12435
  source 1..80: mol_type = other DNA

SEQ ID NO: 46579 - DNA, 80 bp, synthetic construct
  source 1..80: mol_type = other DNA
tcatatgggggagttggtccagagatggagagccagaataagaccaaagttaaagtatgagaaatagtgtagtggtgtcc

SEQ ID NO: 46580 - DNA, 80 bp, synthetic construct
  source 1..80: mol_type = other DNA
tctcgatctcactcaggtactgagcagacaccttttcctgcttggctttagcttcctgtccaagcagagatcaggtagga

SEQ ID NO: 46581 - DNA, 80 bp, synthetic construct
  source 1..80: mol_type = other DNA
ccggatcccagcatctctcttggcctctgcttctccaatccgtgcatctttttggacttgagctgttcgagccttcccca

SEQ ID NO: 46582 - DNA, 80 bp, synthetic construct; identical to SEQ ID NO: 12436
  source 1..80: mol_type = other DNA

SEQ ID NO: 46583 - DNA, 80 bp, synthetic construct
  source 1..80: mol_type = other DNA
ggggtttcaccaggttggctaggctggtctcgaactcctgacctcaagtgatctgcccaccttggcatcccaaagtgctg

SEQ ID NO: 46584 - DNA, 80 bp, synthetic construct
  source 1..80: mol_type = other DNA
ccctctggtggccctctaacgtctccagggcaatgtgggcaatctcagcctccgtcttccccaggaacatctgacaggcg

SEQ ID NO: 46585 - DNA, 80 bp, synthetic construct
  source 1..80: mol_type = other DNA
ctaagaaatgcttcttccatttcagggaaagaaaggaggaggaggcaagtgccttggggtgcctggaaaagatgagacta

SEQ ID NO: 46586 - DNA, 80 bp, synthetic construct; identical to SEQ ID NO: 12437
  source 1..80: mol_type = other DNA

SEQ ID NO: 46587 - DNA, 80 bp, synthetic construct
  source 1..80: mol_type = other DNA
tggcagagcttgaatgtggaagactgaggaactggcgggggtgaggggacagcaacccacaggagagaatctgggagctg

SEQ ID NO: 46588 - DNA, 80 bp, synthetic construct
  source 1..80: mol_type = other DNA
acagtacttaccggagaccaccatggcctcatttgggccacaagtgaaaaacatggttcaggctggagctggaggagagg

SEQ ID NO: 46589 - DNA, 80 bp, synthetic construct
  source 1..80: mol_type = other DNA
gggtccgctaaggcttttccctacaaaatccttaagatccccagctacctcttctccgcctgcgtatggtccctcccttc

SEQ ID NO: 46590 - DNA, 80 bp, synthetic construct; identical to SEQ ID NO: 12438
  source 1..80: mol_type = other DNA

SEQ ID NO: 46591 - DNA, 80 bp, synthetic construct
  source 1..80: mol_type = other DNA
gctagagtccgcagcccgcccgcccgctggctctcgggcccagccgggctgcctggttagcccggggagggccacatccc

SEQ ID NO: 46592 - DNA, 80 bp, synthetic construct
  source 1..80: mol_type = other DNA
ctcggattcgccgcggggcaactacctgggaaaaccgcagactgggcaatgaaagactacatccggcaaccggatgctgg

SEQ ID NO: 46593 - DNA, 80 bp, synthetic construct
  source 1..80: mol_type = other DNA
gcttgcaaagatacactcaagactgcagacagtaaatcaattttatttgtgttcacagaacatactaggcgatctcgaca

SEQ ID NO: 46594 - DNA, 80 bp, synthetic construct
  source 1..80: mol_type = other DNA
cctcctaaacttacgacccaccaccagacttcatcccagccgggacgtcctcccccacccgagtcctccccatttcttct

SEQ ID NO: 46595 - DNA, 80 bp, synthetic construct; identical to SEQ ID NO: 12439
  source 1..80: mol_type = other DNA

SEQ ID NO: 46596 - DNA, 80 bp, synthetic construct
  source 1..80: mol_type = other DNA
atacgctctcgcgcaccaggtacgcctggtgtttctttgtggtttttcggattctttttggggagtgcggggagtcacag

SEQ ID NO: 46597 - DNA, 80 bp, synthetic construct
  source 1..80: mol_type = other DNA
ccctcttcagccatcaggatctggcagaagacgatggtgagcagcagaaagagaagccttttggctgggttcggttcctc

SEQ ID NO: 46598 - DNA, 80 bp, synthetic construct
  source 1..80: mol_type = other DNA
gcgctttcggtgcccgcgagaggcgctggggcgcccggcaggggccgctgcgggctccgggagagggtcgaaggtgaaga

SEQ ID NO: 46599 - DNA, 80 bp, synthetic construct; identical to SEQ ID NO: 12440
  source 1..80: mol_type = other DNA

SEQ ID NO: 46600 - DNA, 80 bp, synthetic construct
  source 1..80: mol_type = other DNA
agccacaggatccctcacaggcctttttttttttttttttttggagatggagcagtctcgttcggtcgccaggctggaat

SEQ ID NO: 46601 - DNA, 80 bp, synthetic construct
  source 1..80: mol_type = other DNA
tggtctcgatttcctgacctcgtgatctgcctcgctccctccgtccttcttctagtagtctcaagttgctattgttgcca

SEQ ID NO: 46602 - DNA, 80 bp, synthetic construct
  source 1..80: mol_type = other DNA
gcaatactgacccagttatatgcacgcattcatgcacttgtaggtatccttagaatataaactccccaagaaggaaattg

SEQ ID NO: 46603 - DNA, 80 bp, synthetic construct; identical to SEQ ID NO: 12441
  source 1..80: mol_type = other DNA

SEQ ID NO: 46604 - DNA, 80 bp, synthetic construct
  source 1..80: mol_type = other DNA
aacaaacctgcacatataccccagaatttaaaataaaagttggggagggagggaaggatagaaagattaaaaaagtaata

SEQ ID NO: 46605 - DNA, 80 bp, synthetic construct
  source 1..80: mol_type = other DNA
gccataaaaagaatgcaatcctggaaaaaaaggaaaacataccacgtacacctaccaacacacatgtacacagtaaaggt

SEQ ID NO: 46606 - DNA, 80 bp, synthetic construct
  source 1..80: mol_type = other DNA
atttgccccttgctgtaagtcaaacaaccaaatttatgggacaaacattctaaattgtgagacattatacaaatgttaca

SEQ ID NO: 46607 - DNA, 80 bp, synthetic construct; identical to SEQ ID NO: 12442
  source 1..80: mol_type = other DNA

SEQ ID NO: 46608 - DNA, 80 bp, synthetic construct
  source 1..80: mol_type = other DNA
ccaccgtgcagaatttaacatcttttgagcattcacctgtttcaggcgccctctgttgagggtactactgttgagagtcc

SEQ ID NO: 46609 - DNA, 80 bp, synthetic construct
  source 1..80: mol_type = other DNA
ctttttttgttatattgagtttctgcctgaaggaaaggcaagctttcttgaagatcctaagaaaggccaggcacggtggt

SEQ ID NO: 46610 - DNA, 80 bp, synthetic construct
  source 1..80: mol_type = other DNA
ggaggctgaggcaggagaatcgcttgaactcaggaggcagaggttgcagcaagctgagagcgtgccactgcactccagcc

SEQ ID NO: 46611 - DNA, 80 bp, synthetic construct; identical to SEQ ID NO: 12443
  source 1..80: mol_type = other DNA

SEQ ID NO: 46612 - DNA, 80 bp, synthetic construct
  source 1..80: mol_type = other DNA
agcctgggtttcactctagactgtagagcttgtgggttgctggatgagataaagggaggaaaattcaagcaggaaactga

SEQ ID NO: 46613 - DNA, 80 bp, synthetic construct
  source 1..80: mol_type = other DNA
taacaagagcctgagaaggtggccctaagagacattcctagcataagataatcagaattgggcaatgagatggatatcat

SEQ ID NO: 46614 - DNA, 80 bp, synthetic construct
  source 1..80: mol_type = other DNA
ggtgcacaaagtgaatacatatatgatctcttccactggaggctgtgtcatacacatctttgtgtcctccagagaaccca

SEQ ID NO: 46615 - DNA, 80 bp, synthetic construct
  source 1..80: mol_type = other DNA
gtggctacactcctccaaaccactcatacaaatgtacaacatctttagaaaagctgggacaattcttacacagacaccaa

SEQ ID NO: 46616 - DNA, 80 bp, synthetic construct; identical to SEQ ID NO: 12444
  source 1..80: mol_type = other DNA

SEQ ID NO: 46617 - DNA, 80 bp, synthetic construct
  source 1..80: mol_type = other DNA
ctacacaatgaccaacataaacccatgactacttacacatgtggacagaccctcacactcacataaacataaattgggag

SEQ ID NO: 46618 - DNA, 80 bp, synthetic construct
  source 1..80: mol_type = other DNA
ggggaaatgaaggggatgccaggatcttgttttgccactacctcccacatctggaatctgggcctccagctgggtctagt

SEQ ID NO: 46619 - DNA, 80 bp, synthetic construct
  source 1..80: mol_type = other DNA
ctgccacacaggaagctagggaaatgttgggggtgaatcattaagccaataagggggtgggggagtgcaggctggggaat

SEQ ID NO: 46620 - DNA, 80 bp, synthetic construct
  source 1..80: mol_type = other DNA
gtttgacctttgccttgatccatcaccactgctagcctccttctcagccccttgtttttcttcatgacacatatcacgtt

SEQ ID NO: 46621 - DNA, 80 bp, synthetic construct; identical to SEQ ID NO: 12445
  source 1..80: mol_type = other DNA

SEQ ID NO: 46622 - DNA, 80 bp, synthetic construct
  source 1..80: mol_type = other DNA
acaatccctgacataggagtgagtcaggcctgctgcctcacctgggtactgctgcactgctgaccacaggcccagaacgg

SEQ ID NO: 46623 - DNA, 80 bp, synthetic construct
  source 1..80: mol_type = other DNA
ggtattcagtagatcctcaataactacttggtgacttgagatgggtttgagatagaaaggaaacacggaatagcaaaaag

SEQ ID NO: 46624 - DNA, 80 bp, synthetic construct
  source 1..80: mol_type = other DNA
agaatataaatttactccttctgggcacatagtaggtgcttcttgcatggagcaggggcattattataattatgagaaga

SEQ ID NO: 46625 - DNA, 80 bp, synthetic construct; identical to SEQ ID NO: 12446
  source 1..80: mol_type = other DNA

SEQ ID NO: 46626 - DNA, 80 bp, synthetic construct
  source 1..80: mol_type = other DNA
cccagctaatttttatttattttggtagagacagggtcttgccatgttgcccaggcaggtctcaaaattctgggctcaag

SEQ ID NO: 46627 - DNA, 80 bp, synthetic construct
  source 1..80: mol_type = other DNA
gagttcgagaccagcctggccaacatggcaaaaccccgtctctaccaaaaatacaaaaattagctgggcgtggtggcgtg

SEQ ID NO: 46628 - DNA, 80 bp, synthetic construct
  source 1..80: mol_type = other DNA
ggctggagtgcagtggcacaatctcggctcactgcaacctctgcctcccgggttcaggcgattctcctgcttcagcctcc

SEQ ID NO: 46629 - DNA, 80 bp, synthetic construct; identical to SEQ ID NO: 12447
  source 1..80: mol_type = other DNA

SEQ ID NO: 46630 - DNA, 80 bp, synthetic construct
  source 1..80: mol_type = other DNA
cctggcagttcccctgacgcaaaaccatggcaagagttccgggagcaccaaggcaaggtcacaaaagtggcacgatgacc

SEQ ID NO: 46631 - DNA, 80 bp, synthetic construct
  source 1..80: mol_type = other DNA
ttggtttctttcccaccagattataactccaccagagtaggactttatctatcttgtgtactgctctattttcagtgcct

SEQ ID NO: 46632 - DNA, 80 bp, synthetic construct
  source 1..80: mol_type = other DNA
caaaacataatcataggggaaaaatgcacaacaaataaaatatttccccttttgtccagacttttcagacaccccgtatt

SEQ ID NO: 46633 - DNA, 80 bp, synthetic construct
  source 1..80: mol_type = other DNA
ctccagcctaccctccaaagcagttgccataggctcttttcttccaaggttgggagggacagttcattccccaagaggcc

SEQ ID NO: 46634 - DNA, 80 bp, synthetic construct; identical to SEQ ID NO: 12448
  source 1..80: mol_type = other DNA

SEQ ID NO: 46635 - DNA, 80 bp, synthetic construct
  source 1..80: mol_type = other DNA
tttatgacactttcccttcccagacacttggtcatttctttccccaggttgggaatcccacctaccatagaaggggaatt

SEQ ID NO: 46636 - DNA, 80 bp, synthetic construct
  source 1..80: mol_type = other DNA
gctgaccctgggagcctgaattaatagatttcttgagagctgagattctctggttcaggaaagaaaaagggggtaccaaa

SEQ ID NO: 46637 - DNA, 80 bp, synthetic construct
  source 1..80: mol_type = other DNA
agttcactaccaaaaaggcacattttattttagtgaaaatgggacaatcatgggccataaagaaccttcctaactattgt

SEQ ID NO: 46638 - DNA, 80 bp, synthetic construct
  source 1..80: mol_type = other DNA
ttcttgatgttgtgcatctctaattttgtcctttttctcacacatgccaaactcttacccattggaccctataaccgttc

SEQ ID NO: 46639 - DNA, 80 bp, synthetic construct; identical to SEQ ID NO: 12449
  source 1..80: mol_type = other DNA

SEQ ID NO: 46640 - DNA, 80 bp, synthetic construct
  source 1..80: mol_type = other DNA
gtcaggagttcgagaccagcctggccaacatggtgaaaccccgtctctactaaaaatacaaaaattagcctggcgtggtg

SEQ ID NO: 46641 - DNA, 80 bp, synthetic construct
  source 1..80: mol_type = other DNA
taaaccagatattctcaacctatccctgtgggttgaactcatcctatctctgaccctgagcctttcacataaaatttggt

SEQ ID NO: 46642 - DNA, 80 bp, synthetic construct
  source 1..80: mol_type = other DNA
tttgtgtaaaggcctccaccatgatgatatagagttttccatcacccccaaaagttccctgcatccctttgtagtcagtc

SEQ ID NO: 46643 - DNA, 80 bp, synthetic construct; identical to SEQ ID NO: 12450
  source 1..80: mol_type = other DNA

SEQ ID NO: 46644 - DNA, 80 bp, synthetic construct
  source 1..80: mol_type = other DNA
agacactcttttgtgtccagattcttttgctcagtataatatttttgtgattcatccatgtcatggcatgattcagtagt

SEQ ID NO: 46645 - DNA, 80 bp, synthetic construct
  source 1..80: mol_type = other DNA
ttcttatttctcttgagcagatgtctaggagtagtataactaggtgcatgtttagcttagtaagaaatcgctgctgtgcc

SEQ ID NO: 46646 - DNA, 80 bp, synthetic construct
  source 1..80: mol_type = other DNA
gtgtgtgccaccatgcccagcctaaaggcagaaggatttcttgagcccaggagtttgagatcagcctgggcagcatggag

SEQ ID NO: 46647 - DNA, 80 bp, synthetic construct; identical to SEQ ID NO: 12451
  source 1..80: mol_type = other DNA

SEQ ID NO: 46648 - DNA, 80 bp, synthetic construct
  source 1..80: mol_type = other DNA
ggagtcggagattgcacagtgagccaagattgcaccactgcactccagcctggcgagactccgtctcaaaaaaaaaaaaa

SEQ ID NO: 46649 - DNA, 80 bp, synthetic construct
  source 1..80: mol_type = other DNA
gtgttttttttgttatagaacaggttgccactcagattacctcaagggacagagatgggctggaatagagccacctcagt

SEQ ID NO: 46650 - DNA, 80 bp, synthetic construct
  source 1..80: mol_type = other DNA
gggtagtgtgaagtgacactagcccacacacctgagcatgtatgatgcctcagaggcactgtgtgtttttttttgtttgt

SEQ ID NO: 46651 - DNA, 80 bp, synthetic construct
  source 1..80: mol_type = other DNA
aatttttcgtatttttagtagagatggggtttccccgtgttagccaagatggtctcgatctcctgatctcgtgatctgcc

SEQ ID NO: 46652 - DNA, 80 bp, synthetic construct; identical to SEQ ID NO: 12452
  source 1..80: mol_type = other DNA

SEQ ID NO: 46653 - DNA, 80 bp, synthetic construct
  source 1..80: mol_type = other DNA
gtaatgggagttagatgtgaacctaggtctatttcattccaaagcctagtggcatacctatttgtcagagcatagatgct

SEQ ID NO: 46654 - DNA, 80 bp, synthetic construct
  source 1..80: mol_type = other DNA
gcctcctgattagctgggattacaggcatgtgccaccatacctggctaatttttgtttttttagtacagatggggtttca

SEQ ID NO: 46655 - DNA, 80 bp, synthetic construct
  source 1..80: mol_type = other DNA
catagctcactatagccccaaactcctgggctcaagcaatcctgccacttcagcttcctgagtttctaggactacaggcg

SEQ ID NO: 46656 - DNA, 80 bp, synthetic construct
  source 1..80: mol_type = other DNA
ctggacaactgtatgttttaattcacttaattttcatggtacacctctgagaggagggcatgacaacactcattatacag

SEQ ID NO: 46657 - DNA, 80 bp, synthetic construct; identical to SEQ ID NO: 12453
  source 1..80: mol_type = other DNA

SEQ ID NO: 46658 - DNA, 80 bp, synthetic construct
  source 1..80: mol_type = other DNA
gaactgcccctagctcaagcaaggatcctaatttagtagatgaggtcagggccggaagattatctgcagggtgacctatg

SEQ ID NO: 46659 - DNA, 80 bp, synthetic construct
  source 1..80: mol_type = other DNA
caggtgagagactaatcactgaacccactgtcagtattcagcagtgtgcctgattgatatatactaggtactcaatggtt

SEQ ID NO: 46660 - DNA, 80 bp, synthetic construct
  source 1..80: mol_type = other DNA
tcttggctcactgcaacctctgcctcccaggttcaagcagttctcctgcctcagcctcctaggttgctgggattacaggc

SEQ ID NO: 46661 - DNA, 80 bp, synthetic construct
  source 1..80: mol_type = other DNA
cctcctgagtagctgggactacaggctcccgccaccacactcagctaattttttgtatttttagtagagacggggtttct

SEQ ID NO: 46662 - DNA, 80 bp, synthetic construct; identical to SEQ ID NO: 12454
  source 1..80: mol_type = other DNA

SEQ ID NO: 46663 - DNA, 80 bp, synthetic construct
  source 1..80: mol_type = other DNA
cagcactaggctagatgacagatagggtgggggaagagaaaatgctgcattgggaaaatgcttggtataggctgatggct

SEQ ID NO: 46664 - DNA, 80 bp, synthetic construct
  source 1..80: mol_type = other DNA
aatggaagcccatttctgatcacatacatgacccatgcttcttcagaaaggaaggcatgaagttgaagggggaactaaga

SEQ ID NO: 46665 - DNA, 80 bp, synthetic construct
  source 1..80: mol_type = other DNA
aacatcagtagattgtcaaatgtgttccaactaagagcagtggaaggcagaaaggtgtataaaatatgggtcttaagagg

SEQ ID NO: 46666 - DNA, 80 bp, synthetic construct; identical to SEQ ID NO: 12455
  source 1..80: mol_type = other DNA

SEQ ID NO: 46667 - DNA, 80 bp, synthetic construct
  source 1..80: mol_type = other DNA
ccagcaggaatgtggggtagtcacacaaacacagatacaattcctggtttccctactagacacttcccaggctctcaatt

SEQ ID NO: 46668 - DNA, 80 bp, synthetic construct
  source 1..80: mol_type = other DNA
ctcagtgcagtggtgcgatcatggctcagtgcagtggtgcgatcatggctcagtgcagtggtgcaattatgtctcagtgc

SEQ ID NO: 46669 - DNA, 80 bp, synthetic construct
  source 1..80: mol_type = other DNA
gctcaagcagttctccctcctcagcctcctgatttgttgggaccatgggtgtgtgccaccacatctggctaattttttga

SEQ ID NO: 46670 - DNA, 80 bp, synthetic construct
  source 1..80: mol_type = other DNA
gttgatgaagagttcttagtgatccatgttttctctccagtcctccaccaaaataacgcattttaaaaaaacaaactccc

SEQ ID NO: 46671 - DNA, 80 bp, synthetic construct; identical to SEQ ID NO: 12456
  source 1..80: mol_type = other DNA

SEQ ID NO: 46672 - DNA, 80 bp, synthetic construct
  source 1..80: mol_type = other DNA
aggctggagtgcaatggcttgatttcggctcaccgcaacctccgcctcccaggttcaagcgattctcctgcctcagcctc

SEQ ID NO: 46673 - DNA, 80 bp, synthetic construct
  source 1..80: mol_type = other DNA
caaccgcgcctggccggtttcctttaacttttctaaagagcttctacttttcttccttggcatttgaatttctttggctt

SEQ ID NO: 46674 - DNA, 80 bp, synthetic construct
  source 1..80: mol_type = other DNA
tcctggctacctgctgaaatgagtaagtgacaaagggttttttccatcctttccattttgttcatcattcaaagccctag

SEQ ID NO: 46675 - DNA, 80 bp, synthetic construct; identical to SEQ ID NO: 12457
  source 1..80: mol_type = other DNA

SEQ ID NO: 46676 - DNA, 80 bp, synthetic construct
  source 1..80: mol_type = other DNA
gaaaatatatgcaaaatgcctattaccttacttggcatgtagcaaggttcattaaatgtcagtcccatttcaccccttcc

SEQ ID NO: 46677 - DNA, 80 bp, synthetic construct
  source 1..80: mol_type = other DNA
agacagaaagatgtgattgctttctgcacccatcctgagtcatgaccaatactcccataacaaaagacaggcgaacaaaa

SEQ ID NO: 46678 - DNA, 80 bp, synthetic construct
  source 1..80: mol_type = other DNA
tcaagcaatcctcctgactcagcctacagagtagctggaactacaggtgcagaccaccacacacaggtaattttttgtag

SEQ ID NO: 46679 - DNA, 80 bp, synthetic construct; identical to SEQ ID NO: 12458
  source 1..80: mol_type = other DNA

SEQ ID NO: 46680 - DNA, 80 bp, synthetic construct
  source 1..80: mol_type = other DNA
gctactcaggaggctgaggcaggagaatcacttgaacctgggagacagaagttgcagtgagttgagatcgtgccactgca

SEQ ID NO: 46681 - DNA, 80 bp, synthetic construct
  source 1..80: mol_type = other DNA
ggagttcaagaccagcctgaccaacatggagaaaccccatctctactaaaaatacaaaattagctgggcatggtggtgcg

SEQ ID NO: 46682 - DNA, 80 bp, synthetic construct
  source 1..80: mol_type = other DNA
gattgaacacaaagtgaatggtcgcatgggaataggctgagggagaaagccagcagagcctgtctgttgggattctgctt

SEQ ID NO: 46683 - DNA, 80 bp, synthetic construct
  source 1..80: mol_type = other DNA
gcttatacagaaaggcaaaggaaggctagagtaatagttctaagttttatgattggctttgggggaaagacattctggtt

SEQ ID NO: 46684 - DNA, 80 bp, synthetic construct; identical to SEQ ID NO: 12459
  source 1..80: mol_type = other DNA

SEQ ID NO: 46685 - DNA, 80 bp, synthetic construct
  source 1..80: mol_type = other DNA
aagaaccaagttagcattaggttgacctgtgagtgacaaaaaccgaatagaacaatggcttcctagatggaagtccattt

SEQ ID NO: 46686 - DNA, 80 bp, synthetic construct
  source 1..80: mol_type = other DNA
cacaccccatcctagtaggtccacagacagaagtaacccgtaacatttctgctcatttcaaataggttggaaggaagtct

SEQ ID NO: 46687 - DNA, 80 bp, synthetic construct
  source 1..80: mol_type = other DNA
tggtgtgatgggaatgagcatagtttgtggaactctgggggagctgactggaatagaaaattaaaaatactgacaaatga

SEQ ID NO: 46688 - DNA, 80 bp, synthetic construct; identical to SEQ ID NO: 12460
  source 1..80: mol_type = other DNA

SEQ ID NO: 46689 - DNA, 80 bp, synthetic construct
  source 1..80: mol_type = other DNA
ccccgcaagccgcaaaaccagcaagtttttattagggattttcaaaaggggagggagtgtgtgaataggtgtgggtcaca

SEQ ID NO: 46690 - DNA, 80 bp, synthetic construct
  source 1..80: mol_type = other DNA
actggtctgaccaaaatttattaggcaggaatttcctcttcctaataagcctgggagcgctatgggacactggggtctat

SEQ ID NO: 46691 - DNA, 80 bp, synthetic construct
  source 1..80: mol_type = other DNA
gctctgttccgcccagctcaccggcggtcagagtttaaggttatctctcttgttccctaaacattgctgttatcctgctc

SEQ ID NO: 46692 - DNA, 80 bp, synthetic construct
  source 1..80: mol_type = other DNA
caagggtattgactggggaagtgataagtgtccatgaaatcttcacaatttatgtttagagattgcagtaaagacaggca

SEQ ID NO: 46693 - DNA, 80 bp, synthetic construct; identical to SEQ ID NO: 12461
  source 1..80: mol_type = other DNA

SEQ ID NO: 46694 - DNA, 80 bp, synthetic construct
  source 1..80: mol_type = other DNA
ctcctgcctcagcctcccgagtagctggggtaacaggtatgtgccaccatggccagctaatttctttatttttactagag

SEQ ID NO: 46695 - DNA, 80 bp, synthetic construct
  source 1..80: mol_type = other DNA
caggctgaagtgcagtggtgcaatctcagctttctgcaacctctgcctcctgggctcaagcgatcgatcctcctgtctca

SEQ ID NO: 46696 - DNA, 80 bp, synthetic construct
  source 1..80: mol_type = other DNA
tgctgggattgcaggtgtgagccactgcactcggcagcaggtgttttagattgggctaccttgaagcagaacctggggtg

SEQ ID NO: 46697 - DNA, 80 bp, synthetic construct; identical to SEQ ID NO: 12462
  source 1..80: mol_type = other DNA

SEQ ID NO: 46698 - DNA, 80 bp, synthetic construct
  source 1..80: mol_type = other DNA
tgttggatttgaggtggcaaagaaataaggaactggcatgtgactgcgggaaattggagctacaagacaggagttcaggt

SEQ ID NO: 46699 - DNA, 80 bp, synthetic construct
  source 1..80: mol_type = other DNA
gcatgatcatagctctctgcagccttgacctcccaggctcaagagatcgtctcacctcagcttcttgagtagctgatact

SEQ ID NO: 46700 - DNA, 80 bp, synthetic construct
  source 1..80: mol_type = other DNA
ggcctagatgatagtttaaacaagagggaatttgtatatttgtcactttgggggttgctggtggcctttgaaggaagagt

SEQ ID NO: 46701 - DNA, 80 bp, synthetic construct; identical to SEQ ID NO: 12463
  source 1..80: mol_type = other DNA

SEQ ID NO: 46702 - DNA, 80 bp, synthetic construct
  source 1..80: mol_type = other DNA
gtctagttagagtttctcttgcatagtggctgggttgctgtgagggaaccaggcatgaactgctttttttttttttgagg

SEQ ID NO: 46703 - DNA, 80 bp, synthetic construct
  source 1..80: mol_type = other DNA
tgccaacatgcctggctgatttttgtattattattatcattattttgtagagacagggtctcactatgttgcccaggctg

SEQ ID NO: 46704 - DNA, 80 bp, synthetic construct
  source 1..80: mol_type = other DNA
cagctgcattctttttataacctcatctttttttgatctgcatcacctccctcctaccctattggtcagagtagtcacag

SEQ ID NO: 46705 - DNA, 80 bp, synthetic construct
  source 1..80: mol_type = other DNA
agctgtcattgggtcaacaataacagcaacttgaggaacctcttgagggcagggatcaggcctgttacgtttgtttactt

SEQ ID NO: 46706 - DNA, 80 bp, synthetic construct; identical to SEQ ID NO: 12464
  source 1..80: mol_type = other DNA

SEQ ID NO: 46707 - DNA, 80 bp, synthetic construct
  source 1..80: mol_type = other DNA
atacatatgatgatttaacatgaagatttagtgtgattttgcatctcttcatgggagcagggtcaggaccaggtcctgtt

SEQ ID NO: 46708 - DNA, 80 bp, synthetic construct
  source 1..80: mol_type = other DNA
ccctggaggggaagggggacgtggtggaggcagttcctggaggcccagctcagagcggagaaaggagccaattaccacct

SEQ ID NO: 46709 - DNA, 80 bp, synthetic construct
  source 1..80: mol_type = other DNA
tgtgatccacccccgcgcccactgcacaccaccaaccaacctttgactttatctctttagttgatttctcagagattgca

SEQ ID NO: 46710 - DNA, 80 bp, synthetic construct; identical to SEQ ID NO: 12465
  source 1..80: mol_type = other DNA

SEQ ID NO: 46711 - DNA, 80 bp, synthetic construct
  source 1..80: mol_type = other DNA
gtcatcaatccctctggaatgcacccctcctccagacacccatgctccccacatcctttattattttgttaaaactagca

SEQ ID NO: 46712 - DNA, 80 bp, synthetic construct
  source 1..80: mol_type = other DNA
gaataaaaagcaccaataattccataacccaaattagctaacattacattccggtggatttccatctggcattctcctcg

SEQ ID NO: 46713 - DNA, 80 bp, synthetic construct
  source 1..80: mol_type = other DNA
gctagtctctttattacacactcacaatacccagtacttttccttgtagcactcaccacaactagaaataaatcatcatt

SEQ ID NO: 46714 - DNA, 80 bp, synthetic construct; identical to SEQ ID NO: 12466
  source 1..80: mol_type = other DNA

SEQ ID NO: 46715 - DNA, 80 bp, synthetic construct
  source 1..80: mol_type = other DNA
caccattgttttatcttgttaatgcatttacttcacagaatcacaggataatggaattggacggcaccatgagatcagca

SEQ ID NO: 46716 - DNA, 80 bp, synthetic construct
  source 1..80: mol_type = other DNA
ctcccctctcctcttattctgttaatccccaagtcctttgattttccccatgaaggtctctccaatctctccacttttcc

SEQ ID NO: 46717 - DNA, 80 bp, synthetic construct
  source 1..80: mol_type = other DNA
cctggcttagaactccagtggcttcccaccaggcttttagaaatatactcaaaattcttatatggtgtattagtcagctc

SEQ ID NO: 46718 - DNA, 80 bp, synthetic construct; identical to SEQ ID NO: 12467
  source 1..80: mol_type = other DNA

SEQ ID NO: 46719 - DNA, 80 bp, synthetic construct
  source 1..80: mol_type = other DNA
gtgctgggattacaggcgtaagccaccacgcctggcctctttctttctctttttttttttttttttgagacagagagagt

SEQ ID NO: 46720 - DNA, 80 bp, synthetic construct
  source 1..80: mol_type = other DNA
caccaccatgcctggctaatttttgatttttagtagagacggggtttcaccatgttggccaggctgttctcaaactcttg

SEQ ID NO: 46721 - DNA, 80 bp, synthetic construct
  source 1..80: mol_type = other DNA
cacatggcctcttcgtgcatgtggggagagagagctctcttgtgcatcctgttccttttataagaacaccagtcccatca

SEQ ID NO: 46722 - DNA, 80 bp, synthetic construct
  source 1..80: mol_type = other DNA
accttaccagcctcttctaaacccaactcacctctctgtctgtacgcttttatatcttggaatttttttggttcctccga

SEQ ID NO: 46723 - DNA, 80 bp, synthetic construct; identical to SEQ ID NO: 12468
  source 1..80: mol_type = other DNA

SEQ ID NO: 46724 - DNA, 80 bp, synthetic construct
  source 1..80: mol_type = other DNA
tcctcagagagtatatgtattttgttgtctaatttgggttgaaatctctcagaagggtcctatctgttccttacttgaaa

SEQ ID NO: 46725 - DNA, 80 bp, synthetic construct
  source 1..80: mol_type = other DNA
tcatgtaacaacaatctactgagaattaaaaagaaactaaagtgttcctctcctctcccacctctgggcaaccaggactt

SEQ ID NO: 46726 - DNA, 80 bp, synthetic construct
  source 1..80: mol_type = other DNA
atggtatgagagtacagggtgtgagggcaggagcctacttcttggttgactcttagacttccatggactcatggaaaaga

SEQ ID NO: 46727 - DNA, 80 bp, synthetic construct
  source 1..80: mol_type = other DNA
ccgtctctactaaaaatacaaaaattagctgggcgtggtggtgggtgcctgtaatctcagctactcgggaggctgaggca

SEQ ID NO: 46728 - DNA, 80 bp, synthetic construct; identical to SEQ ID NO: 12469
  source 1..80: mol_type = other DNA

SEQ ID NO: 46729 - DNA, 80 bp, synthetic construct
  source 1..80: mol_type = other DNA
tctgggcaacatggtgaaaccctgtctctgcaaaaaatacaaaaattatctgggcatagtggtgcacgcctgtaatccta

SEQ ID NO: 46730 - DNA, 80 bp, synthetic construct
  source 1..80: mol_type = other DNA
gaaaaggaaaaggagaaaaacatcaaactgcatacatttttaaaatgaaaaaaggaaacaaattactgacacatgcaatg

SEQ ID NO: 46731 - DNA, 80 bp, synthetic construct
  source 1..80: mol_type = other DNA
cacttttgaaaagataaaacgatagcaacagagactagatcaaaatagcaaaatagcagggagtttgtcgggggcaggaa

SEQ ID NO: 46732 - DNA, 80 bp, synthetic construct
  source 1..80: mol_type = other DNA
tatgttaatttttaaaataaaattatttttaattaagaagagaccttctagcccctcaatagcgcagaggagttcctgaa

SEQ ID NO: 46733 - DNA, 80 bp, synthetic construct; identical to SEQ ID NO: 12470
  source 1..80: mol_type = other DNA

SEQ ID NO: 46734 - DNA, 80 bp, synthetic construct
  source 1..80: mol_type = other DNA
cccatgaggcagggttaccagctttcctatcgtttgaagaatttagcaatctgagtttattattgctgtcattctaattt

SEQ ID NO: 46735 - DNA, 80 bp, synthetic construct
  source 1..80: mol_type = other DNA
tatatgcaacagatatgattgccccacagctcctgggctacaagtaatgtcttgtttctttgtggactcactcaaataga

SEQ ID NO: 46736 - DNA, 80 bp, synthetic construct
  source 1..80: mol_type = other DNA
cccaggtcagtggggaccattatgagtcaggctgctggtggggtgtggtggctcacgcctgtaatcccagcactttggga

SEQ ID NO: 46737 - DNA, 80 bp, synthetic construct; identical to SEQ ID NO: 12471
  source 1..80: mol_type = other DNA

SEQ ID NO: 46738 - DNA, 80 bp, synthetic construct
  source 1..80: mol_type = other DNA
tgtcgcccaggctggagtgcagtggcgcgatctcggttcactgcaagctccgcctcccgtgttcccgccattctcctgcc

SEQ ID NO: 46739 - DNA, 80 bp, synthetic construct
  source 1..80: mol_type = other DNA
tacaggcgtgagacaccgtgctcggcctttttttttttttttttttgagacagagtcttggtctgttgccgaggctggag

SEQ ID NO: 46740 - DNA, 80 bp, synthetic construct
  source 1..80: mol_type = other DNA
ctggtctcgaactcctggcctcaagtgatccgcccacctcagcctcctaaagtgctggtattacaggcatgagccactgt

SEQ ID NO: 46741 - DNA, 80 bp, synthetic construct; identical to SEQ ID NO: 12472
  source 1..80: mol_type = other DNA

SEQ ID NO: 46742 - DNA, 80 bp, synthetic construct
  source 1..80: mol_type = other DNA
cacatttttttttctccttcaactatagtaattggtgatattccacatagtggctgctctgtcaacctgggtcctggagt

SEQ ID NO: 46743 - DNA, 80 bp, synthetic construct
  source 1..80: mol_type = other DNA
cataacctagcctgcttggttgatataccacattacacatttattactaagattatgtgaagtaaaatgtttggaacttc

SEQ ID NO: 46744 - DNA, 80 bp, synthetic construct
  source 1..80: mol_type = other DNA
ctgatcttaagtaatcctctcccacctcagccttccgagtagctgggattgcagacataccctgccatacccagctgatt

SEQ ID NO: 46745 - DNA, 80 bp, synthetic construct; identical to SEQ ID NO: 12473
  source 1..80: mol_type = other DNA

SEQ ID NO: 46746 - DNA, 80 bp, synthetic construct
  source 1..80: mol_type = other DNA
caggagtgcaagaccagcctggccaacatgctgaaaccccgtctctactaaaaatacaaaaattagttggccttagtggt

SEQ ID NO: 46747 - DNA, 80 bp, synthetic construct
  source 1..80: mol_type = other DNA
aataaaaaaaaacaaaacaaaacaaaacaaaaaaacaggtataagggatgtctgaggcatagacagaggtgattctcaga

SEQ ID NO: 46748 - DNA, 80 bp, synthetic construct
  source 1..80: mol_type = other DNA
ttggcaaatagagcttctgggtgtgcatttatcagtctttccactcggtttactgggcgcctactctgtgcctgacattg

SEQ ID NO: 46749 - DNA, 80 bp, synthetic construct; identical to SEQ ID NO: 12474
  source 1..80: mol_type = other DNA

SEQ ID NO: 46750 - DNA, 80 bp, synthetic construct
  source 1..80: mol_type = other DNA
atgttggtctttaagtggatgggctcggggatatttgggctgttatgtggggaagtgacatggtcagatttttagctaaa

SEQ ID NO: 46751 - DNA, 80 bp, synthetic construct
  source 1..80: mol_type = other DNA
agaatcatcctagccgctgcttcatcagtgtctcaggggagtgatggctatctgcggtggtggcgttggggtaaaagaat

SEQ ID NO: 46752 - DNA, 80 bp, synthetic construct
  source 1..80: mol_type = other DNA
gcttgtaatctaatctcagctactcgagaggctgaggcaggagaattgcttgaacctgggaggcggagcttgcagtgagc

SEQ ID NO: 46753 - DNA, 80 bp, synthetic construct; identical to SEQ ID NO: 12475
  source 1..80: mol_type = other DNA

SEQ ID NO: 46754 - DNA, 80 bp, synthetic construct
  source 1..80: mol_type = other DNA
gatgtttctttttgagagtttggcggtagaatttgtcacaattctttacagcctagaggcaagtttgcaggaacggacgg

SEQ ID NO: 46755 - DNA, 80 bp, synthetic construct
  source 1..80: mol_type = other DNA
caccaattagaaaagacctcctggccgctcaggggcctcatgctggatggccagtccaggcactcacttatgctgggtga

SEQ ID NO: 46756 - DNA, 80 bp, synthetic construct
  source 1..80: mol_type = other DNA
aatttagagtgagaaagagagcgtctgagttacctaaaacgtgtgtgagtttgccccgaacaagcttctgctgtcaattg

SEQ ID NO: 46757 - DNA, 80 bp, synthetic construct; identical to SEQ ID NO: 12476
  source 1..80: mol_type = other DNA

SEQ ID NO: 46758 - DNA, 80 bp, synthetic construct
  source 1..80: mol_type = other DNA
ctgtatggagagggagagttccctgtatgggccaccaaaatgtttcaggggagcaacggctatctgggctggcggctcag

SEQ ID NO: 46759 - DNA, 80 bp, synthetic construct
  source 1..80: mol_type = other DNA
gctcttaggctgtagagtgttatgtgcagtactgattatgccagggtagcagggaggtaacttgcatttttttttttttt

SEQ ID NO: 46760 - DNA, 80 bp, synthetic construct
  source 1..80: mol_type = other DNA
gctttcccctggtcccaccagcctgatttgttttttaattattactcaacagtgagtgctgtcacatgctgggcattgtg

SEQ ID NO: 46761 - DNA, 80 bp, synthetic construct
  source 1..80: mol_type = other DNA
ttcaagcgattcttctgcctcagcctcctgagtagctgggactacaggtgcgtgccaccacgcccaattaatttttgtgt

SEQ ID NO: 46762 - DNA, 80 bp, synthetic construct; identical to SEQ ID NO: 12477
  source 1..80: mol_type = other DNA

SEQ ID NO: 46763 - DNA, 80 bp, synthetic construct
  source 1..80: mol_type = other DNA
ctatacagatgacctcattccagccttgcaataatagcttctgtgaggtattattattcatagctttaaaaaagccagtt

SEQ ID NO: 46764 - DNA, 80 bp, synthetic construct
  source 1..80: mol_type = other DNA
taggccactttccactactattgagctgcctcctctctatgaaaatgcttttctggattgagggagacagtcatagagaa

SEQ ID NO: 46765 - DNA, 80 bp, synthetic construct
  source 1..80: mol_type = other DNA
tcttgcaattcgcaaagtgaggaactgaaaagtcagctctcagggaagatttcactgtataaagtcaggtaaaaatgggg

SEQ ID NO: 46766 - DNA, 80 bp, synthetic construct; identical to SEQ ID NO: 12478
  source 1..80: mol_type = other DNA

SEQ ID NO: 46767 - DNA, 80 bp, synthetic construct
  source 1..80: mol_type = other DNA
aaacaatggtacatgtgttaaggtagacagttaaattgtccctccaccactccctgtctcattcccaaccctgctctcca

SEQ ID NO: 46768 - DNA, 80 bp, synthetic construct
  source 1..80: mol_type = other DNA
taaacatacagttcagtggcattaggtacatccacattattgtgcaaccatcaccatcagccacattcagaactttttca

SEQ ID NO: 46769 - DNA, 80 bp, synthetic construct
  source 1..80: mol_type = other DNA
tgtcaccaagccagagtgctgtggcacgatcctggctcactgcaacctctgcctcctgggttctagtgattctcctgccc

SEQ ID NO: 46770 - DNA, 80 bp, synthetic construct
  source 1..80: mol_type = other DNA
cactttgggagaccaagtctgatggatcacttgaggtcaggagttcgagaccagcctgtccaacatggcaaaaccccatc

SEQ ID NO: 46771 - DNA, 80 bp, synthetic construct; identical to SEQ ID NO: 12479
  source 1..80: mol_type = other DNA

SEQ ID NO: 46772 - DNA, 80 bp, synthetic construct
  source 1..80: mol_type = other DNA
agatcgctccagcctgggtgacagagcaaaactctgtctaaaaaaaaaaaaaaaggtggaatcataaaatatttttcctc

SEQ ID NO: 46773 - DNA, 80 bp, synthetic construct
  source 1..80: mol_type = other DNA
aacacactgggctaattttttgtatttttggtagagacagggtttctccatgttggtcaggctggtctcaaactcctgac

SEQ ID NO: 46774 - DNA, 80 bp, synthetic construct
  source 1..80: mol_type = other DNA
attatatgtatatatgtattatacaattttttttttttttttgggtggagacagagtctccttctgttgcccaggctgga

SEQ ID NO: 46775 - DNA, 80 bp, synthetic construct; identical to SEQ ID NO: 12480
  source 1..80: mol_type = other DNA

SEQ ID NO: 46776 - DNA, 80 bp, synthetic construct
  source 1..80: mol_type = other DNA
aagaggtggaggttgcagtgtggtgagccgagatcatgctcctgcactccagcctggggggtacaaagtgagacgccatc

SEQ ID NO: 46777 - DNA, 80 bp, synthetic construct
  source 1..80: mol_type = other DNA
tgctcagaccagagtagctaggattataggctcctgccaccgtgcccggctaatttttgtatttttagtagagatggggt

SEQ ID NO: 46778 - DNA, 80 bp, synthetic construct
  source 1..80: mol_type = other DNA
attttcatcacactcaaagacgtcccatgctcattagcagtcatttccggttttacccccaatctctccccttcccagcc

SEQ ID NO: 46779 - DNA, 80 bp, synthetic construct; identical to SEQ ID NO: 12481
  source 1..80: mol_type = other DNA

SEQ ID NO: 46780 - DNA, 80 bp, synthetic construct
  source 1..80: mol_type = other DNA
cttaggagtggaatttcgaggtcattaactttatgttccacttttgagaactgctttccaatgttgctgagccatttgac

SEQ ID NO: 46781 - DNA, 80 bp, synthetic construct
  source 1..80: mol_type = other DNA
agtctcgctctgtcgcccaggctggaatgcagtggcacgatctcagctcactgcaacttctgcctcctgggttcaagcga

SEQ ID NO: 46782 - DNA, 80 bp, synthetic construct
  source 1..80: mol_type = other DNA
tgctgagtcaccgcgcctggcctgaacgtcttctcatgtgcttattggtcatttgtatacctttggagaaatgtttattc

SEQ ID NO: 46783 - DNA, 80 bp, synthetic construct; identical to SEQ ID NO: 12482
  source 1..80: mol_type = other DNA

SEQ ID NO: 46784 - DNA, 80 bp, synthetic construct
  source 1..80: mol_type = other DNA
tttttttcctgcttgtgcactgtgtcatagctaagaaaccactgcctagtctgtggtcacaaagatttacatctgtcttt

SEQ ID NO: 46785 - DNA, 80 bp, synthetic construct
  source 1..80: mol_type = other DNA
tggtctcagcattagtatgccttgttacggaggaataaattttcagcttcgtaagaaaaggaccatgggcctggcaaggt

SEQ ID NO: 46786 - DNA, 80 bp, synthetic construct
  source 1..80: mol_type = other DNA
ttatcttcccaggattctcttagccccatgcaagacacatgctacatgctcaataaatatagcctgagtgagtgaacata

SEQ ID NO: 46787 - DNA, 80 bp, synthetic construct
  source 1..80: mol_type = other DNA
tcactgcaacctccacctcccaggttgaagcgattctcctgcctcagcctcctgagtagctgggactacaggcgcgcacc

SEQ ID NO: 46788 - DNA, 80 bp, synthetic construct; identical to SEQ ID NO: 12483
  source 1..80: mol_type = other DNA

SEQ ID NO: 46789 - DNA, 80 bp, synthetic construct
  source 1..80: mol_type = other DNA
ctctactaaaagtacaaaaattagccgggcgtggtggcaagcacctgtaatcccagctactggggaggctgaggcaggga

SEQ ID NO: 46790 - DNA, 80 bp, synthetic construct
  source 1..80: mol_type = other DNA
ttctccaaagtttcatttgctgtctctgctgtatgatcccaatcatttcattgtttgtgagcagcaaaactcaaatctag

SEQ ID NO: 46791 - DNA, 80 bp, synthetic construct
  source 1..80: mol_type = other DNA
ctcctgctgcaaaattgtgccataaatccccatgagtgttcagtgtaaccattgactataggacctggtttgatgtggga

SEQ ID NO: 46792 - DNA, 80 bp, synthetic construct
  source 1..80: mol_type = other DNA
aggtggcatgaaccccagaaaattttggtgaactcacctcttggaatgaggacaaaggagagtcttgaagcagaaaagag

SEQ ID NO: 46793 - DNA, 80 bp, synthetic construct; identical to SEQ ID NO: 12484
  source 1..80: mol_type = other DNA

SEQ ID NO: 46794 - DNA, 80 bp, synthetic construct
  source 1..80: mol_type = other DNA
ggggagccagcgggcagaaatgacgtgtgaggtaccctctctctcttcacttccatgtgatctgttactcattttgtcaa

SEQ ID NO: 46795 - DNA, 80 bp, synthetic construct
  source 1..80: mol_type = other DNA
caccacggaataactacacacggataactgctacaaatcagggatccccatctcccccacaagctggtttgctaacacat

SEQ ID NO: 46796 - DNA, 80 bp, synthetic construct
  source 1..80: mol_type = other DNA
tgcctggcaattttcgtatttttagtagagacagggtttcgcaatgttggccaggctagtcttgaactcctggcctcaag

SEQ ID NO: 46797 - DNA, 80 bp, synthetic construct; identical to SEQ ID NO: 12485
  source 1..80: mol_type = other DNA

SEQ ID NO: 46798 - DNA, 80 bp, synthetic construct
  source 1..80: mol_type = other DNA
cacagaagaggggaactttgactttgagcctgaggtcttgggatgaaaagcagtttgtggaccggattcctgaccctggg

SEQ ID NO: 46799 - DNA, 80 bp, synthetic construct
  source 1..80: mol_type = other DNA
agatggggttattccaggctgggatctgtgaagagcagaacaactctaagccccagggcaaaaatctgcagagctgagtc

SEQ ID NO: 46800 - DNA, 80 bp, synthetic construct
  source 1..80: mol_type = other DNA
cagcctgggccacatggtgtacccccatctctacaaaaaatataaaaattagccaggtgtgttggtgagcacctgtagta

SEQ ID NO: 46801 - DNA, 80 bp, synthetic construct; identical to SEQ ID NO: 12486
  source 1..80: mol_type = other DNA

SEQ ID NO: 46802 - DNA, 80 bp, synthetic construct
  source 1..80: mol_type = other DNA
aaacaggacctccctaaaggccaagagctaaggaaagagaaagtgaaggactgagcagcaggtaaccagaatcagagtca

SEQ ID NO: 46803 - DNA, 80 bp, synthetic construct
  source 1..80: mol_type = other DNA
cctgcctaatacctgaatggccatctctttcagagaccactcttattcccaggtgtgtgacctcctcctacagactacag

SEQ ID NO: 46804 - DNA, 80 bp, synthetic construct
  source 1..80: mol_type = other DNA
aaagagatacccagattgggtatgcgtgtaaagggcaagagctatgagaccaatgtgacatttaggattaattagtccct

SEQ ID NO: 46805 - DNA, 80 bp, synthetic construct
  source 1..80: mol_type = other DNA
ggttcctattaagcagagagaggttagaacttagtggcacagaaactgatatcagctaaatatgggttagtcaccaaccc

SEQ ID NO: 46806 - DNA, 80 bp, synthetic construct; identical to SEQ ID NO: 12487
  source 1..80: mol_type = other DNA

SEQ ID NO: 46807 - DNA, 80 bp, synthetic construct
  source 1..80: mol_type = other DNA
ggattacaggcacctgccaccactcctggctaattttttgtatttttagtagagacaggggtttcatcatgttggccagg

SEQ ID NO: 46808 - DNA, 80 bp, synthetic construct
  source 1..80: mol_type = other DNA
tgaggtcatctaatttagtctggggtgacaaggaatgcctactaaagaaggtatcgtttaagacatacctggggaatagc

SEQ ID NO: 46809 - DNA, 80 bp, synthetic construct
  source 1..80: mol_type = other DNA
ccttcctttagctcagcttaggaaacagcttttgtaaaactgcgtaactagtagtaggtgagagaggaatacgaatgata

SEQ ID NO: 46810 - DNA, 80 bp, synthetic construct; identical to SEQ ID NO: 12488
  source 1..80: mol_type = other DNA

SEQ ID NO: 46811 - DNA, 80 bp, synthetic construct
  source 1..80: mol_type = other DNA
acgcccggctaattttttgtatttttagtagagacggggtttcactgtgttagccaggatggtctcgatctcctaacctc

SEQ ID NO: 46812 - DNA, 80 bp, synthetic construct
  source 1..80: mol_type = other DNA
aaaataataaatcaagtaggaatggaggggaggatatgcatgcagcactagataatatctatacagagagaggatgaggt

SEQ ID NO: 46813 - DNA, 80 bp, synthetic construct
  source 1..80: mol_type = other DNA
gagatggagtctcactctgtcaccctggctgaagtgcaatggcatgatctcagctcactacaacctttgcctcccaggtt

SEQ ID NO: 46814 - DNA, 80 bp, synthetic construct; identical to SEQ ID NO: 12489
  source 1..80: mol_type = other DNA

SEQ ID NO: 46815 - DNA, 80 bp, synthetic construct
  source 1..80: mol_type = other DNA
tcttgccatgttgcccaggctggtcttgaactcttgggctcaagtgatcctcctgcctcagcctcccaaagtgctgggat

SEQ ID NO: 46816 - DNA, 80 bp, synthetic construct
  source 1..80: mol_type = other DNA
caaagacactagagagctttgtaaatcttccaattagatgatacataaatacttccccaggtcttctaggcctgattcaa

SEQ ID NO: 46817 - DNA, 80 bp, synthetic construct
  source 1..80: mol_type = other DNA
tgtctgcatttatgctggaatcatagagctgaactatcattgagataaaaattccagtctttaccccaatttacaattcc

SEQ ID NO: 46818 - DNA, 80 bp, synthetic construct
  source 1..80: mol_type = other DNA
agtgattcttcctgcctcagtctcctgagtagctgggattacaggcgcccgccaccatgcccggctaatttttgtatttt

SEQ ID NO: 46819 - DNA, 80 bp, synthetic construct; identical to SEQ ID NO: 12490
  source 1..80: mol_type = other DNA

SEQ ID NO: 46820 - DNA, 80 bp, synthetic construct
  source 1..80: mol_type = other DNA
ttcacagacaagtgaagcaaccagaaatactgaattttcagatggacatgtttatcgtactgaatctccatagccaggag

SEQ ID NO: 46821 - DNA, 80 bp, synthetic construct
  source 1..80: mol_type = other DNA
gaaagagttttttttgtttttgttttggctagactaatgtaaacacagttcaaatgttgctccttcactggggacagaaa

SEQ ID NO: 46822 - DNA, 80 bp, synthetic construct
  source 1..80: mol_type = other DNA
gtgagaggatcacctgagcttggggatgtcaaggctgccatgagccatgtttgtgccactgcactccaccatggatgaca

SEQ ID NO: 46823 - DNA, 80 bp, synthetic construct; identical to SEQ ID NO: 12491
  source 1..80: mol_type = other DNA

SEQ ID NO: 46824 - DNA, 80 bp, synthetic construct
  source 1..80: mol_type = other DNA
ctgactggagaagcttggaatcttctggatgtcttttgcaaagatgacaaattcttttagataggctgctgcttgaaggt

SEQ ID NO: 46825 - DNA, 80 bp, synthetic construct
  source 1..80: mol_type = other DNA
gtttgaaatacgaaatgcgtaagagacatgttcctgagatgtcggagtgaggtttcctttgagagaaggaagtgagggtt

SEQ ID NO: 46826 - DNA, 80 bp, synthetic construct
  source 1..80: mol_type = other DNA
aacttgcccattcttgcccttccttgggtcctgctgtttattctgttctctgaaataaggagttcctcccagtattgtag

SEQ ID NO: 46827 - DNA, 80 bp, synthetic construct; identical to SEQ ID NO: 12492
  source 1..80: mol_type = other DNA

SEQ ID NO: 46828 - DNA, 80 bp, synthetic construct
  source 1..80: mol_type = other DNA
tatgctccagatgagtaagagtatgaattggaaccactttcagggaacctcttgtctgcacctcattctgtttttattta

SEQ ID NO: 46829 - DNA, 80 bp, synthetic construct
  source 1..80: mol_type = other DNA
cgtgccaccacgcctggctagtttttgtatttttagtagagacggagttttaccatgttgaccaggctggtcttgaactc

SEQ ID NO: 46830 - DNA, 80 bp, synthetic construct
  source 1..80: mol_type = other DNA
gaggtggtcatgatcagtaaagagacaattggagggagatggtccaaccctgtggttctggactctgaagtggtctttac

SEQ ID NO: 46831 - DNA, 80 bp, synthetic construct; identical to SEQ ID NO: 12493
  source 1..80: mol_type = other DNA

SEQ ID NO: 46832 - DNA, 80 bp, synthetic construct
  source 1..80: mol_type = other DNA
acctataatcccaaaagtgtgatttcagaatacaaaatttgggattataatttgtaatcccaaaagtgggatttgggcat

SEQ ID NO: 46833 - DNA, 80 bp, synthetic construct
  source 1..80: mol_type = other DNA
attattgttttttatatctcctttaatgtacaggttagctctctcattttttccccctcttgaaataggtttgttggaga

SEQ ID NO: 46834 - DNA, 80 bp, synthetic construct
  source 1..80: mol_type = other DNA
ggccccttctcagggaatgttgtgaacattcacccagaggtacatgctgtctgcttgtgtccgtctcttttggtgatgtt

SEQ ID NO: 46835 - DNA, 80 bp, synthetic construct; identical to SEQ ID NO: 12494
  source 1..80: mol_type = other DNA

SEQ ID NO: 46836 - DNA, 80 bp, synthetic construct
  source 1..80: mol_type = other DNA
ttcactatagtccattatagtgattagtcttatgaatgctcaaattgtcccgtctttggcaagtgggagtcttttcacct

SEQ ID NO: 46837 - DNA, 80 bp, synthetic construct
  source 1..80: mol_type = other DNA
tgcttgttgctgctggattggttcttgtttctagggccttttagtgggaagaaaatataaacatattttaaaaataaact

SEQ ID NO: 46838 - DNA, 80 bp, synthetic construct
  source 1..80: mol_type = other DNA
agtttccaaatccaccaacgtttgctttatccctcaatacttatacacagtcttaaaataacaacatcaatattatcgcc

SEQ ID NO: 46839 - DNA, 80 bp, synthetic construct; identical to SEQ ID NO: 12495
  source 1..80: mol_type = other DNA

SEQ ID NO: 46840 - DNA, 80 bp, synthetic construct
  source 1..80: mol_type = other DNA
cgacatggtggattagcatccaagatggggccacttttgtctccacaataaaactattctttcagttcctttttttttgt

SEQ ID NO: 46841 - DNA, 80 bp, synthetic construct
  source 1..80: mol_type = other DNA
ttcttagatatagagtagcatccagatttccccacttctcttttttttaaatgaacattgggataaaattgacatacagt

SEQ ID NO: 46842 - DNA, 80 bp, synthetic construct
  source 1..80: mol_type = other DNA
atttttaaaatttgaaatagagatggagtttcaccatgttgctcaggctggccttgaactcctgggcttaagcaaacagc

SEQ ID NO: 46843 - DNA, 80 bp, synthetic construct; identical to SEQ ID NO: 12496
  source 1..80: mol_type = other DNA

SEQ ID NO: 46844 - DNA, 80 bp, synthetic construct
  source 1..80: mol_type = other DNA
ttcgtttgttttgttttttgtttttgtttttgttttgttttttgtttttttgcgattctcctgcctcagcctcctgagta

SEQ ID NO: 46845 - DNA, 80 bp, synthetic construct
  source 1..80: mol_type = other DNA
gcccagccaaaatttatcactctttctcttcaattgcagctgaagatttagccatagttatgcaagtcttttccactccc

SEQ ID NO: 46846 - DNA, 80 bp, synthetic construct
  source 1..80: mol_type = other DNA
cactccctcccttcagcttgatttttcctggacattttattattttcttggccaaagctggacatggatcaaaataaacg

SEQ ID NO: 46847 - DNA, 80 bp, synthetic construct; identical to SEQ ID NO: 12497
  source 1..80: mol_type = other DNA

SEQ ID NO: 46848 - DNA, 80 bp, synthetic construct
  source 1..80: mol_type = other DNA
tgcaacctctgtctcttgggttcaagtgattctcctgcctcagcctcctgagtagctgggattacaggcgcccgccacca

SEQ ID NO: 46849 - DNA, 80 bp, synthetic construct
  source 1..80: mol_type = other DNA
taacccatgtttcctgtttccacccctcccctgctcttgatttccattaggaatttctacctttctaactggaaaagact

SEQ ID NO: 46850 - DNA, 80 bp, synthetic construct
  source 1..80: mol_type = other DNA
tttagtggttatttcctaccaccacgcatcagatactgcgctaagtactttatacagaataaatcatttcatcttgacct

SEQ ID NO: 46851 - DNA, 80 bp, synthetic construct; identical to SEQ ID NO: 12498
  source 1..80: mol_type = other DNA

SEQ ID NO: 46852 - DNA, 80 bp, synthetic construct
  source 1..80: mol_type = other DNA
tcacgtatctgttggataattagatgaaaaaggaggaggaagaggaacgtgtgctggagataaagcggcaggagtggagg

SEQ ID NO: 46853 - DNA, 80 bp, synthetic construct
  source 1..80: mol_type = other DNA
cagcactttgggaagctgccggacggatcacctgaggccaggagttacagacttgcctggccaatatggtaaaaccctgt

SEQ ID NO: 46854 - DNA, 80 bp, synthetic construct
  source 1..80: mol_type = other DNA
ctgtctcaaaaaaaaaaaaaaaaaaaaaaaaaaaatatatatatatatatatataaacacacacacacatatatatacac

SEQ ID NO: 46855 - DNA, 80 bp, synthetic construct; identical to SEQ ID NO: 12499
  source 1..80: mol_type = other DNA

SEQ ID NO: 46856 - DNA, 80 bp, synthetic construct
  source 1..80: mol_type = other DNA
agaatacagctctaggccgggtgtggttgctcacgcctgtaattccagtactttgggaggctgaggagggtggatcacct

SEQ ID NO: 46857 - DNA, 80 bp, synthetic construct
  source 1..80: mol_type = other DNA
gcagtgagctgaggttgtgccattgcacttcagcctgggtgacaagagcaaaactctgcctcaaaaataaagataaaaat

SEQ ID NO: 46858 - DNA, 80 bp, synthetic construct
  source 1..80: mol_type = other DNA
gtagtcccagctactcaggaggctgatgcaggagaatcgcttgaacccgggaggcggaggttgcagtaagccgagatcat

SEQ ID NO: 46859 - DNA, 80 bp, synthetic construct; identical to SEQ ID NO: 12500
  source 1..80: mol_type = other DNA

SEQ ID NO: 46860 - DNA, 80 bp, synthetic construct
  source 1..80: mol_type = other DNA
taaaagaatacagctcttctagttcccagcccctctggggttcttgtgtgaaagaaaacattttaatgtgtcctttgatt

SEQ ID NO: 46861 - DNA, 80 bp, synthetic construct
  source 1..80: mol_type = other DNA
tggagattattttaggaatgtcatctctggtatggaattctacttgtcccctgtagaattctgggctggcctacccatgg

SEQ ID NO: 46862 - DNA, 80 bp, synthetic construct
  source 1..80: mol_type = other DNA
ccctggacttcctgtagttgtagaaaagtgcaggcctgagttatttaactatcaaagaaaaagtgatgctctgtgtgtgg

SEQ ID NO: 46863 - DNA, 80 bp, synthetic construct; identical to SEQ ID NO: 12501
  source 1..80: mol_type = other DNA

SEQ ID NO: 46864 - DNA, 80 bp, synthetic construct
  source 1..80: mol_type = other DNA
gtcctccctgtgtgcaacaccttccaggaacctccatgtgttcagctctccagaagctctctgaaccccgtcctcttggg

SEQ ID NO: 46865 - DNA, 80 bp, synthetic construct
  source 1..80: mol_type = other DNA
cctccaggatatggggcatcctttctgaaatgggagtcttatgacctatagtcagacaaggtaggtcaaagacagaaaga

SEQ ID NO: 46866 - DNA, 80 bp, synthetic construct
  source 1..80: mol_type = other DNA
accatggactaaaacctatatataaattataatagcacagaatcccaaaggctggaaaacttgtgggcttccctttcacc

SEQ ID NO: 46867 - DNA, 80 bp, synthetic construct
  source 1..80: mol_type = other DNA
ctgcctcaatctcccaagtagctgggattataagctcctgccaccacgcccgtctaattttttgtatttttgtagagaca

SEQ ID NO: 46868 - DNA, 80 bp, synthetic construct; identical to SEQ ID NO: 12502
  source 1..80: mol_type = other DNA

SEQ ID NO: 46869 - DNA, 80 bp, synthetic construct
  source 1..80: mol_type = other DNA
taatcccagcagtttgggaggccgaggtgggcagatcacttgaggtcaggagttcaagaccagcctgtccaatatggtaa

SEQ ID NO: 46870 - DNA, 80 bp, synthetic construct
  source 1..80: mol_type = other DNA
agtgagctgagatcacactgccacactgcagcctgggcgacagagcaagactccgtctcaaaaaaaaaaaaaaaaaaaaa

SEQ ID NO: 46871 - DNA, 80 bp, synthetic construct
  source 1..80: mol_type = other DNA
tatgttgtagcatttctgccagccaggtatgggactggacccctctggaatgaggatcttattgtgtccagaaatggtgg

SEQ ID NO: 46872 - DNA, 80 bp, synthetic construct; identical to SEQ ID NO: 12503
  source 1..80: mol_type = other DNA

SEQ ID NO: 46873 - DNA, 80 bp, synthetic construct
  source 1..80: mol_type = other DNA
gcgtttacaatccttgcgctagatacaaaggttctccacgtccccatcagattagttagatacagagtttggacacacag

SEQ ID NO: 46874 - DNA, 80 bp, synthetic construct
  source 1..80: mol_type = other DNA
cacctagtggaccccacactggggctgcaggtggagctgcctgccagtcctgtgccgtgtgcttgcactcctcagccctt

SEQ ID NO: 46875 - DNA, 80 bp, synthetic construct
  source 1..80: mol_type = other DNA
tcgagcgcaccgccggtgggctggcactgctgggcgacccagtacaccctctgcagccactggcccgggtgctaagtccc

SEQ ID NO: 46876 - DNA, 80 bp, synthetic construct
  source 1..80: mol_type = other DNA
ctccagccttggccagcccagaaaggggttcccacagtgcagtggtgggctgaagggctcgtcaaatgccgccaaagtgg

SEQ ID NO: 46877 - DNA, 80 bp, synthetic construct; identical to SEQ ID NO: 12504
  source 1..80: mol_type = other DNA

SEQ ID NO: 46878 - DNA, 80 bp, synthetic construct
  source 1..80: mol_type = other DNA
tcttcttcattctttctcaatctcttcttctttttttaattgagatggagtctcactctatcacccaggctggagtgcag

SEQ ID NO: 46879 - DNA, 80 bp, synthetic construct
  source 1..80: mol_type = other DNA
tggtctcgaattcctgaccccaggtgatccgcctgccttggcctcacgcctgctgggattataggcgtgagccactgcat

SEQ ID NO: 46880 - DNA, 80 bp, synthetic construct
  source 1..80: mol_type = other DNA
atttgttcagcataatagaagtgcaaaccgatggcctactgcctgagtatctgctctgcagaaacatataatttgctaag

SEQ ID NO: 46881 - DNA, 80 bp, synthetic construct; identical to SEQ ID NO: 12505
  source 1..80: mol_type = other DNA

SEQ ID NO: 46882 - DNA, 80 bp, synthetic construct
  source 1..80: mol_type = other DNA
aattggagatttcacataaaaatccagattttatcctgggcaacatgggcaacacagtgagaccctgtctttacaaaaaa

SEQ ID NO: 46883 - DNA, 80 bp, synthetic construct
  source 1..80: mol_type = other DNA
cagttttacagcttaaaaaaaaatcaggctatctggcatcatgcgacctacaccgattgctagtaacagttgatggagct

SEQ ID NO: 46884 - DNA, 80 bp, synthetic construct
  source 1..80: mol_type = other DNA
aaagggaaaacagagaacaagagccaggtctttcttatcccaagcctgctacctcatttgcattttctgctttgcccctg

SEQ ID NO: 46885 - DNA, 80 bp, synthetic construct
  source 1..80: mol_type = other DNA
tgtaatcccagcactttgggaggccaaagcgggtggatcacttgaggtcaggagttcgagaccagcctggccaacatggt

SEQ ID NO: 46886 - DNA, 80 bp, synthetic construct; identical to SEQ ID NO: 12506
  source 1..80: mol_type = other DNA

SEQ ID NO: 46887 - DNA, 80 bp, synthetic construct
  source 1..80: mol_type = other DNA
ttcttgtttgactaacagcctatttatatggataagatctgagaatcggttactaggccgtatgaaagaggagtcttctt

SEQ ID NO: 46888 - DNA, 80 bp, synthetic construct
  source 1..80: mol_type = other DNA
gtgtaattaaccatgttttctagtttctatattctgatacttccacatcgtggggtcttgctgaccctggagtgactgcc

SEQ ID NO: 46889 - DNA, 80 bp, synthetic construct
  source 1..80: mol_type = other DNA
acagcccctatgccccagaggctgctgaaattattcaaactagccgagcctgaacttgcttacctgcctgcacactcctg

SEQ ID NO: 46890 - DNA, 80 bp, synthetic construct; identical to SEQ ID NO: 12507
  source 1..80: mol_type = other DNA

SEQ ID NO: 46891 - DNA, 80 bp, synthetic construct
  source 1..80: mol_type = other DNA
gtctctactaaaaaaaaaaaaaaaaaaaaaaatagctgggtgtagtggcatattcctgtaactccagctacttgggaggc

SEQ ID NO: 46892 - DNA, 80 bp, synthetic construct
  source 1..80: mol_type = other DNA
cacacctataatcccagccccttgtgaggttaggataggaagatcacttgaggccaggagcttgagaccagcctggggaa

SEQ ID NO: 46893 - DNA, 80 bp, synthetic construct
  source 1..80: mol_type = other DNA
ctctagtgtgggcaacagaaggagatggagtgagagtgtccctaaagataataagaatctcatttcttaatttattttcc

SEQ ID NO: 46894 - DNA, 80 bp, synthetic construct; identical to SEQ ID NO: 12508
  source 1..80: mol_type = other DNA

SEQ ID NO: 46895 - DNA, 80 bp, synthetic construct
  source 1..80: mol_type = other DNA
acatctcattggccagccctatgccacaccaccactcctacctgcatggcagtttgaggcaaaaaaaaatttaaagcata

SEQ ID NO: 46896 - DNA, 80 bp, synthetic construct
  source 1..80: mol_type = other DNA
gtcttactctgttgcccaagttggagtgcagtggtgtgatctcggctcactgcaagctccacctcctggattcacaccat

SEQ ID NO: 46897 - DNA, 80 bp, synthetic construct
  source 1..80: mol_type = other DNA
accgcaggcgtgagccaccgcgcccagccctacatggagctctttaccctggcctgtgctttcctctctatttacttttt

SEQ ID NO: 46898 - DNA, 80 bp, synthetic construct
  source 1..80: mol_type = other DNA
agctaatttttgtatttttagtagagaacagggtttcatcatgttggccaggctggtctcaaactctctacctcaagtga

SEQ ID NO: 46899 - DNA, 80 bp, synthetic construct; identical to SEQ ID NO: 12509
  source 1..80: mol_type = other DNA

SEQ ID NO: 46900 - DNA, 80 bp, synthetic construct
  source 1..80: mol_type = other DNA
ctcttcctccttttttccaaggctgatgttggccctttctgaaaatgctttaatgtgtagaaagcagcccacagataggc

SEQ ID NO: 46901 - DNA, 80 bp, synthetic construct
  source 1..80: mol_type = other DNA
ccaccacgcttaggtaagtttaaaaaaaaaagttttgtagagatgggggtcttactatgttgcccaggccgatctcaaac

SEQ ID NO: 46902 - DNA, 80 bp, synthetic construct
  source 1..80: mol_type = other DNA
gtttagagtaataattccagtttttatggcttttgcttcggggaaaaagggttctagtttctaggacctaccgtggggaa

SEQ ID NO: 46903 - DNA, 80 bp, synthetic construct
  source 1..80: mol_type = other DNA
ctgaaccccaacagaaacaactcactctctcggcatcagccttgtgcctatacccacaggagcaggagcacaagccattg

SEQ ID NO: 46904 - DNA, 80 bp, synthetic construct; identical to SEQ ID NO: 12510
  source 1..80: mol_type = other DNA

SEQ ID NO: 46905 - DNA, 80 bp, synthetic construct
  source 1..80: mol_type = other DNA
tttctcctgctacccctccccttgtttgtttttaagatggatttgttcggaacacatcttttgctctttccttctccttt

SEQ ID NO: 46906 - DNA, 80 bp, synthetic construct
  source 1..80: mol_type = other DNA
atcagctctggactgcctgctcaagtcttcttcataactgggaaaaataaacacctatgaagttaggccattgtattgag

SEQ ID NO: 46907 - DNA, 80 bp, synthetic construct
  source 1..80: mol_type = other DNA
gtagctgagattacaggcgcccaccacatctggctaatttttttgtatttttagtggagacggggtttcacaatgttggc

SEQ ID NO: 46908 - DNA, 80 bp, synthetic construct
  source 1..80: mol_type = other DNA
gtgtccggaattggtgggttcttggtctcactgacttcaagaatgaagccacggaccctcacggtgagtgttatagctct

SEQ ID NO: 46909 - DNA, 80 bp, synthetic construct; identical to SEQ ID NO: 12511
  source 1..80: mol_type = other DNA

SEQ ID NO: 46910 - DNA, 80 bp, synthetic construct
  source 1..80: mol_type = other DNA
agagtatggacacacgggttctccaaggccccaccagagcagctagatacagagtgtcgattggtgcactcacaaaccct

SEQ ID NO: 46911 - DNA, 80 bp, synthetic construct
  source 1..80: mol_type = other DNA
gagctagacacagggtgctgattggcgtgtttacaaaccttgagttagatacagagtgccgattggtgtatttacaatcc

SEQ ID NO: 46912 - DNA, 80 bp, synthetic construct
  source 1..80: mol_type = other DNA
agctagatacagagtgccgattggtgtatttacaatccctgagctagacataaagactctccacgtccccaccagactca

SEQ ID NO: 46913 - DNA, 80 bp, synthetic construct
  source 1..80: mol_type = other DNA
cacaggagcccacggagggggtgggaggctcaggcatggcgggctgcaggtcccgagccctgccccgtgcgaaggcagct

SEQ ID NO: 46914 - DNA, 80 bp, synthetic construct; identical to SEQ ID NO: 12512
  source 1..80: mol_type = other DNA

SEQ ID NO: 46915 - DNA, 80 bp, synthetic construct
  source 1..80: mol_type = other DNA
tctcaagctcactgcaacctctgcctcccaggttcaagtgattctcctgcctcagcctcctgagtaggtaggattacagg

SEQ ID NO: 46916 - DNA, 80 bp, synthetic construct; identical to SEQ ID NO: 12513
  source 1..80: mol_type = other DNA

SEQ ID NO: 46917 - DNA, 80 bp, synthetic construct
  source 1..80: mol_type = other DNA
tgactacttagcatgcgtcatgtgttaaaaccctaacctcgttagcaattataaccactatcagtatcccatactctggt

SEQ ID NO: 46918 - DNA, 80 bp, synthetic construct
  source 1..80: mol_type = other DNA
actagagtgttctcacttaattacaactgggataggtgggagggagttacccatgtgggcaacattagggaaactttttc

SEQ ID NO: 46919 - DNA, 80 bp, synthetic construct
  source 1..80: mol_type = other DNA
catttttgcatttcttgtggagatgcgttttttccatgtttctcaggctggtcttgaattcctgggctcaagagatcctt

SEQ ID NO: 46920 - DNA, 80 bp, synthetic construct; identical to SEQ ID NO: 12514
  source 1..80: mol_type = other DNA

SEQ ID NO: 46921 - DNA, 80 bp, synthetic construct
  source 1..80: mol_type = other DNA
tgcctgtaatccaagctactcgggaggctgaggcaggagaatcgcttgaacctgggaggcggaggttgcagtgagctgag

SEQ ID NO: 46922 - DNA, 80 bp, synthetic construct
  source 1..80: mol_type = other DNA
tatttggccttagctataagaaaatttccttaccattactctttattgtgcaattctctgaagatattcttctgatggca

SEQ ID NO: 46923 - DNA, 80 bp, synthetic construct
  source 1..80: mol_type = other DNA
agctgctatggcttttgtgctcatcagcaaactggaatgcgcttccattagacttatcctttcaccttagattccttaag

SEQ ID NO: 46924 - DNA, 80 bp, synthetic construct; identical to SEQ ID NO: 12515
  source 1..80: mol_type = other DNA

SEQ ID NO: 46925 - DNA, 80 bp, synthetic construct
  source 1..80: mol_type = other DNA
cccggctaaatttttgtgttttaatagagacggggtttcaccctgttggccaggctggtctcaatctcctgacctcgtga

SEQ ID NO: 46926 - DNA, 80 bp, synthetic construct
  source 1..80: mol_type = other DNA
tctttcctgtggacccactgagtcagaggttcacatctggttgggcaagtagtgggtgtgatcagtgatgaatattcttt

SEQ ID NO: 46927 - DNA, 80 bp, synthetic construct
  source 1..80: mol_type = other DNA
tgccgagaaaagaaacttgacagagcaggttcaaagggtccctggtttcttgcactggaagaattagggtgggaacacag

SEQ ID NO: 46928 - DNA, 80 bp, synthetic construct; identical to SEQ ID NO: 12516
  source 1..80: mol_type = other DNA

SEQ ID NO: 46929 - DNA, 80 bp, synthetic construct
  source 1..80: mol_type = other DNA
ggagtgagtggagtaaaagcgaagatggaaggtggatttcagtggtgccagaggggaatggtagtaaggagagcgtagtg

SEQ ID NO: 46930 - DNA, 80 bp, synthetic construct
  source 1..80: mol_type = other DNA
agctccatgtggtgactaagcagggctggatataaatgtctggctctttcagttcaacttgctttgctttgatagacaat

SEQ ID NO: 46931 - DNA, 80 bp, synthetic construct
  source 1..80: mol_type = other DNA
acatcttgcatcccaactttatctcagtatctgtttccagagaacatggtctccaacagaatcatgggaacaagtcttct

SEQ ID NO: 46932 - DNA, 80 bp, synthetic construct; identical to SEQ ID NO: 12517
  source 1..80: mol_type = other DNA

SEQ ID NO: 46933 - DNA, 80 bp, synthetic construct
  source 1..80: mol_type = other DNA
tggctaatttttttttttttcttgagatggagtttttgctcttgttgcccaggctggagtgtgatggcacgatctcggct

SEQ ID NO: 46934 - DNA, 80 bp, synthetic construct
  source 1..80: mol_type = other DNA
aggtgatatgcctgccgcggcctcccaaagtgttgggattacaggcgtgagccaccgtgcccagctaatttttgtatttt

SEQ ID NO: 46935 - DNA, 80 bp, synthetic construct
  source 1..80: mol_type = other DNA
agagccacacaatctccaacttctaatacctttctgcctctttgtgatttctcagagatcgttgatagtgacttggagat

SEQ ID NO: 46936 - DNA, 80 bp, synthetic construct; identical to SEQ ID NO: 12518
  source 1..80: mol_type = other DNA

SEQ ID NO: 46937 - DNA, 80 bp, synthetic construct
  source 1..80: mol_type = other DNA
tgctcacggaaaatggggagaaaactaaggggtgaaagggaataactctaaaaaggacacgttcacactttctgacagca

SEQ ID NO: 46938 - DNA, 80 bp, synthetic construct
  source 1..80: mol_type = other DNA
ctagctggctttttatacacaggcaggggagacccatctttggaattttaaggttcaaaaaggaatttgtctgtacctga

SEQ ID NO: 46939 - DNA, 80 bp, synthetic construct
  source 1..80: mol_type = other DNA
tgagggattgtagctaatattagcattgttgagctaaaataccatcatattttgtcaggagaagtgctgactgtcctgtg

SEQ ID NO: 46940 - DNA, 80 bp, synthetic construct; identical to SEQ ID NO: 12519
  source 1..80: mol_type = other DNA

SEQ ID NO: 46941 - DNA, 80 bp, synthetic construct
  source 1..80: mol_type = other DNA
gatgcagctcctggtgaaggcagaagtcctttaaaagtttattgactgcaaagaataaaccaaaatgggccgggtgcagt

SEQ ID NO: 46942 - DNA, 80 bp, synthetic construct
  source 1..80: mol_type = other DNA
agctgggcatggtggcgggtgcctgtaatcccagctacttgggaggctgaggcaggagaatcgcttgaactcgggaggca

SEQ ID NO: 46943 - DNA, 80 bp, synthetic construct
  source 1..80: mol_type = other DNA
ttcttcttcttcctcttccccttcttcttcttctcctccttctccttctttttttttggagatggagtcttgctctcttg

SEQ ID NO: 46944 - DNA, 80 bp, synthetic construct; identical to SEQ ID NO: 12520
  source 1..80: mol_type = other DNA

SEQ ID NO: 46945 - DNA, 80 bp, synthetic construct
  source 1..80: mol_type = other DNA
atagtgagacctcatctctgcaaaagttttaaacaattagccagacatggtggtgcatgcctgtagtcccagctactcag

SEQ ID NO: 46946 - DNA, 80 bp, synthetic construct
  source 1..80: mol_type = other DNA
ggaaattgctccagtgagaggtgatgaacatctgaattagtggcaggagtctctctgaacctattcagtttcaggggatt

SEQ ID NO: 46947 - DNA, 80 bp, synthetic construct
  source 1..80: mol_type = other DNA
agtgcgagactccatctcgaaaaaaaaaaaaaaaaaaggcagtggttaagggactgagtggggacagatgggagatggat

SEQ ID NO: 46948 - DNA, 80 bp, synthetic construct; identical to SEQ ID NO: 12521
  source 1..80: mol_type = other DNA

SEQ ID NO: 46949 - DNA, 80 bp, synthetic construct
  source 1..80: mol_type = other DNA
tcctggtgcaaccttccatagcacgttccgcttggatcactttctctttctctgttttataattgtccattacatacagc

SEQ ID NO: 46950 - DNA, 80 bp, synthetic construct
  source 1..80: mol_type = other DNA
tggaagtaattgttcagtaagcagttaccaatctaagttttataaaattgatactctctttatgagtgtattttagtaaa

SEQ ID NO: 46951 - DNA, 80 bp, synthetic construct
  source 1..80: mol_type = other DNA
taatttttgtattttatagtagagacggggttttgccatgttggccaggctggtctcgaactcctgacctcaagtgatct

SEQ ID NO: 46952 - DNA, 80 bp, synthetic construct; identical to SEQ ID NO: 12522
  source 1..80: mol_type = other DNA

SEQ ID NO: 46953 - DNA, 80 bp, synthetic construct
  source 1..80: mol_type = other DNA
ctgtggggtattttctaggtgctggttactgttctaagagctttaaatggagtaattcagttaatcctgcctcacggtac

SEQ ID NO: 46954 - DNA, 80 bp, synthetic construct
  source 1..80: mol_type = other DNA
gcagtggctcacacctgtaatcccagcacattgggaggccgaggagggtggatcacttgaggtcaggagttcaagaccag

SEQ ID NO: 46955 - DNA, 80 bp, synthetic construct
  source 1..80: mol_type = other DNA
gccattgcactccagcctgggtgacagagcgagactttgtctcaaaagaaaaaaaaaaaaatttaaaaactttttgtagt

SEQ ID NO: 46956 - DNA, 80 bp, synthetic construct; identical to SEQ ID NO: 12523
  source 1..80: mol_type = other DNA

SEQ ID NO: 46957 - DNA, 80 bp, synthetic construct
  source 1..80: mol_type = other DNA
attgcataatatttttctgttccattgttatatgacagcacgtttctgcctggttgtaatctcatagtggcttgattttt

SEQ ID NO: 46958 - DNA, 80 bp, synthetic construct
  source 1..80: mol_type = other DNA
gtgttagtttttatgtgttttggaatttcagcttccaggttcatttccaggctttctctgtctcccttctcttgttcctc

SEQ ID NO: 46959 - DNA, 80 bp, synthetic construct
  source 1..80: mol_type = other DNA
gccgtttggtaaccacgggcctccctaggccacagtcccaggcgaagttagtagcaagctatttcagtcttcttgaagag

SEQ ID NO: 46960 - DNA, 80 bp, synthetic construct; identical to SEQ ID NO: 12524
  source 1..80: mol_type = other DNA

SEQ ID NO: 46961 - DNA, 80 bp, synthetic construct
  source 1..80: mol_type = other DNA
tcacactctaatcactttctcaaggctggatcaggtgcgagactctgtagcagtaacctgaagttgagaattgaggaagt

SEQ ID NO: 46962 - DNA, 80 bp, synthetic construct
  source 1..80: mol_type = other DNA
agcatatgagagcaaacaatggaagcttgacatgatcactggatgaacatctgaagtttcatatgtgatgggatctcccc

SEQ ID NO: 46963 - DNA, 80 bp, synthetic construct
  source 1..80: mol_type = other DNA
gcattgtgttgctgtgttttttgaacccagtgagttaactgtccagtgttccacatcattctgacctgggtcaacagatg

SEQ ID NO: 46964 - DNA, 80 bp, synthetic construct
  source 1..80: mol_type = other DNA
tggctaattcaggggcatgagaggcagcatctaaccttgcccaggggccctggctcccctttactatggggggtggcctg

SEQ ID NO: 46965 - DNA, 80 bp, synthetic construct; identical to SEQ ID NO: 12525
  source 1..80: mol_type = other DNA

SEQ ID NO: 46966 - DNA, 80 bp, synthetic construct
  source 1..80: mol_type = other DNA
tgactcagctttccctgttaatgtagtcaacttaagctactgccatggttcaggttccatcatgcttcaaatatagttta

SEQ ID NO: 46967 - DNA, 80 bp, synthetic construct
  source 1..80: mol_type = other DNA
cctggaccttggcaaggagatttttacagtgggaatctggtccagcctctctctggccccaggcctctactgtccacctt

SEQ ID NO: 46968 - DNA, 80 bp, synthetic construct
  source 1..80: mol_type = other DNA
tggccacactctgttcccccaggcagcgtcttcactgagtagtctttgaaccattaaccacctgcagccctatccatgtt

SEQ ID NO: 46969 - DNA, 80 bp, synthetic construct; identical to SEQ ID NO: 12526
  source 1..80: mol_type = other DNA

SEQ ID NO: 46970 - DNA, 80 bp, synthetic construct
  source 1..80: mol_type = other DNA
gggaaactgctgatcaccagtttcagatgtttctattgggagactgcctgtctctggtgccagctgtgaccaattatttt

SEQ ID NO: 46971 - DNA, 80 bp, synthetic construct
  source 1..80: mol_type = other DNA
aattctcagagtgtagtgtgtaaacgttcacctccactataaagacctccttgccaggggtaggaagcctttagtctgaa

SEQ ID NO: 46972 - DNA, 80 bp, synthetic construct
  source 1..80: mol_type = other DNA
actgaccaagcaggcaggaaatgtaattgaagttttattagggactcccctatctcttctcctatggggtccagtgacca

SEQ ID NO: 46973 - DNA, 80 bp, synthetic construct; identical to SEQ ID NO: 12527
  source 1..80: mol_type = other DNA

SEQ ID NO: 46974 - DNA, 80 bp, synthetic construct
  source 1..80: mol_type = other DNA
cgcaaaatcttctggggccaggatgtgcaaacgcttcctggaatggggtagaacagtgacaaaacaggaagaacaaaaaa

SEQ ID NO: 46975 - DNA, 80 bp, synthetic construct
  source 1..80: mol_type = other DNA
gacacagactgagacactgtggagctggatgcctttctgtgtgtttgttagagtatgagaagcccgctgggaacaagtaa

SEQ ID NO: 46976 - DNA, 80 bp, synthetic construct
  source 1..80: mol_type = other DNA
gcaggaggatcacttgagcccaggggttccaggctgcagtgagctgcaattttgccactgtactccaacctgggtgacag

SEQ ID NO: 46977 - DNA, 80 bp, synthetic construct; identical to SEQ ID NO: 12528
  source 1..80: mol_type = other DNA

SEQ ID NO: 46978 - DNA, 80 bp, synthetic construct
  source 1..80: mol_type = other DNA
acagaaagctctgtcttgcttcgtctttgagccaaaggggacctggtgcccctgagttgggggcactgtgtggtgcccag

SEQ ID NO: 46979 - DNA, 80 bp, synthetic construct
  source 1..80: mol_type = other DNA
tgcagtggaatatttctcagcactgaaaatgaatgttcctataactgcatgtgataacaggcaaatctgcagacataaag

SEQ ID NO: 46980 - DNA, 80 bp, synthetic construct
  source 1..80: mol_type = other DNA
ctttccttaatctaggcactggttgcatgcatatgctgtttgcgaaagttctttgagctgtacatttaaaattaatgcac

SEQ ID NO: 46981 - DNA, 80 bp, synthetic construct
  source 1..80: mol_type = other DNA
accccatctctactaaaaatacaaaaattagccgggtgtggtggcacatgcctgtaatcccaccttcctggaggctggga

SEQ ID NO: 46982 - DNA, 80 bp, synthetic construct; identical to SEQ ID NO: 12529
  source 1..80: mol_type = other DNA

SEQ ID NO: 46983 - DNA, 80 bp, synthetic construct
  source 1..80: mol_type = other DNA
aatctgctgagagcctgaacagaacgaaaagaggaaagagaaattcactactgtttcttcccgcctgcgcgctggaactg

SEQ ID NO: 46984 - DNA, 80 bp, synthetic construct
  source 1..80: mol_type = other DNA
taatgtgagccaattcctcattctatctatcaatctatatatcgattgattgatcgatcgatagatcgatctatctaatc

SEQ ID NO: 46985 - DNA, 80 bp, synthetic construct
  source 1..80: mol_type = other DNA
ccagcctcatcctcctgagtagctaggactacaggtgcccaccaccatgcccaactaatttttaaactttttttacagat

SEQ ID NO: 46986 - DNA, 80 bp, synthetic construct; identical to SEQ ID NO: 12530
  source 1..80: mol_type = other DNA

SEQ ID NO: 46987 - DNA, 80 bp, synthetic construct
  source 1..80: mol_type = other DNA
acttctattcattgcagatttaaaagttggctacatatcctttgctacttctcccattgggaggtggggaccccttaaat

SEQ ID NO: 46988 - DNA, 80 bp, synthetic construct
  source 1..80: mol_type = other DNA
ggcgggcggatcatgaggtcaggagttcaagaccagcctggccaacatggtgaaatgccgtctctactaaaaatacaaaa

SEQ ID NO: 46989 - DNA, 80 bp, synthetic construct
  source 1..80: mol_type = other DNA
aaaaaaaaaaaaaaaagtttcaaattcaggctgggcacagtggtgctccgtaatcctagaactttgggaggctgaggcag

SEQ ID NO: 46990 - DNA, 80 bp, synthetic construct; identical to SEQ ID NO: 12531
  source 1..80: mol_type = other DNA

SEQ ID NO: 46991 - DNA, 80 bp, synthetic construct
  source 1..80: mol_type = other DNA
tccagttaacatcaagcagagtagaattgctgaactgacagacacaattttttatgtaaggaagtggctgttgttgtaag

SEQ ID NO: 46992 - DNA, 80 bp, synthetic construct
  source 1..80: mol_type = other DNA
agctcttcattccattacagttcatcaaagctcccatgccaggcttgtggcagggtaatttactgtggaattgttttgtt

SEQ ID NO: 46993 - DNA, 80 bp, synthetic construct
  source 1..80: mol_type = other DNA
gtgtgtcttgagcagaggttgagattctctagggtctggaaatttggtgctttctccccacgagtgaggagacccccact

SEQ ID NO: 46994 - DNA, 80 bp, synthetic construct; identical to SEQ ID NO: 12532
  source 1..80: mol_type = other DNA

SEQ ID NO: 46995 - DNA, 80 bp, synthetic construct
  source 1..80: mol_type = other DNA
gtgtgattagtgcccttataagacgagttagagaccagagctctctctcggccatcggtagtgagaaggctgcagtctga

SEQ ID NO: 46996 - DNA, 80 bp, synthetic construct
  source 1..80: mol_type = other DNA
tacttgagcccaggagtttgagaccagcctgggcaacatggggaaaaccccatctctacaaaaatacaaaaacttaggct

SEQ ID NO: 46997 - DNA, 80 bp, synthetic construct
  source 1..80: mol_type = other DNA
cccagctattcaggaggctgaggcaggacaattgcttgaacctgggaggcggaggttgcagtgagccgagattgtgccac

SEQ ID NO: 46998 - DNA, 80 bp, synthetic construct; identical to SEQ ID NO: 12533
  source 1..80: mol_type = other DNA

SEQ ID NO: 46999 - DNA, 80 bp, synthetic construct
  source 1..80: mol_type = other DNA
gggttgaatttcctcccagtcttctgggtaggacacagagcagattacatttgattgagtaaaagtaaggaatgtgacat

SEQ ID NO: 47000 - DNA, 80 bp, synthetic construct
  source 1..80: mol_type = other DNA
ggaaattttgtctttatgaaaagtggggcatgggaccagaggagggacttggtcagaaaaacaaaatacgattatttttg

SEQ ID NO: 47001 - DNA, 80 bp, synthetic construct
  source 1..80: mol_type = other DNA
caactcttgggctcaagcaatcctcccacctcagcctcatgagtagctgggactacagccatgtggcaccatgcctggct

SEQ ID NO: 47002 - DNA, 80 bp, synthetic construct; identical to SEQ ID NO: 12534
  source 1..80: mol_type = other DNA

SEQ ID NO: 47003 - DNA, 80 bp, synthetic construct
  source 1..80: mol_type = other DNA
taaatatactgggtatccttccctatcaccacgtaaagctgttcctcctgcctttttcattttgacagctctatagtatt

SEQ ID NO: 47004 - DNA, 80 bp, synthetic construct
  source 1..80: mol_type = other DNA
gtttacctttgtgtaggtgaatctataagatagattcccagaagggggatctctgggtcaaagggtttgtgcatgtatag

SEQ ID NO: 47005 - DNA, 80 bp, synthetic construct
  source 1..80: mol_type = other DNA
ctcttgccaaccaaggaaagatttatgtataagttcaacatggatgcacttaggctaattctccttcctgcatttccttc

SEQ ID NO: 47006 - DNA, 80 bp, synthetic construct; identical to SEQ ID NO: 12535
  source 1..80: mol_type = other DNA

SEQ ID NO: 47007 - DNA, 80 bp, synthetic construct
  source 1..80: mol_type = other DNA
acggtcctgtcttggacagtttccccggccacccagcaggctgcctattgtgctgtttgagatgcaaatgatctcttctt

SEQ ID NO: 47008 - DNA, 80 bp, synthetic construct
  source 1..80: mol_type = other DNA
aagtgattctcctgcctccgcctcccgagtagctcggactacaggcgcatggcatcacgcccagctaatttttgtatttt

SEQ ID NO: 47009 - DNA, 80 bp, synthetic construct
  source 1..80: mol_type = other DNA
gacttgttcaactctttcttatggatggttttgcagaatacatacatggaaaccgtccacaaattctagcccaccaatta

SEQ ID NO: 47010 - DNA, 80 bp, synthetic construct; identical to SEQ ID NO: 12536
  source 1..80: mol_type = other DNA

SEQ ID NO: 47011 - DNA, 80 bp, synthetic construct
  source 1..80: mol_type = other DNA
cccgagtagctgggattacaggcacctgccactgtgcctggctaatttctgtatttttagtagagacagggttttaccat

SEQ ID NO: 47012 - DNA, 80 bp, synthetic construct
  source 1..80: mol_type = other DNA
ctggtttgggtacagatatatttgtggactctggagtccaggtgtcagggtatagcttcctgaggtgccccaggcagctg

SEQ ID NO: 47013 - DNA, 80 bp, synthetic construct
  source 1..80: mol_type = other DNA
ccaccacacccttaatcctctcagggaactccagtctccagcaaacaaaggcctgaaaagtgtctacaaggaaattctga

SEQ ID NO: 47014 - DNA, 80 bp, synthetic construct; identical to SEQ ID NO: 12537
  source 1..80: mol_type = other DNA

SEQ ID NO: 47015 - DNA, 80 bp, synthetic construct
  source 1..80: mol_type = other DNA
gccagggcaacagagtgagaccctgtctcttaaaaaaaaaaaaaaagaaaagaaaaatcataaatttggaaaggagagct

SEQ ID NO: 47016 - DNA, 80 bp, synthetic construct
  source 1..80: mol_type = other DNA
gggttcttgtcacatgaccaggaaaagttaagcaggcagacactttgaagggtgaggggaatggaattttttgggtgaaa

SEQ ID NO: 47017 - DNA, 80 bp, synthetic construct
  source 1..80: mol_type = other DNA
ccccattttcccagtatgcaggcaggtgattctccagggaccctcccctttatctgtctcctgcatctatcattatctat

SEQ ID NO: 47018 - DNA, 80 bp, synthetic construct; identical to SEQ ID NO: 12538
  source 1..80: mol_type = other DNA

SEQ ID NO: 47019 - DNA, 80 bp, synthetic construct
  source 1..80: mol_type = other DNA
aggaaatccctggcataattgataaagtagacaggaaagggcagaagccagcatggggtgcatcgatgagcaatgaactt

SEQ ID NO: 47020 - DNA, 80 bp, synthetic construct
  source 1..80: mol_type = other DNA
acccatgggtagtgctcctgtgactagggtaagtcctcaacagtgtcagaggcttaaagacggagccatctgaatggcaa

SEQ ID NO: 47021 - DNA, 80 bp, synthetic construct
  source 1..80: mol_type = other DNA
gtggattcacaaaacaactgcctttctccctttccacctcagttcattatcaagaacaaccctggggtttcccaccttaa

SEQ ID NO: 47022 - DNA, 80 bp, synthetic construct; identical to SEQ ID NO: 12539
  source 1..80: mol_type = other DNA

SEQ ID NO: 47023 - DNA, 80 bp, synthetic construct
  source 1..80: mol_type = other DNA
gccatggcaggtcagggttaagtcacacacccctgcacttaaagaaaaagtgttctgccacaaggttttaatttttctct

SEQ ID NO: 47024 - DNA, 80 bp, synthetic construct
  source 1..80: mol_type = other DNA
aagaagactactgaccatggactggttctggctggtttacagatgctgcatacttgagtttgcttgtgtcctgaaaagac

SEQ ID NO: 47025 - DNA, 80 bp, synthetic construct
  source 1..80: mol_type = other DNA
cagcctcccgagtagctgggactacaggcacccgctaccatgcccggctaattttttttgtatttttagtagagacgggg

SEQ ID NO: 47026 - DNA, 80 bp, synthetic construct
  source 1..80: mol_type = other DNA
aaatgctaagtctccaccctaaggtgcacatgggtcatatgcaatatactagtttattcagtatatgtgcttcaggacca

SEQ ID NO: 47027 - DNA, 80 bp, synthetic construct; identical to SEQ ID NO: 12540
  source 1..80: mol_type = other DNA

SEQ ID NO: 47028 - DNA, 80 bp, synthetic construct
  source 1..80: mol_type = other DNA
aggctcaggtgattctccaacctcagcctttcaagtagctgggaccacatccgtgcaccaccaggcccagttaactttca

SEQ ID NO: 47029 - DNA, 80 bp, synthetic construct
  source 1..80: mol_type = other DNA
tcagttcttgtgtgtagcctggaatcagtctgggggtgggggtgctgttggcaggaactcttcttgctttgctgagagat

SEQ ID NO: 47030 - DNA, 80 bp, synthetic construct
  source 1..80: mol_type = other DNA
aaagttctgcatcaataagattcaaaagaaatcattctattgaaatatgattctaggcacaggctagttgggggtctctg

SEQ ID NO: 47031 - DNA, 80 bp, synthetic construct; identical to SEQ ID NO: 12541
  source 1..80: mol_type = other DNA

SEQ ID NO: 47032 - DNA, 80 bp, synthetic construct
  source 1..80: mol_type = other DNA
ctgcccagggagctccttctgccagtccccagcctactgcacttcttccttatatgcttggagtgtgtggaatgctgctc

SEQ ID NO: 47033 - DNA, 80 bp, synthetic construct
  source 1..80: mol_type = other DNA
ttctggatgggctccatctctgaaagagaggggcaaaagggttggggaaggggtagctgccggtcttagtgaagggtccc

SEQ ID NO: 47034 - DNA, 80 bp, synthetic construct
  source 1..80: mol_type = other DNA
tcccattccttagcctgtcagccttggtagggacatcactttcctccttatccttcaatgaggacattcaagacaacatc

SEQ ID NO: 47035 - DNA, 80 bp, synthetic construct
  source 1..80: mol_type = other DNA
ggcttcaatgctcagcccctcttattccttctagcaagagcttcttgcaaatacctcaatttttttttttatcttctgca

SEQ ID NO: 47036 - DNA, 80 bp, synthetic construct; identical to SEQ ID NO: 12542
  source 1..80: mol_type = other DNA

SEQ ID NO: 47037 - DNA, 80 bp, synthetic construct
  source 1..80: mol_type = other DNA
cccgcacttaggtaataccagccagctatattcgatgggtggaggaggcagtatctgatctgcataggactcaggggatt

SEQ ID NO: 47038 - DNA, 80 bp, synthetic construct
  source 1..80: mol_type = other DNA
caaaggtgggaatagccttgttgggtggacccagtttctaacagctagcgtttgcatatcaaaggttgctggcccaagtc

SEQ ID NO: 47039 - DNA, 80 bp, synthetic construct
  source 1..80: mol_type = other DNA
tctcgggttcaagcaattctcttgccatagccacccacatagctgggactacaggcacccaccaccaagcccggctagtt

SEQ ID NO: 47040 - DNA, 80 bp, synthetic construct; identical to SEQ ID NO: 12543
  source 1..80: mol_type = other DNA

SEQ ID NO: 47041 - DNA, 80 bp, synthetic construct
  source 1..80: mol_type = other DNA
ttgtcttttcttttcttttcttttttttttgagatggagttttgctcttgttgcccaggctggagtgcaattgcgcggtc

SEQ ID NO: 47042 - DNA, 80 bp, synthetic construct
  source 1..80: mol_type = other DNA
ctgacctcaggtgattcacccccctcagcctcctaaagtgctgggattacaggcatgagccaccatgccaggtgggggta

SEQ ID NO: 47043 - DNA, 80 bp, synthetic construct
  source 1..80: mol_type = other DNA
aaaaatacaaaaaattagccgggcatggtagcacgtgcctgtaatcccagatactcgggaggctgaggcaggagaatcac

SEQ ID NO: 47044 - DNA, 80 bp, synthetic construct; identical to SEQ ID NO: 12544
  source 1..80: mol_type = other DNA

SEQ ID NO: 47045 - DNA, 80 bp, synthetic construct
  source 1..80: mol_type = other DNA
tatttattgctgtgttcacagaaaaggaagcatcaagacggcaaagctctttgatgaaaagccaggcgtactcacacaca

SEQ ID NO: 47046 - DNA, 80 bp, synthetic construct
  source 1..80: mol_type = other DNA
cagaacagagaattggtaagtaaaaaattgttaagaatgtatattggctgggcgcgatggctcatgcctgtaatactagc

SEQ ID NO: 47047 - DNA, 80 bp, synthetic construct
  source 1..80: mol_type = other DNA
ctaatgtggaaggatcgcttgagcccagagtgtgggggtgggggttgggaggcaaggttgcagtgagcctggattgcacc

SEQ ID NO: 47048 - DNA, 80 bp, synthetic construct
  source 1..80: mol_type = other DNA
aaatgaggaatgtaggtggataagggactggaatagtgcagcacaacactaactacaggtttcagccccaatgagattgc

SEQ ID NO: 47049 - DNA, 80 bp, synthetic construct; identical to SEQ ID NO: 12545
  source 1..80: mol_type = other DNA

SEQ ID NO: 47050 - DNA, 80 bp, synthetic construct
  source 1..80: mol_type = other DNA
ccaccaaattttggcgtccagagttttcattacataggcacaattggttgactcatttgccaccgaattgaacgcaatct

SEQ ID NO: 47051 - DNA, 80 bp, synthetic construct
  source 1..80: mol_type = other DNA
caggagattccaaggatttagtttccctcctaggaaccagggacaaagggcagtcaaattctttattgttatcacagaga

SEQ ID NO: 47052 - DNA, 80 bp, synthetic construct
  source 1..80: mol_type = other DNA
tattgcaggaattgaaaaattgatgtaataaagcctagaatgcaataaaggaatcggcattcaagtagatgagagaggtt

SEQ ID NO: 47053 - DNA, 80 bp, synthetic construct; identical to SEQ ID NO: 12546
  source 1..80: mol_type = other DNA

SEQ ID NO: 47054 - DNA, 80 bp, synthetic construct
  source 1..80: mol_type = other DNA
ttgtactcctggttagtcatggtgcatttttttttaatacttcatattaaatttttaccttctggattgagacactagag

SEQ ID NO: 47055 - DNA, 80 bp, synthetic construct
  source 1..80: mol_type = other DNA
ccaagttccaaggaggtcaggctactaatacccacaaatgaattctgatgagatcattacacaataaacaataactgttg

SEQ ID NO: 47056 - DNA, 80 bp, synthetic construct
  source 1..80: mol_type = other DNA
tatgcctcttttaaaaaactctgcttatgatgacaatttcaaacatacacagaagccgtgagtatataatgagtcttgct

SEQ ID NO: 47057 - DNA, 80 bp, synthetic construct; identical to SEQ ID NO: 12547
  source 1..80: mol_type = other DNA

SEQ ID NO: 47058 - DNA, 80 bp, synthetic construct
  source 1..80: mol_type = other DNA
gaactgacaagcaggggagagaggtgatgtttaaggttatatattttggcaaaaaattatgagtgtaaattgtgcttgtt

SEQ ID NO: 47059 - DNA, 80 bp, synthetic construct
  source 1..80: mol_type = other DNA
gtctgatatggtttagctgggtctccacccaaatctcatcttgaattgtagttcccttaatccccacgtgtcatgagagg

SEQ ID NO: 47060 - DNA, 80 bp, synthetic construct
  source 1..80: mol_type = other DNA
tcttccaccatgattttgagggcctcctcagccatgtggaactgtgaatgcattaaacctctttttctttataaattacc

SEQ ID NO: 47061 - DNA, 80 bp, synthetic construct; identical to SEQ ID NO: 12548
  source 1..80: mol_type = other DNA

SEQ ID NO: 47062 - DNA, 80 bp, synthetic construct
  source 1..80: mol_type = other DNA
gctataaagatacctgaaaatgtggaaatgggtaacaggcagaggttagaagtttagagggctcagaagaagacacaaaa

SEQ ID NO: 47063 - DNA, 80 bp, synthetic construct
  source 1..80: mol_type = other DNA
gataaggaacttgttgggacctggagtaaaggtcactcttcctatgcaaagagactggcggtattttgcccctgccctag

SEQ ID NO: 47064 - DNA, 80 bp, synthetic construct
  source 1..80: mol_type = other DNA
ttcaagtttgctgcagaaatttgcataagtaaagaggagtggaatgttaatcactaagacaatggggaaaatgtctccag

SEQ ID NO: 47065 - DNA, 80 bp, synthetic construct; identical to SEQ ID NO: 12549
  source 1..80: mol_type = other DNA

SEQ ID NO: 47066 - DNA, 80 bp, synthetic construct
  source 1..80: mol_type = other DNA
cccctacacagagttccccaccggggcattgcctggtggagctgtgagaagagggccaccatcctccaaaccccagaatg

SEQ ID NO: 47067 - DNA, 80 bp, synthetic construct
  source 1..80: mol_type = other DNA
tgtgagacatggagtcaaagggggagcattttggaacgttaaggtttaatgactgccctactgtatttcagacttgtatg

SEQ ID NO: 47068 - DNA, 80 bp, synthetic construct
  source 1..80: mol_type = other DNA
tggacttttgagttaatgctgaaatgagttaagactttggtggactgttgaaaggcatgattgtgtgttgaattgtgaag

SEQ ID NO: 47069 - DNA, 80 bp, synthetic construct; identical to SEQ ID NO: 12550
  source 1..80: mol_type = other DNA

SEQ ID NO: 47070 - DNA, 80 bp, synthetic construct
  source 1..80: mol_type = other DNA
tcgagtctcactctgtcacccaggctggagtgcagtggcatgatctcggctcactgcaacctccatctcctgggttcaag

SEQ ID NO: 47071 - DNA, 80 bp, synthetic construct
  source 1..80: mol_type = other DNA
agtgctgggattacaggcatgagccacgcgcccagctcagaattataaattacccagtcttgggtatttcttcatagcag

SEQ ID NO: 47072 - DNA, 80 bp, synthetic construct
  source 1..80: mol_type = other DNA
gtgtttgagaatgggcatggcaggagggaaggaagtataacgggcatgagaaaacttttgagaggtatggatgtgttcac

SEQ ID NO: 47073 - DNA, 80 bp, synthetic construct
  source 1..80: mol_type = other DNA
ggccgaggcgggcggatcacgaggtcaggagatcgagaccatcctggctaacatggtgaaaccccgtctctactaaaaat

SEQ ID NO: 47074 - DNA, 80 bp, synthetic construct; identical to SEQ ID NO: 12551
  source 1..80: mol_type = other DNA

SEQ ID NO: 47075 - DNA, 80 bp, synthetic construct
  source 1..80: mol_type = other DNA
cattgtgcaagaaagaatttggggcgagtccacagagtaaagtgaaagcaagtttattaagaaataaaggaataaaagag

SEQ ID NO: 47076 - DNA, 80 bp, synthetic construct
  source 1..80: mol_type = other DNA
cgattctcctgcctcagcctcctgagtagctgggtttacaggcatgcaccactcccagctaattttgtatttttagtaga

SEQ ID NO: 47077 - DNA, 80 bp, synthetic construct
  source 1..80: mol_type = other DNA
attttctgggaaagggatggagatttcctggaactgtgggttcttcttccttttagatcatatagggtaactctgggaca

SEQ ID NO: 47078 - DNA, 80 bp, synthetic construct; identical to SEQ ID NO: 12552
  source 1..80: mol_type = other DNA

SEQ ID NO: 47079 - DNA, 80 bp, synthetic construct
  source 1..80: mol_type = other DNA
aaagaaagggggatcaggaagcaactttattttcacttcaccgtgtccctttacatccattttgtgggatttcttctcct

SEQ ID NO: 47080 - DNA, 80 bp, synthetic construct
  source 1..80: mol_type = other DNA
gagatttcttcccgtactttatgctatttacagaccagccacgctcaatgggaattgaggtgtgtggtgacctctgattt

SEQ ID NO: 47081 - DNA, 80 bp, synthetic construct
  source 1..80: mol_type = other DNA
ctaacttttggccaacggatctgaatcagaacaacataagcaaccttttgttctgccctcaaacagcatgggtggcatta

SEQ ID NO: 47082 - DNA, 80 bp, synthetic construct; identical to SEQ ID NO: 12553
  source 1..80: mol_type = other DNA

SEQ ID NO: 47083 - DNA, 80 bp, synthetic construct
  source 1..80: mol_type = other DNA
gggtcattaggcatagctgattcttcctttcatcaggcacttccgttgatttttctgagctaacaccttccctttgctac

SEQ ID NO: 47084 - DNA, 80 bp, synthetic construct
  source 1..80: mol_type = other DNA
cctgccatctctctcttatggtggccccacctgtggtccacaggaaacatgaatccagtgcccccggcaattgcggaagg

SEQ ID NO: 47085 - DNA, 80 bp, synthetic construct
  source 1..80: mol_type = other DNA
caggaacatatattcagctccctgacgggtaccaccaaaggccctttcctggggctcgaagaaataccctcactgaattc

SEQ ID NO: 47086 - DNA, 80 bp, synthetic construct; identical to SEQ ID NO: 12554
  source 1..80: mol_type = other DNA

SEQ ID NO: 47087 - DNA, 80 bp, synthetic construct
  source 1..80: mol_type = other DNA
ccaaaaggccaggggctctcatcccagtagtagtaattaatctgtcatgcacaattcatagtatttcaacattaggttcc

SEQ ID NO: 47088 - DNA, 80 bp, synthetic construct
  source 1..80: mol_type = other DNA
tgagggaaatctcactcgtgctcctaaatccaggcacccaggccaacagcaactctccatcgcctgctgagcattccccc

SEQ ID NO: 47089 - DNA, 80 bp, synthetic construct
  source 1..80: mol_type = other DNA
gcttctatgttgaccttcagctttctttttgcttcggatggaggcaggactggactaaatgtggtgacaaacaacattca

SEQ ID NO: 47090 - DNA, 80 bp, synthetic construct; identical to SEQ ID NO: 12555
  source 1..80: mol_type = other DNA

SEQ ID NO: 47091 - DNA, 80 bp, synthetic construct
  source 1..80: mol_type = other DNA
aagtgtctgatttgtttcaacactctaacaaccaaagaaaacactgattgtatctcttaaagagcttttcttccttcccc

SEQ ID NO: 47092 - DNA, 80 bp, synthetic construct
  source 1..80: mol_type = other DNA
tgcttgagctcaggagttcgagaccagcttggacaatgtggtaaaaccccgtctctaccaaaaatacaaaaattagccag

SEQ ID NO: 47093 - DNA, 80 bp, synthetic construct
  source 1..80: mol_type = other DNA
aaataaataacatttgaggcttcttcacttactttgtgccatttacaggccagctgctcctggtgagaatggaggtgtgt

SEQ ID NO: 47094 - DNA, 80 bp, synthetic construct; identical to SEQ ID NO: 12556
  source 1..80: mol_type = other DNA

SEQ ID NO: 47095 - DNA, 80 bp, synthetic construct
  source 1..80: mol_type = other DNA
aaaatgagccagatgtggtggcacccacctgtagtaccagctactcaggaggctgaggcaagagaatcacttgaactcag

SEQ ID NO: 47096 - DNA, 80 bp, synthetic construct
  source 1..80: mol_type = other DNA
ttataaagaaaaaggggtttaatggactcacagttccatgtggcaggggaggcctcacaagcatggcagaaggcaaaagg

SEQ ID NO: 47097 - DNA, 80 bp, synthetic construct
  source 1..80: mol_type = other DNA
acacatgggaattatgggaactacaactcaagatgagatttgggtggggacacagcccaaccatatcattctgccccagc

SEQ ID NO: 47098 - DNA, 80 bp, synthetic construct
  source 1..80: mol_type = other DNA
ttacttcctagatatagtgggggtataggcattgggtaaatacagctattccaaatgggagaaattggccaaaacaaagg

SEQ ID NO: 47099 - DNA, 80 bp, synthetic construct; identical to SEQ ID NO: 12557
  source 1..80: mol_type = other DNA

SEQ ID NO: 47100 - DNA, 80 bp, synthetic construct
  source 1..80: mol_type = other DNA
ttctgcctggacatccaggtgaaatctagttggaggttcccaaacctcaattcttgacttcagtgcacccacaggctcaa

SEQ ID NO: 47101 - DNA, 80 bp, synthetic construct
  source 1..80: mol_type = other DNA
tccctagtctccaggtctgtgatgggaggggctgctgcaaaggtctctgacacgccctggagacatttaccccattgtct

SEQ ID NO: 47102 - DNA, 80 bp, synthetic construct; identical to SEQ ID NO: 12558
  source 1..80: mol_type = other DNA

SEQ ID NO: 47103 - DNA, 80 bp, synthetic construct
  source 1..80: mol_type = other DNA
aaagaattgcttgaacctgggaggcagaggttgcagtgagccaagatcatgccactgcactacagcctgggtgacagagc

SEQ ID NO: 47104 - DNA, 80 bp, synthetic construct
  source 1..80: mol_type = other DNA
agaaatttcttctgccagataccctaaatcatctccctcaagttcaatgttccacaaatctctaggtcaggggcaaaatg

SEQ ID NO: 47105 - DNA, 80 bp, synthetic construct
  source 1..80: mol_type = other DNA
actttcccacactttcctgtcttctgagccctccaaactgttccagtcgctacctgttacccagttccaaagttgcttcc

SEQ ID NO: 47106 - DNA, 80 bp, synthetic construct; identical to SEQ ID NO: 12559
  source 1..80: mol_type = other DNA

SEQ ID NO: 47107 - DNA, 80 bp, synthetic construct
  source 1..80: mol_type = other DNA
acagccaaaccatatcagtttataatcccagcactttgggaggccaagacaggattatcacttgaggccagaagttggag

SEQ ID NO: 47108 - DNA, 80 bp, synthetic construct
  source 1..80: mol_type = other DNA
tgccactgtactccagcctaggcaacagagcgaggccctctttctctctctctctttttttaaacaaggaagaaaaaaga

SEQ ID NO: 47109 - DNA, 80 bp, synthetic construct
  source 1..80: mol_type = other DNA
aaatataaaagggggccagggacttgctaatcttgccggagagtcggcgcagctcagtgcaaggacttgggaaggcaggg

SEQ ID NO: 47110 - DNA, 80 bp, synthetic construct; identical to SEQ ID NO: 12560
  source 1..80: mol_type = other DNA

SEQ ID NO: 47111 - DNA, 80 bp, synthetic construct
  source 1..80: mol_type = other DNA
ctatcgcctggagttacagacaaacccgcagaccaatgtgaaaagccaattgcccagagaaacccagcagagtcttcagc

SEQ ID NO: 47112 - DNA, 80 bp, synthetic construct
  source 1..80: mol_type = other DNA
tgcaacctctgcctcccaggttcaagcgattctcctgcctcagcttcctgagtagctgggattacaggcgcgcaccacca

SEQ ID NO: 47113 - DNA, 80 bp, synthetic construct
  source 1..80: mol_type = other DNA
ctagaatttcaggcttcctttttaatttgcttgctttcttgttggtctgtgtcttggaacataggaactttcaatccctc

SEQ ID NO: 47114 - DNA, 80 bp, synthetic construct; identical to SEQ ID NO: 12561
  source 1..80: mol_type = other DNA

SEQ ID NO: 47115 - DNA, 80 bp, synthetic construct
  source 1..80: mol_type = other DNA
gatcacgccattgcactccagcctgggcaacaagagcaaaactctgactcaaaaaacaaacaaacaaacaaaacaaaaca

SEQ ID NO: 47116 - DNA, 80 bp, synthetic construct
  source 1..80: mol_type = other DNA
ttaaacttcctttcttcataaattacccagtctcaggtagttctttatagcagtgctaatacaccctgttacaggactaa

SEQ ID NO: 47117 - DNA, 80 bp, synthetic construct
  source 1..80: mol_type = other DNA
tataaagtcagtttaatgatttaaatcccattgtggagaaaatagatctctgcagaaaagtacatccctgccctttccca

SEQ ID NO: 47118 - DNA, 80 bp, synthetic construct; identical to SEQ ID NO: 12562
  source 1..80: mol_type = other DNA

SEQ ID NO: 47119 - DNA, 80 bp, synthetic construct
  source 1..80: mol_type = other DNA
gacaagatgtgaacttcatgtctcaattgatgatcacgtggttgtgtggtggtgcagattgtgtttttgatgtgcagcag

SEQ ID NO: 47120 - DNA, 80 bp, synthetic construct
  source 1..80: mol_type = other DNA
ccttgggtacctccctcctcccctcaaggtgaatgtttcatcaacaaaatcaagctaatagaagtctcaggttgtcactt

SEQ ID NO: 47121 - DNA, 80 bp, synthetic construct
  source 1..80: mol_type = other DNA
tggctctggatcccagtcaggcgctaaaaatctgctatttgtgcttaggttagctttacccatagctgaatggctctgag

SEQ ID NO: 47122 - DNA, 80 bp, synthetic construct
  source 1..80: mol_type = other DNA
aagcacataatacatagccttgttactggcaccccttcccctaatcttgctttccctttgtattaggccattcttgcact

SEQ ID NO: 47123 - DNA, 80 bp, synthetic construct; identical to SEQ ID NO: 12563
  source 1..80: mol_type = other DNA

SEQ ID NO: 47124 - DNA, 80 bp, synthetic construct
  source 1..80: mol_type = other DNA
cttcatatcatcctttataatactatgccaatctgatcatggccaggttcaacttcttttttaaaggcttcccagagact

SEQ ID NO: 47125 - DNA, 80 bp, synthetic construct
  source 1..80: mol_type = other DNA
ccactgtttaaaaaaaaaaaaaattagccaggcattggggtacatgcctatagtcccagctactgaggaggctgaggtga

SEQ ID NO: 47126 - DNA, 80 bp, synthetic construct
  source 1..80: mol_type = other DNA
agtttccacaaaacagccaccctctacttccttactggcaaagctttcatgaatattatttatttgccatttcagtgctg

SEQ ID NO: 47127 - DNA, 80 bp, synthetic construct; identical to SEQ ID NO: 12564
  source 1..80: mol_type = other DNA

SEQ ID NO: 47128 - DNA, 80 bp, synthetic construct
  source 1..80: mol_type = other DNA
tcgattcactcttccttttgtgagagatttctctgtagcatgtgatgctgtttgatacatgttacccacagtaaaacttc

SEQ ID NO: 47129 - DNA, 80 bp, synthetic construct
  source 1..80: mol_type = other DNA
aagcacttcctcatctattcaaattttatcatgagattgcagcaattcagtcacatcttcaggctccacttctagttctc

SEQ ID NO: 47130 - DNA, 80 bp, synthetic construct
  source 1..80: mol_type = other DNA
ttttttttttttttttttttttttttgagacagagtcttactcttgttgcccaggctggagtgcagtggtgcgatatcag

SEQ ID NO: 47131 - DNA, 80 bp, synthetic construct; identical to SEQ ID NO: 12565
  source 1..80: mol_type = other DNA

SEQ ID NO: 47132 - DNA, 80 bp, synthetic construct
  source 1..80: mol_type = other DNA
tttccaaaagattttcaatgtattttgcccagatatgtcagaaaaatcactatccattgcagctataaccttacaaaatt

SEQ ID NO: 47133 - DNA, 80 bp, synthetic construct
  source 1..80: mol_type = other DNA
ttgaaagaaatcttttttttcctgagcagtaggtctctcaacagtgggcttaaaatattcaacaaaccatgctgtaaaca

SEQ ID NO: 47134 - DNA, 80 bp, synthetic construct
  source 1..80: mol_type = other DNA
gtcctttgaagctttgaagccaggcaggcattgacttttcctctgtagctatgaatgtcctagatggcctcttcttccaa

SEQ ID NO: 47135 - DNA, 80 bp, synthetic construct; identical to SEQ ID NO: 12566
  source 1..80: mol_type = other DNA

SEQ ID NO: 47136 - DNA, 80 bp, synthetic construct
  source 1..80: mol_type = other DNA
tttaattaaaaaatgacttaaaatatatgctatgtggcatacagcgtatctaatttagtggttctgtggtatcacctcaa

SEQ ID NO: 47137 - DNA, 80 bp, synthetic construct
  source 1..80: mol_type = other DNA
acaataactaatttgccatccggctgcttcttacatgggcaactccatagaaccattcttaaggctcattacaaacatac

SEQ ID NO: 47138 - DNA, 80 bp, synthetic construct
  source 1..80: mol_type = other DNA
ttatttatgtcagttggtaaccgggaacaacatagggttcagctagtctttgacacaaaaatatcattaatttgttgtgg

SEQ ID NO: 47139 - DNA, 80 bp, synthetic construct
  source 1..80: mol_type = other DNA
atggatatttatcacttccctaatactcttataatttcttatgcctgtctttaatctcttaatcctattatcttcataaa

SEQ ID NO: 47140 - DNA, 80 bp, synthetic construct; identical to SEQ ID NO: 12567
  source 1..80: mol_type = other DNA

SEQ ID NO: 47141 - DNA, 80 bp, synthetic construct
  source 1..80: mol_type = other DNA
agtaccctcaggcttactaggattgggaaattccagcctggtaaattctagtcagaccggttctttggtctcgaaccctg

SEQ ID NO: 47142 - DNA, 80 bp, synthetic construct
  source 1..80: mol_type = other DNA
tccctaataaaaacctgctggttttgcagctcggggttgtcatcacggtcctaccagtatgtgatgtcaccgctggaggc

SEQ ID NO: 47143 - DNA, 80 bp, synthetic construct; identical to SEQ ID NO: 12568
  source 1..80: mol_type = other DNA

SEQ ID NO: 47144 - DNA, 80 bp, synthetic construct
  source 1..80: mol_type = other DNA
gctacttagcaggctgaggcaggagaattgcttgaacctgggaggcggaggttgcagtgagccgagatcatgccactgca

SEQ ID NO: 47145 - DNA, 80 bp, synthetic construct
  source 1..80: mol_type = other DNA
ttctgcctcctgggttcaagcaactctcctgcctcagcctcctgagtagctgggatcacaggcacctgccaccaccccca

SEQ ID NO: 47146 - DNA, 80 bp, synthetic construct
  source 1..80: mol_type = other DNA
catccaagatttatttttgctcatgctatatgtattcattgcaggttggctatggccctgtccatgtcatctcacaccag

SEQ ID NO: 47147 - DNA, 80 bp, synthetic construct; identical to SEQ ID NO: 12569
  source 1..80: mol_type = other DNA

SEQ ID NO: 47148 - DNA, 80 bp, synthetic construct
  source 1..80: mol_type = other DNA
agagtagcctgggcagcatggtgagatcctgcttctacacgcacacatgcacacacacacacacatacagaaaagaaaga

SEQ ID NO: 47149 - DNA, 80 bp, synthetic construct
  source 1..80: mol_type = other DNA
actgggctgacagttattttcctttggcacttgaaaaaaatgtcatttccttttggttttcatggtttctgaaaagcaat

SEQ ID NO: 47150 - DNA, 80 bp, synthetic construct
  source 1..80: mol_type = other DNA
ttttttccccctaaatttaggaaaatttttagccattattcctttcaattctttttcagctccatcctgtttctcctctc

SEQ ID NO: 47151 - DNA, 80 bp, synthetic construct; identical to SEQ ID NO: 12570
  source 1..80: mol_type = other DNA

SEQ ID NO: 47152 - DNA, 80 bp, synthetic construct
  source 1..80: mol_type = other DNA
tcagataattgcaacatctgtgttatcgtgatattgacatctgttgtcttttcttattctggttgagattttcctggttc

SEQ ID NO: 47153 - DNA, 80 bp, synthetic construct
  source 1..80: mol_type = other DNA
tcctagctcaggtgatccttccgcctcagccccccaagtggctgggactacaggcatgtgccaccacacctggttaattt

SEQ ID NO: 47154 - DNA, 80 bp, synthetic construct
  source 1..80: mol_type = other DNA
caagcctccttgataccacactaacagaagggtgtgtgtgtgtgtgtgtgtgtgtgtgtgtgtgtgtgtgttagggggtg

SEQ ID NO: 47155 - DNA, 80 bp, synthetic construct; identical to SEQ ID NO: 12571
  source 1..80: mol_type = other DNA

SEQ ID NO: 47156 - DNA, 80 bp, synthetic construct
  source 1..80: mol_type = other DNA
atatcttttcagatttttttctatgtctgacgacttatggctccaactggatcctccaactgctcctgtggccccaccca

SEQ ID NO: 47157 - DNA, 80 bp, synthetic construct
  source 1..80: mol_type = other DNA
agtctcagaattttttctaagaggctgatttgagcataataagactccagtcttctccttcgccagctctacatgtgaaa

SEQ ID NO: 47158 - DNA, 80 bp, synthetic construct
  source 1..80: mol_type = other DNA
tcccttccctgtctcactcttcccagcccttcactcagtgcccctcctaaataaactacttatatccaagtacttgtccc

SEQ ID NO: 47159 - DNA, 80 bp, synthetic construct; identical to SEQ ID NO: 12572
  source 1..80: mol_type = other DNA

SEQ ID NO: 47160 - DNA, 80 bp, synthetic construct
  source 1..80: mol_type = other DNA
cagcaatcccatcttaaataagagctgggtaaaataaggctgaaacctactgggctgcattcccacatggttaaggtatt

SEQ ID NO: 47161 - DNA, 80 bp, synthetic construct
  source 1..80: mol_type = other DNA
ccatgacagtttacaaatgccatggcaatgtcagcaagttaccctatatggtctaaaaaggggggctgggtgccctggct

SEQ ID NO: 47162 - DNA, 80 bp, synthetic construct
  source 1..80: mol_type = other DNA
tcagggggctgaggcagaagaatcacttgaacctgggaggtggaggtggcagtaagctgagatctcaccactgcactcca

SEQ ID NO: 47163 - DNA, 80 bp, synthetic construct; identical to SEQ ID NO: 12573
  source 1..80: mol_type = other DNA

SEQ ID NO: 47164 - DNA, 80 bp, synthetic construct
  source 1..80: mol_type = other DNA
ctgcaagctccgcctccccggttcacgccatcctgccgcttcagcctcctgagtagctgggactacaggggcccgccacc

SEQ ID NO: 47165 - DNA, 80 bp, synthetic construct
  source 1..80: mol_type = other DNA
ttgattctatcctgtaaactgtccttggagttttccccaggtgactgccctctgacttcttcactttgtgaatcagtcct

SEQ ID NO: 47166 - DNA, 80 bp, synthetic construct
  source 1..80: mol_type = other DNA
caaagagcagcctgtaaaatcgggctgcagacatagatgacggcagttgtgccaatcatgttcaaaatggcggccccatc

SEQ ID NO: 47167 - DNA, 80 bp, synthetic construct; identical to SEQ ID NO: 12574
  source 1..80: mol_type = other DNA

SEQ ID NO: 47168 - DNA, 80 bp, synthetic construct
  source 1..80: mol_type = other DNA
tggatcttgagggtcggggagatttttgacctttaacagggactccatcattgcaagttttccttggagactcttgatgg

SEQ ID NO: 47169 - DNA, 80 bp, synthetic construct
  source 1..80: mol_type = other DNA
acacaactaactatgaattccttatgcttcagtagttaagcagttataaaaccaaagcaaagtagccataggtacaaaca

SEQ ID NO: 47170 - DNA, 80 bp, synthetic construct
  source 1..80: mol_type = other DNA
cactgtgtgcctggcgatgactcaattcttccccttctcatgtctgttcaaattactaagaaatctttgttagaacttgt

SEQ ID NO: 47171 - DNA, 80 bp, synthetic construct; identical to SEQ ID NO: 12575
  source 1..80: mol_type = other DNA

SEQ ID NO: 47172 - DNA, 80 bp, synthetic construct
  source 1..80: mol_type = other DNA
aggataagaatgtattatagacctctagagttggaaaaagaatggtggctgagatcctccagcctagctttggctctgta

SEQ ID NO: 47173 - DNA, 80 bp, synthetic construct
  source 1..80: mol_type = other DNA
aaatggctgggcgtggtggctcatgcctgtaatcccagcactttgggaggcggaggcgggcggatcacgaggtcaggagt

SEQ ID NO: 47174 - DNA, 80 bp, synthetic construct
  source 1..80: mol_type = other DNA
tgccattgcactccagcctaggcaacagggcgagactctgtctcaaaaaaataaaaataaaaaataacaggacatgatgg

SEQ ID NO: 47175 - DNA, 80 bp, synthetic construct; identical to SEQ ID NO: 12576
  source 1..80: mol_type = other DNA

SEQ ID NO: 47176 - DNA, 80 bp, synthetic construct
  source 1..80: mol_type = other DNA
ctaacattctgcctataaatgacaacatctcctatatgtgcaaattaggtcattgtaccctaaatagccccgcagctgcc

SEQ ID NO: 47177 - DNA, 80 bp, synthetic construct
  source 1..80: mol_type = other DNA
aagtggccttcctgttcactgtccggaccataaggcctaaagaatactccgataagtttatcaaggccgggcttccgcag

SEQ ID NO: 47178 - DNA, 80 bp, synthetic construct
  source 1..80: mol_type = other DNA
aattgctattgcaatttaaggtaaatcgcagcccctctgggcctagttttcttttttctcactctttttttggcgataga

SEQ ID NO: 47179 - DNA, 80 bp, synthetic construct; identical to SEQ ID NO: 12577
  source 1..80: mol_type = other DNA

SEQ ID NO: 47180 - DNA, 80 bp, synthetic construct
  source 1..80: mol_type = other DNA
atctaaacatgtcatttcccagctcaaaaccccaaggttctttctcctcaccttcagaataagccaaactactcaatgat

SEQ ID NO: 47181 - DNA, 80 bp, synthetic construct
  source 1..80: mol_type = other DNA
ggaatggccttgcctcatctctgcaaatcttagcatgacttaaggcccagttcaagctccagctcctccctgaggtcttc

SEQ ID NO: 47182 - DNA, 80 bp, synthetic construct
  source 1..80: mol_type = other DNA
gtgggttccattactgaatgcatctttcatagctctcgctgtcagagccctgccctatgcaaactcttttatttttattt

SEQ ID NO: 47183 - DNA, 80 bp, synthetic construct
  source 1..80: mol_type = other DNA
accatgcctggctgatttttttgcatttttagtagagacagggtttcaccacgttggtcgggctggtctcgaactcctga

SEQ ID NO: 47184 - DNA, 80 bp, synthetic construct; identical to SEQ ID NO: 12578
  source 1..80: mol_type = other DNA

SEQ ID NO: 47185 - DNA, 80 bp, synthetic construct
  source 1..80: mol_type = other DNA
actcagagatcccaagtgacacatgagaagtccacagagagagatcatgtttagtggagtttggatggttgcttttatca

SEQ ID NO: 47186 - DNA, 80 bp, synthetic construct
  source 1..80: mol_type = other DNA
gtgggcctgtaccttacagatgctatctcattatcttctaaacagactctgggccagtgaccattatctccctcttactg

SEQ ID NO: 47187 - DNA, 80 bp, synthetic construct
  source 1..80: mol_type = other DNA
aagcctaattcatcacctttggctttgggatcatagtttccaaaccaaggattgtctgaacattgtctgacaatgccctt

SEQ ID NO: 47188 - DNA, 80 bp, synthetic construct
  source 1..80: mol_type = other DNA
gagatggggttgtgccatgttgcccaagctggtctcgaacttctgggctcaagcgatcagccctccttggcctcccaaag

SEQ ID NO: 47189 - DNA, 80 bp, synthetic construct; identical to SEQ ID NO: 12579
  source 1..80: mol_type = other DNA

SEQ ID NO: 47190 - DNA, 80 bp, synthetic construct
  source 1..80: mol_type = other DNA
ccccaatgccgctttctgtttcctctgcctcccttcatctccttttgtctggggtttctttgtctggggtctccctttgg

SEQ ID NO: 47191 - DNA, 80 bp, synthetic construct
  source 1..80: mol_type = other DNA
cccggggccccggacgctcggacaaagccaggcagcgttggcagccccagacccgaccccaaaggcctgagactggggtg

SEQ ID NO: 47192 - DNA, 80 bp, synthetic construct
  source 1..80: mol_type = other DNA
cccagagcctggcagggaggaggggaaagagagggaatagagttgggtgccatggtgtggtgaatgggctgagggactag

SEQ ID NO: 47193 - DNA, 80 bp, synthetic construct; identical to SEQ ID NO: 12580
  source 1..80: mol_type = other DNA

SEQ ID NO: 47194 - DNA, 80 bp, synthetic construct
  source 1..80: mol_type = other DNA
gtgtgtgccctgtcttcatcctccttttcctctctcagacctgtctccttggccttgacctcagtccatctccgtctctc

SEQ ID NO: 47195 - DNA, 80 bp, synthetic construct
  source 1..80: mol_type = other DNA
tttattcagtggcatcaggtctgactcacacccaaagccttgtacactccttcaccctgccccccacccgtcgcttctta

SEQ ID NO: 47196 - DNA, 80 bp, synthetic construct
  source 1..80: mol_type = other DNA
gctgccttctcccctctcctacgtgcctctcctcacattttttcagctgtttcccatcctctccttcctgggcagcaggc

SEQ ID NO: 47197 - DNA, 80 bp, synthetic construct; identical to SEQ ID NO: 12581
  source 1..80: mol_type = other DNA

SEQ ID NO: 47198 - DNA, 80 bp, synthetic construct
  source 1..80: mol_type = other DNA
ctctagctccttctgctctccccagtggacccctctgtctggcactgccatgccacttagctggggtcagcgtgggcctg

SEQ ID NO: 47199 - DNA, 80 bp, synthetic construct
  source 1..80: mol_type = other DNA
tccagcgtctcctgggcctagattccccagctgctgttctctggaggggtaggtgttctgggggaatgaatccctggggg

SEQ ID NO: 47200 - DNA, 80 bp, synthetic construct
  source 1..80: mol_type = other DNA
tgtgtacttgtctggttgggacttcgtgtttctttcttgggattgttgtctgggactgcaagcagggtatgtttttatct

SEQ ID NO: 47201 - DNA, 80 bp, synthetic construct; identical to SEQ ID NO: 12582
  source 1..80: mol_type = other DNA

SEQ ID NO: 47202 - DNA, 80 bp, synthetic construct
  source 1..80: mol_type = other DNA
ggcctgagggaggcttgccctgaggactcctgagtccccctcccactccactccgttgggagcccaggggaatcagggcc

SEQ ID NO: 47203 - DNA, 80 bp, synthetic construct
  source 1..80: mol_type = other DNA
agggagaagagcagtctggggcctggctggacaggtgagccctgagacctgagctctgctcccttctctgggctaactcc

SEQ ID NO: 47204 - DNA, 80 bp, synthetic construct
  source 1..80: mol_type = other DNA
agctttggaggttctcgtttggggaagcgggggtgggctgcgagtgggtggagggggctgggcgcggagccggccggagg

SEQ ID NO: 47205 - DNA, 80 bp, synthetic construct; identical to SEQ ID NO: 12583
  source 1..80: mol_type = other DNA

SEQ ID NO: 47206 - DNA, 80 bp, synthetic construct
  source 1..80: mol_type = other DNA
ctggctccctccgcctcccccgcccctcgccccgccgccgaagaggccccgctcccgggtcggacgcctgggtctgccgg

SEQ ID NO: 47207 - DNA, 80 bp, synthetic construct
  source 1..80: mol_type = other DNA
ccgcctccccgatgctctggcataccgtctgaaaaccgggggcggggactgggtggaggtgaagcccgtgacctcccaga

SEQ ID NO: 47208 - DNA, 80 bp, synthetic construct
  source 1..80: mol_type = other DNA
ccgctcagccaacacccagttggtcagtctggtcacagtccagcaaaaagagggactgccactctaacccaccagtgaca

SEQ ID NO: 47209 - DNA, 80 bp, synthetic construct; identical to SEQ ID NO: 12584
  source 1..80: mol_type = other DNA

SEQ ID NO: 47210 - DNA, 80 bp, synthetic construct
  source 1..80: mol_type = other DNA
tgtcttttggtcacaggagcatgtggtgtctgtcatttcatgttcacaggtgtctgaaggtggctattcactgagcgatg

SEQ ID NO: 47211 - DNA, 80 bp, synthetic construct
  source 1..80: mol_type = other DNA
atgccacatttagcctcgctgtttacagccagttcagtaagtttgtgtgtttcaccgtgtgtgtgtgtacagagctgtgt

SEQ ID NO: 47212 - DNA, 80 bp, synthetic construct
  source 1..80: mol_type = other DNA
actgtggactgaagacccagtggagagagatgaggtgactgggggtgttggagaacagacagcccagacgtctctgtgct

SEQ ID NO: 47213 - DNA, 80 bp, synthetic construct; identical to SEQ ID NO: 12585
  source 1..80: mol_type = other DNA

SEQ ID NO: 47214 - DNA, 80 bp, synthetic construct
  source 1..80: mol_type = other DNA
ctgcctcttacattcctgccctagtgcattgtgggagcagctggaggaggacaaagggatgggggagtatcccccactcc

SEQ ID NO: 47215 - DNA, 80 bp, synthetic construct
  source 1..80: mol_type = other DNA
gggcccaagatgccctgaacctgataagaggtggcagtcgagtccctcaggactccagggcctggagacttcagtacagg

SEQ ID NO: 47216 - DNA, 80 bp, synthetic construct
  source 1..80: mol_type = other DNA
aggtcacctgggaattgtgttaaaaggcagattttgattgagcaggtcaagggtgagcctgagattctgatttcttccat

SEQ ID NO: 47217 - DNA, 80 bp, synthetic construct; identical to SEQ ID NO: 12586
  source 1..80: mol_type = other DNA

SEQ ID NO: 47218 - DNA, 80 bp, synthetic construct
  source 1..80: mol_type = other DNA
tattctctccttctagacgtacacacaggtatatatacaaacatgggtgcttgtttattctattttcaaaaggtgggata

SEQ ID NO: 47219 - DNA, 80 bp, synthetic construct
  source 1..80: mol_type = other DNA
attttttttaattccagcctgtcccctgtgggcattcacatatcttacagatttatgtcttacaaaaggtaccataataa

SEQ ID NO: 47220 - DNA, 80 bp, synthetic construct
  source 1..80: mol_type = other DNA
agacctgcacatatgttcttacttcctggtgcttctctctcgagggaatgctgggtcgaagaggatgtgcatttttaatt

SEQ ID NO: 47221 - DNA, 80 bp, synthetic construct; identical to SEQ ID NO: 12587
  source 1..80: mol_type = other DNA

SEQ ID NO: 47222 - DNA, 80 bp, synthetic construct
  source 1..80: mol_type = other DNA
ttctaagccgttgtttatggggatattttgcccattcctgattggagaaatggggctttaggaagttatttaactgatct

SEQ ID NO: 47223 - DNA, 80 bp, synthetic construct
  source 1..80: mol_type = other DNA
agcattctaaaaatatagctgatgctgttaaacaatgactgttgttgttgttttactgttattatccccaaagcggccca

SEQ ID NO: 47224 - DNA, 80 bp, synthetic construct
  source 1..80: mol_type = other DNA
caagtggagatgctgacatgaagggacattttgatcctggtgaggagactgaatcatgggtccctgagggccagggcttg

SEQ ID NO: 47225 - DNA, 80 bp, synthetic construct; identical to SEQ ID NO: 12588
  source 1..80: mol_type = other DNA

SEQ ID NO: 47226 - DNA, 80 bp, synthetic construct
  source 1..80: mol_type = other DNA
caaggaggaggagtacttgcaggtggatctacaacgactgcacctggtggctctggtgggcacccagggacggcatgccg

SEQ ID NO: 47227 - DNA, 80 bp, synthetic construct
  source 1..80: mol_type = other DNA
accacctatacgctgacgactctccagtttatatcatctccagactaagcctctcagctgagctccaaacaatattgtaa

SEQ ID NO: 47228 - DNA, 80 bp, synthetic construct
  source 1..80: mol_type = other DNA
cacctagatgtctaataggcatctcaaacgtacgtttaacttcccaagctgaatttgattcccattcccagcctaaacct

SEQ ID NO: 47229 - DNA, 80 bp, synthetic construct; identical to SEQ ID NO: 12589
  source 1..80: mol_type = other DNA

SEQ ID NO: 47230 - DNA, 80 bp, synthetic construct
  source 1..80: mol_type = other DNA
agctggtgcaggatgctcagcctgacctggctcctgcctgcatcacttgtttcttggcgcctccttggccacgctgcctt

SEQ ID NO: 47231 - DNA, 80 bp, synthetic construct
  source 1..80: mol_type = other DNA
cctcactgctctgtccatacttcctgcctcttgttcttcgcagctgttttccctgctgggatctcagtcctacaagggtg

SEQ ID NO: 47232 - DNA, 80 bp, synthetic construct
  source 1..80: mol_type = other DNA
gcttggagacaaatggatggagccaggcaaggagaagagggcagctgagcctgaagtctgaggatggaacatcagagctg

SEQ ID NO: 47233 - DNA, 80 bp, synthetic construct; identical to SEQ ID NO: 12590
  source 1..80: mol_type = other DNA

SEQ ID NO: 47234 - DNA, 80 bp, synthetic construct
  source 1..80: mol_type = other DNA
ggagtgtggagaatgggcatccaggatcccttctcctgctgggaagctgtcactctgaggagggggctagccagcattgt

SEQ ID NO: 47235 - DNA, 80 bp, synthetic construct
  source 1..80: mol_type = other DNA
caatgtatttatctgaggccgtgtacctcaacgactccacctatgacggacataccgtgggcgggtaagaaaggcccctg

SEQ ID NO: 47236 - DNA, 80 bp, synthetic construct
  source 1..80: mol_type = other DNA
tagggtgaccactagcccgtatgacactgtatgaaaaaggcacccctttgctaacacacattgttggaaattgctgcaat

SEQ ID NO: 47237 - DNA, 80 bp, synthetic construct; identical to SEQ ID NO: 12591
  source 1..80: mol_type = other DNA

SEQ ID NO: 47238 - DNA, 80 bp, synthetic construct
  source 1..80: mol_type = other DNA
gactatgtgggatggagcaaccacagcttctccagtggctatgtggagatggagtttgagtttgaccggctgagggcctt

SEQ ID NO: 47239 - DNA, 80 bp, synthetic construct
  source 1..80: mol_type = other DNA
ctggcggggtggaatgtcgcttccggcgtggccctgccatggcctgggagggggagcccatgcgccacaacctagggggc

SEQ ID NO: 47240 - DNA, 80 bp, synthetic construct
  source 1..80: mol_type = other DNA
gaaattgacaactgatttcattcctaaccctgcagtgtccctaaaatactcattccttgcattatatctacccatcaccc

SEQ ID NO: 47241 - DNA, 80 bp, synthetic construct; identical to SEQ ID NO: 12592
  source 1..80: mol_type = other DNA

SEQ ID NO: 47242 - DNA, 80 bp, synthetic construct
  source 1..80: mol_type = other DNA
ccttctccccagatgtggtgaacaattcctctccggcactgggaggcaccttcccgccagccccctggtggccgcctggc

SEQ ID NO: 47243 - DNA, 80 bp, synthetic construct
  source 1..80: mol_type = other DNA
ccgtggccaaggccgaggggagcccgaccgccatcctcatcggctgcctggtggccatcatcctgctcctgctgctcatc

SEQ ID NO: 47244 - DNA, 80 bp, synthetic construct
  source 1..80: mol_type = other DNA
agtaaagagaccacttacaccatgtcaaagagggtatggggctcacagggagggctgctccccagctctgggtctgctca

SEQ ID NO: 47245 - DNA, 80 bp, synthetic construct; identical to SEQ ID NO: 12593
  source 1..80: mol_type = other DNA

SEQ ID NO: 47246 - DNA, 80 bp, synthetic construct
  source 1..80: mol_type = other DNA
gaggcgggaggatcacctgaggtcaagagttcgagaccagcctgaccaacatggtgaaatcccatctctactaagaatac

SEQ ID NO: 47247 - DNA, 80 bp, synthetic construct
  source 1..80: mol_type = other DNA
aaacaaacaaaaaaaaaacggttgatagttatggactgggcagatgagggttagaatctcattgtgggacagggaagtta

SEQ ID NO: 47248 - DNA, 80 bp, synthetic construct
  source 1..80: mol_type = other DNA
ctatgacaaggctgaacggagggtgttggaagaggagctgacggttcacctctctgtccctggggacactatcctcatca

SEQ ID NO: 47249 - DNA, 80 bp, synthetic construct; identical to SEQ ID NO: 12594
  source 1..80: mol_type = other DNA

SEQ ID NO: 47250 - DNA, 80 bp, synthetic construct
  source 1..80: mol_type = other DNA
tttgttccttcatctatcctccatcacccatccttccatccatagtcatacatccttgcatccatccatcaatcttccat

SEQ ID NO: 47251 - DNA, 80 bp, synthetic construct
  source 1..80: mol_type = other DNA
caacaaaacatctgtttaccatccatccatctattcatacgtcccatctgtccatgcattcattatccagccagccgtcc

SEQ ID NO: 47252 - DNA, 80 bp, synthetic construct
  source 1..80: mol_type = other DNA
gtgtttcccctcctccttctcccgacagcgttgctgctctccaatccagcctaccgcctccttctggccacttacgcccg

SEQ ID NO: 47253 - DNA, 80 bp, synthetic construct; identical to SEQ ID NO: 12595
  source 1..80: mol_type = other DNA

SEQ ID NO: 47254 - DNA, 80 bp, synthetic construct
  source 1..80: mol_type = other DNA
ctgcgaggaggagggctctcaccccgggcgcttgccctttccctcacatgtgtcctctctctgcagtcccagaggtgaag

SEQ ID NO: 47255 - DNA, 80 bp, synthetic construct
  source 1..80: mol_type = other DNA
gtgtgcctctgtctctgcttgttgttgagcttggtgtgttgggttgaaagggttgggagggcttggccccagggggagcc

SEQ ID NO: 47256 - DNA, 80 bp, synthetic construct
  source 1..80: mol_type = other DNA
ctcttgagagaccctagggaggccctaaaagagtaagactttatgacagttttgctcaaccatattcattgccttgaaaa

SEQ ID NO: 47257 - DNA, 80 bp, synthetic construct; identical to SEQ ID NO: 12596
  source 1..80: mol_type = other DNA

SEQ ID NO: 47258 - DNA, 80 bp, synthetic construct
  source 1..80: mol_type = other DNA
gatctcgactccgcttcaaggagaagcttggcgagggccagtttggggaggtaaggagggtgcctacccagtgtctggcc

SEQ ID NO: 47259 - DNA, 80 bp, synthetic construct
  source 1..80: mol_type = other DNA
cttgatttcccccttaatgtgcgtaagggacaccctttgctggtagctgtcaagatcttacggccagatgccaccaagaa

SEQ ID NO: 47260 - DNA, 80 bp, synthetic construct
  source 1..80: mol_type = other DNA
aggtggggcaggggggtgggggcgcgggggaaggtgcaggccgcccactcggcattcctcttcagcttctccttgttctc

SEQ ID NO: 47261 - DNA, 80 bp, synthetic construct; identical to SEQ ID NO: 12597
  source 1..80: mol_type = other DNA

SEQ ID NO: 47262 - DNA, 80 bp, synthetic construct
  source 1..80: mol_type = other DNA
aatgtgtgacaagttaacccaggaacatggacagaaaggctggaggtgactatgcaagagtggtgaagggacttgggccc

SEQ ID NO: 47263 - DNA, 80 bp, synthetic construct
  source 1..80: mol_type = other DNA
ccagagtgaccgggcccggggagtgggctctctctcctctcctggatgggaatctgcgaagctgcccccagtgaccttct

SEQ ID NO: 47264 - DNA, 80 bp, synthetic construct
  source 1..80: mol_type = other DNA
gttggggaaaatttcaccatcaaaatcgcagactttggcatgagccggaacctctatgctggggactattaccgtgtgca

SEQ ID NO: 47265 - DNA, 80 bp, synthetic construct
  source 1..80: mol_type = other DNA
ctggtctccatcagtcacacactttctctgggttgcattttacagaatctcatctataatatgaggttctcctagcccaa

SEQ ID NO: 47266 - DNA, 80 bp, synthetic construct; identical to SEQ ID NO: 12598
  source 1..80: mol_type = other DNA

SEQ ID NO: 47267 - DNA, 80 bp, synthetic construct
  source 1..80: mol_type = other DNA
ccaataggaagggaggagggtctacgttgcctgatgtccctgtctgtttttgctgccttctctgcatcccaggggaagtt

SEQ ID NO: 47268 - DNA, 80 bp, synthetic construct
  source 1..80: mol_type = other DNA
gaagatgggtccgaggcgggggacagaaggggcagagttgtcatcttggagactaaagaatatttgttccctgactctca

SEQ ID NO: 47269 - DNA, 80 bp, synthetic construct
  source 1..80: mol_type = other DNA
aatcacacatccagctgcccctccctcagggagcgatccaggggaagccagtgacactaaaacaagaggacacaatggca

SEQ ID NO: 47270 - DNA, 80 bp, synthetic construct; identical to SEQ ID NO: 12599
  source 1..80: mol_type = other DNA

SEQ ID NO: 47271 - DNA, 80 bp, synthetic construct
  source 1..80: mol_type = other DNA
tctgggggtgaggaggacaagaaggagaggaaaatgtttccttgtgcctgctcctgtacttgtcctcagcttgggcttct

SEQ ID NO: 47272 - DNA, 80 bp, synthetic construct
  source 1..80: mol_type = other DNA
catagccttggggttggacatctctagtgtagctgccacattgatttttctataatcacttggggtttgtacatttttgg

SEQ ID NO: 47273 - DNA, 80 bp, synthetic construct
  source 1..80: mol_type = other DNA
ccacttcccaacccacttcccatcttccttttttcctgcctcctcattccatttcccatcacctgttttgcccagcattg

SEQ ID NO: 47274 - DNA, 80 bp, synthetic construct; identical to SEQ ID NO: 12600
  source 1..80: mol_type = other DNA

SEQ ID NO: 47275 - DNA, 80 bp, synthetic construct
  source 1..80: mol_type = other DNA
caggaggctgaggcaggagaattgcttagaacccgggaggtgggggttgcagtgagctgagatcacacaactgtgctcca

SEQ ID NO: 47276 - DNA, 80 bp, synthetic construct
  source 1..80: mol_type = other DNA
atctaaaaacaggtgtaataaactgacattttccaaatactaatgagcataagccatatttgagatttctacaacagtca

SEQ ID NO: 47277 - DNA, 80 bp, synthetic construct
  source 1..80: mol_type = other DNA
agtaaaaggtgtaatttctttttcttgcccaaattctagaacccatctggctccccagggtctggaaatcccaggggaga

SEQ ID NO: 47278 - DNA, 80 bp, synthetic construct; identical to SEQ ID NO: 12601
  source 1..80: mol_type = other DNA

SEQ ID NO: 47279 - DNA, 80 bp, synthetic construct
  source 1..80: mol_type = other DNA
aggccaaggtgggaggataacttgagcccaggaggttgaggctgcagtgagccatgattgcatcacttcactccagcctg

SEQ ID NO: 47280 - DNA, 80 bp, synthetic construct
  source 1..80: mol_type = other DNA
gtaaagataaatcaatgtgaagttgaattaataggcccttggggcctaggtcccgaatctaatagtcctgctaaaactta

SEQ ID NO: 47281 - DNA, 80 bp, synthetic construct
  source 1..80: mol_type = other DNA
tctgagctgtctttcaagcagaaacacctggagttaatttttttttttttttttttttgagacctggtctcgctctgtca

SEQ ID NO: 47282 - DNA, 80 bp, synthetic construct
  source 1..80: mol_type = other DNA
ccatattggccaggctggtctcaaactcctgacctcgtgatccgcccaccttggcctcccaaggtgctgggattacaggc

SEQ ID NO: 47283 - DNA, 80 bp, synthetic construct; identical to SEQ ID NO: 12602
  source 1..80: mol_type = other DNA

SEQ ID NO: 47284 - DNA, 80 bp, synthetic construct
  source 1..80: mol_type = other DNA
tcatttcaaatccagcagtgacttttcattaatcttaaaatgaagaacaaaatccttctggccaaggttggcccccacat

SEQ ID NO: 47285 - DNA, 80 bp, synthetic construct
  source 1..80: mol_type = other DNA
tcacctggaacaatgttccctgcagtctgtgccttattaactcctgcttgtccttcagcagtctttcctgacttccccaa

SEQ ID NO: 47286 - DNA, 80 bp, synthetic construct
  source 1..80: mol_type = other DNA
acaagggcaaaatcttggaacacagggctcaatattggttgaaagaaagaattgtagcaaatatctgatagactaacata

SEQ ID NO: 47287 - DNA, 80 bp, synthetic construct; identical to SEQ ID NO: 12603
  source 1..80: mol_type = other DNA

SEQ ID NO: 47288 - DNA, 80 bp, synthetic construct
  source 1..80: mol_type = other DNA
tagctgggattacaggcacctgccaccatgcccggctaatttttgtatttttagtagagactgggtttcaccatgttggc

SEQ ID NO: 47289 - DNA, 80 bp, synthetic construct
  source 1..80: mol_type = other DNA
tgcctgagaggaggaggtcatgagctccctatcacaggaattttcttttttgaactaccatgcccactaacatgctggcc

SEQ ID NO: 47290 - DNA, 80 bp, synthetic construct
  source 1..80: mol_type = other DNA
gacctgggtgacactgtaagactctgtcccctcaccccctccaaaagaggtgtgcctatttcaatttttttttttttttt

SEQ ID NO: 47291 - DNA, 80 bp, synthetic construct
  source 1..80: mol_type = other DNA
cctcagcctctcaagtagctgggcctacaggcatgcaccctcatgcccagctaatttttttattttttgtagagacaggg

SEQ ID NO: 47292 - DNA, 80 bp, synthetic construct; identical to SEQ ID NO: 12604
  source 1..80: mol_type = other DNA

SEQ ID NO: 47293 - DNA, 80 bp, synthetic construct
  source 1..80: mol_type = other DNA
cgccaccatgtctggctaatttttgtattttcagtagagacggggtttcacccgctcaggctagtctcgaacttctgacc

SEQ ID NO: 47294 - DNA, 80 bp, synthetic construct
  source 1..80: mol_type = other DNA
actgcaacctctgcctcccgggttcaagtgattctcctgcctcagcctcccaagtagctgggattacaggcgcccgtcac

SEQ ID NO: 47295 - DNA, 80 bp, synthetic construct
  source 1..80: mol_type = other DNA
ttttaagagacagtctaattctgcggccaggctggagtgcagtggtgtaactgtagctcactacagccttgaactgctgg

SEQ ID NO: 47296 - DNA, 80 bp, synthetic construct; identical to SEQ ID NO: 12605
  source 1..80: mol_type = other DNA

SEQ ID NO: 47297 - DNA, 80 bp, synthetic construct
  source 1..80: mol_type = other DNA
gagtagctgggcttataggcgcctgccaccacgcccggctaatttttgtatttttaggagagacgggtttcaccatgttg

SEQ ID NO: 47298 - DNA, 80 bp, synthetic construct
  source 1..80: mol_type = other DNA
ctttctctttccttctttccccctccctaaccctcccttcctctcccctccccaattctcccctctccagttctcccctg

SEQ ID NO: 47299 - DNA, 80 bp, synthetic construct
  source 1..80: mol_type = other DNA
accactacacctagctaatttttgttttgttttgtttttgtagcgatagagtttctgtataatgcccaggctggtctgga

SEQ ID NO: 47300 - DNA, 80 bp, synthetic construct; identical to SEQ ID NO: 12606
  source 1..80: mol_type = other DNA

SEQ ID NO: 47301 - DNA, 80 bp, synthetic construct
  source 1..80: mol_type = other DNA
aacagaaaacatgggtgggctacaaagtataaaaagtcttgcatagtcattaccattttgatccctggttgcttgcaaat

SEQ ID NO: 47302 - DNA, 80 bp, synthetic construct
  source 1..80: mol_type = other DNA
gagtttgagactagcctggccaacatgttgaaaccctatctctactaaaaataccagaattagccgggcgtggtggcaca

SEQ ID NO: 47303 - DNA, 80 bp, synthetic construct
  source 1..80: mol_type = other DNA
ggggtctccctctgtcacccaggctggtgcgatcatagctcactgtagcctcaaactcctagtctcaagcgatcctcctg

SEQ ID NO: 47304 - DNA, 80 bp, synthetic construct; identical to SEQ ID NO: 12607
  source 1..80: mol_type = other DNA

SEQ ID NO: 47305 - DNA, 80 bp, synthetic construct
  source 1..80: mol_type = other DNA
ttgagacggagtttcactcttgtcgcccaggctggcgtgtaatggcatggtcctggctcactgcaactccgcctccaggg

SEQ ID NO: 47306 - DNA, 80 bp, synthetic construct
  source 1..80: mol_type = other DNA
tcccaaagtgctaggattacaggcgtgagtcaccgcgcccggcctggagtgtgtattatcccaattttatggggagtaat

SEQ ID NO: 47307 - DNA, 80 bp, synthetic construct
  source 1..80: mol_type = other DNA
cagcttctggtgtctcccctcgctcaattaaaagccagctcctctcctttcggcttccccacggtgcctttcgggatttg

SEQ ID NO: 47308 - DNA, 80 bp, synthetic construct; identical to SEQ ID NO: 12608
  source 1..80: mol_type = other DNA

SEQ ID NO: 47309 - DNA, 80 bp, synthetic construct
  source 1..80: mol_type = other DNA
aggagatcggaaggcgtgggtcagggtgaatgacgtgaagtagacttgggaagggaaaagaggtggctttagatttggga

SEQ ID NO: 47310 - DNA, 80 bp, synthetic construct
  source 1..80: mol_type = other DNA
aggtgtgggctcaattttctttgtccctgtttagccaaagatgagacaagtcattgaaatacaaaatgatcttgcaaaca

SEQ ID NO: 47311 - DNA, 80 bp, synthetic construct
  source 1..80: mol_type = other DNA
ttattgtggggactgatggatctggaatcagttagaaaggtcaggggtgacactggcatggatggtgaggttgcacttct

SEQ ID NO: 47312 - DNA, 80 bp, synthetic construct; identical to SEQ ID NO: 12609
  source 1..80: mol_type = other DNA

SEQ ID NO: 47313 - DNA, 80 bp, synthetic construct
  source 1..80: mol_type = other DNA
gtgctggagtgagatgagatgtttgagaggtaattgagggcagagatgcagatacaatgcagcttctgatactaaccttt

SEQ ID NO: 47314 - DNA, 80 bp, synthetic construct
  source 1..80: mol_type = other DNA
catttcccaaactgctgttccttggagcacttccaggaagtgttaatagatatatcacaaaacttaaaaataaatacatt

SEQ ID NO: 47315 - DNA, 80 bp, synthetic construct
  source 1..80: mol_type = other DNA
ctctgtggaacagtgttccaagggtcagcaagttcagaacaggcagagatggtggcttttatgggcctcctttttgtttt

SEQ ID NO: 47316 - DNA, 80 bp, synthetic construct
  source 1..80: mol_type = other DNA
ctgggtgggtatgtcacttctctctcttcctaagctagggcaggggaactgctgcttattaaaccactaattaaactttg

SEQ ID NO: 47317 - DNA, 80 bp, synthetic construct; identical to SEQ ID NO: 12610
  source 1..80: mol_type = other DNA

SEQ ID NO: 47318 - DNA, 80 bp, synthetic construct
  source 1..80: mol_type = other DNA
attttttgtatttttagtagagatggggtttcgccatgttggccaggctggtcttgaactcctgacctcaagtgatccgc

SEQ ID NO: 47319 - DNA, 80 bp, synthetic construct
  source 1..80: mol_type = other DNA
acaagtacgccgaggagcgatgggaggtaagcacttgggagtgtgtgtgtctctgcttgtgcttctacttcccatggccc

SEQ ID NO: 47320 - DNA, 80 bp, synthetic construct
  source 1..80: mol_type = other DNA
tgccatctccttgggtccctaagaaatggtatctggggctagtcaagatcagaggacattagctggaaaaggcaagctga

SEQ ID NO: 47321 - DNA, 80 bp, synthetic construct; identical to SEQ ID NO: 12611
  source 1..80: mol_type = other DNA

SEQ ID NO: 47322 - DNA, 80 bp, synthetic construct
  source 1..80: mol_type = other DNA
ttctctccttcctcttccagctcagcttctctactctgggcaaggtaagcagggggctgaaaggtatagagatgggaagg

SEQ ID NO: 47323 - DNA, 80 bp, synthetic construct
  source 1..80: mol_type = other DNA
gaaggtatgagtgattctctgttgaacttcctgcaacatctgcgtgagtttgggcttgttttccagaggaaggtatgagc

SEQ ID NO: 47324 - DNA, 80 bp, synthetic construct
  source 1..80: mol_type = other DNA
agggatctgatatttcaggcaggaagatgtaaggcagtgacttctgagacaaggcatctgcctttctattcttttcagag

SEQ ID NO: 47325 - DNA, 80 bp, synthetic construct; identical to SEQ ID NO: 12612
  source 1..80: mol_type = other DNA

SEQ ID NO: 47326 - DNA, 80 bp, synthetic construct
  source 1..80: mol_type = other DNA
gagtgtgcagcaggcaatcgccagtggcatcacagcccagcaggtattcccacttgggagaggtggagcaggaagacagg

SEQ ID NO: 47327 - DNA, 80 bp, synthetic construct
  source 1..80: mol_type = other DNA
tatagatctggatttgtgcctcggcactgccacatcctaactgcgtaaactagacatagttgttttgcctctgtgagcct

SEQ ID NO: 47328 - DNA, 80 bp, synthetic construct
  source 1..80: mol_type = other DNA
aatagtagctgctgctattttaaagaaagaaaaacaaaacattactggaaagggcgaatgtgccagaaaaggaatatccc

SEQ ID NO: 47329 - DNA, 80 bp, synthetic construct; identical to SEQ ID NO: 12613
  source 1..80: mol_type = other DNA

SEQ ID NO: 47330 - DNA, 80 bp, synthetic construct
  source 1..80: mol_type = other DNA
gaccagatccggctctgggagctggaaagggacagactccggttcactgagggtgagtagcttctggtggccaagtcttg

SEQ ID NO: 47331 - DNA, 80 bp, synthetic construct
  source 1..80: mol_type = other DNA
gggaataattcacagtaatttgtattaggcctttctgaatatggctggatcacactggtgttaagatgaacccctgagca

SEQ ID NO: 47332 - DNA, 80 bp, synthetic construct
  source 1..80: mol_type = other DNA
ctgtataaccagttcctgtcgcaagtggactttgagctgctgctggcccacgcgcgggagctgggcgtgctcgtgttcga

SEQ ID NO: 47333 - DNA, 80 bp, synthetic construct; identical to SEQ ID NO: 12614
  source 1..80: mol_type = other DNA

SEQ ID NO: 47334 - DNA, 80 bp, synthetic construct
  source 1..80: mol_type = other DNA
gctccagggccacgttccagggtcgggtttggtggattcctcagtccctgccgccgcggggcgccctgggatagcggcgg

SEQ ID NO: 47335 - DNA, 80 bp, synthetic construct
  source 1..80: mol_type = other DNA
actccttgctggctcttgggcgcgctgatgcccatcatctccctgagtttctgagccctatctctcatgtgtcagtggtc

SEQ ID NO: 47336 - DNA, 80 bp, synthetic construct
  source 1..80: mol_type = other DNA
aatagagacttggaataacagacctgtgctaattagagacaggaaagatggaacaaggggagtgacccttctccaccccc

SEQ ID NO: 47337 - DNA, 80 bp, synthetic construct; identical to SEQ ID NO: 12615
  source 1..80: mol_type = other DNA

SEQ ID NO: 47338 - DNA, 80 bp, synthetic construct
  source 1..80: mol_type = other DNA
ggcctggaggcctaaggagttagtattgtatgaaatccctacgaaacccggtgaaaagaaaggtaagtagaataagtaag

SEQ ID NO: 47339 - DNA, 80 bp, synthetic construct
  source 1..80: mol_type = other DNA
gtggtgggtacgagagggcttcttcaaaccagaatatcaggttagtatctggcagggaggggtcctaaattgtctccagg

SEQ ID NO: 47340 - DNA, 80 bp, synthetic construct
  source 1..80: mol_type = other DNA
ttgaagttctttctgttctggagacagtagagggtgctctttccccaatccaattctctcttgcccctttgacttttttt

SEQ ID NO: 47341 - DNA, 80 bp, synthetic construct; identical to SEQ ID NO: 12616
  source 1..80: mol_type = other DNA

SEQ ID NO: 47342 - DNA, 80 bp, synthetic construct
  source 1..80: mol_type = other DNA
tttgttacctgttccttttcttgggcaaaagcaatttcttcccccaaagcaaccaagcaacctgactctgttcatttgcc

SEQ ID NO: 47343 - DNA, 80 bp, synthetic construct
  source 1..80: mol_type = other DNA
tttcttgcctcccaccactatcactcctgacttgtaatccttggctcttcccgacacagctctgacttcctcagagatgg

SEQ ID NO: 47344 - DNA, 80 bp, synthetic construct
  source 1..80: mol_type = other DNA
attttctttctctttacttaccccaatttctcttgtctaaatctcaccttcttccactcgcccattcccacctttcaatt

SEQ ID NO: 47345 - DNA, 80 bp, synthetic construct
  source 1..80: mol_type = other DNA
taatatcttagaaaaccccatactgggtttgtaagtccatttctattagcctctagaggctagatcaatgccatcctcac

SEQ ID NO: 47346 - DNA, 80 bp, synthetic construct; identical to SEQ ID NO: 12617
  source 1..80: mol_type = other DNA

SEQ ID NO: 47347 - DNA, 80 bp, synthetic construct
  source 1..80: mol_type = other DNA
gcttgtcaactggtcatgtgctttaagatcagccatctcggacattgaggtgaggcggagagagggaagcaggtttgtga

SEQ ID NO: 47348 - DNA, 80 bp, synthetic construct
  source 1..80: mol_type = other DNA
gaatgcttgcatcgtgggggtgttgtaaaaattaaatgagaattcacataggtgcttggcaagatacctggccatggctt

SEQ ID NO: 47349 - DNA, 80 bp, synthetic construct
  source 1..80: mol_type = other DNA
aaaggctgccctctgacccagctttctcggtgcctccaggtggagaaccggcccctgcctggccacacacagcttcgact

SEQ ID NO: 47350 - DNA, 80 bp, synthetic construct; identical to SEQ ID NO: 12618
  source 1..80: mol_type = other DNA

SEQ ID NO: 47351 - DNA, 80 bp, synthetic construct
  source 1..80: mol_type = other DNA
tcggctcctgcaacctctgcttcccaggttcaagcgattctcctgtctcagcctcctgagtagctgggattacaggcgcg

SEQ ID NO: 47352 - DNA, 80 bp, synthetic construct
  source 1..80: mol_type = other DNA
ggtttttacggtaaatgttctgaagagctcagagaaagggaagacagatgagctggaattgtcagtggaagcttcttgta

SEQ ID NO: 47353 - DNA, 80 bp, synthetic construct
  source 1..80: mol_type = other DNA
atttcttccatgcaaattatcagggaattctttagcaccagagaccctctcagacctctggtcatcagcttatgggaaac

SEQ ID NO: 47354 - DNA, 80 bp, synthetic construct; identical to SEQ ID NO: 12619
  source 1..80: mol_type = other DNA

SEQ ID NO: 47355 - DNA, 80 bp, synthetic construct
  source 1..80: mol_type = other DNA
ttttcctgagacttctctcagtggttctgattggactccctcctcctcttatagtttttctgtagctcaggggttgacaa

SEQ ID NO: 47356 - DNA, 80 bp, synthetic construct
  source 1..80: mol_type = other DNA
gcgtggcaccatgcccggcacgtgccaccacacccagctaattttttgtatttttacaaaaattagtaattaattttttt

SEQ ID NO: 47357 - DNA, 80 bp, synthetic construct
  source 1..80: mol_type = other DNA
ttatattatctatggctgctattatataccctctccagctctgctgcagtggcataatagagtaattgtgctgagaatga

SEQ ID NO: 47358 - DNA, 80 bp, synthetic construct; identical to SEQ ID NO: 12620
  source 1..80: mol_type = other DNA

SEQ ID NO: 47359 - DNA, 80 bp, synthetic construct
  source 1..80: mol_type = other DNA
aggcacagacagagaaagtcgcaggggctggggcggtgcaggtgatgatgatacatctggaaaagcaaaagccaaggtca

SEQ ID NO: 47360 - DNA, 80 bp, synthetic construct
  source 1..80: mol_type = other DNA
ggtggtaccaccctatgttaccccatcctttgggggctctctgtccccctaatcctcctcctagtttcttatttctctag

SEQ ID NO: 47361 - DNA, 80 bp, synthetic construct
  source 1..80: mol_type = other DNA
tttactaagggctaccccaaaagggaatgtatggagcttaagggtgacaataggatgggctctgcacccctccgttagaa

SEQ ID NO: 47362 - DNA, 80 bp, synthetic construct; identical to SEQ ID NO: 12621
  source 1..80: mol_type = other DNA

SEQ ID NO: 47363 - DNA, 80 bp, synthetic construct
  source 1..80: mol_type = other DNA
agaatcttggcaagaggcttgggaggtcctttctgagttttaaaatgacctcagaggccactcgtcctatctgtggaggt

SEQ ID NO: 47364 - DNA, 80 bp, synthetic construct
  source 1..80: mol_type = other DNA
ggggaggggggactgactggttattctaagacttcacgaatgtcctcccggcagggactggtgtgtctcccggcagctgt

SEQ ID NO: 47365 - DNA, 80 bp, synthetic construct
  source 1..80: mol_type = other DNA
tcatagtcatgtaaccttctgcgcgatcaaggctccctgaagtggcatttctttatctcacccctgggggaacctggcca

SEQ ID NO: 47366 - DNA, 80 bp, synthetic construct; identical to SEQ ID NO: 12622
  source 1..80: mol_type = other DNA

SEQ ID NO: 47367 - DNA, 80 bp, synthetic construct
  source 1..80: mol_type = other DNA
actgtccccattctttttctgtttcccagatcctgatgtcctagacacatggttttcttctgccctgttccccttttctg

SEQ ID NO: 47368 - DNA, 80 bp, synthetic construct
  source 1..80: mol_type = other DNA
actgctcctcttccccctagaccccagaccttgctcgtttctaccccctgtcacttttggaaacgggcagcgaccttctg

SEQ ID NO: 47369 - DNA, 80 bp, synthetic construct
  source 1..80: mol_type = other DNA
ttgtcctcccttctaacccctaatgtggtcctttccacgttgctgattcctttttcctaattcacttcctaccctacccc

SEQ ID NO: 47370 - DNA, 80 bp, synthetic construct
  source 1..80: mol_type = other DNA
gcaagtccctggggaatgtgctggacccaagagacatcatcagtggggtggagatgcaggtgaggacgaagcacccacta

SEQ ID NO: 47371 - DNA, 80 bp, synthetic construct; identical to SEQ ID NO: 12623
  source 1..80: mol_type = other DNA

SEQ ID NO: 47372 - DNA, 80 bp, synthetic construct
  source 1..80: mol_type = other DNA
agaaaaaggactttcctcacgggatccctgagtgtgggacagatgccctgagattcacactctgctcccatggagttcag

SEQ ID NO: 47373 - DNA, 80 bp, synthetic construct
  source 1..80: mol_type = other DNA
cagagctgccgacatttctgcaacaagatctggaatgctcttcgctttatcctcaatgctttaggggagaaatttgtgcc

SEQ ID NO: 47374 - DNA, 80 bp, synthetic construct
  source 1..80: mol_type = other DNA
tgcctggatcctgagccgccttgccctggctgcccaggagtgtgagcggggcttcctcacccgagagctctcgctcgtca

SEQ ID NO: 47375 - DNA, 80 bp, synthetic construct; identical to SEQ ID NO: 12624
  source 1..80: mol_type = other DNA

SEQ ID NO: 47376 - DNA, 80 bp, synthetic construct
  source 1..80: mol_type = other DNA
ggtctttagaccaggggttctcacgctgtcctacgtccaaagcacctggagggcttgttgacggtggatcccccccgctc

SEQ ID NO: 47377 - DNA, 80 bp, synthetic construct
  source 1..80: mol_type = other DNA
actcaatgatttttttccctaaactacatgtttccctggaaatcctgtccctgtgtactgcagagaattgctgtcctgga

SEQ ID NO: 47378 - DNA, 80 bp, synthetic construct
  source 1..80: mol_type = other DNA
cattggcttcctctccaggaggctgtgaagcccgtgctgtggcactcgccccgccccctggggccccctcaggtcctgtt

SEQ ID NO: 47379 - DNA, 80 bp, synthetic construct; identical to SEQ ID NO: 12625
  source 1..80: mol_type = other DNA

SEQ ID NO: 47380 - DNA, 80 bp, synthetic construct
  source 1..80: mol_type = other DNA
catgtttaaactaggaacagtaatagtatatgttatggttgtgatgagggttggataagttagtaatagggtgtccccaa

SEQ ID NO: 47381 - DNA, 80 bp, synthetic construct
  source 1..80: mol_type = other DNA
agcaactaaacaggcatcaaacactgatcatctaaaacctcttaaatgacgcctcactttttgtcatgttccttgagata

SEQ ID NO: 47382 - DNA, 80 bp, synthetic construct
  source 1..80: mol_type = other DNA
tggagcggcgcttctcccgggtccaagaggtcgtgcaggtgctaagggctctccgagccacgtaccagctcaccaaagcc

SEQ ID NO: 47383 - DNA, 80 bp, synthetic construct; identical to SEQ ID NO: 12626
  source 1..80: mol_type = other DNA

SEQ ID NO: 47384 - DNA, 80 bp, synthetic construct
  source 1..80: mol_type = other DNA
gggaggggctgggctctataaagtaggggaagggaccttctaatggaggatggaggcctggcagcaggcggatgtctgag

SEQ ID NO: 47385 - DNA, 80 bp, synthetic construct
  source 1..80: mol_type = other DNA
tgagggaggcccccagaaggctccacccctgagggaatgtgggccaggaggggcctcattcctggatcctcacctccttt

SEQ ID NO: 47386 - DNA, 80 bp, synthetic construct
  source 1..80: mol_type = other DNA
ggacaaacagatttgtcagctgtcagggtgcagtgggacgtcagagactatgtggtccatcgccttcattgtgtaaatga

SEQ ID NO: 47387 - DNA, 80 bp, synthetic construct; identical to SEQ ID NO: 12627
  source 1..80: mol_type = other DNA

SEQ ID NO: 47388 - DNA, 80 bp, synthetic construct
  source 1..80: mol_type = other DNA
tgagagaagtaggacttcctccagacctgatgggctgcaggctgtgctgcagatggtgtgcccccaccttctgtgctctg

SEQ ID NO: 47389 - DNA, 80 bp, synthetic construct
  source 1..80: mol_type = other DNA
tcctctgtggtgctagatgtacaatgccatttaatcctactgaaaacctcatgaggcgggtgttagctccattttggaga

SEQ ID NO: 47390 - DNA, 80 bp, synthetic construct
  source 1..80: mol_type = other DNA
tgccctgctacttttttttttttttttttttttggaaacggagtcttgctttgtcacctaggctggagtgcactggtgag

SEQ ID NO: 47391 - DNA, 80 bp, synthetic construct
  source 1..80: mol_type = other DNA
gaactcctgacctcaagtgatctgcctgcctcggcctcccaaaatgcttggattacaggcatgagccaccatgcccagcc

SEQ ID NO: 47392 - DNA, 80 bp, synthetic construct; identical to SEQ ID NO: 12628
  source 1..80: mol_type = other DNA

SEQ ID NO: 47393 - DNA, 80 bp, synthetic construct
  source 1..80: mol_type = other DNA
atgggagcccacacctccttcaatcttattttcctgccattctgatgcattgtcaaacttcatgtccaaggtctgcacca

SEQ ID NO: 47394 - DNA, 80 bp, synthetic construct
  source 1..80: mol_type = other DNA
acacttagattcatcagtgagtgaaacaaaattctgtgcccttgtagtactttccttctagcaggacagtcagaaataac

SEQ ID NO: 47395 - DNA, 80 bp, synthetic construct
  source 1..80: mol_type = other DNA
aaatagtgggtcagggcagaactcactgtaaaggtgaggtttaagcaaaggcttgtaggaggtataggaagagcgttcca

SEQ ID NO: 47396 - DNA, 80 bp, synthetic construct
  source 1..80: mol_type = other DNA
caaggcggacaatctggggcttgtgtccaaaatggtagccagttggctacctaaagcattaaataaaataaaaacgttca

SEQ ID NO: 47397 - DNA, 80 bp, synthetic construct; identical to SEQ ID NO: 12629
  source 1..80: mol_type = other DNA

SEQ ID NO: 47398 - DNA, 80 bp, synthetic construct
  source 1..80: mol_type = other DNA
aagggaggctgggaaatgtaatgatccacatgctgagttgaaatctacatgactatccaaaaggaggaggatggctgtta

SEQ ID NO: 47399 - DNA, 80 bp, synthetic construct
  source 1..80: mol_type = other DNA
ttgaggtgcatttagctgtctgctctaccaacctcttggacattcagatatccagtcccccaacttgtttggggatcctc

SEQ ID NO: 47400 - DNA, 80 bp, synthetic construct
  source 1..80: mol_type = other DNA
gtgaaggaaggtagaccaattttttaagtgttttttttccaccctgccattttctatgctcccctcatcttcagtgatgc

SEQ ID NO: 47401 - DNA, 80 bp, synthetic construct
  source 1..80: mol_type = other DNA
agtttgtgttttgagagctggtgagaagtcaatttttttttttttttttttttttttgagacagagtcttgctctgtagt

SEQ ID NO: 47402 - DNA, 80 bp, synthetic construct; identical to SEQ ID NO: 12630
  source 1..80: mol_type = other DNA

SEQ ID NO: 47403 - DNA, 80 bp, synthetic construct
  source 1..80: mol_type = other DNA
agacaggctgtgatatgtccctaagtagcttccctgtgtgatcctcacaacaacctgatggtgcaggaataatgagaaaa

SEQ ID NO: 47404 - DNA, 80 bp, synthetic construct
  source 1..80: mol_type = other DNA
gacagctttagagatccgtgctgcctcccatgctaaagctgctttcaagctaattttctgactctgccgactgtgtgtgt

SEQ ID NO: 47405 - DNA, 80 bp, synthetic construct
  source 1..80: mol_type = other DNA
ctgtcacactacagcaggtaccatcattgttcccattttgcgagtgaagaaatggaggctccaagaggataagaaacatg

SEQ ID NO: 47406 - DNA, 80 bp, synthetic construct; identical to SEQ ID NO: 12631
  source 1..80: mol_type = other DNA

SEQ ID NO: 47407 - DNA, 80 bp, synthetic construct
  source 1..80: mol_type = other DNA
taatgatacctagtatgccacattcaagactgctgcaagcatcgaaatagggatgcaggagaaaagcaggacttcaataa

SEQ ID NO: 47408 - DNA, 80 bp, synthetic construct
  source 1..80: mol_type = other DNA
tgtgacactggtgttgagggagacattgtccatccctggaaccctctgctcaacagggggacagtcagagacttgagcat

SEQ ID NO: 47409 - DNA, 80 bp, synthetic construct
  source 1..80: mol_type = other DNA
cgggccaagaaggacacaggcttcaatggctgtcatgtgttgcagacaacatggtgttgagatcttgcatggtggagggt

SEQ ID NO: 47410 - DNA, 80 bp, synthetic construct; identical to SEQ ID NO: 12632
  source 1..80: mol_type = other DNA

SEQ ID NO: 47411 - DNA, 80 bp, synthetic construct
  source 1..80: mol_type = other DNA
tggggtgtctctgtcactctcagggaccatgaagtcccaccccttttctctggcctcttcttgccacagggacccaggag

SEQ ID NO: 47412 - DNA, 80 bp, synthetic construct
  source 1..80: mol_type = other DNA
actcaagccttagcataagtgtttgaggggaaatgggaggaggaatctggtcaactggattttccagttctcccagtaag

SEQ ID NO: 47413 - DNA, 80 bp, synthetic construct
  source 1..80: mol_type = other DNA
gaggcgtccctcctgcaggtgtctgggcccccacccatgcccgggcctcccaaggatctttagagattaattattaactg

SEQ ID NO: 47414 - DNA, 80 bp, synthetic construct; identical to SEQ ID NO: 12633
  source 1..80: mol_type = other DNA

SEQ ID NO: 47415 - DNA, 80 bp, synthetic construct
  source 1..80: mol_type = other DNA
aaaggggacacccacctactcccggccgagatgcctacaggcaagcgctgggacaggcaagcacaggacagatgtgcaga

SEQ ID NO: 47416 - DNA, 80 bp, synthetic construct
  source 1..80: mol_type = other DNA
aagagacacaccagccatggaaacttgcttgaacacacaagggcacaggccagcatcttcctatctgccacttccctatg

SEQ ID NO: 47417 - DNA, 80 bp, synthetic construct
  source 1..80: mol_type = other DNA
agacttgcacaggacaacaggaagaccacagtgggaagaaagcatggaggagaagagcagcaggcacaggagggacgagc

SEQ ID NO: 47418 - DNA, 80 bp, synthetic construct; identical to SEQ ID NO: 12634
  source 1..80: mol_type = other DNA

SEQ ID NO: 47419 - DNA, 80 bp, synthetic construct
  source 1..80: mol_type = other DNA
ccatgtgctaggctcatcactaagtattcctttatagcgcataagcgcctgtgaagtaggtactagattaccccgatttt

SEQ ID NO: 47420 - DNA, 80 bp, synthetic construct
  source 1..80: mol_type = other DNA
cccaaacatgacacgtgtcttccttggtgccccttatctcccctttccccttccctgtcaaaggaatggaaagctctgtc

SEQ ID NO: 47421 - DNA, 80 bp, synthetic construct
  source 1..80: mol_type = other DNA
acggttgtacttctaggaacaagaggatgaccttgggataggtcatttgggtctccccttttaaaggagggtctgggctg

SEQ ID NO: 47422 - DNA, 80 bp, synthetic construct; identical to SEQ ID NO: 12635
  source 1..80: mol_type = other DNA

SEQ ID NO: 47423 - DNA, 80 bp, synthetic construct
  source 1..80: mol_type = other DNA
atggccaactcttctaaccctgttctatggtttatcttcttttttcaacagttcagctgaccctactggggacttctgac

SEQ ID NO: 47424 - DNA, 80 bp, synthetic construct
  source 1..80: mol_type = other DNA
cactatctctggaggtttccccactgtttctgcaactgtccccactatttccaaaagtttccctactgtctctgaaatct

SEQ ID NO: 47425 - DNA, 80 bp, synthetic construct
  source 1..80: mol_type = other DNA
cagtcctcagtctttagctccagccgtttctgggagcacttcaggaacagtctccacatcatcaggtgatatttctgttg

SEQ ID NO: 47426 - DNA, 80 bp, synthetic construct; identical to SEQ ID NO: 12636
  source 1..80: mol_type = other DNA

SEQ ID NO: 47427 - DNA, 80 bp, synthetic construct
  source 1..80: mol_type = other DNA
gtgagcacctatcctgaaagtcaagtgactatttgtgtgggtttttcggtaagttttttttttttttgaggtggagtttc

SEQ ID NO: 47428 - DNA, 80 bp, synthetic construct
  source 1..80: mol_type = other DNA
cgggattttaccatgttggccaggctggtgtcgaactcctgacgtcaggtgatctgcctgtctcagcctcccaaagtgct

SEQ ID NO: 47429 - DNA, 80 bp, synthetic construct
  source 1..80: mol_type = other DNA
attttcataacattatttcatcagtttattccaaaaacttgctggagtcttgcctgtgggtgcatttgatgtgacctctg

SEQ ID NO: 47430 - DNA, 80 bp, synthetic construct; identical to SEQ ID NO: 12637
  source 1..80: mol_type = other DNA

SEQ ID NO: 47431 - DNA, 80 bp, synthetic construct
  source 1..80: mol_type = other DNA
tacctggctgctttctcgaaaggttttcatctttcttcctcatgatctaatctctctgttcagggcgagaggcattcctt

SEQ ID NO: 47432 - DNA, 80 bp, synthetic construct
  source 1..80: mol_type = other DNA
ggagtggtggggagaactggggcttggaggaaggagagtgcctactgaggaccctcccagtgcagaagcatcacagaccc

SEQ ID NO: 47433 - DNA, 80 bp, synthetic construct
  source 1..80: mol_type = other DNA
gataggagaaaacaccagagagatgaggtctcagagtcagagacatcagtcacagaaagaaagatggaaagtcagagggc

SEQ ID NO: 47434 - DNA, 80 bp, synthetic construct; identical to SEQ ID NO: 12638
  source 1..80: mol_type = other DNA

SEQ ID NO: 47435 - DNA, 80 bp, synthetic construct
  source 1..80: mol_type = other DNA
acgtggaagcactcaactcagctctaggcaatgaaggaccagttctgtggagccacattcacctgggcttgaatccttgt

SEQ ID NO: 47436 - DNA, 80 bp, synthetic construct
  source 1..80: mol_type = other DNA
tacagatgaggtaattgagtcctggatgaaatgagaatgatggcatccatctcaaagggtggttgggaggatcaaataag

SEQ ID NO: 47437 - DNA, 80 bp, synthetic construct
  source 1..80: mol_type = other DNA
gcaggttcccgggtccctagattaacccatcgtaccctcccctcatctcacaggcctgccagttccggagggagatgagt

SEQ ID NO: 47438 - DNA, 80 bp, synthetic construct; identical to SEQ ID NO: 12639
  source 1..80: mol_type = other DNA

SEQ ID NO: 47439 - DNA, 80 bp, synthetic construct
  source 1..80: mol_type = other DNA
agccctcacggagcccaggtctggacagctggaacccctgcccctcaccctctcttcctagtcccaccctcctccctgac

SEQ ID NO: 47440 - DNA, 80 bp, synthetic construct
  source 1..80: mol_type = other DNA
ctgctatgggagggtggtgaacaagttattgctaaataaaatggcacttcctccacttgtctcccagatgctgtgggttt

SEQ ID NO: 47441 - DNA, 80 bp, synthetic construct
  source 1..80: mol_type = other DNA
ggtgacaggtgataactcataggtgaggtgcttagtacattcttcagtacatagaaatgcccaaacaatggtagttggca

SEQ ID NO: 47442 - DNA, 80 bp, synthetic construct; identical to SEQ ID NO: 12640
  source 1..80: mol_type = other DNA

SEQ ID NO: 47443 - DNA, 80 bp, synthetic construct
  source 1..80: mol_type = other DNA
gtacagaaccaccgtcctagaggcttgggtccctggggaaagggggggggggaaggggaccagtgaaaagggggactgtc

SEQ ID NO: 47444 - DNA, 80 bp, synthetic construct
  source 1..80: mol_type = other DNA
aataagcagttggcctcctctcctcttcccacctattccagccctgcccagggcttagggacaagtcacaccaagtaagg

SEQ ID NO: 47445 - DNA, 80 bp, synthetic construct
  source 1..80: mol_type = other DNA
ggagtggaaacatttattgattgcctactgtgtgccagacactgtcctaggctctgatgacacagcagggatccaaggtg

SEQ ID NO: 47446 - DNA, 80 bp, synthetic construct; identical to SEQ ID NO: 12641
  source 1..80: mol_type = other DNA

SEQ ID NO: 47447 - DNA, 80 bp, synthetic construct
  source 1..80: mol_type = other DNA
ttctgtgtcttgtctctgtcactgcctctgcactctccacatattgttgtatgacctctgaacatcatgaagcacctttc

SEQ ID NO: 47448 - DNA, 80 bp, synthetic construct
  source 1..80: mol_type = other DNA
cacagatcagaacgtgaaccccaccccatcctgctcccagccagagctcagtccttctagaactgagccatctgctcccc

SEQ ID NO: 47449 - DNA, 80 bp, synthetic construct
  source 1..80: mol_type = other DNA
tcagggctcccctgtgggttggggtggctccatttgtttaagacttagtcctgaggagccccagcccccatgacgtcaag

SEQ ID NO: 47450 - DNA, 80 bp, synthetic construct; identical to SEQ ID NO: 12642
  source 1..80: mol_type = other DNA

SEQ ID NO: 47451 - DNA, 80 bp, synthetic construct
  source 1..80: mol_type = other DNA
agacactgtagaggctgccagccctggatggtgggggtaggcacctgacattcattgagcaccgtgcacggaattcacag

SEQ ID NO: 47452 - DNA, 80 bp, synthetic construct
  source 1..80: mol_type = other DNA
cagtctcctgggtaactgggattacaggcacctgccaccacgcctggctcatttttttgtatttttagtagagacaggat

SEQ ID NO: 47453 - DNA, 80 bp, synthetic construct
  source 1..80: mol_type = other DNA
atagttgaggagagtggattcacaatgattatgtcccatatctcacagctagagggaggtaagcagggattccagctcca

SEQ ID NO: 47454 - DNA, 80 bp, synthetic construct; identical to SEQ ID NO: 12643
  source 1..80: mol_type = other DNA

SEQ ID NO: 47455 - DNA, 80 bp, synthetic construct
  source 1..80: mol_type = other DNA
atgaaattatgaaattagttcacttagtcaagaaacggactgctactgaacccggggagcagagatgctgaacacagggg

SEQ ID NO: 47456 - DNA, 80 bp, synthetic construct
  source 1..80: mol_type = other DNA
tgaggccaggggtggaggcaggggcaggtgggtggtgaatggcgatgactgaggaatctttgagctgcctctgaaaggtc

SEQ ID NO: 47457 - DNA, 80 bp, synthetic construct
  source 1..80: mol_type = other DNA
ctccttccatcttgcagcttaaggaagaggaacctgcagggggcggaagggaatccactccatacacagtcgctctgaga

SEQ ID NO: 47458 - DNA, 80 bp, synthetic construct; identical to SEQ ID NO: 12644
  source 1..80: mol_type = other DNA

SEQ ID NO: 47459 - DNA, 80 bp, synthetic construct
  source 1..80: mol_type = other DNA
ggaccagtcaacacccagacagataactagatcctggaaccccagagtctgcatcatgcagtcacagaaccacaggtaca

SEQ ID NO: 47460 - DNA, 80 bp, synthetic construct
  source 1..80: mol_type = other DNA
tgagggagcacaggtgcagtctagattaaattatcacagggaggcacaggtgcagtccagattaaatcatcacagggagg

SEQ ID NO: 47461 - DNA, 80 bp, synthetic construct
  source 1..80: mol_type = other DNA
gggaattggggctggggtccttggaagaatctaacaagaacattttcctataacaaatgttatttgatttaatttctata

SEQ ID NO: 47462 - DNA, 80 bp, synthetic construct; identical to SEQ ID NO: 12645
  source 1..80: mol_type = other DNA

SEQ ID NO: 47463 - DNA, 80 bp, synthetic construct
  source 1..80: mol_type = other DNA
gataccaggaaacactagagatgctcttttgggacagcgtgccctgacagcgactccaaggcatgagttgcttagcaaga

SEQ ID NO: 47464 - DNA, 80 bp, synthetic construct
  source 1..80: mol_type = other DNA
tagtggcatgatcttggctcactgcagcctctgcctcccaggttcaactgattctcctgcctcagcctcctgagtagctg

SEQ ID NO: 47465 - DNA, 80 bp, synthetic construct
  source 1..80: mol_type = other DNA
atgtcctctctttcaaatgagtgaacaaagcagatggcggggacctttggcactgtgcatcgttttgatgttgtgggatt

SEQ ID NO: 47466 - DNA, 80 bp, synthetic construct; identical to SEQ ID NO: 12646
  source 1..80: mol_type = other DNA

SEQ ID NO: 47467 - DNA, 80 bp, synthetic construct
  source 1..80: mol_type = other DNA
ttatggactgtgatcctgtggtttaatgacaactggtatcccagaattggtgggccagaggccttctttcaacgtctttt

SEQ ID NO: 47468 - DNA, 80 bp, synthetic construct
  source 1..80: mol_type = other DNA
acaaatatttacaaagtgcctcctatggatcagacactgttctaggctggagacagcgatgaacaaaacaataaaaatcc

SEQ ID NO: 47469 - DNA, 80 bp, synthetic construct
  source 1..80: mol_type = other DNA
tgaggagggggcatactggctcacatttgtagtcccagctgacagggaggctgaggtgggggtactgcttgagcccagga

SEQ ID NO: 47470 - DNA, 80 bp, synthetic construct
  source 1..80: mol_type = other DNA
tgaggtcaggagatcgagaccatcctggctaacacagtgaaaccccatctctactaaaaatacaaaaaattagctgggtg

SEQ ID NO: 47471 - DNA, 80 bp, synthetic construct; identical to SEQ ID NO: 12647
  source 1..80: mol_type = other DNA

SEQ ID NO: 47472 - DNA, 80 bp, synthetic construct
  source 1..80: mol_type = other DNA
tggattcaacaaacatttaaatagcttctgtgctccagagtcttccatggtccatacttcctttaatcctcacattaagc

SEQ ID NO: 47473 - DNA, 80 bp, synthetic construct
  source 1..80: mol_type = other DNA
gccagctcctttattcactcaatagatagtcattcatcccttatcatgtttaaaaacatctggggcacagtgaaaagtct

SEQ ID NO: 47474 - DNA, 80 bp, synthetic construct
  source 1..80: mol_type = other DNA
aattttgccaattacttaacctctttgcgtctcctttccccacctgtaaaacagtaagatcacactcctcacttcacagg

SEQ ID NO: 47475 - DNA, 80 bp, synthetic construct
  source 1..80: mol_type = other DNA
gttcagattctgtctcgacctcttacttgctgggtgtccttgagaagattacttaaccactcagaaccttgtttcttcat

SEQ ID NO: 47476 - DNA, 80 bp, synthetic construct; identical to SEQ ID NO: 12648
  source 1..80: mol_type = other DNA

SEQ ID NO: 47477 - DNA, 80 bp, synthetic construct
  source 1..80: mol_type = other DNA
cattcagcccccttctctcccctcattctcaattcctttcagagacttgggcttctctattaccctcacacccttcttgt

SEQ ID NO: 47478 - DNA, 80 bp, synthetic construct
  source 1..80: mol_type = other DNA
aacagggaccagaaacctcagttatgtaatgacactatctctttcactctttggtgatctcttggccttcactcttttgg

SEQ ID NO: 47479 - DNA, 80 bp, synthetic construct
  source 1..80: mol_type = other DNA
ttttccatggaattaaggcgtgtatctgtccactgataggggtgttttctctcacaccctgtccttaaacatagtcagtc

SEQ ID NO: 47480 - DNA, 80 bp, synthetic construct
  source 1..80: mol_type = other DNA
cccctcatccaactttatcaccgaaatgaaagcttcccatctccttactctacccatcctccattcttcttatacatctc

SEQ ID NO: 47481 - DNA, 80 bp, synthetic construct; identical to SEQ ID NO: 12649
  source 1..80: mol_type = other DNA

SEQ ID NO: 47482 - DNA, 80 bp, synthetic construct
  source 1..80: mol_type = other DNA
gctggattttatctgcttagacggatcagaaaagatgccttaaagccagaaggccttgagatggagagttgaggagatgt

SEQ ID NO: 47483 - DNA, 80 bp, synthetic construct
  source 1..80: mol_type = other DNA
gttggagaagaacatgggggaagtttcttatttgcctctctccctccacaggtgctactacattccaagaatatcagaaa

SEQ ID NO: 47484 - DNA, 80 bp, synthetic construct
  source 1..80: mol_type = other DNA
gccattctaagccaactgacaagcctacaggcaactccaaaactatagaccacaaaagctctacagataatcatgaggct

SEQ ID NO: 47485 - DNA, 80 bp, synthetic construct; identical to SEQ ID NO: 12650
  source 1..80: mol_type = other DNA

SEQ ID NO: 47486 - DNA, 80 bp, synthetic construct
  source 1..80: mol_type = other DNA
attccagaacaacagttgcctcagacaagctcctgacaaaaactacaaaaaacatacaagagaccatatcagccaatgag

SEQ ID NO: 47487 - DNA, 80 bp, synthetic construct
  source 1..80: mol_type = other DNA
ccaatgagaacaccgcaccattcccagcagggcctacagaaaatagagaaatgacagccaatgagaataccacactattc

SEQ ID NO: 47488 - DNA, 80 bp, synthetic construct
  source 1..80: mol_type = other DNA
gagcctacagaacatggagaaaggaccccatttgccaatgacaaaaccacatcatcctcagcagagtctacagaacatgg

SEQ ID NO: 47489 - DNA, 80 bp, synthetic construct; identical to SEQ ID NO: 12651
  source 1..80: mol_type = other DNA

SEQ ID NO: 47490 - DNA, 80 bp, synthetic construct
  source 1..80: mol_type = other DNA
gagcctacagaaaatggagacaggactcctttggccaatgagaagaccacgccatctctagcagagcctacagaaaatgg

SEQ ID NO: 47491 - DNA, 80 bp, synthetic construct
  source 1..80: mol_type = other DNA
ccagcagggcctacagaaaatagagaaatgacagccaacgagaagaccacactattcccagcagagcctacagaaaatag

SEQ ID NO: 47492 - DNA, 80 bp, synthetic construct
  source 1..80: mol_type = other DNA
ccagcagagcctacagaaaatagagaaaggacagccaatgagaagaccacaccattcccagcagagcctacagaaaatag

SEQ ID NO: 47493 - DNA, 80 bp, synthetic construct; identical to SEQ ID NO: 12652
  source 1..80: mol_type = other DNA

SEQ ID NO: 47494 - DNA, 80 bp, synthetic construct
  source 1..80: mol_type = other DNA
gagcctacagaacatgaagaaatgaccccattggccaatgagaagaccacactatccccagcagagcctacagaaaatgg

SEQ ID NO: 47495 - DNA, 80 bp, synthetic construct
  source 1..80: mol_type = other DNA
acatggagaaaggatagccaatgagaaggccacaccatccccagcaaagcctacagaacatggagaaacgacagtcaatg

SEQ ID NO: 47496 - DNA, 80 bp, synthetic construct
  source 1..80: mol_type = other DNA
agaaaggacaccatcagccaatgagaagaccataccatctccagcaaagcctacagaacacgaagaaatgaccccatcgg

SEQ ID NO: 47497 - DNA, 80 bp, synthetic construct; identical to SEQ ID NO: 12653
  source 1..80: mol_type = other DNA

SEQ ID NO: 47498 - DNA, 80 bp, synthetic construct
  source 1..80: mol_type = other DNA
agaaaagcctacgctatactcagagaagaccatatgcaccaaagggaaaaacacaccagtcccagaaaagcctacagaaa

SEQ ID NO: 47499 - DNA, 80 bp, synthetic construct
  source 1..80: mol_type = other DNA
acaaatctctcactactacctcttctcatctaaataaaactgaagttactcatcaggtgcccactggttctttcaccctc

SEQ ID NO: 47500 - DNA, 80 bp, synthetic construct
  source 1..80: mol_type = other DNA
tggctgtgattctcctcctggtgttccttggcctgatcttcttggtaagggacagatgtgccccacagaaatcaacctat

SEQ ID NO: 47501 - DNA, 80 bp, synthetic construct
  source 1..80: mol_type = other DNA
gagaaagacaataaatacacaggaggtaaaaagctggaattggggacaaggctgtggctgagaatgaaagggtgtgaaag

SEQ ID NO: 47502 - DNA, 80 bp, synthetic construct; identical to SEQ ID NO: 12654
  source 1..80: mol_type = other DNA

SEQ ID NO: 47503 - DNA, 80 bp, synthetic construct
  source 1..80: mol_type = other DNA
acccggtctacctgatggagcagcagaatcttggcatgggccagatcccttccccacggtgatcttggagtaggcgccca

SEQ ID NO: 47504 - DNA, 80 bp, synthetic construct
  source 1..80: mol_type = other DNA
gggtgtaagtttaggggacaaagaagaaagaatgaataatacgagcagacattctctgtagaaggtaatggtctgagaat

SEQ ID NO: 47505 - DNA, 80 bp, synthetic construct
  source 1..80: mol_type = other DNA
gacagcattatgttatttccattcactattacttaagagtttgtgtgtaaacaggctcatctctgagttctcaggaccct

SEQ ID NO: 47506 - DNA, 80 bp, synthetic construct; identical to SEQ ID NO: 12655
  source 1..80: mol_type = other DNA

SEQ ID NO: 47507 - DNA, 80 bp, synthetic construct
  source 1..80: mol_type = other DNA
atctcgtaaaagttacccatcttctctactgtccccattctctctcctcccaccttcaccccagattcaagttttcctcc

SEQ ID NO: 47508 - DNA, 80 bp, synthetic construct
  source 1..80: mol_type = other DNA
aaagggcatcatagttattagactatccattgggagaaagttctgactggcgttcctggctctggctgagaccttacaga

SEQ ID NO: 47509 - DNA, 80 bp, synthetic construct
  source 1..80: mol_type = other DNA
ctcagtccaggctgggtttatttgcatggtgacaaaatgagtagaaaaacctgtcaattaataagcaagtattttaaagc

SEQ ID NO: 47510 - DNA, 80 bp, synthetic construct
  source 1..80: mol_type = other DNA
tatagaataaaacaacaccctaattcattaagcccaactccgtgagcatctactatgccccctatttatgttaggacacc

SEQ ID NO: 47511 - DNA, 80 bp, synthetic construct; identical to SEQ ID NO: 12656
  source 1..80: mol_type = other DNA

SEQ ID NO: 47512 - DNA, 80 bp, synthetic construct
  source 1..80: mol_type = other DNA
accagagacccgctctgctaaaggcaagattgaagcttgactctcagaaagcagacatgccagatgccagagggacccag

SEQ ID NO: 47513 - DNA, 80 bp, synthetic construct
  source 1..80: mol_type = other DNA
gagggatgcagaaacccctaaactcagcctggaccccaattcaaaaacaaaacgaaataaaaacatctctgcctctagag

SEQ ID NO: 47514 - DNA, 80 bp, synthetic construct
  source 1..80: mol_type = other DNA
tattccccgctaattatcactttgaaatctaggcggaaatcctttaacaagctccggggctgggccctcattagggataa

SEQ ID NO: 47515 - DNA, 80 bp, synthetic construct; identical to SEQ ID NO: 12657
  source 1..80: mol_type = other DNA

SEQ ID NO: 47516 - DNA, 80 bp, synthetic construct
  source 1..80: mol_type = other DNA
acctgtgatcctccgatcaccctgcgagttacgaggcctgctttacaagccttataagaagttacagaccttataagagt

SEQ ID NO: 47517 - DNA, 80 bp, synthetic construct
  source 1..80: mol_type = other DNA
ccccacctggacgggtgggatgttacagggaccacctaaggaacagggtgtaattgagatttgcacgagggtgtccagcc

SEQ ID NO: 47518 - DNA, 80 bp, synthetic construct
  source 1..80: mol_type = other DNA
cacagtgcccagctgtccctggagaggtgctggcaaagtaagaagatccaatgatttgggacacagtcaccttcattttt

SEQ ID NO: 47519 - DNA, 80 bp, synthetic construct; identical to SEQ ID NO: 12658
  source 1..80: mol_type = other DNA

SEQ ID NO: 47520 - DNA, 80 bp, synthetic construct
  source 1..80: mol_type = other DNA
atcttactcctcccagaaccctgcccctggcaagcttttaattcttcctgcaacttcatgtcccattgagacaccaggca

SEQ ID NO: 47521 - DNA, 80 bp, synthetic construct
  source 1..80: mol_type = other DNA
tgatgcttctctttggaatcttgagactggtaagtgaattatccatcaatcggagaagacactgaggccacaaaaagtct

SEQ ID NO: 47522 - DNA, 80 bp, synthetic construct
  source 1..80: mol_type = other DNA
caacttcaccttgcagcaaacccaccttcatcttccccttccaatgctccgctgtaagcatgaacacaaataatagctgt

SEQ ID NO: 47523 - DNA, 80 bp, synthetic construct; identical to SEQ ID NO: 12659
  source 1..80: mol_type = other DNA

SEQ ID NO: 47524 - DNA, 80 bp, synthetic construct
  source 1..80: mol_type = other DNA
tgcctaatgactacaacccaatgtcaggcagatttataaagccccttcgcttccactgtaggatggaatgccataaaaag

SEQ ID NO: 47525 - DNA, 80 bp, synthetic construct
  source 1..80: mol_type = other DNA
tgttcttttcctcctccctgcgtctctgtgagcttgttcattttaagaggcccaaattattactgcaacaggcaacttcc

SEQ ID NO: 47526 - DNA, 80 bp, synthetic construct
  source 1..80: mol_type = other DNA
ataaatcagtgaacaaaacagcaacaggccctgccttcagggagctcacagttcactaggaaaggcagagatcacacaaa

SEQ ID NO: 47527 - DNA, 80 bp, synthetic construct; identical to SEQ ID NO: 12660
  source 1..80: mol_type = other DNA

SEQ ID NO: 47528 - DNA, 80 bp, synthetic construct
  source 1..80: mol_type = other DNA
atagcgaaaccccgtctctactaaaaatacaaaacttagccaggtgtggtggtgcacacctgtaatctcagctacttggg

SEQ ID NO: 47529 - DNA, 80 bp, synthetic construct
  source 1..80: mol_type = other DNA
ggcctgtaatcccagcacttttggaagacaaggtgggaggattgcccaaagctaggagtcagagacctgcctgggcgaca

SEQ ID NO: 47530 - DNA, 80 bp, synthetic construct
  source 1..80: mol_type = other DNA
tccccttcatcaccaagcctcttgaaacaatcccctacaaacactatcttcatgtccttatctcctactctctgtgtgta

SEQ ID NO: 47531 - DNA, 80 bp, synthetic construct; identical to SEQ ID NO: 12661
  source 1..80: mol_type = other DNA

SEQ ID NO: 47532 - DNA, 80 bp, synthetic construct
  source 1..80: mol_type = other DNA
ctcaaaatagcttcctgtcccaatctcacctctgaaaggacttactaatttaaatatatctactatgaactgaacagtgt

SEQ ID NO: 47533 - DNA, 80 bp, synthetic construct
  source 1..80: mol_type = other DNA
gctgccaccatgcccagctaattagttttgttttaaattttagtagagaccatatctcactatgttgcccaggctggtct

SEQ ID NO: 47534 - DNA, 80 bp, synthetic construct
  source 1..80: mol_type = other DNA
ataagagtggtgcccgaattcaatgggactgtggccttatcaaaggagaaagagagttctttctgtcttcactatgtgag

SEQ ID NO: 47535 - DNA, 80 bp, synthetic construct; identical to SEQ ID NO: 12662
  source 1..80: mol_type = other DNA

SEQ ID NO: 47536 - DNA, 80 bp, synthetic construct
  source 1..80: mol_type = other DNA
aaactgtatgaaaatatgacagtgcatttactgttaactcctgcttatgttttagaaagctcttatggaaagaaaaaaaa

SEQ ID NO: 47537 - DNA, 80 bp, synthetic construct
  source 1..80: mol_type = other DNA
cccaggttcaggcaattcttctgcctcagcctcccgagtagctgggattacaggcatgcaccaccacacctggctaattt

SEQ ID NO: 47538 - DNA, 80 bp, synthetic construct
  source 1..80: mol_type = other DNA
ggatgcaatgaagtgtggagtactcttaaacaagctccaagtccatgaaatgccgtgtcagaatttttcctttccttttt

SEQ ID NO: 47539 - DNA, 80 bp, synthetic construct; identical to SEQ ID NO: 12663
  source 1..80: mol_type = other DNA

SEQ ID NO: 47540 - DNA, 80 bp, synthetic construct
  source 1..80: mol_type = other DNA
attcatgtggttgtgcaaccatccctggtaatttcttcttgattctctgtcccggaactactaaactcaggctgggttta

SEQ ID NO: 47541 - DNA, 80 bp, synthetic construct
  source 1..80: mol_type = other DNA
cagctgcacagtcgttgctatgtagaggaactaatacttgagcgactattttcttatagttggataactctgtttcctta

SEQ ID NO: 47542 - DNA, 80 bp, synthetic construct
  source 1..80: mol_type = other DNA
gtctacattttctctgagctttccagcttgctccaatgcctctgaggttgctgtgtcagtgctgctgttttttagatcca

SEQ ID NO: 47543 - DNA, 80 bp, synthetic construct
  source 1..80: mol_type = other DNA
ataaaagttagccgggcgtggtgacgtgtgcctgtagtcccagctactcaggaggctgaggcaggagaatcactcaaacc

SEQ ID NO: 47544 - DNA, 80 bp, synthetic construct; identical to SEQ ID NO: 12664
  source 1..80: mol_type = other DNA

SEQ ID NO: 47545 - DNA, 80 bp, synthetic construct
  source 1..80: mol_type = other DNA
caatcactgtatcccatgcctggcacatcatgtggcccacagaaggttcttaaggaatatgtttgaataaatgaatgaga

SEQ ID NO: 47546 - DNA, 80 bp, synthetic construct
  source 1..80: mol_type = other DNA
aggaagggagggagggaggaagaaggaaggaaggaagtaaagaagggaggaaggaattaaagaagaaaggaaggaagaga

SEQ ID NO: 47547 - DNA, 80 bp, synthetic construct
  source 1..80: mol_type = other DNA
cttttccccctagtatctccttgtgtctctttacaaactgcctaactcatcaactttcaccacctgaagaggctggaaaa

SEQ ID NO: 47548 - DNA, 80 bp, synthetic construct; identical to SEQ ID NO: 12665
  source 1..80: mol_type = other DNA

SEQ ID NO: 47549 - DNA, 80 bp, synthetic construct
  source 1..80: mol_type = other DNA
tagctgggattacaggcatgcaccaccacacctggctaattttgtatttttagtagagacggggtttctccatgttggtc

SEQ ID NO: 47550 - DNA, 80 bp, synthetic construct
  source 1..80: mol_type = other DNA
cccctaatctgatgagacccaactatccttagtgttataacacacacagagataatgtggagcctccttaacataggtta

SEQ ID NO: 47551 - DNA, 80 bp, synthetic construct
  source 1..80: mol_type = other DNA
aaatacatgattccaaataaaaggtaacgacaccagcagttctgctgatgtaaaggaaacaagaaagacatatgcacgat

SEQ ID NO: 47552 - DNA, 80 bp, synthetic construct; identical to SEQ ID NO: 12666
  source 1..80: mol_type = other DNA

SEQ ID NO: 47553 - DNA, 80 bp, synthetic construct
  source 1..80: mol_type = other DNA
atgagctctgcagccatcccagtctcctccacagcttatgagaccatcaggttctccactgcagtgtctgagccagtgac

SEQ ID NO: 47554 - DNA, 80 bp, synthetic construct
  source 1..80: mol_type = other DNA
atcacagcctccgaggacaccacagtctccactcaaacctctgtgatagctgcagagtctgtgccccacacagccaccaa

SEQ ID NO: 47555 - DNA, 80 bp, synthetic construct
  source 1..80: mol_type = other DNA
cccaccacagtcttcaccacaacctctaaaatcaccgcaggctctgagatccccacagcctccaccacagactctgcgac

SEQ ID NO: 47556 - DNA, 80 bp, synthetic construct; identical to SEQ ID NO: 12667
  source 1..80: mol_type = other DNA

SEQ ID NO: 47557 - DNA, 80 bp, synthetic construct
  source 1..80: mol_type = other DNA
aatactatagactccgtgaccaagtctgtgcccaccatggactctaccatagcctccaagagcaccactctctccaagat

SEQ ID NO: 47558 - DNA, 80 bp, synthetic construct
  source 1..80: mol_type = other DNA
gcaaagattccgagatccccacagcctggatgataacctctgtgcctactgtagctcccacctcagcctctgaaactact

SEQ ID NO: 47559 - DNA, 80 bp, synthetic construct
  source 1..80: mol_type = other DNA
ccacaatagtatctgtgcccacaacaacctccaaaataacctctgagaacactgcaggatttttatccatgatgggctct

SEQ ID NO: 47560 - DNA, 80 bp, synthetic construct; identical to SEQ ID NO: 12668
  source 1..80: mol_type = other DNA

SEQ ID NO: 47561 - DNA, 80 bp, synthetic construct
  source 1..80: mol_type = other DNA
ctactcagaccatcaccaaaacagttgtgtcaggtactaacccccatgtcttctctgatcacacacattttaattccaat

SEQ ID NO: 47562 - DNA, 80 bp, synthetic construct
  source 1..80: mol_type = other DNA
ctaatttatataaacagaaatctggagaacaggcattagaatggatatgaagggtgtgggataatggtggaaggaacata

SEQ ID NO: 47563 - DNA, 80 bp, synthetic construct
  source 1..80: mol_type = other DNA
tggattaaaagatggcccactgtgagcaagctgatctcccttggtttaatgtaaatgaagggatccaaaggcttagggag

SEQ ID NO: 47564 - DNA, 80 bp, synthetic construct; identical to SEQ ID NO: 12669
  source 1..80: mol_type = other DNA

SEQ ID NO: 47565 - DNA, 80 bp, synthetic construct
  source 1..80: mol_type = other DNA
gtgttcctagaagtgaaattgataggaagcctattgcattcctatttaatttatacaagcagagaacttctaggctgaat

SEQ ID NO: 47566 - DNA, 80 bp, synthetic construct
  source 1..80: mol_type = other DNA
ctttctcccatccttccccaagacctctggccttttaccagggtaactgtgtattggggaaagggaaatgattagacatt

SEQ ID NO: 47567 - DNA, 80 bp, synthetic construct
  source 1..80: mol_type = other DNA
gtcaggagttcgagaccagcctggccaaaatagtgaaaccctctctactaaaaatacaaaaattagccacgtatggtggt

SEQ ID NO: 47568 - DNA, 80 bp, synthetic construct; identical to SEQ ID NO: 12670
  source 1..80: mol_type = other DNA

SEQ ID NO: 47569 - DNA, 80 bp, synthetic construct
  source 1..80: mol_type = other DNA
aaaaaaaaaaatcacatcccaggagggactgcggagattagtgccaccatcaaggacttgaaagacacaggggtggtgat

SEQ ID NO: 47570 - DNA, 80 bp, synthetic construct
  source 1..80: mol_type = other DNA
cctggtacctagtatgcagccattgacttggcaaatgcctttttctccattcctgtccataggcccaccagaagtaattt

SEQ ID NO: 47571 - DNA, 80 bp, synthetic construct
  source 1..80: mol_type = other DNA
ttgggtccagtgagcaagaagtagcaaacacactggacttattggtgagatatttgtgtgccagaggatgggaaataaat

SEQ ID NO: 47572 - DNA, 80 bp, synthetic construct; identical to SEQ ID NO: 12671
  source 1..80: mol_type = other DNA

SEQ ID NO: 47573 - DNA, 80 bp, synthetic construct
  source 1..80: mol_type = other DNA
agcagaggcctctaggattttggaacaagtccctgccatcttctgcagataactactctccttttgagagacagctcttg

SEQ ID NO: 47574 - DNA, 80 bp, synthetic construct
  source 1..80: mol_type = other DNA
acacatgatcgggctcaagcagttcctgaaggcacaagtaagttacatgaggaagtggctcaaatgcccatggtctccac

SEQ ID NO: 47575 - DNA, 80 bp, synthetic construct
  source 1..80: mol_type = other DNA
ccctctctaggacatccctgaaggacagcggtggagggaaatattctcagtgggcagaacttcaagcagtgcacttggtt

SEQ ID NO: 47576 - DNA, 80 bp, synthetic construct
  source 1..80: mol_type = other DNA
gtggtcaaaaactgtgaagatatttgtatctcatgtgagtgctcaccaacagatgacctcagcagaggaggattttaata

SEQ ID NO: 47577 - DNA, 80 bp, synthetic construct; identical to SEQ ID NO: 12672
  source 1..80: mol_type = other DNA

SEQ ID NO: 47578 - DNA, 80 bp, synthetic construct
  source 1..80: mol_type = other DNA
atgccttatccaccatcatggttccacacagcattacctctggccaaggcattcactttacagctaaagaagggtggcag

SEQ ID NO: 47579 - DNA, 80 bp, synthetic construct
  source 1..80: mol_type = other DNA
atgctctgaatcagtgtccattgtatggtactgtttctcccatagccagcattcctgggtccaggaagcaagggatggaa

SEQ ID NO: 47580 - DNA, 80 bp, synthetic construct
  source 1..80: mol_type = other DNA
taaaattgccacctggacactttgggctccttctacctttacgttaacaggcttagaagggagttacagtgttggctgct

SEQ ID NO: 47581 - DNA, 80 bp, synthetic construct; identical to SEQ ID NO: 12673
  source 1..80: mol_type = other DNA

SEQ ID NO: 47582 - DNA, 80 bp, synthetic construct
  source 1..80: mol_type = other DNA
aagaaaatatcttcattttatttcctttctcctttattatgtgatgtaagatttattgacttcacatcagcatttaagta

SEQ ID NO: 47583 - DNA, 80 bp, synthetic construct
  source 1..80: mol_type = other DNA
gggtggacttatgatggttaatactgagtgtcaacctgattggattgaaggacacaaagtattgatcgtgggtgtgtctg

SEQ ID NO: 47584 - DNA, 80 bp, synthetic construct
  source 1..80: mol_type = other DNA
catcttcctcccgtgctggatgcttcctcagttttggaactcggactggctctcctttctcctcagcctgcagacggcct

SEQ ID NO: 47585 - DNA, 80 bp, synthetic construct; identical to SEQ ID NO: 12674
  source 1..80: mol_type = other DNA

SEQ ID NO: 47586 - DNA, 80 bp, synthetic construct
  source 1..80: mol_type = other DNA
ccaccctctcctgtccctgtgagcagccttctccacttgggtcaggtcctcccacatctgcccaagcacactcaccccac

SEQ ID NO: 47587 - DNA, 80 bp, synthetic construct
  source 1..80: mol_type = other DNA
tacaagcccgccctcttctatttgggtggccacttccgaagtcaaatagatcttccacttccatacccatcacggtcacg

SEQ ID NO: 47588 - DNA, 80 bp, synthetic construct
  source 1..80: mol_type = other DNA
ccatagacatgttagattcaccccgctctgctctaagcgctcccactcccctttaattatctctgctatgaatgcatcat

SEQ ID NO: 47589 - DNA, 80 bp, synthetic construct; identical to SEQ ID NO: 12675
  source 1..80: mol_type = other DNA

SEQ ID NO: 47590 - DNA, 80 bp, synthetic construct
  source 1..80: mol_type = other DNA
tgctcatttccctggctgtagtcatggttggtgttggattgtcagtaggactgaggttttgcctgtgagtgactgagcat

SEQ ID NO: 47591 - DNA, 80 bp, synthetic construct
  source 1..80: mol_type = other DNA
atcgaccaagagtgcaggagcaaatgtatagtcccatgaagtcagatttatcagttagttgcaaaatgggaggctgtata

SEQ ID NO: 47592 - DNA, 80 bp, synthetic construct
  source 1..80: mol_type = other DNA
gcagggctgtttgtaaaggggtcaccggcagcttgaaactgtgaaatagattgtttccttggaaactacagttaaaatga

SEQ ID NO: 47593 - DNA, 80 bp, synthetic construct
  source 1..80: mol_type = other DNA
ttagagaatgaaatttttcattggctaaatcactgcaagtgagtaggtcactggaagtgagtaagggctgtgatacttca

SEQ ID NO: 47594 - DNA, 80 bp, synthetic construct; identical to SEQ ID NO: 12676
  source 1..80: mol_type = other DNA

SEQ ID NO: 47595 - DNA, 80 bp, synthetic construct
  source 1..80: mol_type = other DNA
gaccaaaatggtgaaactccatctctactaaaaatacaaaaattagccggtgtggtggtaggcacctgtaatcccaacta

SEQ ID NO: 47596 - DNA, 80 bp, synthetic construct
  source 1..80: mol_type = other DNA
aagaggaagggggccccaagtgagaggaaagtgtctgggtatgaataggagagcattgagaatatgatggaaaatgtgtc

SEQ ID NO: 47597 - DNA, 80 bp, synthetic construct
  source 1..80: mol_type = other DNA
agagtggggcatgtcccacctcatgcctttatgattttacccaagtgaaaacaaattcacttttctaggtacctcttagc

SEQ ID NO: 47598 - DNA, 80 bp, synthetic construct
  source 1..80: mol_type = other DNA
aatgtgacagccactggccagcagcagactgtgttctattgtccatcctggtcttaatcttctattcaaatgtatttctc

SEQ ID NO: 47599 - DNA, 80 bp, synthetic construct; identical to SEQ ID NO: 12677
  source 1..80: mol_type = other DNA

SEQ ID NO: 47600 - DNA, 80 bp, synthetic construct
  source 1..80: mol_type = other DNA
tcaaccacccttggggatgcgtactcctattatcccattttatagactagaaaactggaagcagagacataagtaacttg

SEQ ID NO: 47601 - DNA, 80 bp, synthetic construct
  source 1..80: mol_type = other DNA
caacctccacctcccgggttcaagcaattctcctgcctcagcctcctgagtagctgggattacaggcatgtgccaccatg

SEQ ID NO: 47602 - DNA, 80 bp, synthetic construct
  source 1..80: mol_type = other DNA
ttctccaacctttagctctttatggcctgtctcttatttttctttatctttaaaaattgaggtgtaattcttaccaataa

SEQ ID NO: 47603 - DNA, 80 bp, synthetic construct; identical to SEQ ID NO: 12678
  source 1..80: mol_type = other DNA

SEQ ID NO: 47604 - DNA, 80 bp, synthetic construct
  source 1..80: mol_type = other DNA
caagttggagttggctactcctgtttggtttcgattaatttgcaggagtggctgactgaactcagggaaacacctttact

SEQ ID NO: 47605 - DNA, 80 bp, synthetic construct
  source 1..80: mol_type = other DNA
ggtatacctgattaaaccatggccactggtaatcaacttaaccttcagtcccctctcctccctggaggttaagggttaag

SEQ ID NO: 47606 - DNA, 80 bp, synthetic construct
  source 1..80: mol_type = other DNA
ttaatacagttgggagaaaggttaaaagttaaattacacttaaaaataaaaagaacagccgggcgcagttctgtaacctc

SEQ ID NO: 47607 - DNA, 80 bp, synthetic construct
  source 1..80: mol_type = other DNA
gaattgcttgaacctgggaggcagaggttgcagtgagccgagatcgtgctactgcactccagcctgggtagcagagaaag

SEQ ID NO: 47608 - DNA, 80 bp, synthetic construct; identical to SEQ ID NO: 12679
  source 1..80: mol_type = other DNA

SEQ ID NO: 47609 - DNA, 80 bp, synthetic construct
  source 1..80: mol_type = other DNA
ggctcactgcagcttctgtctacccagagatagagctgggttcaagtgatcctctcgctttggcctcccaaagtactagg

SEQ ID NO: 47610 - DNA, 80 bp, synthetic construct
  source 1..80: mol_type = other DNA
ggttgatttacacaataaaagattccctactcttagctgactctgttcccaggtacaggatgcaaatttaccttgtcttg

SEQ ID NO: 47611 - DNA, 80 bp, synthetic construct
  source 1..80: mol_type = other DNA
ccaccatgcccagacttatcttgtcttgaaagttgagcagcatagatccctaccaaggtacaagtatactaattaggaag

SEQ ID NO: 47612 - DNA, 80 bp, synthetic construct
  source 1..80: mol_type = other DNA
agttaactactaatatatatatttttctcttttagaaggatctttctttaccctgacaaatagaggcatttataacctcc

SEQ ID NO: 47613 - DNA, 80 bp, synthetic construct; identical to SEQ ID NO: 12680
  source 1..80: mol_type = other DNA

SEQ ID NO: 47614 - DNA, 80 bp, synthetic construct
  source 1..80: mol_type = other DNA
atgggtcaggatgggcttctctgaggtctccaagggattggccatagagatggtcatgatcaaaatcaagaaaagaacca

SEQ ID NO: 47615 - DNA, 80 bp, synthetic construct
  source 1..80: mol_type = other DNA
atgatcaagctcagaacaatttctctttgatctctcaacacacaagtcagaactctttaggctttggctttctatcgttt

SEQ ID NO: 47616 - DNA, 80 bp, synthetic construct
  source 1..80: mol_type = other DNA
gtaacttcaaactctacaaactgagtagatcagaaaatcctgttagactcactcagtgccctccagttcttcatctttgg

SEQ ID NO: 47617 - DNA, 80 bp, synthetic construct
  source 1..80: mol_type = other DNA
attattgcatgcttattaagtgccaaacactatgctagtgcctgtaaatacatcaccatttatttctcaaaacaatccaa

SEQ ID NO: 47618 - DNA, 80 bp, synthetic construct; identical to SEQ ID NO: 12681
  source 1..80: mol_type = other DNA

SEQ ID NO: 47619 - DNA, 80 bp, synthetic construct
  source 1..80: mol_type = other DNA
agaggagggtagagggagtatcccttgagaaataaattgtaaccacaacaaccaacaataccttacttacatggtttgta

SEQ ID NO: 47620 - DNA, 80 bp, synthetic construct
  source 1..80: mol_type = other DNA
ataataataaaataatcctcaaatggtaatgtctccatatgcttggaaaaaacatgcaaattctctgtgaaagatcgtag

SEQ ID NO: 47621 - DNA, 80 bp, synthetic construct
  source 1..80: mol_type = other DNA
aagtgaaaacagacaccctgagtgaaaaccagcaaggaagaaaacaaaaccaaaaagctagacagcagtatcagatcctc

SEQ ID NO: 47622 - DNA, 80 bp, synthetic construct
  source 1..80: mol_type = other DNA
caatgtgaaatcagcacatcgtggagaatggggtatctatcccctcaagcatttatcctttgagttacaaaaaatccaat

SEQ ID NO: 47623 - DNA, 80 bp, synthetic construct; identical to SEQ ID NO: 12682
  source 1..80: mol_type = other DNA

SEQ ID NO: 47624 - DNA, 80 bp, synthetic construct
  source 1..80: mol_type = other DNA
gtaccacgttttcttttcttttcttttcttttttttttttttttttccgagatggagacttgctctgtcatccaggctgg

SEQ ID NO: 47625 - DNA, 80 bp, synthetic construct
  source 1..80: mol_type = other DNA
atttttgtatttttagtggagatggggtttcaccatgctggccaggctggtctcgaactcctgacatcatgatctgccca

SEQ ID NO: 47626 - DNA, 80 bp, synthetic construct
  source 1..80: mol_type = other DNA
ctacctcagcttctcgagtagctgggattacaggcgcccgtcaccacactgggctaatttttgtatttttagtggagatg

SEQ ID NO: 47627 - DNA, 80 bp, synthetic construct; identical to SEQ ID NO: 12683
  source 1..80: mol_type = other DNA

SEQ ID NO: 47628 - DNA, 80 bp, synthetic construct
  source 1..80: mol_type = other DNA
tgtgactgcgttcaggctgagggtgtgtaagcagacaacaataattttttttttacaataatctttcatgaagttaacaa

SEQ ID NO: 47629 - DNA, 80 bp, synthetic construct
  source 1..80: mol_type = other DNA
taggctctgataagtatgcgcgctacaattttcagagtaccctctaaaaggtgaaatttggacttgaatccaggatctca

SEQ ID NO: 47630 - DNA, 80 bp, synthetic construct
  source 1..80: mol_type = other DNA
aggcagactcacttctgagcctttcccagcacaccgctgaccctttctgtttctccagctcactcattcagagctccttc

SEQ ID NO: 47631 - DNA, 80 bp, synthetic construct; identical to SEQ ID NO: 12684
  source 1..80: mol_type = other DNA

SEQ ID NO: 47632 - DNA, 80 bp, synthetic construct
  source 1..80: mol_type = other DNA
cattccttctttccagcttcctctctctcgctatatgatctgtgcaaaccggctccccttctccttcggccacgagtgga

SEQ ID NO: 47633 - DNA, 80 bp, synthetic construct
  source 1..80: mol_type = other DNA
gcaacaccaatggactatgacagaaaatacagactgtatattggaaccccatcagcctggtcacagatgccatctcagac

SEQ ID NO: 47634 - DNA, 80 bp, synthetic construct
  source 1..80: mol_type = other DNA
gcactgtgtctctccctaaggtgtgtactctcctgagagacgcttccttggaactgatgctaaggcacatcagaaggatc

SEQ ID NO: 47635 - DNA, 80 bp, synthetic construct; identical to SEQ ID NO: 12685
  source 1..80: mol_type = other DNA

SEQ ID NO: 47636 - DNA, 80 bp, synthetic construct
  source 1..80: mol_type = other DNA
ttcatgctaaagcaggcccacaggacttcctgaccagaaaacaaattcttgagctgcaacaggtttctaacccgatccct

SEQ ID NO: 47637 - DNA, 80 bp, synthetic construct
  source 1..80: mol_type = other DNA
tcgttctctcacctgcctgtagttggcagactgtcaggtcaactgccccacccctcctcagaccatatgaagctataaag

SEQ ID NO: 47638 - DNA, 80 bp, synthetic construct
  source 1..80: mol_type = other DNA
tcaccttcaagtcccctttctcaagaatcctctgttctttgccctctaaagtcttggtacatctaggacccaggcatctt

SEQ ID NO: 47639 - DNA, 80 bp, synthetic construct
  source 1..80: mol_type = other DNA
gctttccagccacaaagagacagatgaagatgcagaaaggaaatgttctccttatgtttggtctactattgcatttagaa

SEQ ID NO: 47640 - DNA, 80 bp, synthetic construct; identical to SEQ ID NO: 12686
  source 1..80: mol_type = other DNA

SEQ ID NO: 47641 - DNA, 80 bp, synthetic construct
  source 1..80: mol_type = other DNA
atcccagcactttgggagggtgaggcaggcaggtcattgaggtcagaagttcaagaccagcctagctaacgtggcaaaac

SEQ ID NO: 47642 - DNA, 80 bp, synthetic construct
  source 1..80: mol_type = other DNA
tgagactctgtctcaaaaaaataaaataataaaataaggccaggctcagtggctcacgcctgtaatctcagcactttggg

SEQ ID NO: 47643 - DNA, 80 bp, synthetic construct
  source 1..80: mol_type = other DNA
acgtgggaggcggatgttgcagtgagctgagattgctccactatactccagcctgggcggcagagcaagactccgtctca

SEQ ID NO: 47644 - DNA, 80 bp, synthetic construct; identical to SEQ ID NO: 12687
  source 1..80: mol_type = other DNA

SEQ ID NO: 47645 - DNA, 80 bp, synthetic construct
  source 1..80: mol_type = other DNA
cctgggccccatctcaaattctaattcatttagtctggaatgatttgcttaagaatattttcaacatgctcccttaagta

SEQ ID NO: 47646 - DNA, 80 bp, synthetic construct
  source 1..80: mol_type = other DNA
tgtggaaaaaggttagctaccagtgaaactagatgatgtaactctggcattgtgggtgggtggttgacttagcttagtct

SEQ ID NO: 47647 - DNA, 80 bp, synthetic construct
  source 1..80: mol_type = other DNA
ccgcaacctctgcctcccgggttcaagtgattctcctgcctcagcctcccgagtagctggaattaatgcccggctaattt

SEQ ID NO: 47648 - DNA, 80 bp, synthetic construct; identical to SEQ ID NO: 12688
  source 1..80: mol_type = other DNA

SEQ ID NO: 47649 - DNA, 80 bp, synthetic construct
  source 1..80: mol_type = other DNA
ggagccagcacagccaccaactctgggtccagtgtgacctccagtggggtcagcacagccaccatctcagggtccagcgt

SEQ ID NO: 47650 - DNA, 80 bp, synthetic construct
  source 1..80: mol_type = other DNA
accaactctgagtccagcacaccctccagtggggccagcacagccaccaactctgactccagcacaacctccagtggggc

SEQ ID NO: 47651 - DNA, 80 bp, synthetic construct
  source 1..80: mol_type = other DNA
agcacaacctccagtggggccagcacagccaccaactctgagtccagaacgacctccaatggggctggcacagccaccaa

SEQ ID NO: 47652 - DNA, 80 bp, synthetic construct; identical to SEQ ID NO: 12689
  source 1..80: mol_type = other DNA

SEQ ID NO: 47653 - DNA, 80 bp, synthetic construct
  source 1..80: mol_type = other DNA
accaactctgggtccagcacgacctccagtgggaccagcacagccaccaactctgagtccagcacagtgtccagtggggc

SEQ ID NO: 47654 - DNA, 80 bp, synthetic construct
  source 1..80: mol_type = other DNA
agtgtgacctctgcaggctctggaacagcagctctgactggaatgcacacaacttcccatagtgcatctactgcagtgag

SEQ ID NO: 47655 - DNA, 80 bp, synthetic construct
  source 1..80: mol_type = other DNA
ggaaatgggtgtgaatagaaggggtctcaagtcaggggtgggtagggaggaagggagatcaggaaagagtaacacagaga

SEQ ID NO: 47656 - DNA, 80 bp, synthetic construct; identical to SEQ ID NO: 12690
  source 1..80: mol_type = other DNA

SEQ ID NO: 47657 - DNA, 80 bp, synthetic construct
  source 1..80: mol_type = other DNA
gcattcttcaggaaggaagagacctgggcacccaagacctggtttcctttcattcatcccaggagacccctcccagcttt

SEQ ID NO: 47658 - DNA, 80 bp, synthetic construct
  source 1..80: mol_type = other DNA
ctagctctgagatgaactcagttataggagaaaacctccatgctggactccatctggcattcaaaatctccacagtaaaa

SEQ ID NO: 47659 - DNA, 80 bp, synthetic construct
  source 1..80: mol_type = other DNA
gcctgtggtacacagagattaggttgtgatacatgaagagccaagagcaggatgaggtggaggcgttacaactacctgct

SEQ ID NO: 47660 - DNA, 80 bp, synthetic construct; identical to SEQ ID NO: 12691
  source 1..80: mol_type = other DNA

SEQ ID NO: 47661 - DNA, 80 bp, synthetic construct
  source 1..80: mol_type = other DNA
ttcaccccaactcacagcagtagaaactgctccatcttccaccacttattgggtttctccagtgtcagcaaaccaaagaa

SEQ ID NO: 47662 - DNA, 80 bp, synthetic construct
  source 1..80: mol_type = other DNA
atcctcctgcctcagcctcctgagtagctgggactacagtttcgtgtgccaccatgcctggctaatttttagaatttttt

SEQ ID NO: 47663 - DNA, 80 bp, synthetic construct
  source 1..80: mol_type = other DNA
agatgtccaatgtctgactcctgcataccaaggtgttctgtatcaagggctttaaaacaatgcctgtagcgtaattaacc

SEQ ID NO: 47664 - DNA, 80 bp, synthetic construct
  source 1..80: mol_type = other DNA
agagggagtgtgggaatccaccatcttgtggccacctcagacatcacttctctttggaagactccattaaatatttctct

SEQ ID NO: 47665 - DNA, 80 bp, synthetic construct; identical to SEQ ID NO: 12692
  source 1..80: mol_type = other DNA

SEQ ID NO: 47666 - DNA, 80 bp, synthetic construct
  source 1..80: mol_type = other DNA
tgaagatccggctagcagcagaagccaaaattaaatgtctagagaaggaattgcaactagaaaaagacgtgtacctctcc

SEQ ID NO: 47667 - DNA, 80 bp, synthetic construct
  source 1..80: mol_type = other DNA
atccctgggattgttatgaagaggaagactgatgacatagaagtcacaggtgtggagggggatggggatcattggcaagc

SEQ ID NO: 47668 - DNA, 80 bp, synthetic construct
  source 1..80: mol_type = other DNA
tggtctgattgtgggacacaggggctgatgatatttccttaacaggagaagcagaaaaaatgagtaacatcaccacccat

SEQ ID NO: 47669 - DNA, 80 bp, synthetic construct; identical to SEQ ID NO: 12693
  source 1..80: mol_type = other DNA

SEQ ID NO: 47670 - DNA, 80 bp, synthetic construct
  source 1..80: mol_type = other DNA
ttgagatcgggagttcgagaccagcctggacaatatggtgaaaccccatctctactaaaaatacaaaaattagctaggtg

SEQ ID NO: 47671 - DNA, 80 bp, synthetic construct
  source 1..80: mol_type = other DNA
gaccccgtctcaaaaaaaaaaaaaaaaaaaaaaaaaaagggctgggcacggtggctcatgcctgtaatcccagcactttg

SEQ ID NO: 47672 - DNA, 80 bp, synthetic construct
  source 1..80: mol_type = other DNA
aacgtgggaggcggaggttgcagtgagccgagatcgtgccattgcactccagcctgagcaacaacagcgaaacttcgtct

SEQ ID NO: 47673 - DNA, 80 bp, synthetic construct; identical to SEQ ID NO: 12694
  source 1..80: mol_type = other DNA

SEQ ID NO: 47674 - DNA, 80 bp, synthetic construct
  source 1..80: mol_type = other DNA
tccatgctgggcccaagattagcagtgggaccaaggtcaaccccacgttgcaggtgaccagaggccccatattgagctca

SEQ ID NO: 47675 - DNA, 80 bp, synthetic construct
  source 1..80: mol_type = other DNA
atacatctaggtattggggaagctcccctgccccatatgtggtgtttatttttcttattccagaaaacattttaggcaca

SEQ ID NO: 47676 - DNA, 80 bp, synthetic construct
  source 1..80: mol_type = other DNA
agggagatttggcagggtcataggacaataatggagggaaggtcagcagataaacaagtgaacaaaggtctctggttttc

SEQ ID NO: 47677 - DNA, 80 bp, synthetic construct; identical to SEQ ID NO: 12695
  source 1..80: mol_type = other DNA

SEQ ID NO: 47678 - DNA, 80 bp, synthetic construct
  source 1..80: mol_type = other DNA
acggggtggtggcctggcagaggggctcctcacttcccagtagtggcggccagtcagaggcgcccctcacctcccggacg

SEQ ID NO: 47679 - DNA, 80 bp, synthetic construct
  source 1..80: mol_type = other DNA
tctcagacggggcggttgccaggcagagggtctcctcacttctcagacggggcggccgggcagagacgctcctcacctcc

SEQ ID NO: 47680 - DNA, 80 bp, synthetic construct
  source 1..80: mol_type = other DNA
tgggatggcggccgggctgagacgctcctcactttccagactgggcagccaggcagaggggctcctcacatcccagacga

SEQ ID NO: 47681 - DNA, 80 bp, synthetic construct
  source 1..80: mol_type = other DNA
cactgagtgaacgagactcccgtctgcaatcccggcacctcgggaggccgaggctggcggatcactcgcggttaggagct

SEQ ID NO: 47682 - DNA, 80 bp, synthetic construct; identical to SEQ ID NO: 12696
  source 1..80: mol_type = other DNA

SEQ ID NO: 47683 - DNA, 80 bp, synthetic construct
  source 1..80: mol_type = other DNA
gttcgggggttcatatgcaggtttgttacataagtaaatgtgtgtcatgggggtttttttgtacaggttatttcgtcacc

SEQ ID NO: 47684 - DNA, 80 bp, synthetic construct
  source 1..80: mol_type = other DNA
ttttctgttcctgcattagtttgctaagaataatggcctccagctccatccatgtccctgcaaaggacatgatgttgttc

SEQ ID NO: 47685 - DNA, 80 bp, synthetic construct
  source 1..80: mol_type = other DNA
tttgctcttgttgccgaggctagagtgcaatggtgcgatctcagctcactgcaacctctgcctcccgggatcaagcgatt

SEQ ID NO: 47686 - DNA, 80 bp, synthetic construct; identical to SEQ ID NO: 12697
  source 1..80: mol_type = other DNA

SEQ ID NO: 47687 - DNA, 80 bp, synthetic construct
  source 1..80: mol_type = other DNA
gactttttaataatagctgttctgactggcgtgagatgatatcttattgtgggtttttgtttgtttgttttgagatggag

SEQ ID NO: 47688 - DNA, 80 bp, synthetic construct
  source 1..80: mol_type = other DNA
caggctggagtgcaatggcacaatatcattgtggttttgatatgcgtttctctaataatcaatgatgtttagctttttaa

SEQ ID NO: 47689 - DNA, 80 bp, synthetic construct
  source 1..80: mol_type = other DNA
attttctcccattctgtaggttgtctgtttactctgttgatagtttcttttgctgtgcagaagctctttcgtttagttaa

SEQ ID NO: 47690 - DNA, 80 bp, synthetic construct
  source 1..80: mol_type = other DNA
ttttgtgtaaggtgtaaagaaggggtccagtttgaattgtttgcatatggctagcctgttatcccagcaccgtttattga

SEQ ID NO: 47691 - DNA, 80 bp, synthetic construct; identical to SEQ ID NO: 12698
  source 1..80: mol_type = other DNA

SEQ ID NO: 47692 - DNA, 80 bp, synthetic construct
  source 1..80: mol_type = other DNA
tacaggcacctgccaccatgcccagctaacttttgtatttttagtagagatggggtttcaccatattggccaggctggtc

SEQ ID NO: 47693 - DNA, 80 bp, synthetic construct
  source 1..80: mol_type = other DNA
gtcaactccagaaacagtcaaagaaatccaaacatttgtgggtcttttgggttattggagagtatgcatcccatacttag

SEQ ID NO: 47694 - DNA, 80 bp, synthetic construct
  source 1..80: mol_type = other DNA
ggtcttttgggttattggagagtatgcatcccatacttagcacagtttttgagatccctatacagacttatcagagaaag

SEQ ID NO: 47695 - DNA, 80 bp, synthetic construct
  source 1..80: mol_type = other DNA
agtctagggaatcagtccttttaagaaaggagccaaaaccagatactctcctgttgaacaagaagtgctagtagtagaga

SEQ ID NO: 47696 - DNA, 80 bp, synthetic construct; identical to SEQ ID NO: 12699
  source 1..80: mol_type = other DNA

SEQ ID NO: 47697 - DNA, 80 bp, synthetic construct
  source 1..80: mol_type = other DNA
aactgatacaatctggtttgatacaggtgggcatcagaggagccactgggatgagttgcaagcagcctggttaatagtca

SEQ ID NO: 47698 - DNA, 80 bp, synthetic construct
  source 1..80: mol_type = other DNA
cttgtggctgatttaactgtatttcaggtgactgcacataaaaaccactcagttccacaaaacatggaagctaaaaccct

SEQ ID NO: 47699 - DNA, 80 bp, synthetic construct
  source 1..80: mol_type = other DNA
cttaaaatgtagtgaccaggctgggcacggtggctcatgcctgtaatcccagcactttgggaggccgaggcgggcaaatc

SEQ ID NO: 47700 - DNA, 80 bp, synthetic construct
  source 1..80: mol_type = other DNA
gtgagccgagatcacgccattgcactccagccagggcaataagagcaaaactccgtctcaaaaaaaaaaaaaaaaaaaaa

SEQ ID NO: 47701 - DNA, 80 bp, synthetic construct; identical to SEQ ID NO: 12700
  source 1..80: mol_type = other DNA

SEQ ID NO: 47702 - DNA, 80 bp, synthetic construct
  source 1..80: mol_type = other DNA
ataagcaagctaatcaagccagtactattaaaggcttagaggctctcagtactatgtatggatatatctggcacattgac

SEQ ID NO: 47703 - DNA, 80 bp, synthetic construct
  source 1..80: mol_type = other DNA
aaacctaccttgcataggcagatgaatgtgttatctccaacctttatttctttaaattcagccaaagcagggacgcctgc

SEQ ID NO: 47704 - DNA, 80 bp, synthetic construct
  source 1..80: mol_type = other DNA
gcttggaacgacaaatagccccaggctggataggctatttcctgctagagagtgacaacaccctaaataaagaacaaaac

SEQ ID NO: 47705 - DNA, 80 bp, synthetic construct; identical to SEQ ID NO: 12701
  source 1..80: mol_type = other DNA

SEQ ID NO: 47706 - DNA, 80 bp, synthetic construct
  source 1..80: mol_type = other DNA
gatctgttttttattggtatgattgtttggcctccatttgtcttcctcatccggttattgaagatattatctggcatata

SEQ ID NO: 47707 - DNA, 80 bp, synthetic construct
  source 1..80: mol_type = other DNA
agttacttgggaggctgaggcaggaaaattgcttgaacctgggaggtggaggttacagtgagccaagaccgtgctactgc

SEQ ID NO: 47708 - DNA, 80 bp, synthetic construct
  source 1..80: mol_type = other DNA
ccaggctttacatatactcacgctgcacaacggggcacttgtgcaattggaaaaactgctgtgtttatattcctgatgaa

SEQ ID NO: 47709 - DNA, 80 bp, synthetic construct; identical to SEQ ID NO: 12702
  source 1..80: mol_type = other DNA

SEQ ID NO: 47710 - DNA, 80 bp, synthetic construct
  source 1..80: mol_type = other DNA
ggagtgtaggaatacagcctgttgcacggcaacagggacgccattttgaagcaaagctgccattgagaggtgacagggtg

SEQ ID NO: 47711 - DNA, 80 bp, synthetic construct; identical to SEQ ID NO: 12703
  source 1..80: mol_type = other DNA

SEQ ID NO: 47712 - DNA, 80 bp, synthetic construct
  source 1..80: mol_type = other DNA
gcttgggacctgcagcccgccatgcctgagcctcccaccccctccatgggctcctatgcggcccgagcctccccgacgag

SEQ ID NO: 47713 - DNA, 80 bp, synthetic construct
  source 1..80: mol_type = other DNA
aacctttatgtctagctcagggattgtaaatacaccaatccgcactctgtatctagctcaaggtttgtaaacacaccaat

SEQ ID NO: 47714 - DNA, 80 bp, synthetic construct
  source 1..80: mol_type = other DNA
cgcaccaatcagcaccctgtcaaaacagaccactcggctctaccaatcagcaggatgtgggtggggccagataagagaat

SEQ ID NO: 47715 - DNA, 80 bp, synthetic construct; identical to SEQ ID NO: 12704
  source 1..80: mol_type = other DNA

SEQ ID NO: 47716 - DNA, 80 bp, synthetic construct
  source 1..80: mol_type = other DNA
aatgcctgctgcataaataacccttcacaaacatgcttctttaacctccggagtggttatgggttttggcaagaaagtct

SEQ ID NO: 47717 - DNA, 80 bp, synthetic construct
  source 1..80: mol_type = other DNA
tcattcagcctttgttccataaaagggtcatacatgtaaagtggctcccaaacgctgaaggagccgagaaaccaaaaaca

SEQ ID NO: 47718 - DNA, 80 bp, synthetic construct
  source 1..80: mol_type = other DNA
taaaagcaacctttcagaacaggcaggaatgctatgtgcgtcgtagcctgtaatttatgccataatatcaaggttgcttt

SEQ ID NO: 47719 - DNA, 80 bp, synthetic construct; identical to SEQ ID NO: 12705
  source 1..80: mol_type = other DNA

SEQ ID NO: 47720 - DNA, 80 bp, synthetic construct
  source 1..80: mol_type = other DNA
aaaacgaagacaggatttacagtaagtacatgtccttaccaagaacagtaaataaagtaggaatgaggcccatgtgactc

SEQ ID NO: 47721 - DNA, 80 bp, synthetic construct
  source 1..80: mol_type = other DNA
tcatcatcatctgctcacttaaagggatccagaaaccagaagggaaagacaagttgaacaccctgaaaaggtgcctccca

SEQ ID NO: 47722 - DNA, 80 bp, synthetic construct
  source 1..80: mol_type = other DNA
tagtaatccggaagagcaagcgcgaaaaataactcaaacagacacaattatacaggaataaaaatcacccggcaaatata

SEQ ID NO: 47723 - DNA, 80 bp, synthetic construct; identical to SEQ ID NO: 12706
  source 1..80: mol_type = other DNA

SEQ ID NO: 47724 - DNA, 80 bp, synthetic construct
  source 1..80: mol_type = other DNA
aatgttggccaggctggtctcgaactcctgacctcaggtgatccacccaccttggactcccaaagtgctgggattacagg

SEQ ID NO: 47725 - DNA, 80 bp, synthetic construct
  source 1..80: mol_type = other DNA
ttctcctccctcagcctcccaagtagctgggattataggcgagtgccaccatgcctggctaatttttgtatttttagtag

SEQ ID NO: 47726 - DNA, 80 bp, synthetic construct
  source 1..80: mol_type = other DNA
atagctcaatacagctcttaaatttttaccaggcacattatgtaaataaaaatttttatttcctggccggacatggtggc

SEQ ID NO: 47727 - DNA, 80 bp, synthetic construct
  source 1..80: mol_type = other DNA
gaaggctgaggcaggagaatcacttgaacctgggaggtggacgttgcagtgagctgagatcatgtcactgcactctagcc

SEQ ID NO: 47728 - DNA, 80 bp, synthetic construct; identical to SEQ ID NO: 12707
  source 1..80: mol_type = other DNA

SEQ ID NO: 47729 - DNA, 80 bp, synthetic construct
  source 1..80: mol_type = other DNA
catcttgggcgtacataaagacttcctgaagagtattatgcaggcgtgggttgtttgatgggaaccattttccagatctt

SEQ ID NO: 47730 - DNA, 80 bp, synthetic construct
  source 1..80: mol_type = other DNA
ggtgtcaaataaagccttttagtgaagggatacctcaaaaaccacctctaatttagggatcatatacccagagtaggact

SEQ ID NO: 47731 - DNA, 80 bp, synthetic construct
  source 1..80: mol_type = other DNA
aacaatctcttctcttccatccactctttaaaaatgcatccctcttgagggagtatctcatgagattggagcaagagcag

SEQ ID NO: 47732 - DNA, 80 bp, synthetic construct; identical to SEQ ID NO: 12708
  source 1..80: mol_type = other DNA

SEQ ID NO: 47733 - DNA, 80 bp, synthetic construct
  source 1..80: mol_type = other DNA
aattccttaattcttctgggtctcagtttccatatttgtaaacatgagagtgaaaatagtacccacttcatggggttatt

SEQ ID NO: 47734 - DNA, 80 bp, synthetic construct
  source 1..80: mol_type = other DNA
agcctgaccaacatggtgaaaccccatctctactaaaaatacaaaaactagctggcgtggtggcaggcacctgtagtccc

SEQ ID NO: 47735 - DNA, 80 bp, synthetic construct
  source 1..80: mol_type = other DNA
ttttcttgaaaatatggaaagacgtatcataagagaagcatttttgcttaattcaccaaaaagttactgggggctataaa

SEQ ID NO: 47736 - DNA, 80 bp, synthetic construct; identical to SEQ ID NO: 12709
  source 1..80: mol_type = other DNA

SEQ ID NO: 47737 - DNA, 80 bp, synthetic construct
  source 1..80: mol_type = other DNA
gacgtcaacgaggtggggaggttgtgcttgcgtaggggcagggagtctatgggacctctgtacttaccacttaattttgc

SEQ ID NO: 47738 - DNA, 80 bp, synthetic construct
  source 1..80: mol_type = other DNA
gagcaggaggaaccatttaaaaacctagactattgaggaagagcttgcttatatgttattcaaaaggataatggaagcta

SEQ ID NO: 47739 - DNA, 80 bp, synthetic construct
  source 1..80: mol_type = other DNA
gatgctgctagtgtttagagtctactggaaacattttaaagagtagtaaaaacttttattatttcaatgtctacatttac

SEQ ID NO: 47740 - DNA, 80 bp, synthetic construct; identical to SEQ ID NO: 12710
  source 1..80: mol_type = other DNA

SEQ ID NO: 47741 - DNA, 80 bp, synthetic construct
  source 1..80: mol_type = other DNA
cattgagactccttgtgatgaaaataactctacttgaattgggggtaaactaaaattagaagggaaagcagaccccttgt

SEQ ID NO: 47742 - DNA, 80 bp, synthetic construct
  source 1..80: mol_type = other DNA
tttcaaatctatgctatgtttataaattgtgtactctacgtaattgccgggtccctggaattccctactctgtgcgaaac

SEQ ID NO: 47743 - DNA, 80 bp, synthetic construct
  source 1..80: mol_type = other DNA
actcattaattttcccgacatgtcccttatgatgactcgtccatctgtttttcaaattccacatagctgggcctctgtag

SEQ ID NO: 47744 - DNA, 80 bp, synthetic construct; identical to SEQ ID NO: 12711
  source 1..80: mol_type = other DNA

SEQ ID NO: 47745 - DNA, 80 bp, synthetic construct
  source 1..80: mol_type = other DNA
gccagtaggaggcataaattccccctcagaggacgtgcaggaaagaagtggaggggagagcccttgaaatggggggaaaa

SEQ ID NO: 47746 - DNA, 80 bp, synthetic construct
  source 1..80: mol_type = other DNA
tctgcctcccgggttcaagcaattctcctgcctcagcctcccaagtagctgggattacaggcacccgccactacgcccag

SEQ ID NO: 47747 - DNA, 80 bp, synthetic construct
  source 1..80: mol_type = other DNA
ccccaagcttactgaggtaaaatagacaaaaattatatgttttcagcgtgtacaatgtgttgatttgatgagtatacatt

SEQ ID NO: 47748 - DNA, 80 bp, synthetic construct; identical to SEQ ID NO: 12712
  source 1..80: mol_type = other DNA

SEQ ID NO: 47749 - DNA, 80 bp, synthetic construct
  source 1..80: mol_type = other DNA
ccaccgcacccggccaattgttgaatcttaacacatgcatacactcacctacccgctttccagatcaagatgtgccacat

SEQ ID NO: 47750 - DNA, 80 bp, synthetic construct
  source 1..80: mol_type = other DNA
agaaaatgaaatttcatcaccaatatttggcaagcttatacccgtatcctcatttccaaccccaggcttccctgccattg

SEQ ID NO: 47751 - DNA, 80 bp, synthetic construct
  source 1..80: mol_type = other DNA
agagccattgccaaagattgactcagggaaatgggtagttccgtgccccatcctcttccctactcacttccgcttgatac

SEQ ID NO: 47752 - DNA, 80 bp, synthetic construct; identical to SEQ ID NO: 12713
  source 1..80: mol_type = other DNA

SEQ ID NO: 47753 - DNA, 80 bp, synthetic construct
  source 1..80: mol_type = other DNA
aaacaggtttcaggtcagctctggttcaaagggtgggtcccttccactccgacaagtttgatcccctcattctgcctccc

SEQ ID NO: 47754 - DNA, 80 bp, synthetic construct
  source 1..80: mol_type = other DNA
tactcagtatcagctataaatgccacagacacgtttgcgaggaaaaaagaagaaaaataagaagccaaactgtggagcaa

SEQ ID NO: 47755 - DNA, 80 bp, synthetic construct
  source 1..80: mol_type = other DNA
atctaaatgacaacttctatgtgcatcatttagagatgagaagaggaaatatctctcctgctttctggttcctgtggctg

SEQ ID NO: 47756 - DNA, 80 bp, synthetic construct
  source 1..80: mol_type = other DNA
cccatttctgcaaaagccagtactgatcccaattccactgaccatgattctgatgctgtcttagaagcaaatctgtatta

SEQ ID NO: 47757 - DNA, 80 bp, synthetic construct; identical to SEQ ID NO: 12714
  source 1..80: mol_type = other DNA

SEQ ID NO: 47758 - DNA, 80 bp, synthetic construct
  source 1..80: mol_type = other DNA
tccttcctccctagtgcccaaagtccactgtatcattctcatgcgtttgagtcctcacagcttagctcccacctatcagt

SEQ ID NO: 47759 - DNA, 80 bp, synthetic construct
  source 1..80: mol_type = other DNA
tccatcgtatatatatgccagtttctttatccaccgttgattgatgggcatttgggttccatgactttgcaattgtgaat

SEQ ID NO: 47760 - DNA, 80 bp, synthetic construct
  source 1..80: mol_type = other DNA
tacattcccactagcagtgtagaagtgttccctgatcactgcatctacgccaacatctactgttttttgattttttgctt

SEQ ID NO: 47761 - DNA, 80 bp, synthetic construct; identical to SEQ ID NO: 12715
  source 1..80: mol_type = other DNA

SEQ ID NO: 47762 - DNA, 80 bp, synthetic construct
  source 1..80: mol_type = other DNA
ggttgaaagagaaggtataggttggatgatgtggaggatttggagtgcttcccccttcttcctcagtatgcatctgtttc

SEQ ID NO: 47763 - DNA, 80 bp, synthetic construct
  source 1..80: mol_type = other DNA
gtcctatctgtctgattttaaacaagagtccccttacctcagaagaaactgtcattcatgtagtcattcaacaaacattt

SEQ ID NO: 47764 - DNA, 80 bp, synthetic construct
  source 1..80: mol_type = other DNA
aataatatttcctaacaaaagggagcaagtgtgcaagggctgaaaggcccctcctcttttcctaccactagatctataaa

SEQ ID NO: 47765 - DNA, 80 bp, synthetic construct
  source 1..80: mol_type = other DNA
ttccatcagcatccaaacaagctcagttctgtatgcacaagtatcatccaaggagacgattaaaaacttgggtttccagg

SEQ ID NO: 47766 - DNA, 80 bp, synthetic construct; identical to SEQ ID NO: 12716
  source 1..80: mol_type = other DNA

SEQ ID NO: 47767 - DNA, 80 bp, synthetic construct
  source 1..80: mol_type = other DNA
cctgagctcagacaatctacccaccttggcctcccaaagtgctgggattacgggtgtgagctaccgggcctggcccctca

SEQ ID NO: 47768 - DNA, 80 bp, synthetic construct
  source 1..80: mol_type = other DNA
tcccttgccccaattgcttcttattctgagtcctgcttcccagggttcctgttggcatttacgttcatactgcatttatc

SEQ ID NO: 47769 - DNA, 80 bp, synthetic construct
  source 1..80: mol_type = other DNA
aattctcttactaccattacttctttgttggttgaggttttttgggttttttttcctgctttgggcatgatttattgtct

SEQ ID NO: 47770 - DNA, 80 bp, synthetic construct; identical to SEQ ID NO: 12717
  source 1..80: mol_type = other DNA

SEQ ID NO: 47771 - DNA, 80 bp, synthetic construct
  source 1..80: mol_type = other DNA
acatgaggcaatctatcagtttcacttttttcccttgagcaatcccatttggaagcctctgtccaaccagagcaatccca

SEQ ID NO: 47772 - DNA, 80 bp, synthetic construct
  source 1..80: mol_type = other DNA
ttcctgagagagagagtttatggtgggaaattattttaaaaccttatgcactgttagggtaatgctaagctgctgtaaca

SEQ ID NO: 47773 - DNA, 80 bp, synthetic construct
  source 1..80: mol_type = other DNA
gaatatggttcttccgtcttcaacatatggtttccagtgtcatcatcatttcagcccaaggagagggaagaaaaacagta

SEQ ID NO: 47774 - DNA, 80 bp, synthetic construct
  source 1..80: mol_type = other DNA
agtcaggaggcagaagacaggagtgaaggaaagatttatgtctttccttttattgggtttctgtgggaaaggcaaggaaa

SEQ ID NO: 47775 - DNA, 80 bp, synthetic construct; identical to SEQ ID NO: 12718
  source 1..80: mol_type = other DNA

SEQ ID NO: 47776 - DNA, 80 bp, synthetic construct
  source 1..80: mol_type = other DNA
aagcagaaatcaaggaataggtatttactcttaaagaaatgaagtggaaattaatatgtattccttcccttcaggggcct

SEQ ID NO: 47777 - DNA, 80 bp, synthetic construct
  source 1..80: mol_type = other DNA
tagctggttatagaattctaggatggatatgatttttctcaggattttaaaggcgttgatccactattcctagattctag

SEQ ID NO: 47778 - DNA, 80 bp, synthetic construct
  source 1..80: mol_type = other DNA
ggattctttcattgtgttaggaatttgcacagtagaaagttgtatcagtcagttctgggaaattttattgcatttttttc

SEQ ID NO: 47779 - DNA, 80 bp, synthetic construct
  source 1..80: mol_type = other DNA
aactctgtcgttttatttttcttctggggagatttcctcagcttctaaagtcttcaaatccttctagtgaattttgaggt

SEQ ID NO: 47780 - DNA, 80 bp, synthetic construct; identical to SEQ ID NO: 12719
  source 1..80: mol_type = other DNA

SEQ ID NO: 47781 - DNA, 80 bp, synthetic construct
  source 1..80: mol_type = other DNA
ttagggtaatttagcagagacgtggcagtttagattgggaagatcctcaaaatgtcagtatctagtgttggctaatttct

SEQ ID NO: 47782 - DNA, 80 bp, synthetic construct
  source 1..80: mol_type = other DNA
aggtaatgtgggttttacatttcagggtgtaagcatttccttaattgcatagtttcagtaaaaccttttgagaggtgaca

SEQ ID NO: 47783 - DNA, 80 bp, synthetic construct
  source 1..80: mol_type = other DNA
gggagaggcacgggcgggaacccgggctgcctgcggcacttgcgggccagcactagttccaggtgggcgtggcctcgggg

SEQ ID NO: 47784 - DNA, 80 bp, synthetic construct; identical to SEQ ID NO: 12720
  source 1..80: mol_type = other DNA

SEQ ID NO: 47785 - DNA, 80 bp, synthetic construct
  source 1..80: mol_type = other DNA
tggggacttggagaacctttatgtctagctaagggattgtaaatacaccaatcagcactctgtgtctagctcaaggtttg

SEQ ID NO: 47786 - DNA, 80 bp, synthetic construct
  source 1..80: mol_type = other DNA
gggacttggagaatctttatgtctagctaagggattgtaaatacaccaatcagcaccctgtgtctcgctcaaggtttgta

SEQ ID NO: 47787 - DNA, 80 bp, synthetic construct
  source 1..80: mol_type = other DNA
ggcgctctgtaaaatggaccaatcagtaggatgtgggtgccaccagataagggaataaaagcaggctgccctgagccagc

SEQ ID NO: 47788 - DNA, 80 bp, synthetic construct; identical to SEQ ID NO: 12721
  source 1..80: mol_type = other DNA

SEQ ID NO: 47789 - DNA, 80 bp, synthetic construct
  source 1..80: mol_type = other DNA
aaaaggaagagaggtgtattcatccaagtgcttgagtggaaggagtgatctggagctgagagacagttcctagctacatt

SEQ ID NO: 47790 - DNA, 80 bp, synthetic construct
  source 1..80: mol_type = other DNA
tctctgttgtgttggagagttaccactcatctgcctattaccttcaaaaaaacaaaaatatctcctctgctgttatctct

SEQ ID NO: 47791 - DNA, 80 bp, synthetic construct
  source 1..80: mol_type = other DNA
tattgtctctgaatccaatggacatggcccaggccatatcttacttgatctctctgcaaaaatcaattcagttaactgcc

SEQ ID NO: 47792 - DNA, 80 bp, synthetic construct; identical to SEQ ID NO: 12722
  source 1..80: mol_type = other DNA

SEQ ID NO: 47793 - DNA, 80 bp, synthetic construct
  source 1..80: mol_type = other DNA
gcgtaagccccaaagctagaagttgttcttgacttcttttcgtgtcatccaccacatgcagcctttcaacacttcctatt

SEQ ID NO: 47794 - DNA, 80 bp, synthetic construct
  source 1..80: mol_type = other DNA
caattttgttttctactttctcttcccttcctgaatgattaagccccagatcattaggtgaggcagagcaaagcagatat

SEQ ID NO: 47795 - DNA, 80 bp, synthetic construct
  source 1..80: mol_type = other DNA
ggcaaaactctgtttctactagaaatacaaaaattagctgggtgtggtagcgcatgtctgtatttccagctactcaggag

SEQ ID NO: 47796 - DNA, 80 bp, synthetic construct; identical to SEQ ID NO: 12723
  source 1..80: mol_type = other DNA

SEQ ID NO: 47797 - DNA, 80 bp, synthetic construct
  source 1..80: mol_type = other DNA
accaaagtacaacgtaatcaaataactaaaaatcagtgataaaagggaaatcctagaatgagctagaaaagacacattgt

SEQ ID NO: 47798 - DNA, 80 bp, synthetic construct
  source 1..80: mol_type = other DNA
cacggagtaagaatattttcaatatgaagatgaaatgaaggcttttctagacaagcaaaaactggaagaccttgcctcct

SEQ ID NO: 47799 - DNA, 80 bp, synthetic construct
  source 1..80: mol_type = other DNA
cctcctctgcctgggctcccactttggcggcacttgaggagcccttcagcccaccgctgcactgtgggagtccctttctg

SEQ ID NO: 47800 - DNA, 80 bp, synthetic construct; identical to SEQ ID NO: 12724
  source 1..80: mol_type = other DNA

SEQ ID NO: 47801 - DNA, 80 bp, synthetic construct
  source 1..80: mol_type = other DNA
agtcccaccgaccgcccacgggctgaggactgtgagcgcatggcgtaggactggcaggcagctccacctgcggccccggg

SEQ ID NO: 47802 - DNA, 80 bp, synthetic construct; identical to SEQ ID NO: 12725
  source 1..80: mol_type = other DNA

SEQ ID NO: 47803 - DNA, 80 bp, synthetic construct
  source 1..80: mol_type = other DNA
gtaaacacaccaatcagcaccctgtgtttagctcaaagtttgtgagtgcaccaatcgacactctgtatctagctgctctg

SEQ ID NO: 47804 - DNA, 80 bp, synthetic construct
  source 1..80: mol_type = other DNA
ccagataagagaataaaagcaggctgcccgagccagcagtggcaacctgcttgggtcgttttccacactgtggaaacttt

SEQ ID NO: 47805 - DNA, 80 bp, synthetic construct
  source 1..80: mol_type = other DNA
cttaagagttgctaacactcactgtgaaggtttgcagcttcactcatgagccagcgagagcacaaacccaccagaaggaa

SEQ ID NO: 47806 - DNA, 80 bp, synthetic construct; identical to SEQ ID NO: 12726
  source 1..80: mol_type = other DNA

SEQ ID NO: 47807 - DNA, 80 bp, synthetic construct
  source 1..80: mol_type = other DNA
atgtaaaagttcttcaggaagaaaaaatttagatctatgcaaaaaagaatgaagtgtgctggaaatgataaatatatggg

SEQ ID NO: 47808 - DNA, 80 bp, synthetic construct
  source 1..80: mol_type = other DNA
aggaagaggaatgagctcactgggaggtagacagtgataaaggtgtatatcgtaaatcctagagcaaaggcacacaaata

SEQ ID NO: 47809 - DNA, 80 bp, synthetic construct
  source 1..80: mol_type = other DNA
aaaccctgtctctactaaaaatacaaaaattagctgggcgtggtggcgcatgcctgtggttccagctactcaggaggccg

SEQ ID NO: 47810 - DNA, 80 bp, synthetic construct; identical to SEQ ID NO: 12727
  source 1..80: mol_type = other DNA

SEQ ID NO: 47811 - DNA, 80 bp, synthetic construct
  source 1..80: mol_type = other DNA
atagttcggaggctgaggcaggaggatttcttgagcttagaaagtcaaggctgcagtcagccgtgattgtgccactgcat

SEQ ID NO: 47812 - DNA, 80 bp, synthetic construct
  source 1..80: mol_type = other DNA
agaaatacattttaactaactataactacaaatagggtaaacaataggataaaaataagaggaagaaagatacggccata

SEQ ID NO: 47813 - DNA, 80 bp, synthetic construct
  source 1..80: mol_type = other DNA
accagcctggatacaccttcttaatcaagtaatccaagagaacatcatcaatgatgggacacattgatattatctgtcac

SEQ ID NO: 47814 - DNA, 80 bp, synthetic construct; identical to SEQ ID NO: 12728
  source 1..80: mol_type = other DNA

SEQ ID NO: 47815 - DNA, 80 bp, synthetic construct
  source 1..80: mol_type = other DNA
atggttgcgtatgagaatatataaagtattgaaggataatgagacagattcagggaaaagggttctttgtgttatacttg

SEQ ID NO: 47816 - DNA, 80 bp, synthetic construct
  source 1..80: mol_type = other DNA
ttttgctaaactctgagtatacccctgtcagcaaaagaaatgtgggcttatgttcttgtaaagaagagtttagaatataa

SEQ ID NO: 47817 - DNA, 80 bp, synthetic construct
  source 1..80: mol_type = other DNA
cattaacaactcagggtatttgtacttatgctatcaatctgtgatgtccttctcctggcctttcaaattgctgccttctt

SEQ ID NO: 47818 - DNA, 80 bp, synthetic construct
  source 1..80: mol_type = other DNA
cctgaatagctgggattataggcatgcgccaccatgcctggctaattttgtatttttagtagagatggggtttctccata

SEQ ID NO: 47819 - DNA, 80 bp, synthetic construct; identical to SEQ ID NO: 12729
  source 1..80: mol_type = other DNA

SEQ ID NO: 47820 - DNA, 80 bp, synthetic construct
  source 1..80: mol_type = other DNA
gtaacactatactaaacctgcaaattcatctttaacccattcccaccaccttatttgttctccacctcaggctctgagaa

SEQ ID NO: 47821 - DNA, 80 bp, synthetic construct
  source 1..80: mol_type = other DNA
agactctaccacaggctctgagacaacctcagcctccaccatggcttctactgcagccttcaccacaggctctgagacca

SEQ ID NO: 47822 - DNA, 80 bp, synthetic construct
  source 1..80: mol_type = other DNA
agtccctgagactaccatggcctccagcacaacctccactgcaggctctgagaaaacgatggcctcctccataatttctg

SEQ ID NO: 47823 - DNA, 80 bp, synthetic construct; identical to SEQ ID NO: 12730
  source 1..80: mol_type = other DNA

SEQ ID NO: 47824 - DNA, 80 bp, synthetic construct
  source 1..80: mol_type = other DNA
caccatagtctctatttcaggttctgagatcaccaccacctctacggcaggatccgagaacaccacagtctctagtgcag

SEQ ID NO: 47825 - DNA, 80 bp, synthetic construct
  source 1..80: mol_type = other DNA
cgtcacctctactgcaggctctgagaccaccacagtctccaccgtgggctctgagaccaccacagcctatactgcagatt

SEQ ID NO: 47826 - DNA, 80 bp, synthetic construct
  source 1..80: mol_type = other DNA
aacagcctctactgcacattctgagacgactgcagcctccaccatgggctctgagaccaccaaagtctcaactgcaggct

SEQ ID NO: 47827 - DNA, 80 bp, synthetic construct; identical to SEQ ID NO: 12731
  source 1..80: mol_type = other DNA

SEQ ID NO: 47828 - DNA, 80 bp, synthetic construct
  source 1..80: mol_type = other DNA
agcctctactgaaggctctgagaccaccacagcttccactgaaggctctgaggccactacagtctccaccacaggctctg

SEQ ID NO: 47829 - DNA, 80 bp, synthetic construct
  source 1..80: mol_type = other DNA
agcttctactgaaggttctgagaccactacagtcactaccgcaggctctgagaccaaaacagcctatactacaggctctg

SEQ ID NO: 47830 - DNA, 80 bp, synthetic construct
  source 1..80: mol_type = other DNA
agtctccaccacaggctctgagaccactacagtttccaccacaggcttggagaccaccaccacttccactgaaggctctg

SEQ ID NO: 47831 - DNA, 80 bp, synthetic construct; identical to SEQ ID NO: 12732
  source 1..80: mol_type = other DNA

SEQ ID NO: 47832 - DNA, 80 bp, synthetic construct
  source 1..80: mol_type = other DNA
ctccatcacaggctctgagaccactaaagtttctaccacaggttcagagaccaccaccacttctactgaaggctctgaga

SEQ ID NO: 47833 - DNA, 80 bp, synthetic construct
  source 1..80: mol_type = other DNA
atccatcatgggctctgagaccactatggcctctaccataggctctgagaccaccaaggtctccactgcaagctctaaaa

SEQ ID NO: 47834 - DNA, 80 bp, synthetic construct
  source 1..80: mol_type = other DNA
agcctctactgaaggctctgagaccaccacagcctctactgaaagctctgagaccactacagccactaccataggctctg

SEQ ID NO: 47835 - DNA, 80 bp, synthetic construct; identical to SEQ ID NO: 12733
  source 1..80: mol_type = other DNA

SEQ ID NO: 47836 - DNA, 80 bp, synthetic construct
  source 1..80: mol_type = other DNA
agtctctaccacaggcactgagactaccatcacctctactgaaggttcagagaccactacagtcactactgcaggttctg

SEQ ID NO: 47837 - DNA, 80 bp, synthetic construct
  source 1..80: mol_type = other DNA
agcctctaccgcaggctctgagaccacaacagtctatatcacaggctctaagactaccaccgcctctactgaaggctctg

SEQ ID NO: 47838 - DNA, 80 bp, synthetic construct
  source 1..80: mol_type = other DNA
aggccaccacatcctctgctgcaggctctgaggccaccaccacctctactgaaggctctgagaccaccacagcctccact

SEQ ID NO: 47839 - DNA, 80 bp, synthetic construct; identical to SEQ ID NO: 12734
  source 1..80: mol_type = other DNA

SEQ ID NO: 47840 - DNA, 80 bp, synthetic construct
  source 1..80: mol_type = other DNA
accaccagctgttcacctgtttctatcatctctgccctggttcaagtcaagccagcacacagttagatataatttcctct

SEQ ID NO: 47841 - DNA, 80 bp, synthetic construct
  source 1..80: mol_type = other DNA
ctaaaaatacaaaaaattagctgggcgtggtggcgggcacctgtagtcccagctactcggaaggctgaggcaggagaatg

SEQ ID NO: 47842 - DNA, 80 bp, synthetic construct
  source 1..80: mol_type = other DNA
taattgcctctactctggtctcacctctttttttttaagtgcccaccacttccattgcaatcagaaccacaatatagtaa

SEQ ID NO: 47843 - DNA, 80 bp, synthetic construct
  source 1..80: mol_type = other DNA
ctctagaccagaggctggcagaccacatttcatgggtcaagtctcacctgttacctggttttgtaaagttttactggaac

SEQ ID NO: 47844 - DNA, 80 bp, synthetic construct; identical to SEQ ID NO: 12735
  source 1..80: mol_type = other DNA

SEQ ID NO: 47845 - DNA, 80 bp, synthetic construct
  source 1..80: mol_type = other DNA
ccaccgcctctgctgtgttgattcgtgctcacacctgtctgagcccaccctctcctatccctgtgagcagccttctccac

SEQ ID NO: 47846 - DNA, 80 bp, synthetic construct
  source 1..80: mol_type = other DNA
ccagtgatcacagtcacaaaagaagcagggcctgccgctttgtataccagcccacccacttatttgatctgctttgattt

SEQ ID NO: 47847 - DNA, 80 bp, synthetic construct
  source 1..80: mol_type = other DNA
tcttcccccaaagtccccaaagtccattgcatcattcttatgtcttcgtatttccatagcttagctcccacatatcagtg

SEQ ID NO: 47848 - DNA, 80 bp, synthetic construct; identical to SEQ ID NO: 12736
  source 1..80: mol_type = other DNA

SEQ ID NO: 47849 - DNA, 80 bp, synthetic construct
  source 1..80: mol_type = other DNA
tcaccctcctctggtctaagcacccccattcccctttaatcatctctgctacaaatgcatcatcttgtgtgacctgtttc

SEQ ID NO: 47850 - DNA, 80 bp, synthetic construct
  source 1..80: mol_type = other DNA
tgctgccagccatactgtgccaggaatagtcttaaacacctctggcctgggtacatccactatgggagcatcatctacca

SEQ ID NO: 47851 - DNA, 80 bp, synthetic construct
  source 1..80: mol_type = other DNA
tatcatcctcatttccctggctgcagttgtggctgctgttggattgtcagtaggactgagtttttgtctggtgagtaccc

SEQ ID NO: 47852 - DNA, 80 bp, synthetic construct; identical to SEQ ID NO: 12737
  source 1..80: mol_type = other DNA

SEQ ID NO: 47853 - DNA, 80 bp, synthetic construct
  source 1..80: mol_type = other DNA
ttgtctttactaaaaatacaaaaattagtcgagagtggtagcatggacctgtagtcccagctactttggaggctgaggca

SEQ ID NO: 47854 - DNA, 80 bp, synthetic construct
  source 1..80: mol_type = other DNA
aatgaggaagaaaggaagaaagcaagaaagagaaagaaaggaagaaagaaagaaagaaactgagagagaaagagaaagaa

SEQ ID NO: 47855 - DNA, 80 bp, synthetic construct
  source 1..80: mol_type = other DNA
tcccactccatctctgctctctggtcttgattgttctttgaatacatatttttcttacatcgatttcacatttattgatg

SEQ ID NO: 47856 - DNA, 80 bp, synthetic construct; identical to SEQ ID NO: 12738
  source 1..80: mol_type = other DNA

SEQ ID NO: 47857 - DNA, 80 bp, synthetic construct
  source 1..80: mol_type = other DNA
caatttgctgaggttctttgttttagaattctcagcctctctccgtatgtggactacataataaataccagcatctaaga

SEQ ID NO: 47858 - DNA, 80 bp, synthetic construct
  source 1..80: mol_type = other DNA
tttaatctggcctacaatcccgtggccatattatattcatcttacaagtaagggatctggagcttcatgatcttagctat

SEQ ID NO: 47859 - DNA, 80 bp, synthetic construct
  source 1..80: mol_type = other DNA
gaaagactgtctgtaaagtgagtctctgtgcctttcacataggggtatggatttacctttgtcttggaagtccaaaaaca

SEQ ID NO: 47860 - DNA, 80 bp, synthetic construct; identical to SEQ ID NO: 12739
  source 1..80: mol_type = other DNA

SEQ ID NO: 47861 - DNA, 80 bp, synthetic construct
  source 1..80: mol_type = other DNA
gcactggttcatggaggagaacttgaaatgggacatggaggaacacacggctttggatatggagtgggccatggactgag

SEQ ID NO: 47862 - DNA, 80 bp, synthetic construct
  source 1..80: mol_type = other DNA
tgggtgggagggggtcatggaggagaaaaaaataatgatcatgaaataattaaaatggagcataggaagcttcccaggat

SEQ ID NO: 47863 - DNA, 80 bp, synthetic construct
  source 1..80: mol_type = other DNA
catcttctctcccatttcccgccacatcagggtcaacgtttctcatccctgtgtttcctcatggtgctataaatattacc

SEQ ID NO: 47864 - DNA, 80 bp, synthetic construct
  source 1..80: mol_type = other DNA
tttggctgggtgtggtggctcacgcctgtaatcccagcactttgggaggccaatgcgggtggatcacttgaggtcaggag

SEQ ID NO: 47865 - DNA, 80 bp, synthetic construct; identical to SEQ ID NO: 12740
  source 1..80: mol_type = other DNA

SEQ ID NO: 47866 - DNA, 80 bp, synthetic construct
  source 1..80: mol_type = other DNA
agtcaaagatgggagaagatattgcaacacatatagctaacaaacgactcatatccagaatgcagaaagagctacaataa

SEQ ID NO: 47867 - DNA, 80 bp, synthetic construct
  source 1..80: mol_type = other DNA
tgtaatgactagcatttgaaagactgccagtaccaagtattggaaaggacattgaacaactggaactctcacacattgtt

SEQ ID NO: 47868 - DNA, 80 bp, synthetic construct
  source 1..80: mol_type = other DNA
cataccactgcagggtggaaatttaaccccaaagtccactaacattagaacaggtaagtaaattgtgacatattcatgca

SEQ ID NO: 47869 - DNA, 80 bp, synthetic construct; identical to SEQ ID NO: 12741
  source 1..80: mol_type = other DNA

SEQ ID NO: 47870 - DNA, 80 bp, synthetic construct
  source 1..80: mol_type = other DNA
tatgtctcaatttgaaaaatgaaaaagatattctgaggctattttctcagcatattatgatttccttggtcagagaatgt

SEQ ID NO: 47871 - DNA, 80 bp, synthetic construct
  source 1..80: mol_type = other DNA
ctttaggttgaaataggtctgatataattaatctgccattctctctggagaatggtgccacataacggggccaacactga

SEQ ID NO: 47872 - DNA, 80 bp, synthetic construct
  source 1..80: mol_type = other DNA
aaagagattggctgacgtctgcagaatggatcgcttggtcaacctcatcatggaagatttcctctgtagtgaacgcccat

SEQ ID NO: 47873 - DNA, 80 bp, synthetic construct; identical to SEQ ID NO: 12742
  source 1..80: mol_type = other DNA

SEQ ID NO: 47874 - DNA, 80 bp, synthetic construct
  source 1..80: mol_type = other DNA
aatctttcctttctcagtcaactagacataggaaacccttcatgtgactgtgattatggagagagaggttaggaatgtag

SEQ ID NO: 47875 - DNA, 80 bp, synthetic construct
  source 1..80: mol_type = other DNA
aaagggcagctcatgtttcatgaaccctcgcatgctgaggacccaagattaagtcagatgctaggatgtggaagagggct

SEQ ID NO: 47876 - DNA, 80 bp, synthetic construct
  source 1..80: mol_type = other DNA
gaaagtggggaaatatgcgcagacggagcctagagatgaactttgagtaagatgttatttatgttcttttttttttgaga

SEQ ID NO: 47877 - DNA, 80 bp, synthetic construct
  source 1..80: mol_type = other DNA
ctacaggcgcctgccaccatgcctggctaattttcgtatctttagtagagccaggtttttaccttgttggtcaggctggt

SEQ ID NO: 47878 - DNA, 80 bp, synthetic construct; identical to SEQ ID NO: 12743
  source 1..80: mol_type = other DNA

SEQ ID NO: 47879 - DNA, 80 bp, synthetic construct
  source 1..80: mol_type = other DNA
aattaggtgagagtctgtggcaactcaagtcagctctctgttcaaccacctggatattttcacttatatagatcaagtaa

SEQ ID NO: 47880 - DNA, 80 bp, synthetic construct
  source 1..80: mol_type = other DNA
ctgaaatcaggaagctcatttcaatggtcagatcatccaccattgcatttagcaaagagctgctacagagcttttcaacg

SEQ ID NO: 47881 - DNA, 80 bp, synthetic construct
  source 1..80: mol_type = other DNA
atgaaatactgggatctcaactttatttagtgtaggccaccactaagtccacatttcaagcaaccgagagaactattagt

SEQ ID NO: 47882 - DNA, 80 bp, synthetic construct; identical to SEQ ID NO: 12744
  source 1..80: mol_type = other DNA

SEQ ID NO: 47883 - DNA, 80 bp, synthetic construct
  source 1..80: mol_type = other DNA
gtaggcagaataacagcccctcaaaaacatccacgtttcaattcccagaacctggaaatatgttactttatatggcaaaa

SEQ ID NO: 47884 - DNA, 80 bp, synthetic construct
  source 1..80: mol_type = other DNA
ggagggtagatcacgaggtcaggagttcgagaccagcctggtcaagatgatgaaaccctgtctctactaaaaatacaaaa

SEQ ID NO: 47885 - DNA, 80 bp, synthetic construct
  source 1..80: mol_type = other DNA
aaaaaaagagggagacaggagtcagagtcagagagatttgaagatgctgcgatgcaagctttgaagatggaagaaggggc

SEQ ID NO: 47886 - DNA, 80 bp, synthetic construct; identical to SEQ ID NO: 12745
  source 1..80: mol_type = other DNA

SEQ ID NO: 47887 - DNA, 80 bp, synthetic construct
  source 1..80: mol_type = other DNA
tttggaggttcaaagtttttcagactcatcaaaatctacccaggtgtctccactccaattctgggcttccgttaacaaat

SEQ ID NO: 47888 - DNA, 80 bp, synthetic construct
  source 1..80: mol_type = other DNA
gataagcatgtcttttagaatattcagagaaagctctgtgttcgctggcaatgccttgactgaggatgcagcagaggggt

SEQ ID NO: 47889 - DNA, 80 bp, synthetic construct
  source 1..80: mol_type = other DNA
ttctatcttttgctgtgtaatacaaagacttcattttatactagcatgaggtcgcccctgccctcaagcctaatgggtca

SEQ ID NO: 47890 - DNA, 80 bp, synthetic construct
  source 1..80: mol_type = other DNA
ataaaaggatttagtacaagaagtagatgtttataaaaccactcgaaaaggtggtgtgccgcccattgcttcccattcta

SEQ ID NO: 47891 - DNA, 80 bp, synthetic construct; identical to SEQ ID NO: 12746
  source 1..80: mol_type = other DNA

SEQ ID NO: 47892 - DNA, 80 bp, synthetic construct
  source 1..80: mol_type = other DNA
tatgggaacggggtaattggcttccagttccttcattcgcaggtcatgaaaaaaacctggggctagactccatgagagtt

SEQ ID NO: 47893 - DNA, 80 bp, synthetic construct
  source 1..80: mol_type = other DNA
ctacaggcgcccgccaccacgccctgctaattgttttgtatttttcgtagagacagggtttcactgtgttagccaggatg

SEQ ID NO: 47894 - DNA, 80 bp, synthetic construct
  source 1..80: mol_type = other DNA
ggcccttcctaatgggactaagtcatcctccaccctcacctaccttctggctgctgtaccctcctctctaagcttgggga

SEQ ID NO: 47895 - DNA, 80 bp, synthetic construct
  source 1..80: mol_type = other DNA
tctcagctcactgcaacctctgcctcctgggctcaagcgattctcccgcctcagcctcccaagcaactgggactacaggc

SEQ ID NO: 47896 - DNA, 80 bp, synthetic construct; identical to SEQ ID NO: 12747
  source 1..80: mol_type = other DNA

SEQ ID NO: 47897 - DNA, 80 bp, synthetic construct
  source 1..80: mol_type = other DNA
aggagccttcccttccagcctcacacaggcagactatctcaaaagaaagagaaagcaattttcccttgcatgctggctgt

SEQ ID NO: 47898 - DNA, 80 bp, synthetic construct
  source 1..80: mol_type = other DNA
ttgcccccattctcttcaaggcaggagggatgattattttgcttctttctctccaatgcaacccagcatctgtcctccgt

SEQ ID NO: 47899 - DNA, 80 bp, synthetic construct
  source 1..80: mol_type = other DNA
catctagcctctaattaaacacttcatgagacattgctgttccacactcacgcagatttaattctctctagaatctgccc

SEQ ID NO: 47900 - DNA, 80 bp, synthetic construct; identical to SEQ ID NO: 12748
  source 1..80: mol_type = other DNA

SEQ ID NO: 47901 - DNA, 80 bp, synthetic construct
  source 1..80: mol_type = other DNA
gaaagaagctcagtctcaccttaactctaactgatccaacaagaaagctgagccactttcctgaatcccagaagatctta

SEQ ID NO: 47902 - DNA, 80 bp, synthetic construct
  source 1..80: mol_type = other DNA
cctccaccttccaggctcaagcgattctcgtgcctcaacctcccgagtagctgggattacaggtgtgcaccaccatgctt

SEQ ID NO: 47903 - DNA, 80 bp, synthetic construct
  source 1..80: mol_type = other DNA
gaattacccgatgtagtaaaaatgcacatcatggtcccctcccaaaccgattccgcttgattatctgccccctagaggaa

SEQ ID NO: 47904 - DNA, 80 bp, synthetic construct; identical to SEQ ID NO: 12749
  source 1..80: mol_type = other DNA

SEQ ID NO: 47905 - DNA, 80 bp, synthetic construct
  source 1..80: mol_type = other DNA
gccactattattatcactagtattactcatagtagcggtagtggtgaacaaaaccaaatttccagtggagccaaccagcc

SEQ ID NO: 47906 - DNA, 80 bp, synthetic construct
  source 1..80: mol_type = other DNA
agtggaatcaccatgaccacccctccaggatcaaccacattatccagcagaatcaccgtgaccacgctccctggaccaac

SEQ ID NO: 47907 - DNA, 80 bp, synthetic construct
  source 1..80: mol_type = other DNA
catcctagtcactctggccttggttgcaatggctgtgattctcttcacagggctcttttatttcatgagtgcctgatgtg

SEQ ID NO: 47908 - DNA, 80 bp, synthetic construct; identical to SEQ ID NO: 12750
  source 1..80: mol_type = other DNA

SEQ ID NO: 47909 - DNA, 80 bp, synthetic construct
  source 1..80: mol_type = other DNA
tcccaaaccttggtccatgtcctcaaggatatcatggagtccaagatgggtcaagtgagactgaaacggattttagagac

SEQ ID NO: 47910 - DNA, 80 bp, synthetic construct
  source 1..80: mol_type = other DNA
cttctgtttagttctcccagacctgaaacaggaggctatcgctagtgctgaatgattaaataagtgcatctgctctatgt

SEQ ID NO: 47911 - DNA, 80 bp, synthetic construct
  source 1..80: mol_type = other DNA
agagaggtttcctatatcatgaggacactctttcgctgtgacctcccagttctcaaatcctagcatgaaatccagagacc

SEQ ID NO: 47912 - DNA, 80 bp, synthetic construct
  source 1..80: mol_type = other DNA
gcatggcaggaaaacagcctctgcgtgagcctagaacatgaactggaggaaagtgatcctgttttcatgttgtgaggtag

SEQ ID NO: 47913 - DNA, 80 bp, synthetic construct; identical to SEQ ID NO: 12751
  source 1..80: mol_type = other DNA

SEQ ID NO: 47914 - DNA, 80 bp, synthetic construct
  source 1..80: mol_type = other DNA
tgggtctttgggagagccttaacaggaccaagctgtttctctaagaacattttacaatatgatgaacaaaactgttttta

SEQ ID NO: 47915 - DNA, 80 bp, synthetic construct
  source 1..80: mol_type = other DNA
ctgtagtttcagctactcgggaagctgaggtgggaggattgcttgaacctgggaggcggaggttgcagtgagcagagatt

SEQ ID NO: 47916 - DNA, 80 bp, synthetic construct
  source 1..80: mol_type = other DNA
tctatggtggcagagatcagatctcctatgagggtgagggtttttaggaagggggcactttctgggtgataggaatgttt

SEQ ID NO: 47917 - DNA, 80 bp, synthetic construct; identical to SEQ ID NO: 12752
  source 1..80: mol_type = other DNA

SEQ ID NO: 47918 - DNA, 80 bp, synthetic construct
  source 1..80: mol_type = other DNA
agaaacctccactaactgaattcttaagatctgtgcatttcactttttgtaaattttacctcaataggaagaaaaaatgt

SEQ ID NO: 47919 - DNA, 80 bp, synthetic construct
  source 1..80: mol_type = other DNA
tttttcattcattcattcaccatatttactggacacctgcttggcatgaggtctcaaggagctggggcagctaggatgac

SEQ ID NO: 47920 - DNA, 80 bp, synthetic construct
  source 1..80: mol_type = other DNA
acatagaaggtgacatttggattttgaggagttagcaggcatttacgaggagcagaagaggaaatgccaggcaagcaagc

SEQ ID NO: 47921 - DNA, 80 bp, synthetic construct; identical to SEQ ID NO: 12753
  source 1..80: mol_type = other DNA

SEQ ID NO: 47922 - DNA, 80 bp, synthetic construct
  source 1..80: mol_type = other DNA
aaaactgtttgagcccaggagtttgagaccagcctgggcaacagagtgaggtcctgtctctacaaaaagttaaaaagatt

SEQ ID NO: 47923 - DNA, 80 bp, synthetic construct
  source 1..80: mol_type = other DNA
aaacgagaagaaatgtgaatttcaagagatttctgcctagcacttttttaaaaatccccaactccagaatttatggtgac

SEQ ID NO: 47924 - DNA, 80 bp, synthetic construct
  source 1..80: mol_type = other DNA
agagggagactggggaatgtcttcttgatttatagcatgttttctagttaagaaaatactcaagataaatatatttattt

SEQ ID NO: 47925 - DNA, 80 bp, synthetic construct; identical to SEQ ID NO: 12754
  source 1..80: mol_type = other DNA

SEQ ID NO: 47926 - DNA, 80 bp, synthetic construct
  source 1..80: mol_type = other DNA
atggaaattcagcaaatcaaccaggatgtggagggaaagatggaaagcagactctgacaaatgactcatgtaagcacagt

SEQ ID NO: 47927 - DNA, 80 bp, synthetic construct
  source 1..80: mol_type = other DNA
accccgcctctacaaaaagttaaaaaaattagctgggcatgatggtgtgcctgtagtcctagctgctcaggaggctagga

SEQ ID NO: 47928 - DNA, 80 bp, synthetic construct
  source 1..80: mol_type = other DNA
acactgtactgtagttggtaaatgtgtttctggcaagggtatgaattagcagttctgaaaccactatttgtttattaggg

SEQ ID NO: 47929 - DNA, 80 bp, synthetic construct; identical to SEQ ID NO: 12755
  source 1..80: mol_type = other DNA

SEQ ID NO: 47930 - DNA, 80 bp, synthetic construct
  source 1..80: mol_type = other DNA
tccaagaaattgaaaatccaaaacacttacggtctcaaacatttcagataagggattcaatctgtatatgcagacaggta

SEQ ID NO: 47931 - DNA, 80 bp, synthetic construct
  source 1..80: mol_type = other DNA
aagaggagccagagctctgtggagaaatagttgattccagggcctggatggacaaaataaaaaatgagcatgaagcatct

SEQ ID NO: 47932 - DNA, 80 bp, synthetic construct
  source 1..80: mol_type = other DNA
ctactaaaataatacagaattagttgggcatggtggtgcatgcctgtaatcccagctacttgggaggctgaggcaggaga

SEQ ID NO: 47933 - DNA, 80 bp, synthetic construct; identical to SEQ ID NO: 12756
  source 1..80: mol_type = other DNA

SEQ ID NO: 47934 - DNA, 80 bp, synthetic construct
  source 1..80: mol_type = other DNA
aatattgcaccactgcactctagcatgggcaacaaagtgagaccctgtctcaaaaaacaaaacaaaatagcaatggagat

SEQ ID NO: 47935 - DNA, 80 bp, synthetic construct
  source 1..80: mol_type = other DNA
aaaaaaaggatggaggacattaaaacggcactggagcccatctgaaagagctcccagtggccaaagtttgagcaacaaaa

SEQ ID NO: 47936 - DNA, 80 bp, synthetic construct
  source 1..80: mol_type = other DNA
caccattaggattacacacctgtaatcccgggtgctcgggaggctgaggcaggagaattacttgaacctgggaggggaag

SEQ ID NO: 47937 - DNA, 80 bp, synthetic construct; identical to SEQ ID NO: 12757
  source 1..80: mol_type = other DNA

SEQ ID NO: 47938 - DNA, 80 bp, synthetic construct
  source 1..80: mol_type = other DNA
tagttatactaaatacatacaaattcttttgagtgtgtttaaatactatgtttgaaaatgttgctgggtgatgtggctca

SEQ ID NO: 47939 - DNA, 80 bp, synthetic construct
  source 1..80: mol_type = other DNA
ggaggctgaggtggaaggatcacttgagcctgggagatcgaggctgcagtgagccgtgatagcaccactgcactccaacc

SEQ ID NO: 47940 - DNA, 80 bp, synthetic construct
  source 1..80: mol_type = other DNA
tactagtagttaacatagtcagttacatgtggtaaactagccattcattaaattgattttcaggaaatcagctgccttct

SEQ ID NO: 47941 - DNA, 80 bp, synthetic construct; identical to SEQ ID NO: 12758
  source 1..80: mol_type = other DNA

SEQ ID NO: 47942 - DNA, 80 bp, synthetic construct
  source 1..80: mol_type = other DNA
tccgcttttgcttctttctcattttctcttgccgccactgtgtaagaagtgccttttgtctccctccgtgattctgaggc

SEQ ID NO: 47943 - DNA, 80 bp, synthetic construct
  source 1..80: mol_type = other DNA
cgtgggctggagagaagccaaggaagaggatttgggtggatgattgagcaaagagtgaggttttaagagacagagagatt

SEQ ID NO: 47944 - DNA, 80 bp, synthetic construct
  source 1..80: mol_type = other DNA
tactgtggccacctgtgggaaggaaggccgaggccctccctgagcactgaaacaccgggtggaggatggttttcaactag

SEQ ID NO: 47945 - DNA, 80 bp, synthetic construct; identical to SEQ ID NO: 12759
  source 1..80: mol_type = other DNA

SEQ ID NO: 47946 - DNA, 80 bp, synthetic construct
  source 1..80: mol_type = other DNA
aggagttaattttggtgagaaggatgcaaaagtccccgggacctggagagatggagtcagggtccctggagaaggagcct

SEQ ID NO: 47947 - DNA, 80 bp, synthetic construct
  source 1..80: mol_type = other DNA
gattttgtgcattttatttaagtttctttgtttcaactttcctggagaaatgaaaaatttggcactcctctaatcccagc

SEQ ID NO: 47948 - DNA, 80 bp, synthetic construct
  source 1..80: mol_type = other DNA
gatcacttgaggccaggaggccaaggctgcattgagccatgattgtgctactgaactctagcctgaatcacagaacaaga

SEQ ID NO: 47949 - DNA, 80 bp, synthetic construct
  source 1..80: mol_type = other DNA
ctctagtaaaaatacaaaaattagctgggtctggtggcgcacgcctgtaatcccaaatacttgagaagctgaggcaggag

SEQ ID NO: 47950 - DNA, 80 bp, synthetic construct; identical to SEQ ID NO: 12760
  source 1..80: mol_type = other DNA

SEQ ID NO: 47951 - DNA, 80 bp, synthetic construct
  source 1..80: mol_type = other DNA
agaggactcatctcttctttgtacttatacctgactcagtgttgccctcagtccaactagatcacacccacacccctcat

SEQ ID NO: 47952 - DNA, 80 bp, synthetic construct
  source 1..80: mol_type = other DNA
agcatgacctgagtgtaatctctaacatgaatcacagcttctgcctcattggtttgccagaaccgcaggcacaaatggat

SEQ ID NO: 47953 - DNA, 80 bp, synthetic construct
  source 1..80: mol_type = other DNA
gcgtggctcagcaaagataatccatattgtagtgcaagaggattcttgtggaatatgttttaccagaattaaaccaaaaa

SEQ ID NO: 47954 - DNA, 80 bp, synthetic construct; identical to SEQ ID NO: 12761
  source 1..80: mol_type = other DNA

SEQ ID NO: 47955 - DNA, 80 bp, synthetic construct
  source 1..80: mol_type = other DNA
gggaccaccaaggattctgtcactgcagacccagggaccactcactgagaactttgtcactgcagacccagggaccacca

SEQ ID NO: 47956 - DNA, 80 bp, synthetic construct
  source 1..80: mol_type = other DNA
caccgaggactccgtcactgcagacccagggaccacagaagatgaaaccactaaacatggtgacactcaccttctgtgaa

SEQ ID NO: 47957 - DNA, 80 bp, synthetic construct
  source 1..80: mol_type = other DNA
gaggccaactgaggataagcggtgggcatggagagctgaggtacagaggcccaagaaatcgtcaggcgtgaggaagccta

SEQ ID NO: 47958 - DNA, 80 bp, synthetic construct; identical to SEQ ID NO: 12762
  source 1..80: mol_type = other DNA

SEQ ID NO: 47959 - DNA, 80 bp, synthetic construct
  source 1..80: mol_type = other DNA
agaagatttttttaaaaccaaaattgagtgggtttttatgagccaccactaccctgcaccaaagagacagtttgtaccag

SEQ ID NO: 47960 - DNA, 80 bp, synthetic construct
  source 1..80: mol_type = other DNA
gtggcccaaaccctccagagatggggccaattgggattccaaagaaagaagcccagatgtcagggtgatcaattcaaagc

SEQ ID NO: 47961 - DNA, 80 bp, synthetic construct
  source 1..80: mol_type = other DNA
gtttagggaatttgactcagggctggagccagtttctttcaacgttttgggcaacaacctagatacctttattagtgcct

SEQ ID NO: 47962 - DNA, 80 bp, synthetic construct
  source 1..80: mol_type = other DNA
acatttgatctaaaacccaagcctcctgcttctggcctgctgcttgagggggaagggctggtcctttttggccatcctga

SEQ ID NO: 47963 - DNA, 80 bp, synthetic construct; identical to SEQ ID NO: 12763
  source 1..80: mol_type = other DNA

SEQ ID NO: 47964 - DNA, 80 bp, synthetic construct
  source 1..80: mol_type = other DNA
ctgttaccataaacaattggatttctgatcatgtggatcaccatgaaaagttggacactcttgctctagaacaaaagatg

SEQ ID NO: 47965 - DNA, 80 bp, synthetic construct
  source 1..80: mol_type = other DNA
ttaaacctttaactcgaaaagttttaaaaataagaactatattaccattcctcccaagtttcatttgtcaaaatgctttt

SEQ ID NO: 47966 - DNA, 80 bp, synthetic construct
  source 1..80: mol_type = other DNA
ctggccaatatggtgaaaccccatctctactaaaactacaaaaaagttagccagccatagtggtgggcacctgtaatccc

SEQ ID NO: 47967 - DNA, 80 bp, synthetic construct; identical to SEQ ID NO: 12764
  source 1..80: mol_type = other DNA

SEQ ID NO: 47968 - DNA, 80 bp, synthetic construct
  source 1..80: mol_type = other DNA
actacagtacaccataaagaggaccccagcagtgactacagttggttctagaaaaaggagacccctcatccgcctctgca

SEQ ID NO: 47969 - DNA, 80 bp, synthetic construct
  source 1..80: mol_type = other DNA
gaccttggttacttcctctggacaatcgcctttacctatctaccaggttttgaggaattacacacagctcaggtataaga

SEQ ID NO: 47970 - DNA, 80 bp, synthetic construct
  source 1..80: mol_type = other DNA
agctcactgcaacctctgccccccaggttcaagtgattctcctgcctcagcctccctagtagctgggattacaggcgcat

SEQ ID NO: 47971 - DNA, 80 bp, synthetic construct; identical to SEQ ID NO: 12765
  source 1..80: mol_type = other DNA

SEQ ID NO: 47972 - DNA, 80 bp, synthetic construct
  source 1..80: mol_type = other DNA
atcgcggtgtgaaatgaggacacgaagtccagacctaacctctaagagaaaagccctgcctgatagaagaagagatttgt

SEQ ID NO: 47973 - DNA, 80 bp, synthetic construct
  source 1..80: mol_type = other DNA
ctgatgccactatgagcagcatcaccaccagtgttaaataatggaattgtagtattatgatacagagtcggaaacacgga

SEQ ID NO: 47974 - DNA, 80 bp, synthetic construct
  source 1..80: mol_type = other DNA
cgatcttggctcactgcaacctccacttcctgggttcaagcgattctccttcctcagcctccgagtagctgggattacag

SEQ ID NO: 47975 - DNA, 80 bp, synthetic construct; identical to SEQ ID NO: 12766
  source 1..80: mol_type = other DNA

SEQ ID NO: 47976 - DNA, 80 bp, synthetic construct
  source 1..80: mol_type = other DNA
ctagtttctcaaatctcatttgccacttgatgttttccttctttcatggatcgtctctgtacaagctctctcaagacctt

SEQ ID NO: 47977 - DNA, 80 bp, synthetic construct
  source 1..80: mol_type = other DNA
caggaaatgcttatattatggggattttcaagattattacctgaaggaaaacgtgacagaaacagctctagtctcccctt

SEQ ID NO: 47978 - DNA, 80 bp, synthetic construct
  source 1..80: mol_type = other DNA
gtgtcccttccagatgaaaaggccaaagctcatgaggagaaagccctttgccccttccccttcgttcctcttcctacctg

SEQ ID NO: 47979 - DNA, 80 bp, synthetic construct; identical to SEQ ID NO: 12767
  source 1..80: mol_type = other DNA

SEQ ID NO: 47980 - DNA, 80 bp, synthetic construct
  source 1..80: mol_type = other DNA
tggccaagggagaattttgtgattagagatacttgcatgaatatcagtttattgcaggaaaaaagagtgacagaagagtc

SEQ ID NO: 47981 - DNA, 80 bp, synthetic construct
  source 1..80: mol_type = other DNA
ccagaatctgccttggtcttcaagggggcagaacttttggtctcggtacaagctaggtttgtgcaataaacaaaggaatt

SEQ ID NO: 47982 - DNA, 80 bp, synthetic construct
  source 1..80: mol_type = other DNA
caaaagcatgcatgcaaaaacgctagcatatcaaaagcttttcttttctttcaatcaagttaatttctggccaggcagga

SEQ ID NO: 47983 - DNA, 80 bp, synthetic construct; identical to SEQ ID NO: 12768
  source 1..80: mol_type = other DNA

SEQ ID NO: 47984 - DNA, 80 bp, synthetic construct
  source 1..80: mol_type = other DNA
gcaacatagtgagacctcgtctctacaaaaaaattaaaaattagctgggtatggtagtgtatgcctgtagtcccagctac

SEQ ID NO: 47985 - DNA, 80 bp, synthetic construct
  source 1..80: mol_type = other DNA
gagggaaattcaatctcagtctttttgctgctctccaaagatcccagagttgtacataggattgaagcataaggaacatc

SEQ ID NO: 47986 - DNA, 80 bp, synthetic construct
  source 1..80: mol_type = other DNA
ccgtgaaggagagtatggttttggcatttgagagcccagagagatatacatgaagatctggtctctggagagtattgaag

SEQ ID NO: 47987 - DNA, 80 bp, synthetic construct; identical to SEQ ID NO: 12769
  source 1..80: mol_type = other DNA

SEQ ID NO: 47988 - DNA, 80 bp, synthetic construct
  source 1..80: mol_type = other DNA
tggggagtgtcacctctcattaaaacgtctgcgaatgcacactctggtccagtcccctgtctttctaaacaagaatgttt

SEQ ID NO: 47989 - DNA, 80 bp, synthetic construct
  source 1..80: mol_type = other DNA
tatggagctgacgacaatctgaacttatgcttatttacgtgttaacttatttgttttatgtctgtctccttccactagaa

SEQ ID NO: 47990 - DNA, 80 bp, synthetic construct
  source 1..80: mol_type = other DNA
ccagcactttgggaggctgaggcaggtggatcacttgacgtcaggagttggagaccagcctggccaacatagtgaaaccc

SEQ ID NO: 47991 - DNA, 80 bp, synthetic construct; identical to SEQ ID NO: 12770
  source 1..80: mol_type = other DNA

SEQ ID NO: 47992 - DNA, 80 bp, synthetic construct
  source 1..80: mol_type = other DNA
ctctttcttccttagtggggcataagtaatgctgcatcttgcattcaacgtcatcttagatgggatgaaatacacatttt

SEQ ID NO: 47993 - DNA, 80 bp, synthetic construct
  source 1..80: mol_type = other DNA
gcaacctccgcctcccaggctcaagcaattctcctgcctcagcctcctgagtagctgggactataggcgcgtgccaccac

SEQ ID NO: 47994 - DNA, 80 bp, synthetic construct
  source 1..80: mol_type = other DNA
gtctagtatggtgctgggaattcttttgggaacagaggcagccaaccaacagaagtgaatgacatagttcttaccctcaa

SEQ ID NO: 47995 - DNA, 80 bp, synthetic construct; identical to SEQ ID NO: 12771
  source 1..80: mol_type = other DNA

SEQ ID NO: 47996 - DNA, 80 bp, synthetic construct
  source 1..80: mol_type = other DNA
gatgaactgttctgcactgtctctacaaaaatcactcacaggtatgaacacttttatccttcagtcttctcttctttagg

SEQ ID NO: 47997 - DNA, 80 bp, synthetic construct
  source 1..80: mol_type = other DNA
acacagaaaaaacattcttgtgtgtgtgatggatggtagggaacgtgtcatcaattgtgacatttatggcatttatttgc

SEQ ID NO: 47998 - DNA, 80 bp, synthetic construct
  source 1..80: mol_type = other DNA
tattcgtgagtttccatacccagaagactttttcagcttctaccttctacccatgaaaggaggtggcatggatgtttcct

SEQ ID NO: 47999 - DNA, 80 bp, synthetic construct
  source 1..80: mol_type = other DNA
gccttccgcagtgtttgtgtccctgggtacttgagattagggagtggtgatgactcttaacgagcatgctgccttcaagc

SEQ ID NO: 48000 - DNA, 80 bp, synthetic construct; identical to SEQ ID NO: 12772
  source 1..80: mol_type = other DNA

SEQ ID NO: 48001 - DNA, 80 bp, synthetic construct
  source 1..80: mol_type = other DNA
tgcccccccacctccctccctgacggggcggctgccgggcggagatgctcctcacttcccagacggggcggctgccgggc

SEQ ID NO: 48002 - DNA, 80 bp, synthetic construct
  source 1..80: mol_type = other DNA
ctcctcacttcctagatgggatggcggccgggaagaggcgctcctcacttcccagactgggcggccaggcagaggggctc

SEQ ID NO: 48003 - DNA, 80 bp, synthetic construct
  source 1..80: mol_type = other DNA
cctgggcaacattgagcactgagtgattgagactccgtctgcaatcccagcacctcgggaggccgaggctggcagatcac

SEQ ID NO: 48004 - DNA, 80 bp, synthetic construct
  source 1..80: mol_type = other DNA
gatggtggcagtacagtccagcttcggctcggcatcagagggagaccgtggagagagagggagagggagagggagaggga

SEQ ID NO: 48005 - DNA, 80 bp, synthetic construct; identical to SEQ ID NO: 12773
  source 1..80: mol_type = other DNA

SEQ ID NO: 48006 - DNA, 80 bp, synthetic construct
  source 1..80: mol_type = other DNA
tgcctggcagaagcgaatgaatattgctgtcatgtacatgcaaacgttgtgaaatgcttcaatgttccacatcttctttg

SEQ ID NO: 48007 - DNA, 80 bp, synthetic construct
  source 1..80: mol_type = other DNA
ttagtattcactacttgtgcttagttgcttgcagtggatacccaatttgtgaagtgagctgaggtataatgcagtattgt

SEQ ID NO: 48008 - DNA, 80 bp, synthetic construct
  source 1..80: mol_type = other DNA
aaaacagataatcaggggaaatgcagtgacagtcaaagcaactatggaaacaatatccatggcaacaaatggcctggtcg

SEQ ID NO: 48009 - DNA, 80 bp, synthetic construct; identical to SEQ ID NO: 12774
  source 1..80: mol_type = other DNA

SEQ ID NO: 48010 - DNA, 80 bp, synthetic construct
  source 1..80: mol_type = other DNA
gacacgccattgattgtaagacgcatccctattcaagagatgataaatgggaaaataaatatatgtcttacaacctataa

SEQ ID NO: 48011 - DNA, 80 bp, synthetic construct
  source 1..80: mol_type = other DNA
atatatatatgtatatatatacacacacacatatatataaatgactttcagtgattcatttaacattttcagatacttgt

SEQ ID NO: 48012 - DNA, 80 bp, synthetic construct
  source 1..80: mol_type = other DNA
ggtttctgattatctttgtcacactgaatctgtgagtcagtgagtccgtgaccctaagtgagtttcagagtgaaaacaga

SEQ ID NO: 48013 - DNA, 80 bp, synthetic construct; identical to SEQ ID NO: 12775
  source 1..80: mol_type = other DNA

SEQ ID NO: 48014 - DNA, 80 bp, synthetic construct
  source 1..80: mol_type = other DNA
tcttctcacctcagcttcccaaatagctgggatcataggcatgcaccaccatgccctgctacgttttatttttatttttt

SEQ ID NO: 48015 - DNA, 80 bp, synthetic construct
  source 1..80: mol_type = other DNA
cctcatctttctttcatgtcactagatcaagaaagctccagagtttttcttgttcccttcaggtgtcaagcaatatcatt

SEQ ID NO: 48016 - DNA, 80 bp, synthetic construct
  source 1..80: mol_type = other DNA
acctcatggtaggagacaggctggttttctgccctgggagtgggagtgtaggaaaggaggaggcactggggacctgtatc

SEQ ID NO: 48017 - DNA, 80 bp, synthetic construct
  source 1..80: mol_type = other DNA
caggcctcagcagagagaagctgaagtgattactgcattcctatgagctgtgggaggaataaatcgtggaaagaaatcct

SEQ ID NO: 48018 - DNA, 80 bp, synthetic construct; identical to SEQ ID NO: 12776
  source 1..80: mol_type = other DNA

SEQ ID NO: 48019 - DNA, 80 bp, synthetic construct
  source 1..80: mol_type = other DNA
atattttcatcttggaatggggaaaactggctccactgagcaagttaaggacgtcatagactgatctgtagatgttcaat

SEQ ID NO: 48020 - DNA, 80 bp, synthetic construct
  source 1..80: mol_type = other DNA
agtttgagatcagcctggccaaagtggtgaaaccccatctctattaaaaatacaaaaattagccaggcgtggtggtgtgc

SEQ ID NO: 48021 - DNA, 80 bp, synthetic construct
  source 1..80: mol_type = other DNA
attcttgagacacatgcgatgcaagacaagtatttattgctaggatctcctcaggtaagctgtgcagtaagtctgtgctg

SEQ ID NO: 48022 - DNA, 80 bp, synthetic construct
  source 1..80: mol_type = other DNA
catgaagtgtggctagtccaaatacaaatgtgctcttaagtgcaagacacacatgagatttcaaagacttagtacaaaaa

SEQ ID NO: 48023 - DNA, 80 bp, synthetic construct; identical to SEQ ID NO: 12777
  source 1..80: mol_type = other DNA

SEQ ID NO: 48024 - DNA, 80 bp, synthetic construct
  source 1..80: mol_type = other DNA
gattgagtggggaaacttcctgctgtctttgaaccagaacaagaacagagttgggagcctgtattttgcatagtgaaggc

SEQ ID NO: 48025 - DNA, 80 bp, synthetic construct
  source 1..80: mol_type = other DNA
gaaatctgaaagcaccatgtctcatttccagttttaagtgtacctggaattctcttctgttatccctaggtctttagtgg

SEQ ID NO: 48026 - DNA, 80 bp, synthetic construct
  source 1..80: mol_type = other DNA
ttgtgtctcttagcctgtgacttcaatgcagtcatctcatttctgggaatctatccaattctcaattgtgtaaaaagctt

SEQ ID NO: 48027 - DNA, 80 bp, synthetic construct; identical to SEQ ID NO: 12778
  source 1..80: mol_type = other DNA

SEQ ID NO: 48028 - DNA, 80 bp, synthetic construct
  source 1..80: mol_type = other DNA
acagagatcacgccactttactccatcctgggtgacagaactagactgtctcaaaaataaataaataaataaatataagg

SEQ ID NO: 48029 - DNA, 80 bp, synthetic construct
  source 1..80: mol_type = other DNA
cagagaaacagaactaaaacctctctctctctgtctctctctctctctcatatagatgagaagacacactcaaaggagct

SEQ ID NO: 48030 - DNA, 80 bp, synthetic construct
  source 1..80: mol_type = other DNA
gatgtcagacccactcacatacgggagggtaatttgctttattcaaagtccatccatttaaatgttgatttcatctacaa

SEQ ID NO: 48031 - DNA, 80 bp, synthetic construct; identical to SEQ ID NO: 12779
  source 1..80: mol_type = other DNA

SEQ ID NO: 48032 - DNA, 80 bp, synthetic construct
  source 1..80: mol_type = other DNA
taataaatatttttaaaaattaactttcacaatgatctaaggcttactactttaggatttgcttttgaaatacttttctg

SEQ ID NO: 48033 - DNA, 80 bp, synthetic construct
  source 1..80: mol_type = other DNA
ccattattatgcatgtctgaatatgtcttcctttgctaaacatcaaacagagttttaggactgggattctagaaagtgag

SEQ ID NO: 48034 - DNA, 80 bp, synthetic construct
  source 1..80: mol_type = other DNA
gtttttcctgttttgttaaaattgcctaaaattttttagcaatacttcatttgattttctctaatggtttctgtcatttc

SEQ ID NO: 48035 - DNA, 80 bp, synthetic construct; identical to SEQ ID NO: 12780
  source 1..80: mol_type = other DNA

SEQ ID NO: 48036 - DNA, 80 bp, synthetic construct
  source 1..80: mol_type = other DNA
ctcggctcactgcaacctccggctcccgggttcaagtgattctcctgcctcagactctcaagcatctgggactccagtca

SEQ ID NO: 48037 - DNA, 80 bp, synthetic construct
  source 1..80: mol_type = other DNA
atttgttaagaactcatttgggcgggcaacaggtatacatcgcctcatgaaaactgagtcactcagcctgtgctcccacc

SEQ ID NO: 48038 - DNA, 80 bp, synthetic construct
  source 1..80: mol_type = other DNA
ctacgcaggcctggtccctaaccccatgttgttacagcaaaatataacccattcttatttcagaaaaagaaaaaaagcta

SEQ ID NO: 48039 - DNA, 80 bp, synthetic construct; identical to SEQ ID NO: 12781
  source 1..80: mol_type = other DNA

SEQ ID NO: 48040 - DNA, 80 bp, synthetic construct
  source 1..80: mol_type = other DNA
cagctccctgagtagctggggctacaagaacacgccaccatgcctggctaattttgttcgctttttgtagagatggagat

SEQ ID NO: 48041 - DNA, 80 bp, synthetic construct
  source 1..80: mol_type = other DNA
ttatttttatttatttatttttttgagacagggtctcattctgttgtccagactagagtgcagtggtgcaatcatggctt

SEQ ID NO: 48042 - DNA, 80 bp, synthetic construct
  source 1..80: mol_type = other DNA
tcaagttatcctcccacctcggtgtcccaaagtgctggtattacagatgtgagccaccatgtccagccttatttttaaaa

SEQ ID NO: 48043 - DNA, 80 bp, synthetic construct; identical to SEQ ID NO: 12782
  source 1..80: mol_type = other DNA

SEQ ID NO: 48044 - DNA, 80 bp, synthetic construct
  source 1..80: mol_type = other DNA
ctgggcagaggcaagccagagaaaacagagggaaatgaaaagaaagacttcctggtattcacttctacatactgccagct

SEQ ID NO: 48045 - DNA, 80 bp, synthetic construct
  source 1..80: mol_type = other DNA
gggttcaagtgattctcctgcctcagccttcctgagtagctgggattacaggcatgcaccactacggctggctaagtttt

SEQ ID NO: 48046 - DNA, 80 bp, synthetic construct
  source 1..80: mol_type = other DNA
attgaacacaaccatctctgctcccagcagaaatcccaccaaaatgtgataaaggggttttaaaaggcaaggactgacaa

SEQ ID NO: 48047 - DNA, 80 bp, synthetic construct; identical to SEQ ID NO: 12783
  source 1..80: mol_type = other DNA

SEQ ID NO: 48048 - DNA, 80 bp, synthetic construct
  source 1..80: mol_type = other DNA
tatattccaccctaatgagtggtttgctcgctggaggcgttgaaccatgccacatcctgggaaccacaatgaaaatcatt

SEQ ID NO: 48049 - DNA, 80 bp, synthetic construct
  source 1..80: mol_type = other DNA
atggccttctggctttatgtggccagaagaaaacaaaataaaataatttaaaaaatagaaaataagtaataataaaagaa

SEQ ID NO: 48050 - DNA, 80 bp, synthetic construct
  source 1..80: mol_type = other DNA
tggagaaactgaccagacaaggaaaaacacctaggaacacaggagtaagggggttctgacggatattaagctactgtcac

SEQ ID NO: 48051 - DNA, 80 bp, synthetic construct; identical to SEQ ID NO: 12784
  source 1..80: mol_type = other DNA

SEQ ID NO: 48052 - DNA, 80 bp, synthetic construct
  source 1..80: mol_type = other DNA
ctctgcggtatctcagtgctctttttgtctttttagatctcaatatgtggttaacaatcctttatataaaattacctctg

SEQ ID NO: 48053 - DNA, 80 bp, synthetic construct
  source 1..80: mol_type = other DNA
aaaatacaaaacttagctgggtgtggtggcaggtgcctgtaatcccactacttgggaggctgaggcaggagaatcatttg

SEQ ID NO: 48054 - DNA, 80 bp, synthetic construct
  source 1..80: mol_type = other DNA
tttggatttttttctttcacctgactagaccctaatacaagggtcttctggagaaacagttcagcccatttgcactatgg

SEQ ID NO: 48055 - DNA, 80 bp, synthetic construct
  source 1..80: mol_type = other DNA
cagagaaagtttattattagaaagaattattggctgtaacaggctaaaaagacgtgcagagaactccaaagaatgctgta

SEQ ID NO: 48056 - DNA, 80 bp, synthetic construct; identical to SEQ ID NO: 12785
  source 1..80: mol_type = other DNA

SEQ ID NO: 48057 - DNA, 80 bp, synthetic construct
  source 1..80: mol_type = other DNA
ctgccgcaggagcaacaagaatcacaaaccatagctcccggaaccagagataaaagaaattctttcctctggcagtgtcc

SEQ ID NO: 48058 - DNA, 80 bp, synthetic construct
  source 1..80: mol_type = other DNA
aactagtcattatgggatgaaaaccactgacatgaaagacaggtattgaaaacacaagaattaaggaatataaagccagg

SEQ ID NO: 48059 - DNA, 80 bp, synthetic construct
  source 1..80: mol_type = other DNA
agctgctcaggaggctgagatgggaggatcacttgagtccgggaggtcgaggcttcattgagctgtgattaagccattgc

SEQ ID NO: 48060 - DNA, 80 bp, synthetic construct; identical to SEQ ID NO: 12786
  source 1..80: mol_type = other DNA

SEQ ID NO: 48061 - DNA, 80 bp, synthetic construct
  source 1..80: mol_type = other DNA
cccagctacttgggaggctaaggcaggagaatcgcttgaacccgagagaggtggagattggagtgagccgagatagtgcc

SEQ ID NO: 48062 - DNA, 80 bp, synthetic construct
  source 1..80: mol_type = other DNA
aataattcaagaacttttctcagaactgagagatatggttccaaagtgagatagacctcaagtgtctaacagaagtgtct

SEQ ID NO: 48063 - DNA, 80 bp, synthetic construct
  source 1..80: mol_type = other DNA
tttttttttttttttttttttgagacaggatctcactctgtcacccaggctggagcgtagtgatacaatcatggatcact

SEQ ID NO: 48064 - DNA, 80 bp, synthetic construct; identical to SEQ ID NO: 12787
  source 1..80: mol_type = other DNA

SEQ ID NO: 48065 - DNA, 80 bp, synthetic construct
  source 1..80: mol_type = other DNA
cattttcagacaaaatttcaaaaattgccctcccttgcccctttccttaggaagttccatcaaagtaagggattagatca

SEQ ID NO: 48066 - DNA, 80 bp, synthetic construct
  source 1..80: mol_type = other DNA
gcgggtggatcacctgaggctaggagtttgagaccagcccggccaacatagtgaaaccccgtctctaccaaaaacacaca

SEQ ID NO: 48067 - DNA, 80 bp, synthetic construct
  source 1..80: mol_type = other DNA
gaaaaaaaaaaaaggcttggggccaaaacctcagggattaagaaaattcctttacctggttacagaaagatattaccaag

SEQ ID NO: 48068 - DNA, 80 bp, synthetic construct
  source 1..80: mol_type = other DNA
gatctgtataattctggatatcattccataaagcccagcttagaacctgtgccctcagcccttataaagatttcaaaagc

SEQ ID NO: 48069 - DNA, 80 bp, synthetic construct; identical to SEQ ID NO: 12788
  source 1..80: mol_type = other DNA

SEQ ID NO: 48070 - DNA, 80 bp, synthetic construct
  source 1..80: mol_type = other DNA
aaaaggccaggagcggtggctcacacctgtaatcccagcattttgggaggccaaggtgggtggatcacctgaggtcagga

SEQ ID NO: 48071 - DNA, 80 bp, synthetic construct
  source 1..80: mol_type = other DNA
aggatgacacacaaatttgtgaagggttccatttaaaaaaaaaaaaaagtctgagcgaggtggctcagtcctgtaatccc

SEQ ID NO: 48072 - DNA, 80 bp, synthetic construct
  source 1..80: mol_type = other DNA
ggcagcagaattgcttgaactcaggaggcggaggttgcagtgagctgagatcatgccattgcactccagcctgggcaaga

SEQ ID NO: 48073 - DNA, 80 bp, synthetic construct; identical to SEQ ID NO: 12789
  source 1..80: mol_type = other DNA

SEQ ID NO: 48074 - DNA, 80 bp, synthetic construct
  source 1..80: mol_type = other DNA
cttctctgctctgattcttcctatccctcagaaacccaaggcctccttagccaaacggagctgctgtggtcgcaaatagc

SEQ ID NO: 48075 - DNA, 80 bp, synthetic construct
  source 1..80: mol_type = other DNA
tcctagacttgccagatgtaggtcgagtcctcaaagatgagataaccaagatgcaaaatcctaaaatcctccattaagca

SEQ ID NO: 48076 - DNA, 80 bp, synthetic construct
  source 1..80: mol_type = other DNA
aggactcatgggacagggcaggctgccctgtctcttttttaggcagtcactgcaatcacacatgctcactaatccagttc

SEQ ID NO: 48077 - DNA, 80 bp, synthetic construct; identical to SEQ ID NO: 12790
  source 1..80: mol_type = other DNA

SEQ ID NO: 48078 - DNA, 80 bp, synthetic construct
  source 1..80: mol_type = other DNA
cggcctcggcctcccaaaatgctgggattacagacgtgagccaccaagcccatccataaggttatattttttaatgtcct

SEQ ID NO: 48079 - DNA, 80 bp, synthetic construct
  source 1..80: mol_type = other DNA
tgcatattttctcaatgcattgcagtaggtggatttggtacttgagaccctcaacaatctctttccgcatatcatgacta

SEQ ID NO: 48080 - DNA, 80 bp, synthetic construct
  source 1..80: mol_type = other DNA
ggatataagccctcagcagggaggagagcaaaaaggccagtgtggttggttattggagaagttatttggatagtttttaa

SEQ ID NO: 48081 - DNA, 80 bp, synthetic construct; identical to SEQ ID NO: 12791
  source 1..80: mol_type = other DNA

SEQ ID NO: 48082 - DNA, 80 bp, synthetic construct
  source 1..80: mol_type = other DNA
acctgctctatcattcccccaacttataggacaaaaagtccgagaagccaaagggatagacctacccatggaggttgcat

SEQ ID NO: 48083 - DNA, 80 bp, synthetic construct
  source 1..80: mol_type = other DNA
tggctgttttcagagaaggatatgggtctggagattttagggacttgaattttcaggaaaagaaagtagggcagatgcag

SEQ ID NO: 48084 - DNA, 80 bp, synthetic construct
  source 1..80: mol_type = other DNA
ctcagatagatttatctgcagaagttttattggggaacaatcttgggacaaacacctttaaaagctgagagaaacgggac

SEQ ID NO: 48085 - DNA, 80 bp, synthetic construct
  source 1..80: mol_type = other DNA
gtgggggaggattatctgaggtcagcagttcaagaccagcctagttaacatggtgaaaccccgtttctactaaaaataca

SEQ ID NO: 48086 - DNA, 80 bp, synthetic construct; identical to SEQ ID NO: 12792
  source 1..80: mol_type = other DNA

SEQ ID NO: 48087 - DNA, 80 bp, synthetic construct
  source 1..80: mol_type = other DNA
ggaataagtgacaatgttgaaggtaggatttgggtggcacacaacagtatctgctacactagccttcaagatcagtatga

SEQ ID NO: 48088 - DNA, 80 bp, synthetic construct
  source 1..80: mol_type = other DNA
tcagcctggactgctgaatagatgccctgtgatttatcttcagacatgactcagtggaaatgcagttgactccattctaa

SEQ ID NO: 48089 - DNA, 80 bp, synthetic construct
  source 1..80: mol_type = other DNA
ggttggaaaatagacaagacaaaggcaggcagatgtaagaggtattcaaaagcccagttgtgctctatttttgccttcca

SEQ ID NO: 48090 - DNA, 80 bp, synthetic construct; identical to SEQ ID NO: 12793
  source 1..80: mol_type = other DNA

SEQ ID NO: 48091 - DNA, 80 bp, synthetic construct
  source 1..80: mol_type = other DNA
ataactaataataaaggtaaaatttttgttggtcttaatgagagagaatttggaaagtggagataagcggggctttggag

SEQ ID NO: 48092 - DNA, 80 bp, synthetic construct
  source 1..80: mol_type = other DNA
attgttagtcacctaagaagttaagacaataagaaatcattcaaaaaataaaatggtggcaggacgaggtggctcacgcc

SEQ ID NO: 48093 - DNA, 80 bp, synthetic construct
  source 1..80: mol_type = other DNA
caataatgaaaatattacaaagtactattattcagccataaaaaagaaattacattctatttatttattttattttattt

SEQ ID NO: 48094 - DNA, 80 bp, synthetic construct; identical to SEQ ID NO: 12794
  source 1..80: mol_type = other DNA

SEQ ID NO: 48095 - DNA, 80 bp, synthetic construct
  source 1..80: mol_type = other DNA
tagatatttaaaatggggaaatctggtttgccagcacagcaggaaaaaaaataaataaaagtaaaatacaaaaatcatag

SEQ ID NO: 48096 - DNA, 80 bp, synthetic construct
  source 1..80: mol_type = other DNA
aagaaaataagtcgattagaggttaccaggggctgggcggaaaggagaatggggagttattgcttaatgggtaatgagtt

SEQ ID NO: 48097 - DNA, 80 bp, synthetic construct
  source 1..80: mol_type = other DNA
gaggatcacctgaggtcaggagttcaagaccagcctggccaacatggtgaaaccccatctgtactaaaaatacaaaaatt

SEQ ID NO: 48098 - DNA, 80 bp, synthetic construct; identical to SEQ ID NO: 12795
  source 1..80: mol_type = other DNA

SEQ ID NO: 48099 - DNA, 80 bp, synthetic construct
  source 1..80: mol_type = other DNA
tctgatgtaagtgaaatcatgcaatatttgtccttttgtttctggctcatttcattttgcataattttttttcaatattc

SEQ ID NO: 48100 - DNA, 80 bp, synthetic construct
  source 1..80: mol_type = other DNA
tcaggagtttgagaccaacctgggcaacatggcgaaaccctgtctgtactaaaaatacaaaaattagccgggcgtgttgg

SEQ ID NO: 48101 - DNA, 80 bp, synthetic construct
  source 1..80: mol_type = other DNA
taattaattatttttttaaattttttattttttgaggcgcagtttcagtcttgttgcccaggctggagtacaatggcatg

SEQ ID NO: 48102 - DNA, 80 bp, synthetic construct
  source 1..80: mol_type = other DNA
tcctgacctctggtgatctgcccacctcggcctcccaaagtgctgggattacaggtgtgagccactgcacctggctaaaa

SEQ ID NO: 48103 - DNA, 80 bp, synthetic construct; identical to SEQ ID NO: 12796
  source 1..80: mol_type = other DNA

SEQ ID NO: 48104 - DNA, 80 bp, synthetic construct
  source 1..80: mol_type = other DNA
attacaactaaggctgagcctggtggtgcctgcctgtaaccccacctactctggaggctgaggcaggaggattgcttgag

SEQ ID NO: 48105 - DNA, 80 bp, synthetic construct
  source 1..80: mol_type = other DNA
agctgcagtgagctatgagtgagaccccaaaatctctaagaaaaagaaagaaaaatacgaaggcaagtaaagagttagaa

SEQ ID NO: 48106 - DNA, 80 bp, synthetic construct
  source 1..80: mol_type = other DNA
ctagaagccaattcaaagagggaaacacaatcatcacatggcttccagtgtccaaagtctcagaagtagtgagacagcca

SEQ ID NO: 48107 - DNA, 80 bp, synthetic construct; identical to SEQ ID NO: 12797
  source 1..80: mol_type = other DNA

SEQ ID NO: 48108 - DNA, 80 bp, synthetic construct
  source 1..80: mol_type = other DNA
gtctcaaccacaccactaccataaatacaagttttcataggatttattcatttcttcggtgttcctgttacagctggtgg

SEQ ID NO: 48109 - DNA, 80 bp, synthetic construct
  source 1..80: mol_type = other DNA
ttccatcaaactgacagaagaagtctctctccacccatcttttgatatgtagagcatgactgtgagttcagtgttattat

SEQ ID NO: 48110 - DNA, 80 bp, synthetic construct
  source 1..80: mol_type = other DNA
gaaaattaagaaaataaaattaaaataggttacaacagaatactcatggccagaacatacctgtcttcatgttcccctgc

SEQ ID NO: 48111 - DNA, 80 bp, synthetic construct; identical to SEQ ID NO: 12798
  source 1..80: mol_type = other DNA

SEQ ID NO: 48112 - DNA, 80 bp, synthetic construct
  source 1..80: mol_type = other DNA
tctctgagccatattttcatcatttataaagctcataatgcctaccttggaaggatgtttggaattaaagtaagttagag

SEQ ID NO: 48113 - DNA, 80 bp, synthetic construct
  source 1..80: mol_type = other DNA
gtaatcccaacattttgggaggctgaggtgggctgatcacctgaagtcaggagttcaagaccagcctggccagcatggtg

SEQ ID NO: 48114 - DNA, 80 bp, synthetic construct
  source 1..80: mol_type = other DNA
agagcgagtctcaaaaaaaaaaaaaaaaaaaaaattagccgggggcgtattcccagctactcaggaggctaaggcaggag

SEQ ID NO: 48115 - DNA, 80 bp, synthetic construct
  source 1..80: mol_type = other DNA
gccagacacgatgctaagaatttcgtatacaaatatttggttgagtcatctcaacaagcctatcacatgggaactctgac

SEQ ID NO: 48116 - DNA, 80 bp, synthetic construct; identical to SEQ ID NO: 12799
  source 1..80: mol_type = other DNA

SEQ ID NO: 48117 - DNA, 80 bp, synthetic construct
  source 1..80: mol_type = other DNA
aaagtacaaagttgaaaagtcctgaaaagcttctaccaccaaggaataaccgccgaaataatatctcatcagaactttct

SEQ ID NO: 48118 - DNA, 80 bp, synthetic construct
  source 1..80: mol_type = other DNA
ttcagcccttccagtagtttaaaacatgcatctttagttctagtctaattcatgatttcccttacatctatttaaagtta

SEQ ID NO: 48119 - DNA, 80 bp, synthetic construct
  source 1..80: mol_type = other DNA
tctgcctctggggttcaagtgattctcgtgcctcagctttccgagtagctaggattacagttgcccgccactacgcccag

SEQ ID NO: 48120 - DNA, 80 bp, synthetic construct; identical to SEQ ID NO: 12800
  source 1..80: mol_type = other DNA

SEQ ID NO: 48121 - DNA, 80 bp, synthetic construct
  source 1..80: mol_type = other DNA
ggtgtctgcccagcagagagcaggagcaggggtgagggtgaggacaagagacagacagagcctggaggggcagtcagctg

SEQ ID NO: 48122 - DNA, 80 bp, synthetic construct
  source 1..80: mol_type = other DNA
catgaacatccccatatgagaaagaagggcataaacaggaaacaaatttaacaattaaataaaagcacctccctcatgca

SEQ ID NO: 48123 - DNA, 80 bp, synthetic construct
  source 1..80: mol_type = other DNA
agaaggctctgcagtgtcagcaccagcacccccaccccttggcccctctctgtggtcactttcttgggtcctgcagatgc

SEQ ID NO: 48124 - DNA, 80 bp, synthetic construct; identical to SEQ ID NO: 12801
  source 1..80: mol_type = other DNA

SEQ ID NO: 48125 - DNA, 80 bp, synthetic construct
  source 1..80: mol_type = other DNA
tcccttcattgtctctcagtgatgtggaaagttttcatgatgagtctaccctgctctctctaatgcaagtaggatacaac

SEQ ID NO: 48126 - DNA, 80 bp, synthetic construct
  source 1..80: mol_type = other DNA
atggtgaaaccctgtctctatttaaaaaaaaaaaaaaaaaaattagccaggcatggtggtgcacttgtagtcctagctac

SEQ ID NO: 48127 - DNA, 80 bp, synthetic construct
  source 1..80: mol_type = other DNA
tgtcactagctgtcatgtggaaccccaggacctagcctttggtttcaaatactgtttttcatttatagaaactaggaccc

SEQ ID NO: 48128 - DNA, 80 bp, synthetic construct
  source 1..80: mol_type = other DNA
cagagaaggaaagaatcaggacaggacttgaatgttctgttgttgccatagagcaaggatgacttcaagaatgtgaagga

SEQ ID NO: 48129 - DNA, 80 bp, synthetic construct; identical to SEQ ID NO: 12802
  source 1..80: mol_type = other DNA

SEQ ID NO: 48130 - DNA, 80 bp, synthetic construct
  source 1..80: mol_type = other DNA
ttcaaagagctcccattgttcaagttgacagtcgggcatgaaagaaagaagatgggaggaggaatgataattatggttaa

SEQ ID NO: 48131 - DNA, 80 bp, synthetic construct
  source 1..80: mol_type = other DNA
tgtgtctgtttataaagcaaagataggtgcttgcttttgtctgtgtaagcagaaaacccacagagaatgctgagaaagcc

SEQ ID NO: 48132 - DNA, 80 bp, synthetic construct
  source 1..80: mol_type = other DNA
ctgtttctctaaaataataactggtagcagctggcgccagggacaggcagatcccaatagatagaaaaaacctgaaactg

SEQ ID NO: 48133 - DNA, 80 bp, synthetic construct; identical to SEQ ID NO: 12803
  source 1..80: mol_type = other DNA

SEQ ID NO: 48134 - DNA, 80 bp, synthetic construct
  source 1..80: mol_type = other DNA
cctgagattaggagtttgagatcagcctggccaacatggtgaaaccccgtctctactaaaaatacaaaaattagccaggc

SEQ ID NO: 48135 - DNA, 80 bp, synthetic construct
  source 1..80: mol_type = other DNA
caaacaaaaaaagacccaagtcaaaagatcaaaccacatacttgatctctaaagtcgtccacttggccctcttccaaatg

SEQ ID NO: 48136 - DNA, 80 bp, synthetic construct
  source 1..80: mol_type = other DNA
ccctgctgtaaatatgaatgttagcagaaataagaacgtctgacatgagatgatgtcagaggcaataatgaaagagaagg

SEQ ID NO: 48137 - DNA, 80 bp, synthetic construct; identical to SEQ ID NO: 12804
  source 1..80: mol_type = other DNA

SEQ ID NO: 48138 - DNA, 80 bp, synthetic construct
  source 1..80: mol_type = other DNA
tcaaccttccgactagctgggattacaggcatgtgccaccacgcccggctaatttttgttttttcagtagagacagggtt

SEQ ID NO: 48139 - DNA, 80 bp, synthetic construct
  source 1..80: mol_type = other DNA
tttatgtaaaagatgtgtacctaactaaaagcagttatattcctcagtgagatataatttcacacccactaggctggcta

SEQ ID NO: 48140 - DNA, 80 bp, synthetic construct
  source 1..80: mol_type = other DNA
ggtacagcactttggaaaatagtctgaccattcctccaaaggttgaacatggagttactgtatgactcagcaatcctact

SEQ ID NO: 48141 - DNA, 80 bp, synthetic construct
  source 1..80: mol_type = other DNA
aataaaatgtgatatatacagccatacgctagaataaaaatgaatttgaaaataaaaagaaataaagtactgatatgtgc

SEQ ID NO: 48142 - DNA, 80 bp, synthetic construct; identical to SEQ ID NO: 12805
  source 1..80: mol_type = other DNA

SEQ ID NO: 48143 - DNA, 80 bp, synthetic construct
  source 1..80: mol_type = other DNA
caatcttggctcaccgcaaccttccgcctcctggcttcaagcaattctcctgcctcagcctcccaagtagctgggactat

SEQ ID NO: 48144 - DNA, 80 bp, synthetic construct
  source 1..80: mol_type = other DNA
attttattattttattaatgattttttaattttgtgtgtacgttgtaggtatatatgtttatggggtacatgagatattt

SEQ ID NO: 48145 - DNA, 80 bp, synthetic construct
  source 1..80: mol_type = other DNA
tatactcctaacactttgagaggccgaggcgggcggatcacctgaggtccggagtttgagactagcctggccaacatggt

SEQ ID NO: 48146 - DNA, 80 bp, synthetic construct; identical to SEQ ID NO: 12806
  source 1..80: mol_type = other DNA

SEQ ID NO: 48147 - DNA, 80 bp, synthetic construct
  source 1..80: mol_type = other DNA
tgtgatgtttgtctttctatgcctggcttatttcatctaacataatgacctccaattccatccatattgttgcaaatgac

SEQ ID NO: 48148 - DNA, 80 bp, synthetic construct
  source 1..80: mol_type = other DNA
tttagtctttctactttaagacaggagtagtttacctaccaccattaaattattatactattctgtgtttttctgtatac

SEQ ID NO: 48149 - DNA, 80 bp, synthetic construct
  source 1..80: mol_type = other DNA
tatgcttgaaggatattttcactggatatactattgtagggtaaaagtttttttccttcagcacttgaaatatgtcatgc

SEQ ID NO: 48150 - DNA, 80 bp, synthetic construct; identical to SEQ ID NO: 12807
  source 1..80: mol_type = other DNA

SEQ ID NO: 48151 - DNA, 80 bp, synthetic construct
  source 1..80: mol_type = other DNA
gtcttttctgaaagattaaaataaataaaattttaaaaaggctgggcacagtgggtcacacctgaaatccaagcactttg

SEQ ID NO: 48152 - DNA, 80 bp, synthetic construct
  source 1..80: mol_type = other DNA
gaacccaggagacggaggttgcagtgaactgaaattgtgccactgcactccagcctgggtaacagagtaagactctgtcc

SEQ ID NO: 48153 - DNA, 80 bp, synthetic construct
  source 1..80: mol_type = other DNA
ttaaatttatctgatagaattctgaattctttctctatgctatcttaattttttttttttggagatggagtctcactctg

SEQ ID NO: 48154 - DNA, 80 bp, synthetic construct
  source 1..80: mol_type = other DNA
caccatgttagccaggatggtctcgatcccgatctcgcgatccgccctcctcagcctcccaaagtgctgggatttcaggc

SEQ ID NO: 48155 - DNA, 80 bp, synthetic construct; identical to SEQ ID NO: 12808
  source 1..80: mol_type = other DNA

SEQ ID NO: 48156 - DNA, 80 bp, synthetic construct
  source 1..80: mol_type = other DNA
gagccacctggagctgggggtgtggtgacacaagcacccctgtggccgtcactgggactgcactgggtcagatctgaagc

SEQ ID NO: 48157 - DNA, 80 bp, synthetic construct
  source 1..80: mol_type = other DNA
acaccacaatacaaagtccctcccactcatccctcccctttccttaggcagaggagcctctccctatggcaaccaccacc

SEQ ID NO: 48158 - DNA, 80 bp, synthetic construct
  source 1..80: mol_type = other DNA
gaaacactgtctctactaaaaatacaaaaattagccaggtgtggtggtgggtgcctgtaagctcagcttcttgggaggct

SEQ ID NO: 48159 - DNA, 80 bp, synthetic construct; identical to SEQ ID NO: 12809
  source 1..80: mol_type = other DNA

SEQ ID NO: 48160 - DNA, 80 bp, synthetic construct
  source 1..80: mol_type = other DNA
tgggttactgctgaagacagcatgtctcagagtctcacccaaggcccacagtgtactacctggttattgctgctagttat

SEQ ID NO: 48161 - DNA, 80 bp, synthetic construct
  source 1..80: mol_type = other DNA
ctactgtggctgagctggtatccaagatgcaagaccaagtcctctttacccgttgctcatctctccttaagcagagggaa

SEQ ID NO: 48162 - DNA, 80 bp, synthetic construct
  source 1..80: mol_type = other DNA
agtccttgggtcctagactgccttttcttttttttcttttgtggaaatatggcctccttatgttgcccaggctggtctca

SEQ ID NO: 48163 - DNA, 80 bp, synthetic construct; identical to SEQ ID NO: 12810
  source 1..80: mol_type = other DNA

SEQ ID NO: 48164 - DNA, 80 bp, synthetic construct
  source 1..80: mol_type = other DNA
gccctcctcaatgtttcctttagtgatatgaagttaaatccagttactgtgattgctcacctgatttttggttcttgtga

SEQ ID NO: 48165 - DNA, 80 bp, synthetic construct
  source 1..80: mol_type = other DNA
ctataaaaatttaaaaattacccaggtgcagtggtgcaggcctgttgtcccagctacttggaaggctgaggtgggaggac

SEQ ID NO: 48166 - DNA, 80 bp, synthetic construct
  source 1..80: mol_type = other DNA
gcagtttgggaggccaaggtgggtggatgacctgtggtcaggagttcaaaaccagcctgaccaacatggtgaaaccccat

SEQ ID NO: 48167 - DNA, 80 bp, synthetic construct; identical to SEQ ID NO: 12811
  source 1..80: mol_type = other DNA

SEQ ID NO: 48168 - DNA, 80 bp, synthetic construct
  source 1..80: mol_type = other DNA
agctaatttgtatatttttagtagagacagggtttcaccatgttggtcagcctgttctcgaactcctgacctcaggtgat

SEQ ID NO: 48169 - DNA, 80 bp, synthetic construct
  source 1..80: mol_type = other DNA
gctgaggtgggtggatcacaaggtcaggagatcgagaccatcctggctaacacggtgaaaccccatctctactaaaaata

SEQ ID NO: 48170 - DNA, 80 bp, synthetic construct
  source 1..80: mol_type = other DNA
aaataaataaataaataaataaataaataaataaataaataaaatcaataatgtgttttaatcagtttggattattaaat

SEQ ID NO: 48171 - DNA, 80 bp, synthetic construct; identical to SEQ ID NO: 12812
  source 1..80: mol_type = other DNA

SEQ ID NO: 48172 - DNA, 80 bp, synthetic construct
  source 1..80: mol_type = other DNA
gggattatggtcctgagtagccagggagtgatttaagtacgggattcagagaaaggagggacagaggaagaggtgctaaa

SEQ ID NO: 48173 - DNA, 80 bp, synthetic construct
  source 1..80: mol_type = other DNA
gcacatgcctgtaatcccagctactcgggaggctgaggcaggggaatcgcttgaaccagggagtcggaggttgtggtaag

SEQ ID NO: 48174 - DNA, 80 bp, synthetic construct
  source 1..80: mol_type = other DNA
atttcacaacttgttgctaccacctttccacagtggggcttgtctagccagagaatcaaacattaattcactttaggctg

SEQ ID NO: 48175 - DNA, 80 bp, synthetic construct
  source 1..80: mol_type = other DNA
acaaacaaacaaaagagtaagcacgtcatacacatcatagaattctaagaactgaagtaaccttgtaacatttagttcat

SEQ ID NO: 48176 - DNA, 80 bp, synthetic construct; identical to SEQ ID NO: 12813
  source 1..80: mol_type = other DNA

SEQ ID NO: 48177 - DNA, 80 bp, synthetic construct
  source 1..80: mol_type = other DNA
tctaaggcaccttatcattatcttacctaaacttcctaataatcctgtgagggaggctggacatctgctttcatcccatg

SEQ ID NO: 48178 - DNA, 80 bp, synthetic construct
  source 1..80: mol_type = other DNA
acttccactaattaaccactaataaaaatgtaaaaatcagtatgccagcagtagtccctgttgcaaacattaggaccttt

SEQ ID NO: 48179 - DNA, 80 bp, synthetic construct
  source 1..80: mol_type = other DNA
aacctctacctcccaggttcaagcgattctcctacctcagtctcccgagtagctgggattacaggcgcccaccaccacac

SEQ ID NO: 48180 - DNA, 80 bp, synthetic construct; identical to SEQ ID NO: 12814
  source 1..80: mol_type = other DNA

SEQ ID NO: 48181 - DNA, 80 bp, synthetic construct
  source 1..80: mol_type = other DNA
atctcagctcactgcaacctccatctcccaagttcaagcaattcttatacctcagccttccctctagctgggattacagg

SEQ ID NO: 48182 - DNA, 80 bp, synthetic construct
  source 1..80: mol_type = other DNA
caagctaattttttaattactatttgtagagatgaggtctccctatgttgcccaggctggtctagaattcctgggctcaa

SEQ ID NO: 48183 - DNA, 80 bp, synthetic construct
  source 1..80: mol_type = other DNA
ccctgagccatcagcaccaagcatcagatgaacttcactgccctggctcagtgttgcctgtgtgtgagcctcagctcccc

SEQ ID NO: 48184 - DNA, 80 bp, synthetic construct; identical to SEQ ID NO: 12815
  source 1..80: mol_type = other DNA

SEQ ID NO: 48185 - DNA, 80 bp, synthetic construct
  source 1..80: mol_type = other DNA
agcctcagcctcctaagtagctggcattacaggcaccatgcctggctaatttttgtgtttttagtagagatgaggtttca

SEQ ID NO: 48186 - DNA, 80 bp, synthetic construct
  source 1..80: mol_type = other DNA
acgcacagagcattttaatgctgagaagggcttcatgaggttgttgaaaaatgtcagtgaggctctgggagggctacagc

SEQ ID NO: 48187 - DNA, 80 bp, synthetic construct
  source 1..80: mol_type = other DNA
gtgcagcagtgaactaaagagacaaagcccctgtcctcgtggtgcttatgctctagtgagtctgtggaacagagcagggg

SEQ ID NO: 48188 - DNA, 80 bp, synthetic construct; identical to SEQ ID NO: 12816
  source 1..80: mol_type = other DNA

SEQ ID NO: 48189 - DNA, 80 bp, synthetic construct
  source 1..80: mol_type = other DNA
tgtttttcctactcctttctcccctcccacaagctgcccaactcccagggacctgactggatggagagtacatacacctg

SEQ ID NO: 48190 - DNA, 80 bp, synthetic construct
  source 1..80: mol_type = other DNA
caggagagacaatactgtgaccaaaggctgagactgtgtcatcacttgggaatgaaagcatcaaatgccaccccaggtgg

SEQ ID NO: 48191 - DNA, 80 bp, synthetic construct
  source 1..80: mol_type = other DNA
cttccaagaagcttgactttccggggaagaaaagacaagtgaagcgtagacattgcgacttttggcttcctgtttctgtg

SEQ ID NO: 48192 - DNA, 80 bp, synthetic construct; identical to SEQ ID NO: 12817
  source 1..80: mol_type = other DNA

SEQ ID NO: 48193 - DNA, 80 bp, synthetic construct
  source 1..80: mol_type = other DNA
cccagaaacaaagaaaccaaggagaagcaaattccataagtgcttttattttattggagatgagcaggggaggcactgaa

SEQ ID NO: 48194 - DNA, 80 bp, synthetic construct
  source 1..80: mol_type = other DNA
gttccaagaagagccaggagggcggaggactccaggaggaaatgggttattgatacctgggtatagatgaatattccccc

SEQ ID NO: 48195 - DNA, 80 bp, synthetic construct
  source 1..80: mol_type = other DNA
cgttccccaaccagtcccagggcctccacctccccaggacacactgggattcagggtaccccaggggtgatcaggcagaa

SEQ ID NO: 48196 - DNA, 80 bp, synthetic construct; identical to SEQ ID NO: 12818
  source 1..80: mol_type = other DNA

SEQ ID NO: 48197 - DNA, 80 bp, synthetic construct
  source 1..80: mol_type = other DNA
agacctagggtccagagcgggctgcggatgttcagagttagaggggccagtggaggaaggttgtccgagctgaggcaagt

SEQ ID NO: 48198 - DNA, 80 bp, synthetic construct
  source 1..80: mol_type = other DNA
ctaaatgtgtaccctcctgcctttacccctttccttaattcctgtttcctgggggacctccagtccctcctgcccaaggg

SEQ ID NO: 48199 - DNA, 80 bp, synthetic construct
  source 1..80: mol_type = other DNA
aacaggctgggctagtggttgtgaagacaataaacctccacattccaccctcattcctaatgtggtctgtggcaacaggt

SEQ ID NO: 48200 - DNA, 80 bp, synthetic construct; identical to SEQ ID NO: 12819
  source 1..80: mol_type = other DNA

SEQ ID NO: 48201 - DNA, 80 bp, synthetic construct
  source 1..80: mol_type = other DNA
taattcctgctgctgcagtgacaaattaccatgaaccgaatggcttacaacaacatggatttattactttacagttttgg

SEQ ID NO: 48202 - DNA, 80 bp, synthetic construct
  source 1..80: mol_type = other DNA
aagccaaaatcagccatttcttacactgtatcactcagacttcctcttctgcctcccatgtccacattaagggacctggt

SEQ ID NO: 48203 - DNA, 80 bp, synthetic construct
  source 1..80: mol_type = other DNA
aagacatcattctgcctgctactggtggtcagatgtgccatagagtataagaaaccttgggagaaagtggctatttccaa

SEQ ID NO: 48204 - DNA, 80 bp, synthetic construct; identical to SEQ ID NO: 12820
  source 1..80: mol_type = other DNA

SEQ ID NO: 48205 - DNA, 80 bp, synthetic construct
  source 1..80: mol_type = other DNA
ccagaggcctttttggatgacatgcatgagttttacacaagcttttaatttggagcacagcaggagactcgaggaaacac

SEQ ID NO: 48206 - DNA, 80 bp, synthetic construct
  source 1..80: mol_type = other DNA
ctggtcaatgtaatacatttttgctgattccagacttggagtttcaacagttctaaattcaggaccagacagcaccaccc

SEQ ID NO: 48207 - DNA, 80 bp, synthetic construct
  source 1..80: mol_type = other DNA
ctctccctgcctgtctcaggacttaagtcgcatggaccccaccacacactccactttctctctcttctccagtggaagcg

SEQ ID NO: 48208 - DNA, 80 bp, synthetic construct
  source 1..80: mol_type = other DNA
gctctgttctgccacaggctgggcctcttgatctaggccagtgagtcaccctgcttggctgcactccctgccctgctccc

SEQ ID NO: 48209 - DNA, 80 bp, synthetic construct; identical to SEQ ID NO: 12821
  source 1..80: mol_type = other DNA

SEQ ID NO: 48210 - DNA, 80 bp, synthetic construct
  source 1..80: mol_type = other DNA
aggccaggcaatctctgctttcagttcaacaaatatttattgtcttcctcctctgtgggagcagctggaaggtagaagag

SEQ ID NO: 48211 - DNA, 80 bp, synthetic construct
  source 1..80: mol_type = other DNA
gacagcagggagcctgcttcaacctctgagggtgccccagtgtctccctcacccagggaatcatctgagcactgagggaa

SEQ ID NO: 48212 - DNA, 80 bp, synthetic construct
  source 1..80: mol_type = other DNA
aggtcagtgaaaagtggccactgtttccagatgatggtttgactttgctttatttggtaaaggggaagaggaaggtataa

SEQ ID NO: 48213 - DNA, 80 bp, synthetic construct; identical to SEQ ID NO: 12822
  source 1..80: mol_type = other DNA

SEQ ID NO: 48214 - DNA, 80 bp, synthetic construct
  source 1..80: mol_type = other DNA
acttctcccatatgggatatagtgtatgtgcttgtttgtgcccaaggcatgcacacacacaacagttgacttcttatgga

SEQ ID NO: 48215 - DNA, 80 bp, synthetic construct
  source 1..80: mol_type = other DNA
gagagccatcggggcccccagtcagtgtcaaggaggagacagacatgcaagggtgaccagaagagctggacttgctgcca

SEQ ID NO: 48216 - DNA, 80 bp, synthetic construct
  source 1..80: mol_type = other DNA
gagctgctggaaatgctagaactgctggggactcgagaactggagggagagcagggtcccttggagcccgtggagccgcc

SEQ ID NO: 48217 - DNA, 80 bp, synthetic construct
  source 1..80: mol_type = other DNA
ttctctttggtgaagtagcccacagggtagattttacccttactgtaggtcatgcctggaaccagataactgtcagagga

SEQ ID NO: 48218 - DNA, 80 bp, synthetic construct; identical to SEQ ID NO: 12823
  source 1..80: mol_type = other DNA

SEQ ID NO: 48219 - DNA, 80 bp, synthetic construct
  source 1..80: mol_type = other DNA
tttgtccaggctgggaagggtttagtattccgcggtaagagttgtcattggttggcagagcagagccattccctacttgg

SEQ ID NO: 48220 - DNA, 80 bp, synthetic construct
  source 1..80: mol_type = other DNA
gcaccttgtagactagagccagatccggaggagtagctgacctgggaataccccgttcctggcttaaaagatcctgcaga

SEQ ID NO: 48221 - DNA, 80 bp, synthetic construct
  source 1..80: mol_type = other DNA
atacgcgtggggtccttacaagggtctgagaaggtgccaatgctcttagccaaggtccctgtggaggaaagcagtggtta

SEQ ID NO: 48222 - DNA, 80 bp, synthetic construct; identical to SEQ ID NO: 12824
  source 1..80: mol_type = other DNA

SEQ ID NO: 48223 - DNA, 80 bp, synthetic construct
  source 1..80: mol_type = other DNA
ttttttaaaaagaagagggaatggagaaggggcaggaacaagtaggtctaaaagaaaggaccctgaagagacagagaatt

SEQ ID NO: 48224 - DNA, 80 bp, synthetic construct
  source 1..80: mol_type = other DNA
acacatatagaaggagacactggaaaaagacaaagctgggggcagaggggctgaaataaaggaaagggcactcgaggact

SEQ ID NO: 48225 - DNA, 80 bp, synthetic construct
  source 1..80: mol_type = other DNA
gacaccgcaccctgagccagccctgctctcgctggcccagcccagggaaccaggacgaaaccccacgaacctccgaggct

SEQ ID NO: 48226 - DNA, 80 bp, synthetic construct; identical to SEQ ID NO: 12825
  source 1..80: mol_type = other DNA

SEQ ID NO: 48227 - DNA, 80 bp, synthetic construct
  source 1..80: mol_type = other DNA
gtttcttgttgcccaggctaaagtgcaataacacggtctcagctcactgtaacctctgcctccttggtgcaagcgattct

SEQ ID NO: 48228 - DNA, 80 bp, synthetic construct
  source 1..80: mol_type = other DNA
gggattacaggcacaagctatcatgtgcggccagatgttttagaaagtgtaaagcattatatattatgaattattactgc

SEQ ID NO: 48229 - DNA, 80 bp, synthetic construct
  source 1..80: mol_type = other DNA
ctttcgctattccctcagacaccaaccacccactagaccatgggaaggtcgcagaaattcctcaagggctataagtaccc

SEQ ID NO: 48230 - DNA, 80 bp, synthetic construct; identical to SEQ ID NO: 12826
  source 1..80: mol_type = other DNA

SEQ ID NO: 48231 - DNA, 80 bp, synthetic construct
  source 1..80: mol_type = other DNA
agaggtggaagttgcagtgagccgagattacgccactgcactccagccttggagacagagtgggactccatctcacaaaa

SEQ ID NO: 48232 - DNA, 80 bp, synthetic construct
  source 1..80: mol_type = other DNA
ctagaatttccaaagtacatatcacatacattatttaatttgagacacacagactagagttaggtgtcattaaccccact

SEQ ID NO: 48233 - DNA, 80 bp, synthetic construct
  source 1..80: mol_type = other DNA
tcccagggcccccagcctcctacctggcaggaggagaccagccagcagcagtgccatcatcccgtgcccacccacacgcc

SEQ ID NO: 48234 - DNA, 80 bp, synthetic construct; identical to SEQ ID NO: 12827
  source 1..80: mol_type = other DNA

SEQ ID NO: 48235 - DNA, 80 bp, synthetic construct
  source 1..80: mol_type = other DNA
tgcctaccgtagcttggcctgtctctccatctgccctccactcgcagtcgtgggtgtttcagctttttcttccacacttg

SEQ ID NO: 48236 - DNA, 80 bp, synthetic construct
  source 1..80: mol_type = other DNA
taccaggccagccacatacctattacgtgttccatcacctggggaactttctccttctcagaaatggggcaccacattcc

SEQ ID NO: 48237 - DNA, 80 bp, synthetic construct
  source 1..80: mol_type = other DNA
cctccccatggctggtaacccagacctcaagggtgagcaagaggctaagaaggctaattgggaaggtggtggccccatag

SEQ ID NO: 48238 - DNA, 80 bp, synthetic construct; identical to SEQ ID NO: 12828
  source 1..80: mol_type = other DNA

SEQ ID NO: 48239 - DNA, 80 bp, synthetic construct
  source 1..80: mol_type = other DNA
acctcctgaccgccctttaagttcagaccagcaggaggatggaaatgtttcctgtctgtgctgtccgatacggtagccac

SEQ ID NO: 48240 - DNA, 80 bp, synthetic construct
  source 1..80: mol_type = other DNA
ggagctgtggagagaggaagggataggacagggtcccctgaagggggctaatgccttgggaaaaacaaacaaacaaaaaa

SEQ ID NO: 48241 - DNA, 80 bp, synthetic construct
  source 1..80: mol_type = other DNA
taacacttatttcacaaggtttttgtgaacatcaaatgggaaattatcaaaaaggttaaatgggacaaggggtgcagtcc

SEQ ID NO: 48242 - DNA, 80 bp, synthetic construct; identical to SEQ ID NO: 12829
  source 1..80: mol_type = other DNA

SEQ ID NO: 48243 - DNA, 80 bp, synthetic construct
  source 1..80: mol_type = other DNA
gggaggctgaggcaggagaatcacttgaaccctggaggcagaggttgcagtgagccaagattgcaccattgcactccagc

SEQ ID NO: 48244 - DNA, 80 bp, synthetic construct
  source 1..80: mol_type = other DNA
gggcagggaggagtggactagaaggtgctgggccgtcccagggtgtgaggggagaaggcagcggaacagtggaatctgtg

SEQ ID NO: 48245 - DNA, 80 bp, synthetic construct
  source 1..80: mol_type = other DNA
cgcccacgtggactggcggtgcagccacgtccctcctcctggctactctctcctgtccactcctgtccaccccatcctgc

SEQ ID NO: 48246 - DNA, 80 bp, synthetic construct; identical to SEQ ID NO: 12830
  source 1..80: mol_type = other DNA

SEQ ID NO: 48247 - DNA, 80 bp, synthetic construct
  source 1..80: mol_type = other DNA
ccttccataggcaaaaggtggggctcccagccatgtatcatgaagcaggcaggtcactgtcccctctggtcccctccacc

SEQ ID NO: 48248 - DNA, 80 bp, synthetic construct
  source 1..80: mol_type = other DNA
ctagagtggagaagcgggtaggcacttggcttcagggaggtggcaggactttccccgggccttgaggaatgatgagagaa

SEQ ID NO: 48249 - DNA, 80 bp, synthetic construct
  source 1..80: mol_type = other DNA
gttaaaagaatttggattctataggaattgcagtaaatgtgagagggtgcagggaaccaaacggctttgaatgatcacaa

SEQ ID NO: 48250 - DNA, 80 bp, synthetic construct; identical to SEQ ID NO: 12831
  source 1..80: mol_type = other DNA

SEQ ID NO: 48251 - DNA, 80 bp, synthetic construct
  source 1..80: mol_type = other DNA
acaggcttaagaggctccctaaaccctgtaaggatgtgtgcaaaattccttatgtatatgaatatttctagagagaagat

SEQ ID NO: 48252 - DNA, 80 bp, synthetic construct
  source 1..80: mol_type = other DNA
gcaggagaatcatttgaaccggcgaggcggaggctgcagtgagccgatttcatgccactgcactccagcctgggtgacag

SEQ ID NO: 48253 - DNA, 80 bp, synthetic construct
  source 1..80: mol_type = other DNA
cttaggcttggaagaaggaaaatggagtgagcacgaggaagagaaaaagcctggaaaagcagcttattttgtgctgagga

SEQ ID NO: 48254 - DNA, 80 bp, synthetic construct; identical to SEQ ID NO: 12832
  source 1..80: mol_type = other DNA

SEQ ID NO: 48255 - DNA, 80 bp, synthetic construct
  source 1..80: mol_type = other DNA
acacttcttgactcagttttaatctctccttctctgccttcctgttgggaataccccctcacttctgtggcttctttcct

SEQ ID NO: 48256 - DNA, 80 bp, synthetic construct
  source 1..80: mol_type = other DNA
aagcacaggtgcgttcactgagttcccagcacatagctgtggcaggcacttggtgatattttgaaataaaagaatggaag

SEQ ID NO: 48257 - DNA, 80 bp, synthetic construct
  source 1..80: mol_type = other DNA
aggtggcagtgggcatgtgcacttggctctgacacagccactcatgcaacaccctgtgcaatctcggcctgggcctgtgt

SEQ ID NO: 48258 - DNA, 80 bp, synthetic construct; identical to SEQ ID NO: 12833
  source 1..80: mol_type = other DNA

SEQ ID NO: 48259 - DNA, 80 bp, synthetic construct
  source 1..80: mol_type = other DNA
tatggaatggcctcctggagcttggctgggtcagcccccactttccactcttcccatgcctgtcctcaccctcccagcag

SEQ ID NO: 48260 - DNA, 80 bp, synthetic construct
  source 1..80: mol_type = other DNA
tcttttcccttcacccccacttcccaaaagcagcagggagtcagctgtagggcagtcgctccctggccgaagccttcctg

SEQ ID NO: 48261 - DNA, 80 bp, synthetic construct
  source 1..80: mol_type = other DNA
ctgttaaatagtcattctttccactagggctattagtggtttttattgttactggtcacccagaattagagtcacagctt

SEQ ID NO: 48262 - DNA, 80 bp, synthetic construct; identical to SEQ ID NO: 12834
  source 1..80: mol_type = other DNA

SEQ ID NO: 48263 - DNA, 80 bp, synthetic construct
  source 1..80: mol_type = other DNA
tgcccatgcaggactgatctccattctctcaatgaccctaggagacaggaattattattattattattattattattatt

SEQ ID NO: 48264 - DNA, 80 bp, synthetic construct
  source 1..80: mol_type = other DNA
tgcagtgagctgagatcgcaccactgcactccagcctgggcgacaagagcgaaactctgtctcaaaaaaacacacataca

SEQ ID NO: 48265 - DNA, 80 bp, synthetic construct
  source 1..80: mol_type = other DNA
ttgactggctgtggtatcctctcctgtagaccgctggctcatgaaataatcagggagagaatgtgtaaatgatgatcgtg

SEQ ID NO: 48266 - DNA, 80 bp, synthetic construct; identical to SEQ ID NO: 12835
  source 1..80: mol_type = other DNA

SEQ ID NO: 48267 - DNA, 80 bp, synthetic construct
  source 1..80: mol_type = other DNA
tcccaaggtcacatagagaacgaatggctaagtagcgacaagaacccaagtcacagtctgttgatctcactaccatgcta

SEQ ID NO: 48268 - DNA, 80 bp, synthetic construct
  source 1..80: mol_type = other DNA
tttgagttttgattcagtgccaggcacctggtgggcacttaattaaagattagcaggagaagaaaaatgtacagtaagag

SEQ ID NO: 48269 - DNA, 80 bp, synthetic construct
  source 1..80: mol_type = other DNA
tttttatcaaattttattgtcatgatgtatatgtttgtcctccctaaacacagagccccttgagggcagggaggactgaa

SEQ ID NO: 48270 - DNA, 80 bp, synthetic construct
  source 1..80: mol_type = other DNA
aaagacatcattcgctgcccaaggctcagggctgtgcctggtgctttctcaaggtaacttagcttgtataattagatttt

SEQ ID NO: 48271 - DNA, 80 bp, synthetic construct; identical to SEQ ID NO: 12836
  source 1..80: mol_type = other DNA

SEQ ID NO: 48272 - DNA, 80 bp, synthetic construct
  source 1..80: mol_type = other DNA
cccactcagtctcctccccagctaatgaagacagcctgtttgagtgccaaaatccactgcctattaataggtactaaaat

SEQ ID NO: 48273 - DNA, 80 bp, synthetic construct
  source 1..80: mol_type = other DNA
tatgacttgcacaggtgagttacctctctcagtgttggttcctcttctgtgaaatggggctaatcatttgctttattgag

SEQ ID NO: 48274 - DNA, 80 bp, synthetic construct
  source 1..80: mol_type = other DNA
gctttttccctagacaacatcaggggctcagttcctttccctcctttctctcttctttaagaatttctcttagctggaca

SEQ ID NO: 48275 - DNA, 80 bp, synthetic construct; identical to SEQ ID NO: 12837
  source 1..80: mol_type = other DNA

SEQ ID NO: 48276 - DNA, 80 bp, synthetic construct
  source 1..80: mol_type = other DNA
aggtgatcttcctgctgagtagctgggactacaggcatgcactaccatggcctggctaattgtttgttttttttttttga

SEQ ID NO: 48277 - DNA, 80 bp, synthetic construct
  source 1..80: mol_type = other DNA
tttagtagagacagggtttcaccgtggtctcgatctcctgacctcgcgatccgcccacctcggcctcccaaagtgctggg

SEQ ID NO: 48278 - DNA, 80 bp, synthetic construct
  source 1..80: mol_type = other DNA
gccactgtgcctggcccttttttaattttaattttttttttttttagagatggggtcttgctgtgttgcccaggctggct

SEQ ID NO: 48279 - DNA, 80 bp, synthetic construct; identical to SEQ ID NO: 12838
  source 1..80: mol_type = other DNA

SEQ ID NO: 48280 - DNA, 80 bp, synthetic construct
  source 1..80: mol_type = other DNA
aaacacacattaagtgtgcatgacggcccaggcactgtattctctgtcagggttacacagatgaataaagagctgggatg

SEQ ID NO: 48281 - DNA, 80 bp, synthetic construct
  source 1..80: mol_type = other DNA
ctgtaatcccagccatgtgggaggctgaggcaggagaattgctttaacccaggaggcggaggttgcagtgagccaagatc

SEQ ID NO: 48282 - DNA, 80 bp, synthetic construct
  source 1..80: mol_type = other DNA
accttgcatgggtcactgtacctctctaggcctgtttctgtcttctgtgaaatgatcatgatagcattgttatgcaaatt

SEQ ID NO: 48283 - DNA, 80 bp, synthetic construct; identical to SEQ ID NO: 12839
  source 1..80: mol_type = other DNA

SEQ ID NO: 48284 - DNA, 80 bp, synthetic construct
  source 1..80: mol_type = other DNA
tgtactccagcctgggcaacagagtgagaactgtctcaaaaataaataggccaggcacagtggctcatgcctgtaatctc

SEQ ID NO: 48285 - DNA, 80 bp, synthetic construct
  source 1..80: mol_type = other DNA
gaatcgcttgaactcaggaggcggagattgcagtgggctgagatcacaccactgcattccagtctgggcaacgagaggga

SEQ ID NO: 48286 - DNA, 80 bp, synthetic construct
  source 1..80: mol_type = other DNA
agacatcatttctgcaagaaattaaaaaattagcccagtgagtggagtgcatctatagtaccagctactcagaaggctga

SEQ ID NO: 48287 - DNA, 80 bp, synthetic construct; identical to SEQ ID NO: 12840
  source 1..80: mol_type = other DNA

SEQ ID NO: 48288 - DNA, 80 bp, synthetic construct
  source 1..80: mol_type = other DNA
aaaatggtaaaggggttcaagaagaaatgcgtagaacacagtccctgccccacaaggttcatggcctgggaagggaagac

SEQ ID NO: 48289 - DNA, 80 bp, synthetic construct
  source 1..80: mol_type = other DNA
aggctgatgcacatacgcgcaagggctggtccctagagctggtggttctggccacgagagctcatcacctgggggcagct

SEQ ID NO: 48290 - DNA, 80 bp, synthetic construct
  source 1..80: mol_type = other DNA
actgccaaggctattacgttggcgctcgctcatgtcattattaggaaatatgcatttttactgtctttgatgttatttaa

SEQ ID NO: 48291 - DNA, 80 bp, synthetic construct; identical to SEQ ID NO: 12841
  source 1..80: mol_type = other DNA

SEQ ID NO: 48292 - DNA, 80 bp, synthetic construct
  source 1..80: mol_type = other DNA
gggattacaggcgcccgccaccatgcccagctaatttttttgtatttttagtagagacagggattcaccatgttggtgag

SEQ ID NO: 48293 - DNA, 80 bp, synthetic construct
  source 1..80: mol_type = other DNA
gagtgcagtggcacgatctcggctcactgcaagctccacctcccaggttcacgccattctcctgtctcagcctcccgagt

SEQ ID NO: 48294 - DNA, 80 bp, synthetic construct
  source 1..80: mol_type = other DNA
accgcgcctggcctctcatatgtagtttttaatgagagttaccacataagcaaactgggttctaagtggtgaaatttaag

SEQ ID NO: 48295 - DNA, 80 bp, synthetic construct
  source 1..80: mol_type = other DNA
tctctgagctcctgtccttctaacctgattgcctctttaaaggattttgaaaaactatgtcccttgcacatttgtattgt

SEQ ID NO: 48296 - DNA, 80 bp, synthetic construct; identical to SEQ ID NO: 12842
  source 1..80: mol_type = other DNA

SEQ ID NO: 48297 - DNA, 80 bp, synthetic construct
  source 1..80: mol_type = other DNA
ataatttaatagcattccaaagggtatgcttttcaaggaattgcaaatacatgttaaaaatcacatcactatttatgtat

SEQ ID NO: 48298 - DNA, 80 bp, synthetic construct
  source 1..80: mol_type = other DNA
gtatttttagtagagacagagtttcaccattgtccaggctggtcttgaattgctgacctcaagtgatctgcctacctcag

SEQ ID NO: 48299 - DNA, 80 bp, synthetic construct
  source 1..80: mol_type = other DNA
tccttttaaaaaatacgtgaacaagcccttgaacaagtgttagaaacagttattctatttgtattgcaattattgcagtt

SEQ ID NO: 48300 - DNA, 80 bp, synthetic construct; identical to SEQ ID NO: 12843
  source 1..80: mol_type = other DNA

SEQ ID NO: 48301 - DNA, 80 bp, synthetic construct
  source 1..80: mol_type = other DNA
cgtggtggtttacacctgtaatcctagcactttgggaggccagggcaagcagatcccatgagatcaggaattcgagacca

SEQ ID NO: 48302 - DNA, 80 bp, synthetic construct
  source 1..80: mol_type = other DNA
ctgcactccagcctgggcgacagagagataatacgtctcaaaaaaaaaaaaaaagaaaagaaagaaaatgaatctcttaa

SEQ ID NO: 48303 - DNA, 80 bp, synthetic construct
  source 1..80: mol_type = other DNA
gaaggtttgcatataccactaggggtatccaagccataggccattaaacagagatgaaacttgccttcccattctttaat

SEQ ID NO: 48304 - DNA, 80 bp, synthetic construct; identical to SEQ ID NO: 12844
  source 1..80: mol_type = other DNA

SEQ ID NO: 48305 - DNA, 80 bp, synthetic construct
  source 1..80: mol_type = other DNA
cagctactcagaaggctgaggcaggagaatggcttgaacccgggaggcggaggttgcagtgagccgagatcgtgccattg

SEQ ID NO: 48306 - DNA, 80 bp, synthetic construct
  source 1..80: mol_type = other DNA
cggtgaaaccccgcctctactaaaaaatacaaaaaattagcctggcgtggtggcgggcgcctgtagtcccagctactcgg

SEQ ID NO: 48307 - DNA, 80 bp, synthetic construct
  source 1..80: mol_type = other DNA
aagcagcagcctagattcagaattaagaaaacatgatttttatttttccgtttcatggaagcagcagctgtctactgata

SEQ ID NO: 48308 - DNA, 80 bp, synthetic construct; identical to SEQ ID NO: 12845
  source 1..80: mol_type = other DNA

SEQ ID NO: 48309 - DNA, 80 bp, synthetic construct
  source 1..80: mol_type = other DNA
tatctgtactcttcccggggtgggtctaggtctggctcctcctgaggtcggttgtccacctcaggggcaggaggccaggg

SEQ ID NO: 48310 - DNA, 80 bp, synthetic construct
  source 1..80: mol_type = other DNA
gcccctggccaagggtcaccggggactggggggccctgaggcaatgttggggagcctgcctcctctcggtcctctgcggg

SEQ ID NO: 48311 - DNA, 80 bp, synthetic construct
  source 1..80: mol_type = other DNA
caaaaaagtcactctcaaagagctctcggtaggtttgtaaatacttaactgatggtaaaatgtcatgaacccctaccccc

SEQ ID NO: 48312 - DNA, 80 bp, synthetic construct; identical to SEQ ID NO: 12846
  source 1..80: mol_type = other DNA

SEQ ID NO: 48313 - DNA, 80 bp, synthetic construct
  source 1..80: mol_type = other DNA
gccatcttgagtatccctcatcaccccaaactgcagtccctgcctctgttcccacctcacctctggtgtgcaggcaaagg

SEQ ID NO: 48314 - DNA, 80 bp, synthetic construct
  source 1..80: mol_type = other DNA
actggtcaaacccgttgggaaggcctgggctgatgtgtcacccctgaaggtggcgtcccttattttagtcctccagccca

SEQ ID NO: 48315 - DNA, 80 bp, synthetic construct
  source 1..80: mol_type = other DNA
agaatgggagcaaaccacgcgatgggcgttgggaagcaccgtaattacagggttgggaggcaggatgcctgcgctgaggg

SEQ ID NO: 48316 - DNA, 80 bp, synthetic construct; identical to SEQ ID NO: 12847
  source 1..80: mol_type = other DNA

SEQ ID NO: 48317 - DNA, 80 bp, synthetic construct
  source 1..80: mol_type = other DNA
aactctattgtactcgtctcctccctcccattctccttttggtctcagctccttgatctaagcctcccagagagacccct

SEQ ID NO: 48318 - DNA, 80 bp, synthetic construct
  source 1..80: mol_type = other DNA
aaggaacaccttattatgcaatggcgtgatctcatctgttccctccagggctcacccagaaaccttcgttacactcctcc

SEQ ID NO: 48319 - DNA, 80 bp, synthetic construct
  source 1..80: mol_type = other DNA
ggtcttaaaatatacatcacgcgggcctggtgtggtggctcgcgcctgtaatcccagcactttgggaggccgaagcgggc

SEQ ID NO: 48320 - DNA, 80 bp, synthetic construct
  source 1..80: mol_type = other DNA
gaggttgtggtgagctgagatcacaccattgcactccagcctgggcaacgagtgaaattccgtctcaaaaaaaaaaaaca

SEQ ID NO: 48321 - DNA, 80 bp, synthetic construct; identical to SEQ ID NO: 12848
  source 1..80: mol_type = other DNA

SEQ ID NO: 48322 - DNA, 80 bp, synthetic construct
  source 1..80: mol_type = other DNA
atgtacaccaaatcatgttgcgtcttccctttgtttggggagtgaggacaggttctcgctctcttaggctggggtgcagt

SEQ ID NO: 48323 - DNA, 80 bp, synthetic construct
  source 1..80: mol_type = other DNA
ctcaaactcctgggctcaagcgatccgctcacctcggcctcccaaaaaagtgctgggattcagctactccggaggctgag

SEQ ID NO: 48324 - DNA, 80 bp, synthetic construct
  source 1..80: mol_type = other DNA
tttttttttttaattcttcttctttttttgaggctgagtctcgctctgtcacccaggctggagtgcagtggcatgatcac

SEQ ID NO: 48325 - DNA, 80 bp, synthetic construct; identical to SEQ ID NO: 12849
  source 1..80: mol_type = other DNA

SEQ ID NO: 48326 - DNA, 80 bp, synthetic construct
  source 1..80: mol_type = other DNA
ctcagaggcctctccccagagtcagtttctatcatatcatcgtactgtactttctcttcaagcacttatttgaaacgatc

SEQ ID NO: 48327 - DNA, 80 bp, synthetic construct
  source 1..80: mol_type = other DNA
ctaatacagtgcctagctctgacattcctgttgaacgagtgaatgtttcatcttccccactcctagcatttatcatcttc

SEQ ID NO: 48328 - DNA, 80 bp, synthetic construct
  source 1..80: mol_type = other DNA
gggagaattcccacagattcccagaaataacatttccaaacaatggctccttctgtagtcgtctttatttagagcagaat

SEQ ID NO: 48329 - DNA, 80 bp, synthetic construct; identical to SEQ ID NO: 12850
  source 1..80: mol_type = other DNA

SEQ ID NO: 48330 - DNA, 80 bp, synthetic construct
  source 1..80: mol_type = other DNA
cagagaacaacactcatcatgcgagagtctgaagaggagattcctgaagtgcgcgcatttgtcccttgtccctttgtgct

SEQ ID NO: 48331 - DNA, 80 bp, synthetic construct
  source 1..80: mol_type = other DNA
agaccttcctgctgcaaggtggcctgggaaggagagggttaaacctagcccggatagagcctccctcaccatcctctttc

SEQ ID NO: 48332 - DNA, 80 bp, synthetic construct
  source 1..80: mol_type = other DNA
gagttcctggctccgctccttttcctgggcggctctgcgctgaatctggcgtaaggagaccactacagagaggccaaggc

SEQ ID NO: 48333 - DNA, 80 bp, synthetic construct; identical to SEQ ID NO: 12851
  source 1..80: mol_type = other DNA

SEQ ID NO: 48334 - DNA, 80 bp, synthetic construct
  source 1..80: mol_type = other DNA
gggcggatcacgaggttaggagctcgagaccatcctggccaacatggtgtaatcccgtctctactgcaaatacaaaaact

SEQ ID NO: 48335 - DNA, 80 bp, synthetic construct
  source 1..80: mol_type = other DNA
caaaacattaaatgattacaacttaaagtgattcaaaagatgtacaaatatgtgtgtatatagataagagaccaaatgtg

SEQ ID NO: 48336 - DNA, 80 bp, synthetic construct
  source 1..80: mol_type = other DNA
gcctcacaagtaagcttggggtacaggtgcccaccaccaggcctagctaatttttgtatttttagtcgagacagggtttc

SEQ ID NO: 48337 - DNA, 80 bp, synthetic construct; identical to SEQ ID NO: 12852
  source 1..80: mol_type = other DNA

SEQ ID NO: 48338 - DNA, 80 bp, synthetic construct
  source 1..80: mol_type = other DNA
gggtgaaagtgcagacggggcatatcagcaggagctttgattcgcagttcccaccccaccctccaagggaagcacccatt

SEQ ID NO: 48339 - DNA, 80 bp, synthetic construct
  source 1..80: mol_type = other DNA
gctgctgggccaccttgctcagctgctgccgctctgcctcccctaaaaggagggggtgctgggtcaggcctctcccagca

SEQ ID NO: 48340 - DNA, 80 bp, synthetic construct
  source 1..80: mol_type = other DNA
cacgtctgtgaccggtggtggtaggggacagctgggacggggaagagaaagagtcagaagaaatcacccagctgcctgat

SEQ ID NO: 48341 - DNA, 80 bp, synthetic construct; identical to SEQ ID NO: 12853
  source 1..80: mol_type = other DNA

SEQ ID NO: 48342 - DNA, 80 bp, synthetic construct
  source 1..80: mol_type = other DNA
cttgcggacagcatagctgagtcggttgttgaggctgggaagctgggcggcagccccttccaccttagccatggtggtct

SEQ ID NO: 48343 - DNA, 80 bp, synthetic construct
  source 1..80: mol_type = other DNA
agtacagaacgcacagcttccgtcaattatctaaaggacccttgccccaagaatgcattaaatgactatctttttaagca

SEQ ID NO: 48344 - DNA, 80 bp, synthetic construct
  source 1..80: mol_type = other DNA
cctggccaacatggtgaaactctctctacttaaaaacacaaaaattagccgggcatggtggctcatgcctgtaatcccag

SEQ ID NO: 48345 - DNA, 80 bp, synthetic construct; identical to SEQ ID NO: 12854
  source 1..80: mol_type = other DNA

SEQ ID NO: 48346 - DNA, 80 bp, synthetic construct
  source 1..80: mol_type = other DNA
ggaaattgttccagtagatgcttccaacacctaccacagcccttattaaagtctccaattacctagagacaatctaataa

SEQ ID NO: 48347 - DNA, 80 bp, synthetic construct
  source 1..80: mol_type = other DNA
ctttctgttctcctggaggtagggggcacccgcgatggattgaacctgggtggtaggtcattataactagtttaattccg

SEQ ID NO: 48348 - DNA, 80 bp, synthetic construct
  source 1..80: mol_type = other DNA
atctttatctaaattaacccatcaagaagagcctcacgataacaataaacatttacaagccagagactgtgctaagaact

SEQ ID NO: 48349 - DNA, 80 bp, synthetic construct
  source 1..80: mol_type = other DNA
cacctgtaatcccagctactcaggaggctgaggcaggaaaatcgtgtgaacccgggaggcagaggttgcagtgagctgag

SEQ ID NO: 48350 - DNA, 80 bp, synthetic construct; identical to SEQ ID NO: 12855
  source 1..80: mol_type = other DNA

SEQ ID NO: 48351 - DNA, 80 bp, synthetic construct
  source 1..80: mol_type = other DNA
aggtcaggagttcaagaccagcctggccaacatggtgaaaccccgtccctactaaaaatgcaaaaattagccgggtgtag

SEQ ID NO: 48352 - DNA, 80 bp, synthetic construct
  source 1..80: mol_type = other DNA
aatagactaaatttttctccagtgaaacggattgcccgtaaaattttagaaaaaaaaaggaagatgaagtgtctacactc

SEQ ID NO: 48353 - DNA, 80 bp, synthetic construct
  source 1..80: mol_type = other DNA
aaattcataacaagcaatcaggtatgaatgcagaaggggcttccccaggaaaagaaacgaacacaggaacattgatagag

SEQ ID NO: 48354 - DNA, 80 bp, synthetic construct; identical to SEQ ID NO: 12856
  source 1..80: mol_type = other DNA

SEQ ID NO: 48355 - DNA, 80 bp, synthetic construct
  source 1..80: mol_type = other DNA
gctccacctccacctctgcggctttgtcctgcagggatcgctgcaggatggcctgctcctggctctgggatgtcactttt

SEQ ID NO: 48356 - DNA, 80 bp, synthetic construct
  source 1..80: mol_type = other DNA
tgcagcacggtggctcacacctgtaatcccagcactttgggaggccgaggcagatggatcacttgaggtcaggggttcaa

SEQ ID NO: 48357 - DNA, 80 bp, synthetic construct
  source 1..80: mol_type = other DNA
actgcactccagcctggtgacaagaacaagactccttctcaaaaaaaaaaaaaaaaaaaaaagaaaagaaaaagaatgaa

SEQ ID NO: 48358 - DNA, 80 bp, synthetic construct; identical to SEQ ID NO: 12857
  source 1..80: mol_type = other DNA

SEQ ID NO: 48359 - DNA, 80 bp, synthetic construct
  source 1..80: mol_type = other DNA
gccactatgaccggctaattttttgtatttttagtagagacgggatttcacatgttgcccaggctggtctcgaactcctg

SEQ ID NO: 48360 - DNA, 80 bp, synthetic construct
  source 1..80: mol_type = other DNA
ccactgcacctggcttcaatctttctatcgcacatataattacccaacattatctgtttacttgcgtgttctgtgtctct

SEQ ID NO: 48361 - DNA, 80 bp, synthetic construct
  source 1..80: mol_type = other DNA
gagggaataccgggagaaaagagagtgcagtgacctgtcccttcagctgcttaacagagtcactgtgttccagctcctgg

SEQ ID NO: 48362 - DNA, 80 bp, synthetic construct; identical to SEQ ID NO: 12858
  source 1..80: mol_type = other DNA

SEQ ID NO: 48363 - DNA, 80 bp, synthetic construct
  source 1..80: mol_type = other DNA
cacctgcagcagctccgcggtggcatgcaggctgtcccggtcctcctgcaagtgctgcgggcagaggaaagcagcccctc

SEQ ID NO: 48364 - DNA, 80 bp, synthetic construct
  source 1..80: mol_type = other DNA
ctccagttcccatgtctggctgtggacctcagaaggcacttgttccccaacatattttcttagattctcaaccagggtca

SEQ ID NO: 48365 - DNA, 80 bp, synthetic construct
  source 1..80: mol_type = other DNA
tgagcctcggccagctccttggcttcccctgctcttctggtttccagactactcagagacttctccaagccctcagcctt

SEQ ID NO: 48366 - DNA, 80 bp, synthetic construct; identical to SEQ ID NO: 12859
  source 1..80: mol_type = other DNA

SEQ ID NO: 48367 - DNA, 80 bp, synthetic construct
  source 1..80: mol_type = other DNA
aggccaggggacccggcctctgcctacctcctgagctcaccctggaggctctcccactgctccccgctccggccacgggg

SEQ ID NO: 48368 - DNA, 80 bp, synthetic construct
  source 1..80: mol_type = other DNA
atcttgcttatgtgtatgtgttactatctgtcggaccacactggaaggaaagctccaggaaaggaggaattttgtgtctt

SEQ ID NO: 48369 - DNA, 80 bp, synthetic construct; identical to SEQ ID NO: 12860
  source 1..80: mol_type = other DNA

SEQ ID NO: 48370 - DNA, 80 bp, synthetic construct
  source 1..80: mol_type = other DNA
gaatgacttgaacccgggaggcggagctggcagtgagccaagatcgcgccactgcactccagcctgggcgacagagcgag

SEQ ID NO: 48371 - DNA, 80 bp, synthetic construct
  source 1..80: mol_type = other DNA
aggttcaagcgattctcctgcctcaccctcctgagtagctgagattacaggcatgagccaccacgcccagctaatttttg

SEQ ID NO: 48372 - DNA, 80 bp, synthetic construct
  source 1..80: mol_type = other DNA
cgctttgttgcccaggctggtctcaaactcctgggctcaaatgatccttccaccttggcctcccaaagtgctaggattac

SEQ ID NO: 48373 - DNA, 80 bp, synthetic construct; identical to SEQ ID NO: 12861
  source 1..80: mol_type = other DNA

SEQ ID NO: 48374 - DNA, 80 bp, synthetic construct
  source 1..80: mol_type = other DNA
ggggattacaggcgcccacgactatacccggctaatttttgtatttttttgtagagttcttcatgttggccaggttggtc

SEQ ID NO: 48375 - DNA, 80 bp, synthetic construct
  source 1..80: mol_type = other DNA
tgtccattttctgattggattgctggtctttcccttaccaatttctaggcacacattttatattagggatattacccttt

SEQ ID NO: 48376 - DNA, 80 bp, synthetic construct
  source 1..80: mol_type = other DNA
tcacaggtagaaaggccttgcccactacaaggttataaaggaattctcccttgttttctcccagttccttttttatttta

SEQ ID NO: 48377 - DNA, 80 bp, synthetic construct
  source 1..80: mol_type = other DNA
tgggattacaggtgcgcaccaccacgcctggtgaatttttgtatttttagtagagacagggtttcgccatgttggccagg

SEQ ID NO: 48378 - DNA, 80 bp, synthetic construct; identical to SEQ ID NO: 12862
  source 1..80: mol_type = other DNA

SEQ ID NO: 48379 - DNA, 80 bp, synthetic construct
  source 1..80: mol_type = other DNA
acccctgatgaattggtacctggagtaaagtagggaggcaaactatttcctactagaaagggaagcagggcttcaagtgg

SEQ ID NO: 48380 - DNA, 80 bp, synthetic construct
  source 1..80: mol_type = other DNA
atgtgtgtttattttcaccaaaggtctcatcactctactactcactactcatggagggtcttttctgcaatacctgttct

SEQ ID NO: 48381 - DNA, 80 bp, synthetic construct
  source 1..80: mol_type = other DNA
agttcttccggacaacctcagccccagccaaagcagcacgcaggccctcagcctcagctcggccggccttctccgcccgt

SEQ ID NO: 48382 - DNA, 80 bp, synthetic construct
  source 1..80: mol_type = other DNA
cccaggaccttcaaagacaggttagtgcaggtgagacttgtctccagtgctggaaggatagttgagggcataaacatagc

SEQ ID NO: 48383 - DNA, 80 bp, synthetic construct; identical to SEQ ID NO: 12863
  source 1..80: mol_type = other DNA

SEQ ID NO: 48384 - DNA, 80 bp, synthetic construct
  source 1..80: mol_type = other DNA
caagaagtttgagggaggaatgggcatagagaggtcgtaagcttccagtatcaatatggtgaggccaggtgctagttaaa

SEQ ID NO: 48385 - DNA, 80 bp, synthetic construct
  source 1..80: mol_type = other DNA
caggtgcctgtagtcccagctgcttgggaggctgaggcaggagaatggcgtcaacctgggaggcagagcttgcagtgagc

SEQ ID NO: 48386 - DNA, 80 bp, synthetic construct
  source 1..80: mol_type = other DNA
gtgaagtttaatccagcttggaacatggctcctgaggcagctctctgagacccaggactataagagattgttgttgttgt

SEQ ID NO: 48387 - DNA, 80 bp, synthetic construct; identical to SEQ ID NO: 12864
  source 1..80: mol_type = other DNA

SEQ ID NO: 48388 - DNA, 80 bp, synthetic construct
  source 1..80: mol_type = other DNA
ccagtctagtattccttcttcatcatgctgcttcttctaatgtaatcctattctggagcaaaatggcagaatgatatccc

SEQ ID NO: 48389 - DNA, 80 bp, synthetic construct
  source 1..80: mol_type = other DNA
ttcatcttgcctcataccatgctttaccatcagctggtggtcaatctatctcccctcttaggattttagattccttatta

SEQ ID NO: 48390 - DNA, 80 bp, synthetic construct
  source 1..80: mol_type = other DNA
gttctggaaactagggccgaaatagggtaaggagtttattccagtgaggaagggtcactagcaagcaagcctgagaaaac

SEQ ID NO: 48391 - DNA, 80 bp, synthetic construct; identical to SEQ ID NO: 12865
  source 1..80: mol_type = other DNA

SEQ ID NO: 48392 - DNA, 80 bp, synthetic construct
  source 1..80: mol_type = other DNA
acactccaattcaattttcaggccaccttccaaagagaaagcccctacaataacaaagtcataatccttgaattatagcc

SEQ ID NO: 48393 - DNA, 80 bp, synthetic construct
  source 1..80: mol_type = other DNA
tcatactttcaggattctgggcagtgcctctaccctcctccttaagtttctatggtccctgctgctcctggccagaggtg

SEQ ID NO: 48394 - DNA, 80 bp, synthetic construct
  source 1..80: mol_type = other DNA
tggccacatgcagggctagaccctccccaagaccttgggaatccaggccgcctagatccccaggcagaaaagccagcgtc

SEQ ID NO: 48395 - DNA, 80 bp, synthetic construct; identical to SEQ ID NO: 12866
  source 1..80: mol_type = other DNA

SEQ ID NO: 48396 - DNA, 80 bp, synthetic construct
  source 1..80: mol_type = other DNA
ctgtacccccttcccctttggaccccttgaaccctcccaggacccccgctcagccccttcccgcccccaaccgactcttc

SEQ ID NO: 48397 - DNA, 80 bp, synthetic construct
  source 1..80: mol_type = other DNA
aggcgcagtggcgtctaaatttgggcccactaaatgcgtcggagcatctccgcgcccaggcggctcctcctcactgcggc

SEQ ID NO: 48398 - DNA, 80 bp, synthetic construct
  source 1..80: mol_type = other DNA
gggtaggcgctgcccgcgcgcagaggccgcgcccctcctggccccggcttcttggctgtcaaacagatgcagcaacgtcg

SEQ ID NO: 48399 - DNA, 80 bp, synthetic construct; identical to SEQ ID NO: 12867
  source 1..80: mol_type = other DNA

SEQ ID NO: 48400 - DNA, 80 bp, synthetic construct
  source 1..80: mol_type = other DNA
caagtttgacaggaagaagctactcttctccgaattacacagaggtgatgtgttcgtattgcacgtagacgtgtgtataa

SEQ ID NO: 48401 - DNA, 80 bp, synthetic construct
  source 1..80: mol_type = other DNA
accttcctggaatttttcatttgcaagtcggcttaaccaattttgcattgagtcctaggctgcttgcactctgaatttgg

SEQ ID NO: 48402 - DNA, 80 bp, synthetic construct
  source 1..80: mol_type = other DNA
gctgccctgcttccaactgctgcgcatagggggcggcaggggcggtgatctctacaccttccacccccccgccggggctg

SEQ ID NO: 48403 - DNA, 80 bp, synthetic construct; identical to SEQ ID NO: 12868
  source 1..80: mol_type = other DNA

SEQ ID NO: 48404 - DNA, 80 bp, synthetic construct
  source 1..80: mol_type = other DNA
ctcatacaggacctgggatatcatcagaaagatatcacagtggggatgttctgaggccactagaggccaagtttagactt

SEQ ID NO: 48405 - DNA, 80 bp, synthetic construct
  source 1..80: mol_type = other DNA
taaagtcagctgtaggagtgttatggttattagactatagtagccaacattcatctagtgcttactgttatgagccaggc

SEQ ID NO: 48406 - DNA, 80 bp, synthetic construct; identical to SEQ ID NO: 12869
  source 1..80: mol_type = other DNA

SEQ ID NO: 48407 - DNA, 80 bp, synthetic construct
  source 1..80: mol_type = other DNA
acctgtaaccccagctactcaggaggctgaagcagcagaatcacttgaacccgggaggcggaggttgcagtgagctgaga

SEQ ID NO: 48408 - DNA, 80 bp, synthetic construct
  source 1..80: mol_type = other DNA
ttagggcggggcacggtggctcacgcctgtaatcccagcactttgggaggctgaggcgggcagatcaggaggtcaggagt

SEQ ID NO: 48409 - DNA, 80 bp, synthetic construct
  source 1..80: mol_type = other DNA
ctactgcactccagcttgggcaatagagcaaaactccatctcaaaaaaaaaaaaaaagaaagaaagaaaaaaaaagaaga

SEQ ID NO: 48410 - DNA, 80 bp, synthetic construct; identical to SEQ ID NO: 12870
  source 1..80: mol_type = other DNA

SEQ ID NO: 48411 - DNA, 80 bp, synthetic construct
  source 1..80: mol_type = other DNA
cggagttctacttcatgttccaacaagtacgagtcaagcctcaggactttgctgccattaccatcccacggtctagggga

SEQ ID NO: 48412 - DNA, 80 bp, synthetic construct
  source 1..80: mol_type = other DNA
gttggggtggaccaaagagcctgcctgttcccgccccacctggggaaatggggaccacgccttctgctccaccacaacgc

SEQ ID NO: 48413 - DNA, 80 bp, synthetic construct
  source 1..80: mol_type = other DNA
ctgactcccactgggtaagtggagtcctcacttggccctctcagtgttttactgcttttcgattccttgtatccctaggc

SEQ ID NO: 48414 - DNA, 80 bp, synthetic construct; identical to SEQ ID NO: 12871
  source 1..80: mol_type = other DNA

SEQ ID NO: 48415 - DNA, 80 bp, synthetic construct
  source 1..80: mol_type = other DNA
ttcagaaatcgacgtggccgtcctcggaagtacccagtgagcgctcccatggctccccctgcagttgggggcggggagcc

SEQ ID NO: 48416 - DNA, 80 bp, synthetic construct
  source 1..80: mol_type = other DNA
acctaaggtccactgccaaggcaccatcggacacacctgcccatgagtagacacagcagcgagcaaataggtctgataaa

SEQ ID NO: 48417 - DNA, 80 bp, synthetic construct
  source 1..80: mol_type = other DNA
ggaagttcccactattacaagccataaggccatgttgccatggacaccagaatatctgtagtcagagcacctatcagttg

SEQ ID NO: 48418 - DNA, 80 bp, synthetic construct; identical to SEQ ID NO: 12872
  source 1..80: mol_type = other DNA

SEQ ID NO: 48419 - DNA, 80 bp, synthetic construct
  source 1..80: mol_type = other DNA
ggttgagctggaggtaggaatacaggtaattaaggtttctagtttaagggaaaacagatctattgccatttaaataaggt

SEQ ID NO: 48420 - DNA, 80 bp, synthetic construct
  source 1..80: mol_type = other DNA
aactgggctggcctggttcagtgtgaatcaaaccgcttaacccacacatggtacatgtgattttcttttgtgagccttac

SEQ ID NO: 48421 - DNA, 80 bp, synthetic construct
  source 1..80: mol_type = other DNA
aaaatggaagaaatgactctggggcaaagacccctaatgaactagtggcagagccaggaataaaacttgagtaactaatg

SEQ ID NO: 48422 - DNA, 80 bp, synthetic construct
  source 1..80: mol_type = other DNA
aagatgatttctaagtataaagccatttaagaattccagagtagggtgggaaagcaaaaagccagctctgaacaggtaac

SEQ ID NO: 48423 - DNA, 80 bp, synthetic construct; identical to SEQ ID NO: 12873
  source 1..80: mol_type = other DNA

SEQ ID NO: 48424 - DNA, 80 bp, synthetic construct
  source 1..80: mol_type = other DNA
cctttgtgttcccaattccttccttagtgaatgaagaacttaatcccaaaaaccctggcacaaactccaggttttctttc

SEQ ID NO: 48425 - DNA, 80 bp, synthetic construct
  source 1..80: mol_type = other DNA
ggaccgaggagtacagtgcagtgaagtgagggctcccatagcctggggtaccaaaatggggccctggggccagaggaaag

SEQ ID NO: 48426 - DNA, 80 bp, synthetic construct
  source 1..80: mol_type = other DNA
aagtgaatgacagaaaggagaatgacattagacaatgagctgagacgggcctgactctgcttggacattctatccaaagc

SEQ ID NO: 48427 - DNA, 80 bp, synthetic construct
  source 1..80: mol_type = other DNA
gagacatggcactcacatccttctcgagcccaagctgctgggcgatgtggctgatctgctgcagtgtgggtttcgggcac

SEQ ID NO: 48428 - DNA, 80 bp, synthetic construct; identical to SEQ ID NO: 12874
  source 1..80: mol_type = other DNA

SEQ ID NO: 48429 - DNA, 80 bp, synthetic construct
  source 1..80: mol_type = other DNA
gtcagcttcctccacccacttctgcagcaagggccgcagcttacacatgttcttgaagctaagctgcagagcctcaaagc

SEQ ID NO: 48430 - DNA, 80 bp, synthetic construct
  source 1..80: mol_type = other DNA
atgggtgagggtagtctgcccctgcccctccccactaggttcagggatactccttagaggggagatgcggtcagaatctg

SEQ ID NO: 48431 - DNA, 80 bp, synthetic construct
  source 1..80: mol_type = other DNA
tgtaagaacataaacacaccagttatcaatctcccctttccattcgggattcaagaacctacgtgtggccccaaggaata

SEQ ID NO: 48432 - DNA, 80 bp, synthetic construct; identical to SEQ ID NO: 12875
  source 1..80: mol_type = other DNA

SEQ ID NO: 48433 - DNA, 80 bp, synthetic construct
  source 1..80: mol_type = other DNA
aggaggctgaggcaggagaatcacttgaacccgggaggcggaggttgcagtgagctgagatcacgccactgcactccagc

SEQ ID NO: 48434 - DNA, 80 bp, synthetic construct
  source 1..80: mol_type = other DNA
aagagcatcatgtctcagaagctaaattcagtatatactctccccagcttgctttgagggtcccacaaactataacatgg

SEQ ID NO: 48435 - DNA, 80 bp, synthetic construct
  source 1..80: mol_type = other DNA
ctatagaggcatcctaattgatttttaaattcaagagatttatcgagcaccttctataagccagcggctatacaaagtgg

SEQ ID NO: 48436 - DNA, 80 bp, synthetic construct; identical to SEQ ID NO: 12876
  source 1..80: mol_type = other DNA

SEQ ID NO: 48437 - DNA, 80 bp, synthetic construct
  source 1..80: mol_type = other DNA
ccaaggtgggtagatcacttgaggtcaggagttcaagactagcctggtcaacatagtgagactctgtctctactaaaaat

SEQ ID NO: 48438 - DNA, 80 bp, synthetic construct
  source 1..80: mol_type = other DNA
attaaaaaaaaaataaagcagtctataggagtagggtaaaggagggaaggagattatggaggagggtgacacttttaaag

SEQ ID NO: 48439 - DNA, 80 bp, synthetic construct; identical to SEQ ID NO: 12877
  source 1..80: mol_type = other DNA

SEQ ID NO: 48440 - DNA, 80 bp, synthetic construct
  source 1..80: mol_type = other DNA
tgggactacaggcacccaccaccatgcccggctaatttttgtatttttagtagatatggggtttcaccatgttggccagg

SEQ ID NO: 48441 - DNA, 80 bp, synthetic construct
  source 1..80: mol_type = other DNA
cgcaacctccatctcccaggttcaagcgattctcctgcctcagcttcctgagtagctgagattacaggcatgcgtcacca

SEQ ID NO: 48442 - DNA, 80 bp, synthetic construct; identical to SEQ ID NO: 12878
  source 1..80: mol_type = other DNA

SEQ ID NO: 48443 - DNA, 80 bp, synthetic construct
  source 1..80: mol_type = other DNA
acaagagacagaaaacgcggtagtcatctggtgtctaaatggcatttaagccttgagggtgggtgagaggaaggaagggt

SEQ ID NO: 48444 - DNA, 80 bp, synthetic construct
  source 1..80: mol_type = other DNA
gctgttttcatccccaacttctgctcagccaataactcaaactgataaatgccctctgctatcttggattttccaaattc

SEQ ID NO: 48445 - DNA, 80 bp, synthetic construct
  source 1..80: mol_type = other DNA
aatgatgtataaacggagcacacagccaggcacttaggaagtggaccacaattgccagccattatcattcaaggctcagc

SEQ ID NO: 48446 - DNA, 80 bp, synthetic construct; identical to SEQ ID NO: 12879
  source 1..80: mol_type = other DNA

SEQ ID NO: 48447 - DNA, 80 bp, synthetic construct
  source 1..80: mol_type = other DNA
cccaaacaggagatcctatcagaaacgagtcacaccctagactttcaggaacaataatcctggaatgagcactgttttta

SEQ ID NO: 48448 - DNA, 80 bp, synthetic construct
  source 1..80: mol_type = other DNA
tgtgagagaccctgacaagggctgggccagagcaaaggccagcctgggccagcttccgactctcccaggctgctctgccc

SEQ ID NO: 48449 - DNA, 80 bp, synthetic construct
  source 1..80: mol_type = other DNA
tccccatcaggctgccctgtcatgaccacctccccacaccccaaccccgtcgaagctcacttgcctcctccgggttttgc

SEQ ID NO: 48450 - DNA, 80 bp, synthetic construct; identical to SEQ ID NO: 12880
  source 1..80: mol_type = other DNA

SEQ ID NO: 48451 - DNA, 80 bp, synthetic construct
  source 1..80: mol_type = other DNA
gcgccccaagccgggggcctggtgaaatgagggcttgcgaagggactactcaacccctctctccctccccagtcccaccc

SEQ ID NO: 48452 - DNA, 80 bp, synthetic construct
  source 1..80: mol_type = other DNA
aggtcccccacagaaactttttttatttttattttttaagacagggtctcactttgttgcccagactggagtgcagtgga

SEQ ID NO: 48453 - DNA, 80 bp, synthetic construct
  source 1..80: mol_type = other DNA
tgaattcctgtcctcaagaaatcctcccgcctctgccgcccagtgtcatgattaaaggcgtgagccaccacacccaactt

SEQ ID NO: 48454 - DNA, 80 bp, synthetic construct; identical to SEQ ID NO: 12881
  source 1..80: mol_type = other DNA

SEQ ID NO: 48455 - DNA, 80 bp, synthetic construct
  source 1..80: mol_type = other DNA
ccccccacccccccatccccccacccctccgtcttccagaatcagactccagactctcctcatctaacagactaaggggt

SEQ ID NO: 48456 - DNA, 80 bp, synthetic construct
  source 1..80: mol_type = other DNA
atctaataccacggtaggccccgttctccctcccccacctccctggcccaggcctccagccctaggccctgggtggggaa

SEQ ID NO: 48457 - DNA, 80 bp, synthetic construct
  source 1..80: mol_type = other DNA
ggcctggatggctcccctggggactgcttcctgctccccaaccccccagtcccaatcccctcacacagaatccccttcag

SEQ ID NO: 48458 - DNA, 80 bp, synthetic construct; identical to SEQ ID NO: 12882
  source 1..80: mol_type = other DNA

SEQ ID NO: 48459 - DNA, 80 bp, synthetic construct
  source 1..80: mol_type = other DNA
cccaaaacttgatctcagtggagggcctggggtaagtctgggggctccagagggggctctgggccagggctccccacagc

SEQ ID NO: 48460 - DNA, 80 bp, synthetic construct
  source 1..80: mol_type = other DNA
tgtcttcatcttggtggcatccgtgagtcttttgagacttttcccccactcttatgttgcctctgttcgtgtgcccatct

SEQ ID NO: 48461 - DNA, 80 bp, synthetic construct
  source 1..80: mol_type = other DNA
ggaggaacatgcttcggaacaggaggaggcccctccccagccatctcaatccccaggacagaaccatcacggcacctttg

SEQ ID NO: 48462 - DNA, 80 bp, synthetic construct; identical to SEQ ID NO: 12883
  source 1..80: mol_type = other DNA

SEQ ID NO: 48463 - DNA, 80 bp, synthetic construct
  source 1..80: mol_type = other DNA
tctggggtgctcagggctgatgggaggttgaggcaggctttccttccttctcactgtcctgttatgcctgaagggtaggt

SEQ ID NO: 48464 - DNA, 80 bp, synthetic construct
  source 1..80: mol_type = other DNA
gttttagaaagtcaccataaaaagatacttcacacacacctttattattacagtgcaatgtcaagacccttcacagagca

SEQ ID NO: 48465 - DNA, 80 bp, synthetic construct
  source 1..80: mol_type = other DNA
aaaaactcagttgggaccaatagagacttgctctcgacccggtctaggaaaccacttattttgacttccgaggcctgtca

SEQ ID NO: 48466 - DNA, 80 bp, synthetic construct; identical to SEQ ID NO: 12884
  source 1..80: mol_type = other DNA

SEQ ID NO: 48467 - DNA, 80 bp, synthetic construct
  source 1..80: mol_type = other DNA
atttggactcaatgaactctaaacttccttccaactcagacataaaattgctgccccgctctcatatgccctcccatcta

SEQ ID NO: 48468 - DNA, 80 bp, synthetic construct
  source 1..80: mol_type = other DNA
gccacctacctccaagcatccttcctggggaatctggcaggttttcccctgaagtttgatcaagagatataggaggaggc

SEQ ID NO: 48469 - DNA, 80 bp, synthetic construct
  source 1..80: mol_type = other DNA
aataccaaaaggtggtttttttgtttgtttgttttgttttttttgcatgtggtggtgcatgcctgtaatcccagctactc

SEQ ID NO: 48470 - DNA, 80 bp, synthetic construct; identical to SEQ ID NO: 12885
  source 1..80: mol_type = other DNA

SEQ ID NO: 48471 - DNA, 80 bp, synthetic construct
  source 1..80: mol_type = other DNA
gacagggaaaagtggtggcaaagacctcccagacaaactggctgcctctggtcctatcaagctgccgtacatcctccaca

SEQ ID NO: 48472 - DNA, 80 bp, synthetic construct
  source 1..80: mol_type = other DNA
cggtcagcaacagagctgtgttcatttaggacatgggtattgaaatggagttttgaaggctggctgaggggcctgcactc

SEQ ID NO: 48473 - DNA, 80 bp, synthetic construct
  source 1..80: mol_type = other DNA
tccttctgcagctatgcttggttctggctggcttttgctggagttgaaagactcaagtgtgctaagaagggagtcctggc

SEQ ID NO: 48474 - DNA, 80 bp, synthetic construct; identical to SEQ ID NO: 12886
  source 1..80: mol_type = other DNA

SEQ ID NO: 48475 - DNA, 80 bp, synthetic construct
  source 1..80: mol_type = other DNA
gctactggctatatgcccacggcaaatgtaatggaacctctccaagccttgctttcctcatttggcaactggacacaatt

SEQ ID NO: 48476 - DNA, 80 bp, synthetic construct
  source 1..80: mol_type = other DNA
atgaaaaaaaatgatattggttagaaatatattttgctcaggtcaccaggtttcttattaactactggtggtggcgagag

SEQ ID NO: 48477 - DNA, 80 bp, synthetic construct
  source 1..80: mol_type = other DNA
ctggccaacatggtgaaaccccatctctactaaaaatataaaaattagccaggtgtggtggcaggcgcctgtaatcccag

SEQ ID NO: 48478 - DNA, 80 bp, synthetic construct; identical to SEQ ID NO: 12887
  source 1..80: mol_type = other DNA

SEQ ID NO: 48479 - DNA, 80 bp, synthetic construct
  source 1..80: mol_type = other DNA
gtgcctgccagcgcacccggctaattttttttgtatttttagtagagacagggtttcactgtgttagctaggatggtctc

SEQ ID NO: 48480 - DNA, 80 bp, synthetic construct
  source 1..80: mol_type = other DNA
ttgagtcagggatgaactcccccaggcaggaggagatagcatcaggatctcagtgaagtgggatggtatctgagtgccta

SEQ ID NO: 48481 - DNA, 80 bp, synthetic construct
  source 1..80: mol_type = other DNA
caatcaccttggctctggttgttgtgtgccatgatgctccccgggatggtgacaaggtgctgggctctggccttcagtct

SEQ ID NO: 48482 - DNA, 80 bp, synthetic construct; identical to SEQ ID NO: 12888
  source 1..80: mol_type = other DNA

SEQ ID NO: 48483 - DNA, 80 bp, synthetic construct
  source 1..80: mol_type = other DNA
tcccaaatctcttcatccctgttcttcacatcggtatatccaactacctacctgttggtcatctggacctaaggttccat

SEQ ID NO: 48484 - DNA, 80 bp, synthetic construct
  source 1..80: mol_type = other DNA
gtcatgtagcctcctggcacaatagcatgaagtgagctgagaggtcatggaacaaaaaggctcacagaccaaatgtaaat

SEQ ID NO: 48485 - DNA, 80 bp, synthetic construct
  source 1..80: mol_type = other DNA
gaaacctcctgcatcctgagtgcctcatgtctcacgtatttagggtaccgtgaatatttagtgcctccttggtctttctg

SEQ ID NO: 48486 - DNA, 80 bp, synthetic construct; identical to SEQ ID NO: 12889
  source 1..80: mol_type = other DNA

SEQ ID NO: 48487 - DNA, 80 bp, synthetic construct
  source 1..80: mol_type = other DNA
taatcagagtgatctatccagaaatacatatcagaccgcatacctctctgctcttcctctaaggattccccttttgtcct

SEQ ID NO: 48488 - DNA, 80 bp, synthetic construct
  source 1..80: mol_type = other DNA
tgagatggtcccctgaagggaagacccatcctccccttctccaaacaccacttaaaccacttaaaccctttcattaaacc

SEQ ID NO: 48489 - DNA, 80 bp, synthetic construct
  source 1..80: mol_type = other DNA
ggggccatctcttgtggacaagaatatgagccacattcttcatatatgagaaaattacaccaatctcagaggattagagg

SEQ ID NO: 48490 - DNA, 80 bp, synthetic construct
  source 1..80: mol_type = other DNA
aggagaatccctagaacccaggaggcggaggttgtagtgagccgagattgcaccactgcactccagcctgggcgactgag

SEQ ID NO: 48491 - DNA, 80 bp, synthetic construct; identical to SEQ ID NO: 12890
  source 1..80: mol_type = other DNA

SEQ ID NO: 48492 - DNA, 80 bp, synthetic construct
  source 1..80: mol_type = other DNA
aaggacctcctacggccaagtttaagcttcaagtgggagacatgggacaattacttaccagatacaaccagtttcagagg

SEQ ID NO: 48493 - DNA, 80 bp, synthetic construct
  source 1..80: mol_type = other DNA
ggctcaggggaaggggagaggtgctaaataattaagcccccctactactcagcacccgcgtgaggcatcgtcaggcatcg

SEQ ID NO: 48494 - DNA, 80 bp, synthetic construct
  source 1..80: mol_type = other DNA
cgaaccgtcgccagcaagcacagcagtaggaccagggggatgcaagagcgggggcggccggggatcgtgcttctcgctca

SEQ ID NO: 48495 - DNA, 80 bp, synthetic construct; identical to SEQ ID NO: 12891
  source 1..80: mol_type = other DNA

SEQ ID NO: 48496 - DNA, 80 bp, synthetic construct
  source 1..80: mol_type = other DNA
aaaaatacaaaaaaattagccgggtgtggtggcgggcacctgtagtcccagctactcgggaggctgaggcaggagaatgg

SEQ ID NO: 48497 - DNA, 80 bp, synthetic construct
  source 1..80: mol_type = other DNA
gtggggggccgaagcgggcggatcacctgaggtcaggagttggagaccagcctggccaacatagcgaaaccctggcgcgc

SEQ ID NO: 48498 - DNA, 80 bp, synthetic construct
  source 1..80: mol_type = other DNA
ttgtctctccttggtcgctgtgcagtcgagtgtttttatgttcagacctcttcctgcccattttatttatttaatttatt

SEQ ID NO: 48499 - DNA, 80 bp, synthetic construct; identical to SEQ ID NO: 12892
  source 1..80: mol_type = other DNA

SEQ ID NO: 48500 - DNA, 80 bp, synthetic construct
  source 1..80: mol_type = other DNA
atgagccatcttgtgtctaagtggcaggcctatagtattatataatttttttaggaggtcatttatcatctttccaatta

SEQ ID NO: 48501 - DNA, 80 bp, synthetic construct
  source 1..80: mol_type = other DNA
ggtgggggctgtccagtcccggtggagttctgggtgggcccaaacagtctgcaactttggaaatttactgaatggatttc

SEQ ID NO: 48502 - DNA, 80 bp, synthetic construct
  source 1..80: mol_type = other DNA
cttgacagatacacttattttttttttactgtgtcactttttttttccaatttagagaaccgcatcctattccatgctgc

SEQ ID NO: 48503 - DNA, 80 bp, synthetic construct; identical to SEQ ID NO: 12893
  source 1..80: mol_type = other DNA

SEQ ID NO: 48504 - DNA, 80 bp, synthetic construct
  source 1..80: mol_type = other DNA
ttcctcatgcttcgcctgtgcgtggaccagtcagcttctgggtgtgactggagcagggcttgtctccttcttcagagtca

SEQ ID NO: 48505 - DNA, 80 bp, synthetic construct
  source 1..80: mol_type = other DNA
tgggttagggtgttggaaacttcaatggttttgtggggattttcacagagcaaggtttggtatctagttagtctagcatt

SEQ ID NO: 48506 - DNA, 80 bp, synthetic construct
  source 1..80: mol_type = other DNA
tctagttgttttgagagataggcccctggccttgaccagggccctacagtctgggttaaaactccaactgtcattttttc

SEQ ID NO: 48507 - DNA, 80 bp, synthetic construct; identical to SEQ ID NO: 12894
  source 1..80: mol_type = other DNA

SEQ ID NO: 48508 - DNA, 80 bp, synthetic construct
  source 1..80: mol_type = other DNA
aaggtccaccccgataccaccacacatcctctcggggatgaacaagggctgactgattgataagctcttggaaactctta

SEQ ID NO: 48509 - DNA, 80 bp, synthetic construct
  source 1..80: mol_type = other DNA
ttactccaggctgtagaatcctggaaaagagctaccatgcagcccacacctggtcgactggaggaccaccttagtggaag

SEQ ID NO: 48510 - DNA, 80 bp, synthetic construct
  source 1..80: mol_type = other DNA
ctctagtaaaatgaatgtttcctttagcatctatttttattagtttttagaccaaagaaagctaaacaccattttatatt

SEQ ID NO: 48511 - DNA, 80 bp, synthetic construct; identical to SEQ ID NO: 12895
  source 1..80: mol_type = other DNA

SEQ ID NO: 48512 - DNA, 80 bp, synthetic construct
  source 1..80: mol_type = other DNA
tttttaccaaaggtatattttacttttcttatacaccttgcacataaactgtttttttttttaaatagtactcaggaggc

SEQ ID NO: 48513 - DNA, 80 bp, synthetic construct
  source 1..80: mol_type = other DNA
gaatttaccatataacactctttttacataaattctgcctcccccgctttttttttttaaagtgaactttttttttgtct

SEQ ID NO: 48514 - DNA, 80 bp, synthetic construct
  source 1..80: mol_type = other DNA
aattggtatagatggcctttttttctctctgctggtctttccttgcctctgccagatgcttatgctactgttctcttaac

SEQ ID NO: 48515 - DNA, 80 bp, synthetic construct; identical to SEQ ID NO: 12896
  source 1..80: mol_type = other DNA

SEQ ID NO: 48516 - DNA, 80 bp, synthetic construct
  source 1..80: mol_type = other DNA
ttgcagtttacaccaaaccaaaatcagagtatccaaaaacccaagccaggtcaaaaccaaaaccaaaaccaaagtatcac

SEQ ID NO: 48517 - DNA, 80 bp, synthetic construct
  source 1..80: mol_type = other DNA
tcagccagtgtgttaatcctcctcgggggcctgctacgtgctgctctggcgaggcgttccacccggggaatttcctaccc

SEQ ID NO: 48518 - DNA, 80 bp, synthetic construct
  source 1..80: mol_type = other DNA
caaaacctttcagacaccgagttgtagaaggaagggctttattcagctgcgagcatcggcaagctactgccttaaaatcc

SEQ ID NO: 48519 - DNA, 80 bp, synthetic construct; identical to SEQ ID NO: 12897
  source 1..80: mol_type = other DNA

SEQ ID NO: 48520 - DNA, 80 bp, synthetic construct
  source 1..80: mol_type = other DNA
ggtctctctcttccctcaaagggaataggctgctgtggagaaaggtaaataaatggtggaaagaattacatgggggatta

SEQ ID NO: 48521 - DNA, 80 bp, synthetic construct
  source 1..80: mol_type = other DNA
gcctggccaacatggtgaaactccatctctactaaaaatacgaaaattagctgggcatggtggcacgcacccgtagtccc

SEQ ID NO: 48522 - DNA, 80 bp, synthetic construct
  source 1..80: mol_type = other DNA
tggaaagacagagaccctagaagagggagaaggcctaaggcaatttcttcttcctctcttccccatcattctttcagcca

SEQ ID NO: 48523 - DNA, 80 bp, synthetic construct; identical to SEQ ID NO: 12898
  source 1..80: mol_type = other DNA

SEQ ID NO: 48524 - DNA, 80 bp, synthetic construct
  source 1..80: mol_type = other DNA
tgggattacaggcgtgagccccgcacctggcctaaaaacttttatattaagttcaggggtatatgagcaggtttgttata

SEQ ID NO: 48525 - DNA, 80 bp, synthetic construct
  source 1..80: mol_type = other DNA
ggaatcttacttatctccagttcttatagcatatactcattctgtttctctttcctttggcctagtttgagtgcccagca

SEQ ID NO: 48526 - DNA, 80 bp, synthetic construct
  source 1..80: mol_type = other DNA
caagctctgcttcccgggttcatgccattctcctgcctcagcctcccgagtagctgggattatgggtgcctgccaccacg

SEQ ID NO: 48527 - DNA, 80 bp, synthetic construct
  source 1..80: mol_type = other DNA
tattttttttttttgagatagagtctcgctctgtcgcccaggctggagtgcaatggtgtgatctggctcactgcaatctc

SEQ ID NO: 48528 - DNA, 80 bp, synthetic construct; identical to SEQ ID NO: 12899
  source 1..80: mol_type = other DNA

SEQ ID NO: 48529 - DNA, 80 bp, synthetic construct
  source 1..80: mol_type = other DNA
tttgttcttgttgcccaggctggagtgcaatggcacaatctcagctcaccgcaacctctgcctcctgggttcaagtgatt

SEQ ID NO: 48530 - DNA, 80 bp, synthetic construct
  source 1..80: mol_type = other DNA
gggattacaggcatgagccacagcccccggctactttttattattaacattaaaatatttttgtttaattaatttattta

SEQ ID NO: 48531 - DNA, 80 bp, synthetic construct
  source 1..80: mol_type = other DNA
aatgctctccctccctttgtccccaaccctattttatttttttgagacagagtctccctctattgctcaggctggagtgc

SEQ ID NO: 48532 - DNA, 80 bp, synthetic construct; identical to SEQ ID NO: 12900
  source 1..80: mol_type = other DNA

SEQ ID NO: 48533 - DNA, 80 bp, synthetic construct
  source 1..80: mol_type = other DNA
ctctttgattctgccctacccctgagtagccatggatctgatgactatcactatagagcagtttttcctaattttttttt

SEQ ID NO: 48534 - DNA, 80 bp, synthetic construct
  source 1..80: mol_type = other DNA
tacttccagtagagatggggtttcgctatgttcaccaggctggtctcaaactcctgacctcaggtgatccacccgcctcg

SEQ ID NO: 48535 - DNA, 80 bp, synthetic construct
  source 1..80: mol_type = other DNA
tagttcattctttctttaaaaaaaatttttttttttaaattttgagacagtctcactgtcttaggctgcagtgcagtggt

SEQ ID NO: 48536 - DNA, 80 bp, synthetic construct
  source 1..80: mol_type = other DNA
caggagaatcacttgaacccagaaggcagaggttgcagtaagccgagatcgcaccactgcactctagcctgggcggcaag

SEQ ID NO: 48537 - DNA, 80 bp, synthetic construct; identical to SEQ ID NO: 12901
  source 1..80: mol_type = other DNA

SEQ ID NO: 48538 - DNA, 80 bp, synthetic construct
  source 1..80: mol_type = other DNA
tggattacagccttctgccaccatgcccactaatgttttgtatttttagtagagacagggttttgccatgttttccaggc

SEQ ID NO: 48539 - DNA, 80 bp, synthetic construct
  source 1..80: mol_type = other DNA
gctcttgtcgcccaggctggagtgcaatggcaagatctcggctcactgcaacctctgcctcccgggttcaagtgattctc

SEQ ID NO: 48540 - DNA, 80 bp, synthetic construct
  source 1..80: mol_type = other DNA
attacaggcttgagccactgcacccggccaagacagagactttttgccttttgaaccttttgaatttttaaccaagtgaa

SEQ ID NO: 48541 - DNA, 80 bp, synthetic construct
  source 1..80: mol_type = other DNA
tttgcgaggcagaggcaagcggatcacgaggtcaggagatggagaccatcctggctaacacggtgaaaccctgtctctac

SEQ ID NO: 48542 - DNA, 80 bp, synthetic construct; identical to SEQ ID NO: 12902
  source 1..80: mol_type = other DNA

SEQ ID NO: 48543 - DNA, 80 bp, synthetic construct
  source 1..80: mol_type = other DNA
ttgactaggctggtcttgaactcctgacctcaagcgatccaccgtggcccaccctcagcctttcaaatttctggcattac

SEQ ID NO: 48544 - DNA, 80 bp, synthetic construct
  source 1..80: mol_type = other DNA
gcttcagcctccccagtagctgagattactggtgcatgctaccacacccggctaatttttagtagagatggggtttcacc

SEQ ID NO: 48545 - DNA, 80 bp, synthetic construct
  source 1..80: mol_type = other DNA
ctctggtgtccatgtgggcccaaggatgtgatatttagaaaaaacacttgtaattctgggggacatgtaattgaagccac

SEQ ID NO: 48546 - DNA, 80 bp, synthetic construct
  source 1..80: mol_type = other DNA
agctgggactacaggtgcatgccaccatgcctggctactttttgtattttttgcagagacagggtttcaccatgttggcc

SEQ ID NO: 48547 - DNA, 80 bp, synthetic construct; identical to SEQ ID NO: 12903
  source 1..80: mol_type = other DNA

SEQ ID NO: 48548 - DNA, 80 bp, synthetic construct
  source 1..80: mol_type = other DNA
gtcctgcaggtcaatgcttcgaggaggggtgggaaggattgagggtgtgggggccagactgtgtagtggcaggaacccca

SEQ ID NO: 48549 - DNA, 80 bp, synthetic construct
  source 1..80: mol_type = other DNA
ttctgcctcatagtgctctcccagtcctcttctgttattagagatcaaaccaggttgctttagggcagtgattctcaaag

SEQ ID NO: 48550 - DNA, 80 bp, synthetic construct
  source 1..80: mol_type = other DNA
ggtgaaaccctgtctctactaaaaatacaaaaaattagccgagcgtggtggcaggcgtctgtaatcccagctacctggga

SEQ ID NO: 48551 - DNA, 80 bp, synthetic construct; identical to SEQ ID NO: 12904
  source 1..80: mol_type = other DNA

SEQ ID NO: 48552 - DNA, 80 bp, synthetic construct
  source 1..80: mol_type = other DNA
tctcttgtcccaggtgcctgttgggctcctacttacacctcaaaacatagcttgaacattgtctcttttgtgaactttct

SEQ ID NO: 48553 - DNA, 80 bp, synthetic construct
  source 1..80: mol_type = other DNA
ccagctccttaaacacaatgcctggcacgtggtaggtatttgataaatatttattcaatgaaggaactgcctgcaatggc

SEQ ID NO: 48554 - DNA, 80 bp, synthetic construct
  source 1..80: mol_type = other DNA
acttagtcacacactacctttcaggactaccttccacatcagccaggtgcaaaccccacaatgacttctgccatggctcc

SEQ ID NO: 48555 - DNA, 80 bp, synthetic construct; identical to SEQ ID NO: 12905
  source 1..80: mol_type = other DNA

SEQ ID NO: 48556 - DNA, 80 bp, synthetic construct
  source 1..80: mol_type = other DNA
gccctcgcttgctctccccgcctcctctgcctgggctcctactttggcggcacttgaggagcccttcagcccaccgctgc

SEQ ID NO: 48557 - DNA, 80 bp, synthetic construct
  source 1..80: mol_type = other DNA
cggagcagccggccagccctgctggcccctggcaatgagggacttagcacccgggccagcagctgcggagggtgtactgg

SEQ ID NO: 48558 - DNA, 80 bp, synthetic construct
  source 1..80: mol_type = other DNA
accccctgctccacggcgcccagtcccatcgaccacccaagggctgaggaatgcaagcgcaccgtgcgggactggtaggc

SEQ ID NO: 48559 - DNA, 80 bp, synthetic construct; identical to SEQ ID NO: 12906
  source 1..80: mol_type = other DNA

SEQ ID NO: 48560 - DNA, 80 bp, synthetic construct
  source 1..80: mol_type = other DNA
gtgtccatactgtgtatctaactaatctgatggggacttggagaacctttgtgtctagctcagggattgcaaacgcacca

SEQ ID NO: 48561 - DNA, 80 bp, synthetic construct
  source 1..80: mol_type = other DNA
tcttgctactgctcactctttgggtccatagtgcttttatgagctgtaacactcactgtgaaggtctacagcttcactcc

SEQ ID NO: 48562 - DNA, 80 bp, synthetic construct
  source 1..80: mol_type = other DNA
cagaaggaacaaactccagacgcgccaccttaagagctgtaacactcaccgcgagggtccacagtttcattcttgaagtc

SEQ ID NO: 48563 - DNA, 80 bp, synthetic construct; identical to SEQ ID NO: 12907
  source 1..80: mol_type = other DNA

SEQ ID NO: 48564 - DNA, 80 bp, synthetic construct
  source 1..80: mol_type = other DNA
gctggtctagtatcatttcagtgaacgtcactctacattttttgtgtgtgtgtgagatggagtctctgtcgcccaggctg

SEQ ID NO: 48565 - DNA, 80 bp, synthetic construct
  source 1..80: mol_type = other DNA
agctggtctcgaactcctgacctcaagtgatccgcccgccatggtctcccaaagtgccgggattacagacgtgagccacc

SEQ ID NO: 48566 - DNA, 80 bp, synthetic construct
  source 1..80: mol_type = other DNA
gggcgctgccttcctggggtgacgcagcagcaggaagagtttccggatcctggaatccgtgggcggcccgtgggaggggc

SEQ ID NO: 48567 - DNA, 80 bp, synthetic construct; identical to SEQ ID NO: 12908
  source 1..80: mol_type = other DNA

SEQ ID NO: 48568 - DNA, 80 bp, synthetic construct
  source 1..80: mol_type = other DNA
agtctgcaaggaggaggtcgcctctgtgctgtgggtccaggaatctaaggcgagtgctgagggagaaaatgtagttgatg

SEQ ID NO: 48569 - DNA, 80 bp, synthetic construct
  source 1..80: mol_type = other DNA
agggtgggactggctttatttctgcctgccatcacctcaaaatgccgtgggacaaatcttacatattattattgttattt

SEQ ID NO: 48570 - DNA, 80 bp, synthetic construct
  source 1..80: mol_type = other DNA
cgcccggctgatttttatatttttagtagagacggggttttgccatgttgtccaggctagtctcgaactcctgaccttag

SEQ ID NO: 48571 - DNA, 80 bp, synthetic construct; identical to SEQ ID NO: 12909
  source 1..80: mol_type = other DNA

SEQ ID NO: 48572 - DNA, 80 bp, synthetic construct
  source 1..80: mol_type = other DNA
gagagagagagaggaagggagggagggagggagttgaggttcagaatatgtaacagtgtttattgctatactccattcaa

SEQ ID NO: 48573 - DNA, 80 bp, synthetic construct
  source 1..80: mol_type = other DNA
ggtcaacatggtgaaacctcgtttctactaaaaatacaaaaattaccctggcatggtggcacacgcctgtaatctcagtt

SEQ ID NO: 48574 - DNA, 80 bp, synthetic construct
  source 1..80: mol_type = other DNA
aaaagatatttcccaccttggattgctgggtcggggggtggtgggtattttcattcataattgtcagattactttcataa

SEQ ID NO: 48575 - DNA, 80 bp, synthetic construct; identical to SEQ ID NO: 12910
  source 1..80: mol_type = other DNA

SEQ ID NO: 48576 - DNA, 80 bp, synthetic construct
  source 1..80: mol_type = other DNA
caggcatcttctttattctggaatgagcctgcccatccctcaggaagactgaaaggaattcggtcagaagaatattattg

SEQ ID NO: 48577 - DNA, 80 bp, synthetic construct
  source 1..80: mol_type = other DNA
aattttacaacctgctgtagcatctttgctcccactgtgacagtaaactccttgagactggtggccatcttgggaagtga

SEQ ID NO: 48578 - DNA, 80 bp, synthetic construct
  source 1..80: mol_type = other DNA
atctgctggttccctaacctcagatttccagggtccagaattgtgagaaagaaatgtctgttgttaaccaatccatctgt

SEQ ID NO: 48579 - DNA, 80 bp, synthetic construct; identical to SEQ ID NO: 12911
  source 1..80: mol_type = other DNA

SEQ ID NO: 48580 - DNA, 80 bp, synthetic construct
  source 1..80: mol_type = other DNA
accagcctggccagcatgatgaaaccctgtttctactaaaaatacaaaaattagctgggcgtggtggtaggtgcctgtaa

SEQ ID NO: 48581 - DNA, 80 bp, synthetic construct
  source 1..80: mol_type = other DNA
ctttatattatctctcattctgtgggctgattgggctcagctgggcagctcttccgctccatacaacatgggctgggcca

SEQ ID NO: 48582 - DNA, 80 bp, synthetic construct
  source 1..80: mol_type = other DNA
tgcacctggggtccgggtgtttcaagtggccaagtcagaaccacaaggcatcttatgctggaacctcagaagtcaggcag

SEQ ID NO: 48583 - DNA, 80 bp, synthetic construct; identical to SEQ ID NO: 12912
  source 1..80: mol_type = other DNA

SEQ ID NO: 48584 - DNA, 80 bp, synthetic construct
  source 1..80: mol_type = other DNA
accctggaggctgaggcaggagaatcgcttgaacccaggaggtgaaggttgcagtgagccaatatcgcaccactgccctc

SEQ ID NO: 48585 - DNA, 80 bp, synthetic construct
  source 1..80: mol_type = other DNA
ggagagaaactgagacacgcaggtatgtgcaaaggaagaaccttccagaatcaccctcatgtacacctatgctctgtaca

SEQ ID NO: 48586 - DNA, 80 bp, synthetic construct
  source 1..80: mol_type = other DNA
tgtggaggaagactaggagaggaggggaggccaaagcgtgtcccaccctcactccacctctctgctctctgtctcctaca

SEQ ID NO: 48587 - DNA, 80 bp, synthetic construct; identical to SEQ ID NO: 12913
  source 1..80: mol_type = other DNA

SEQ ID NO: 48588 - DNA, 80 bp, synthetic construct
  source 1..80: mol_type = other DNA
gatgtcctcagtcaccctctgagcactcacacatcaccccttatttggaaatttttctcactctaaccttccttcctgcc

SEQ ID NO: 48589 - DNA, 80 bp, synthetic construct
  source 1..80: mol_type = other DNA
ggagaatgggcacagccagagcagagtggaagggttgggggaggcgataaagacagatgtttccgtattaccatttttct

SEQ ID NO: 48590 - DNA, 80 bp, synthetic construct
  source 1..80: mol_type = other DNA
aaagaaaaatcttagtgatccctcctgctgtctctttccttttgcctattctggcaaattttgtaagtgaaatttgttac

SEQ ID NO: 48591 - DNA, 80 bp, synthetic construct
  source 1..80: mol_type = other DNA
aaggtggtgctgaaatgagtcatttatttgcctgtgtaagctcaggcaggtgttggaattgaggaagtataggtaatgaa

SEQ ID NO: 48592 - DNA, 80 bp, synthetic construct; identical to SEQ ID NO: 12914
  source 1..80: mol_type = other DNA

SEQ ID NO: 48593 - DNA, 80 bp, synthetic construct
  source 1..80: mol_type = other DNA
gagtttctccagcagtgatcaatgctgtctcatccttaggagcagcccaccctgaatcctctcagggtgtacagtttatt

SEQ ID NO: 48594 - DNA, 80 bp, synthetic construct
  source 1..80: mol_type = other DNA
tttaaattcttttaaatgaagaagtcaagaaccaaggtattacaacagccgtcaacatttccggtgccatgactcagagg

SEQ ID NO: 48595 - DNA, 80 bp, synthetic construct
  source 1..80: mol_type = other DNA
tttccatttggctgctgcttttacagtgtttacaattaccttatttggatggaacgccctgattattcagccttgggact

SEQ ID NO: 48596 - DNA, 80 bp, synthetic construct
  source 1..80: mol_type = other DNA
gcaacctccacctcctgggctcaagcgattctcctgcctcagcctcccaagtagctgggattacaggcgtgcaccatcac

SEQ ID NO: 48597 - DNA, 80 bp, synthetic construct; identical to SEQ ID NO: 12915
  source 1..80: mol_type = other DNA

SEQ ID NO: 48598 - DNA, 80 bp, synthetic construct
  source 1..80: mol_type = other DNA
tggacattaaaaatggcagatcagtgaaataaggaagggcttgttggtgagacatccaggctccccggctggcagcagag

SEQ ID NO: 48599 - DNA, 80 bp, synthetic construct
  source 1..80: mol_type = other DNA
ggattttggtacatgtttctgtggttgcaggattctcttgttacctagaaagccacctcctctactgtcactgaaacacc

SEQ ID NO: 48600 - DNA, 80 bp, synthetic construct
  source 1..80: mol_type = other DNA
gaaaccccatctctactaaaaatacaaaattagctgggcatggcggcacattcctgtaatcccagctactcgggaggctg

SEQ ID NO: 48601 - DNA, 80 bp, synthetic construct; identical to SEQ ID NO: 12916
  source 1..80: mol_type = other DNA

SEQ ID NO: 48602 - DNA, 80 bp, synthetic construct
  source 1..80: mol_type = other DNA
ctggcagggcttccgtccaggctgtgcactgtctgggaatcctcatttgcaatgtctggagatcttcatttttcttacta

SEQ ID NO: 48603 - DNA, 80 bp, synthetic construct
  source 1..80: mol_type = other DNA
ctttttctctctaacccgtaagactgataaaaattgtcctaaagtttctttctttctgctttgtgtgtcagggctcctct

SEQ ID NO: 48604 - DNA, 80 bp, synthetic construct
  source 1..80: mol_type = other DNA
cagcctcccgagtagctgggactacaggtgtgtgccaccacgcctggctaatttttttgtatttttagtagagatggggt

SEQ ID NO: 48605 - DNA, 80 bp, synthetic construct; identical to SEQ ID NO: 12917
  source 1..80: mol_type = other DNA

SEQ ID NO: 48606 - DNA, 80 bp, synthetic construct
  source 1..80: mol_type = other DNA
gttgctgtttttaaataaaaagaaaggaagtttgggtgcagtggctcatgcctgtaatcccagcactttgggaggccaag

SEQ ID NO: 48607 - DNA, 80 bp, synthetic construct
  source 1..80: mol_type = other DNA
tcgggaggctgaggcaggagaatcactggaacctgggaggcagaggttgcagtgagacaagattcagccactgcactcta

SEQ ID NO: 48608 - DNA, 80 bp, synthetic construct; identical to SEQ ID NO: 12918
  source 1..80: mol_type = other DNA

SEQ ID NO: 48609 - DNA, 80 bp, synthetic construct
  source 1..80: mol_type = other DNA
atcccagctactcaggaggctgaggcaagataatcacttgaacgtgggaggcggaggttgcagtgagccgagatcgcacc

SEQ ID NO: 48610 - DNA, 80 bp, synthetic construct
  source 1..80: mol_type = other DNA
cgagaccagcctggccaacatggtgaaaccctgtctctactaaaaataaaaaaattagtcgggtgtggtggcgcaggcct

SEQ ID NO: 48611 - DNA, 80 bp, synthetic construct
  source 1..80: mol_type = other DNA
accaacaactttcctcccttacaatctagtccagggttactcttcaaacctcttaagcttctactcctgtagtccttcct

SEQ ID NO: 48612 - DNA, 80 bp, synthetic construct; identical to SEQ ID NO: 12919
  source 1..80: mol_type = other DNA

SEQ ID NO: 48613 - DNA, 80 bp, synthetic construct
  source 1..80: mol_type = other DNA
cagagtggaaaaggcacatagagatcaaagggaagaaaagagagacaaaagatagtcccaatttttggccttcactcact

SEQ ID NO: 48614 - DNA, 80 bp, synthetic construct
  source 1..80: mol_type = other DNA
gaaggactgtctccaactctgaagggaggagggactcctaattccttattgtccctggctaaagactaaagagaccaaag

SEQ ID NO: 48615 - DNA, 80 bp, synthetic construct
  source 1..80: mol_type = other DNA
actgtcattggtgttaatagcaaactccagactaggattttcactctaccatgcagctgaccaacttctgctgcagtaaa

SEQ ID NO: 48616 - DNA, 80 bp, synthetic construct
  source 1..80: mol_type = other DNA
gctcctgtccaaaaacagccaagacccaaaacatcaggcaattaatgttgcctcagcataagcttctattcaagaaaaca

SEQ ID NO: 48617 - DNA, 80 bp, synthetic construct; identical to SEQ ID NO: 12920
  source 1..80: mol_type = other DNA

SEQ ID NO: 48618 - DNA, 80 bp, synthetic construct
  source 1..80: mol_type = other DNA
tttcttaccttgctttttacccagagcaattccccttctgcctttacagcaaccatgccagtttcactccttttatagaa

SEQ ID NO: 48619 - DNA, 80 bp, synthetic construct
  source 1..80: mol_type = other DNA
cttttaccacctcgatgcaaaatgcttttgcagcacaaatttcaccatcacatagaatttgcttgtgttggccgggcgca

SEQ ID NO: 48620 - DNA, 80 bp, synthetic construct
  source 1..80: mol_type = other DNA
tcaggaggctgaggcaggagaatcgcttgaaccagggagtcggaggttgcaatgagctgagatcgcactactgtactcca

SEQ ID NO: 48621 - DNA, 80 bp, synthetic construct; identical to SEQ ID NO: 12921
  source 1..80: mol_type = other DNA

SEQ ID NO: 48622 - DNA, 80 bp, synthetic construct
  source 1..80: mol_type = other DNA
cttagaccttctcacagttggacaacgaggaacatgtttgtatctagaagaagaatgttgttttcgcatcaatcaaatta

SEQ ID NO: 48623 - DNA, 80 bp, synthetic construct
  source 1..80: mol_type = other DNA
tttggtccaactttgtttaaaatgctgatttcccagcctggccaacatgtcgaaacactgtctctactaaaaatacaaaa

SEQ ID NO: 48624 - DNA, 80 bp, synthetic construct
  source 1..80: mol_type = other DNA
aaaaaaaaaaattgctgatttcttgctttgtcacctacagcaaatcccggttcatgtgatggttttgcaaggcttccaac

SEQ ID NO: 48625 - DNA, 80 bp, synthetic construct; identical to SEQ ID NO: 12922
  source 1..80: mol_type = other DNA

SEQ ID NO: 48626 - DNA, 80 bp, synthetic construct
  source 1..80: mol_type = other DNA
gagcatgcgcattttgattttacctaccgtcaaactgacccttagctcattacaatagtaagaaacacacacctgggtgg

SEQ ID NO: 48627 - DNA, 80 bp, synthetic construct
  source 1..80: mol_type = other DNA
aagggagtttctgcagcaataatcaatgctgtctcatccttaggagcagcccaccctgaatcctctctctcagggcatac

SEQ ID NO: 48628 - DNA, 80 bp, synthetic construct
  source 1..80: mol_type = other DNA
ccttaggaaagtgaaatgagcacccaatgcccagattttggttataatacatcaatctccaatagaaggaaccagggctc

SEQ ID NO: 48629 - DNA, 80 bp, synthetic construct
  source 1..80: mol_type = other DNA
accagcctggtcaacatggtgaaaccccatctctactaaaaatacaaaaaattagccaggcgtagtggtgggcacctgta

SEQ ID NO: 48630 - DNA, 80 bp, synthetic construct; identical to SEQ ID NO: 12923
  source 1..80: mol_type = other DNA

SEQ ID NO: 48631 - DNA, 80 bp, synthetic construct
  source 1..80: mol_type = other DNA
gtggaggttgcagtgagctgagattgcactccagcctgggcaacaggagcgaaactctgtctcaaaaaaacaaaaaacaa

SEQ ID NO: 48632 - DNA, 80 bp, synthetic construct
  source 1..80: mol_type = other DNA
aggttcctcaaaaaattaaaatatagaactaccatatgatccagcaatcctaccactgaatatatattcaaaggatataa

SEQ ID NO: 48633 - DNA, 80 bp, synthetic construct
  source 1..80: mol_type = other DNA
tgtgcgagccaccacacctggctgcagtgttattctcaagagccaagatatggaatcaacctaagtatccattaatggat

SEQ ID NO: 48634 - DNA, 80 bp, synthetic construct; identical to SEQ ID NO: 12924
  source 1..80: mol_type = other DNA

SEQ ID NO: 48635 - DNA, 80 bp, synthetic construct
  source 1..80: mol_type = other DNA
taaaatacaaaagaaattagccgggtgtcgtggcatgcgcctgtagtcccagctactcgggaggctgagacaggagaatt

SEQ ID NO: 48636 - DNA, 80 bp, synthetic construct
  source 1..80: mol_type = other DNA
catgatcttggctcattgcagtctctgaatcactcgggttcaagtgattcttgtgcctcaacctcccaagtagctgggac

SEQ ID NO: 48637 - DNA, 80 bp, synthetic construct
  source 1..80: mol_type = other DNA
tttcaattagataggaagaataagtttaagagatctattgtactttatggtgattaaacttagtaaccacatattgtata

SEQ ID NO: 48638 - DNA, 80 bp, synthetic construct; identical to SEQ ID NO: 12925
  source 1..80: mol_type = other DNA

SEQ ID NO: 48639 - DNA, 80 bp, synthetic construct
  source 1..80: mol_type = other DNA
gaacaaaaagtgcccagcagggtctctgacagcaagctcctacattaatctaatggctggacttcaatagccttagcccc

SEQ ID NO: 48640 - DNA, 80 bp, synthetic construct
  source 1..80: mol_type = other DNA
gcttgtccctggctgaagacaggcccctcctgcagaggccaggcatgaatgcacatctgagtaagactctattatgactc

SEQ ID NO: 48641 - DNA, 80 bp, synthetic construct
  source 1..80: mol_type = other DNA
tgggggccttcctgtagtgtcatcccatggtgaaagaggtagggcaaaggggccaaacatactttttatcaggagcccac

SEQ ID NO: 48642 - DNA, 80 bp, synthetic construct; identical to SEQ ID NO: 12926
  source 1..80: mol_type = other DNA

SEQ ID NO: 48643 - DNA, 80 bp, synthetic construct
  source 1..80: mol_type = other DNA
caacgacaggaagttactctatatggtctaaaaagggaaggcataaataacccaccccttgtttagcatatcatcaagaa

SEQ ID NO: 48644 - DNA, 80 bp, synthetic construct
  source 1..80: mol_type = other DNA
tctgaatcaagactcctttcctgtaacaaaaccttagcattaggtaatctgtggtttacttttttttttttttttttttt

SEQ ID NO: 48645 - DNA, 80 bp, synthetic construct
  source 1..80: mol_type = other DNA
tttggtagagatggggtttctccatgttggtcaggctggtcccaacctcaggtgatcctcctgccttggcttcccaaagt

SEQ ID NO: 48646 - DNA, 80 bp, synthetic construct; identical to SEQ ID NO: 12927
  source 1..80: mol_type = other DNA

SEQ ID NO: 48647 - DNA, 80 bp, synthetic construct
  source 1..80: mol_type = other DNA
aaaggttcagcttcttcaacttccttgttctttgttttctatttctaaaacccaacttccttgtactctcttgttcctag

SEQ ID NO: 48648 - DNA, 80 bp, synthetic construct
  source 1..80: mol_type = other DNA
ctgaaacagcccttcccgccctacttactcacactcctgctccatttgaaatagccaattgggatcagcttagattgtgc

SEQ ID NO: 48649 - DNA, 80 bp, synthetic construct; identical to SEQ ID NO: 12928
  source 1..80: mol_type = other DNA

SEQ ID NO: 48650 - DNA, 80 bp, synthetic construct
  source 1..80: mol_type = other DNA
tggctaattttttgtatctttagtacagatggggtttctccatgttggccaggctggtcttgaactcctgacctcatgat

SEQ ID NO: 48651 - DNA, 80 bp, synthetic construct
  source 1..80: mol_type = other DNA
gcctcccgagtagctgggatgacaggtgcctgccaccatgcctggccaatttttgtatttttagtaaagacagggttttg

SEQ ID NO: 48652 - DNA, 80 bp, synthetic construct
  source 1..80: mol_type = other DNA
tctcaatcaattcggtgttcattttgccaaggttgaaaatatgctgggggaaaagaaacataagccacaataggacctgt

SEQ ID NO: 48653 - DNA, 80 bp, synthetic construct; identical to SEQ ID NO: 12929
  source 1..80: mol_type = other DNA

SEQ ID NO: 48654 - DNA, 80 bp, synthetic construct
  source 1..80: mol_type = other DNA
aaagcatggtagaagaaaatgggtgtctgctcatgggtttagtctaacctcttctgctagaatgatttattcctggaaga

SEQ ID NO: 48655 - DNA, 80 bp, synthetic construct
  source 1..80: mol_type = other DNA
gaaacaaatggaatgcaatcctggaaaagtaatttaggatatgctaccgagaagtccatacttcagtaggcaggcacaaa

SEQ ID NO: 48656 - DNA, 80 bp, synthetic construct
  source 1..80: mol_type = other DNA
acattttataggtgaaaagaagggagtagagaaaaaatctattatgcatttgtcttgcacttagtaagtctacattgtac

SEQ ID NO: 48657 - DNA, 80 bp, synthetic construct
  source 1..80: mol_type = other DNA
taatttctagtgattccaagtgagaaaaatgggagaaatttttcttttgaaaatgttactttggagacttatagccaggg

SEQ ID NO: 48658 - DNA, 80 bp, synthetic construct; identical to SEQ ID NO: 12930
  source 1..80: mol_type = other DNA

SEQ ID NO: 48659 - DNA, 80 bp, synthetic construct
  source 1..80: mol_type = other DNA
caccaagcccagctaattttgtatttttagtcaggacggggttactccatgtttgtcaagctggtctcgaactcccaacc

SEQ ID NO: 48660 - DNA, 80 bp, synthetic construct
  source 1..80: mol_type = other DNA
ctgcagatacttgtatgaatgaggtaaatttctgtcttctcaaggtctcaaaataacgtgtggttcctaggtctgtgaga

SEQ ID NO: 48661 - DNA, 80 bp, synthetic construct
  source 1..80: mol_type = other DNA
ttctagccaaagccttggtaaaataatcagtgtcaaaattatgtcctgttaagaaagaaaacagatttttattaaactca

SEQ ID NO: 48662 - DNA, 80 bp, synthetic construct
  source 1..80: mol_type = other DNA
ctaaaaatacaaaaattagccaggcgtggtggcgggtgcctgtaattccagctactcaggaggctgagacaggagaatca

SEQ ID NO: 48663 - DNA, 80 bp, synthetic construct; identical to SEQ ID NO: 12931
  source 1..80: mol_type = other DNA

SEQ ID NO: 48664 - DNA, 80 bp, synthetic construct
  source 1..80: mol_type = other DNA
aaccccatctctactaaaaatacaaaaaattagctgagcgtggtggtgcacatctgtagtcccagctacttgggaggctg

SEQ ID NO: 48665 - DNA, 80 bp, synthetic construct
  source 1..80: mol_type = other DNA
ttacttttcctttaacaaaagccctatttccatgccttcttatgtttctaccaaaaaccacattctacttttctttgcat

SEQ ID NO: 48666 - DNA, 80 bp, synthetic construct
  source 1..80: mol_type = other DNA
ccgcctcccaggttcaagcgattctcctgcctcagtctcccaagtagctgggactacaggtgtgtgccactacgcccggc

SEQ ID NO: 48667 - DNA, 80 bp, synthetic construct; identical to SEQ ID NO: 12932
  source 1..80: mol_type = other DNA

SEQ ID NO: 48668 - DNA, 80 bp, synthetic construct
  source 1..80: mol_type = other DNA
ctctgtgatcagcccatttcccagccattgtatacgccaaagtcaagttttctcacaatataaagtgatttctgatccca

SEQ ID NO: 48669 - DNA, 80 bp, synthetic construct
  source 1..80: mol_type = other DNA
tcttgggattccctgaggaaaaaacagcagtttctcacaaaaatgcgtctgtggtgccttttgcatttttcttaagggat

SEQ ID NO: 48670 - DNA, 80 bp, synthetic construct
  source 1..80: mol_type = other DNA
aggtcaggagttcgagatcagcctcgccaatatagtgaaaccccgtctctactaaaaatacaaaaattagctgggtgtgg

SEQ ID NO: 48671 - DNA, 80 bp, synthetic construct
  source 1..80: mol_type = other DNA
tagggaaacagaggaagtgcatgtggctagcagggggttgaaaaagagagacatttagttgactgagaaatgtttaccca

SEQ ID NO: 48672 - DNA, 80 bp, synthetic construct; identical to SEQ ID NO: 12933
  source 1..80: mol_type = other DNA

SEQ ID NO: 48673 - DNA, 80 bp, synthetic construct
  source 1..80: mol_type = other DNA
cctctcaggttcaagcgattctcctgcctcagcctcctgagtagctgggactacaggtgcccaccaccacacccgactaa

SEQ ID NO: 48674 - DNA, 80 bp, synthetic construct
  source 1..80: mol_type = other DNA
cgcacccggctgagaagtgtttaattttaactaccagaagtgtttgaagtgatttttttgctcttaatttagtcaaggga

SEQ ID NO: 48675 - DNA, 80 bp, synthetic construct
  source 1..80: mol_type = other DNA
tgttcctgttatataaatgaaacctctcaggtagtcaaattttatctttttttaaccagctgggggttttacaggtgcaa

SEQ ID NO: 48676 - DNA, 80 bp, synthetic construct
  source 1..80: mol_type = other DNA
taaactaatgggctagaaacagagaaagggaggtagaatttcccacttacagccagaccctgcagcacagctttccagag

SEQ ID NO: 48677 - DNA, 80 bp, synthetic construct; identical to SEQ ID NO: 12934
  source 1..80: mol_type = other DNA

SEQ ID NO: 48678 - DNA, 80 bp, synthetic construct
  source 1..80: mol_type = other DNA
ggttggattgaaggacgcaaaatactgatcctgggcatgtctgtgagggtgttgccaaaggagattaacatttgagtcag

SEQ ID NO: 48679 - DNA, 80 bp, synthetic construct
  source 1..80: mol_type = other DNA
tcgaactccaagttcttccgctttgggactcggactggcttccttgctcctcagcttgcaggcgacctattgtgggacca

SEQ ID NO: 48680 - DNA, 80 bp, synthetic construct
  source 1..80: mol_type = other DNA
gccttacaggaatttaccctggatcatgtcctacaataacctctccccaaacacagtaagaagatgtagcatgcagatac

SEQ ID NO: 48681 - DNA, 80 bp, synthetic construct; identical to SEQ ID NO: 12935
  source 1..80: mol_type = other DNA

SEQ ID NO: 48682 - DNA, 80 bp, synthetic construct
  source 1..80: mol_type = other DNA
cgcgcccagcctagttaggatttttaaaattctgacaatcaggaatgggggttcaggagtggtgctgatgcagaggaggg

SEQ ID NO: 48683 - DNA, 80 bp, synthetic construct
  source 1..80: mol_type = other DNA
tgttcaactgaagagaaaatatggcacagtcagaataaggcatgaaaaggggaaagtgaggcaggaacacacggcacaca

SEQ ID NO: 48684 - DNA, 80 bp, synthetic construct
  source 1..80: mol_type = other DNA
tgcatcagatgcccatgacctatgtgatgagattgaagaaaaacatactaaggttcagggaggaactaagtgtttcatga

SEQ ID NO: 48685 - DNA, 80 bp, synthetic construct; identical to SEQ ID NO: 12936
  source 1..80: mol_type = other DNA

SEQ ID NO: 48686 - DNA, 80 bp, synthetic construct
  source 1..80: mol_type = other DNA
ggacatgtgcagaacagcaaacaattttagtcacctgatgtgtttccttggcttcctgttcagttttccttaggcctcag

SEQ ID NO: 48687 - DNA, 80 bp, synthetic construct
  source 1..80: mol_type = other DNA
ttgcacagtgtgtttggtcaccccagtgctcaggctgaaccctgagaagaaagaggaacttgactgtctgaaggctcttg

SEQ ID NO: 48688 - DNA, 80 bp, synthetic construct
  source 1..80: mol_type = other DNA
ttcacgccattctcctgcctcagcctcctgagtagctgggactacaggcacccgccaccacacccggctaattttttgta

SEQ ID NO: 48689 - DNA, 80 bp, synthetic construct; identical to SEQ ID NO: 12937
  source 1..80: mol_type = other DNA

SEQ ID NO: 48690 - DNA, 80 bp, synthetic construct
  source 1..80: mol_type = other DNA
tgggctgactgcttggttcaagtcttctttataatatacaaagttgttttagctttttgaccgtagctttgtaatgccat

SEQ ID NO: 48691 - DNA, 80 bp, synthetic construct
  source 1..80: mol_type = other DNA
cagcaagctattgctagggccttggagggacaaacagggagtgtacatacaattttatactggcagtttttatagtactt

SEQ ID NO: 48692 - DNA, 80 bp, synthetic construct
  source 1..80: mol_type = other DNA
ctaggtaaagacttcggtcatagcatatataaggctggccatttcttgggtcacaaattgaacaggtggtctgattataa

SEQ ID NO: 48693 - DNA, 80 bp, synthetic construct
  source 1..80: mol_type = other DNA
cacgcccggctaattttttttttttttatttttagtagagacgggggtttcaccgtgttagccaggatggtctcgatctc

SEQ ID NO: 48694 - DNA, 80 bp, synthetic construct; identical to SEQ ID NO: 12938
  source 1..80: mol_type = other DNA

SEQ ID NO: 48695 - DNA, 80 bp, synthetic construct
  source 1..80: mol_type = other DNA
gtgcatagactagtcagcttccggtgtgtgactagagcaaggcttgttgtttcttcaaacttcagctgtgcgtagactgg

SEQ ID NO: 48696 - DNA, 80 bp, synthetic construct
  source 1..80: mol_type = other DNA
caactttaacagcagtgggagtggacaagattactctgtggggcttatcttacatgggtcttagagaagttgggttctac

SEQ ID NO: 48697 - DNA, 80 bp, synthetic construct
  source 1..80: mol_type = other DNA
tttaatttgacggtggctgattgaacaaaatcttatagggtaaatacttagtttgtttggtgggggtgcgcttggctcag

SEQ ID NO: 48698 - DNA, 80 bp, synthetic construct; identical to SEQ ID NO: 12939
  source 1..80: mol_type = other DNA

SEQ ID NO: 48699 - DNA, 80 bp, synthetic construct
  source 1..80: mol_type = other DNA
tggtgggtgcctgtagtcccagctactcgggaggctgaggcgggagaatggcgtgaacctgggaggcggagcttgcagtg

SEQ ID NO: 48700 - DNA, 80 bp, synthetic construct
  source 1..80: mol_type = other DNA
cttagctttaacttaaagtaagtaaatgcaatacttattattattattattatttttaaatttctgcctcagaatgaata

SEQ ID NO: 48701 - DNA, 80 bp, synthetic construct
  source 1..80: mol_type = other DNA
gtcccctgcactgggaggcaaccacaacaggcacggcccatgctcctgcaccacctggcttctgcttgggtgtggatgat

SEQ ID NO: 48702 - DNA, 80 bp, synthetic construct; identical to SEQ ID NO: 12940
  source 1..80: mol_type = other DNA

SEQ ID NO: 48703 - DNA, 80 bp, synthetic construct
  source 1..80: mol_type = other DNA
acatggagaaaccctgtctctactaaaaataaaaaattagctgggcgtggtggcgcatgcctgtaatcccagctactcgg

SEQ ID NO: 48704 - DNA, 80 bp, synthetic construct
  source 1..80: mol_type = other DNA
ggtgctcccacaaaaggagaagtgacaagaatgtatttaagacattgcactaacacatctattcatgatgttaattcaaa

SEQ ID NO: 48705 - DNA, 80 bp, synthetic construct
  source 1..80: mol_type = other DNA
aaagtgagagacagagcctggccggagcaggatgataacggctctcctacagagtactattcctgtaaatctctgacgag

SEQ ID NO: 48706 - DNA, 80 bp, synthetic construct; identical to SEQ ID NO: 12941
  source 1..80: mol_type = other DNA

SEQ ID NO: 48707 - DNA, 80 bp, synthetic construct
  source 1..80: mol_type = other DNA
ctctctctttctttttttttttttttttttttgagacagagtttatctcttgttgccaggctggagtgcaatggcgtgat

SEQ ID NO: 48708 - DNA, 80 bp, synthetic construct
  source 1..80: mol_type = other DNA
gggttttcaccatgttagccaggctggtctcgaattcctgacctcaggtgatctgcctgtcttggcttcccaaagtgctg

SEQ ID NO: 48709 - DNA, 80 bp, synthetic construct
  source 1..80: mol_type = other DNA
agagtgagtgagtcacaggggagatctgggagggaaacactgcaactctttcattcccagaaaaagaaggttgatccagg

SEQ ID NO: 48710 - DNA, 80 bp, synthetic construct
  source 1..80: mol_type = other DNA
aggggagctgagaacaatctgtgtcttgctggtctgcagaaggcagctctcaaactgtagagaacagtttgggatgatga

SEQ ID NO: 48711 - DNA, 80 bp, synthetic construct; identical to SEQ ID NO: 12942
  source 1..80: mol_type = other DNA

SEQ ID NO: 48712 - DNA, 80 bp, synthetic construct
  source 1..80: mol_type = other DNA
accacaaacaaagaaggattaatttaatgtgtggaattctatgaataataaacatgaatgctctagagacacctataaca

SEQ ID NO: 48713 - DNA, 80 bp, synthetic construct
  source 1..80: mol_type = other DNA
acaggattactatgaaatcaggatgagggtgaactctcacgacagcaaagggattgttattgctatcaggattggtatgg

SEQ ID NO: 48714 - DNA, 80 bp, synthetic construct
  source 1..80: mol_type = other DNA
tgtaattggaaaaattaacctttattcacaaaagagatgggctgccccctataccacgaatcagagaagagaccatgaat

SEQ ID NO: 48715 - DNA, 80 bp, synthetic construct
  source 1..80: mol_type = other DNA
gctgccccctataccacgaatcagagaagagaccatgaattgaaatgggaacttggaattgtcattattccgtaattata

SEQ ID NO: 48716 - DNA, 80 bp, synthetic construct; identical to SEQ ID NO: 12943
  source 1..80: mol_type = other DNA

SEQ ID NO: 48717 - DNA, 80 bp, synthetic construct
  source 1..80: mol_type = other DNA
caccatctgtgacagcttcttgatctgtccccaggtgggtggctgtgttcaacgggtgttgctcgtgacagttagggtcc

SEQ ID NO: 48718 - DNA, 80 bp, synthetic construct
  source 1..80: mol_type = other DNA
ccaagttattattttacctatgtcccaactttttgttattggatctcttcaccaaaccagttgttctgctcctgtctttg

SEQ ID NO: 48719 - DNA, 80 bp, synthetic construct
  source 1..80: mol_type = other DNA
tcataactgagcattttcaattaattgcatggaatgaaccatgtataaagaatcagaaatcacattaacaggcatatcaa

SEQ ID NO: 48720 - DNA, 80 bp, synthetic construct; identical to SEQ ID NO: 12944
  source 1..80: mol_type = other DNA

SEQ ID NO: 48721 - DNA, 80 bp, synthetic construct
  source 1..80: mol_type = other DNA
gtctccagtttctctttacttagcagccactgttctatccaaattggcttatctgttaaccattttaaaggtataggttc

SEQ ID NO: 48722 - DNA, 80 bp, synthetic construct
  source 1..80: mol_type = other DNA
ctatataattgctctggaagtagaacttgtgctccccattgttgtaataaatctctcccccataaatttatagatacgga

SEQ ID NO: 48723 - DNA, 80 bp, synthetic construct
  source 1..80: mol_type = other DNA
gaaatgtccgctcctgtatctaccaaatctttacatttctttccctgaatagttatttcacaggtaggacgtttatcagt

SEQ ID NO: 48724 - DNA, 80 bp, synthetic construct; identical to SEQ ID NO: 12945
  source 1..80: mol_type = other DNA

SEQ ID NO: 48725 - DNA, 80 bp, synthetic construct
  source 1..80: mol_type = other DNA
gggaatggcctgagccagaaatgccccggtttggaatggggccccgggatgggcccctcatggtgtttcctgaaatcagg

SEQ ID NO: 48726 - DNA, 80 bp, synthetic construct
  source 1..80: mol_type = other DNA
aaacagttaaaacaagctccaggaaatggagtatttcctttatccactctcagtcctgccattgcctgtgccaacaaagt

SEQ ID NO: 48727 - DNA, 80 bp, synthetic construct
  source 1..80: mol_type = other DNA
acctttttaagagactcctgtcttaagagattccaagctataaaatctgcatacagttcttttggtccctgttttacagc

SEQ ID NO: 48728 - DNA, 80 bp, synthetic construct; identical to SEQ ID NO: 12946
  source 1..80: mol_type = other DNA

SEQ ID NO: 48729 - DNA, 80 bp, synthetic construct
  source 1..80: mol_type = other DNA
atgtagctataatatttccctgttgatcaggtggtgtattctaacagggaactgccaagcctctatatcaccctctcgtc

SEQ ID NO: 48730 - DNA, 80 bp, synthetic construct
  source 1..80: mol_type = other DNA
gggtagggatgaacctcttcctcctttgccgctttagctttagctggcaaataaacctgctctgtaacctcttctgttac

SEQ ID NO: 48731 - DNA, 80 bp, synthetic construct
  source 1..80: mol_type = other DNA
ttccccattctccaactgttgctctggcgacccttcaacctggattcgagcccccacgtatgggtgctgcttactgagac

SEQ ID NO: 48732 - DNA, 80 bp, synthetic construct; identical to SEQ ID NO: 12947
  source 1..80: mol_type = other DNA

SEQ ID NO: 48733 - DNA, 80 bp, synthetic construct
  source 1..80: mol_type = other DNA
gggcatcatggccatcacgaacatgtcacagtgctgcagagattttgtttatggccagttttggggccagtttatggcca

SEQ ID NO: 48734 - DNA, 80 bp, synthetic construct
  source 1..80: mol_type = other DNA
gtagattttcttacactcagcagctaataaaatatctgaaccccacaaaaaacccctgtttatctctgttatctctgggt

SEQ ID NO: 48735 - DNA, 80 bp, synthetic construct
  source 1..80: mol_type = other DNA
tctttctttcctccttccttccttccttgttttttgtttttgagacaggttctcactctgttgccgtgtctggagtgcag

SEQ ID NO: 48736 - DNA, 80 bp, synthetic construct; identical to SEQ ID NO: 12948
  source 1..80: mol_type = other DNA

SEQ ID NO: 48737 - DNA, 80 bp, synthetic construct
  source 1..80: mol_type = other DNA
tcaaggccagacatggtggctcatgcttgtaatcccagcactttgggaggcccatatcacctggggtcgggagttcgaga

SEQ ID NO: 48738 - DNA, 80 bp, synthetic construct
  source 1..80: mol_type = other DNA
gcactccagcctggcggtagagtgagactttgtctcaaaaaaaaaaaaaacaaaaaaaaaaaactccaataatcagttca

SEQ ID NO: 48739 - DNA, 80 bp, synthetic construct
  source 1..80: mol_type = other DNA
cctcctgagtagctgggactgcaggtgtgcaccaccatgtccagcttaacattttattttatctgatagtagagtgaagc

SEQ ID NO: 48740 - DNA, 80 bp, synthetic construct; identical to SEQ ID NO: 12949
  source 1..80: mol_type = other DNA

SEQ ID NO: 48741 - DNA, 80 bp, synthetic construct
  source 1..80: mol_type = other DNA
attttatgctgaatcatttgaccatgtgaggaaagcatatttttggactcttatcccatcttgactagagggatcagtaa

SEQ ID NO: 48742 - DNA, 80 bp, synthetic construct
  source 1..80: mol_type = other DNA
ttcttgtgtgcactgcccttcattcacacttctgtgcattcacacatttgtgattgcacgttttggtattgatttagaat

SEQ ID NO: 48743 - DNA, 80 bp, synthetic construct
  source 1..80: mol_type = other DNA
cttattaattcaatcaaaagccattgaagtttatagcaagaggcatcaaagaaggcagaatgtttctatctgttctggga

SEQ ID NO: 48744 - DNA, 80 bp, synthetic construct
  source 1..80: mol_type = other DNA
taaagtgtcccaataattagaaggtttcctggtctctctcaaattcagtgctcatttggccagggataaggccctcacac

SEQ ID NO: 48745 - DNA, 80 bp, synthetic construct; identical to SEQ ID NO: 12950
  source 1..80: mol_type = other DNA

SEQ ID NO: 48746 - DNA, 80 bp, synthetic construct
  source 1..80: mol_type = other DNA
acttgtgaaagcccaagaaaaaaagacacgaatgtcagaggtgaatccaggctcatgaacccattgtggtcacgggactg

SEQ ID NO: 48747 - DNA, 80 bp, synthetic construct
  source 1..80: mol_type = other DNA
tatagaccttgatcgaattggagctagagtggagtcaggcaaaactctgcattgactcagaggcacctacatgtgaaata

SEQ ID NO: 48748 - DNA, 80 bp, synthetic construct
  source 1..80: mol_type = other DNA
gaaagcacatgcaattagaaaactgggacatgattcataaggcaggagggacccttttctctttcgtggtagatgtggga

SEQ ID NO: 48749 - DNA, 80 bp, synthetic construct; identical to SEQ ID NO: 12951
  source 1..80: mol_type = other DNA

SEQ ID NO: 48750 - DNA, 80 bp, synthetic construct
  source 1..80: mol_type = other DNA
actccatctctaccaaaaatgcaaaaattagccagatgtggtggcatgcacctgtaatcccagctactcaggaggctgag

SEQ ID NO: 48751 - DNA, 80 bp, synthetic construct
  source 1..80: mol_type = other DNA
tgtataaaaatcaaggttgcaattctgcaattcttgtggcacccagaatactggactagaccaagggtgccaggtgcttg

SEQ ID NO: 48752 - DNA, 80 bp, synthetic construct
  source 1..80: mol_type = other DNA
catttcatccttactgagatgcagtgagtgtcgccccagtactaaggggtaaatgcagagagaaacattagtttaggatt

SEQ ID NO: 48753 - DNA, 80 bp, synthetic construct
  source 1..80: mol_type = other DNA
caagtagctggaactataggcttgtgccactatgcccggctaatttttttgtatttttagtagagttagggtttcaccat

SEQ ID NO: 48754 - DNA, 80 bp, synthetic construct; identical to SEQ ID NO: 12952
  source 1..80: mol_type = other DNA

SEQ ID NO: 48755 - DNA, 80 bp, synthetic construct
  source 1..80: mol_type = other DNA
gagtggtgaccatgggacccaaagtggtttgtaaatgaccctttatcatctacacttgtcaagtttcaattgattcactc

SEQ ID NO: 48756 - DNA, 80 bp, synthetic construct
  source 1..80: mol_type = other DNA
aggctggaagtccaagatcatggtgttggcagtgcacatttcttctgaggcttctttccttggcttgtagatgtgttttc

SEQ ID NO: 48757 - DNA, 80 bp, synthetic construct
  source 1..80: mol_type = other DNA
ctgggggttaggacaccaacatgccaatttttggagggatgcaatttagcccataacagtctggattaacctggagactc

SEQ ID NO: 48758 - DNA, 80 bp, synthetic construct
  source 1..80: mol_type = other DNA
acctccgcttcccaggttcaagcatttctcctgtctcagtttcccgagtagctgggattacagatgcctgccaccacgcc

SEQ ID NO: 48759 - DNA, 80 bp, synthetic construct; identical to SEQ ID NO: 12953
  source 1..80: mol_type = other DNA

SEQ ID NO: 48760 - DNA, 80 bp, synthetic construct
  source 1..80: mol_type = other DNA
tttttcattgggaagaggattctctcccagaggaaaaacttctcctgctatgcaggcttattttctttatatttgtagga

SEQ ID NO: 48761 - DNA, 80 bp, synthetic construct
  source 1..80: mol_type = other DNA
tccatgggattcagtttcagccctggtaggtgaagggagagctcttggtgtagggtttggtctttataataaactatgct

SEQ ID NO: 48762 - DNA, 80 bp, synthetic construct
  source 1..80: mol_type = other DNA
gaaagtgacagagcattctttcacctttttgtgacatgcatgcatccaagtctctggtgttttaaataactgaaactgag

SEQ ID NO: 48763 - DNA, 80 bp, synthetic construct
  source 1..80: mol_type = other DNA
ttcatcaaaataaagtgaaattgtggctgtagatggggttttatttagagctttgactccgcatctgcttcctaagacat

SEQ ID NO: 48764 - DNA, 80 bp, synthetic construct; identical to SEQ ID NO: 12954
  source 1..80: mol_type = other DNA

SEQ ID NO: 48765 - DNA, 80 bp, synthetic construct
  source 1..80: mol_type = other DNA
ccagcaaacacatagaaccctatgagaaatcattaaaaattcttagttactattttcaggaatatccttttccatccttt

SEQ ID NO: 48766 - DNA, 80 bp, synthetic construct
  source 1..80: mol_type = other DNA
ctgtaattgtgatggttttatgcatgtcttatagctgtttcatcccttatcttcctcattccaaccttcctttgtgttta

SEQ ID NO: 48767 - DNA, 80 bp, synthetic construct
  source 1..80: mol_type = other DNA
ttttccacccctcattttacattattgatgtcacaaattactcctctgcaggctagcaggctggaaagtcacaatgttgc

SEQ ID NO: 48768 - DNA, 80 bp, synthetic construct
  source 1..80: mol_type = other DNA
agtcttcagtctaaaatttgtaaaccaggctggcagattggaaatctaaactgtagttgctactgtcatcttgaggcaga

SEQ ID NO: 48769 - DNA, 80 bp, synthetic construct; identical to SEQ ID NO: 12955
  source 1..80: mol_type = other DNA

SEQ ID NO: 48770 - DNA, 80 bp, synthetic construct
  source 1..80: mol_type = other DNA
ggggggtcggccccccgcccggccagccgccctgtccgggagggaggtgggggggtcagccccccgcctggccagccgcc

SEQ ID NO: 48771 - DNA, 80 bp, synthetic construct
  source 1..80: mol_type = other DNA
cgcccggccagccgccccgtccgggagggaggtgggggggtcagccctccgcccggccagccgccccgtctgggaggtga

SEQ ID NO: 48772 - DNA, 80 bp, synthetic construct
  source 1..80: mol_type = other DNA
cccgtccgggagggaggtggggatgtcggccccccgcccggccagccgccccgtccgggagggaggtgggggggtcggcc

SEQ ID NO: 48773 - DNA, 80 bp, synthetic construct; identical to SEQ ID NO: 12956
  source 1..80: mol_type = other DNA

SEQ ID NO: 48774 - DNA, 80 bp, synthetic construct
  source 1..80: mol_type = other DNA
tgtgaccttacccccaaccctgtgctctctgaaacatgtgctgtgtccactcaggattaaatggattaagggcggtgcaa

SEQ ID NO: 48775 - DNA, 80 bp, synthetic construct
  source 1..80: mol_type = other DNA
ttccctccactattgtcccatgaccctgccaaatccccctctgtgagaaacacccaagaattatcaataaaaaaataaat

SEQ ID NO: 48776 - DNA, 80 bp, synthetic construct; identical to SEQ ID NO: 12957
  source 1..80: mol_type = other DNA

SEQ ID NO: 48777 - DNA, 80 bp, synthetic construct
  source 1..80: mol_type = other DNA
gtacgtgtatgggtacatacacacagacataaatatcattgtaaaaacataaggaagaaatgcttataacatttactgtc

SEQ ID NO: 48778 - DNA, 80 bp, synthetic construct
  source 1..80: mol_type = other DNA
ctacctcaacctcctaagtagctgggactgcaagcacaccaccaagtctgactaattttttgtatgtattttcagtagag

SEQ ID NO: 48779 - DNA, 80 bp, synthetic construct
  source 1..80: mol_type = other DNA
tgtaaatagctttttttcactaaccatcccatagtcccactgccttcagcaagtccgtcagctgatcaggtttcttttcc

SEQ ID NO: 48780 - DNA, 80 bp, synthetic construct
  source 1..80: mol_type = other DNA
tctaaaagatctcctgtatttcaaacatagtcttatttactgccattgtgtagtagcagaccaatttccccctgatgacc

SEQ ID NO: 48781 - DNA, 80 bp, synthetic construct; identical to SEQ ID NO: 12958
  source 1..80: mol_type = other DNA

SEQ ID NO: 48782 - DNA, 80 bp, synthetic construct
  source 1..80: mol_type = other DNA
aaggcagactaccatctttgctgttatgtagctttcactggtgatatctccagttactggaaaatctgaggcaactgggg

SEQ ID NO: 48783 - DNA, 80 bp, synthetic construct
  source 1..80: mol_type = other DNA
tgctgaaaactcaaaaagccagcaagggtttggaaccaggctaaagctgagatgactgaaagagcagaagtagaattcag

SEQ ID NO: 48784 - DNA, 80 bp, synthetic construct
  source 1..80: mol_type = other DNA
agaatttcatagtgcactcacaagtattaacagcagaatagaacaagtggaggaaagactctcagtgcttgaagactggc

SEQ ID NO: 48785 - DNA, 80 bp, synthetic construct; identical to SEQ ID NO: 12959
  source 1..80: mol_type = other DNA

SEQ ID NO: 48786 - DNA, 80 bp, synthetic construct
  source 1..80: mol_type = other DNA
ccagaagagattgagggccagtattgaacattgttaaagaaaagaatttccaacccacaatttcatatccagccaaacta

SEQ ID NO: 48787 - DNA, 80 bp, synthetic construct
  source 1..80: mol_type = other DNA
gaccagtgacgcaataaagcaaccacataagcaagtctgcaaagtaaccagctaacaccatgatgacaggatcaaatcca

SEQ ID NO: 48788 - DNA, 80 bp, synthetic construct
  source 1..80: mol_type = other DNA
ggaaaattttccaagcaaatggaaagcggaagaaagccagggttgcaatcctagtttctgacaacacagactttaaacca

SEQ ID NO: 48789 - DNA, 80 bp, synthetic construct; identical to SEQ ID NO: 12960
  source 1..80: mol_type = other DNA

SEQ ID NO: 48790 - DNA, 80 bp, synthetic construct
  source 1..80: mol_type = other DNA
ctgaaatcataacaaatagtctctcagactacagtgcaatcaaattcaaaatcaagaataagaaattcactaaaaccata

SEQ ID NO: 48791 - DNA, 80 bp, synthetic construct
  source 1..80: mol_type = other DNA
gcagtaaatgcccacatcaaaaagttagaaagatctcaagtcaacaacctaaaatcaaacctataagaacttaagaatga

SEQ ID NO: 48792 - DNA, 80 bp, synthetic construct
  source 1..80: mol_type = other DNA
aagctaataaagaagaaaagagagaaaattccaataaacacaatcagaaacaataagaggaacattacctctgaccccac

SEQ ID NO: 48793 - DNA, 80 bp, synthetic construct; identical to SEQ ID NO: 12961
  source 1..80: mol_type = other DNA

SEQ ID NO: 48794 - DNA, 80 bp, synthetic construct
  source 1..80: mol_type = other DNA
atgaacattaatgcaaaaatctccaacaaaatgctggcaaaccgaatcctgcagcacatcaaaaaccttatccatcacaa

SEQ ID NO: 48795 - DNA, 80 bp, synthetic construct
  source 1..80: mol_type = other DNA
aaaaaactctcaataaactaggtgttcaaggaatatacctcaaaacaataaaagccatctatgacaaacccacagccaac

SEQ ID NO: 48796 - DNA, 80 bp, synthetic construct
  source 1..80: mol_type = other DNA
ataggaagagaggaattcaaatgattcctgtttgcagatgacatgattctataactagaaaaacccatagcctcagtcca

SEQ ID NO: 48797 - DNA, 80 bp, synthetic construct; identical to SEQ ID NO: 12962
  source 1..80: mol_type = other DNA

SEQ ID NO: 48798 - DNA, 80 bp, synthetic construct
  source 1..80: mol_type = other DNA
tctcagtggaaaaaggaaatgaagctgtcttttcatcattaaatgctgtgccaactagtcccttaattttctttttgcct

SEQ ID NO: 48799 - DNA, 80 bp, synthetic construct
  source 1..80: mol_type = other DNA
atcacaaaacatctcatgaatgtattatgatttgtcaatttaaattatacatatatatgttttagaaaggtattattttc

SEQ ID NO: 48800 - DNA, 80 bp, synthetic construct
  source 1..80: mol_type = other DNA
cttctgttttcaacaaatacatgtttttttcacccacagttatagaatgaacttgagcaacaatctataggaatggcttt

SEQ ID NO: 48801 - DNA, 80 bp, synthetic construct; identical to SEQ ID NO: 12963
  source 1..80: mol_type = other DNA

SEQ ID NO: 48802 - DNA, 80 bp, synthetic construct
  source 1..80: mol_type = other DNA
ttggaagatgaatggacaacatcctgtttggaagtccaccgctttgatcgaagaagataaaaacagaacaactcttgtgg

SEQ ID NO: 48803 - DNA, 80 bp, synthetic construct
  source 1..80: mol_type = other DNA
tgagacacagtcctatggaaatcacgatggtaatttgagaggttcattaatgtaagacacgttgatgcctgatatagagt

SEQ ID NO: 48804 - DNA, 80 bp, synthetic construct
  source 1..80: mol_type = other DNA
tttggaaggtgattgaaataaacaagcatttatctccaagtgtttgccaggtgcacctgtaattccagctatgagagcag

SEQ ID NO: 48805 - DNA, 80 bp, synthetic construct; identical to SEQ ID NO: 12964
  source 1..80: mol_type = other DNA

SEQ ID NO: 48806 - DNA, 80 bp, synthetic construct
  source 1..80: mol_type = other DNA
tggagctgggcattgctcagctggtggtagatgtgctaccaaactgaactggagtccactcacctggggcagtaaaaaca

SEQ ID NO: 48807 - DNA, 80 bp, synthetic construct
  source 1..80: mol_type = other DNA
acaggcaacatcataaatcaatgcatagaagttacacactggtttggccttaaaaggaggaatatcctgatgagggagct

SEQ ID NO: 48808 - DNA, 80 bp, synthetic construct
  source 1..80: mol_type = other DNA
tctccaggcccctcaggaagaaatttagaacaaagaacagtggtcagagttcagtcctcagtttccccttatctgaggtc

SEQ ID NO: 48809 - DNA, 80 bp, synthetic construct
  source 1..80: mol_type = other DNA
cgttttaagctatcattaccttcttgtttataaggtcactcacttaatttttagggctggctaggtgcctggaatttctt

SEQ ID NO: 48810 - DNA, 80 bp, synthetic construct; identical to SEQ ID NO: 12965
  source 1..80: mol_type = other DNA

SEQ ID NO: 48811 - DNA, 80 bp, synthetic construct
  source 1..80: mol_type = other DNA
acacttgatatgaaagtatcctctcttttccttgtggatcaggggaaggtgctggtgtgatctatatacaatccttccca

SEQ ID NO: 48812 - DNA, 80 bp, synthetic construct
  source 1..80: mol_type = other DNA
gcaagaaactgtaaatatattttgtgtccattatgtaatgattcctaagggtctggagaagtaggttgtgccttcactgc

SEQ ID NO: 48813 - DNA, 80 bp, synthetic construct
  source 1..80: mol_type = other DNA
cagcagaacctcatgtcccttccataactagaaatgtttggtataaatgaagagaaggagaaatagtagctgagggtaaa

SEQ ID NO: 48814 - DNA, 80 bp, synthetic construct; identical to SEQ ID NO: 12966
  source 1..80: mol_type = other DNA

SEQ ID NO: 48815 - DNA, 80 bp, synthetic construct
  source 1..80: mol_type = other DNA
gtgagaacatgcggtgtttggttttctatccttgtaatagtttgctcagaatgatggtttccagcttcatccacgtccct

SEQ ID NO: 48816 - DNA, 80 bp, synthetic construct
  source 1..80: mol_type = other DNA
aagctctgcctcctgggttcatgccattctcctgcctcagcctcccaagtagctgggactataggcacccgccaccatga

SEQ ID NO: 48817 - DNA, 80 bp, synthetic construct
  source 1..80: mol_type = other DNA
atccagtctatcactgatggacatttgggttggttccaagtatttgctattgtgaatagtgcagtaaacatacatgtgca

SEQ ID NO: 48818 - DNA, 80 bp, synthetic construct; identical to SEQ ID NO: 12967
  source 1..80: mol_type = other DNA

SEQ ID NO: 48819 - DNA, 80 bp, synthetic construct
  source 1..80: mol_type = other DNA
agttctttgtagattctggatattagtcctttgtcagatgggtagattacaaaaattttctcccattctgtaggttgcct

SEQ ID NO: 48820 - DNA, 80 bp, synthetic construct
  source 1..80: mol_type = other DNA
agggtttttatggttttaggtctaacatttaagtctttaatccatcttgaattaatttttgtataaggtataaggaaggg

SEQ ID NO: 48821 - DNA, 80 bp, synthetic construct
  source 1..80: mol_type = other DNA
ctatatctctgttttggttccagtaccatgctgtttttgttactgtagacttgtaatatagtttgaagtcaggtagtgtg

SEQ ID NO: 48822 - DNA, 80 bp, synthetic construct; identical to SEQ ID NO: 12968
  source 1..80: mol_type = other DNA

SEQ ID NO: 48823 - DNA, 80 bp, synthetic construct
  source 1..80: mol_type = other DNA
tttgcacattgattttgtatcctgagactttgctgaagttgcttatcagcttaaggagattttgggctgagatgatgggg

SEQ ID NO: 48824 - DNA, 80 bp, synthetic construct
  source 1..80: mol_type = other DNA
tgccagttttcaaagggaatgcttccagtttttgcccattcagtatgatattggctgtgggtttgtcataaatagctctt

SEQ ID NO: 48825 - DNA, 80 bp, synthetic construct
  source 1..80: mol_type = other DNA
gtatgttgaaccagccttgcatcccagggatgaagcccacttgatcatggtggataacctttttgatgtgctgctggatt

SEQ ID NO: 48826 - DNA, 80 bp, synthetic construct
  source 1..80: mol_type = other DNA
ttggaatagtttcagaaggaatggtaccagctcctctttgtacctctgttagaattcggctgtgaatccatctggtcctg

SEQ ID NO: 48827 - DNA, 80 bp, synthetic construct; identical to SEQ ID NO: 12969
  source 1..80: mol_type = other DNA

SEQ ID NO: 48828 - DNA, 80 bp, synthetic construct
  source 1..80: mol_type = other DNA
tcttctgctagcttttgaatgtgattgctcttgcttctccagttcttttaattgtgatgttaggctgtcgattttagatc

SEQ ID NO: 48829 - DNA, 80 bp, synthetic construct
  source 1..80: mol_type = other DNA
caggagcaggttgttcagtttccatgtagttgagtggttttgagtgagtttcttaatcctgagttctaatttgattgcac

SEQ ID NO: 48830 - DNA, 80 bp, synthetic construct
  source 1..80: mol_type = other DNA
taggtctgcctggtgcagagctgagttcaagtcctggatatccttgttaactttctgtctcgttgatctgtctaatgttg

SEQ ID NO: 48831 - DNA, 80 bp, synthetic construct
  source 1..80: mol_type = other DNA
gtaatggccttctttgtctcttttgatgtttgttggtttaaagtctgttttatcagagactaggattgcaacccctgctt

SEQ ID NO: 48832 - DNA, 80 bp, synthetic construct; identical to SEQ ID NO: 12970
  source 1..80: mol_type = other DNA

SEQ ID NO: 48833 - DNA, 80 bp, synthetic construct
  source 1..80: mol_type = other DNA
aggctcttatttctcctttacttatgaagcttagtttggctggatatgaaattctgggttgaaaattcttttctttaaga

SEQ ID NO: 48834 - DNA, 80 bp, synthetic construct
  source 1..80: mol_type = other DNA
tatgtctttgggttgctcttcttgaggagtatctttgtggtgttctctgtatttcacaaatttgaagtttggcctgcctt

SEQ ID NO: 48835 - DNA, 80 bp, synthetic construct
  source 1..80: mol_type = other DNA
tttctctcaacttctctgctcgcttcatttcattcatttgatcttcaatcaccgataccctttcttccacttgatcgaat

SEQ ID NO: 48836 - DNA, 80 bp, synthetic construct
  source 1..80: mol_type = other DNA
cctttagctcggagaagtttgttattaccaatcttctgaagcctatttctgtcagcttgtcaaagtcattctccatccag

SEQ ID NO: 48837 - DNA, 80 bp, synthetic construct; identical to SEQ ID NO: 12971
  source 1..80: mol_type = other DNA

SEQ ID NO: 48838 - DNA, 80 bp, synthetic construct
  source 1..80: mol_type = other DNA
tccctactgggaggtgtctcccaggtaggctactcagaggtcagcgacgcacttgaggaggcaatctgtccgttctcaga

SEQ ID NO: 48839 - DNA, 80 bp, synthetic construct
  source 1..80: mol_type = other DNA
cacctagtttgagcttcctgccactttgtttacctagtcaagcctcagcaatggcagacgcccctcccccagcctcactg

SEQ ID NO: 48840 - DNA, 80 bp, synthetic construct
  source 1..80: mol_type = other DNA
ggtacaatctctcatgttttcccttggctaggaaagggaattccccgagcccttgtgcttccctggtgaggcaatgcctt

SEQ ID NO: 48841 - DNA, 80 bp, synthetic construct; identical to SEQ ID NO: 12972
  source 1..80: mol_type = other DNA

SEQ ID NO: 48842 - DNA, 80 bp, synthetic construct
  source 1..80: mol_type = other DNA
ttgggcatgctggtgtgcacctgtaatgctattgctcaggaggctgaggcaggaggataacttgagcccaggaattcaag

SEQ ID NO: 48843 - DNA, 80 bp, synthetic construct
  source 1..80: mol_type = other DNA
tgacaagcaggttccaaaacatttgcaatctcctcagtgataagtatgactttaatatgccaatgagatgactatggggt

SEQ ID NO: 48844 - DNA, 80 bp, synthetic construct
  source 1..80: mol_type = other DNA
cgtacacaatgaaacttccatagaaacctctagagattgggtttcggagagcttcccaactggtgagtacatccgtgtgt

SEQ ID NO: 48845 - DNA, 80 bp, synthetic construct; identical to SEQ ID NO: 12973
  source 1..80: mol_type = other DNA

SEQ ID NO: 48846 - DNA, 80 bp, synthetic construct
  source 1..80: mol_type = other DNA
cccttttgctttctaccaggtacagtccttggtcttggaattcccatcctcaacaaccatgaacaaaataaatttctgtt

SEQ ID NO: 48847 - DNA, 80 bp, synthetic construct
  source 1..80: mol_type = other DNA
cattttaagttatccagtctcaggtgttctactatagtggcataatttaaaccaagagtctgtaacccccggctgtggac

SEQ ID NO: 48848 - DNA, 80 bp, synthetic construct
  source 1..80: mol_type = other DNA
ggatctaggttgcatgctccatatgaaacagtaatgcctgatcatctgaggtggaacagtttcatcctcaatgcattccc

SEQ ID NO: 48849 - DNA, 80 bp, synthetic construct
  source 1..80: mol_type = other DNA
tataccaaagggacaagttaagtttggtaactgagtgatggaaaaactgcctttcttttgttcctaaacaaataactgca

SEQ ID NO: 48850 - DNA, 80 bp, synthetic construct; identical to SEQ ID NO: 12974
  source 1..80: mol_type = other DNA

SEQ ID NO: 48851 - DNA, 80 bp, synthetic construct
  source 1..80: mol_type = other DNA
tgtaaaatgcagatttactgagcactcgatgaaagcatagttgcctgttcctttttcctctcctgcctgctctttctcct

SEQ ID NO: 48852 - DNA, 80 bp, synthetic construct
  source 1..80: mol_type = other DNA
aggaacttcctgagttctttgagttagtttaagaattcccaaaccttgggaggtgagaaacccctgactttgcagccatg

SEQ ID NO: 48853 - DNA, 80 bp, synthetic construct
  source 1..80: mol_type = other DNA
ttggagaatcagaaaattatttggctggaggaaaaccccatcaccatcccacagagagaaacttacagtatattggggga

SEQ ID NO: 48854 - DNA, 80 bp, synthetic construct
  source 1..80: mol_type = other DNA
caaacaagtttttgttaagggtttcaaaaggggagggggtgtaagaacaaggagtaggtaaaaaatcacacgcttctgag

SEQ ID NO: 48855 - DNA, 80 bp, synthetic construct; identical to SEQ ID NO: 12975
  source 1..80: mol_type = other DNA

SEQ ID NO: 48856 - DNA, 80 bp, synthetic construct
  source 1..80: mol_type = other DNA
tttataggctctgggcaagaagaaaaaatatggctctttttgcccaacctcgcaggcagtcagaccttatggttgtcttt

SEQ ID NO: 48857 - DNA, 80 bp, synthetic construct
  source 1..80: mol_type = other DNA
taaagtaaagacaggcataagaaattataaaagtattatttgggaactgttaaatgtccatattaaaatgaaatcttcac

SEQ ID NO: 48858 - DNA, 80 bp, synthetic construct
  source 1..80: mol_type = other DNA
taaacacaggtttctaccagctattcattgtccagacatggagtggccctacctctaacctagaagttaggattttttag

SEQ ID NO: 48859 - DNA, 80 bp, synthetic construct; identical to SEQ ID NO: 12976
  source 1..80: mol_type = other DNA

SEQ ID NO: 48860 - DNA, 80 bp, synthetic construct
  source 1..80: mol_type = other DNA
tcattcttttcccacccttcacactccagcacttcaaccctcttactacatcagaattccacactgtcaatgaaaagagg

SEQ ID NO: 48861 - DNA, 80 bp, synthetic construct
  source 1..80: mol_type = other DNA
gtatttaagatatacattggatcagtccagaaaagcagaacaatttgaagcaagcgggggttgggggttactgcttctag

SEQ ID NO: 48862 - DNA, 80 bp, synthetic construct
  source 1..80: mol_type = other DNA
ctccaggtgccaggcttcagagagaatagattataatgtttctgatcagacttaaggtctgtgttgatgttaattgctgg

SEQ ID NO: 48863 - DNA, 80 bp, synthetic construct
  source 1..80: mol_type = other DNA
tgtccattaagatggttgggagagggtgggtttgaagtttatttttggtttacaacatgtaaaatgttaagaggagatag

SEQ ID NO: 48864 - DNA, 80 bp, synthetic construct; identical to SEQ ID NO: 12977
  source 1..80: mol_type = other DNA

SEQ ID NO: 48865 - DNA, 80 bp, synthetic construct
  source 1..80: mol_type = other DNA
tcgtgcaagcttccagcttgcttgtctatgtctgaagcttgattttacaggctggtctttgtcagaaaagaaaatgattt

SEQ ID NO: 48866 - DNA, 80 bp, synthetic construct
  source 1..80: mol_type = other DNA
acagaaaggctgggattgtgcagaatgcattttagtaaacatggctgagtgtcagtagtgatgtccagttgccaggtgca

SEQ ID NO: 48867 - DNA, 80 bp, synthetic construct
  source 1..80: mol_type = other DNA
agcctggttctgtggccttccccacaataaaattaacccccaataccagatatactactttatgtgtaaattacagaaat

SEQ ID NO: 48868 - DNA, 80 bp, synthetic construct
  source 1..80: mol_type = other DNA
tctacctcatggtggagagatcaacagggaatatcacatctcttaactgatgatatacatcctccctttcctttctgcaa

SEQ ID NO: 48869 - DNA, 80 bp, synthetic construct; identical to SEQ ID NO: 12978
  source 1..80: mol_type = other DNA

SEQ ID NO: 48870 - DNA, 80 bp, synthetic construct
  source 1..80: mol_type = other DNA
cgactccagacttcctggatctcagcaccacatacaggtgatcctggtgcacatgggggttccttgtctgagtgtcctct

SEQ ID NO: 48871 - DNA, 80 bp, synthetic construct
  source 1..80: mol_type = other DNA
tcatccatgcttgaggttttaagtatcctttatgtggtgtgacctcttaaatctatttctccagcccagtcctttcccct

SEQ ID NO: 48872 - DNA, 80 bp, synthetic construct
  source 1..80: mol_type = other DNA
ctcattttacaactatgggtgtccttgattcgtctttctcacaccacagatacaatccattggcaaatgctgtgagtcta

SEQ ID NO: 48873 - DNA, 80 bp, synthetic construct; identical to SEQ ID NO: 12979
  source 1..80: mol_type = other DNA

SEQ ID NO: 48874 - DNA, 80 bp, synthetic construct
  source 1..80: mol_type = other DNA
ctagaaagaacttccccagacatcctcatatccctcaaatctttcctgaaaggtcatctttgcaacaaggcacacattga

SEQ ID NO: 48875 - DNA, 80 bp, synthetic construct
  source 1..80: mol_type = other DNA
tgattttacttcaatggcgttccccagatgcagaacttttctgtcctatgtctggctgacaacaaaggtcagttgaatga

SEQ ID NO: 48876 - DNA, 80 bp, synthetic construct
  source 1..80: mol_type = other DNA
atccctcctcccacaccaaccgccctgcacactgcagcacacgatcaggtttctctcttcaggaaggaacaattctagac

SEQ ID NO: 48877 - DNA, 80 bp, synthetic construct; identical to SEQ ID NO: 12980
  source 1..80: mol_type = other DNA

SEQ ID NO: 48878 - DNA, 80 bp, synthetic construct
  source 1..80: mol_type = other DNA
cccacctgcaacagactcagcacagcgaacatgcaaattctggaaggttctcaggtctttatttgctctctcaacttcta

SEQ ID NO: 48879 - DNA, 80 bp, synthetic construct
  source 1..80: mol_type = other DNA
atttgagacagagatggagacatccagccccacctctctggaacaggaaagatgatcggggagggaacacaggtcagtgt

SEQ ID NO: 48880 - DNA, 80 bp, synthetic construct
  source 1..80: mol_type = other DNA
ccacacaggcagctgtctcaggctacagaacacaatagtcatgaacaaattcaggtcagtcatggtaagcgatgacactc

SEQ ID NO: 48881 - DNA, 80 bp, synthetic construct; identical to SEQ ID NO: 12981
  source 1..80: mol_type = other DNA

SEQ ID NO: 48882 - DNA, 80 bp, synthetic construct
  source 1..80: mol_type = other DNA
tgcagacccagggcaggatcaggaaacatggggaaagcagttgtgggttctggaccaactgccctcctaaggtctgtcct

SEQ ID NO: 48883 - DNA, 80 bp, synthetic construct
  source 1..80: mol_type = other DNA
cttccagtaacaaggcggggcacacttctacctggggcttgaaactcccagtgggacaagaaaacccagaccccgctctt

SEQ ID NO: 48884 - DNA, 80 bp, synthetic construct
  source 1..80: mol_type = other DNA
ccctgacccccaagcctcagccctgacccggctgaagggctccagaaggacttctgctttctctgataagagatgtgacc

SEQ ID NO: 48885 - DNA, 80 bp, synthetic construct; identical to SEQ ID NO: 12982
  source 1..80: mol_type = other DNA

SEQ ID NO: 48886 - DNA, 80 bp, synthetic construct
  source 1..80: mol_type = other DNA
aggcggcagagaacccagacgccagcctggacacaggcacctgggataatctcctattcattggaaagttctagtctctg

SEQ ID NO: 48887 - DNA, 80 bp, synthetic construct
  source 1..80: mol_type = other DNA
aaggagacccctgatcagtattccagggactgtcttcccctccatttcctcagagacttcatcccttaattgtcctagag

SEQ ID NO: 48888 - DNA, 80 bp, synthetic construct
  source 1..80: mol_type = other DNA
cctgcgcgctgcagcgtctccttcccgttctccaggtatctgcggagccactccacgcacgtgccctccaggtaggctct

SEQ ID NO: 48889 - DNA, 80 bp, synthetic construct; identical to SEQ ID NO: 12983
  source 1..80: mol_type = other DNA

SEQ ID NO: 48890 - DNA, 80 bp, synthetic construct
  source 1..80: mol_type = other DNA
gggatggggaggggtcgtgacctgcgccccgggccggggtcactcaccgtcctcgctctggttgtagtagccgcgcaggt

SEQ ID NO: 48891 - DNA, 80 bp, synthetic construct
  source 1..80: mol_type = other DNA
gcccactgagatgaagcggggctctccgcggccgggccgggacacggcggtgtcgaaatacctcatggagtgggagcctg

SEQ ID NO: 48892 - DNA, 80 bp, synthetic construct
  source 1..80: mol_type = other DNA
agagcagcaggaggagggctcggggcgccatgacccgcatctcggcctctggggagaatgtgagtccgggtgggtgactg

SEQ ID NO: 48893 - DNA, 80 bp, synthetic construct; identical to SEQ ID NO: 12984
  source 1..80: mol_type = other DNA

SEQ ID NO: 48894 - DNA, 80 bp, synthetic construct
  source 1..80: mol_type = other DNA
ccaccctttgccttaccttacctcacctcaggtaatattaaactacatccagcaaaataaaggaaacttacctctcccct

SEQ ID NO: 48895 - DNA, 80 bp, synthetic construct
  source 1..80: mol_type = other DNA
agcaccaggtagagattctcatagagaccagtttcctttttgtttattgatacagtaggtagcacaatattggtaatccc

SEQ ID NO: 48896 - DNA, 80 bp, synthetic construct
  source 1..80: mol_type = other DNA
gtccagaacatctcctgaatacaaagaagcagggtttgttactgtctattgcaaccgggagcctgtagtcatcacctcaa

SEQ ID NO: 48897 - DNA, 80 bp, synthetic construct; identical to SEQ ID NO: 12985
  source 1..80: mol_type = other DNA

SEQ ID NO: 48898 - DNA, 80 bp, synthetic construct
  source 1..80: mol_type = other DNA
gtgctcagcagtcctgctaatgtgactcaggtcgtgtcatttcttcacttataatggttgggttttggtctaccattttg

SEQ ID NO: 48899 - DNA, 80 bp, synthetic construct
  source 1..80: mol_type = other DNA
cccaattccttgacttttcacagtgaaattcaggtaatattaagctgcatccagcaaaataaaggacacttcaaatggtg

SEQ ID NO: 48900 - DNA, 80 bp, synthetic construct
  source 1..80: mol_type = other DNA
catcatttctgttgttaattgttcctttctgtatatctgggtcaccatctagtatcatttcccttcagcctgaagaacgt

SEQ ID NO: 48901 - DNA, 80 bp, synthetic construct; identical to SEQ ID NO: 12986
  source 1..80: mol_type = other DNA

SEQ ID NO: 48902 - DNA, 80 bp, synthetic construct
  source 1..80: mol_type = other DNA
cctgagttgtggcgctgtagagaacagtttcttttccctaaaaactttctttatccccctttctatttaatccttgcctc

SEQ ID NO: 48903 - DNA, 80 bp, synthetic construct
  source 1..80: mol_type = other DNA
tttttgttgctgagcagctgccgagtattgctggaatcccagtttattcattggtttctgtgtctccagttgatagacat

SEQ ID NO: 48904 - DNA, 80 bp, synthetic construct
  source 1..80: mol_type = other DNA
actttacaaattggctgccacatttcttgcattcctaccagcaatagcagacattcctattttttccatattcttgccag

SEQ ID NO: 48905 - DNA, 80 bp, synthetic construct; identical to SEQ ID NO: 12987
  source 1..80: mol_type = other DNA

SEQ ID NO: 48906 - DNA, 80 bp, synthetic construct
  source 1..80: mol_type = other DNA
atgagccaccatgcctggtccttgttgcactggttaggatggctgttaggtgtttaaacaagaatgataagagctcacat

SEQ ID NO: 48907 - DNA, 80 bp, synthetic construct
  source 1..80: mol_type = other DNA
ataatcctatccaaaaaagacctgatttcaagcaacagcaggattgcttccgttcaatacttggacctgcaaacatcaaa

SEQ ID NO: 48908 - DNA, 80 bp, synthetic construct
  source 1..80: mol_type = other DNA
ctaaaggttctttggagattgtattggattccaaagacaaaacccaaaagagcaatggtgaaaagaatgaaaaatgtgag

SEQ ID NO: 48909 - DNA, 80 bp, synthetic construct; identical to SEQ ID NO: 12988
  source 1..80: mol_type = other DNA

SEQ ID NO: 48910 - DNA, 80 bp, synthetic construct
  source 1..80: mol_type = other DNA
attcccagtatacaacaaatgctaaggtcactccacccccacaacaccagaatgaagagttgtctatctcattggatttt

SEQ ID NO: 48911 - DNA, 80 bp, synthetic construct
  source 1..80: mol_type = other DNA
aatgagaggacgggaccactgaatatatcaattccagttgaaccagttgctgcttctaaatctgatgtttcacccatcat

SEQ ID NO: 48912 - DNA, 80 bp, synthetic construct
  source 1..80: mol_type = other DNA
tcagaatgaaaaagttattcctgattgttccgccaagccagtagtttcctctccaactctcatgttaacagatgaagaaa

SEQ ID NO: 48913 - DNA, 80 bp, synthetic construct; identical to SEQ ID NO: 12989
  source 1..80: mol_type = other DNA

SEQ ID NO: 48914 - DNA, 80 bp, synthetic construct
  source 1..80: mol_type = other DNA
attcaggttcaggcaagccttttaagattaaaggacaaccagaaactggaattctaaggacagaaacttttagagaggat

SEQ ID NO: 48915 - DNA, 80 bp, synthetic construct
  source 1..80: mol_type = other DNA
actggaacgtttcattattatcattcaccactaacactgttcatatgtacccactggaaatggctccttcatctgcacct

SEQ ID NO: 48916 - DNA, 80 bp, synthetic construct
  source 1..80: mol_type = other DNA
aagacaagccaacatgctaccctaaagctgagatctcaaggctttctgcttctcagatttggaaactcagtcctgttttc

SEQ ID NO: 48917 - DNA, 80 bp, synthetic construct; identical to SEQ ID NO: 12990
  source 1..80: mol_type = other DNA

SEQ ID NO: 48918 - DNA, 80 bp, synthetic construct
  source 1..80: mol_type = other DNA
tttaaagctgcagaacatgcctggcagaaacacaagcggctctatgagtctattattgttgcactttttcagggtcaatt

SEQ ID NO: 48919 - DNA, 80 bp, synthetic construct
  source 1..80: mol_type = other DNA
tactgcaatctttgcagagctcgacgggattcttaaaaaagaaatctggaagttaccacctgtgcttttagtgcatctga

SEQ ID NO: 48920 - DNA, 80 bp, synthetic construct
  source 1..80: mol_type = other DNA
aggccattacacagcctactgtaaaaatgcagcaaaacagcggtggtttaagtttgatgatcatgaagtttctgatatct

SEQ ID NO: 48921 - DNA, 80 bp, synthetic construct; identical to SEQ ID NO: 12991
  source 1..80: mol_type = other DNA

SEQ ID NO: 48922 - DNA, 80 bp, synthetic construct
  source 1..80: mol_type = other DNA
ctggtctaaaaaccattgtaccctttttttccttttcactgttacagccttttcacatttctaaatcccatcttcatata

SEQ ID NO: 48923 - DNA, 80 bp, synthetic construct
  source 1..80: mol_type = other DNA
ctcagaggattgcatttttttctttgagcatattttgagtaactgcagtgctttcttatggaaatgacagggcaaagcta

SEQ ID NO: 48924 - DNA, 80 bp, synthetic construct
  source 1..80: mol_type = other DNA
cacaatgagataccatctcccgccagtcagaatggtaattattaaaaagtcaagaaacaatagatgctggtgaggctgtg

SEQ ID NO: 48925 - DNA, 80 bp, synthetic construct; identical to SEQ ID NO: 12992
  source 1..80: mol_type = other DNA

SEQ ID NO: 48926 - DNA, 80 bp, synthetic construct
  source 1..80: mol_type = other DNA
cgggaacagaaaacaaagcacctcatgttctcattcctaagtgagagttgaacaatgacaacacatggatacagggaggg

SEQ ID NO: 48927 - DNA, 80 bp, synthetic construct
  source 1..80: mol_type = other DNA
aaagcaaattaaaaaaagaaagcccatgtcttacatgtatgcatatgttcattgcagcactattcacaatagcaaagaca

SEQ ID NO: 48928 - DNA, 80 bp, synthetic construct
  source 1..80: mol_type = other DNA
cgtgggaaggtgaagagcttccctaaggatgacccgtccaagccggtccacctcacagccttcctgggatacaaggctgg

SEQ ID NO: 48929 - DNA, 80 bp, synthetic construct; identical to SEQ ID NO: 12993
  source 1..80: mol_type = other DNA

SEQ ID NO: 48930 - DNA, 80 bp, synthetic construct
  source 1..80: mol_type = other DNA
actgtggctgagaagctggactgggctggtgagaggctcaagcaccaggtacctgtgaaccaagtgtttgggcaggatga

SEQ ID NO: 48931 - DNA, 80 bp, synthetic construct
  source 1..80: mol_type = other DNA
ggtgggcagaaaggctaccatcaccgcactgagatcaacaagaagatctataggattggctagggctaccttatcaagga

SEQ ID NO: 48932 - DNA, 80 bp, synthetic construct
  source 1..80: mol_type = other DNA
aagaccttgctggtgcagacaaagcagcgggctctggagaagattgaccttaagttcattgacacccactccaagtttgg

SEQ ID NO: 48933 - DNA, 80 bp, synthetic construct
  source 1..80: mol_type = other DNA
aaatgtggcacatatacaccacagaatactatgcagccataaaaaagaatgagatcatgtcctttgcaggaacatggatg

SEQ ID NO: 48934 - DNA, 80 bp, synthetic construct; identical to SEQ ID NO: 12994
  source 1..80: mol_type = other DNA

SEQ ID NO: 48935 - DNA, 80 bp, synthetic construct
  source 1..80: mol_type = other DNA
attcacacaatctctgcccttcattggagtgttgattcatataggtttttttttcattattgataagttttaggtctacc

SEQ ID NO: 48936 - DNA, 80 bp, synthetic construct
  source 1..80: mol_type = other DNA
gacaactaagaattctatatccagcacagatgtccttcaaggacaggcaaaataaggagatgtttcaggtaaaagaaaat

SEQ ID NO: 48937 - DNA, 80 bp, synthetic construct
  source 1..80: mol_type = other DNA
gtgggaaatgaggttatcagaaaagatgaagatgatcaaaaatggtaaatactgagctaagtgcaaaaggctatcttgtt

SEQ ID NO: 48938 - DNA, 80 bp, synthetic construct
  source 1..80: mol_type = other DNA
tatgggtactagtacatttttaactgaaagtggactgtgaaatgttaagaagagttaaattctgaaggaaattgagacac

SEQ ID NO: 48939 - DNA, 80 bp, synthetic construct; identical to SEQ ID NO: 12995
  source 1..80: mol_type = other DNA

SEQ ID NO: 48940 - DNA, 80 bp, synthetic construct
  source 1..80: mol_type = other DNA
ttacccagtgtcctcacccaagagacaaggggtgtctgctgctgtatccacacttggagaaagaaaccttgatagtgtca

SEQ ID NO: 48941 - DNA, 80 bp, synthetic construct
  source 1..80: mol_type = other DNA
tggtggtgggcgcttgtatttccaggtattgtggaggctgaggtgggaagatcccttgagctcataaatacaaggctgca

SEQ ID NO: 48942 - DNA, 80 bp, synthetic construct
  source 1..80: mol_type = other DNA
gaaactagaaatcacatccactttccagtgttaaaaagcccagtctagggaggtgagaaggagacagtcctcattagcgt

SEQ ID NO: 48943 - DNA, 80 bp, synthetic construct
  source 1..80: mol_type = other DNA
tctggctcagcctcccgagtagctgggacaacaggtgcccaccaccacgcccggctaatgttttgtattttttagtagag

SEQ ID NO: 48944 - DNA, 80 bp, synthetic construct; identical to SEQ ID NO: 12996
  source 1..80: mol_type = other DNA

SEQ ID NO: 48945 - DNA, 80 bp, synthetic construct
  source 1..80: mol_type = other DNA
tcaaggagtagacctgcatgttacctctggtgatgtaagctgcatgcacacctagaagtgaggtcacccctgctgggggt

SEQ ID NO: 48946 - DNA, 80 bp, synthetic construct
  source 1..80: mol_type = other DNA
tgtgtcctttaatacaaagtaaacacccattaatcaccagggatagatgtttgtggggcaaaccagaagccccatcattt

SEQ ID NO: 48947 - DNA, 80 bp, synthetic construct
  source 1..80: mol_type = other DNA
tccttgaaatttatattgtgtggtagagcttcccatagtgtgcattttgctgattgctccccaaggcatagtttaatatg

SEQ ID NO: 48948 - DNA, 80 bp, synthetic construct; identical to SEQ ID NO: 12997
  source 1..80: mol_type = other DNA

SEQ ID NO: 48949 - DNA, 80 bp, synthetic construct
  source 1..80: mol_type = other DNA
tgatccagcaatagcactcttagttctaaaccaatagaaatgcatgtatgtgtgtgccaaactatatgaaaatattattc

SEQ ID NO: 48950 - DNA, 80 bp, synthetic construct
  source 1..80: mol_type = other DNA
gtgactgtataatgccattcaactagacctggcagaactcatctgtattagaaatcaagagtggctactctagggtgggg

SEQ ID NO: 48951 - DNA, 80 bp, synthetic construct
  source 1..80: mol_type = other DNA
tgtattcaagaaaattatagcgacagccgccagataatgatcagctctaaaaagagaagctcaagaagctcatgccacag

SEQ ID NO: 48952 - DNA, 80 bp, synthetic construct; identical to SEQ ID NO: 12998
  source 1..80: mol_type = other DNA

SEQ ID NO: 48953 - DNA, 80 bp, synthetic construct
  source 1..80: mol_type = other DNA
ctataatcaaagcctgggacatttatttgctctaaacaagcagttattcttcatccagaattacacaatagaagctctca

SEQ ID NO: 48954 - DNA, 80 bp, synthetic construct
  source 1..80: mol_type = other DNA
tacgggtctatcaaggtaatcttgagaggtacttatcaatatgtgatgtgccagcaacaacatgagggaagataaccacg

SEQ ID NO: 48955 - DNA, 80 bp, synthetic construct
  source 1..80: mol_type = other DNA
aatatctactttcacctcaatgtaaactttcaaaattaagaccaagtggagcacggtgccctctgaagcactgtctgtca

SEQ ID NO: 48956 - DNA, 80 bp, synthetic construct
  source 1..80: mol_type = other DNA
gcccaagctgtaagggctggcaaatattttgagtattggtcccaaaggcccctgaaggtgaaaggatcttgttcttcatt

SEQ ID NO: 48957 - DNA, 80 bp, synthetic construct; identical to SEQ ID NO: 12999
  source 1..80: mol_type = other DNA

SEQ ID NO: 48958 - DNA, 80 bp, synthetic construct
  source 1..80: mol_type = other DNA
cacagcacatctgcagaattgtaatgatcaataagagtaaacccaaagtacactaaatactttcatggcctacaggaaaa

SEQ ID NO: 48959 - DNA, 80 bp, synthetic construct
  source 1..80: mol_type = other DNA
tttttggatgtgcagaagcaatatcacatcattaatacaaaaggtgctcagctgcgggattataataccattgagtgctg

SEQ ID NO: 48960 - DNA, 80 bp, synthetic construct
  source 1..80: mol_type = other DNA
tgtttttgtcaaactctaagtctccctcagaatccctgtacttctccactgcaatgtattgacagggttgtgaccttgtc

SEQ ID NO: 48961 - DNA, 80 bp, synthetic construct
  source 1..80: mol_type = other DNA
aggttcttgacactttgcctcagctactggtggtagtgtgggggcgaatgcatggggaagacaaaaaagaagaactgagc

SEQ ID NO: 48962 - DNA, 80 bp, synthetic construct; identical to SEQ ID NO: 13000
  source 1..80: mol_type = other DNA

SEQ ID NO: 48963 - DNA, 80 bp, synthetic construct
  source 1..80: mol_type = other DNA
gcctggtttgtgggcccatgtggacatgcatcttcagctgcctaggaagggtcgtgagaatggtttggagtagctcgata

SEQ ID NO: 48964 - DNA, 80 bp, synthetic construct
  source 1..80: mol_type = other DNA
tccttttcacatcataagtggtgccatctatgtggttttgctacttttgatgccttctgtctttccttttgtcttctgtg

SEQ ID NO: 48965 - DNA, 80 bp, synthetic construct
  source 1..80: mol_type = other DNA
tcctgcagcacttcttctttccagaggtcaaataaatgggaaggatcagtatagaacttcagcctgtctttatcatctcc

SEQ ID NO: 48966 - DNA, 80 bp, synthetic construct
  source 1..80: mol_type = other DNA
actgctgaatccagctgagtgactttgaccatgaggcaacaaattctaagagaatttgatctaatgtggaagtagttagc

SEQ ID NO: 48967 - DNA, 80 bp, synthetic construct; identical to SEQ ID NO: 13001
  source 1..80: mol_type = other DNA

SEQ ID NO: 48968 - DNA, 80 bp, synthetic construct
  source 1..80: mol_type = other DNA
tttgtaattttctctgcagttattttgctttcatttattgaacaccttagatatgagctaaaatcccccaccaaatgtgg

SEQ ID NO: 48969 - DNA, 80 bp, synthetic construct
  source 1..80: mol_type = other DNA
tttagaattgagcacattctggagatttatattcaaagtcacaggcttgttctttattctgccatctcaaaacttctgtg

SEQ ID NO: 48970 - DNA, 80 bp, synthetic construct
  source 1..80: mol_type = other DNA
tcaacttcattgtggttgctttgtttctggaattctctttgaatttccaattgttttgttagactcaaatcctgcctttt

SEQ ID NO: 48971 - DNA, 80 bp, synthetic construct; identical to SEQ ID NO: 13002
  source 1..80: mol_type = other DNA

SEQ ID NO: 48972 - DNA, 80 bp, synthetic construct
  source 1..80: mol_type = other DNA
gtccttacctaagacagaaggagtcttaaacaagaaagctcttatcacatattgcttgcctttgttaattttccagtgac

SEQ ID NO: 48973 - DNA, 80 bp, synthetic construct
  source 1..80: mol_type = other DNA
gagaaggtcacagtccacaattcaatcttctgagacaaatatggatccaggcaccagaaactgtcaagttagatttctaa

SEQ ID NO: 48974 - DNA, 80 bp, synthetic construct
  source 1..80: mol_type = other DNA
gcggtggcacacagctgtagtcccggctacttggaaggctgaggtgggaggatcacctaagcctggggcggtcgaggctg

SEQ ID NO: 48975 - DNA, 80 bp, synthetic construct; identical to SEQ ID NO: 13003
  source 1..80: mol_type = other DNA

SEQ ID NO: 48976 - DNA, 80 bp, synthetic construct
  source 1..80: mol_type = other DNA
tggcaatgagacctcccattattgaggccctggtctttttaacttgaggaattccagcaaatctaaggagtacaagctct

SEQ ID NO: 48977 - DNA, 80 bp, synthetic construct
  source 1..80: mol_type = other DNA
ttgatccaggcaaaagtcaagcatatctgccatttggccctaaatgcttatttggatattgttgagtgtgtgtgtgtgtg

SEQ ID NO: 48978 - DNA, 80 bp, synthetic construct
  source 1..80: mol_type = other DNA
tcatgatacagaaaatgaccaagtgacttgagatgcccattatgacctgagttttatcgggtcactcatgctcaccagcc

SEQ ID NO: 48979 - DNA, 80 bp, synthetic construct; identical to SEQ ID NO: 13004
  source 1..80: mol_type = other DNA

SEQ ID NO: 48980 - DNA, 80 bp, synthetic construct
  source 1..80: mol_type = other DNA
cagtgactttaaaggaataagatggtaaggtttgtgataaggagcgttggggaggagatttgaaccactcacatggcaca

SEQ ID NO: 48981 - DNA, 80 bp, synthetic construct
  source 1..80: mol_type = other DNA
taggataattaaggtttagttttcatggcctcctaaggcatttggaatagaagacagagttcaggtagcactcagagtgg

SEQ ID NO: 48982 - DNA, 80 bp, synthetic construct
  source 1..80: mol_type = other DNA
agcccgagttcacactccctgggtggtctaaaaatcatcaaggcatgaatttattttaaagtagtgcagactccaaggaa

SEQ ID NO: 48983 - DNA, 80 bp, synthetic construct; identical to SEQ ID NO: 13005
  source 1..80: mol_type = other DNA

SEQ ID NO: 48984 - DNA, 80 bp, synthetic construct
  source 1..80: mol_type = other DNA
aaacacacctagtaaagtacaagaagttctaaagaatgtactttagtcacaaaaagatatcccaggtagaaagtatgagg

SEQ ID NO: 48985 - DNA, 80 bp, synthetic construct
  source 1..80: mol_type = other DNA
tattctgattaaaatttcaagataaacttctcactcataatgtgtcccattctggttttgttttgtacatttcagtataa

SEQ ID NO: 48986 - DNA, 80 bp, synthetic construct
  source 1..80: mol_type = other DNA
tttttactagtgggcagttttccacaatatgaatgccattcatgtagttggcgggacctgccagtgtatctttcagaacc

SEQ ID NO: 48987 - DNA, 80 bp, synthetic construct; identical to SEQ ID NO: 13006
  source 1..80: mol_type = other DNA

SEQ ID NO: 48988 - DNA, 80 bp, synthetic construct
  source 1..80: mol_type = other DNA
cttaacatctctgtacctaattttcttgaacaagttacagtttacagatttcatttatttattgtggataataacatcct

SEQ ID NO: 48989 - DNA, 80 bp, synthetic construct
  source 1..80: mol_type = other DNA
ctctgaggacctgttggatcagcagctcttttgtaagattcgttgatattgtgaaaattctctaatcacagcccagctac

SEQ ID NO: 48990 - DNA, 80 bp, synthetic construct
  source 1..80: mol_type = other DNA
ttcaaaatacagtttgtcttgttgagactaggaatttggaaaattccagtctgtgaagtgaagggagaggagatacttcc

SEQ ID NO: 48991 - DNA, 80 bp, synthetic construct; identical to SEQ ID NO: 13007
  source 1..80: mol_type = other DNA

SEQ ID NO: 48992 - DNA, 80 bp, synthetic construct
  source 1..80: mol_type = other DNA
ctttgagtaggactaaggtatgaaaagagcaatgatggtgtgctcaatggctatattactaaacacaagaatgttttcag

SEQ ID NO: 48993 - DNA, 80 bp, synthetic construct
  source 1..80: mol_type = other DNA
ttcagggatagagaaattaacaggcagagagggaatctctgagactaggaaagactaactgcagctgggcctagatgatc

SEQ ID NO: 48994 - DNA, 80 bp, synthetic construct
  source 1..80: mol_type = other DNA
cagaaaactctgggatggctgggagaatatgtgcatatagacatctgtagagtgggtgacaaataaatgaaaccacctaa

SEQ ID NO: 48995 - DNA, 80 bp, synthetic construct
  source 1..80: mol_type = other DNA
tcaaatggtagggcactgtgaatacaatgtaatttttcaaaagctacaatgagcaataagatgaaataaaagtcatctag

SEQ ID NO: 48996 - DNA, 80 bp, synthetic construct; identical to SEQ ID NO: 13008
  source 1..80: mol_type = other DNA

SEQ ID NO: 48997 - DNA, 80 bp, synthetic construct
  source 1..80: mol_type = other DNA
agtgaggggaagaaattatcttttcatcaaacagtgcagaaacaacaggctatccctatgcaaaagaataaagctggatc

SEQ ID NO: 48998 - DNA, 80 bp, synthetic construct
  source 1..80: mol_type = other DNA
aaagaggaaataaaagataaattgaacatcatcaaaattaaaaatgtgtgagtctaaggacaccatcaagaaagtgaaaa

SEQ ID NO: 48999 - DNA, 80 bp, synthetic construct
  source 1..80: mol_type = other DNA
acaaaaggcccataagcacatagaaacatgttcaacatcattaagcatcagggaaatgcacatcaacccaaaaatgagat

SEQ ID NO: 49000 - DNA, 80 bp, synthetic construct; identical to SEQ ID NO: 13009
  source 1..80: mol_type = other DNA

SEQ ID NO: 49001 - DNA, 80 bp, synthetic construct
  source 1..80: mol_type = other DNA
aagatgtgaagtactgatacaagctacgacccacacaaactttgaaaatgttccggtaagtaaaagaagacagacacaaa

SEQ ID NO: 49002 - DNA, 80 bp, synthetic construct
  source 1..80: mol_type = other DNA
tcttagggctggggtttggatatggatttttctgcagggctgggaggagataaaaggatctgtaattgattgtggtaatg

SEQ ID NO: 49003 - DNA, 80 bp, synthetic construct
  source 1..80: mol_type = other DNA
ctcactatggtttgcgtgcaagtgaagaaagtagacatgcagagagtaggctgatacaatagtaatcaccttagttaagt

SEQ ID NO: 49004 - DNA, 80 bp, synthetic construct; identical to SEQ ID NO: 13010
  source 1..80: mol_type = other DNA

SEQ ID NO: 49005 - DNA, 80 bp, synthetic construct
  source 1..80: mol_type = other DNA
aagatggccagccatcagggacagtgtcccgaatcagattctgtcccgaatcagaagggctgtctaatcattccctttct

SEQ ID NO: 49006 - DNA, 80 bp, synthetic construct
  source 1..80: mol_type = other DNA
caggaataaatagaaataagagcatacactaatgtttggaaaccacgggtagcaaatattggtgaagtcatgtgacaggc

SEQ ID NO: 49007 - DNA, 80 bp, synthetic construct
  source 1..80: mol_type = other DNA
ttatcctggattatctgggcaggttcgatgtaatcacaatagtccttataagtgaaaggagtagaaagcagcatcagagt

SEQ ID NO: 49008 - DNA, 80 bp, synthetic construct; identical to SEQ ID NO: 13011
  source 1..80: mol_type = other DNA

SEQ ID NO: 49009 - DNA, 80 bp, synthetic construct
  source 1..80: mol_type = other DNA
tcagcttgaagcatggatgggaggttctcagaatcctgctgcgagattgctatattctccagaacctatgagaaagctct

SEQ ID NO: 49010 - DNA, 80 bp, synthetic construct
  source 1..80: mol_type = other DNA
tgtcccaccatctctccagggccccatttcttaggcaagtctctctcactggaaaatgtaaactggaactatacagggaa

SEQ ID NO: 49011 - DNA, 80 bp, synthetic construct; identical to SEQ ID NO: 13012
  source 1..80: mol_type = other DNA

SEQ ID NO: 49012 - DNA, 80 bp, synthetic construct
  source 1..80: mol_type = other DNA
ttatataggtacacatgtgccattgtggtttgctgcatccatcaacccgtcatctaggttttaagccccgcatgcattag

SEQ ID NO: 49013 - DNA, 80 bp, synthetic construct
  source 1..80: mol_type = other DNA
gaatgattgtttccagcttcatccatgtctctgcaaagcacatgaactcattcttttttatggctgcataacattccatg

SEQ ID NO: 49014 - DNA, 80 bp, synthetic construct
  source 1..80: mol_type = other DNA
ggataaataaattattaactatgctgctattttatttatttaaaaatgtgagttcgtggtctgagtaatttacctcagta

SEQ ID NO: 49015 - DNA, 80 bp, synthetic construct; identical to SEQ ID NO: 13013
  source 1..80: mol_type = other DNA

SEQ ID NO: 49016 - DNA, 80 bp, synthetic construct
  source 1..80: mol_type = other DNA
cagagagagatgagtataattgtgaagctaagttttgtaaagcacagggatggctaagaatgggaaggaactgatcccag

SEQ ID NO: 49017 - DNA, 80 bp, synthetic construct
  source 1..80: mol_type = other DNA
ggtgtcctaaatacagtgctgagattcatgtagaagcacaggaggaagcaactgtgtaagtatccagagtcctatgaagt

SEQ ID NO: 49018 - DNA, 80 bp, synthetic construct
  source 1..80: mol_type = other DNA
atctgggcctttactgaaaccactggctgacccctgggttaaagtatgtatgttctgagtactgatgttaattacataca

SEQ ID NO: 49019 - DNA, 80 bp, synthetic construct
  source 1..80: mol_type = other DNA
tcttcataaacatgccagcttagtgtgttggtgtgaggcagcagtagagtgtgtctgcagtgtgggcaactcaggaatga

SEQ ID NO: 49020 - DNA, 80 bp, synthetic construct; identical to SEQ ID NO: 13014
  source 1..80: mol_type = other DNA

SEQ ID NO: 49021 - DNA, 80 bp, synthetic construct
  source 1..80: mol_type = other DNA
gggtcccaaggcttgggctcccttcagcatggctgacgtggttattgtcacaacctaccttccaacgataaataaactcc

SEQ ID NO: 49022 - DNA, 80 bp, synthetic construct
  source 1..80: mol_type = other DNA
ggtatgagtttgttctttcttcccatagtgccacactcagaaacgttatctaagggctcacatatgtatgatcttctaat

SEQ ID NO: 49023 - DNA, 80 bp, synthetic construct
  source 1..80: mol_type = other DNA
ctgggttttatcttgaagatcacatcctatcaggatgggtaatgtccttcaggatgaagcatacacttaggctatggcag

SEQ ID NO: 49024 - DNA, 80 bp, synthetic construct; identical to SEQ ID NO: 13015
  source 1..80: mol_type = other DNA

SEQ ID NO: 49025 - DNA, 80 bp, synthetic construct
  source 1..80: mol_type = other DNA
tgaaactggtaacagtggttgcatccaggcaaggaatttggaagaattgtggatggggtggagaacgaaatttgctttgc

SEQ ID NO: 49026 - DNA, 80 bp, synthetic construct
  source 1..80: mol_type = other DNA
ttctttagtagtgaattctgagattttggtgcaccatcacccgagcagtgtactctgtacccagtgttgccttttatccc

SEQ ID NO: 49027 - DNA, 80 bp, synthetic construct
  source 1..80: mol_type = other DNA
tccatccaagttgctacataaggcattatttcattcctttttatggctgagtagtaatccatggtgtacatacaccacac

SEQ ID NO: 49028 - DNA, 80 bp, synthetic construct; identical to SEQ ID NO: 13016
  source 1..80: mol_type = other DNA

SEQ ID NO: 49029 - DNA, 80 bp, synthetic construct
  source 1..80: mol_type = other DNA
tcctgcctcagcctcccgagtagctgggactacaggtgcatgccaccacgcccagataattttttgtatttctggtagag

SEQ ID NO: 49030 - DNA, 80 bp, synthetic construct
  source 1..80: mol_type = other DNA
cacatttatttagcaaacatttattaggcagttactatgtgtcagggtctcctaggcctcaatgagtgaaacatcaaaga

SEQ ID NO: 49031 - DNA, 80 bp, synthetic construct
  source 1..80: mol_type = other DNA
gtgaatggcaggagaaatcttttagggaatcagtatcacaaacaaaggctcagaagaaagaacacacagggagtctgggg

SEQ ID NO: 49032 - DNA, 80 bp, synthetic construct; identical to SEQ ID NO: 13017
  source 1..80: mol_type = other DNA

SEQ ID NO: 49033 - DNA, 80 bp, synthetic construct
  source 1..80: mol_type = other DNA
acacatggaaaatgaggtggaaaaggagaaaggtccccatgtgaacagcactccatctggaaaaatgacataaaacaagg

SEQ ID NO: 49034 - DNA, 80 bp, synthetic construct
  source 1..80: mol_type = other DNA
cttacatgtctgatcctgcttaagaactatgccaatccccgactttccaggacccccagtaattttgtcgtgtccatgtg

SEQ ID NO: 49035 - DNA, 80 bp, synthetic construct
  source 1..80: mol_type = other DNA
atcaataaagtgtaattaccagaagttcgtgggattctgcatgaaaacaagcttgaagaaatagtgaaagcagaagattt

SEQ ID NO: 49036 - DNA, 80 bp, synthetic construct; identical to SEQ ID NO: 13018
  source 1..80: mol_type = other DNA

SEQ ID NO: 49037 - DNA, 80 bp, synthetic construct
  source 1..80: mol_type = other DNA
cgtgatgaggtcatattacagccgcacttctgtattactagatgactctgtcttctaccttctttgtttgcaagttttga

SEQ ID NO: 49038 - DNA, 80 bp, synthetic construct
  source 1..80: mol_type = other DNA
gacccagccatggcactctgatgaaaatcatgtgagaaagctgcatagctgtgtctggattcctgacccatagaaatgtg

SEQ ID NO: 49039 - DNA, 80 bp, synthetic construct
  source 1..80: mol_type = other DNA
gaacttatctcatccccttccctgtggcagcccttatctttctcataggttgacatcccactttctctttaccagtgtga

SEQ ID NO: 49040 - DNA, 80 bp, synthetic construct
  source 1..80: mol_type = other DNA
aaccttgagtgcaggtattaccagttggaagaagagaggtcaggaaccagtagggattggatggagatgagtgaacaccc

SEQ ID NO: 49041 - DNA, 80 bp, synthetic construct; identical to SEQ ID NO: 13019
  source 1..80: mol_type = other DNA

SEQ ID NO: 49042 - DNA, 80 bp, synthetic construct
  source 1..80: mol_type = other DNA
agcagttacttgggctcagcagtcagactgtctccttagagtcatgagtcagcccattgacagttactaaacttcctagt

SEQ ID NO: 49043 - DNA, 80 bp, synthetic construct
  source 1..80: mol_type = other DNA
ggtcctgtttccttattccaggtgtgatgaaaccagctctccccaacacttatcctgacccccgttctatgcctgcaggt

SEQ ID NO: 49044 - DNA, 80 bp, synthetic construct
  source 1..80: mol_type = other DNA
acgcacttataaacacgcacatacacatagatgcccatacctgtttatacatccacatgtgcacagacagacacacacac

SEQ ID NO: 49045 - DNA, 80 bp, synthetic construct; identical to SEQ ID NO: 13020
  source 1..80: mol_type = other DNA

SEQ ID NO: 49046 - DNA, 80 bp, synthetic construct
  source 1..80: mol_type = other DNA
cagagtttaacttaaccccctcgggtgatgcaccctcaggtccagttttttggttctaacattggtgataccacttttca

SEQ ID NO: 49047 - DNA, 80 bp, synthetic construct
  source 1..80: mol_type = other DNA
gaaaccccgtctctactaaaaatacaaaaaattagccgggcgtagtggcgggcgcctgtagtcccagctactcgggaggc

SEQ ID NO: 49048 - DNA, 80 bp, synthetic construct
  source 1..80: mol_type = other DNA
aaggtttataacttttgatactcacatctgctactttctattagaacctagcagtccttcgtggtactttcatctactgt

SEQ ID NO: 49049 - DNA, 80 bp, synthetic construct
  source 1..80: mol_type = other DNA
aggaaagaaaaagattcccggtgaagctagacccaagtacatcactgttgacaagggtaactactgtcctttcctattta

SEQ ID NO: 49050 - DNA, 80 bp, synthetic construct; identical to SEQ ID NO: 13021
  source 1..80: mol_type = other DNA

SEQ ID NO: 49051 - DNA, 80 bp, synthetic construct
  source 1..80: mol_type = other DNA
tctgcaggtcctcgttcagggacatgaaatctccttgtcgtaggcggacttaaagtgtccttcgaggaagctcctgtccg

SEQ ID NO: 49052 - DNA, 80 bp, synthetic construct
  source 1..80: mol_type = other DNA
ctccctctgtcattggtcacagaacaagtcagtcatgatccagattgaaggagaaacctggagcaaaatggccccagcgc

SEQ ID NO: 49053 - DNA, 80 bp, synthetic construct
  source 1..80: mol_type = other DNA
tcagtaacacattccctgcggtcttcgagaactttcctcagggcgcccacagccctgtgccatcttctccacccgcgctt

SEQ ID NO: 49054 - DNA, 80 bp, synthetic construct; identical to SEQ ID NO: 13022
  source 1..80: mol_type = other DNA

SEQ ID NO: 49055 - DNA, 80 bp, synthetic construct
  source 1..80: mol_type = other DNA
gcggctctgggagaagtgacctgaggagtctgcagatcccagcccgggacggaggcgccgcgagaggagctactaagccc

SEQ ID NO: 49056 - DNA, 80 bp, synthetic construct
  source 1..80: mol_type = other DNA
ggagatctcccactttatgaagctcatcctccactgactctgatggcttctctagaacccgagaccaactgataaaggcg

SEQ ID NO: 49057 - DNA, 80 bp, synthetic construct
  source 1..80: mol_type = other DNA
agctggagatgcttaagtttaaaccagagactttggatattttccctgagtgacataatccttgtctttctctcctggaa

SEQ ID NO: 49058 - DNA, 80 bp, synthetic construct; identical to SEQ ID NO: 13023
  source 1..80: mol_type = other DNA

SEQ ID NO: 49059 - DNA, 80 bp, synthetic construct
  source 1..80: mol_type = other DNA
cctgttggaagttgatgtcagcaagagacctcctcttgggaaatgctggctcagtgtggggcctcccttttagtaaaggg

SEQ ID NO: 49060 - DNA, 80 bp, synthetic construct
  source 1..80: mol_type = other DNA
agtgcttttcatagtcttgcaacacattttgaatccctggttctcatttcacactgactgcctcacagagtgaagacgat

SEQ ID NO: 49061 - DNA, 80 bp, synthetic construct
  source 1..80: mol_type = other DNA
ttacacatgcttaagtagtcactactgatacctatgcattttctcccttggcatgtgacattgacataaaaattgtacat

SEQ ID NO: 49062 - DNA, 80 bp, synthetic construct; identical to SEQ ID NO: 13024
  source 1..80: mol_type = other DNA

SEQ ID NO: 49063 - DNA, 80 bp, synthetic construct
  source 1..80: mol_type = other DNA
gtccagcagttttcactgctcttattaaaaattttaattgaggatcttcccagtgtcataaagaagaaaagaaatacact

SEQ ID NO: 49064 - DNA, 80 bp, synthetic construct
  source 1..80: mol_type = other DNA
ttttttttttttgagatggagtctcgctctgtcgcccaggctggagtgcagtggcgagatctcggctcactgcaagctcc

SEQ ID NO: 49065 - DNA, 80 bp, synthetic construct
  source 1..80: mol_type = other DNA
ggaagttaataagatatttttgcttggtaggtagaagaaattatagagctgttttgcacagatataaaatgaaaatttaa

SEQ ID NO: 49066 - DNA, 80 bp, synthetic construct; identical to SEQ ID NO: 13025
  source 1..80: mol_type = other DNA

SEQ ID NO: 49067 - DNA, 80 bp, synthetic construct
  source 1..80: mol_type = other DNA
gagagtcgagatgttgagacagggtagtaaactagaacttgggaacagaatagaaagccctgaacgtatgtagagcagag

SEQ ID NO: 49068 - DNA, 80 bp, synthetic construct
  source 1..80: mol_type = other DNA
agtgtagggaaagatttttatgcaggttacaacaaagtattaaccccagggtaatctttgacaggattaaagacattaaa

SEQ ID NO: 49069 - DNA, 80 bp, synthetic construct
  source 1..80: mol_type = other DNA
acatatcagctggctttggtgtagctactggataagaatttctgaatatccaggactcaaggttggtgactgctcagcag

SEQ ID NO: 49070 - DNA, 80 bp, synthetic construct; identical to SEQ ID NO: 13026
  source 1..80: mol_type = other DNA

SEQ ID NO: 49071 - DNA, 80 bp, synthetic construct
  source 1..80: mol_type = other DNA
gttgattggagtcaaacctggagagttttaggaacaatactgtttccaggatcctacttttgatgaattagatttcattg

SEQ ID NO: 49072 - DNA, 80 bp, synthetic construct
  source 1..80: mol_type = other DNA
acatttaatctaagatactgggtgaagatcccatattgatgaatccaggccaatcacatctcatttctccctatgtcaat

SEQ ID NO: 49073 - DNA, 80 bp, synthetic construct
  source 1..80: mol_type = other DNA
agagtacatggagcgtggatcaggagtgcacagagaagataccagcagacctgccctctccattgcactcaaaatcacac

SEQ ID NO: 49074 - DNA, 80 bp, synthetic construct; identical to SEQ ID NO: 13027
  source 1..80: mol_type = other DNA

SEQ ID NO: 49075 - DNA, 80 bp, synthetic construct
  source 1..80: mol_type = other DNA
gtacttggaaaggtgcctgtcaagctaggaaagttgccaatgatagaaaaaacactcctgaagtgaaaactcaaaattta

SEQ ID NO: 49076 - DNA, 80 bp, synthetic construct
  source 1..80: mol_type = other DNA
attgtatactttagatgggtgagtagtatgtgatttatatctcaataaagtttaatgaggaaaacataatgagatatttt

SEQ ID NO: 49077 - DNA, 80 bp, synthetic construct
  source 1..80: mol_type = other DNA
atcatctctttgagtgggatatcatacacatataccagtaactccactcctaggtgtataattttgacagatatgtgccc

SEQ ID NO: 49078 - DNA, 80 bp, synthetic construct; identical to SEQ ID NO: 13028
  source 1..80: mol_type = other DNA

SEQ ID NO: 49079 - DNA, 80 bp, synthetic construct
  source 1..80: mol_type = other DNA
gggaattggtatgaaaacttctgggttttttttctgagttttgtttctttttcacacggatcttccctttaaaaccatgt

SEQ ID NO: 49080 - DNA, 80 bp, synthetic construct
  source 1..80: mol_type = other DNA
agagaccatgaattggaatgggaactcggaattgtcatcatcctataattctactcaggattctgtccttaaaacattgg

SEQ ID NO: 49081 - DNA, 80 bp, synthetic construct
  source 1..80: mol_type = other DNA
tgatttaagtgtaaatagtgtcttgtggacaaggcaacattacaaaaacaaaatgcagcacccgctgtctctgtcttttt

SEQ ID NO: 49082 - DNA, 80 bp, synthetic construct; identical to SEQ ID NO: 13029
  source 1..80: mol_type = other DNA

SEQ ID NO: 49083 - DNA, 80 bp, synthetic construct
  source 1..80: mol_type = other DNA
taaaaatatagcaatataattctatgctgtgtgtgaaaaggattaaaaacaaggtgagcctgtgttagcttggtaaatta

SEQ ID NO: 49084 - DNA, 80 bp, synthetic construct
  source 1..80: mol_type = other DNA
cagaaacatttcactgtgaatgtggaagggaagatgaacagaattttaaacacattgggtgtgtacagaggatcagaatc

SEQ ID NO: 49085 - DNA, 80 bp, synthetic construct
  source 1..80: mol_type = other DNA
gtgagtagtaactttgcgtaactccagccaagggcgtgataagcttttacagttcttttgtagtttttattcctaaaaca

SEQ ID NO: 49086 - DNA, 80 bp, synthetic construct; identical to SEQ ID NO: 13030
  source 1..80: mol_type = other DNA

SEQ ID NO: 49087 - DNA, 80 bp, synthetic construct
  source 1..80: mol_type = other DNA
atcaccatgcctggcttggtattttcttttatcagatagcagagtgaagcacttgcattacaaaaataaaatgcataaaa

SEQ ID NO: 49088 - DNA, 80 bp, synthetic construct
  source 1..80: mol_type = other DNA
tagagtttgttaagaaaacttccctgagttgttttaaatggtcttttgaaagccagacactgcaatcctataatcattgg

SEQ ID NO: 49089 - DNA, 80 bp, synthetic construct
  source 1..80: mol_type = other DNA
gaggaaagcagatttttagacttttagcccatcttgaccagagggatcagcaaaaacctggaatgaagaatttcttcctg

SEQ ID NO: 49090 - DNA, 80 bp, synthetic construct; identical to SEQ ID NO: 13031
  source 1..80: mol_type = other DNA

SEQ ID NO: 49091 - DNA, 80 bp, synthetic construct
  source 1..80: mol_type = other DNA
aagaggcatctaagaaggcagaatgtttctatctgttctgggattaacaggggtagaaagatgtgaaaggcagatggaaa

SEQ ID NO: 49092 - DNA, 80 bp, synthetic construct
  source 1..80: mol_type = other DNA
cacactttggtttgaggatccaagcacagaatgtggctgtctctgggacatttcatgctaaagaagcccagcacgtatag

SEQ ID NO: 49093 - DNA, 80 bp, synthetic construct
  source 1..80: mol_type = other DNA
ttgaatccctgtgtcctttccctccatctctaccagagaccacttgtggaaaaaaaagacacgaatgtcagaggtgaatc

SEQ ID NO: 49094 - DNA, 80 bp, synthetic construct
  source 1..80: mol_type = other DNA
tcatgaggagctggagaggtcccagagcatatagaccttgattgaattggaaccagagagaagtcaggtaaaactctcca

SEQ ID NO: 49095 - DNA, 80 bp, synthetic construct; identical to SEQ ID NO: 13032
  source 1..80: mol_type = other DNA

SEQ ID NO: 49096 - DNA, 80 bp, synthetic construct
  source 1..80: mol_type = other DNA
agtctgattatccttgagattgcattttctaaagaataaaatagagtaaatctctttggctcttgatactctgaaatttt

SEQ ID NO: 49097 - DNA, 80 bp, synthetic construct
  source 1..80: mol_type = other DNA
ggatgctttcccaggggaacaacttctcctgctgtgctggcttattttctttgtatttggaggacaaaaaagttgatgta

SEQ ID NO: 49098 - DNA, 80 bp, synthetic construct
  source 1..80: mol_type = other DNA
ctgccatggtggataaggggagagctcttggtgtagggtttggtctttataatgaaccatgctgtttgggcagcgggttt

SEQ ID NO: 49099 - DNA, 80 bp, synthetic construct; identical to SEQ ID NO: 13033
  source 1..80: mol_type = other DNA

SEQ ID NO: 49100 - DNA, 80 bp, synthetic construct
  source 1..80: mol_type = other DNA
ctatagaatcacaggcttagactggaggggtaaggcgtgatggtgttcttcctttctggcagacaggatgttttggattg

SEQ ID NO: 49101 - DNA, 80 bp, synthetic construct
  source 1..80: mol_type = other DNA
agcagatctgatatttgcgctacccaataaaatatggcagaagtatgcttgtgtcagttctgggcactgctgttaaccat

SEQ ID NO: 49102 - DNA, 80 bp, synthetic construct
  source 1..80: mol_type = other DNA
attttcatgaatatccttctctatccttccaatttcaacttccgagtgtcgttagatccaaagtgagaatcttttttttt

SEQ ID NO: 49103 - DNA, 80 bp, synthetic construct
  source 1..80: mol_type = other DNA
tttttagtagagacaggggtttcatcatgttggccaggctggtctcaaactcctgacctcgtgatccacccgccacagcc

SEQ ID NO: 49104 - DNA, 80 bp, synthetic construct; identical to SEQ ID NO: 13034
  source 1..80: mol_type = other DNA

SEQ ID NO: 49105 - DNA, 80 bp, synthetic construct
  source 1..80: mol_type = other DNA
catcttttcccacccctcattttacgttattgatgtcacaaattacacctcagcaggctggaaggctggaaagtcataat

SEQ ID NO: 49106 - DNA, 80 bp, synthetic construct
  source 1..80: mol_type = other DNA
aaaggccttcaagtgattcaaaaagtcccacccacattttttagggtaatttccttttcatgaaatcaactgatatcaga

SEQ ID NO: 49107 - DNA, 80 bp, synthetic construct
  source 1..80: mol_type = other DNA
tcgtctccaaataaaaacagctataaagtcttacttttgccaaagatgatacaattaacttgcatccaactagaaacaca

SEQ ID NO: 49108 - DNA, 80 bp, synthetic construct; identical to SEQ ID NO: 13035
  source 1..80: mol_type = other DNA

SEQ ID NO: 49109 - DNA, 80 bp, synthetic construct
  source 1..80: mol_type = other DNA
tgatcctcctacctcaacctcctaagtagctgggactacaagcacaccaccaagtctaactaattttttgtatttatttt

SEQ ID NO: 49110 - DNA, 80 bp, synthetic construct
  source 1..80: mol_type = other DNA
aaccatcccatattcccattgctttcagcaagtccctcagctgatcaggtttcttttcctgcttgaatgacttaaacctt

SEQ ID NO: 49111 - DNA, 80 bp, synthetic construct
  source 1..80: mol_type = other DNA
caattccccctgatgaccaagaccaatcaccccagacagtgcagtaactccttcctttgttgattcagaatcatgaggag

SEQ ID NO: 49112 - DNA, 80 bp, synthetic construct; identical to SEQ ID NO: 13036
  source 1..80: mol_type = other DNA

SEQ ID NO: 49113 - DNA, 80 bp, synthetic construct
  source 1..80: mol_type = other DNA
cctcaaacattgagggtagataagcccacaaagatgagaagaaatcagcaaaagaatttgataaccaacctgacagagct

SEQ ID NO: 49114 - DNA, 80 bp, synthetic construct
  source 1..80: mol_type = other DNA
tgaaaaacatgggattatgtaaagaaactgaatatatgaatgattggtgtacctgaaagagatggggagaatggaaccaa

SEQ ID NO: 49115 - DNA, 80 bp, synthetic construct
  source 1..80: mol_type = other DNA
gaaaaaatatgaagggtatccagagagaaaggccagatcacctacaaagggaagcccatcagactaacagtggatctctc

SEQ ID NO: 49116 - DNA, 80 bp, synthetic construct; identical to SEQ ID NO: 13037
  source 1..80: mol_type = other DNA

SEQ ID NO: 49117 - DNA, 80 bp, synthetic construct
  source 1..80: mol_type = other DNA
ctggataaagaaccaagacttatcagtatgctgtcttccatatacccatttcacacgcaatgacgtacataggctcaaaa

SEQ ID NO: 49118 - DNA, 80 bp, synthetic construct
  source 1..80: mol_type = other DNA
taactatctgaaatatatatgcatcctgtacaggaatacccagattcataaagtaggttcctagagaccttcaaagagac

SEQ ID NO: 49119 - DNA, 80 bp, synthetic construct
  source 1..80: mol_type = other DNA
cagaatatacatttttcacattgtcacatggcacttactctaaaatcgatcacacaattggaagtaaaacactcctcagc

SEQ ID NO: 49120 - DNA, 80 bp, synthetic construct; identical to SEQ ID NO: 13038
  source 1..80: mol_type = other DNA

SEQ ID NO: 49121 - DNA, 80 bp, synthetic construct
  source 1..80: mol_type = other DNA
aggagacagagacatgaaaaaccactcaaaagatctacgaattcaggagtttttgttctgttttgttttggttttgtttt

SEQ ID NO: 49122 - DNA, 80 bp, synthetic construct
  source 1..80: mol_type = other DNA
ttataggcatgtgtcaccatgcccggttaatttttttgtatttttaatagagatgaggtttctccatgttggtcaggctg

SEQ ID NO: 49123 - DNA, 80 bp, synthetic construct
  source 1..80: mol_type = other DNA
gtaaacacaattagaaacaataagagggacattaccattgaccccacagaaattcaagcaaccaccagaaaatattatga

SEQ ID NO: 49124 - DNA, 80 bp, synthetic construct; identical to SEQ ID NO: 13039
  source 1..80: mol_type = other DNA

SEQ ID NO: 49125 - DNA, 80 bp, synthetic construct
  source 1..80: mol_type = other DNA
acaaaatgccggcaagccgaatccagcagcacatcaaaaagcttatccactacaatcaagtagacttcacccccagtatg

SEQ ID NO: 49126 - DNA, 80 bp, synthetic construct
  source 1..80: mol_type = other DNA
aaggaacacacttcaaaataataaaagccaattatgacaaacccacagcgagcatcatactgatgggcaaaggctggaag

SEQ ID NO: 49127 - DNA, 80 bp, synthetic construct
  source 1..80: mol_type = other DNA
aggaagataggaagtcaaactattcctgtttgcagattacatgattctataactagaaaaacccagtctcagcccaaaag

SEQ ID NO: 49128 - DNA, 80 bp, synthetic construct; identical to SEQ ID NO: 13040
  source 1..80: mol_type = other DNA

SEQ ID NO: 49129 - DNA, 80 bp, synthetic construct
  source 1..80: mol_type = other DNA
gctggagggcagtggcgcgatctcggctcactgcaagctctgcctcctgggttcacggcattctcctgcctcagcctccc

SEQ ID NO: 49130 - DNA, 80 bp, synthetic construct
  source 1..80: mol_type = other DNA
caccgcgcccggccactaccactgacattcttcacagaactagaaaaaactattttaaaattcacctgaagccaaaaaag

SEQ ID NO: 49131 - DNA, 80 bp, synthetic construct
  source 1..80: mol_type = other DNA
tgattctccttttctcagcctcctgagtagctgggattacaggcacgtgccaccacgcccagctaattttttgtatcttt

SEQ ID NO: 49132 - DNA, 80 bp, synthetic construct
  source 1..80: mol_type = other DNA
aaacagcatggtactggtacaaaaacagacatatagagcaatggaacagaatagagaacccaaaaataagaccacacacc

SEQ ID NO: 49133 - DNA, 80 bp, synthetic construct; identical to SEQ ID NO: 13041
  source 1..80: mol_type = other DNA

SEQ ID NO: 49134 - DNA, 80 bp, synthetic construct
  source 1..80: mol_type = other DNA
gtctaatatctataaggaacttaaacaaatttacaagaaaaaacaaaacaaccccattaaaaagtgggcaaagcataaga

SEQ ID NO: 49135 - DNA, 80 bp, synthetic construct
  source 1..80: mol_type = other DNA
ggcaaagttgtggagaaaaaggaatacttatacactgttggtgggagtgcaaattaggtcagccattgtggaagacagtg

SEQ ID NO: 49136 - DNA, 80 bp, synthetic construct
  source 1..80: mol_type = other DNA
taaagaaaatgtgatacatgtataccatggaatactatgcagccagaaaaaggaatgtgatcatgtcctttgtagggaca

SEQ ID NO: 49137 - DNA, 80 bp, synthetic construct; identical to SEQ ID NO: 13042
  source 1..80: mol_type = other DNA

SEQ ID NO: 49138 - DNA, 80 bp, synthetic construct
  source 1..80: mol_type = other DNA
gggcccactggaaccactgtgagaatggttcatggatgttagggcttcaggttttctattcttcctagtttaatcttggt

SEQ ID NO: 49139 - DNA, 80 bp, synthetic construct
  source 1..80: mol_type = other DNA
ctcttgtttctgattttgagtctgttagaaattaagcttgaagtcgcaaagaaaacgaacacttgaacaaaggatttctc

SEQ ID NO: 49140 - DNA, 80 bp, synthetic construct
  source 1..80: mol_type = other DNA
ttcctgtctgcattggctggagctggactgcgcagtctaaactgatcccggttgactaaaaactttaactttcctaaaaa

SEQ ID NO: 49141 - DNA, 80 bp, synthetic construct
  source 1..80: mol_type = other DNA
gtctggtcagatccaggcagactacgagttaggccttggttcaagtacaagaacatagaatgtgtttatttatttactgt

SEQ ID NO: 49142 - DNA, 80 bp, synthetic construct; identical to SEQ ID NO: 13043
  source 1..80: mol_type = other DNA

SEQ ID NO: 49143 - DNA, 80 bp, synthetic construct
  source 1..80: mol_type = other DNA
gaactgaggacatgagtcctttccacttaccaaaccacctttccattaagctagtgaaaggatcatttattccagagttt

SEQ ID NO: 49144 - DNA, 80 bp, synthetic construct
  source 1..80: mol_type = other DNA
cccaagtcatctgtctggtgggtcctagttgctcagctattccctcatagcatcccttgtgcaattaatgaattattgct

SEQ ID NO: 49145 - DNA, 80 bp, synthetic construct
  source 1..80: mol_type = other DNA
tgccaccacgcccggctaatttttgtatttttattagagaaagggtttcactatgttggtcaggctggtctcaaactcct

SEQ ID NO: 49146 - DNA, 80 bp, synthetic construct; identical to SEQ ID NO: 13044
  source 1..80: mol_type = other DNA

SEQ ID NO: 49147 - DNA, 80 bp, synthetic construct
  source 1..80: mol_type = other DNA
gcttggggatggataagggcagactgatcggttagctcttggaagtgcttgacctccctgcatcccatgaggtttccaag

SEQ ID NO: 49148 - DNA, 80 bp, synthetic construct
  source 1..80: mol_type = other DNA
tgtttgacatgatttattaccccaggctgtggggtcttggagcagagctaccatgcggtccgtatctggtctattacaag

SEQ ID NO: 49149 - DNA, 80 bp, synthetic construct
  source 1..80: mol_type = other DNA
ttttacttctactacagctactttggctttgtcactgagtataggtggggtgatggtttgaggaagatgtgatagagagg

SEQ ID NO: 49150 - DNA, 80 bp, synthetic construct
  source 1..80: mol_type = other DNA
tggacaattagaagaggcaatcccttttgtaagatggatatatggctttaaggactggcaaagactggtgggagcagtcc

SEQ ID NO: 49151 - DNA, 80 bp, synthetic construct; identical to SEQ ID NO: 13045
  source 1..80: mol_type = other DNA

SEQ ID NO: 49152 - DNA, 80 bp, synthetic construct
  source 1..80: mol_type = other DNA
gaaggtgatgccttcttgacttgagtataatgagtccaccctttttcagtggtctgaactgctgtttcagttgttgtgag

SEQ ID NO: 49153 - DNA, 80 bp, synthetic construct
  source 1..80: mol_type = other DNA
ccaaatacataatttctaaggaactgatcttttgtttcgatcataggaaggtcagtagtagtgtttagataaggtaaccc

SEQ ID NO: 49154 - DNA, 80 bp, synthetic construct
  source 1..80: mol_type = other DNA
gatgaaggtggagaccaggaagtatgatattcccattttatctctaatacttggattaggcctttaataatgtgcatggt

SEQ ID NO: 49155 - DNA, 80 bp, synthetic construct; identical to SEQ ID NO: 13046
  source 1..80: mol_type = other DNA

SEQ ID NO: 49156 - DNA, 80 bp, synthetic construct
  source 1..80: mol_type = other DNA
ggtttgaggaccccagtgagatccttgatgaagctgtgacaatatttccctcataagaggtttggataacatttctcttc

SEQ ID NO: 49157 - DNA, 80 bp, synthetic construct
  source 1..80: mol_type = other DNA
tatttggtcagtgggattatttccctcgccttcaaatgaaggattcgtttgatgtcgtgggacatgtacaacagctattt

SEQ ID NO: 49158 - DNA, 80 bp, synthetic construct
  source 1..80: mol_type = other DNA
atttgcagaaattttaaggcctgatttaatgtgaacaactcatatgtttgtgcagaccactcatttggtaacctttcaga

SEQ ID NO: 49159 - DNA, 80 bp, synthetic construct; identical to SEQ ID NO: 13047
  source 1..80: mol_type = other DNA

SEQ ID NO: 49160 - DNA, 80 bp, synthetic construct
  source 1..80: mol_type = other DNA
ccgccttctgattgagaattgttctcacttggtgaggagcactaatgataagatttccccaaaggttaattgtctgctgt

SEQ ID NO: 49161 - DNA, 80 bp, synthetic construct
  source 1..80: mol_type = other DNA
agatgaaagggcaattctaaagagggtaaggctagaacatgggctgtcactagtaactcttaatttttttacctgctgta

SEQ ID NO: 49162 - DNA, 80 bp, synthetic construct
  source 1..80: mol_type = other DNA
atatgatgccttcaatccattcaaatccaattctctatttgcccttactgattaagtgccctaaatacttgacttcaggt

SEQ ID NO: 49163 - DNA, 80 bp, synthetic construct; identical to SEQ ID NO: 13048
  source 1..80: mol_type = other DNA

SEQ ID NO: 49164 - DNA, 80 bp, synthetic construct
  source 1..80: mol_type = other DNA
ttgttcgaactatttggttaatagatcgaagatcttgcactagccgatatgacccatctggctttttcacaggtagtgtg

SEQ ID NO: 49165 - DNA, 80 bp, synthetic construct
  source 1..80: mol_type = other DNA
gtaattttcctcggtttccttcctttgaccatacatctgaatggatgtatccctcatttagagtagcaagcaaatttaag

SEQ ID NO: 49166 - DNA, 80 bp, synthetic construct
  source 1..80: mol_type = other DNA
taaacccctccccttttgctcccaaaataaaaagttcttcttgtgaccaagttacaccagggggaagataacaaactgag

SEQ ID NO: 49167 - DNA, 80 bp, synthetic construct; identical to SEQ ID NO: 13049
  source 1..80: mol_type = other DNA

SEQ ID NO: 49168 - DNA, 80 bp, synthetic construct
  source 1..80: mol_type = other DNA
caccttttgggcctcccttaagagttcctttatgggacagtccttccaattttctgtcttttgtaatttcttggtaacat

SEQ ID NO: 49169 - DNA, 80 bp, synthetic construct
  source 1..80: mol_type = other DNA
attctgggtgcagggtaacgattctctaattccttttattattatttcttgcaggtctctcatattcctcctatgagcta

SEQ ID NO: 49170 - DNA, 80 bp, synthetic construct
  source 1..80: mol_type = other DNA
ctcagcccagtatacaactggagtcctaaaaattgatgaatttgatctgtcactacatagagatcatctaagagtggctt

SEQ ID NO: 49171 - DNA, 80 bp, synthetic construct; identical to SEQ ID NO: 13050
  source 1..80: mol_type = other DNA

SEQ ID NO: 49172 - DNA, 80 bp, synthetic construct
  source 1..80: mol_type = other DNA
gtcccatgtgttggtggggttcttggcgtaaggggtattaatttcatgagaagtagtttctggcttctctcctttagttt

SEQ ID NO: 49173 - DNA, 80 bp, synthetic construct
  source 1..80: mol_type = other DNA
tgacccgaattttggccagaaaactgaaggctttagaataggttccttggtccaaatgaaacaataatactttatcatct

SEQ ID NO: 49174 - DNA, 80 bp, synthetic construct
  source 1..80: mol_type = other DNA
gaactagagatttttcacctatccttccctggaggtttaacccctatcctggaggttccttgcaatcttctccttctgct

SEQ ID NO: 49175 - DNA, 80 bp, synthetic construct; identical to SEQ ID NO: 13051
  source 1..80: mol_type = other DNA

SEQ ID NO: 49176 - DNA, 80 bp, synthetic construct
  source 1..80: mol_type = other DNA
ggtgaccaaagaccccttcccaaagaagaatgggaatagtggatgagcccccagaaaattgttagaaataaagctcggag

SEQ ID NO: 49177 - DNA, 80 bp, synthetic construct
  source 1..80: mol_type = other DNA
ggatgagcccccagaaaattgttagaaataaagctcggagtcacaaagaaaacaaacacttgaacaaaggatttctcagc

SEQ ID NO: 49178 - DNA, 80 bp, synthetic construct
  source 1..80: mol_type = other DNA
gatcccagttggctaaaaacttaaactttcccaaataaggtaaaggtgcaatggggaacaaaggaaaggagggggtcact

SEQ ID NO: 49179 - DNA, 80 bp, synthetic construct
  source 1..80: mol_type = other DNA
tactgtatgtaacaactccttgggggcacaataaagaatcattagtaaaatagaagatttgttagtatgaagagcaaggg

SEQ ID NO: 49180 - DNA, 80 bp, synthetic construct; identical to SEQ ID NO: 13052
  source 1..80: mol_type = other DNA

SEQ ID NO: 49181 - DNA, 80 bp, synthetic construct
  source 1..80: mol_type = other DNA
tgtttctacttttcttaggtaggtatttattcctataaacctcccttttagccctgtttagctgtatcccacaggttttg

SEQ ID NO: 49182 - DNA, 80 bp, synthetic construct
  source 1..80: mol_type = other DNA
ttgtggccagagaagatatttaatgatttcaatttttgaaaatttgttcagacttgttttgtggcttaacataggctctc

SEQ ID NO: 49183 - DNA, 80 bp, synthetic construct
  source 1..80: mol_type = other DNA
gttgggatgttgaagtcccctactattattgtattggagtctatctttcttgttagatgtagtaatatttgttttatgag

SEQ ID NO: 49184 - DNA, 80 bp, synthetic construct; identical to SEQ ID NO: 13053
  source 1..80: mol_type = other DNA

SEQ ID NO: 49185 - DNA, 80 bp, synthetic construct
  source 1..80: mol_type = other DNA
taatctgtttacattccagatttttattaatatgtgaggctttgtgccgagactagctcagttgggaagaccctaaccca

SEQ ID NO: 49186 - DNA, 80 bp, synthetic construct
  source 1..80: mol_type = other DNA
attaactaaaagtattccttatgggaaacaaacggatgggccaaaataaagggatgggtttggctagttatctgcagcag

SEQ ID NO: 49187 - DNA, 80 bp, synthetic construct
  source 1..80: mol_type = other DNA
agtgctgcagagattttgtttatggccagttttggggccagtttacggccagatttttggaggcctgttcccaacagctt

SEQ ID NO: 49188 - DNA, 80 bp, synthetic construct; identical to SEQ ID NO: 13054
  source 1..80: mol_type = other DNA

SEQ ID NO: 49189 - DNA, 80 bp, synthetic construct
  source 1..80: mol_type = other DNA
tcttctggcctgtaagatttctgctaagaaatctgctgttagagctgggcacagtggctcacacctgtaatcccagcact

SEQ ID NO: 49190 - DNA, 80 bp, synthetic construct
  source 1..80: mol_type = other DNA
aggagaatcacctgaacccaggaggcagaggttgcagtgaaccgagatcatgccactgcaccccagcctggcagcacagc

SEQ ID NO: 49191 - DNA, 80 bp, synthetic construct
  source 1..80: mol_type = other DNA
ggaactttttgcattgtatttttctcagaattattgaacattttgtatctgaatgtctaaatcacttgctagagttggga

SEQ ID NO: 49192 - DNA, 80 bp, synthetic construct; identical to SEQ ID NO: 13055
  source 1..80: mol_type = other DNA

SEQ ID NO: 49193 - DNA, 80 bp, synthetic construct
  source 1..80: mol_type = other DNA
gaatgttttgagtcctttatctagaatcttgaaaatttctttttgattaagatctattgtcttcctttgcggcttttttt

SEQ ID NO: 49194 - DNA, 80 bp, synthetic construct
  source 1..80: mol_type = other DNA
tctgggtgtagtacatagtagagtactatggcctctgtataatttctttggctgtagacagtgttaatggtatctgtgat

SEQ ID NO: 49195 - DNA, 80 bp, synthetic construct
  source 1..80: mol_type = other DNA
tggtggttactggtgggctgattcctgggcttccaggtggcttgcttggatggcagtagtggcagtggttgactgggtag

SEQ ID NO: 49196 - DNA, 80 bp, synthetic construct; identical to SEQ ID NO: 13056
  source 1..80: mol_type = other DNA

SEQ ID NO: 49197 - DNA, 80 bp, synthetic construct
  source 1..80: mol_type = other DNA
catttgtttgtttgtttgtttgtttgtttatttttgagacagagtctcactctattgcccaggctggagtgcaatggtgt

SEQ ID NO: 49198 - DNA, 80 bp, synthetic construct
  source 1..80: mol_type = other DNA
ctcctgacttcgtgatctacctacctcggcctcccaaagtgttgggatgacaggcatgagccaccatgcctggcctaaaa

SEQ ID NO: 49199 - DNA, 80 bp, synthetic construct
  source 1..80: mol_type = other DNA
gaatagaatctagtttcacagcattttccttttaggactctaaagatgttgctcatctgtctcctcatttgcattgtttc

SEQ ID NO: 49200 - DNA, 80 bp, synthetic construct; identical to SEQ ID NO: 13057
  source 1..80: mol_type = other DNA

SEQ ID NO: 49201 - DNA, 80 bp, synthetic construct
  source 1..80: mol_type = other DNA
accaaaagcaatggcatcaaaaaccaaaattgacaaatgggatctaattaaactaaagagcttctgcactgcaaaagaaa

SEQ ID NO: 49202 - DNA, 80 bp, synthetic construct
  source 1..80: mol_type = other DNA
acacttctccaaagaagacatttatgcagccaacagacacatgaaaaaatgctcatcatcactggccatcagagaaatgc

SEQ ID NO: 49203 - DNA, 80 bp, synthetic construct; identical to SEQ ID NO: 13058
  source 1..80: mol_type = other DNA

SEQ ID NO: 49204 - DNA, 80 bp, synthetic construct
  source 1..80: mol_type = other DNA
tgagttcatgtcctttgtagggacatggatgaagctggaaaccatcattctgagcaaactatcacaaggacagaaaacca

SEQ ID NO: 49205 - DNA, 80 bp, synthetic construct
  source 1..80: mol_type = other DNA
ataccaacatggcacatgtatacatatgtaacaaacctgcacgttgtacacatgtaccctagaacttaaagtataataat

SEQ ID NO: 49206 - DNA, 80 bp, synthetic construct; identical to SEQ ID NO: 13059
  source 1..80: mol_type = other DNA

SEQ ID NO: 49207 - DNA, 80 bp, synthetic construct
  source 1..80: mol_type = other DNA
tttcttagcagtggtggaagaattgaacaataataaagctcctacgttttagtttttactgacttacagggagtgactaa

SEQ ID NO: 49208 - DNA, 80 bp, synthetic construct
  source 1..80: mol_type = other DNA
tctgttgatacctgatatagattggatgttgttcttgtgcagatctcatgtcgagatgtgatccccagcattataggtgg

SEQ ID NO: 49209 - DNA, 80 bp, synthetic construct
  source 1..80: mol_type = other DNA
tgaaatcaacaagaatttatctccaagtgtttgccaggtgcacttgtaattccagctatgagagcggctgaggcagaagg

SEQ ID NO: 49210 - DNA, 80 bp, synthetic construct; identical to SEQ ID NO: 13060
  source 1..80: mol_type = other DNA

SEQ ID NO: 49211 - DNA, 80 bp, synthetic construct
  source 1..80: mol_type = other DNA
tttgttcagctggtggtaggtgtgttaccaaactgaactggggtccactcacctggggcagtaaaagcaaacatccacac

SEQ ID NO: 49212 - DNA, 80 bp, synthetic construct
  source 1..80: mol_type = other DNA
taaatcaatgcatagcagttacactgctttggccttaaaaggtagaatatcctgatgagggagcttacaggtcttaggta

SEQ ID NO: 49213 - DNA, 80 bp, synthetic construct
  source 1..80: mol_type = other DNA
tcagagttcagttctcagtttcccctttataaggtctccctgtcagtggatctattaggagggaatccatgtttctgaaa

SEQ ID NO: 49214 - DNA, 80 bp, synthetic construct; identical to SEQ ID NO: 13061
  source 1..80: mol_type = other DNA

SEQ ID NO: 49215 - DNA, 80 bp, synthetic construct
  source 1..80: mol_type = other DNA
gagaattaaaatagtcagttggatgtgtaaaggaaagagtggggaaacaagcacaaagggtgggcttatacaccttcatg

SEQ ID NO: 49216 - DNA, 80 bp, synthetic construct
  source 1..80: mol_type = other DNA
ccaggactagggatgcaaatagagttcagaaacaggaattattcctgagcaagaaactgtaaatatattttatgtccatt

SEQ ID NO: 49217 - DNA, 80 bp, synthetic construct
  source 1..80: mol_type = other DNA
gagacacttgctagaacagtattggtccctgcagtctcagccagcacagcagcagaacctagtgttccttccaaaattat

SEQ ID NO: 49218 - DNA, 80 bp, synthetic construct; identical to SEQ ID NO: 13062
  source 1..80: mol_type = other DNA

SEQ ID NO: 49219 - DNA, 80 bp, synthetic construct
  source 1..80: mol_type = other DNA
aatagtgagacccattcctacaaaatatttaaaaattagttgggcatgttggtgtgcacttgtaatgctatctactcagg

SEQ ID NO: 49220 - DNA, 80 bp, synthetic construct
  source 1..80: mol_type = other DNA
atctgtggtccaataaaaatatttggtcttttccctgtttcctgacaaccaggttctaaaacatttgcaatctcctcagt

SEQ ID NO: 49221 - DNA, 80 bp, synthetic construct
  source 1..80: mol_type = other DNA
gttgagttcagtcacacaatggccggtgatttaattaatcatgcttacacaatgaaatttccatagaaacctctggagat

SEQ ID NO: 49222 - DNA, 80 bp, synthetic construct; identical to SEQ ID NO: 13063
  source 1..80: mol_type = other DNA

SEQ ID NO: 49223 - DNA, 80 bp, synthetic construct
  source 1..80: mol_type = other DNA
caccatgaacgaaacaaatttctgtttgttaaaagttatccagtctcaggaattctgctctagtggcataatttaaacca

SEQ ID NO: 49224 - DNA, 80 bp, synthetic construct
  source 1..80: mol_type = other DNA
tgaaccctattgtgaactctgcatgcaagagatctaggttgcatgctccttatgaagcgctaatgcctgatcatctgagg

SEQ ID NO: 49225 - DNA, 80 bp, synthetic construct
  source 1..80: mol_type = other DNA
atttcaggactccaaattcactataccaaaaggaaaaattaagtttggagactgatggaaaaactgcctttctttcgttc

SEQ ID NO: 49226 - DNA, 80 bp, synthetic construct; identical to SEQ ID NO: 13064
  source 1..80: mol_type = other DNA

SEQ ID NO: 49227 - DNA, 80 bp, synthetic construct
  source 1..80: mol_type = other DNA
ttaggaaaaagcatgggccacagatgctacaatgatttgtgtctctgtttccaaggtgcatcttcagcttggtgaaataa

SEQ ID NO: 49228 - DNA, 80 bp, synthetic construct
  source 1..80: mol_type = other DNA
ctttgcagccatgttagacagaagtgcaggtaacctgggacgtgatacttgtgacttgcttctgaagtgaggacagactt

SEQ ID NO: 49229 - DNA, 80 bp, synthetic construct
  source 1..80: mol_type = other DNA
taagagtaagcaagtaaacctctaccttcttcggtcccagaggaaaagataaacaaatgtaagcatttgtttcatgtccc

SEQ ID NO: 49230 - DNA, 80 bp, synthetic construct; identical to SEQ ID NO: 13065
  source 1..80: mol_type = other DNA

SEQ ID NO: 49231 - DNA, 80 bp, synthetic construct
  source 1..80: mol_type = other DNA
aaatatgttatttattagtcactggttcattcagccactcttcgtgcctactgggtaccagataaagttctcgtcctgga

SEQ ID NO: 49232 - DNA, 80 bp, synthetic construct
  source 1..80: mol_type = other DNA
gcccatgacacagccctcaggagaccctgagaacatgtgctcaaggtggttgaggcacaggttggttttacacatttaag

SEQ ID NO: 49233 - DNA, 80 bp, synthetic construct
  source 1..80: mol_type = other DNA
gaaaggaatgtctgggttatgataaaaggttgtggagtccaaaattctcatgcagatgatgcctccaggtgccaggcttc

SEQ ID NO: 49234 - DNA, 80 bp, synthetic construct; identical to SEQ ID NO: 13066
  source 1..80: mol_type = other DNA

SEQ ID NO: 49235 - DNA, 80 bp, synthetic construct
  source 1..80: mol_type = other DNA
gtcatctcacgccaagaagattaaggacactgacacacgaggagtgagttaggaccaaagggtttaataggcaaaagaaa

SEQ ID NO: 49236 - DNA, 80 bp, synthetic construct
  source 1..80: mol_type = other DNA
agggcccacaggttggttgtaccaggtgtgatatttacatagtgcgtgtggaaggctgttcaccccaccctcatcctatt

SEQ ID NO: 49237 - DNA, 80 bp, synthetic construct
  source 1..80: mol_type = other DNA
attcctattggacagctgctggcattcacccgtgcaaacttccagcttacttgtctatgtctgaagcttgatattacagg

SEQ ID NO: 49238 - DNA, 80 bp, synthetic construct
  source 1..80: mol_type = other DNA
gaatgaggtgacagagaggctaggactgtgcagaaagcattttagtaaagatggctgagtgacagtagtgatgtccaatt

SEQ ID NO: 49239 - DNA, 80 bp, synthetic construct; identical to SEQ ID NO: 13067
  source 1..80: mol_type = other DNA

SEQ ID NO: 49240 - DNA, 80 bp, synthetic construct
  source 1..80: mol_type = other DNA
tcacctctcataactgatgatatacagcctcccttttctttctgtgagaaaaatcctcttttaaacagggtttgaaaacc

SEQ ID NO: 49241 - DNA, 80 bp, synthetic construct
  source 1..80: mol_type = other DNA
tgtctcagagtattatgcacaagaccaaggaatcatttatatgacaagccctagaggcgaggctgatgctcagacatgtg

SEQ ID NO: 49242 - DNA, 80 bp, synthetic construct
  source 1..80: mol_type = other DNA
ccagcaacatgagctccagccttgtcataaatccagaatctcttgctcaactccagacttcctggatctcagcaccacat

SEQ ID NO: 49243 - DNA, 80 bp, synthetic construct
  source 1..80: mol_type = other DNA
ttggtgcttcatccatgcctgaggttttaagtctcatatatatggtgtgacctcctaaatctatttctccagcccagtcc

SEQ ID NO: 49244 - DNA, 80 bp, synthetic construct; identical to SEQ ID NO: 13068
  source 1..80: mol_type = other DNA

SEQ ID NO: 49245 - DNA, 80 bp, synthetic construct
  source 1..80: mol_type = other DNA
cacagccgtcagagagatccttttaaaacagaagtcatatcatggctctcttctgctcaaaactgtcctctaactcccca

SEQ ID NO: 49246 - DNA, 80 bp, synthetic construct
  source 1..80: mol_type = other DNA
gagcttcctctgcctggaaagaacttccccagacatcctcatgtctctcaaatctttcctcaaaagtcacctttgcaaca

SEQ ID NO: 49247 - DNA, 80 bp, synthetic construct
  source 1..80: mol_type = other DNA
aatgtatctatcgtctgcctcttcccactggaacatatgctacaaaaggccagagatttttcttttacttcagtggtgtt

SEQ ID NO: 49248 - DNA, 80 bp, synthetic construct
  source 1..80: mol_type = other DNA
acaaaggtcagttgaatgaatgatcactgtagagcacctccctattttgaaggcagtatctttattaacatagcctcagg

SEQ ID NO: 49249 - DNA, 80 bp, synthetic construct; identical to SEQ ID NO: 13069
  source 1..80: mol_type = other DNA

SEQ ID NO: 49250 - DNA, 80 bp, synthetic construct
  source 1..80: mol_type = other DNA
tgaatggctctgaaaatttgtctcagaatgcacagagacccccgtgtgcaggggccgccctgggcgatgtgtgagcctct

SEQ ID NO: 49251 - DNA, 80 bp, synthetic construct
  source 1..80: mol_type = other DNA
caccccacctgcaacagactcagcacagcgaacatgcagattctggaaggttctcaggtctttatttgctctctcaaatt

SEQ ID NO: 49252 - DNA, 80 bp, synthetic construct
  source 1..80: mol_type = other DNA
aaagttgagacagagatggagacatccagccccacctctctggaacaagaaagatgactggggaggaaacacaggtcagc

SEQ ID NO: 49253 - DNA, 80 bp, synthetic construct
  source 1..80: mol_type = other DNA
tccctcacaagacagctgtctcaggctacagaaaacaacagtcatgaacaaattctggttagtcatggtaagcgatgaca

SEQ ID NO: 49254 - DNA, 80 bp, synthetic construct; identical to SEQ ID NO: 13070
  source 1..80: mol_type = other DNA

SEQ ID NO: 49255 - DNA, 80 bp, synthetic construct
  source 1..80: mol_type = other DNA
catgagatcttagaggaacctcctagtcttggacccaaaaggaatttccagaagtatgactacagacccagggcaggatc

SEQ ID NO: 49256 - DNA, 80 bp, synthetic construct
  source 1..80: mol_type = other DNA
ctcatgaatgctggaatcaggaccccaacaccacaaccatcaaggtgatacatccatccttcattgtcacatgtgctgca

SEQ ID NO: 49257 - DNA, 80 bp, synthetic construct
  source 1..80: mol_type = other DNA
ctcttcctcctacacatcacagcagcgaccacagctccgatgaccacaactgctaggacagccaggccagcaacaatgcc

SEQ ID NO: 49258 - DNA, 80 bp, synthetic construct; identical to SEQ ID NO: 13071
  source 1..80: mol_type = other DNA

SEQ ID NO: 49259 - DNA, 80 bp, synthetic construct
  source 1..80: mol_type = other DNA
tctgatgggaagagtcagaaaattcaggcgctttgcatctttcatgggacaccctaggaccacccatgtgaccagcctga

SEQ ID NO: 49260 - DNA, 80 bp, synthetic construct
  source 1..80: mol_type = other DNA
agtgctggaatcagagccccaaacacactgagtgtgaggcagagaacaaggcctgagaggaaaagtcacggttcccaagg

SEQ ID NO: 49261 - DNA, 80 bp, synthetic construct
  source 1..80: mol_type = other DNA
attctagcgctgatcccattttcctcctcttctcgtgggaggccatccccggcgacctataggagatggggaaggctccc

SEQ ID NO: 49262 - DNA, 80 bp, synthetic construct; identical to SEQ ID NO: 13072
  source 1..80: mol_type = other DNA

SEQ ID NO: 49263 - DNA, 80 bp, synthetic construct
  source 1..80: mol_type = other DNA
gctctcgccggtcgagggtctgggcgggtcccgcggcctcagggaggcggatctcggacccggagactcggggcgacccg

SEQ ID NO: 49264 - DNA, 80 bp, synthetic construct
  source 1..80: mol_type = other DNA
ccctcctgctctatccacggcgcccgcggctcctctctcggactcgcggcgtcgctgtcgaacctcacgaactgggtgtc

SEQ ID NO: 49265 - DNA, 80 bp, synthetic construct
  source 1..80: mol_type = other DNA
gcggtcccctcgctcctcccggcagaggccatttccctcccgacccgcactcaccggcccaggtctcggtcagggccagg

SEQ ID NO: 49266 - DNA, 80 bp, synthetic construct; identical to SEQ ID NO: 13073
  source 1..80: mol_type = other DNA

SEQ ID NO: 49267 - DNA, 80 bp, synthetic construct
  source 1..80: mol_type = other DNA
aaaccagggagagacccccaggctgcgcccagccccttccccttcacttctcgtcctggaatccctgtccctgaactgga

SEQ ID NO: 49268 - DNA, 80 bp, synthetic construct
  source 1..80: mol_type = other DNA
tagggattctcatagagaccagtttcctttttgtttgttaatacagtaggtagcacaatattggtaatccctgaatgatt

SEQ ID NO: 49269 - DNA, 80 bp, synthetic construct
  source 1..80: mol_type = other DNA
acatctcctgaatataaagaagcagggtttgttactgtctattgcaaccgggagcctgtagtcatcacctcaaagttgcg

SEQ ID NO: 49270 - DNA, 80 bp, synthetic construct; identical to SEQ ID NO: 13074
  source 1..80: mol_type = other DNA

SEQ ID NO: 49271 - DNA, 80 bp, synthetic construct
  source 1..80: mol_type = other DNA
gtcctgctaatgtgactcaggtcatgtcatttcttcacttgcaatggttgggttttggtctaccattttgctatacgttt

SEQ ID NO: 49272 - DNA, 80 bp, synthetic construct
  source 1..80: mol_type = other DNA
cagtgaagttcaggttatattaagctgcatccagcaaaataaaggacacttctaacagtgtagtttcttgtaacctacca

SEQ ID NO: 49273 - DNA, 80 bp, synthetic construct
  source 1..80: mol_type = other DNA
gttcctttctgtatatctgggtcaccatctagtatcattttccttcaccctgaagcacttcctttaaaattaaatgtagt

SEQ ID NO: 49274 - DNA, 80 bp, synthetic construct; identical to SEQ ID NO: 13075
  source 1..80: mol_type = other DNA

SEQ ID NO: 49275 - DNA, 80 bp, synthetic construct
  source 1..80: mol_type = other DNA
agttgtggcgctgtagagaaccgtttcttttccctaaaaactttctttctgcccctttctatttaatccttgcctcccac

SEQ ID NO: 49276 - DNA, 80 bp, synthetic construct
  source 1..80: mol_type = other DNA
gttgctgagcagctgctgagtattgctggaatcccagcttattcattggtttctctgcctccagttgatagacatgtgga

SEQ ID NO: 49277 - DNA, 80 bp, synthetic construct
  source 1..80: mol_type = other DNA
acaaattggctgccacattttttgcattcctaccagcaatatcagacattcctattttttccatattcttgacagtattt

SEQ ID NO: 49278 - DNA, 80 bp, synthetic construct; identical to SEQ ID NO: 13076
  source 1..80: mol_type = other DNA

SEQ ID NO: 49279 - DNA, 80 bp, synthetic construct
  source 1..80: mol_type = other DNA
atgcctggtccttctattggtttcttatttcattttcttgccatgttgcactgatttggatgcctcttaggtgtttaaac

SEQ ID NO: 49280 - DNA, 80 bp, synthetic construct
  source 1..80: mol_type = other DNA
gcaaatcaaaaccacaatgatgtactatctcctgcgagccagaatggcgattattaaaaagtgaggaaacaatagatgct

SEQ ID NO: 49281 - DNA, 80 bp, synthetic construct
  source 1..80: mol_type = other DNA
acccagcaatccctttactgggtatatacccaaaggaatatcaatcattctactataaagacacatgcacaggtatgttt

SEQ ID NO: 49282 - DNA, 80 bp, synthetic construct
  source 1..80: mol_type = other DNA
aatgagttcatgtcctttgcagggacatggatgaagctggaagtcatcgtcagcaaactaacatgggaacagaaaaccta

SEQ ID NO: 49283 - DNA, 80 bp, synthetic construct; identical to SEQ ID NO: 13077
  source 1..80: mol_type = other DNA

SEQ ID NO: 49284 - DNA, 80 bp, synthetic construct
  source 1..80: mol_type = other DNA
ccatagaatactatacagccataaaaaagaatgagattacgtcctttgcaggaacatggatggagctggaggccattatt

SEQ ID NO: 49285 - DNA, 80 bp, synthetic construct
  source 1..80: mol_type = other DNA
agctaatgggaactaagacttaatacttgggtgggtactaatgggcatagaaataatttgtgaaacaaaaccccatgaca

SEQ ID NO: 49286 - DNA, 80 bp, synthetic construct
  source 1..80: mol_type = other DNA
ttttaaaccaagtcacacaatctctgcccttcattggagtgttgattcatataggtttttgtcattattgatatgataag

SEQ ID NO: 49287 - DNA, 80 bp, synthetic construct; identical to SEQ ID NO: 13078
  source 1..80: mol_type = other DNA

SEQ ID NO: 49288 - DNA, 80 bp, synthetic construct
  source 1..80: mol_type = other DNA
aactgtttaaagataagaaaaagttttttatcgtgggacttacaacctatatagatatattacatataatatctatacca

SEQ ID NO: 49289 - DNA, 80 bp, synthetic construct
  source 1..80: mol_type = other DNA
cggagatggttttttgaaaacaaatcctagccagtcttgagtatcatcatcctacgatttcagaactatcgtgaatataa

SEQ ID NO: 49290 - DNA, 80 bp, synthetic construct
  source 1..80: mol_type = other DNA
gacaaggggcgtctgctgctgtgtccacacttggagaaggaaatcttgaaggtgtcagtacattacaagctgggcatgac

SEQ ID NO: 49291 - DNA, 80 bp, synthetic construct; identical to SEQ ID NO: 13079
  source 1..80: mol_type = other DNA

SEQ ID NO: 49292 - DNA, 80 bp, synthetic construct
  source 1..80: mol_type = other DNA
aaactagaaatcacatccactttccagtgttaaaaagcccagtccaggcaggtgagaaggagacagtcctcattagcact

SEQ ID NO: 49293 - DNA, 80 bp, synthetic construct
  source 1..80: mol_type = other DNA
caaaagtcttacaatgaaaacaacagtcctgccagttgttctctcgagaggcaaacacttttcattctcttagtttttcc

SEQ ID NO: 49294 - DNA, 80 bp, synthetic construct
  source 1..80: mol_type = other DNA
tttaactcttttagcaatgtcttctatttttttctcacataactacttagtcatttcttgattattttatacattctata

SEQ ID NO: 49295 - DNA, 80 bp, synthetic construct; identical to SEQ ID NO: 13080
  source 1..80: mol_type = other DNA

SEQ ID NO: 49296 - DNA, 80 bp, synthetic construct
  source 1..80: mol_type = other DNA
gtagctggaactacaggcatgggccattccacccagctaacctattaatatttttactgtttctttttaaagccagctcc

SEQ ID NO: 49297 - DNA, 80 bp, synthetic construct
  source 1..80: mol_type = other DNA
ttttaccttcacccttgattatttggctgaatatagatttattcgttgaaaataactttctttctggaattctgaaggca

SEQ ID NO: 49298 - DNA, 80 bp, synthetic construct
  source 1..80: mol_type = other DNA
cacaatgcccagctaacttttgtattttttgtagagatggggcttcaccatgttgcccaagctgatctcaaggtatctgc

SEQ ID NO: 49299 - DNA, 80 bp, synthetic construct; identical to SEQ ID NO: 13081
  source 1..80: mol_type = other DNA

SEQ ID NO: 49300 - DNA, 80 bp, synthetic construct
  source 1..80: mol_type = other DNA
cggatcactttaggtcaggagtttgagaccagcctgaccaacattgtgaaaccccgtcttcaccaaaaacacaaaattag

SEQ ID NO: 49301 - DNA, 80 bp, synthetic construct
  source 1..80: mol_type = other DNA
tatgaagagcttatatacttaaacatgaaattgctttaagtgtttgccattcactgttcacatgcatgccagcagcttct

SEQ ID NO: 49302 - DNA, 80 bp, synthetic construct
  source 1..80: mol_type = other DNA
ctgctcactggctttaaactggttttcttaccttctcagttccatttctccgtacctcaattgatgatttctggtaagac

SEQ ID NO: 49303 - DNA, 80 bp, synthetic construct; identical to SEQ ID NO: 13082
  source 1..80: mol_type = other DNA

SEQ ID NO: 49304 - DNA, 80 bp, synthetic construct
  source 1..80: mol_type = other DNA
ctgatatagtcaagattagtggggagtaaaaacatgttgcttagaaataattatccaaagatctaaagtcaacaaaagtc

SEQ ID NO: 49305 - DNA, 80 bp, synthetic construct
  source 1..80: mol_type = other DNA
tttctccaaatcaatttctggaaaaaacgtgtcactttcaaagtcctgcatgatctttgtcacaaatagtttaagatggc

SEQ ID NO: 49306 - DNA, 80 bp, synthetic construct
  source 1..80: mol_type = other DNA
gagaactaaattaattctatcctttgaaggtcgattcttcccaggaatggagaaccaggtcttcctacacaaaatcacca

SEQ ID NO: 49307 - DNA, 80 bp, synthetic construct; identical to SEQ ID NO: 13083
  source 1..80: mol_type = other DNA

SEQ ID NO: 49308 - DNA, 80 bp, synthetic construct
  source 1..80: mol_type = other DNA
tcactggacaccagcctgcgtcaatcttcctgtaaagcaaaagaagcgtgaggttggtgggggaggaatggtgttatctc

SEQ ID NO: 49309 - DNA, 80 bp, synthetic construct
  source 1..80: mol_type = other DNA
cttcagctgtgtcctatcaggttcttccaggagtccaggagtagacctgcatattgcctctggtgatgtgagctgcatgc

SEQ ID NO: 49310 - DNA, 80 bp, synthetic construct
  source 1..80: mol_type = other DNA
ccaaaaggaaaaaaagaaggtctaaaatttgtgtcctttaataaaaagtaaacacccattaaccaccaaggatagacgtt

SEQ ID NO: 49311 - DNA, 80 bp, synthetic construct; identical to SEQ ID NO: 13084
  source 1..80: mol_type = other DNA

SEQ ID NO: 49312 - DNA, 80 bp, synthetic construct
  source 1..80: mol_type = other DNA
tgtttgatggtgctgtattgtgttcttccatcaagaggaagaacctcacattagttttttttattgtgttgttaatcgcc

SEQ ID NO: 49313 - DNA, 80 bp, synthetic construct
  source 1..80: mol_type = other DNA
ctcctgtactgtttgtttactactagaaacttgctttttgagagactaagccaagcatctactcacctatgacccagcaa

SEQ ID NO: 49314 - DNA, 80 bp, synthetic construct
  source 1..80: mol_type = other DNA
caaagggacaagaaatgtgagctatttataaagtggagcattggacagccatgggagtgaataggctatgaccacacaca

SEQ ID NO: 49315 - DNA, 80 bp, synthetic construct
  source 1..80: mol_type = other DNA
attggtgtactttgatgtgggtgttgtttacctgagtgttcactatgtgaaactccactgcccacttgtggattgtcctt

SEQ ID NO: 49316 - DNA, 80 bp, synthetic construct; identical to SEQ ID NO: 13085
  source 1..80: mol_type = other DNA

SEQ ID NO: 49317 - DNA, 80 bp, synthetic construct
  source 1..80: mol_type = other DNA
tacgcatagacctcttgctataggccgagtgtgtgacgatagtggttgtgtgtggatgcctaccagagggtctttaaggg

SEQ ID NO: 49318 - DNA, 80 bp, synthetic construct
  source 1..80: mol_type = other DNA
tggcagctgccactgctgagggcccagcccaccaaaagcagctgtttttttgacggagaaataaaacaggcagtggtaat

SEQ ID NO: 49319 - DNA, 80 bp, synthetic construct
  source 1..80: mol_type = other DNA
ccagactgttttacacataagttctaccaaaactttgaagaaggttactgaacttatacgtaatattcaagagaatgagg

SEQ ID NO: 49320 - DNA, 80 bp, synthetic construct; identical to SEQ ID NO: 13086
  source 1..80: mol_type = other DNA

SEQ ID NO: 49321 - DNA, 80 bp, synthetic construct
  source 1..80: mol_type = other DNA
attcaacactccatctcacccacatttcttcagttatctccacttctaagaacttgtgatcagtactcgctttggcagca

SEQ ID NO: 49322 - DNA, 80 bp, synthetic construct
  source 1..80: mol_type = other DNA
accaatatcatactgaatgggcaaaagctggaagcatccccctttaacaccagcacaaggcgaggatgccttctctcact

SEQ ID NO: 49323 - DNA, 80 bp, synthetic construct
  source 1..80: mol_type = other DNA
agctgaaaggcaacttcagttaagtctcagggtacaaaatcagtgtgcagaagccataagcattcctatacaccaacaat

SEQ ID NO: 49324 - DNA, 80 bp, synthetic construct
  source 1..80: mol_type = other DNA
aacactccatgctcagggatagaaagaatcaatattgtgaaaacggtcatactgcccgaagtaatttatagattcagtgc

SEQ ID NO: 49325 - DNA, 80 bp, synthetic construct; identical to SEQ ID NO: 13087
  source 1..80: mol_type = other DNA

SEQ ID NO: 49326 - DNA, 80 bp, synthetic construct
  source 1..80: mol_type = other DNA
gaacatgaaaaagttttccccagttttaagataatttgccatgctattcaagtcagcctaaaattttaaaaagctactac

SEQ ID NO: 49327 - DNA, 80 bp, synthetic construct
  source 1..80: mol_type = other DNA
atgtgactatggagagcattgtttcaaaatgttttaacaaatatatcattgaagttcttgctattttattcaatttcagc

SEQ ID NO: 49328 - DNA, 80 bp, synthetic construct
  source 1..80: mol_type = other DNA
tagccaagacaatcctaagcaaaaagaacaaagctggaggcatcatgctacttgacttcaaactatactacaaggctaca

SEQ ID NO: 49329 - DNA, 80 bp, synthetic construct; identical to SEQ ID NO: 13088
  source 1..80: mol_type = other DNA

SEQ ID NO: 49330 - DNA, 80 bp, synthetic construct
  source 1..80: mol_type = other DNA
ctaaatagcagaaatcaataaataattgtgaaaaggaagcaaatggaaatctggagctgaaatgtacgggaagcaaaatg

SEQ ID NO: 49331 - DNA, 80 bp, synthetic construct
  source 1..80: mol_type = other DNA
aaaatgaacagaagaggtctaagagacaacatcaagtatatgcattttgggagttcccaaaagagagaaggaagaagggg

SEQ ID NO: 49332 - DNA, 80 bp, synthetic construct
  source 1..80: mol_type = other DNA
acagagcatcttgaaaacaacaagagaagggactcattgggtacaaggatcctccatgagattaactgccaagtgttctt

SEQ ID NO: 49333 - DNA, 80 bp, synthetic construct; identical to SEQ ID NO: 13089
  source 1..80: mol_type = other DNA

SEQ ID NO: 49334 - DNA, 80 bp, synthetic construct
  source 1..80: mol_type = other DNA
taatctattctgcaatggaatattatttgaccacaaaaggaataatgtactgatacatgctacaacttggatgaaccttg

SEQ ID NO: 49335 - DNA, 80 bp, synthetic construct
  source 1..80: mol_type = other DNA
tacagagtttccttctagggtggtgaaaatgctctggaacttgatagtgatgatggctgcataatgttgtgcacctacta

SEQ ID NO: 49336 - DNA, 80 bp, synthetic construct
  source 1..80: mol_type = other DNA
ctggcaaatatattccaagtttgcttgggaatctgcccatctgtcttttcccctcaggatttcatctcttattcagagct

SEQ ID NO: 49337 - DNA, 80 bp, synthetic construct; identical to SEQ ID NO: 13090
  source 1..80: mol_type = other DNA

SEQ ID NO: 49338 - DNA, 80 bp, synthetic construct
  source 1..80: mol_type = other DNA
tactttcactaattttctactgctatctagaaggcagagccaggtgtgcaggatggaacatgaaggcagactaggagcgt

SEQ ID NO: 49339 - DNA, 80 bp, synthetic construct
  source 1..80: mol_type = other DNA
accgctagaccacggttcgcctggcaacaggcgtcttcccagacgctggcatcaccgctagaccaaggagccctctggtg

SEQ ID NO: 49340 - DNA, 80 bp, synthetic construct
  source 1..80: mol_type = other DNA
aatgattaatgatattcatatataatcatatctaagctctatatctggtacaactattcttgttttatattttattatac

SEQ ID NO: 49341 - DNA, 80 bp, synthetic construct; identical to SEQ ID NO: 13091
  source 1..80: mol_type = other DNA

SEQ ID NO: 49342 - DNA, 80 bp, synthetic construct
  source 1..80: mol_type = other DNA
actgtacccttcacccatccttcagttgtattccactggacgtggaccctctacaagtgtggacattcctggatctcagt

SEQ ID NO: 49343 - DNA, 80 bp, synthetic construct
  source 1..80: mol_type = other DNA
aagtacacaggggctcagattttcatctatgaaatggaagaatccatctccctctttcaggtgtagtggtaattatatat

SEQ ID NO: 49344 - DNA, 80 bp, synthetic construct
  source 1..80: mol_type = other DNA
tggtggagcactcggtaggcatttctgccctttgggttcaaatgagaaagtagctttagcctgagggagaaagaagatta

SEQ ID NO: 49345 - DNA, 80 bp, synthetic construct; identical to SEQ ID NO: 13092
  source 1..80: mol_type = other DNA

SEQ ID NO: 49346 - DNA, 80 bp, synthetic construct
  source 1..80: mol_type = other DNA
agactgcagtgcaaatggtggtccctggagctgtcttgtgcagtggtgctgattttcattttgttattttctatatatgt

SEQ ID NO: 49347 - DNA, 80 bp, synthetic construct
  source 1..80: mol_type = other DNA
tttatacactttttcaagccatatcccatttcagataagaagatgtaacccaacttctttttttggatccgtctgccttc

SEQ ID NO: 49348 - DNA, 80 bp, synthetic construct
  source 1..80: mol_type = other DNA
tctctaaatcgtcatactgacatattccacctcacctttcaggacatgctaggactcaaggctatttacgcatctggaat

SEQ ID NO: 49349 - DNA, 80 bp, synthetic construct; identical to SEQ ID NO: 13093
  source 1..80: mol_type = other DNA

SEQ ID NO: 49350 - DNA, 80 bp, synthetic construct
  source 1..80: mol_type = other DNA
gatttatgtgactcatgagctggaagtttgcagccctgagttcatctttttctttccgcattttgtccagcacaattggc

SEQ ID NO: 49351 - DNA, 80 bp, synthetic construct
  source 1..80: mol_type = other DNA
cctttaaatccaaatagattagagaaacaattcaagaaaccccccccccccccgcaccaaattcagtacattcattctta

SEQ ID NO: 49352 - DNA, 80 bp, synthetic construct
  source 1..80: mol_type = other DNA
ttgcacacactgagtcgggctccagtggcccctaggcttctaaggggcactctcctcctgctagtgccaagctaagctgt

SEQ ID NO: 49353 - DNA, 80 bp, synthetic construct; identical to SEQ ID NO: 13094
  source 1..80: mol_type = other DNA

SEQ ID NO: 49354 - DNA, 80 bp, synthetic construct
  source 1..80: mol_type = other DNA
ggtcttgaaaccatcaggagcagttgttctttggcctccgggacaccgcagggctgagttgctccctgcctggaggtggt

SEQ ID NO: 49355 - DNA, 80 bp, synthetic construct
  source 1..80: mol_type = other DNA
tgtgcacatgacagatgctccatcctcaggagatgacaaagacgggaggacaaggtgaagacacaggtgcatcatctcct

SEQ ID NO: 49356 - DNA, 80 bp, synthetic construct
  source 1..80: mol_type = other DNA
cagcttcttcccacctccagtcatctcactgtatctgacatgatgccagcagattgtctcagctcaaattccagctccat

SEQ ID NO: 49357 - DNA, 80 bp, synthetic construct; identical to SEQ ID NO: 13095
  source 1..80: mol_type = other DNA

SEQ ID NO: 49358 - DNA, 80 bp, synthetic construct
  source 1..80: mol_type = other DNA
ctcccaggctcaaagtcttccctcaactccagaaatgcaaacccaacactgacctcacggagttctgaaggttaaggagg

SEQ ID NO: 49359 - DNA, 80 bp, synthetic construct
  source 1..80: mol_type = other DNA
cagcacgtctccaggttcctctcagccccggttacccccagccctgcagttaatccctgagctgggaaggagcccttgaa

SEQ ID NO: 49360 - DNA, 80 bp, synthetic construct
  source 1..80: mol_type = other DNA
cgggtgatgacagtgccacaaagaacaaatgttactgtctatcctcatcaaccataattttccagttttccaaccctcag

SEQ ID NO: 49361 - DNA, 80 bp, synthetic construct; identical to SEQ ID NO: 13096
  source 1..80: mol_type = other DNA

SEQ ID NO: 49362 - DNA, 80 bp, synthetic construct
  source 1..80: mol_type = other DNA
agggccagggtcccagctccccacaccccagccaccacaccttcttctgcttttttttttcccattattgtttctttctt

SEQ ID NO: 49363 - DNA, 80 bp, synthetic construct
  source 1..80: mol_type = other DNA
ttcacattgaaaagctcgggtatttctattagaatcacatgttttacttgaggttgctgacgcctgtgtccatctcaacc

SEQ ID NO: 49364 - DNA, 80 bp, synthetic construct
  source 1..80: mol_type = other DNA
caggggaggacccagacctgctctcctcccacagcacattcttgagtcttggaaagagttgtgaaaatgccacaggtaca

SEQ ID NO: 49365 - DNA, 80 bp, synthetic construct
  source 1..80: mol_type = other DNA
acgccagcaggggcaaagttatccctagcaacaagacagaggaagaaaggaaaacggaagaaaggacaatgtcacagtag

SEQ ID NO: 49366 - DNA, 80 bp, synthetic construct; identical to SEQ ID NO: 13097
  source 1..80: mol_type = other DNA

SEQ ID NO: 49367 - DNA, 80 bp, synthetic construct
  source 1..80: mol_type = other DNA
cttgtaggggatgaatccagaaaaagcctctgttacaaatcaaaatggacatgccggaagtattagctcaaatcaacctt

SEQ ID NO: 49368 - DNA, 80 bp, synthetic construct
  source 1..80: mol_type = other DNA
cagccaggtgtataaacacacatcattgactgatagtttcagttctatgcccaagaaaatcatcgatggagtgaagtaat

SEQ ID NO: 49369 - DNA, 80 bp, synthetic construct
  source 1..80: mol_type = other DNA
agagcaatgccttaaatcttcagtgttcatttgtagaacattcactcacagctacaaaagtgacttaattttcttctgga

SEQ ID NO: 49370 - DNA, 80 bp, synthetic construct; identical to SEQ ID NO: 13098
  source 1..80: mol_type = other DNA

SEQ ID NO: 49371 - DNA, 80 bp, synthetic construct
  source 1..80: mol_type = other DNA
cagtccagattcttcagagaagcagaaccaataaggtgtgtgtgtgtgtgtgtgtgtgtgtgtgtgtatttgtattcata

SEQ ID NO: 49372 - DNA, 80 bp, synthetic construct
  source 1..80: mol_type = other DNA
ggatgaggcccatccacattattgatggtaattttctttttgtaaagtcagctaattcagcatggggaagggggtcatgg

SEQ ID NO: 49373 - DNA, 80 bp, synthetic construct
  source 1..80: mol_type = other DNA
cctcaggctacagaaaacaatagtcatgaacaaattcaggtcagtggccataaagcgtaacactctgaactccccactac

SEQ ID NO: 49374 - DNA, 80 bp, synthetic construct; identical to SEQ ID NO: 13099
  source 1..80: mol_type = other DNA

SEQ ID NO: 49375 - DNA, 80 bp, synthetic construct
  source 1..80: mol_type = other DNA
gaaagcaggtgtgaggactgaaccaactgcacggtatgtaaagacatacttggtacatagtagatacaaagttagctttg

SEQ ID NO: 49376 - DNA, 80 bp, synthetic construct
  source 1..80: mol_type = other DNA
tatctgttggtctatgtatgaattttctgttactgcataacatattaccactaactcactggctctacacagcacccatt

SEQ ID NO: 49377 - DNA, 80 bp, synthetic construct
  source 1..80: mol_type = other DNA
tcatcttgaggctggggtcctccttccagcttatacagagcttggtggcagaattcagtttcaggcagttgtgggattgt

SEQ ID NO: 49378 - DNA, 80 bp, synthetic construct
  source 1..80: mol_type = other DNA
ccctcacgttgaatttcgctcacactgtgaatctctttgctgaagaagaaataagttgttttaagagctcacctgattag

SEQ ID NO: 49379 - DNA, 80 bp, synthetic construct; identical to SEQ ID NO: 13100
  source 1..80: mol_type = other DNA

SEQ ID NO: 49380 - DNA, 80 bp, synthetic construct
  source 1..80: mol_type = other DNA
taacatgaagtttgacaacccaaaacaacaaatacttatcatctcccacagtttccagtggtcaggaatctgggagagat

SEQ ID NO: 49381 - DNA, 80 bp, synthetic construct
  source 1..80: mol_type = other DNA
gcatcctagaccacaggcaatctgaggagagttgagcaaggccatggaggagtcctccagccacagatggccaacagagg

SEQ ID NO: 49382 - DNA, 80 bp, synthetic construct
  source 1..80: mol_type = other DNA
atcttcctcctgaggggtctgggcctttggaaatcaaacgctgtcagactgggttgctggacgattctgttcacatttac

SEQ ID NO: 49383 - DNA, 80 bp, synthetic construct; identical to SEQ ID NO: 13101
  source 1..80: mol_type = other DNA

SEQ ID NO: 49384 - DNA, 80 bp, synthetic construct
  source 1..80: mol_type = other DNA
cgtagtgatgtctctgattcaataaatgcaccgtgccctgaaagatggcacccattcctcagtgtttcctccaagctggt

SEQ ID NO: 49385 - DNA, 80 bp, synthetic construct
  source 1..80: mol_type = other DNA
gagagtaattccaaacctgtggatcaggaatgtcagtggtgctggctgagagtctgagaatagtgggggaaaaagcctac

SEQ ID NO: 49386 - DNA, 80 bp, synthetic construct
  source 1..80: mol_type = other DNA
gttggatattcagaggtggcagcagctagttcggccttggtaggtgggagtctcaccttttggaggctacctatgggtcc

SEQ ID NO: 49387 - DNA, 80 bp, synthetic construct; identical to SEQ ID NO: 13102
  source 1..80: mol_type = other DNA

SEQ ID NO: 49388 - DNA, 80 bp, synthetic construct
  source 1..80: mol_type = other DNA
atctgatcagggccagcaacactaaaagttgcttcgagaagggggcatatatttctgctgtggatgacatgaacttactc

SEQ ID NO: 49389 - DNA, 80 bp, synthetic construct
  source 1..80: mol_type = other DNA
gctccacttgaatctggcatcctcctatgtcacccaaaatgtggccaaaatgatatacctagatgtggaatgtggtgttg

SEQ ID NO: 49390 - DNA, 80 bp, synthetic construct
  source 1..80: mol_type = other DNA
aatatctctgcatgcacctagccactggacccataaaatttcactgcagttgccactcctaaatttctgtaagatttatc

SEQ ID NO: 49391 - DNA, 80 bp, synthetic construct
  source 1..80: mol_type = other DNA
tgtccggcatctcttaagactatgttacagatgacagaagagttataatagctctcagggaaagtgtaaataaatgtggt

SEQ ID NO: 49392 - DNA, 80 bp, synthetic construct; identical to SEQ ID NO: 13103
  source 1..80: mol_type = other DNA

SEQ ID NO: 49393 - DNA, 80 bp, synthetic construct
  source 1..80: mol_type = other DNA
cgtaatatcgcttcggttgggataggggcagtttcagaggtttccctttagccttcagcgcaataagagccattaatcca

SEQ ID NO: 49394 - DNA, 80 bp, synthetic construct
  source 1..80: mol_type = other DNA
tgtaggaatctgggcatcaatgttagttcacacacaaagtcaatactcacccaaattctgcctatttccctttcccggtg

SEQ ID NO: 49395 - DNA, 80 bp, synthetic construct
  source 1..80: mol_type = other DNA
gcattgagaacagattatgactttgtcttggatcaaacaccctcagcctcctgctcctcaattcttgctttcttttcata

SEQ ID NO: 49396 - DNA, 80 bp, synthetic construct; identical to SEQ ID NO: 13104
  source 1..80: mol_type = other DNA

SEQ ID NO: 49397 - DNA, 80 bp, synthetic construct
  source 1..80: mol_type = other DNA
tgtactgagtaaagcaaggactgccagtggggagtggcggatgtcttgaatttggtgaatgcctttatattgttacaaag

SEQ ID NO: 49398 - DNA, 80 bp, synthetic construct
  source 1..80: mol_type = other DNA
tagaaacagttactttgttttcagttctggatagtattcatgggaggaatatcccacaatttatctcttctgtccgtgac

SEQ ID NO: 49399 - DNA, 80 bp, synthetic construct
  source 1..80: mol_type = other DNA
gtatcagctccccgctttaaaatcttctttgacattttacaggtcaagttctcttcctccccaactggctgctcctcctc

SEQ ID NO: 49400 - DNA, 80 bp, synthetic construct; identical to SEQ ID NO: 13105
  source 1..80: mol_type = other DNA

SEQ ID NO: 49401 - DNA, 80 bp, synthetic construct
  source 1..80: mol_type = other DNA
taaaagaaaaaataatccaaatgtctgtcactaggggactggttaaaaaagcattgcaagctgggcacagtagcattcac

SEQ ID NO: 49402 - DNA, 80 bp, synthetic construct
  source 1..80: mol_type = other DNA
agcaaggtgtagaataacatatagagtctgctaaaatttgtgtgaaaagggacaaaggatatatatgtacacatttatat

SEQ ID NO: 49403 - DNA, 80 bp, synthetic construct
  source 1..80: mol_type = other DNA
aaggagaccaaacaaacccccaaaaaattcaaaatgaaaaactttttaaaaactaatggaattttttaacctttatcgaa

SEQ ID NO: 49404 - DNA, 80 bp, synthetic construct; identical to SEQ ID NO: 13106
  source 1..80: mol_type = other DNA

SEQ ID NO: 49405 - DNA, 80 bp, synthetic construct
  source 1..80: mol_type = other DNA
tcctattaatggcccatctgagtacttgtcatacgcggtcaccctatctttggatcagaaggtacactcagagctcctag

SEQ ID NO: 49406 - DNA, 80 bp, synthetic construct
  source 1..80: mol_type = other DNA
atttggtcccttcctgggtgtcttccattcccaggactcccaggaaataaaatgctgcaagaatggggtggggagctgtc

SEQ ID NO: 49407 - DNA, 80 bp, synthetic construct
  source 1..80: mol_type = other DNA
atatgcaatcttcagggcctggcctggacctactgtatcagaaactctgcatttaacaagcccccagcagaattctgctt

SEQ ID NO: 49408 - DNA, 80 bp, synthetic construct; identical to SEQ ID NO: 13107
  source 1..80: mol_type = other DNA

SEQ ID NO: 49409 - DNA, 80 bp, synthetic construct
  source 1..80: mol_type = other DNA
tcagagctgaagatctacatatatgtctaccaagcaagtgtgcatgtcccactagccagtttgttagtcttgccaatgca

SEQ ID NO: 49410 - DNA, 80 bp, synthetic construct
  source 1..80: mol_type = other DNA
agcaaaagaagaaagctctcccccacggagagggggcttggaagatggttgccatttttacagctgaatgcaaagccttt

SEQ ID NO: 49411 - DNA, 80 bp, synthetic construct
  source 1..80: mol_type = other DNA
tttccctgactgcccacgtatcgggggacagaattttccattgcgggcatgtctgggcaagtctcctgtgcagcctttct

SEQ ID NO: 49412 - DNA, 80 bp, synthetic construct
  source 1..80: mol_type = other DNA
ctgaccagtttcttcctttttcctctctcaatttgtgttatgatttccttactgatctctgcctgagcaagactgggcac

SEQ ID NO: 49413 - DNA, 80 bp, synthetic construct; identical to SEQ ID NO: 13108
  source 1..80: mol_type = other DNA

SEQ ID NO: 49414 - DNA, 80 bp, synthetic construct
  source 1..80: mol_type = other DNA
tggagttagaggcttatcccttaggagtggcaatggctggctttaagattcgagaagtagtgtttacatctcaaaagaga

SEQ ID NO: 49415 - DNA, 80 bp, synthetic construct
  source 1..80: mol_type = other DNA
ccctggatgtggatggtccccgagtgtgaactcgcctgggctctgaccctgggtgcccttcccgccgttgtggagcctct

SEQ ID NO: 49416 - DNA, 80 bp, synthetic construct
  source 1..80: mol_type = other DNA
aactatgaaaatgagagaatctatcccactctctcaggtgtggtgagattcatattatatgacaatcggtcgtctacaca

SEQ ID NO: 49417 - DNA, 80 bp, synthetic construct; identical to SEQ ID NO: 13109
  source 1..80: mol_type = other DNA

SEQ ID NO: 49418 - DNA, 80 bp, synthetic construct
  source 1..80: mol_type = other DNA
ttacagacacccaccaccacatccagctaattttttgtatttttagtagagacagggtttcgctatgttggccaggctgg

SEQ ID NO: 49419 - DNA, 80 bp, synthetic construct
  source 1..80: mol_type = other DNA
aatctcaagtacagaaaatataaaaaggtataaagaagcagaaggatggaaactgccagtgtctccactgggaggatcgg

SEQ ID NO: 49420 - DNA, 80 bp, synthetic construct; identical to SEQ ID NO: 13110
  source 1..80: mol_type = other DNA

SEQ ID NO: 49421 - DNA, 80 bp, synthetic construct
  source 1..80: mol_type = other DNA
ggagtgcagtggcgagatctcagctcactgcaacctccacctcctgggttcaagagattctccttcctcaacctcctaag

SEQ ID NO: 49422 - DNA, 80 bp, synthetic construct
  source 1..80: mol_type = other DNA
atgcccggccgcatgaatatttttaagccttctcatacatattatcaaattacttctcaaaagcagtgtaccggctgggc

SEQ ID NO: 49423 - DNA, 80 bp, synthetic construct
  source 1..80: mol_type = other DNA
aaaattagccaagcgtggtggcggacgcctgtaatcccagctactctggaggctgaggcaggagaatggtgtgaacccag

SEQ ID NO: 49424 - DNA, 80 bp, synthetic construct
  source 1..80: mol_type = other DNA
cccatttactcaacccatatttattgagccccttctctgtccttggatttctagatgctggaaatccaagtggtgactag

SEQ ID NO: 49425 - DNA, 80 bp, synthetic construct; identical to SEQ ID NO: 13111
  source 1..80: mol_type = other DNA

SEQ ID NO: 49426 - DNA, 80 bp, synthetic construct
  source 1..80: mol_type = other DNA
gggatgaggggctgtaaaacatagtgagagactggggtttcactgtgctaagaagggaagaggctggcatgtctgtggga

SEQ ID NO: 49427 - DNA, 80 bp, synthetic construct
  source 1..80: mol_type = other DNA
agtgagaagtgattggatttggggttaatacatttttaagatggtgttagcaataactccttggagaaccacacatttat

SEQ ID NO: 49428 - DNA, 80 bp, synthetic construct
  source 1..80: mol_type = other DNA
catctgaaacatttgctgaaatggagttgaccctttacctagccatagatttgttgcctcacgatttcattgcatctgag

SEQ ID NO: 49429 - DNA, 80 bp, synthetic construct; identical to SEQ ID NO: 13112
  source 1..80: mol_type = other DNA

SEQ ID NO: 49430 - DNA, 80 bp, synthetic construct
  source 1..80: mol_type = other DNA
aggcaactttggtgatctcacctgagctaggaattcggttttttgatgtgggttctctttgagccattgtgtgagcttta

SEQ ID NO: 49431 - DNA, 80 bp, synthetic construct
  source 1..80: mol_type = other DNA
cttcgctttgtgtaggaaggatcaggagacctggagtcagggcttcctccaatctcactctcctccataaaacagtgtct

SEQ ID NO: 49432 - DNA, 80 bp, synthetic construct
  source 1..80: mol_type = other DNA
tggggatgtttcctaggcgccaggtttagcactttgactttgtatgtacacacacaggggccaggcattgtggtttatgc

SEQ ID NO: 49433 - DNA, 80 bp, synthetic construct
  source 1..80: mol_type = other DNA
acacactgggtgtggtggctccagtctgtagtcccagctactcgagaagctgaggtgggaggattgcctgagtccaggag

SEQ ID NO: 49434 - DNA, 80 bp, synthetic construct; identical to SEQ ID NO: 13113
  source 1..80: mol_type = other DNA

SEQ ID NO: 49435 - DNA, 80 bp, synthetic construct
  source 1..80: mol_type = other DNA
tctgctttatcaggatggatttgggaaaccagccggagtgggagataaggagtctactttgcaaaggacacatgtgagcc

SEQ ID NO: 49436 - DNA, 80 bp, synthetic construct
  source 1..80: mol_type = other DNA
aggtctggagggtttgggtcctcccttgtgctccttcttcctctgccatttattccctgagtgtcctcgcctttcctccg

SEQ ID NO: 49437 - DNA, 80 bp, synthetic construct
  source 1..80: mol_type = other DNA
cagagttttattactcaaatcagtctccccaaaaactctcatcagtttttaaggataatttggtggataggggggccagt

SEQ ID NO: 49438 - DNA, 80 bp, synthetic construct; identical to SEQ ID NO: 13114
  source 1..80: mol_type = other DNA

SEQ ID NO: 49439 - DNA, 80 bp, synthetic construct
  source 1..80: mol_type = other DNA
tttagcggttggaagcaagatggggtcagttaggtttgatgtctttcactgtcatcatttccttagttataattttgcaa

SEQ ID NO: 49440 - DNA, 80 bp, synthetic construct
  source 1..80: mol_type = other DNA
ctcactgctagaacgaatattcttgagactttagatctgaaagtcagcctgatttctgaaagccttggaccgtttccaaa

SEQ ID NO: 49441 - DNA, 80 bp, synthetic construct
  source 1..80: mol_type = other DNA
actcatttgcgttttcctttttattacagccaaccgcttttgtaaatattgttacacatctctctattccactgaaaaca

SEQ ID NO: 49442 - DNA, 80 bp, synthetic construct
  source 1..80: mol_type = other DNA
tttcgttgtggggcttagcttcatattttcaaactgaaatattctcttccttaacctccacataaatccaagtttataat

SEQ ID NO: 49443 - DNA, 80 bp, synthetic construct; identical to SEQ ID NO: 13115
  source 1..80: mol_type = other DNA

SEQ ID NO: 49444 - DNA, 80 bp, synthetic construct
  source 1..80: mol_type = other DNA
gagagtttatctaaagagcatgtttacctttgatcatttgtaggactgctctctccgggggactgcgaccagattaatta

SEQ ID NO: 49445 - DNA, 80 bp, synthetic construct
  source 1..80: mol_type = other DNA
ttcatccatcgtgcagcctgggtctgccggtcagaccctggcacaacatttaagaggaaatgaaagtcacaaagttatcc

SEQ ID NO: 49446 - DNA, 80 bp, synthetic construct
  source 1..80: mol_type = other DNA
cagtctctggagtcactgtcaaaactttggtgaggaatcttccaggttttcccctacttcaaatatatattaatattatg

SEQ ID NO: 49447 - DNA, 80 bp, synthetic construct
  source 1..80: mol_type = other DNA
tttcagtagagacagggtttcaccatgttggccaggctgatcttgaacttctgacctcaggttatctgcctgccatagcc

SEQ ID NO: 49448 - DNA, 80 bp, synthetic construct; identical to SEQ ID NO: 13116
  source 1..80: mol_type = other DNA

SEQ ID NO: 49449 - DNA, 80 bp, synthetic construct
  source 1..80: mol_type = other DNA
gaggtagagggtcatgctgtctgcaacttaccctcacaggctctgaaataacaataatagcagcatatttacagatttag

SEQ ID NO: 49450 - DNA, 80 bp, synthetic construct
  source 1..80: mol_type = other DNA
tcacgaggtcaggagatcgagaccatcctggctaacacagtgaaaccccgtctctactaaaaatacaaaaaattagtcgg

SEQ ID NO: 49451 - DNA, 80 bp, synthetic construct
  source 1..80: mol_type = other DNA
caaaaaaactctcctttactttttctctccccttttcttcctatctcttccctcatttcttcaacacgtccccccatcct

SEQ ID NO: 49452 - DNA, 80 bp, synthetic construct; identical to SEQ ID NO: 13117
  source 1..80: mol_type = other DNA

SEQ ID NO: 49453 - DNA, 80 bp, synthetic construct
  source 1..80: mol_type = other DNA
tgaggcgcagtttcctactcacccggatccgaatcctccgcggtgctgtttcaagagagccggattccagatcacgctcc

SEQ ID NO: 49454 - DNA, 80 bp, synthetic construct
  source 1..80: mol_type = other DNA
gttattccgtttctatatcagtaaacacatttcattttccgtagaccagggcggggtgacgggtgatcccagtcctcgca

SEQ ID NO: 49455 - DNA, 80 bp, synthetic construct
  source 1..80: mol_type = other DNA
aaaatataaaattagacgggcttggtggtgaatgcctgtaatcccagctagtcgggaggctgaggcaggagaatcgctta

SEQ ID NO: 49456 - DNA, 80 bp, synthetic construct; identical to SEQ ID NO: 13118
  source 1..80: mol_type = other DNA

SEQ ID NO: 49457 - DNA, 80 bp, synthetic construct
  source 1..80: mol_type = other DNA
tcccctagcccaagagaggactggcttcatgactccctgaaaccatttctaaatgccttagaacaaaccttgcatattca

SEQ ID NO: 49458 - DNA, 80 bp, synthetic construct
  source 1..80: mol_type = other DNA
ctctcactaggcttatgatctttagcagtgaaaataatctctctaaggtggggaaaggaccccggtccctgctgtgctca

SEQ ID NO: 49459 - DNA, 80 bp, synthetic construct
  source 1..80: mol_type = other DNA
aaaagtttgtgaggctgacaaagaagaaacggacacatttcctgatcttggagggttcatagggtagaagatggtagatg

SEQ ID NO: 49460 - DNA, 80 bp, synthetic construct; identical to SEQ ID NO: 13119
  source 1..80: mol_type = other DNA

SEQ ID NO: 49461 - DNA, 80 bp, synthetic construct
  source 1..80: mol_type = other DNA
acacatcggaatcacctagggaactttaaaagatactaagatttaggtccaacctgggtttactgatttaacaacctagg

SEQ ID NO: 49462 - DNA, 80 bp, synthetic construct
  source 1..80: mol_type = other DNA
cttattattgagaattgagaattcatatgccacacaatttatccttttaaagtgtgcagctcagtggcttctagcgtaat

SEQ ID NO: 49463 - DNA, 80 bp, synthetic construct
  source 1..80: mol_type = other DNA
cactgcactcagaccagcctgggaagattttaaggatatggtgtggtctgatgggttccaaggcagaggttacaatagcc

SEQ ID NO: 49464 - DNA, 80 bp, synthetic construct
  source 1..80: mol_type = other DNA
agcatccatcatgtgtgacattcagcagatggggcgctgtgggtggcttggagcactctggttgtaactgaggcaggcac

SEQ ID NO: 49465 - DNA, 80 bp, synthetic construct; identical to SEQ ID NO: 13120
  source 1..80: mol_type = other DNA

SEQ ID NO: 49466 - DNA, 80 bp, synthetic construct
  source 1..80: mol_type = other DNA
gatataagggggtgaaaggggggcctggctttgagtcaaagggaggagaaggagattataaagctgaaacgtctaagaga

SEQ ID NO: 49467 - DNA, 80 bp, synthetic construct
  source 1..80: mol_type = other DNA
ctggaaggaacaagccagtgagagccggtttaatggggcggccggcgaaaggggcttggtgaggcccgcgctcctcgggg

SEQ ID NO: 49468 - DNA, 80 bp, synthetic construct
  source 1..80: mol_type = other DNA
taaatctccccaggtctccagcccactggaattttctcttccaagcgtggccccgccctctccgctcgtgattggcccta

SEQ ID NO: 49469 - DNA, 80 bp, synthetic construct; identical to SEQ ID NO: 13121
  source 1..80: mol_type = other DNA

SEQ ID NO: 49470 - DNA, 80 bp, synthetic construct
  source 1..80: mol_type = other DNA
actttctggtctcctcctgctctttctctcctcgcgtctcctccgcttcctctcacttttcggacaaaccagtccttctg

SEQ ID NO: 49471 - DNA, 80 bp, synthetic construct
  source 1..80: mol_type = other DNA
cctgggccgcagctcctggagtaggggccctcctttctcgggacccggagctggtgcttcctgctgctgtggggactgtg

SEQ ID NO: 49472 - DNA, 80 bp, synthetic construct
  source 1..80: mol_type = other DNA
aggacaccagattccctctcacctcctccctgcccatctcagggcccgctgagtccttttgccctcccagctccctgcta

SEQ ID NO: 49473 - DNA, 80 bp, synthetic construct; identical to SEQ ID NO: 13122
  source 1..80: mol_type = other DNA

SEQ ID NO: 49474 - DNA, 80 bp, synthetic construct
  source 1..80: mol_type = other DNA
ccacaggtgctggaccatccctccctggtccctccgcccctctccaccttgggaccttgtgctgctcctgtctcttgccc

SEQ ID NO: 49475 - DNA, 80 bp, synthetic construct
  source 1..80: mol_type = other DNA
ccccatgctcatgccgccctccagttcttgctctgcccatctcccctccccaacccagacctaaaacaggctgttgggcc

SEQ ID NO: 49476 - DNA, 80 bp, synthetic construct
  source 1..80: mol_type = other DNA
tctccccctctaccttggttttctctctctggccagcacccccaccccttgctttgtttttaatttttaacttttgtttg

SEQ ID NO: 49477 - DNA, 80 bp, synthetic construct; identical to SEQ ID NO: 13123
  source 1..80: mol_type = other DNA

SEQ ID NO: 49478 - DNA, 80 bp, synthetic construct
  source 1..80: mol_type = other DNA
cacaaataagtgagaacatgcaaagtttgtctgtctgggcctggggcttatttcacttcacaggatgacctccagttctt

SEQ ID NO: 49479 - DNA, 80 bp, synthetic construct
  source 1..80: mol_type = other DNA
cgatttcctttctttggagtatatgcctaacagtgggagtgctggagcatatgacagctctattgtatttttagtttttg

SEQ ID NO: 49480 - DNA, 80 bp, synthetic construct
  source 1..80: mol_type = other DNA
tctggataaaagccagtttatctggggtgggatgttatctcgtaggagttttgatttgccttcatctgttgacgaatgat

SEQ ID NO: 49481 - DNA, 80 bp, synthetic construct; identical to SEQ ID NO: 13124
  source 1..80: mol_type = other DNA

SEQ ID NO: 49482 - DNA, 80 bp, synthetic construct
  source 1..80: mol_type = other DNA
actttgatttgatttttgtatatggtgaaagacagggtctagtttcattcttctgcataaggatatctagtttccccagc

SEQ ID NO: 49483 - DNA, 80 bp, synthetic construct
  source 1..80: mol_type = other DNA
tgtctgtttttatgccagtatcatgctgttttggttactgtagctctgtagtataatttgaagtcagataatgtgattcc

SEQ ID NO: 49484 - DNA, 80 bp, synthetic construct
  source 1..80: mol_type = other DNA
atttcaacaaaactgattcttccaatccatgaacgtggactatcttttccattttttgtgtccttcaattttttgcatca

SEQ ID NO: 49485 - DNA, 80 bp, synthetic construct
  source 1..80: mol_type = other DNA
gtgcctggctaattttctatttttattagagatggggtttctctatgttggccaggctagtcttgaactcctgacctcag

SEQ ID NO: 49486 - DNA, 80 bp, synthetic construct; identical to SEQ ID NO: 13125
  source 1..80: mol_type = other DNA

SEQ ID NO: 49487 - DNA, 80 bp, synthetic construct
  source 1..80: mol_type = other DNA
ctgcagtactgtgttgcataactgtggtaaaattagtcatccttgtcttattccagatcttagagaaaaggctttcagtt

SEQ ID NO: 49488 - DNA, 80 bp, synthetic construct
  source 1..80: mol_type = other DNA
ttgtcctttattctgttgatatgacgtattacattgattgatttgtgtatgttaaatcatccttgcatacctggaataca

SEQ ID NO: 49489 - DNA, 80 bp, synthetic construct
  source 1..80: mol_type = other DNA
tggctttgtaaaatgagtttggaagtattccctcctcctctatttttcagaacagtttgaataggactgacatatgttgt

SEQ ID NO: 49490 - DNA, 80 bp, synthetic construct; identical to SEQ ID NO: 13126
  source 1..80: mol_type = other DNA

SEQ ID NO: 49491 - DNA, 80 bp, synthetic construct
  source 1..80: mol_type = other DNA
catctctactaaaaataataaaagttagccgggcgtgatggcgggtgcctgtaatcccaactacttgggaggctgaggca

SEQ ID NO: 49492 - DNA, 80 bp, synthetic construct
  source 1..80: mol_type = other DNA
cagaatttcattccttttaaggatggataatactcattatatgtatgtaccacatcttggttatccatccctcagacaat

SEQ ID NO: 49493 - DNA, 80 bp, synthetic construct
  source 1..80: mol_type = other DNA
tgtgtgtgtgtatgtgtgtgtgtaggtgtgtgataacagccatcctgattggtttcaggtggcatctcattgtggtttgg

SEQ ID NO: 49494 - DNA, 80 bp, synthetic construct; identical to SEQ ID NO: 13127
  source 1..80: mol_type = other DNA

SEQ ID NO: 49495 - DNA, 80 bp, synthetic construct
  source 1..80: mol_type = other DNA
tatatagtgcaaattaagggtccaattttattttaacaccccctgcccccagaactatttgctgaaaagatcaactgact

SEQ ID NO: 49496 - DNA, 80 bp, synthetic construct
  source 1..80: mol_type = other DNA
tcctaccctttgtgcctcatgaccaccccctcccttgtccccgccatgcccatgatgagtctcttctcgaggcagctccc

SEQ ID NO: 49497 - DNA, 80 bp, synthetic construct
  source 1..80: mol_type = other DNA
ggcccctattcccttagggggcttgtggccacccagtccttgcacctggcctacaagtttgccatcttcattcccccttc

SEQ ID NO: 49498 - DNA, 80 bp, synthetic construct; identical to SEQ ID NO: 13128
  source 1..80: mol_type = other DNA

SEQ ID NO: 49499 - DNA, 80 bp, synthetic construct
  source 1..80: mol_type = other DNA
aaggacctcaggatgaccctggctcatatcaaggaccagaaagaaggtgagagtcggcaggggcaagagtgactggagag

SEQ ID NO: 49500 - DNA, 80 bp, synthetic construct
  source 1..80: mol_type = other DNA
taccccctgggctgagttcctcacttgggtggaaaggtgatgggttcgggaatggagaagtcactgctgggtgggggcag

SEQ ID NO: 49501 - DNA, 80 bp, synthetic construct
  source 1..80: mol_type = other DNA
catgaacgtcaggaatttcttgaaggaagatgccatgaagaccaagacacactatcacgctatgcatgcagactgcctgc

SEQ ID NO: 49502 - DNA, 80 bp, synthetic construct; identical to SEQ ID NO: 13129
  source 1..80: mol_type = other DNA

SEQ ID NO: 49503 - DNA, 80 bp, synthetic construct
  source 1..80: mol_type = other DNA
cctgacatccccctcctcagcatcaatgtggggatcccagagcctgaggccacagtcccaaggcccatcctcctgccagc

SEQ ID NO: 49504 - DNA, 80 bp, synthetic construct
  source 1..80: mol_type = other DNA
cccatggtgaatgtcacccgcagcgaggcctcagagggcaacatcaccgtgacatgcagggcttccagcttctatccccg

SEQ ID NO: 49505 - DNA, 80 bp, synthetic construct
  source 1..80: mol_type = other DNA
ccgaggagaggagcagaggttcacctgctacatggaacacagcgggaatcacagcactcaccctgtgccctctggtgagc

SEQ ID NO: 49506 - DNA, 80 bp, synthetic construct; identical to SEQ ID NO: 13130
  source 1..80: mol_type = other DNA

SEQ ID NO: 49507 - DNA, 80 bp, synthetic construct
  source 1..80: mol_type = other DNA
gtgctgcccaagcaagggtcaaacgcccagctgtggcatcctcctgctgcaggtgaggagtgggcagcagggagggctgc

SEQ ID NO: 49508 - DNA, 80 bp, synthetic construct
  source 1..80: mol_type = other DNA
cagaaactggagaggaatctgaggagaggcggtgcccctattcccttcctctctgcatccccctcccctgtttctccagc

SEQ ID NO: 49509 - DNA, 80 bp, synthetic construct
  source 1..80: mol_type = other DNA
ggggttgtcgtgtcctctgcaccattcgaggccctactctttccaggttcccacggcctggcctccctgagtttcttgca

SEQ ID NO: 49510 - DNA, 80 bp, synthetic construct; identical to SEQ ID NO: 13131
  source 1..80: mol_type = other DNA

SEQ ID NO: 49511 - DNA, 80 bp, synthetic construct
  source 1..80: mol_type = other DNA
tcgctggtttctcatccttgaacctaattgcactgtcaatcggcccctcaggcctgagcagatgggaaggtttgtcccct

SEQ ID NO: 49512 - DNA, 80 bp, synthetic construct
  source 1..80: mol_type = other DNA
gccaggaaaagagtatgaagttcatgtgccagtttctcaaaattcctgctttcaatgttgatgtccagtaaagatattcg

SEQ ID NO: 49513 - DNA, 80 bp, synthetic construct
  source 1..80: mol_type = other DNA
gctctgcaatcttaataggatttcctaatactgtaaagcatattaaatgaaacaggaactcaaatttggagccccctctc

SEQ ID NO: 49514 - DNA, 80 bp, synthetic construct; identical to SEQ ID NO: 13132
  source 1..80: mol_type = other DNA

SEQ ID NO: 49515 - DNA, 80 bp, synthetic construct
  source 1..80: mol_type = other DNA
ctgatggggtccccagttaggagctgcctgctcagggctgggaggggaggagcactgagctgcagatagagggcagagcc

SEQ ID NO: 49516 - DNA, 80 bp, synthetic construct
  source 1..80: mol_type = other DNA
tcctttagtcttggggccctttccctccctgcacgatgagtggtgggcacagggcacgggctgatgttgatggagtgatg

SEQ ID NO: 49517 - DNA, 80 bp, synthetic construct
  source 1..80: mol_type = other DNA
agggaataaacacaacactgcacccagtggagcatttacccatttccctcttttctccagagctcgtgagcctgcaggtc

SEQ ID NO: 49518 - DNA, 80 bp, synthetic construct; identical to SEQ ID NO: 13133
  source 1..80: mol_type = other DNA

SEQ ID NO: 49519 - DNA, 80 bp, synthetic construct
  source 1..80: mol_type = other DNA
gcggatcacaaggtcaagagatcgagaccatcctgatcaacatggtgaaaccctgtctctactaaaaatacaaaaaatta

SEQ ID NO: 49520 - DNA, 80 bp, synthetic construct
  source 1..80: mol_type = other DNA
ggcgacagagcgagactctgtctcaaaaaaaaaaaaaaaaaaagacagagtctcactctgtcacccaggctgcagttcag

SEQ ID NO: 49521 - DNA, 80 bp, synthetic construct
  source 1..80: mol_type = other DNA
tttcatagagacaggattttgccatgttggccaggctggtctcaaactcctgacctcaggtgatctgcctgcctcagcct

SEQ ID NO: 49522 - DNA, 80 bp, synthetic construct
  source 1..80: mol_type = other DNA
attttaatatattacgtgtgttgtaattggattatcatcggtgagctttgtgagtgagtgtcttggagatgactcctcct

SEQ ID NO: 49523 - DNA, 80 bp, synthetic construct; identical to SEQ ID NO: 13134
  source 1..80: mol_type = other DNA

SEQ ID NO: 49524 - DNA, 80 bp, synthetic construct
  source 1..80: mol_type = other DNA
aacatctgccctgaagagttggagccttcatgtgatgacacagagctgaagtgtgatattcgggaggggatagagagtgc

SEQ ID NO: 49525 - DNA, 80 bp, synthetic construct
  source 1..80: mol_type = other DNA
tgctggtgttggggcacacagatgggtgatgcacttcttggtcaaggcaacctcagccccacccacgtaaggtggtcatg

SEQ ID NO: 49526 - DNA, 80 bp, synthetic construct
  source 1..80: mol_type = other DNA
agtaagggagctggagtagggaattcactcatgtgctacttactgatccagagatgtgttcgttgacattttcttttatg

SEQ ID NO: 49527 - DNA, 80 bp, synthetic construct; identical to SEQ ID NO: 13135
  source 1..80: mol_type = other DNA

SEQ ID NO: 49528 - DNA, 80 bp, synthetic construct
  source 1..80: mol_type = other DNA
cacagtggtgaatgcaatagttaattgtacctgttccctttcactcttcccattctttcatcttcccgatgtatttctgt

SEQ ID NO: 49529 - DNA, 80 bp, synthetic construct
  source 1..80: mol_type = other DNA
catgactaattttctcatatgtcagcttgaccacttttcacttcctgaacatttgttcttcctgtagttaatacttgcct

SEQ ID NO: 49530 - DNA, 80 bp, synthetic construct
  source 1..80: mol_type = other DNA
tctcctgcctcagcttcccgagtagctgggattacaggcactcaccaccatgcccagctaatttttgtatttttagtaga

SEQ ID NO: 49531 - DNA, 80 bp, synthetic construct
  source 1..80: mol_type = other DNA
aatgcaatggcacaatcttggctcaccacaacctccacctcccaggttcaagggattctcctgcctcagcctcccgaata

SEQ ID NO: 49532 - DNA, 80 bp, synthetic construct; identical to SEQ ID NO: 13136
  source 1..80: mol_type = other DNA

SEQ ID NO: 49533 - DNA, 80 bp, synthetic construct
  source 1..80: mol_type = other DNA
agccaaaatgcagactgattcaagatgtcaaggctgaggcatatgagcctttctgtctagtttcatgagatgctgattct

SEQ ID NO: 49534 - DNA, 80 bp, synthetic construct
  source 1..80: mol_type = other DNA
ccacaggccacatcctaatatatttttaattaactgatgcagtttctttctaaattagtaagagggctgagcattttttc

SEQ ID NO: 49535 - DNA, 80 bp, synthetic construct
  source 1..80: mol_type = other DNA
agtagtgagaccctgtctccagccaaaaaaaaaaaattaaattaaaatatactgtactataatagtgttaattgtaagca

SEQ ID NO: 49536 - DNA, 80 bp, synthetic construct; identical to SEQ ID NO: 13137
  source 1..80: mol_type = other DNA

SEQ ID NO: 49537 - DNA, 80 bp, synthetic construct
  source 1..80: mol_type = other DNA
ctttcttttcacttttgtatcccccctcattttggtgcaactaatcttctagtagcttttcctgaaagcacgtgcttaaa

SEQ ID NO: 49538 - DNA, 80 bp, synthetic construct
  source 1..80: mol_type = other DNA
ctgtgaatacaaaagaaagaaaggtcctgcccaggatgggagtcactcctatatatggtggccctgggacagcagacctt

SEQ ID NO: 49539 - DNA, 80 bp, synthetic construct
  source 1..80: mol_type = other DNA
caatggacagtaagcaaataaaacctagtattaccactaattgccattgagaaaaatatgcctaggccagaagattggtg

SEQ ID NO: 49540 - DNA, 80 bp, synthetic construct; identical to SEQ ID NO: 13138
  source 1..80: mol_type = other DNA

SEQ ID NO: 49541 - DNA, 80 bp, synthetic construct
  source 1..80: mol_type = other DNA
tgtgggtgatggacagcggcgtgaatgtctcttcatgtccattacccatttttgaatggcgttgtttttttaatggatga

SEQ ID NO: 49542 - DNA, 80 bp, synthetic construct
  source 1..80: mol_type = other DNA
ttaattgctcatgctttgggtcatccagccaagaaactactaccaaatccaatgttcacaagactttcctcaatgttttc

SEQ ID NO: 49543 - DNA, 80 bp, synthetic construct
  source 1..80: mol_type = other DNA
tggaagtgaggctgacacatttgcaaaatgcattgagcactagtacaccatgcatttatttacttttctttactccacag

SEQ ID NO: 49544 - DNA, 80 bp, synthetic construct; identical to SEQ ID NO: 13139
  source 1..80: mol_type = other DNA

SEQ ID NO: 49545 - DNA, 80 bp, synthetic construct
  source 1..80: mol_type = other DNA
aacaaataagtagtaagtgtagacctcagaaatttaacaagattctactttttcccccaaaaaaatgtcctcacaatttc

SEQ ID NO: 49546 - DNA, 80 bp, synthetic construct
  source 1..80: mol_type = other DNA
ttgtatttgagctgcagcctggggcttagaaatgtgacttgggtattttgccaaaatggtatgtttttctatagaatttg

SEQ ID NO: 49547 - DNA, 80 bp, synthetic construct
  source 1..80: mol_type = other DNA
atggcaacaaaaaatttctccagacatagctcctgtcctctggtgggaaaatctcccctggatgagaacactagtttgag

SEQ ID NO: 49548 - DNA, 80 bp, synthetic construct; identical to SEQ ID NO: 13140
  source 1..80: mol_type = other DNA

SEQ ID NO: 49549 - DNA, 80 bp, synthetic construct
  source 1..80: mol_type = other DNA
aggggaaataatatgataaattcggtgtggagagcatgctaaagttatttggcctgcaataagtaatgctgttctaaaag

SEQ ID NO: 49550 - DNA, 80 bp, synthetic construct
  source 1..80: mol_type = other DNA
attattgtttattttctttggtgtgataatgtaggtttttactcttaggagatgcacgatgaggtgtttagtggtgaaat

SEQ ID NO: 49551 - DNA, 80 bp, synthetic construct
  source 1..80: mol_type = other DNA
tgcaaaaagggaggagaattggtaagttagagttttttggcaaaggactgacaatgcgccacatggataggacttctatt

SEQ ID NO: 49552 - DNA, 80 bp, synthetic construct; identical to SEQ ID NO: 13141
  source 1..80: mol_type = other DNA

SEQ ID NO: 49553 - DNA, 80 bp, synthetic construct
  source 1..80: mol_type = other DNA
gtgatggctagatcctccatgaaaggaaactggttcaaacacggccaatatgcccagcaacccatgggtaatgggggatt

SEQ ID NO: 49554 - DNA, 80 bp, synthetic construct
  source 1..80: mol_type = other DNA
ctgtactcaccattctgatgaatgtaccttgggatcctgaatgagcaccaaaaataaagcagcacctttgtctggggtga

SEQ ID NO: 49555 - DNA, 80 bp, synthetic construct
  source 1..80: mol_type = other DNA
catggcagagtgcactggattttatacacaggctgaaagaggtgtctgatttgcacagggcccacagattggttggacca

SEQ ID NO: 49556 - DNA, 80 bp, synthetic construct; identical to SEQ ID NO: 13142
  source 1..80: mol_type = other DNA

SEQ ID NO: 49557 - DNA, 80 bp, synthetic construct
  source 1..80: mol_type = other DNA
tactgttctgtgatattgggatatctggacattttgttgtcataggagtttatccttgcaggtattaccaaactgcttcc

SEQ ID NO: 49558 - DNA, 80 bp, synthetic construct
  source 1..80: mol_type = other DNA
agtgtacatgtacccaatgtgtagtcttttctcccgcaccatcctatgaccctaccctctgagtccccaacgttcattat

SEQ ID NO: 49559 - DNA, 80 bp, synthetic construct
  source 1..80: mol_type = other DNA
tatatatatatatacaccacattttcttttttttaattacactttttattttgaggtaatcatagatccacatgtaactg

SEQ ID NO: 49560 - DNA, 80 bp, synthetic construct; identical to SEQ ID NO: 13143
  source 1..80: mol_type = other DNA

SEQ ID NO: 49561 - DNA, 80 bp, synthetic construct
  source 1..80: mol_type = other DNA
atgaatggaatcatgcagtatgtgttcttttgatattggctttttttttcactcagcatgattccctaaagattcaagga

SEQ ID NO: 49562 - DNA, 80 bp, synthetic construct
  source 1..80: mol_type = other DNA
taactcttcatttacattaggtatttctcctaatgctttccctcccccctcttccctcccccaaccccacgacaggcccc

SEQ ID NO: 49563 - DNA, 80 bp, synthetic construct
  source 1..80: mol_type = other DNA
ctttttatggctgcacagtattccacgatatacaccacattttcattttccactcattgattgacggacatttgggctgg

SEQ ID NO: 49564 - DNA, 80 bp, synthetic construct; identical to SEQ ID NO: 13144
  source 1..80: mol_type = other DNA

SEQ ID NO: 49565 - DNA, 80 bp, synthetic construct
  source 1..80: mol_type = other DNA
acttagccttctttttgatgggattattcattttcctcttgctgatttgtttgagttccttgtagattctggacatcagt

SEQ ID NO: 49566 - DNA, 80 bp, synthetic construct
  source 1..80: mol_type = other DNA
tgaagtcattgcctaaaccaatgtctagaagggttttgttcagtgttatcttctagaatttttatggtttcaggtcttag

SEQ ID NO: 49567 - DNA, 80 bp, synthetic construct
  source 1..80: mol_type = other DNA
gttgactgtaagtatttggttttatttctgggttctctattctgtttcattggtctacatgagtctttagggttttctag

SEQ ID NO: 49568 - DNA, 80 bp, synthetic construct; identical to SEQ ID NO: 13145
  source 1..80: mol_type = other DNA

SEQ ID NO: 49569 - DNA, 80 bp, synthetic construct
  source 1..80: mol_type = other DNA
gagggtgttgccaaaagagattaacatttgagacagtgggctggggaaggcagatccacccttaatctggtgggcacagt

SEQ ID NO: 49570 - DNA, 80 bp, synthetic construct
  source 1..80: mol_type = other DNA
tgctcctcagcttgcagacagcctattatgtgaccctgtgattgtgtaagttagtactcaataagcatatatatatatta

SEQ ID NO: 49571 - DNA, 80 bp, synthetic construct
  source 1..80: mol_type = other DNA
cattttgtgtgtgtgtgtatatatatattctatatatatattctatatatatattctatatatatattctatatatattc

SEQ ID NO: 49572 - DNA, 80 bp, synthetic construct
  source 1..80: mol_type = other DNA
tctatatatattctatatatatattctatatatatattctatatatattctatatatatattctatatatattctatata

SEQ ID NO: 49573 - DNA, 80 bp, synthetic construct; identical to SEQ ID NO: 13146
  source 1..80: mol_type = other DNA

SEQ ID NO: 49574 - DNA, 80 bp, synthetic construct
  source 1..80: mol_type = other DNA
tattctatatattctatatatattatatatatatattctatatatatatattccatatatatattctatatatatattcc

SEQ ID NO: 49575 - DNA, 80 bp, synthetic construct
  source 1..80: mol_type = other DNA
tatatatatcctatatatattctatatattctatatatatatcctatatatattctatatattctatatatatatcctat

SEQ ID NO: 49576 - DNA, 80 bp, synthetic construct
  source 1..80: mol_type = other DNA
tatatatatcctatatatatcctatatatatatcctatatatatatcctatatatatatcctatatatatatcctatata

SEQ ID NO: 49577 - DNA, 80 bp, synthetic construct; identical to SEQ ID NO: 13147
  source 1..80: mol_type = other DNA

SEQ ID NO: 49578 - DNA, 80 bp, synthetic construct
  source 1..80: mol_type = other DNA
tatatcctatatgtatatcctatatgtatatcctatatgtatatcctatatgtatatcctatatatatattctatataca

SEQ ID NO: 49579 - DNA, 80 bp, synthetic construct
  source 1..80: mol_type = other DNA
tatatatattctatatatatattctgtatatatatattctgtatatatatattctatatatatattctatatatatattc

SEQ ID NO: 49580 - DNA, 80 bp, synthetic construct
  source 1..80: mol_type = other DNA
ctatatacatattctatatatatattctatatacatattctatatatatatattctatatacatattctatatatatatt

SEQ ID NO: 49581 - DNA, 80 bp, synthetic construct; identical to SEQ ID NO: 13148
  source 1..80: mol_type = other DNA

SEQ ID NO: 49582 - DNA, 80 bp, synthetic construct
  source 1..80: mol_type = other DNA
taaatgcatttcacactattcactgctcctgagaggcaagtttagtgactctaacctaataattttgaccatatgtagag

SEQ ID NO: 49583 - DNA, 80 bp, synthetic construct
  source 1..80: mol_type = other DNA
gtagagaaagagctgaaattgtggaaaaacagacaaaagctcctatcatgtgagtagctgacctgcgatgaaagatgcat

SEQ ID NO: 49584 - DNA, 80 bp, synthetic construct
  source 1..80: mol_type = other DNA
tccccgtccctagtattggcaacatcccctccccagcccatgctgtcatcagcctttccacctttatctgagaagacaaa

SEQ ID NO: 49585 - DNA, 80 bp, synthetic construct; identical to SEQ ID NO: 13149
  source 1..80: mol_type = other DNA

SEQ ID NO: 49586 - DNA, 80 bp, synthetic construct
  source 1..80: mol_type = other DNA
ctgaaatatggattaaaaggtggcccactgtgagcaagctggaaatgtctgatctcccttggtttaatgtagaggaagga

SEQ ID NO: 49587 - DNA, 80 bp, synthetic construct
  source 1..80: mol_type = other DNA
ttctctgcatgtcagagctaacagtgggaatcacagtactcaactataaaatttaaatacaatgggaataattggatccc

SEQ ID NO: 49588 - DNA, 80 bp, synthetic construct
  source 1..80: mol_type = other DNA
taggaagcctacttcattcctacttaatttatacaagcagaaaacttctatgtgcaatggacaaaagactaattttaatc

SEQ ID NO: 49589 - DNA, 80 bp, synthetic construct; identical to SEQ ID NO: 13150
  source 1..80: mol_type = other DNA

SEQ ID NO: 49590 - DNA, 80 bp, synthetic construct
  source 1..80: mol_type = other DNA
cacttaatgcattttcccaattaattttcccaattaatgcatcatttccccaatgcaatttccccaattaatgcataatt

SEQ ID NO: 49591 - DNA, 80 bp, synthetic construct
  source 1..80: mol_type = other DNA
agattagtgccaccatgaagaacttaaaagacacaggggtggtgattcaaatcacatccccattcaactctcccaaatgg

SEQ ID NO: 49592 - DNA, 80 bp, synthetic construct
  source 1..80: mol_type = other DNA
caaatgcctttttctccattcctgtccataaggcccacaagaagcaatttgccttcagctggcaaggccagcaatatgcg

SEQ ID NO: 49593 - DNA, 80 bp, synthetic construct
  source 1..80: mol_type = other DNA
cactggacttattgatgagacatttgcgtgccagaggataggaaataaatctgactaaaattcagggaccttctacctca

SEQ ID NO: 49594 - DNA, 80 bp, synthetic construct; identical to SEQ ID NO: 13151
  source 1..80: mol_type = other DNA

SEQ ID NO: 49595 - DNA, 80 bp, synthetic construct
  source 1..80: mol_type = other DNA
gccctgccatcttctgcagataactactctccttttgagagacagctcttagcctgttactgggctttggtagaaactga

SEQ ID NO: 49596 - DNA, 80 bp, synthetic construct
  source 1..80: mol_type = other DNA
ggcacaagtaaggtacatgaggaagtggctcagatgcccagggtctccactcctgccaccctgctttctcttcctcagcc

SEQ ID NO: 49597 - DNA, 80 bp, synthetic construct
  source 1..80: mol_type = other DNA
agtgaaaggaaatcttcctagtgagcagttcacctggttgtgcagtttgcatggaatgagaaatagccagatgtgcgatt

SEQ ID NO: 49598 - DNA, 80 bp, synthetic construct; identical to SEQ ID NO: 13152
  source 1..80: mol_type = other DNA

SEQ ID NO: 49599 - DNA, 80 bp, synthetic construct
  source 1..80: mol_type = other DNA
accaacactgagctctcaatatgacaccattccttgggcgatcagccagctacctggtgacaggttgattattggacctc

SEQ ID NO: 49600 - DNA, 80 bp, synthetic construct
  source 1..80: mol_type = other DNA
aaccaaggcactcacttcatggctaaagaagtgcagcagtgggctcatgctcatggaattcactggtcttaccatgttct

SEQ ID NO: 49601 - DNA, 80 bp, synthetic construct; identical to SEQ ID NO: 13153
  source 1..80: mol_type = other DNA

SEQ ID NO: 49602 - DNA, 80 bp, synthetic construct
  source 1..80: mol_type = other DNA
caggctatgaagggagttacagtgttggctggcgtgattgacctggactatcaagatgaaatcagtctactactccacaa

SEQ ID NO: 49603 - DNA, 80 bp, synthetic construct
  source 1..80: mol_type = other DNA
ccaccaggaaaaaaaaacacaacctgctgaggtgcttgctgaaggcaaagggaatacagaatgggtagtagaagaaggta

SEQ ID NO: 49604 - DNA, 80 bp, synthetic construct
  source 1..80: mol_type = other DNA
cataagatttattgacttcatgtcagcatttaagttttattaactttatgtaatagtacttggggattggtgcgtttctg

SEQ ID NO: 49605 - DNA, 80 bp, synthetic construct; identical to SEQ ID NO: 13154
  source 1..80: mol_type = other DNA

SEQ ID NO: 49606 - DNA, 80 bp, synthetic construct
  source 1..80: mol_type = other DNA
cttcagttttgagactcgaactggctctcctttctcctcagcttgcagacagcctattgtgtgaacttgtgattgtgtaa

SEQ ID NO: 49607 - DNA, 80 bp, synthetic construct
  source 1..80: mol_type = other DNA
gacttgcgtatgttaaaccatccctgcatccctggtatgaaacccacttgatcatggtggattatctttttgatatgctg

SEQ ID NO: 49608 - DNA, 80 bp, synthetic construct
  source 1..80: mol_type = other DNA
agattgagaccaattcttctttgaatgtctgatggaattcagctgtgaattcatctggtcctggactttttttggttggc

SEQ ID NO: 49609 - DNA, 80 bp, synthetic construct; identical to SEQ ID NO: 13155
  source 1..80: mol_type = other DNA

SEQ ID NO: 49610 - DNA, 80 bp, synthetic construct
  source 1..80: mol_type = other DNA
agttccttgaggtttgaccttagattgtctttttgtgctctttcagacattttcatgtaggcatttaatgctatgaactt

SEQ ID NO: 49611 - DNA, 80 bp, synthetic construct
  source 1..80: mol_type = other DNA
gagggttcctttggagttaatttccagtttcagtccactgtggtctgagagagtacttgatataattttgattttcttaa

SEQ ID NO: 49612 - DNA, 80 bp, synthetic construct
  source 1..80: mol_type = other DNA
tttgttgactttcttgatgacctgtctagtgctgtcagtgaagtattgaagtcccccactattattgtgttgccacctat

SEQ ID NO: 49613 - DNA, 80 bp, synthetic construct; identical to SEQ ID NO: 13156
  source 1..80: mol_type = other DNA

SEQ ID NO: 49614 - DNA, 80 bp, synthetic construct
  source 1..80: mol_type = other DNA
attcatcatgcaggttgttgccttaataccttgttttttccatttcatagtgttgttgaagagtgatggctaaatgtatc

SEQ ID NO: 49615 - DNA, 80 bp, synthetic construct
  source 1..80: mol_type = other DNA
tataggaattgtctccaaactgctttctagacagcctcacaaagcatctagaatgtataaatttgactttcataatgcat

SEQ ID NO: 49616 - DNA, 80 bp, synthetic construct
  source 1..80: mol_type = other DNA
catgctgttctcatgatagagtgactctcatgaaatctgatgcttttataagcatctgacatttcccctgattacactaa

SEQ ID NO: 49617 - DNA, 80 bp, synthetic construct; identical to SEQ ID NO: 13157
  source 1..80: mol_type = other DNA

SEQ ID NO: 49618 - DNA, 80 bp, synthetic construct
  source 1..80: mol_type = other DNA
ggctccgaagacaggaagatatgggaaagcttgaaacttcctagagacttgttgaatggttttgaccaaaatgctgatag

SEQ ID NO: 49619 - DNA, 80 bp, synthetic construct
  source 1..80: mol_type = other DNA
gatttagtgtatctgccagaagaaatttctaagcagcaaagtgttcaagaggaagcagagcataaaagtttgaaaaattc

SEQ ID NO: 49620 - DNA, 80 bp, synthetic construct
  source 1..80: mol_type = other DNA
ccatcacaagcccagaggtcatccttaagtgaaaaaatcaaccacaggagatgacatgataataggcttattacagtaga

SEQ ID NO: 49621 - DNA, 80 bp, synthetic construct; identical to SEQ ID NO: 13158
  source 1..80: mol_type = other DNA

SEQ ID NO: 49622 - DNA, 80 bp, synthetic construct
  source 1..80: mol_type = other DNA
acattctgccgggtacccagaggtggggacagatgctaacaggtccatcttataagtgcaacatgaaatttaaggtcagg

SEQ ID NO: 49623 - DNA, 80 bp, synthetic construct
  source 1..80: mol_type = other DNA
ttcattttcagatactcaatgggattgaaaagttgaattgtgtgctttcttgcagtgagcacagaggaatttgctgtccc

SEQ ID NO: 49624 - DNA, 80 bp, synthetic construct
  source 1..80: mol_type = other DNA
ttctgatgtgtgaagttctgagggcattttccaaagtacttgttcactgagcaggtgtttccactacttgcattaagtca

SEQ ID NO: 49625 - DNA, 80 bp, synthetic construct; identical to SEQ ID NO: 13159
  source 1..80: mol_type = other DNA

SEQ ID NO: 49626 - DNA, 80 bp, synthetic construct
  source 1..80: mol_type = other DNA
acagggatctgttcctgtttagactccaatgctcagtacccagtgcagaacatggcaagacttcagcaaatacatcagtc

SEQ ID NO: 49627 - DNA, 80 bp, synthetic construct
  source 1..80: mol_type = other DNA
agaccagcttgaccaacatggtaaaaccccatctctactaaaaatacaaaaattagccgggcatggtggcagacgcctgt

SEQ ID NO: 49628 - DNA, 80 bp, synthetic construct
  source 1..80: mol_type = other DNA
aaaaaaaaaaaagtgttgatgtacctaccttgcaaggaggtagataggtagacagaagcatggatagatggatggatatt

SEQ ID NO: 49629 - DNA, 80 bp, synthetic construct; identical to SEQ ID NO: 13160
  source 1..80: mol_type = other DNA

SEQ ID NO: 49630 - DNA, 80 bp, synthetic construct
  source 1..80: mol_type = other DNA
tctctaggtacaatttactgctatgaaaagggatttgagaattcccagaggaggctttcagcctctttgcatggctcttt

SEQ ID NO: 49631 - DNA, 80 bp, synthetic construct
  source 1..80: mol_type = other DNA
tcattctggttggattttatgacagccgtattcgccataagaattctagagccagaccttgttacttcacaattgcctca

SEQ ID NO: 49632 - DNA, 80 bp, synthetic construct
  source 1..80: mol_type = other DNA
ctggtccccgaaagcgctcagtcagaatccgagagcactgtggcggcgcccccgtgtggccacaggactgaagacagagg

SEQ ID NO: 49633 - DNA, 80 bp, synthetic construct
  source 1..80: mol_type = other DNA
agcttcccaaaatccatgttgatatgaacgttttctcccacaactgattgactggacttttgtctcagggcagagggagg

SEQ ID NO: 49634 - DNA, 80 bp, synthetic construct; identical to SEQ ID NO: 13161
  source 1..80: mol_type = other DNA

SEQ ID NO: 49635 - DNA, 80 bp, synthetic construct
  source 1..80: mol_type = other DNA
gaagaggaggaggaaaaaggaggagggtgaaaggagtcagggaggagagaaaagtgggaagtgtttctttagaaggggtg

SEQ ID NO: 49636 - DNA, 80 bp, synthetic construct
  source 1..80: mol_type = other DNA
cagagtccagccccgggaagcctggggtcacagcactcggcttgctggatggctgcctcttcattgtctttgacagcagg

SEQ ID NO: 49637 - DNA, 80 bp, synthetic construct
  source 1..80: mol_type = other DNA
attctgaccccttgccctggatcctgagggttccacccttccctattcccaacaggtctcaagaattcttctgttagtct

SEQ ID NO: 49638 - DNA, 80 bp, synthetic construct; identical to SEQ ID NO: 13162
  source 1..80: mol_type = other DNA

SEQ ID NO: 49639 - DNA, 80 bp, synthetic construct
  source 1..80: mol_type = other DNA
gattagtgatgttgaacatttttttatgtatctgttggccatttatattcttcttctgaaaaatatttattcatgccctt

SEQ ID NO: 49640 - DNA, 80 bp, synthetic construct
  source 1..80: mol_type = other DNA
tgcagaagcttttttagttattatagtcctatttgtctggttttatttgtgttttctatatttttgaagtcttagccata

SEQ ID NO: 49641 - DNA, 80 bp, synthetic construct
  source 1..80: mol_type = other DNA
tttcccagcccttttactgaagagggtgtccttttcccaaatgtgtgttcttggcacctttgttaaaagtcagttggctg

SEQ ID NO: 49642 - DNA, 80 bp, synthetic construct; identical to SEQ ID NO: 13163
  source 1..80: mol_type = other DNA

SEQ ID NO: 49643 - DNA, 80 bp, synthetic construct
  source 1..80: mol_type = other DNA
taagagatctttgacttccttgcataaacttattcctaggcatttttttctagttatcgtaaatggaattgcttttttga

SEQ ID NO: 49644 - DNA, 80 bp, synthetic construct
  source 1..80: mol_type = other DNA
gaggggagagaggctgaaggttaagctgatggccaatgatttaatgaatcatgcctaagaaatatgacttccatcaaaac

SEQ ID NO: 49645 - DNA, 80 bp, synthetic construct
  source 1..80: mol_type = other DNA
agctcctgcactggaaacccttctgaccttgccctatgtgtctgttcatggggctctttatttgtgtcttttaaaatatc

SEQ ID NO: 49646 - DNA, 80 bp, synthetic construct; identical to SEQ ID NO: 13164
  source 1..80: mol_type = other DNA

SEQ ID NO: 49647 - DNA, 80 bp, synthetic construct
  source 1..80: mol_type = other DNA
agttgttgtggtgtgagagtagtggaaaacaatgtgagattttccacactcagagtggatctaaatgttgagttgctttt

SEQ ID NO: 49648 - DNA, 80 bp, synthetic construct
  source 1..80: mol_type = other DNA
atgagtacccccttcatcctctctgtctcccaagaaccaaaaaatactctctctgcagctttaacaaatactggtttgga

SEQ ID NO: 49649 - DNA, 80 bp, synthetic construct
  source 1..80: mol_type = other DNA
gaaaaaaaaagaaaaattccttggggaaaaagcatcaaaatcatcaggaagtcttccacacagaaatgacttcattaatt

SEQ ID NO: 49650 - DNA, 80 bp, synthetic construct; identical to SEQ ID NO: 13165
  source 1..80: mol_type = other DNA

SEQ ID NO: 49651 - DNA, 80 bp, synthetic construct
  source 1..80: mol_type = other DNA
tatcccatgttttgattcatcatcatctcctaagccctttcccagcatcgatagtctactaaacatgccatgattaaatt

SEQ ID NO: 49652 - DNA, 80 bp, synthetic construct
  source 1..80: mol_type = other DNA
tctgtcactcaggctaaattacagtggcccgatcatggctcactgcagccttgacctcccaagattcaggtgatcctctt

SEQ ID NO: 49653 - DNA, 80 bp, synthetic construct
  source 1..80: mol_type = other DNA
ttacaggcatgaggcactgtgccagccttttttttttttcacatctgctggaatggaaaatatttcttaaatgagacaca

SEQ ID NO: 49654 - DNA, 80 bp, synthetic construct; identical to SEQ ID NO: 13166
  source 1..80: mol_type = other DNA

SEQ ID NO: 49655 - DNA, 80 bp, synthetic construct
  source 1..80: mol_type = other DNA
tgagtgagtgagtggtgagtgaatgtgaaggctagggcattactgtacactacttagactttataaacttaggctacact

SEQ ID NO: 49656 - DNA, 80 bp, synthetic construct
  source 1..80: mol_type = other DNA
aagttttagggtacatatgcacattgtgcaggttagttacatatgtatacatgtgccatgctggtgtgctgcacccatta

SEQ ID NO: 49657 - DNA, 80 bp, synthetic construct
  source 1..80: mol_type = other DNA
tccttgcgatagtttactaagaatgatgatttccaatttcatccgtgtccctacaaaggacatgaactcatcctttttta

SEQ ID NO: 49658 - DNA, 80 bp, synthetic construct; identical to SEQ ID NO: 13167
  source 1..80: mol_type = other DNA

SEQ ID NO: 49659 - DNA, 80 bp, synthetic construct
  source 1..80: mol_type = other DNA
atggccagtgatggtgagcattttctcatgtgttttttggctgcataaatgtcttcttttgagaagtgtctgttcatgtc

SEQ ID NO: 49660 - DNA, 80 bp, synthetic construct
  source 1..80: mol_type = other DNA
gtgcagaagctctttagtttaattagatcccatttgtcaattttggcttttgttgccattgcttggtgttttagacatga

SEQ ID NO: 49661 - DNA, 80 bp, synthetic construct; identical to SEQ ID NO: 13168
  source 1..80: mol_type = other DNA

SEQ ID NO: 49662 - DNA, 80 bp, synthetic construct
  source 1..80: mol_type = other DNA
agtaaatacataaaacatagcatagtcatttattatcattatgaagtattatgtactgtgcatagctgtatatgctagac

SEQ ID NO: 49663 - DNA, 80 bp, synthetic construct
  source 1..80: mol_type = other DNA
caggtccattaaactctcatgggacgacagtcatatatgcaattcatcattgacccaaacatcattatacaatgcatgac

SEQ ID NO: 49664 - DNA, 80 bp, synthetic construct
  source 1..80: mol_type = other DNA
gaggcttagaggtcttcgggttcaaaccgtcagagaatagctcattttaaactcatcctcccacagtaaacaagtataaa

SEQ ID NO: 49665 - DNA, 80 bp, synthetic construct; identical to SEQ ID NO: 13169
  source 1..80: mol_type = other DNA

SEQ ID NO: 49666 - DNA, 80 bp, synthetic construct
  source 1..80: mol_type = other DNA
tgctaagtagaaatgtcacaggctccatagtgtgaggagatgttggaatttcagccctgcaaaacctgtgttgagacatc

SEQ ID NO: 49667 - DNA, 80 bp, synthetic construct
  source 1..80: mol_type = other DNA
attaccagtctttggaggaagataacaaaacccagagcctctaaaatccatcatgtagaatatgtgccatgccaagcagc

SEQ ID NO: 49668 - DNA, 80 bp, synthetic construct
  source 1..80: mol_type = other DNA
gaaagattaatcataagaagagagaaaacacaaatgaacactatgagaagggacattataaaactgtagattttattaaa

SEQ ID NO: 49669 - DNA, 80 bp, synthetic construct; identical to SEQ ID NO: 13170
  source 1..80: mol_type = other DNA

SEQ ID NO: 49670 - DNA, 80 bp, synthetic construct
  source 1..80: mol_type = other DNA
atgcacatcctcccatatactttaaatcatctctagattacttataattcctaatgcaatgtaaatgatttgtaaatagt

SEQ ID NO: 49671 - DNA, 80 bp, synthetic construct
  source 1..80: mol_type = other DNA
tcaatcctaaggttgttgaattcacagatgtggaactcacagacatgaaaggcagactgtgtgctatggtttgtctgttt

SEQ ID NO: 49672 - DNA, 80 bp, synthetic construct
  source 1..80: mol_type = other DNA
tgttctcacaatacttcatggttttataaggggctttttctgcttcggtttggcacttctccttgttgctgccatgtgag

SEQ ID NO: 49673 - DNA, 80 bp, synthetic construct
  source 1..80: mol_type = other DNA
tattttttagataataaagagtaaacaccttccaactaattttatgaggcaacataagtcagacaaggacctaaacatga

SEQ ID NO: 49674 - DNA, 80 bp, synthetic construct; identical to SEQ ID NO: 13171
  source 1..80: mol_type = other DNA

SEQ ID NO: 49675 - DNA, 80 bp, synthetic construct
  source 1..80: mol_type = other DNA
atctaaagtcataattaatgaagaaatattaaacactcctctgaggtggggacaagagaaggatgtccactatcatcact

SEQ ID NO: 49676 - DNA, 80 bp, synthetic construct
  source 1..80: mol_type = other DNA
aaaaagtaacatttctatacgtgagtaataaacagtgagaagaactgacattctttaaatagctctatgtacaataccac

SEQ ID NO: 49677 - DNA, 80 bp, synthetic construct
  source 1..80: mol_type = other DNA
tattgctaagataccgtttatccacaaagtgatccatggagtcaatgcaattgtaataaaactcccaacagttttttttg

SEQ ID NO: 49678 - DNA, 80 bp, synthetic construct
  source 1..80: mol_type = other DNA
tgaaagccatagtgattagaaaagtgaagtatttgttcagggataaacaaacaggaaaaaattattaaaatagagccctc

SEQ ID NO: 49679 - DNA, 80 bp, synthetic construct; identical to SEQ ID NO: 13172
  source 1..80: mol_type = other DNA

SEQ ID NO: 49680 - DNA, 80 bp, synthetic construct
  source 1..80: mol_type = other DNA
actgaggttctttgcatatatctctttatgtgtctctgagctgttgtctagtgccctttcattttaatctgaatgactca

SEQ ID NO: 49681 - DNA, 80 bp, synthetic construct
  source 1..80: mol_type = other DNA
tagtgttcagtagtgctaagaacactcacactgttttgcaaaccaatctccagaactcctttcatattgcaaaactgcat

SEQ ID NO: 49682 - DNA, 80 bp, synthetic construct
  source 1..80: mol_type = other DNA
ttggctgttaatctcaatgaggatcccttgtacatgatgcattatttgtttcttgctgctgtccaagttctctctgcttc

SEQ ID NO: 49683 - DNA, 80 bp, synthetic construct
  source 1..80: mol_type = other DNA
tatgcatctgtcagtccacttgatgctgtacagaggtgtcatagcctctgatcatttccctttatttttttttcttcctg

SEQ ID NO: 49684 - DNA, 80 bp, synthetic construct; identical to SEQ ID NO: 13173
  source 1..80: mol_type = other DNA

SEQ ID NO: 49685 - DNA, 80 bp, synthetic construct
  source 1..80: mol_type = other DNA
agagggggatttggcagggtcataggacaatagtggagggaaggttggcagataaacaagtgaacaaaggtctctggttt

SEQ ID NO: 49686 - DNA, 80 bp, synthetic construct
  source 1..80: mol_type = other DNA
cagcacatgtttcagagagcacagggttgggggtaaggtcaccgatcaacaggatcccaaggcagaagaatttatcttag

SEQ ID NO: 49687 - DNA, 80 bp, synthetic construct
  source 1..80: mol_type = other DNA
cagacgaggtggtggctgggcagaggggctcctcacttcctagtaggggtggccgggcagaggcgcccctcacctcccgg

SEQ ID NO: 49688 - DNA, 80 bp, synthetic construct
  source 1..80: mol_type = other DNA
ccccccacctccctcccggagggggcggctggccgggcggggtgctgatccccccacctccctcccggacgggtcggctg

SEQ ID NO: 49689 - DNA, 80 bp, synthetic construct; identical to SEQ ID NO: 13174
  source 1..80: mol_type = other DNA

SEQ ID NO: 49690 - DNA, 80 bp, synthetic construct
  source 1..80: mol_type = other DNA
acccccacctccctcctggacggggtggctggccaggcagaggggctcctcacttcccagtaggggcggctgggcagagg

SEQ ID NO: 49691 - DNA, 80 bp, synthetic construct
  source 1..80: mol_type = other DNA
ccggacggggtggctggcctggcagaggggctcctcacttcccagtaggggcggctgggcagaggcgcccctcacctccc

SEQ ID NO: 49692 - DNA, 80 bp, synthetic construct
  source 1..80: mol_type = other DNA
cccccacctccctcccggatggggcggctggccaggcagaggggctcctcacttcccagtaggggcggctgggcagaggc

SEQ ID NO: 49693 - DNA, 80 bp, synthetic construct
  source 1..80: mol_type = other DNA
ggctgccgggcagagggactcctcacttctcagatggggcggatgctgggcggagggtctcctcacttctcagacggggc

SEQ ID NO: 49694 - DNA, 80 bp, synthetic construct; identical to SEQ ID NO: 13175
  source 1..80: mol_type = other DNA

SEQ ID NO: 49695 - DNA, 80 bp, synthetic construct
  source 1..80: mol_type = other DNA
ctgcactccagcctgggcaccattgagcactgagtgaaccagactccgtctgcaatcccggcacctcgggaggccaaggc

SEQ ID NO: 49696 - DNA, 80 bp, synthetic construct
  source 1..80: mol_type = other DNA
cagtgagccgagatggcagcagtacagtccagcttcggctcggcatcagagggagaccatggaaagagagggagagggag

SEQ ID NO: 49697 - DNA, 80 bp, synthetic construct; identical to SEQ ID NO: 13176
  source 1..80: mol_type = other DNA

SEQ ID NO: 49698 - DNA, 80 bp, synthetic construct
  source 1..80: mol_type = other DNA
cttggcttccttagggacaggttctgctgatgtatttttttctgcaaatgggccactttcttaaacttctaaatacctca

SEQ ID NO: 49699 - DNA, 80 bp, synthetic construct
  source 1..80: mol_type = other DNA
gtcactaaaatctattctgttagcttcatggtcagctagtgatttgacagaggtttccttaaacagctggagccaaaaaa

SEQ ID NO: 49700 - DNA, 80 bp, synthetic construct
  source 1..80: mol_type = other DNA
taaagatcacccagaggtaaaagcctaaggtcatctcaggtctttttaaagagtgtgggcatccagggctaaatatccag

SEQ ID NO: 49701 - DNA, 80 bp, synthetic construct
  source 1..80: mol_type = other DNA
tgtctgctgttaacccatccatcattccatgccccaggcatctgtgactagtatttgcctttaaatgcttttgacaaaca

SEQ ID NO: 49702 - DNA, 80 bp, synthetic construct; identical to SEQ ID NO: 13177
  source 1..80: mol_type = other DNA

SEQ ID NO: 49703 - DNA, 80 bp, synthetic construct
  source 1..80: mol_type = other DNA
tgatagtttttttccaggttaatagttgctttagttggggaatgtgttgttggagttctctaccatttttggtgaaggca

SEQ ID NO: 49704 - DNA, 80 bp, synthetic construct
  source 1..80: mol_type = other DNA
ctgaaggactgaaacacttattacagttcgtgtctgctggttatgtattttttcactccctataagtctaaaatcccttt

SEQ ID NO: 49705 - DNA, 80 bp, synthetic construct
  source 1..80: mol_type = other DNA
agaatctagtttgacagcagttgtctttcagaactttagcgatgttggtcatctgtccctcatttgcattgtttccaatg

SEQ ID NO: 49706 - DNA, 80 bp, synthetic construct; identical to SEQ ID NO: 13178
  source 1..80: mol_type = other DNA

SEQ ID NO: 49707 - DNA, 80 bp, synthetic construct
  source 1..80: mol_type = other DNA
tataatgtggacaggcttcattcaattcattgaaggtgtaaattgaatgaaacactgaccttccccaagcaagatggaat

SEQ ID NO: 49708 - DNA, 80 bp, synthetic construct
  source 1..80: mol_type = other DNA
aaagaagataaaaacagaacagctcttgtgggctgaattgcagggtgttttcttagcagtgatggaagaattgaacaatg

SEQ ID NO: 49709 - DNA, 80 bp, synthetic construct
  source 1..80: mol_type = other DNA
agtcctatggaaatcactatggtaatttgaggggtgcattaacgtaagacatgttgatgcctgatatagattggatgttg

SEQ ID NO: 49710 - DNA, 80 bp, synthetic construct; identical to SEQ ID NO: 13179
  source 1..80: mol_type = other DNA

SEQ ID NO: 49711 - DNA, 80 bp, synthetic construct
  source 1..80: mol_type = other DNA
gatgggctgaatcaagacatactccccttgcatcccccacctctaataagcacaaaatactcagtaaaactgttcttttt

SEQ ID NO: 49712 - DNA, 80 bp, synthetic construct
  source 1..80: mol_type = other DNA
gcctgtaattccagctactcaggaaactgaggcaggacaatggcttgaacctgggaggcagaggctgcagtgagccgaga

SEQ ID NO: 49713 - DNA, 80 bp, synthetic construct
  source 1..80: mol_type = other DNA
agccacattacactaggaaacacacttgcccagaatgtccaacaatggtcagagaaatttgttcctcagaagaagagttt

SEQ ID NO: 49714 - DNA, 80 bp, synthetic construct; identical to SEQ ID NO: 13180
  source 1..80: mol_type = other DNA

SEQ ID NO: 49715 - DNA, 80 bp, synthetic construct
  source 1..80: mol_type = other DNA
taaaagtccaggcacaggaattattcctgagcaagaaaccgttaacatatttaaaaaccattatgcaagactgcctaagg

SEQ ID NO: 49716 - DNA, 80 bp, synthetic construct
  source 1..80: mol_type = other DNA
catggtatagctccctgcataggccagcacagcaggaaaacctaatgtcccttccaaaatgagaaatatttggtataaat

SEQ ID NO: 49717 - DNA, 80 bp, synthetic construct
  source 1..80: mol_type = other DNA
atgttgctgagaccattgctatttttggactgcaatgggcgaattgataatgactaaacaggactctggtaatgggccag

SEQ ID NO: 49718 - DNA, 80 bp, synthetic construct; identical to SEQ ID NO: 13181
  source 1..80: mol_type = other DNA

SEQ ID NO: 49719 - DNA, 80 bp, synthetic construct
  source 1..80: mol_type = other DNA
atctgtgatccaataaatatatttggtctttgcccctagtccctgacaggcaggtcctaaaacgcttgcagtccctcagt

SEQ ID NO: 49720 - DNA, 80 bp, synthetic construct
  source 1..80: mol_type = other DNA
ttgagctcagtcatcaatggccaatgatttcaccaatcttgcctacacaatgaaacttccatagacacctctagacagtg

SEQ ID NO: 49721 - DNA, 80 bp, synthetic construct
  source 1..80: mol_type = other DNA
tttctctggggcaaataaaaatgtagaatcagaaaattcaggcactttgcactcctcatgggacactccagcagcactca

SEQ ID NO: 49722 - DNA, 80 bp, synthetic construct; identical to SEQ ID NO: 13182
  source 1..80: mol_type = other DNA

SEQ ID NO: 49723 - DNA, 80 bp, synthetic construct
  source 1..80: mol_type = other DNA
ctgcaaagacaaaagaccacataaatccccaggtgcacaactttttcagatttaaagaaaaaacaacccccgtctttccc

SEQ ID NO: 49724 - DNA, 80 bp, synthetic construct
  source 1..80: mol_type = other DNA
tgagggtttttctctggtttctcagacagctccggggccaagattcggggagacattgagacagagcgtttgatataaaa

SEQ ID NO: 49725 - DNA, 80 bp, synthetic construct
  source 1..80: mol_type = other DNA
tactcatgatgcggcctcagttctcacttccattgggtgttgggttcctagatcagccaatcagtgtcgccgcggttcct

SEQ ID NO: 49726 - DNA, 80 bp, synthetic construct; identical to SEQ ID NO: 13183
  source 1..80: mol_type = other DNA

SEQ ID NO: 49727 - DNA, 80 bp, synthetic construct
  source 1..80: mol_type = other DNA
atctaaggagagttgatcaaggccgtggaagagtcctccagccactattggccatcaaaggagtcctctgtgtcccagga

SEQ ID NO: 49728 - DNA, 80 bp, synthetic construct
  source 1..80: mol_type = other DNA
tctgggctcttggaaatcaaaccctctcaggttgggtggctggacgattctcctcacacttacaatgggacaaggggaac

SEQ ID NO: 49729 - DNA, 80 bp, synthetic construct
  source 1..80: mol_type = other DNA
caattcccctgtggcagctgtaatgtgtagttcaatgggcactcatttgtccccttttaagggtaccctcctttagaatc

SEQ ID NO: 49730 - DNA, 80 bp, synthetic construct; identical to SEQ ID NO: 13184
  source 1..80: mol_type = other DNA

SEQ ID NO: 49731 - DNA, 80 bp, synthetic construct
  source 1..80: mol_type = other DNA
gggtcccccacgaagatactgcacggagagcagtgccaagcctgtggatcaggaatatcaacagcccccagagagtggtg

SEQ ID NO: 49732 - DNA, 80 bp, synthetic construct
  source 1..80: mol_type = other DNA
ttagggtctggttggtcacctaaagaaatagagccctaccagggaagatcattgggttcaaatgctgatgagtaggacat

SEQ ID NO: 49733 - DNA, 80 bp, synthetic construct
  source 1..80: mol_type = other DNA
gcttggttgttcagggccatttcaggtttgggtgttttctggggatgttaacatgggattcaggctcaactcacaagaaa

SEQ ID NO: 49734 - DNA, 80 bp, synthetic construct; identical to SEQ ID NO: 13185
  source 1..80: mol_type = other DNA

SEQ ID NO: 49735 - DNA, 80 bp, synthetic construct
  source 1..80: mol_type = other DNA
gcatcctcctatgtcacctagagtgtgggtcaaagcaatacacctacatgtagaatgtgatgtcagaactcaaacaggct

SEQ ID NO: 49736 - DNA, 80 bp, synthetic construct
  source 1..80: mol_type = other DNA
ggccacttctgaatctctgtaaggtttatttatcttcaccctctggagagaagatgttttaccaaagcctctagtgtacc

SEQ ID NO: 49737 - DNA, 80 bp, synthetic construct
  source 1..80: mol_type = other DNA
ggaattataatagccctgaggcaaactatgaattaaagtgttgtggatcccacatgaatcactttatatccacttttgtg

SEQ ID NO: 49738 - DNA, 80 bp, synthetic construct; identical to SEQ ID NO: 13186
  source 1..80: mol_type = other DNA

SEQ ID NO: 49739 - DNA, 80 bp, synthetic construct
  source 1..80: mol_type = other DNA
tccacttctaattggaatggaagggaatgcactcaccacatccacagctgcacactgtgtgcctgaggccttattaatct

SEQ ID NO: 49740 - DNA, 80 bp, synthetic construct
  source 1..80: mol_type = other DNA
tccttagtaatcccattcattccttaggctccatcaggcttatttgctaaattacatggagataataggcaaccccaaca

SEQ ID NO: 49741 - DNA, 80 bp, synthetic construct
  source 1..80: mol_type = other DNA
tactccacagactagggatgcagtgtgggggtgactccagctgccagggcatcagtgtcaattatgcactaggagaatgg

SEQ ID NO: 49742 - DNA, 80 bp, synthetic construct; identical to SEQ ID NO: 13187
  source 1..80: mol_type = other DNA

SEQ ID NO: 49743 - DNA, 80 bp, synthetic construct
  source 1..80: mol_type = other DNA
tcctgctcctcaattcttgctttcttatcatagataccaagcagtgctcttgctggctgcccttctgttctgaccctgga

SEQ ID NO: 49744 - DNA, 80 bp, synthetic construct
  source 1..80: mol_type = other DNA
atgagcccaactctgggacatcttttcctaccatcaccctcagccttcagagaacaatacaatgaaacttcttagtgatg

SEQ ID NO: 49745 - DNA, 80 bp, synthetic construct
  source 1..80: mol_type = other DNA
cggggcaactaagtcaggtctagcttgtgagataccggcatcattttttcccagtctacatggatcaccccagcagtggg

SEQ ID NO: 49746 - DNA, 80 bp, synthetic construct; identical to SEQ ID NO: 13188
  source 1..80: mol_type = other DNA

SEQ ID NO: 49747 - DNA, 80 bp, synthetic construct
  source 1..80: mol_type = other DNA
ccaagtcaaaggatttttatctatctagcttgaaattctgtccctttgatcaaatgccctcaaattccaatcccagaagt

SEQ ID NO: 49748 - DNA, 80 bp, synthetic construct
  source 1..80: mol_type = other DNA
actggagggcacccatctgataatgctgtcctagtttgcagaatctcatgtttccccaccagggccctgattttccacaa

SEQ ID NO: 49749 - DNA, 80 bp, synthetic construct
  source 1..80: mol_type = other DNA
ttagaatccctcagattctcattctccttttatagggcatcaacacagctgagcagtaaccagccagcttccctgttgta

SEQ ID NO: 49750 - DNA, 80 bp, synthetic construct; identical to SEQ ID NO: 13189
  source 1..80: mol_type = other DNA

SEQ ID NO: 49751 - DNA, 80 bp, synthetic construct
  source 1..80: mol_type = other DNA
atagccatgaaagaaattggggagcaagacagaaaagactgggaaagccataagactgtgatgcaagtggcttttttatt

SEQ ID NO: 49752 - DNA, 80 bp, synthetic construct
  source 1..80: mol_type = other DNA
aggccggtctcaaactcctgacctcatgtgatctgcccaccttggcctcccaaagtgctgggattacaggcgtgagccac

SEQ ID NO: 49753 - DNA, 80 bp, synthetic construct
  source 1..80: mol_type = other DNA
ttgtttctcctgttctctcaattattgaatcgaagaagccaatggcaagtatggtctgagagcaaacgtagcaatagatt

SEQ ID NO: 49754 - DNA, 80 bp, synthetic construct; identical to SEQ ID NO: 13190
  source 1..80: mol_type = other DNA

SEQ ID NO: 49755 - DNA, 80 bp, synthetic construct
  source 1..80: mol_type = other DNA
gctgaagtaagaatgcagatagaaggttggatgtgtgagcagagagaaggtgtgtgagagtcacccagaccagtaggagg

SEQ ID NO: 49756 - DNA, 80 bp, synthetic construct
  source 1..80: mol_type = other DNA
tccaccagctgtgtagttttgccaaacaagtatggcaacgcaagggaggggcaagggagggatggaaattatttacaata

SEQ ID NO: 49757 - DNA, 80 bp, synthetic construct
  source 1..80: mol_type = other DNA
aatgagtggttcactgatattacgtcacagcatatgataaaatgatagtataagtatcctcagagcctgtggcctccgtg

SEQ ID NO: 49758 - DNA, 80 bp, synthetic construct; identical to SEQ ID NO: 13191
  source 1..80: mol_type = other DNA

SEQ ID NO: 49759 - DNA, 80 bp, synthetic construct
  source 1..80: mol_type = other DNA
catgtcacagtcatgtgtgttacaacttcaacagtctcatggggctaaaatcaaggtaaggggaggtctgtgttccttct

SEQ ID NO: 49760 - DNA, 80 bp, synthetic construct
  source 1..80: mol_type = other DNA
cctagagccctctctcagttcctcacacatatcccatgcaacatatccaatcctcctgcttggaacctctgacctccccc

SEQ ID NO: 49761 - DNA, 80 bp, synthetic construct
  source 1..80: mol_type = other DNA
tgcaattttaaggtccttaatcttcatcacatcagtattttcccttttgccatgtaatgcaacctactcgtgggtgccca

SEQ ID NO: 49762 - DNA, 80 bp, synthetic construct
  source 1..80: mol_type = other DNA
aatggctgcaatgaggggagtggggcctgaatctgatgacagctttgggggcttaggaaggaaggaggcagaaaggtctg

SEQ ID NO: 49763 - DNA, 80 bp, synthetic construct; identical to SEQ ID NO: 13192
  source 1..80: mol_type = other DNA

SEQ ID NO: 49764 - DNA, 80 bp, synthetic construct
  source 1..80: mol_type = other DNA
gaggctcaggggtggctttcacctgggctctgtccatggaggtgaggacagggagatagttgggcctcagtgctgtgtgg

SEQ ID NO: 49765 - DNA, 80 bp, synthetic construct
  source 1..80: mol_type = other DNA
ggttcgtccattttggagttataacctaaggcagaaactcagatggttcaaatgtcctcttcatgaagcaatgttatcag

SEQ ID NO: 49766 - DNA, 80 bp, synthetic construct
  source 1..80: mol_type = other DNA
gtagtttgggcctcttatattctaatgattaagactttaagctgtgtacacattgcaatgcaagtatgcgtcatgcataa

SEQ ID NO: 49767 - DNA, 80 bp, synthetic construct
  source 1..80: mol_type = other DNA
aacattttacaaagtttctgtgttctttttccactgagtgggaacaagtcagctagtgaggaacatgaggcctttggcct

SEQ ID NO: 49768 - DNA, 80 bp, synthetic construct; identical to SEQ ID NO: 13193
  source 1..80: mol_type = other DNA

SEQ ID NO: 49769 - DNA, 80 bp, synthetic construct
  source 1..80: mol_type = other DNA
aggctcactagtccaacagagcttgagccctgtaccagtgtcatattccaggagccagagttacaagggatacaaagtgc

SEQ ID NO: 49770 - DNA, 80 bp, synthetic construct
  source 1..80: mol_type = other DNA
acaaatttttcagtttcccagtgcatataaaagttatatttacacttgactgtagtctcttaagtgtacaatagcattat

SEQ ID NO: 49771 - DNA, 80 bp, synthetic construct
  source 1..80: mol_type = other DNA
tcgctgtggcaatttcttaaaataacacaacgaagtttgcagcaagattattctcctcacttggacacttagaggccatt

SEQ ID NO: 49772 - DNA, 80 bp, synthetic construct; identical to SEQ ID NO: 13194
  source 1..80: mol_type = other DNA

SEQ ID NO: 49773 - DNA, 80 bp, synthetic construct
  source 1..80: mol_type = other DNA
aagaaaaagcaaaggaaaaaatgcagtgtcagcaaacagtaataaaggaaagcacagtggaaggtgcacctgcaaagggg

SEQ ID NO: 49774 - DNA, 80 bp, synthetic construct
  source 1..80: mol_type = other DNA
atgaaaccatctgagccagtttcctcatctgcaaaccagtgacataattcctgccttgcagagtttcagaagaataagtg

SEQ ID NO: 49775 - DNA, 80 bp, synthetic construct
  source 1..80: mol_type = other DNA
ggtggcagagtaggatgggggcaagggctgtggcagggcctggcactgaagtgaggccaaagcctggagagagtggctcc

SEQ ID NO: 49776 - DNA, 80 bp, synthetic construct; identical to SEQ ID NO: 13195
  source 1..80: mol_type = other DNA

SEQ ID NO: 49777 - DNA, 80 bp, synthetic construct
  source 1..80: mol_type = other DNA
aggatgccttctgcctttctagctgggcctcaggtcagggctttgagcctgagcagggagaggagatggaagggagatgg

SEQ ID NO: 49778 - DNA, 80 bp, synthetic construct
  source 1..80: mol_type = other DNA
tggcacgtgggtacaagggtgttgggaagtgtcatcctccagtgctgacttgagtgtgtgtgtgtggctgcacacgtgtg

SEQ ID NO: 49779 - DNA, 80 bp, synthetic construct
  source 1..80: mol_type = other DNA
ctgcctgctttcctttctctccaaaacgtgaccacacagcaacttagtgactatctagatttaagtctatcaaacagaag

SEQ ID NO: 49780 - DNA, 80 bp, synthetic construct; identical to SEQ ID NO: 13196
  source 1..80: mol_type = other DNA

SEQ ID NO: 49781 - DNA, 80 bp, synthetic construct
  source 1..80: mol_type = other DNA
gggtccctcccacaacatgtgggaattctgggagataccattcaagttgagattcgaatggggacacagccaaaccgtat

SEQ ID NO: 49782 - DNA, 80 bp, synthetic construct
  source 1..80: mol_type = other DNA
aagaaatgcatgagatctaaactaagccatttgggtaaactgtctcagaatttaaagcatcagcagtcacaagctatcag

SEQ ID NO: 49783 - DNA, 80 bp, synthetic construct
  source 1..80: mol_type = other DNA
ccagctgcccaacaacttccctttgctgatctgagccagactctgcttttatggcttacacccaaataattcaagttatt

SEQ ID NO: 49784 - DNA, 80 bp, synthetic construct; identical to SEQ ID NO: 13197
  source 1..80: mol_type = other DNA

SEQ ID NO: 49785 - DNA, 80 bp, synthetic construct
  source 1..80: mol_type = other DNA
acttccctcactccctttggacagctctgcggttctgtaatcattgccgtcctctacctacagccacaggcctgcagggc

SEQ ID NO: 49786 - DNA, 80 bp, synthetic construct
  source 1..80: mol_type = other DNA
tgtgtcttctttctttgtcatctctttcctgccaggaccctgactgtcccacagaagaagtgacaagaatttatttatga

SEQ ID NO: 49787 - DNA, 80 bp, synthetic construct
  source 1..80: mol_type = other DNA
agcccttaacttgaaaatctgacagtataataaaagaaaaaaatagaagtattctggaaatggaagaggaaagaaggcta

SEQ ID NO: 49788 - DNA, 80 bp, synthetic construct; identical to SEQ ID NO: 13198
  source 1..80: mol_type = other DNA

SEQ ID NO: 49789 - DNA, 80 bp, synthetic construct
  source 1..80: mol_type = other DNA
cacccgcccctaaagaccaggcacaaatcccagcacatggagggatccagacaaatacacaagagatgaccacagcagga

SEQ ID NO: 49790 - DNA, 80 bp, synthetic construct
  source 1..80: mol_type = other DNA
atcttcagaaaacactatgcagaagataactgtagagcaagacatctatttagggtgagtgagtcacagtggagatctgg

SEQ ID NO: 49791 - DNA, 80 bp, synthetic construct
  source 1..80: mol_type = other DNA
cagctgggggaagaaaagtcagggtccacagagatataagggggctgagaactatctgtgtcttgctggtctgcacaagg

SEQ ID NO: 49792 - DNA, 80 bp, synthetic construct; identical to SEQ ID NO: 13199
  source 1..80: mol_type = other DNA

SEQ ID NO: 49793 - DNA, 80 bp, synthetic construct
  source 1..80: mol_type = other DNA
tgaggaaagagacctgatgagatgctatggtgaagaggggccataagggtcttgaataccaagttaattttgctaccagc

SEQ ID NO: 49794 - DNA, 80 bp, synthetic construct
  source 1..80: mol_type = other DNA
tcatctgtgaatgcagccagaccactttcttcctctgatataaataacttggaggatctgtcaccagacacctcatatct

SEQ ID NO: 49795 - DNA, 80 bp, synthetic construct
  source 1..80: mol_type = other DNA
ttttagtaaaggtatttcagggtatatgagaatcagattcctagggccctgggtacctcatcttgctgtttaaagtcctc

SEQ ID NO: 49796 - DNA, 80 bp, synthetic construct; identical to SEQ ID NO: 13200
  source 1..80: mol_type = other DNA

SEQ ID NO: 49797 - DNA, 80 bp, synthetic construct
  source 1..80: mol_type = other DNA
acttgtgaaagtcagttttccctgactaaagaaacaggacatttaccctgttagaagttgatgtctgccagagacctcca

SEQ ID NO: 49798 - DNA, 80 bp, synthetic construct
  source 1..80: mol_type = other DNA
acatccaatgtcatttgtgagattgctttgattcgctcatgtagaatgttactctgctgctttgcagagaggcttgccac

SEQ ID NO: 49799 - DNA, 80 bp, synthetic construct
  source 1..80: mol_type = other DNA
attttactcatggcatagatagatactatccaacaattcgtttttattacctctacattacactgcttaggtagccacta

SEQ ID NO: 49800 - DNA, 80 bp, synthetic construct; identical to SEQ ID NO: 13201
  source 1..80: mol_type = other DNA

SEQ ID NO: 49801 - DNA, 80 bp, synthetic construct
  source 1..80: mol_type = other DNA
cactcaatggctggaggatccaagcttatggcatgactgcctctggagcatttcatgctagagagatcccaacaggtgta

SEQ ID NO: 49802 - DNA, 80 bp, synthetic construct
  source 1..80: mol_type = other DNA
gagattttgtgtccctgcgtcctttccttccatctcaaccagagaccacttgtgaaagcccaagaacaaatgtcattaaa

SEQ ID NO: 49803 - DNA, 80 bp, synthetic construct
  source 1..80: mol_type = other DNA
gtattcattataatttctgatgaggaactagagaggtctcatagcatatagaccttgatcaaattgggtcatggtggagt

SEQ ID NO: 49804 - DNA, 80 bp, synthetic construct; identical to SEQ ID NO: 13202
  source 1..80: mol_type = other DNA

SEQ ID NO: 49805 - DNA, 80 bp, synthetic construct
  source 1..80: mol_type = other DNA
cccaaccctgcaggtttaaggaatggacttaggtctctggcactttgttctcaacacacattttccttcactcattcaga

SEQ ID NO: 49806 - DNA, 80 bp, synthetic construct
  source 1..80: mol_type = other DNA
actcatctgtgaatcctggataaacacagacattccggtaaccttactgaaatgaagtgaggaccaatgagttgacaggt

SEQ ID NO: 49807 - DNA, 80 bp, synthetic construct
  source 1..80: mol_type = other DNA
accaccacactcggctaattttttgtatttttagtggagacggggtttcaccatgttagccaggatggtctcgatctcct

SEQ ID NO: 49808 - DNA, 80 bp, synthetic construct; identical to SEQ ID NO: 13203
  source 1..80: mol_type = other DNA

SEQ ID NO: 49809 - DNA, 80 bp, synthetic construct
  source 1..80: mol_type = other DNA
caaactctacatcacctgccattgtcaattttcaatctatccgttctatgctttggaatcctacataattcatactcttg

SEQ ID NO: 49810 - DNA, 80 bp, synthetic construct
  source 1..80: mol_type = other DNA
ctcccagttctggaggctacaggtccacgatggaatgtattgcagggctgattgctcctgaggcctgtctctggcttaca

SEQ ID NO: 49811 - DNA, 80 bp, synthetic construct
  source 1..80: mol_type = other DNA
gaatacaaccctttggctggactctgttgatattttgaaatgttggtcttgcaataagaacaccaccaaaggccaggcgc

SEQ ID NO: 49812 - DNA, 80 bp, synthetic construct
  source 1..80: mol_type = other DNA
cagctgctcgggaggctgaggcgggagaatggtgtgaacccaggaggcagagcttgcagtgagccaagatctcgccactg

SEQ ID NO: 49813 - DNA, 80 bp, synthetic construct; identical to SEQ ID NO: 13204
  source 1..80: mol_type = other DNA

SEQ ID NO: 49814 - DNA, 80 bp, synthetic construct
  source 1..80: mol_type = other DNA
ggcatataatatttatacatactttggggtacacataatattttcatgcatgtgtagaatgtgaaatgatcgagtcagga

SEQ ID NO: 49815 - DNA, 80 bp, synthetic construct
  source 1..80: mol_type = other DNA
gtatctttgtacccattaagctacctcattttatctcccagatcccccacacacccttcccagcttctggtaactattat

SEQ ID NO: 49816 - DNA, 80 bp, synthetic construct
  source 1..80: mol_type = other DNA
ccatgttgctgctagttattatgaggtagttctagctggaagaatagagaattaaaagaaatctttgtgaagcccctacc

SEQ ID NO: 49817 - DNA, 80 bp, synthetic construct; identical to SEQ ID NO: 13205
  source 1..80: mol_type = other DNA

SEQ ID NO: 49818 - DNA, 80 bp, synthetic construct
  source 1..80: mol_type = other DNA
caccacgaccggctaatttttttgtatttttagtacagacggggtttcactgtgttagccagggtggtctcggtctcctg

SEQ ID NO: 49819 - DNA, 80 bp, synthetic construct
  source 1..80: mol_type = other DNA
atggtctatgaggtgaacccacacacccatagaaacagttcatttgttttcagtgctggatagcatttatgagacgaata

SEQ ID NO: 49820 - DNA, 80 bp, synthetic construct
  source 1..80: mol_type = other DNA
gatgtaggaatgggattactgtgcttttaccatgtgatgttataggatgtcaaattgttctctgaagaggttgtatcaac

SEQ ID NO: 49821 - DNA, 80 bp, synthetic construct; identical to SEQ ID NO: 13206
  source 1..80: mol_type = other DNA

SEQ ID NO: 49822 - DNA, 80 bp, synthetic construct
  source 1..80: mol_type = other DNA
tagaaatgtgtccaaaaatagacctgcattcctgaaaaatgactgtattcagaattatatgatgcaaccctgtttgtaaa

SEQ ID NO: 49823 - DNA, 80 bp, synthetic construct
  source 1..80: mol_type = other DNA
accttcctaagaaaacccaaacaagcactgcatatctacacggctgagtctacaaacatttaacacaaaagaagaaagac

SEQ ID NO: 49824 - DNA, 80 bp, synthetic construct
  source 1..80: mol_type = other DNA
aatatatttggaagaataagcaagaagatatccctggttgcctgttggggatgagacaaggtaagaaagagacattttac

SEQ ID NO: 49825 - DNA, 80 bp, synthetic construct; identical to SEQ ID NO: 13207
  source 1..80: mol_type = other DNA

SEQ ID NO: 49826 - DNA, 80 bp, synthetic construct
  source 1..80: mol_type = other DNA
ttttgttcaaatcttggtctaagtgggaaagggattctaggggatccagtgcagcagttatgggtttcagtatgctcacg

SEQ ID NO: 49827 - DNA, 80 bp, synthetic construct
  source 1..80: mol_type = other DNA
gtacttgtcatacgcggtcaccctatctttggatcagaaggtacactcagagctcctagtgtcacatcccaggcccaacc

SEQ ID NO: 49828 - DNA, 80 bp, synthetic construct
  source 1..80: mol_type = other DNA
cttccattcccaggactcccaggaaataaaatgctgcaagattggggtggggagctgtccagggtaggtcaggtgtgttc

SEQ ID NO: 49829 - DNA, 80 bp, synthetic construct; identical to SEQ ID NO: 13208
  source 1..80: mol_type = other DNA

SEQ ID NO: 49830 - DNA, 80 bp, synthetic construct
  source 1..80: mol_type = other DNA
gattctgagcaaagctctcctatcctgggtgcctgtggggctcccacttacaccacaaaacaaagctcaaataatatttt

SEQ ID NO: 49831 - DNA, 80 bp, synthetic construct
  source 1..80: mol_type = other DNA
ggagttctttgtctcaccaccaagagaattaaggagcgtggatacaaagggtgaggttggagcaaaagtttaataagcaa

SEQ ID NO: 49832 - DNA, 80 bp, synthetic construct
  source 1..80: mol_type = other DNA
caggcccttagcttgagttactccatattgctttgtttccctgactgcccacgtatcgggggacagaattttccattgcg

SEQ ID NO: 49833 - DNA, 80 bp, synthetic construct; identical to SEQ ID NO: 13209
  source 1..80: mol_type = other DNA

SEQ ID NO: 49834 - DNA, 80 bp, synthetic construct
  source 1..80: mol_type = other DNA
gcagacaggaaagcagaatgaaaacccacaggccaaaaatggctgggaaaagattttccaaatcctagtgctgggcacag

SEQ ID NO: 49835 - DNA, 80 bp, synthetic construct
  source 1..80: mol_type = other DNA
aaattctgaggctaatttcagtggagttagaggcttatcccttaggagtggcaatggctggctttaagattcgagaagta

SEQ ID NO: 49836 - DNA, 80 bp, synthetic construct
  source 1..80: mol_type = other DNA
cctcggcccctcctctgcacgtcctggatgtggatggtccccgagtgtgaactagcctgggctctgaccctgggtgctct

SEQ ID NO: 49837 - DNA, 80 bp, synthetic construct; identical to SEQ ID NO: 13210
  source 1..80: mol_type = other DNA

SEQ ID NO: 49838 - DNA, 80 bp, synthetic construct
  source 1..80: mol_type = other DNA
aggagactttccttgaagctgagttgggaatggacatttggacttttttttttaagagttagtaactccgtggagaacca

SEQ ID NO: 49839 - DNA, 80 bp, synthetic construct
  source 1..80: mol_type = other DNA
ggaaggaacatctgaaacatttgctgaaatggagttgaccctttacctggccatagatttgttgcctcacgatttcatta

SEQ ID NO: 49840 - DNA, 80 bp, synthetic construct
  source 1..80: mol_type = other DNA
aatgatgaagtcaaagtccacagagtcagcaagtaagtgtaaaaacctcaggagtccaaggacagtctacgtttctcccc

SEQ ID NO: 49841 - DNA, 80 bp, synthetic construct
  source 1..80: mol_type = other DNA
aacctcacaggcaaatttggtgatctcacctgagctaggaattcggttttttgatgttggttctctttgagccattgtgt

SEQ ID NO: 49842 - DNA, 80 bp, synthetic construct; identical to SEQ ID NO: 13211
  source 1..80: mol_type = other DNA

SEQ ID NO: 49843 - DNA, 80 bp, synthetic construct
  source 1..80: mol_type = other DNA
tgccaaggtggggatgtttcctaggtgccaggtttagcactttgactttgtatatacacacacaggggccaggcgttgtg

SEQ ID NO: 49844 - DNA, 80 bp, synthetic construct
  source 1..80: mol_type = other DNA
cacacacacatactgggtgtggtggctccagtctgtagtcccagctactcgagaagctgaggtgggaggattgcctgaat

SEQ ID NO: 49845 - DNA, 80 bp, synthetic construct
  source 1..80: mol_type = other DNA
ggtcacaggcatttctcaggtccctctcagtggtctttgtctctttttcctggaggtggaggagtctgtacttcatgagg

SEQ ID NO: 49846 - DNA, 80 bp, synthetic construct; identical to SEQ ID NO: 13212
  source 1..80: mol_type = other DNA

SEQ ID NO: 49847 - DNA, 80 bp, synthetic construct
  source 1..80: mol_type = other DNA
gggagagaaggaaggagaggtctggaggctttgggtcctccctcgtgctccttcttcctctgccatttattccctgagtg

SEQ ID NO: 49848 - DNA, 80 bp, synthetic construct
  source 1..80: mol_type = other DNA
catgcagagccggccgtgcgggagaccagagttttattactcaaatcagtctccccgaaaactctgatcagtttttaagg

SEQ ID NO: 49849 - DNA, 80 bp, synthetic construct
  source 1..80: mol_type = other DNA
tagaaatgcaaaaacctggcctggcgtggtggctcacgcctgtaatcccagcactttgggagcccgaggcgggcggatca

SEQ ID NO: 49850 - DNA, 80 bp, synthetic construct
  source 1..80: mol_type = other DNA
gtgaaccgagatcgcgccactgcactccagcctgggcgacagagcgagactccgtcaaaaaaaaaaaaaaaaaaaaaagc

SEQ ID NO: 49851 - DNA, 80 bp, synthetic construct; identical to SEQ ID NO: 13213
  source 1..80: mol_type = other DNA

SEQ ID NO: 49852 - DNA, 80 bp, synthetic construct
  source 1..80: mol_type = other DNA
actgtgccctgtccttccaaccactgccactaggtgaaagcagagagagcatcgcccagatgggctagattcttctcaca

SEQ ID NO: 49853 - DNA, 80 bp, synthetic construct
  source 1..80: mol_type = other DNA
gtgctttgagaataaatggaacagggtcccctgtgtccccactcatttgcgttttcctttttattacagccaaccccttt

SEQ ID NO: 49854 - DNA, 80 bp, synthetic construct
  source 1..80: mol_type = other DNA
ttggtgtggggcttagcttcgtattttcaaattgaaatattctcttccttaacgtccgcataaatccaagttcacaattt

SEQ ID NO: 49855 - DNA, 80 bp, synthetic construct; identical to SEQ ID NO: 13214
  source 1..80: mol_type = other DNA

SEQ ID NO: 49856 - DNA, 80 bp, synthetic construct
  source 1..80: mol_type = other DNA
ctggagtgcagtggcacgatctcagctcactgcaacctccacctcccgggttcaagcaatcctcctgcctcagcctcccg

SEQ ID NO: 49857 - DNA, 80 bp, synthetic construct
  source 1..80: mol_type = other DNA
cactgggcccagcctccttaaccttttaaaaaaggttaaaagtatgctgggcacttcttttcatagcaatacttaaaagc

SEQ ID NO: 49858 - DNA, 80 bp, synthetic construct
  source 1..80: mol_type = other DNA
cactgtggtagtggagatgtgggtgtgtacaacagctaaaattcaacaagttgaacactttaaatagatgcagtttattg

SEQ ID NO: 49859 - DNA, 80 bp, synthetic construct
  source 1..80: mol_type = other DNA
gacacatctggaggtagagggtcatgctgtctgcaacttaccctcacaggctctgaaataacaataatagcagtatattt

SEQ ID NO: 49860 - DNA, 80 bp, synthetic construct; identical to SEQ ID NO: 13215
  source 1..80: mol_type = other DNA

SEQ ID NO: 49861 - DNA, 80 bp, synthetic construct
  source 1..80: mol_type = other DNA
cggggccaaactcggggtgtaaattaggatcctcactgaagcggcgggaccctgagaggctttttcctggccccttagtt

SEQ ID NO: 49862 - DNA, 80 bp, synthetic construct
  source 1..80: mol_type = other DNA
cggtgctgtttccagcgagtcagattccagatcgcgctccagcctggactcggaattcctgccccgcgggtctgcatttt

SEQ ID NO: 49863 - DNA, 80 bp, synthetic construct
  source 1..80: mol_type = other DNA
gaattccgggccacaaaattcaaaacgcttgcgggcaaagccgtgcgcggtggctcaagcctgtaattccagcactttgg

SEQ ID NO: 49864 - DNA, 80 bp, synthetic construct
  source 1..80: mol_type = other DNA
cgggaggcggaggttgctgtgagccgagatcgcgccactgcactccagcctgggcaacaagagcgaaactccgtttcaaa

SEQ ID NO: 49865 - DNA, 80 bp, synthetic construct; identical to SEQ ID NO: 13216
  source 1..80: mol_type = other DNA

SEQ ID NO: 49866 - DNA, 80 bp, synthetic construct
  source 1..80: mol_type = other DNA
ttaaatattcattattattattgaactattaaaagtcttttttggaggcgagctgaatgagaccctttgctggagctggc

SEQ ID NO: 49867 - DNA, 80 bp, synthetic construct
  source 1..80: mol_type = other DNA
gaaaataatctctctaaggtggggacaggaccccagtccctgctgtgcttaataaattatgaggatcaaaataaattatc

SEQ ID NO: 49868 - DNA, 80 bp, synthetic construct
  source 1..80: mol_type = other DNA
gaacttaaaaaaaaaggttgtgaggccaacaaaaaagaaatggacacagttcctgatcctggagggttcatagtctaatg

SEQ ID NO: 49869 - DNA, 80 bp, synthetic construct
  source 1..80: mol_type = other DNA
agctataatcacaccactgcattccaactgagtgacacagcaagactcctctcttaaaaaaataaaataaagtaaatgaa

SEQ ID NO: 49870 - DNA, 80 bp, synthetic construct; identical to SEQ ID NO: 13217
  source 1..80: mol_type = other DNA

SEQ ID NO: 49871 - DNA, 80 bp, synthetic construct
  source 1..80: mol_type = other DNA
gttttaaagtgtacagatcagtggcttctagcataatcacaaggttgtgccaccgtcaccactatctacttgggaagatt

SEQ ID NO: 49872 - DNA, 80 bp, synthetic construct
  source 1..80: mol_type = other DNA
acccgccaccacgcccagctaagttttttgtatttttagtagagacggggtttcactgtgttagcaggatgctctcgatc

SEQ ID NO: 49873 - DNA, 80 bp, synthetic construct
  source 1..80: mol_type = other DNA
tgggagtgaagatgaaacaaaaacatctataactggttgtgatcaattagttgtaaacaccactgcactcagaccagcct

SEQ ID NO: 49874 - DNA, 80 bp, synthetic construct; identical to SEQ ID NO: 13218
  source 1..80: mol_type = other DNA

SEQ ID NO: 49875 - DNA, 80 bp, synthetic construct
  source 1..80: mol_type = other DNA
actttgactcccggagatgaaggagaaagaggaaatcagaagggaccaaggatggtgaagttcttaagagaaactgagga

SEQ ID NO: 49876 - DNA, 80 bp, synthetic construct
  source 1..80: mol_type = other DNA
ttggccctgtgattacccaggaactgaatagagagggggccctgggagacctcagacacttagaggatataagggggtga

SEQ ID NO: 49877 - DNA, 80 bp, synthetic construct
  source 1..80: mol_type = other DNA
ctgagatctggaaacaggtctgcaaatctggtcactggtctcattgcagtaacgctgtgcgcggttgagggagtgtattg

SEQ ID NO: 49878 - DNA, 80 bp, synthetic construct; identical to SEQ ID NO: 13219
  source 1..80: mol_type = other DNA

SEQ ID NO: 49879 - DNA, 80 bp, synthetic construct
  source 1..80: mol_type = other DNA
actaaatttcgacggggtcttctcacgggtttcattcagttggccactgctgagcagctgagaaggtggcgacgtagggg

SEQ ID NO: 49880 - DNA, 80 bp, synthetic construct
  source 1..80: mol_type = other DNA
tcagggcggggctcaggtgtgctgtctggagtgcagggagctggacgccgcctgttcccgccacacctcagccctgcttt

SEQ ID NO: 49881 - DNA, 80 bp, synthetic construct
  source 1..80: mol_type = other DNA
ctagtagctgggactacaggcgcccgccaccacgcccggctaattttttgtgtttttagtagagatggggtttcaccgtg

SEQ ID NO: 49882 - DNA, 80 bp, synthetic construct; identical to SEQ ID NO: 13220
  source 1..80: mol_type = other DNA

SEQ ID NO: 49883 - DNA, 80 bp, synthetic construct
  source 1..80: mol_type = other DNA
tcttgggacccggaggtggtgcttcttgctgctgtggggactgtggggggtcctgactctcaagctgaggggttggagtc

SEQ ID NO: 49884 - DNA, 80 bp, synthetic construct
  source 1..80: mol_type = other DNA
atcttacggcgccctgggtcctgttgctctcccagctccctgctaccccttcctgtgtgctgttctctgatccatttcta

SEQ ID NO: 49885 - DNA, 80 bp, synthetic construct
  source 1..80: mol_type = other DNA
ggggtcttccctccatcccactcccctccagacccccaaggagagccctgatgctaatggcagttgggccttaggcaggg

SEQ ID NO: 49886 - DNA, 80 bp, synthetic construct; identical to SEQ ID NO: 13221
  source 1..80: mol_type = other DNA

SEQ ID NO: 49887 - DNA, 80 bp, synthetic construct
  source 1..80: mol_type = other DNA
cccatctcccctccccaacccagacctaaaacaggctgttgggccagctgttccttgaccttccttcttttcttttggtt

SEQ ID NO: 49888 - DNA, 80 bp, synthetic construct
  source 1..80: mol_type = other DNA
gcacccccaccccttgctttgtttttaatttttaacttttgtttgggtacgtagtagatatgtatgtatatatttatggg

SEQ ID NO: 49889 - DNA, 80 bp, synthetic construct
  source 1..80: mol_type = other DNA
tactcaccctgctgtgctatctactagatcttattcattctaactatatttttgtacccattaaccatccgcactccccc

SEQ ID NO: 49890 - DNA, 80 bp, synthetic construct; identical to SEQ ID NO: 13222
  source 1..80: mol_type = other DNA

SEQ ID NO: 49891 - DNA, 80 bp, synthetic construct
  source 1..80: mol_type = other DNA
tttggaagaacctccacattatttcccacagtggttatactagtttacgttcccaccaacagtgtacaagggttctcttt

SEQ ID NO: 49892 - DNA, 80 bp, synthetic construct
  source 1..80: mol_type = other DNA
ttttgagaaatgactattcagatcttttgctcatttttaagttggattattagatatttttcctatagagttgtttgaga

SEQ ID NO: 49893 - DNA, 80 bp, synthetic construct
  source 1..80: mol_type = other DNA
ctctgcttgtggggtattacttaaaaaatctttgccagtccaatatcttagagagtttccccaatgttttctttcatagt

SEQ ID NO: 49894 - DNA, 80 bp, synthetic construct; identical to SEQ ID NO: 13223
  source 1..80: mol_type = other DNA

SEQ ID NO: 49895 - DNA, 80 bp, synthetic construct
  source 1..80: mol_type = other DNA
ttctatttctgtgaagaatgtcattggtgttttgatagcaattgcattgaatttgtagattgctttgggtaggatggata

SEQ ID NO: 49896 - DNA, 80 bp, synthetic construct
  source 1..80: mol_type = other DNA
aggcgtggtggcatatgcctgtaatcccagctactcaggaaagctgaggcaggagaatcgcttgaacccaggaggcagag

SEQ ID NO: 49897 - DNA, 80 bp, synthetic construct
  source 1..80: mol_type = other DNA
atagtttttattggagagatctttcacttcttcagttaagtctattcctaggtattttattttatttgtagctaatgaaa

SEQ ID NO: 49898 - DNA, 80 bp, synthetic construct; identical to SEQ ID NO: 13224
  source 1..80: mol_type = other DNA

SEQ ID NO: 49899 - DNA, 80 bp, synthetic construct
  source 1..80: mol_type = other DNA
ttccttgtatactcagtttttttagagtttttatcatgaagggatgttaaacttatcaaatgctttttcagtatcaattg

SEQ ID NO: 49900 - DNA, 80 bp, synthetic construct
  source 1..80: mol_type = other DNA
cctcaatgttcatcagggatataggcctgtagttttctttttttgatgtgtctttgcctgattttgatatcaggatattc

SEQ ID NO: 49901 - DNA, 80 bp, synthetic construct
  source 1..80: mol_type = other DNA
gcattagatacattcacatttttgtgcaacccaaaactctgtacccattaatcagtaactccccattcctccctacctct

SEQ ID NO: 49902 - DNA, 80 bp, synthetic construct; identical to SEQ ID NO: 13225
  source 1..80: mol_type = other DNA

SEQ ID NO: 49903 - DNA, 80 bp, synthetic construct
  source 1..80: mol_type = other DNA
cattgcaggcgtgccattttgtatttctagaagcagtatacaggggcttcagtttctctacctccttgccaaacttgctg

SEQ ID NO: 49904 - DNA, 80 bp, synthetic construct
  source 1..80: mol_type = other DNA
agaattggccattgaagtcttgcccatttttctcccccacatagcttctcatggctattttgcccatttttgagtgggtt

SEQ ID NO: 49905 - DNA, 80 bp, synthetic construct
  source 1..80: mol_type = other DNA
tagcttcatgccattctcccgcctcagcctcccgagtagctgggactacaggcgcccgccaccacacccggctaattttt

SEQ ID NO: 49906 - DNA, 80 bp, synthetic construct; identical to SEQ ID NO: 13226
  source 1..80: mol_type = other DNA

SEQ ID NO: 49907 - DNA, 80 bp, synthetic construct
  source 1..80: mol_type = other DNA
ttcatgagtccagtttgtcagttctttctattctatctgtgctttggcgtcatatccatgaaagcactgtcaaaccctat

SEQ ID NO: 49908 - DNA, 80 bp, synthetic construct
  source 1..80: mol_type = other DNA
tccaattttatattatttgaacatccagttcccccagcactatttgctgaaaagatggacttactctttgagaccctgtc

SEQ ID NO: 49909 - DNA, 80 bp, synthetic construct
  source 1..80: mol_type = other DNA
gtgcctcatgaccaccccctcccttgtccccaccatgcccatgatgagtcttttctcaaggcagctcgccttgcctccat

SEQ ID NO: 49910 - DNA, 80 bp, synthetic construct
  source 1..80: mol_type = other DNA
tcccttagggggcttgtggccacccagtcctggcacctgacctacaagtttgccatcttcattcccccttcttctgttca

SEQ ID NO: 49911 - DNA, 80 bp, synthetic construct; identical to SEQ ID NO: 13227
  source 1..80: mol_type = other DNA

SEQ ID NO: 49912 - DNA, 80 bp, synthetic construct
  source 1..80: mol_type = other DNA
ggacacagagaccgaggacttgacagagaatgggcaagacctcaggaggaccctgactcatatcaaggaccagaaaggag

SEQ ID NO: 49913 - DNA, 80 bp, synthetic construct
  source 1..80: mol_type = other DNA
cagggaggcatggaggagggccagggaggggtcgctgctgggctgagttcctcacttgggtggaaaggtgatgggttcgg

SEQ ID NO: 49914 - DNA, 80 bp, synthetic construct
  source 1..80: mol_type = other DNA
tgccccagtcctccagagctcagaccttggctatgaacgtcacaaatttctggaaggaagatgccatgaagaccaagaca

SEQ ID NO: 49915 - DNA, 80 bp, synthetic construct; identical to SEQ ID NO: 13228
  source 1..80: mol_type = other DNA

SEQ ID NO: 49916 - DNA, 80 bp, synthetic construct
  source 1..80: mol_type = other DNA
ccctcctggccccatgacccaggagtccacccttgacatccccctcctcagcatcaatgtggggatcccagagcctgagg

SEQ ID NO: 49917 - DNA, 80 bp, synthetic construct
  source 1..80: mol_type = other DNA
gcttcactggctctgccctttcttctccagtgccccccatggtgaatgtcacctgcagcgaggtctcagagggcaacatc

SEQ ID NO: 49918 - DNA, 80 bp, synthetic construct
  source 1..80: mol_type = other DNA
gagaggagcagaggttcacctgctacatggaacacagcgggaatcacggcactcaccctgtgccctctggtgagcctggg

SEQ ID NO: 49919 - DNA, 80 bp, synthetic construct; identical to SEQ ID NO: 13229
  source 1..80: mol_type = other DNA

SEQ ID NO: 49920 - DNA, 80 bp, synthetic construct
  source 1..80: mol_type = other DNA
tgggagctgcatctccatctacacccataagtgcttcccaagccagggctggggcaaggccttcgaatatccagctgtgg

SEQ ID NO: 49921 - DNA, 80 bp, synthetic construct
  source 1..80: mol_type = other DNA
aatcacgtgctgattgctgagggcctggatgatcatggtgtcagagggaggaaatagtaaaggtggctgtgatctgggga

SEQ ID NO: 49922 - DNA, 80 bp, synthetic construct
  source 1..80: mol_type = other DNA
tgaatagataagcagatgtccctgggccatttgaggagcggggcccagcccctcatcagggcagatgtggtccctgtttt

SEQ ID NO: 49923 - DNA, 80 bp, synthetic construct
  source 1..80: mol_type = other DNA
gggacagtcagaagcatttcccccacagtcaggttgtttgatgggagatgaaaagagacagcagaagttttgtgtttctg

SEQ ID NO: 49924 - DNA, 80 bp, synthetic construct; identical to SEQ ID NO: 13230
  source 1..80: mol_type = other DNA

SEQ ID NO: 49925 - DNA, 80 bp, synthetic construct
  source 1..80: mol_type = other DNA
tctataatcttaataggatttcctctaatactgctgttgtaaagcatattaaataaaacaggaactcaaatttggagccc

SEQ ID NO: 49926 - DNA, 80 bp, synthetic construct
  source 1..80: mol_type = other DNA
ctagggacagagcaggaaggcctcacagcctcaccaagcagcagccctggggtgaagtaagtggaccaggagtaagtgga

SEQ ID NO: 49927 - DNA, 80 bp, synthetic construct
  source 1..80: mol_type = other DNA
cccccaggcttcctgatggggtccccagttaggagctgcctgctcagggctgggaggggaggagtgctgagctgcagata

SEQ ID NO: 49928 - DNA, 80 bp, synthetic construct; identical to SEQ ID NO: 13231
  source 1..80: mol_type = other DNA

SEQ ID NO: 49929 - DNA, 80 bp, synthetic construct
  source 1..80: mol_type = other DNA
agaaaagtccttagggaataaacacaacactgcacccagtggagcatttacccgtttccctcttctccagagcttgtgag

SEQ ID NO: 49930 - DNA, 80 bp, synthetic construct
  source 1..80: mol_type = other DNA
ctcaccagcactttccctctgtttcctgacctatgaaacagagaaaataacatcacttatttattgttgttggatgctgc

SEQ ID NO: 49931 - DNA, 80 bp, synthetic construct
  source 1..80: mol_type = other DNA
agaaggtttgctgagggcattcactccatggtgctcattggagttatctactgggtcatctagagcctattgtttgagga

SEQ ID NO: 49932 - DNA, 80 bp, synthetic construct; identical to SEQ ID NO: 13232
  source 1..80: mol_type = other DNA

SEQ ID NO: 49933 - DNA, 80 bp, synthetic construct
  source 1..80: mol_type = other DNA
aatagctgggattacagacaggcaccaccacacccagctaatttttgtattttttgtagagacggggtttcgccaagttg

SEQ ID NO: 49934 - DNA, 80 bp, synthetic construct
  source 1..80: mol_type = other DNA
taatatattttaatatattacatgtgcagtaattagattatcatgggtgaactttatgagtgagtatcttggtgatgact

SEQ ID NO: 49935 - DNA, 80 bp, synthetic construct
  source 1..80: mol_type = other DNA
ctctttaaatagacatttctggtctgtgttttatttcatgcgtctgggagcggataaagtgtgaggttcagggagaagga

SEQ ID NO: 49936 - DNA, 80 bp, synthetic construct; identical to SEQ ID NO: 13233
  source 1..80: mol_type = other DNA

SEQ ID NO: 49937 - DNA, 80 bp, synthetic construct
  source 1..80: mol_type = other DNA
cctcaactgtctcctatcaggttcttccaggcatcaaggaatagacctgggacattgcctccagtgacatgaacacaccc

SEQ ID NO: 49938 - DNA, 80 bp, synthetic construct
  source 1..80: mol_type = other DNA
cttgttttgggagctcagtgtctggagaggggtgtggagagtaggctttctgcaaaacagtaatcatgacctataaatta

SEQ ID NO: 49939 - DNA, 80 bp, synthetic construct
  source 1..80: mol_type = other DNA
accatcatttgccccagctcagtgataaaggcttcccttccccacataaaatcacagcctgacctttatgatgattgctt

SEQ ID NO: 49940 - DNA, 80 bp, synthetic construct
  source 1..80: mol_type = other DNA
cgcctcacgggttcatgcgattctcctgcctcagcctcccgagtagctgggactacaggcgtctgccaccacgcccggct

SEQ ID NO: 49941 - DNA, 80 bp, synthetic construct; identical to SEQ ID NO: 13234
  source 1..80: mol_type = other DNA

SEQ ID NO: 49942 - DNA, 80 bp, synthetic construct
  source 1..80: mol_type = other DNA
ttaattgccattgcttttcaatggctaaatctgttaattcgttatgggttgcaaaagaattatagtctcagtctctcatt

SEQ ID NO: 49943 - DNA, 80 bp, synthetic construct
  source 1..80: mol_type = other DNA
tgtctctactaaaaacacagaactagccgggagtggtggcgcatgcctgtaatcccagctactcgggaggcggaagtagg

SEQ ID NO: 49944 - DNA, 80 bp, synthetic construct
  source 1..80: mol_type = other DNA
gcaagatgatgagcccagcaaagatgatgagcccaactacatgaaaacaacttctaatttcattcaatcagaaccaacag

SEQ ID NO: 49945 - DNA, 80 bp, synthetic construct; identical to SEQ ID NO: 13235
  source 1..80: mol_type = other DNA

SEQ ID NO: 49946 - DNA, 80 bp, synthetic construct
  source 1..80: mol_type = other DNA
aaagggctgtcgagccaggaactaggaatcaaaacccaaacaagaccacaggaggtagagggtagaaattatgccccagt

SEQ ID NO: 49947 - DNA, 80 bp, synthetic construct
  source 1..80: mol_type = other DNA
ccatgggaagagcatgtgaagatagaggttgcatatggatgcctgccagagggtctccaaggggctggggctccctgtaa

SEQ ID NO: 49948 - DNA, 80 bp, synthetic construct
  source 1..80: mol_type = other DNA
aggacccagcctgccaaaagcagctgtttctttgaacagagaaaaaaaacagacaatgttaattaagagcaagacagtgt

SEQ ID NO: 49949 - DNA, 80 bp, synthetic construct
  source 1..80: mol_type = other DNA
ttctatctctgcccaactatatacagattgtttcacagggaagtcctactaaaccttcaaagaaggttattggacttatt

SEQ ID NO: 49950 - DNA, 80 bp, synthetic construct; identical to SEQ ID NO: 13236
  source 1..80: mol_type = other DNA

SEQ ID NO: 49951 - DNA, 80 bp, synthetic construct
  source 1..80: mol_type = other DNA
aatcactgtagatgaaatctaacactacacctgacctacatttcttcagttatctccacttttaagaatttgtgatcagt

SEQ ID NO: 49952 - DNA, 80 bp, synthetic construct
  source 1..80: mol_type = other DNA
tcgagaccatcctggctaacacagtgaaaccccgtctctactaaaaatacaaaaaattagccgggtgtggtggcgggcac

SEQ ID NO: 49953 - DNA, 80 bp, synthetic construct
  source 1..80: mol_type = other DNA
tatacaccatggtacgctacccagccaaaaaaacaagaacgaaatcatgtccttcacagcaacatggatggaggtggaga

SEQ ID NO: 49954 - DNA, 80 bp, synthetic construct; identical to SEQ ID NO: 13237
  source 1..80: mol_type = other DNA

SEQ ID NO: 49955 - DNA, 80 bp, synthetic construct
  source 1..80: mol_type = other DNA
gtaggcctcttggaggagccatgtgagcagacttgagaaggagagacacagccatgcagatatttgaaggaagaaccttc

SEQ ID NO: 49956 - DNA, 80 bp, synthetic construct
  source 1..80: mol_type = other DNA
agggaaaggcactggcatgtggaggaagactaggagaggaggggaggctgaagtgtgtcccactctcactccacctctct

SEQ ID NO: 49957 - DNA, 80 bp, synthetic construct
  source 1..80: mol_type = other DNA
ctggactcaagactcaaggggaccagacccaggaagatgagacatatcagggctgggcagctgtggggggccctcccaga

SEQ ID NO: 49958 - DNA, 80 bp, synthetic construct; identical to SEQ ID NO: 13238
  source 1..80: mol_type = other DNA

SEQ ID NO: 49959 - DNA, 80 bp, synthetic construct
  source 1..80: mol_type = other DNA
atgggcactgaaatggaagggtagggagacagaagaggcaggtatttccaaatcaccatttttctgtcatggtccaaggg

SEQ ID NO: 49960 - DNA, 80 bp, synthetic construct
  source 1..80: mol_type = other DNA
tcctccctccaccggcttcttcctcttgcctattctggtcaattctctaagtgaatcatgtaaccaaaatgtgaaatgtt

SEQ ID NO: 49961 - DNA, 80 bp, synthetic construct
  source 1..80: mol_type = other DNA
tctctctttttttttttttttttttttttttttgagacggagtcttgctctgtcgcccaggctggagtgcagtggcatga

SEQ ID NO: 49962 - DNA, 80 bp, synthetic construct
  source 1..80: mol_type = other DNA
tcctgacctcaggtgatccgcctgcctcagcctgccaaagttctgggattacaggcatgagccaccatgcccagctgaat

SEQ ID NO: 49963 - DNA, 80 bp, synthetic construct; identical to SEQ ID NO: 13239
  source 1..80: mol_type = other DNA

SEQ ID NO: 49964 - DNA, 80 bp, synthetic construct
  source 1..80: mol_type = other DNA
atagtattggattatgacccaaaatataaataaatattcattccacactgatttatttaatcaaaaataattaaataaat

SEQ ID NO: 49965 - DNA, 80 bp, synthetic construct
  source 1..80: mol_type = other DNA
aataactttacagtggagaaatgtagcagacactaccaagcaatcagagtcatgttaacatcttgccccccagaaatgat

SEQ ID NO: 49966 - DNA, 80 bp, synthetic construct
  source 1..80: mol_type = other DNA
tcttcaaaactttcaaggtcatgaaaacaggtaaagactgagaaactcatgatcagaaagactagggagacccaaaagct

SEQ ID NO: 49967 - DNA, 80 bp, synthetic construct; identical to SEQ ID NO: 13240
  source 1..80: mol_type = other DNA

SEQ ID NO: 49968 - DNA, 80 bp, synthetic construct
  source 1..80: mol_type = other DNA
tccaggcacccatcaccacgctcggctagtttttgtatttttagtagagatggggtttcgccatgttggccagggtggtc

SEQ ID NO: 49969 - DNA, 80 bp, synthetic construct
  source 1..80: mol_type = other DNA
agagaagcctgggcaacatagtgagaccttgtcttataaaaaaaattaatttaaaaaatgaaatgaatagacatatatta

SEQ ID NO: 49970 - DNA, 80 bp, synthetic construct
  source 1..80: mol_type = other DNA
aatttcataatcataaacttaatgctgcaatccagctaggcatggaagggaacaaggaaaacatgaaacccaaagggaac

SEQ ID NO: 49971 - DNA, 80 bp, synthetic construct
  source 1..80: mol_type = other DNA
gtgggatcacctgaggtcaggagttcaagaccagcctgaccaacacggagaaaccccgtctctactaaaaatacagaatt

SEQ ID NO: 49972 - DNA, 80 bp, synthetic construct; identical to SEQ ID NO: 13241
  source 1..80: mol_type = other DNA

SEQ ID NO: 49973 - DNA, 80 bp, synthetic construct
  source 1..80: mol_type = other DNA
atcacctgaggtcaggagttcaagaccagcctgaccaacatggtgaaaccctgtctctaataaaaatacaaatattagcc

SEQ ID NO: 49974 - DNA, 80 bp, synthetic construct
  source 1..80: mol_type = other DNA
gcgacagagttaagactccatctcaaaaaaaagagaaaaaagaaaaaccgggaatcatttgtgttgggtccagcatttgc

SEQ ID NO: 49975 - DNA, 80 bp, synthetic construct
  source 1..80: mol_type = other DNA
tcaaatcctttctctccagtgctcagagcacgaaagttttctgctgtctttggaaacttgtctgcaaacagcttgaagga

SEQ ID NO: 49976 - DNA, 80 bp, synthetic construct; identical to SEQ ID NO: 13242
  source 1..80: mol_type = other DNA

SEQ ID NO: 49977 - DNA, 80 bp, synthetic construct
  source 1..80: mol_type = other DNA
aactggctaaagaagaaaatcacatgatcatatcaatagaggcagaaaaagcaattgacaacatccaacacccattcatg

SEQ ID NO: 49978 - DNA, 80 bp, synthetic construct
  source 1..80: mol_type = other DNA
caacacagcttttcaacgttgtactggaagtcctagctaaagtagtaagacaagaaaaggaactaaaaggtatacaaatt

SEQ ID NO: 49979 - DNA, 80 bp, synthetic construct
  source 1..80: mol_type = other DNA
tatcagcaatgagcacgtagaattcgccatttaatttttttttttcaagacggagtcttgttctgtcgcccaggctagag

SEQ ID NO: 49980 - DNA, 80 bp, synthetic construct
  source 1..80: mol_type = other DNA
ctgatctcgaacttctgacctcatgttctgcctgcctcagcctcccaaagtgctgggattacaggcgtgagccaccgtgc

SEQ ID NO: 49981 - DNA, 80 bp, synthetic construct; identical to SEQ ID NO: 13243
  source 1..80: mol_type = other DNA

SEQ ID NO: 49982 - DNA, 80 bp, synthetic construct
  source 1..80: mol_type = other DNA
acagagtggtgattagcatagccattgtgggaaacagtatggaggttctgcaaaaattttaaaaatagaaataccacatg

SEQ ID NO: 49983 - DNA, 80 bp, synthetic construct
  source 1..80: mol_type = other DNA
ctgctgtctcagcttcccaattatctgggattataagcacgagacactgcacctggctgcagcattattctcaatagcca

SEQ ID NO: 49984 - DNA, 80 bp, synthetic construct
  source 1..80: mol_type = other DNA
ggcacagaaagacaaatacaatctcacttatatgtggagtatagaaaaagccagactcataaatagagagtaaactggtg

SEQ ID NO: 49985 - DNA, 80 bp, synthetic construct; identical to SEQ ID NO: 13244
  source 1..80: mol_type = other DNA

SEQ ID NO: 49986 - DNA, 80 bp, synthetic construct
  source 1..80: mol_type = other DNA
ccacataaatacaaggagcaaagacaatacaataaagatagtcttttcagcaaatgctgctggaacaactggacagccat

SEQ ID NO: 49987 - DNA, 80 bp, synthetic construct
  source 1..80: mol_type = other DNA
aagactttcccatagaggcaacaatgattcctgtcagtcacccagtcctgccaatccactgggtaggatacaatattgag

SEQ ID NO: 49988 - DNA, 80 bp, synthetic construct
  source 1..80: mol_type = other DNA
ataacaaaaacaacaataaataaataaacacagtaacataatctatgtgtcttagtccgtttcctgccgctataacagaa

SEQ ID NO: 49989 - DNA, 80 bp, synthetic construct; identical to SEQ ID NO: 13245
  source 1..80: mol_type = other DNA

SEQ ID NO: 49990 - DNA, 80 bp, synthetic construct
  source 1..80: mol_type = other DNA
tatgagggcctggctgcagtatcatcccatagtgagaggtggaagggcaaagaggctgaactgatttctatcatgccata

SEQ ID NO: 49991 - DNA, 80 bp, synthetic construct
  source 1..80: mol_type = other DNA
gtctctactaaaaatacaaaaattagctgggcgtggtggcatgtgcctgtaattccaactactcaggaggctgagacagg

SEQ ID NO: 49992 - DNA, 80 bp, synthetic construct
  source 1..80: mol_type = other DNA
tttggtggggacattccactttagcactaggtattctggtttatgtatttttttagcttaattccttcatttctacaatt

SEQ ID NO: 49993 - DNA, 80 bp, synthetic construct
  source 1..80: mol_type = other DNA
ctcagcctcccgagtggctgggactacaggcgtgcaccaccatgcccggctaatttttgtatttttagtagagacggggt

SEQ ID NO: 49994 - DNA, 80 bp, synthetic construct; identical to SEQ ID NO: 13246
  source 1..80: mol_type = other DNA

SEQ ID NO: 49995 - DNA, 80 bp, synthetic construct
  source 1..80: mol_type = other DNA
ttgtcttgcaaaagtctcatttgttgttttttctaaatggctgctaatcttttaaattaacagatagagggccaggcacg

SEQ ID NO: 49996 - DNA, 80 bp, synthetic construct
  source 1..80: mol_type = other DNA
tcttgggaggcagaggcataagaattgcttgaacccggcaagcggaggttccagcaagcagagattgtgccattgcactc

SEQ ID NO: 49997 - DNA, 80 bp, synthetic construct
  source 1..80: mol_type = other DNA
actgcaacctccgcctcccaggttcaagcaattctcctgcctcagcctcacaagtagctgggattacaggtggctaccac

SEQ ID NO: 49998 - DNA, 80 bp, synthetic construct; identical to SEQ ID NO: 13247
  source 1..80: mol_type = other DNA

SEQ ID NO: 49999 - DNA, 80 bp, synthetic construct
  source 1..80: mol_type = other DNA
tctttttccacttaagtgggaaaaagtcagctaatgaggaacgtaaagtctttggcctcatctaaaggtgctttggcccg

SEQ ID NO: 50000 - DNA, 80 bp, synthetic construct
  source 1..80: mol_type = other DNA
gcagctgtccactctccagcaatcctgccttctggggcatggttttctaaggaccttcctgttcctagatgatcaaaatt

SEQ ID NO: 50001 - DNA, 80 bp, synthetic construct
  source 1..80: mol_type = other DNA
tcaggaggtgttgggggaggctcactagtccaacagaacttgaggccagttgtaccagtgtcatatcccaggagccaagg

SEQ ID NO: 50002 - DNA, 80 bp, synthetic construct; identical to SEQ ID NO: 13248
  source 1..80: mol_type = other DNA

SEQ ID NO: 50003 - DNA, 80 bp, synthetic construct
  source 1..80: mol_type = other DNA
actacaggtgcccatcaccatgcccagctaatttttgtatttttagtagagatgaggtttcaccatgttggccaggctaa

SEQ ID NO: 50004 - DNA, 80 bp, synthetic construct
  source 1..80: mol_type = other DNA
ttttgctgggggagggtcttgcctccatggatcaggggcatggctgctgaaggctgctttgacaacttcttaaaataaga

SEQ ID NO: 50005 - DNA, 80 bp, synthetic construct
  source 1..80: mol_type = other DNA
gctcatggtgtcccaaaacaatcacaatagttaacttcagtaactgattacaggtcactgtaacaagtataataatgaaa

SEQ ID NO: 50006 - DNA, 80 bp, synthetic construct; identical to SEQ ID NO: 13249
  source 1..80: mol_type = other DNA

SEQ ID NO: 50007 - DNA, 80 bp, synthetic construct
  source 1..80: mol_type = other DNA
ccagtttcctcaggtgcaaaccagtgaggtaattcctaccttgcagagtgaagtgagaaaagacagtgttaagaaatgcc

SEQ ID NO: 50008 - DNA, 80 bp, synthetic construct
  source 1..80: mol_type = other DNA
acaaaaaattagccgggcgtagtggcgagcacctgtagtcccagctcctcgggagggtgaggcaggagaatggcgtgaac

SEQ ID NO: 50009 - DNA, 80 bp, synthetic construct
  source 1..80: mol_type = other DNA
ctttcctttctgtctggcagcagccactgggtaaaccaagatggtgcatacaagtacatccagaagctatggaagaagca

SEQ ID NO: 50010 - DNA, 80 bp, synthetic construct
  source 1..80: mol_type = other DNA
gcaaggttatgttacatataagcgccacggtggctgaaaatctagttcctaagaaggcaacttaacagcaagcctgtcta

SEQ ID NO: 50011 - DNA, 80 bp, synthetic construct; identical to SEQ ID NO: 13250
  source 1..80: mol_type = other DNA

SEQ ID NO: 50012 - DNA, 80 bp, synthetic construct
  source 1..80: mol_type = other DNA
ctaataaacactagatcaaaaaaaaaaaatcacagacctgtggtaggctgggcaccagtgctctaaagcaagttctgcct

SEQ ID NO: 50013 - DNA, 80 bp, synthetic construct
  source 1..80: mol_type = other DNA
ggagcgaaccagttcctggtggccgttggacagctcacacagctccctgccaggtcacccgccatggtcctccctctgcc

SEQ ID NO: 50014 - DNA, 80 bp, synthetic construct
  source 1..80: mol_type = other DNA
ggcaccacaggtaggaacagagggtgtgagaatttacactggggtgtgggaaaaaaaaaccctcaatcccaccctgcacc

SEQ ID NO: 50015 - DNA, 80 bp, synthetic construct; identical to SEQ ID NO: 13251
  source 1..80: mol_type = other DNA

SEQ ID NO: 50016 - DNA, 80 bp, synthetic construct
  source 1..80: mol_type = other DNA
cagcctgcaacaaagcttcccagggcctcagccccctgccctggctgatgctccctcccttaattccctgaccagggccc

SEQ ID NO: 50017 - DNA, 80 bp, synthetic construct
  source 1..80: mol_type = other DNA
gagagccttggaggaggcgcctaagtttcccccagtgcccacagcaccctccggcgctgaaaatacacgcaccacccacc

SEQ ID NO: 50018 - DNA, 80 bp, synthetic construct
  source 1..80: mol_type = other DNA
ataggaattcaccctggaccatgccctaaaataacctcaccccaaatacaataaagggacgaagcacttatagataccac

SEQ ID NO: 50019 - DNA, 80 bp, synthetic construct; identical to SEQ ID NO: 13252
  source 1..80: mol_type = other DNA

SEQ ID NO: 50020 - DNA, 80 bp, synthetic construct
  source 1..80: mol_type = other DNA
tgagagaagacaagacaccccacataaaggtcagaaaaacatcccaacacagcatcaaagaccagggggcatgaaccagt

SEQ ID NO: 50021 - DNA, 80 bp, synthetic construct
  source 1..80: mol_type = other DNA
gtctatctcatcaggcagctcactaatattgacctcaaagcgatcctgcacatcattgaggatcttggcatcattctcat

SEQ ID NO: 50022 - DNA, 80 bp, synthetic construct
  source 1..80: mol_type = other DNA
ttttcagcctgtgaggtttacccgatgcaggtaggtgtcagaatcctcaggcatgtcataattaaaagcaatgttcaccc

SEQ ID NO: 50023 - DNA, 80 bp, synthetic construct
  source 1..80: mol_type = other DNA
ttcccttctctcaactgtctttttctcccaaggacacaaaatatctttcccatcttcagctcacctctcctcctggggca

SEQ ID NO: 50024 - DNA, 80 bp, synthetic construct; identical to SEQ ID NO: 13253
  source 1..80: mol_type = other DNA

SEQ ID NO: 50025 - DNA, 80 bp, synthetic construct
  source 1..80: mol_type = other DNA
ctggaggggtaactgatattcctgctcaccaaaacattaaacctaagggagctatcctaattctagaaagcagttttaaa

SEQ ID NO: 50026 - DNA, 80 bp, synthetic construct
  source 1..80: mol_type = other DNA
ggaccacaggtgcacaccaccacgcccagctactttttttattttttatttttactatttgtagagacgggcgtctccct

SEQ ID NO: 50027 - DNA, 80 bp, synthetic construct
  source 1..80: mol_type = other DNA
taacatgcccccaaacatcgtttcaagacttttaacaacttcctaaaatccttcaaggacttttggagacaagatctcac

SEQ ID NO: 50028 - DNA, 80 bp, synthetic construct; identical to SEQ ID NO: 13254
  source 1..80: mol_type = other DNA

SEQ ID NO: 50029 - DNA, 80 bp, synthetic construct
  source 1..80: mol_type = other DNA
catgctcagcccctaagatatttataccctcattattctctcccacatcacacatgtgatttcctcaataaaagtgtact

SEQ ID NO: 50030 - DNA, 80 bp, synthetic construct
  source 1..80: mol_type = other DNA
ttgtccttcagtttcacgtagtactgctgcaacccatgcagcgtcaacttcgtctcatcatccacgaagatctccattgg

SEQ ID NO: 50031 - DNA, 80 bp, synthetic construct
  source 1..80: mol_type = other DNA
ctgtggtctctctcacattacatctaatttccttcctatcagatgagttttaagactgcccaactaaaaactatcatggg

SEQ ID NO: 50032 - DNA, 80 bp, synthetic construct; identical to SEQ ID NO: 13255
  source 1..80: mol_type = other DNA

SEQ ID NO: 50033 - DNA, 80 bp, synthetic construct
  source 1..80: mol_type = other DNA
tgactaagaattaaaccatctacaggtttacaggaaaggtatcagtaagtggtgttaaaataccaaattcagagcagcag

SEQ ID NO: 50034 - DNA, 80 bp, synthetic construct
  source 1..80: mol_type = other DNA
atacctcactgcattcatctttaaaattaaaaaaccccctgaaggggaggaaagtaacaaagacagaaattaccacaact

SEQ ID NO: 50035 - DNA, 80 bp, synthetic construct
  source 1..80: mol_type = other DNA
ccaaagcccaactttcctaacactttttatactatcctgggggaagatagttaatatgaagacccagaggacaaaatagg

SEQ ID NO: 50036 - DNA, 80 bp, synthetic construct
  source 1..80: mol_type = other DNA
aaaccctcctgcctcagcttcccaagtagctgggactacaggcatgcgccaccacgcccggtttttctggtagagacaaa

SEQ ID NO: 50037 - DNA, 80 bp, synthetic construct; identical to SEQ ID NO: 13256
  source 1..80: mol_type = other DNA

SEQ ID NO: 50038 - DNA, 80 bp, synthetic construct
  source 1..80: mol_type = other DNA
ggaaacggggcacggcacgcgttgggttcaggaaaaaaaccgggaacggaaaaagaggctggtttggtcctcagcttcct

SEQ ID NO: 50039 - DNA, 80 bp, synthetic construct
  source 1..80: mol_type = other DNA
tgaggtgccaaaggcccccacccctggaggtggggaaggggaggattcatttgtgctgatgctcttcttttggacatgcc

SEQ ID NO: 50040 - DNA, 80 bp, synthetic construct
  source 1..80: mol_type = other DNA
ctgccctcccccaaagggagaagaggttcaaaaatgttgtgatttatgaaaaagtcgaacactacccgctctcacattaa

SEQ ID NO: 50041 - DNA, 80 bp, synthetic construct; identical to SEQ ID NO: 13257
  source 1..80: mol_type = other DNA

SEQ ID NO: 50042 - DNA, 80 bp, synthetic construct
  source 1..80: mol_type = other DNA
gacttcccagtgaggtgaagattgctggaaatagtaacaacacaatggaaagagcaatggacttggaatcaagaagtggg

SEQ ID NO: 50043 - DNA, 80 bp, synthetic construct
  source 1..80: mol_type = other DNA
cagccttcagcagactacaaatatcaagcacatattatattccagatatcagagtccatctatgactctctggattactt

SEQ ID NO: 50044 - DNA, 80 bp, synthetic construct
  source 1..80: mol_type = other DNA
ttcaccaagattcaattcttacagaaaaatcttccattaaccccacctggcacactagaataccacatcacacaaactgc

SEQ ID NO: 50045 - DNA, 80 bp, synthetic construct
  source 1..80: mol_type = other DNA
atctccgctatgactcccagtatatgaatctataatgaaaacggtggtggtggtgatgacttatgcctaaaattatcaaa

SEQ ID NO: 50046 - DNA, 80 bp, synthetic construct; identical to SEQ ID NO: 13258
  source 1..80: mol_type = other DNA

SEQ ID NO: 50047 - DNA, 80 bp, synthetic construct
  source 1..80: mol_type = other DNA
tcagcacctcttcatccttcttgatagacagaccaccaaaaaaaacagcaacctgccgagccagaagcaaagagtctcaa

SEQ ID NO: 50048 - DNA, 80 bp, synthetic construct
  source 1..80: mol_type = other DNA
catggctagtcggagcagtcaggacaataattcagttctactgacttaatctaaccaacttccttcatttatgaggccag

SEQ ID NO: 50049 - DNA, 80 bp, synthetic construct
  source 1..80: mol_type = other DNA
aaaaagaaataaaataaataaaaataaaataaagccaggcccagtggctcacgcctgtaatcccagcagtttgggaggtc

SEQ ID NO: 50050 - DNA, 80 bp, synthetic construct
  source 1..80: mol_type = other DNA
ggaggtggagattgcagtgaggcgagattgagccactgtactccagcctggatgacagagcgagactccatctcaaaaaa

SEQ ID NO: 50051 - DNA, 80 bp, synthetic construct; identical to SEQ ID NO: 13259
  source 1..80: mol_type = other DNA

SEQ ID NO: 50052 - DNA, 80 bp, synthetic construct
  source 1..80: mol_type = other DNA
tcgagaccagcctggccaacatggcgaaaccctgtcactactaaaaaaaaacaaaaattagccaggcatgatggcacact

SEQ ID NO: 50053 - DNA, 80 bp, synthetic construct
  source 1..80: mol_type = other DNA
ataagtcgaccagatttgtggcataacaggagatacagtatcacctatgaaggattcttgccaaaaatgcttaacttcaa

SEQ ID NO: 50054 - DNA, 80 bp, synthetic construct
  source 1..80: mol_type = other DNA
cagcctcccaagcaggtgggactataggtgtgtgccaccatgcacggctaatttttgcatttttagtagagagagggttt

SEQ ID NO: 50055 - DNA, 80 bp, synthetic construct
  source 1..80: mol_type = other DNA
tcacacaccactggagctgttttaaagtttccggctttctctgccacataccccaaaattattaaactgatatgattcaa

SEQ ID NO: 50056 - DNA, 80 bp, synthetic construct; identical to SEQ ID NO: 13260
  source 1..80: mol_type = other DNA

SEQ ID NO: 50057 - DNA, 80 bp, synthetic construct
  source 1..80: mol_type = other DNA
acggagacatatggtaaatgtagctcttcattatcccctctagggaagtgactgtcacaaaaacacacctgggccgataa

SEQ ID NO: 50058 - DNA, 80 bp, synthetic construct
  source 1..80: mol_type = other DNA
tgtagctaggacaaaaacacccttcccttatagtcctaaccaaaatcccctccccagcactctccccaaatatacctgcc

SEQ ID NO: 50059 - DNA, 80 bp, synthetic construct
  source 1..80: mol_type = other DNA
agtctccagataactctacctttttcaccatgccaagcccatttcttaccactcaattctcaaagtctagtatttacctg

SEQ ID NO: 50060 - DNA, 80 bp, synthetic construct
  source 1..80: mol_type = other DNA
agtaacaaaccccttgcatctaccaaccgctcaccttcaatgatcctagctctgtccttatttttcttaatctgtaacaa

SEQ ID NO: 50061 - DNA, 80 bp, synthetic construct; identical to SEQ ID NO: 13261
  source 1..80: mol_type = other DNA

SEQ ID NO: 50062 - DNA, 80 bp, synthetic construct
  source 1..80: mol_type = other DNA
tcctctatccaaaattgtttttgatacttatcccctgattttttcttcctcactgtcgccccggctggtgcacagtggtg

SEQ ID NO: 50063 - DNA, 80 bp, synthetic construct
  source 1..80: mol_type = other DNA
agccactgcacctggccctgatctagccttaagtataaacccttaccaccacctgagcaacgacaaacacatctttgtat

SEQ ID NO: 50064 - DNA, 80 bp, synthetic construct
  source 1..80: mol_type = other DNA
aaagccagagctgtggatggagacataggagcccttgacatccttcttggcaggggcctcagccccatctcccccagctg

SEQ ID NO: 50065 - DNA, 80 bp, synthetic construct
  source 1..80: mol_type = other DNA
gaaaacaaggggtgaagagtaggggattgaggaacagcaaaggaaaacaaagatactatttctaacagaagagctggagg

SEQ ID NO: 50066 - DNA, 80 bp, synthetic construct; identical to SEQ ID NO: 13262
  source 1..80: mol_type = other DNA

SEQ ID NO: 50067 - DNA, 80 bp, synthetic construct
  source 1..80: mol_type = other DNA
aacttagtaaagtggaaaatggagatgacaagtagagtcctgaaaagtcctcaaaggaagactccgctttccctattata

SEQ ID NO: 50068 - DNA, 80 bp, synthetic construct
  source 1..80: mol_type = other DNA
cgctgtttaagcaagccttgtgtaattagcatgggggggaggggcggtgcaagacaaatggctcggccacaaaaaaacaa

SEQ ID NO: 50069 - DNA, 80 bp, synthetic construct
  source 1..80: mol_type = other DNA
agactccttttggagaaacatacaatgacaccaatcgtatcgtaaacacttggaaggcactccaaattaagttgggcaag

SEQ ID NO: 50070 - DNA, 80 bp, synthetic construct; identical to SEQ ID NO: 13263
  source 1..80: mol_type = other DNA

SEQ ID NO: 50071 - DNA, 80 bp, synthetic construct
  source 1..80: mol_type = other DNA
gcagatggaaacggattgtagcgaaggccaaagcttacctaaacagggagagcgcgtatggcggcagcaacagcgacgaa

SEQ ID NO: 50072 - DNA, 80 bp, synthetic construct
  source 1..80: mol_type = other DNA
aaatttgttttaaaaccgtttctaacttcactgctaccgccagtaacaaaagatataaaggaaactaacgtctccccccc

SEQ ID NO: 50073 - DNA, 80 bp, synthetic construct
  source 1..80: mol_type = other DNA
tgaaggtgacctgaggactgctgggcacgcactaggaaccggcaggccctagctgaggggagggaggagggaagtctcag

SEQ ID NO: 50074 - DNA, 80 bp, synthetic construct; identical to SEQ ID NO: 13264
  source 1..80: mol_type = other DNA

SEQ ID NO: 50075 - DNA, 80 bp, synthetic construct
  source 1..80: mol_type = other DNA
cgccaccacgcccagcaaatttttgtttttttagtagagacggggcttcacccatgtatgacctcaggtgatccacccac

SEQ ID NO: 50076 - DNA, 80 bp, synthetic construct
  source 1..80: mol_type = other DNA
atggggagctacaaaagtaagacctgatgtcctgctgtgtaataaaacaacaaacgtttggccctctccctgttaacata

SEQ ID NO: 50077 - DNA, 80 bp, synthetic construct
  source 1..80: mol_type = other DNA
tggttagtaaatacactgcaggttaccttattggttcaaattcttggtgaagtaagcttgtcttcagtgacaaatgaagt

SEQ ID NO: 50078 - DNA, 80 bp, synthetic construct; identical to SEQ ID NO: 13265
  source 1..80: mol_type = other DNA

SEQ ID NO: 50079 - DNA, 80 bp, synthetic construct
  source 1..80: mol_type = other DNA
agtccagggggtcaaggctgccgtgagctggaactccagcctgggcaacacagcaggaccttgtctcaaaaaaccagtag

SEQ ID NO: 50080 - DNA, 80 bp, synthetic construct
  source 1..80: mol_type = other DNA
tctccaagaagtttcaaaggatagccatttgggctgtttagggaatatgtaaacaaaaaacaagaaagtgactgaaggcc

SEQ ID NO: 50081 - DNA, 80 bp, synthetic construct
  source 1..80: mol_type = other DNA
tccagcaacttgggaggctgaggcaggagaatcgcttgaacctgggaggcagaggttgcaatgagctgagatcacgccat

SEQ ID NO: 50082 - DNA, 80 bp, synthetic construct; identical to SEQ ID NO: 13266
  source 1..80: mol_type = other DNA

SEQ ID NO: 50083 - DNA, 80 bp, synthetic construct
  source 1..80: mol_type = other DNA
gaggggctaaatgtagtcatctcctctttttggagatcagaaggtctctgggaaaagagaagaaccaatttttcagaaaa

SEQ ID NO: 50084 - DNA, 80 bp, synthetic construct
  source 1..80: mol_type = other DNA
actgaatcactgctacaacatgcaaggaactgtgctagactttacagaatgattcctaatcattgaagcaaccctcacaa

SEQ ID NO: 50085 - DNA, 80 bp, synthetic construct
  source 1..80: mol_type = other DNA
agacactgaagtcaggatgttttccacattcctacttccccatattacaaatttcacagagggtttaggtgagaatgact

SEQ ID NO: 50086 - DNA, 80 bp, synthetic construct
  source 1..80: mol_type = other DNA
tggaaagaagacagggattatggtgggaggtgattttgattggaggatttctttgagggagggaactggcagaaggagtc

SEQ ID NO: 50087 - DNA, 80 bp, synthetic construct; identical to SEQ ID NO: 13267
  source 1..80: mol_type = other DNA

SEQ ID NO: 50088 - DNA, 80 bp, synthetic construct
  source 1..80: mol_type = other DNA
accgtaatatccccaccacctcaccatccatgaccataaaactctaccctccaccacaaatgttaatcatactccacata

SEQ ID NO: 50089 - DNA, 80 bp, synthetic construct
  source 1..80: mol_type = other DNA
gagtcacccttacacacctcactagatgcacccaccaacttgcagtggggtctcaacccgactctgcctcaactcaccgc

SEQ ID NO: 50090 - DNA, 80 bp, synthetic construct
  source 1..80: mol_type = other DNA
gagtcagtcccttccagaaagttatacagccttctctcagccaaccaggtgccagattctaatatccatccatttcttcc

SEQ ID NO: 50091 - DNA, 80 bp, synthetic construct; identical to SEQ ID NO: 13268
  source 1..80: mol_type = other DNA

SEQ ID NO: 50092 - DNA, 80 bp, synthetic construct
  source 1..80: mol_type = other DNA
cgagtgtctctcccaatctcatcctcctattgatgactggtcctcctctccagcacttcttgctcaggcagtacccaaag

SEQ ID NO: 50093 - DNA, 80 bp, synthetic construct
  source 1..80: mol_type = other DNA
agaaggagaacttgattggtggtaacagaggaagcataaagggttgtgaatgcggtgaaaaggtaaggatgtcatcatgc

SEQ ID NO: 50094 - DNA, 80 bp, synthetic construct
  source 1..80: mol_type = other DNA
tacatatttctcaagtccaaatttttgcatctcacttgccccatcctacgatagtcttcttccgtcttttgtctgtattt

SEQ ID NO: 50095 - DNA, 80 bp, synthetic construct
  source 1..80: mol_type = other DNA
ttcgtccatcactgaaccatctcctctctctgccaagttagaggaggcgggaaaaaacctccaaataactctcttttctc

SEQ ID NO: 50096 - DNA, 80 bp, synthetic construct; identical to SEQ ID NO: 13269
  source 1..80: mol_type = other DNA

SEQ ID NO: 50097 - DNA, 80 bp, synthetic construct
  source 1..80: mol_type = other DNA
ctgtgactttttaaaactcagatttctgctgataaaaattttccccatccggccctgttgggtttttttaaagttctttg

SEQ ID NO: 50098 - DNA, 80 bp, synthetic construct
  source 1..80: mol_type = other DNA
tttcaaatctatcatctgataaaggatcagggttaggttaggcctcatctcttgctgaagatattaaaaaaagacggaac

SEQ ID NO: 50099 - DNA, 80 bp, synthetic construct
  source 1..80: mol_type = other DNA
gcaggacggctggtccgggcccaggccctcctccagcgacacccaggcctcgatgtagatgctgggcagcccccaccact

SEQ ID NO: 50100 - DNA, 80 bp, synthetic construct; identical to SEQ ID NO: 13270
  source 1..80: mol_type = other DNA

SEQ ID NO: 50101 - DNA, 80 bp, synthetic construct
  source 1..80: mol_type = other DNA
ttagtagctactttgtttcttgacagattgtttgctcgtagccaaaaagtagcatagaaggtaggctctggagttagatt

SEQ ID NO: 50102 - DNA, 80 bp, synthetic construct
  source 1..80: mol_type = other DNA
ctcacaacaatcttaggaggtgagtactgatattatcccccatttcccagctgaggaaacagggcatagagaagtcattt

SEQ ID NO: 50103 - DNA, 80 bp, synthetic construct
  source 1..80: mol_type = other DNA
ttttgagaatcaactgacatagtacataattagagtacctggcacacacgataagcacttggtatatgctggcgattgtt

SEQ ID NO: 50104 - DNA, 80 bp, synthetic construct
  source 1..80: mol_type = other DNA
agtgattctcatgcgtcagcctcccaagtagctaggattacaggcgcatgccaccacgcccagctaatttttatattttt

SEQ ID NO: 50105 - DNA, 80 bp, synthetic construct; identical to SEQ ID NO: 13271
  source 1..80: mol_type = other DNA

SEQ ID NO: 50106 - DNA, 80 bp, synthetic construct
  source 1..80: mol_type = other DNA
ctacctaatatagagtgagtgtacttttaggtcagccctatcaagtcccaaaaacatttgaattctgcaaaacctttggc

SEQ ID NO: 50107 - DNA, 80 bp, synthetic construct
  source 1..80: mol_type = other DNA
gagttcgagaccagcctgaccaacatagtgaaacccccatctgtactaaaaatacaaaaattagccaggcatggtggcac

SEQ ID NO: 50108 - DNA, 80 bp, synthetic construct
  source 1..80: mol_type = other DNA
ctttataggtagagccctgcttactagaataaaagctgaaaccttctttccccatctagagatttccttctggagtaaga

SEQ ID NO: 50109 - DNA, 80 bp, synthetic construct
  source 1..80: mol_type = other DNA
ttgtttcttgttgtttttacttaaaacagagtaggtttactgagtgcaggcatctaacttgacagctcatattgtaagag

SEQ ID NO: 50110 - DNA, 80 bp, synthetic construct; identical to SEQ ID NO: 13272
  source 1..80: mol_type = other DNA

SEQ ID NO: 50111 - DNA, 80 bp, synthetic construct
  source 1..80: mol_type = other DNA
agagacggtttctccgtgttggtcaggctggtctcaaactcccgacctcaggtgacctgccagcctagcctcccaaagtg

SEQ ID NO: 50112 - DNA, 80 bp, synthetic construct
  source 1..80: mol_type = other DNA
tacctcgtgggctcaagcagtcctcccacctcagcctccctagtagctgggactacaagcacacaccaccatgcccagct

SEQ ID NO: 50113 - DNA, 80 bp, synthetic construct
  source 1..80: mol_type = other DNA
caccacacccaactccattgtattgaattttaagaagctggtgagactgatattatcccatttacagatgaggaaagcag

SEQ ID NO: 50114 - DNA, 80 bp, synthetic construct; identical to SEQ ID NO: 13273
  source 1..80: mol_type = other DNA

SEQ ID NO: 50115 - DNA, 80 bp, synthetic construct
  source 1..80: mol_type = other DNA
tttttatttgtttatttatttttgagacggagtctccctctgttccccaggctggagtgcagtggcagtatcttgactca

SEQ ID NO: 50116 - DNA, 80 bp, synthetic construct; identical to SEQ ID NO: 13274
  source 1..80: mol_type = other DNA

SEQ ID NO: 50117 - DNA, 80 bp, synthetic construct
  source 1..80: mol_type = other DNA
gttttgttttgttttgtttgaaaaggagtctcattctgtcgcccaggctggagtgcagtggcacaatctcggctcactgc

SEQ ID NO: 50118 - DNA, 80 bp, synthetic construct
  source 1..80: mol_type = other DNA
ctcttgaccttgtgatctgctcacctcagcctcccaaagtgttgggattacaggcgtgagccacagcgcctggccaaaat

SEQ ID NO: 50119 - DNA, 80 bp, synthetic construct
  source 1..80: mol_type = other DNA
tggagtgcagtagtgtgatctcggctcactgcaagctccgcttcccaggttcaagccattctcctgcctcagcctcccaa

SEQ ID NO: 50120 - DNA, 80 bp, synthetic construct; identical to SEQ ID NO: 13275
  source 1..80: mol_type = other DNA

SEQ ID NO: 50121 - DNA, 80 bp, synthetic construct
  source 1..80: mol_type = other DNA
ccgtgttggccaggctggtcttaaactcctgtcctgacctgaggtgatccacccacctcagcttcccaaagtgctgggat

SEQ ID NO: 50122 - DNA, 80 bp, synthetic construct
  source 1..80: mol_type = other DNA
aattcatgggacagatggcctggggaggaatgaaacttggaaggcggtatcacggtaaactacctttatctgtgatgatt

SEQ ID NO: 50123 - DNA, 80 bp, synthetic construct
  source 1..80: mol_type = other DNA
ggagtccagtcgcgcaatcttggctcactgcaacctctgcctcccgggttcaagcagttctctgcctcagcctcccaagt

SEQ ID NO: 50124 - DNA, 80 bp, synthetic construct; identical to SEQ ID NO: 13276
  source 1..80: mol_type = other DNA

SEQ ID NO: 50125 - DNA, 80 bp, synthetic construct
  source 1..80: mol_type = other DNA
gccaggagttcaagaccagcctgaacaacacagtgagacctggtctgtacaaaaaatacaaaattagccaggcgtggtgg

SEQ ID NO: 50126 - DNA, 80 bp, synthetic construct
  source 1..80: mol_type = other DNA
ttttaaagatagatagaagaaaatgtttgcaatatgtataacacatacagtatatagaaccctcatatcaatatatataa

SEQ ID NO: 50127 - DNA, 80 bp, synthetic construct
  source 1..80: mol_type = other DNA
ggaagacataggcacacttgtatattggcacaaacttattgagagcagtttgaccaaattgcgcatgtcctttgactcag

SEQ ID NO: 50128 - DNA, 80 bp, synthetic construct; identical to SEQ ID NO: 13277
  source 1..80: mol_type = other DNA

SEQ ID NO: 50129 - DNA, 80 bp, synthetic construct
  source 1..80: mol_type = other DNA
ataaaattgggggaaaagccacctacagccccaccacccataggctagaatttttacatattttttgccagtctattttt

SEQ ID NO: 50130 - DNA, 80 bp, synthetic construct
  source 1..80: mol_type = other DNA
cacgcctggctaatttttgtatttttagtagagacaggatttcaccatgttggccaggctggtctcgaactcctgacctc

SEQ ID NO: 50131 - DNA, 80 bp, synthetic construct
  source 1..80: mol_type = other DNA
ttgagatagagtctcaccctgtcacccaggctggaatgcagaggcgcgatctcggctcactgcaacctccgcctcccagg

SEQ ID NO: 50132 - DNA, 80 bp, synthetic construct; identical to SEQ ID NO: 13278
  source 1..80: mol_type = other DNA

SEQ ID NO: 50133 - DNA, 80 bp, synthetic construct
  source 1..80: mol_type = other DNA
gctcaccacctgagctcaggtggggaacaagcgaatgagagacaggaccaggtactttctgggtgggacaagttgagagg

SEQ ID NO: 50134 - DNA, 80 bp, synthetic construct
  source 1..80: mol_type = other DNA
aaacagtactttccagcactaccaaataaagatttaaggactgctagcccatttcctcttaccccggggaaagaaagtag

SEQ ID NO: 50135 - DNA, 80 bp, synthetic construct
  source 1..80: mol_type = other DNA
atggcactcagctaaccttgggccagatgcagcaaggttgggactgaagaaaaggggagttcaggaacgtcggttcctct

SEQ ID NO: 50136 - DNA, 80 bp, synthetic construct
  source 1..80: mol_type = other DNA
tcacctccccacccctctcccatcatcccctggtaaggctggctgagagaaattcccctgaaaacatttattttactcag

SEQ ID NO: 50137 - DNA, 80 bp, synthetic construct; identical to SEQ ID NO: 13279
  source 1..80: mol_type = other DNA

SEQ ID NO: 50138 - DNA, 80 bp, synthetic construct
  source 1..80: mol_type = other DNA
ccacctcccgggttcacatcattctcctgcctcagcctgccgagtagctgggactgcaggcgcccgccaccaggcctggc

SEQ ID NO: 50139 - DNA, 80 bp, synthetic construct
  source 1..80: mol_type = other DNA
taccatgcatgtggtaaactatcagtctgtatttatcagtgatggttatttcctaatacccaggaggcatccatgtgagc

SEQ ID NO: 50140 - DNA, 80 bp, synthetic construct
  source 1..80: mol_type = other DNA
gccatgggaataaagaataaggatggggagacccctggccaaattttgggctggggacccccctgggattctgctgaaga

SEQ ID NO: 50141 - DNA, 80 bp, synthetic construct; identical to SEQ ID NO: 13280
  source 1..80: mol_type = other DNA

SEQ ID NO: 50142 - DNA, 80 bp, synthetic construct
  source 1..80: mol_type = other DNA
agcagcgagaagcagagggatcccgtcgacccccacgtgctgagggctccagccagagctggcgacagcaggaggaggag

SEQ ID NO: 50143 - DNA, 80 bp, synthetic construct
  source 1..80: mol_type = other DNA
gatttggtgatgtgccctggccctgccctgggggaggggacccagaggccatggctgcagccctggtggccaggggcccc

SEQ ID NO: 50144 - DNA, 80 bp, synthetic construct
  source 1..80: mol_type = other DNA
atgcagaggccctcaagtgaccctagggaagaagcaagaaacttcggggctgcagcctcaggatgaggcagaaggaaggg

SEQ ID NO: 50145 - DNA, 80 bp, synthetic construct; identical to SEQ ID NO: 13281
  source 1..80: mol_type = other DNA

SEQ ID NO: 50146 - DNA, 80 bp, synthetic construct
  source 1..80: mol_type = other DNA
caatctgtggctggagaaatagatgcgaacagaggcaaaaaggggaacaaaaccagtttccctcccctccctggctcccc

SEQ ID NO: 50147 - DNA, 80 bp, synthetic construct
  source 1..80: mol_type = other DNA
agagccctgtgggggagtggaatttcagttgctaaaattaggagcaggggaaggaggtggaaagagcaaaattatgtaac

SEQ ID NO: 50148 - DNA, 80 bp, synthetic construct
  source 1..80: mol_type = other DNA
agttcatctctgggcagcccaggcatggccttccctataaacatttccttttccaagaaccagtagttgaagtcctgaga

SEQ ID NO: 50149 - DNA, 80 bp, synthetic construct; identical to SEQ ID NO: 13282
  source 1..80: mol_type = other DNA

SEQ ID NO: 50150 - DNA, 80 bp, synthetic construct
  source 1..80: mol_type = other DNA
ggaagggctggtgagaaagatcctgtgagaggaagctgctgtgattcagagaagagacttcaagctgtgtgtgaccctgg

SEQ ID NO: 50151 - DNA, 80 bp, synthetic construct
  source 1..80: mol_type = other DNA
aaactctggtgaccaaatttgctcctccacccaggagatttctcactggtttttaagcacatcatttccccttctgcaag

SEQ ID NO: 50152 - DNA, 80 bp, synthetic construct
  source 1..80: mol_type = other DNA
gctgttcactttctctgaccacatggtttccgcttctgtgtctcttgtttcctaggctgataaaaatactgagccctaga

SEQ ID NO: 50153 - DNA, 80 bp, synthetic construct
  source 1..80: mol_type = other DNA
ggagttgagtctcagtggaggatgcattgggattcaattggaggaacaggcctggaaaagaataatgagattgaagaggg

SEQ ID NO: 50154 - DNA, 80 bp, synthetic construct; identical to SEQ ID NO: 13283
  source 1..80: mol_type = other DNA

SEQ ID NO: 50155 - DNA, 80 bp, synthetic construct
  source 1..80: mol_type = other DNA
aaatgcagtatgttctgggaaaggagcgtcctgagggagaagaagcacaggtgtgagggaacatgtgatgaagaaaggac

SEQ ID NO: 50156 - DNA, 80 bp, synthetic construct
  source 1..80: mol_type = other DNA
atcttgtgaattaatacctactgtgtgttaaccagcccttttcctaacaccacaaatcctctcaacgtctgtccaaaagg

SEQ ID NO: 50157 - DNA, 80 bp, synthetic construct
  source 1..80: mol_type = other DNA
gaaaccccgtctctactaaaaatataaaaactagctgggtgtggtcttgggcacctgtaatcccagctactcaggtgtct

SEQ ID NO: 50158 - DNA, 80 bp, synthetic construct
  source 1..80: mol_type = other DNA
agcacctattaggagcagggcactgcttgacaataggtataaataataaagtcactgccttcatagaacttgcagtctaa

SEQ ID NO: 50159 - DNA, 80 bp, synthetic construct; identical to SEQ ID NO: 13284
  source 1..80: mol_type = other DNA

SEQ ID NO: 50160 - DNA, 80 bp, synthetic construct
  source 1..80: mol_type = other DNA
agattgttgggttcaggaactagacgattacaaattttgagaaaaccgtttccatttaatagaggggcagaaatcacttt

SEQ ID NO: 50161 - DNA, 80 bp, synthetic construct
  source 1..80: mol_type = other DNA
gggctagtcttttgagacatcacacgaaaacggaaggtgagatagactggacatttgagggagaaatattccaaggaagg

SEQ ID NO: 50162 - DNA, 80 bp, synthetic construct
  source 1..80: mol_type = other DNA
atggccaacatggcaaaaccgcatctctacgaaagatacaaaaattagccaggcgtggtggcacatgcctgtggtcccag

SEQ ID NO: 50163 - DNA, 80 bp, synthetic construct; identical to SEQ ID NO: 13285
  source 1..80: mol_type = other DNA

SEQ ID NO: 50164 - DNA, 80 bp, synthetic construct
  source 1..80: mol_type = other DNA
tatcccaaaaacaaacaagaaagggagagatagtgaaaacataagcaagaagtggggagagaatatagtaaagatagagg

SEQ ID NO: 50165 - DNA, 80 bp, synthetic construct
  source 1..80: mol_type = other DNA
cacttgatggccttaagctcaatgaaatattaatagatgagagtgaagaacatcagaggcacggagatttagaacatcac

SEQ ID NO: 50166 - DNA, 80 bp, synthetic construct
  source 1..80: mol_type = other DNA
tctactgcagcgcttggcagcctaagacaaagccccaagaatgagaccacttagtttacccaagtcaatttttgagacag

SEQ ID NO: 50167 - DNA, 80 bp, synthetic construct
  source 1..80: mol_type = other DNA
tgcccaccatcacgcccagctaatttttgtatttttagtagagatggggcttcaccacattggccgggctggtctcgaac

SEQ ID NO: 50168 - DNA, 80 bp, synthetic construct; identical to SEQ ID NO: 13286
  source 1..80: mol_type = other DNA

SEQ ID NO: 50169 - DNA, 80 bp, synthetic construct
  source 1..80: mol_type = other DNA
aggctgtaaaaccagtagacttgagaaacttggagaattgagaggccagactgtaagactcatctgatctgtgtggcttc

SEQ ID NO: 50170 - DNA, 80 bp, synthetic construct
  source 1..80: mol_type = other DNA
accacgcccagctaattttgtttttgtatttttagtagagacggggtttcaccttgttagccaggatggtctcgatctcc

SEQ ID NO: 50171 - DNA, 80 bp, synthetic construct
  source 1..80: mol_type = other DNA
gaggcgggtggattgcttgagctcaggagttcaagaccagcctaggcaacatagcaaaaccctatctctggaaaaaaaaa

SEQ ID NO: 50172 - DNA, 80 bp, synthetic construct; identical to SEQ ID NO: 13287
  source 1..80: mol_type = other DNA

SEQ ID NO: 50173 - DNA, 80 bp, synthetic construct
  source 1..80: mol_type = other DNA
ggtcgaagaaagagcaaccttcaccacagagaggagtagcatcattaggggaaagccaggtttcaaaatgcccagaggaa

SEQ ID NO: 50174 - DNA, 80 bp, synthetic construct
  source 1..80: mol_type = other DNA
cagtgggaattcagaagactaagtctggagagtttagcttctaggagcaggaggttgttgcctctggaattcagaatgga

SEQ ID NO: 50175 - DNA, 80 bp, synthetic construct
  source 1..80: mol_type = other DNA
tgcccagtggcatctctacttgcatgtctaatagacttagacttaccacacccaaaatagaattttttagtttttccatc

SEQ ID NO: 50176 - DNA, 80 bp, synthetic construct; identical to SEQ ID NO: 13288
  source 1..80: mol_type = other DNA

SEQ ID NO: 50177 - DNA, 80 bp, synthetic construct
  source 1..80: mol_type = other DNA
acatgatgaaaccctatctctactaaaaataccaaaattagccaggcacggtggcgcatgcctgtaatcccagctactcg

SEQ ID NO: 50178 - DNA, 80 bp, synthetic construct
  source 1..80: mol_type = other DNA
actttgcgaggctaaggtgcaaggattgcctgaggccaagagttgaaggctgcagtgagctatgatggtgccattgcact

SEQ ID NO: 50179 - DNA, 80 bp, synthetic construct
  source 1..80: mol_type = other DNA
tatactaaaagtacaaaaattagccaggcatggtgacatgcacctataatcccagctacttgggagactgacataggtgg

SEQ ID NO: 50180 - DNA, 80 bp, synthetic construct
  source 1..80: mol_type = other DNA
gcaagtggatcacctgaggtcaggagttcgagaccagcctggccaagatggtgtactttctctactaaaagtacaaaaat

SEQ ID NO: 50181 - DNA, 80 bp, synthetic construct; identical to SEQ ID NO: 13289
  source 1..80: mol_type = other DNA

SEQ ID NO: 50182 - DNA, 80 bp, synthetic construct
  source 1..80: mol_type = other DNA
ggctgaagcaggagaatcgcttgaacccaggaggcagaggttgcagtgagatgagatcagtcattgcactccagcctggg

SEQ ID NO: 50183 - DNA, 80 bp, synthetic construct
  source 1..80: mol_type = other DNA
acacacctgtagtcctagatacttgggaagctgaggtggaaggatgacttgagcccatggttttgaggttgcagtgggct

SEQ ID NO: 50184 - DNA, 80 bp, synthetic construct
  source 1..80: mol_type = other DNA
acacacgcacgcatgcacgcaccacacactctgacgacctttaaaggcttcctgtggctggatgaaatctagaggcttta

SEQ ID NO: 50185 - DNA, 80 bp, synthetic construct; identical to SEQ ID NO: 13290
  source 1..80: mol_type = other DNA

SEQ ID NO: 50186 - DNA, 80 bp, synthetic construct
  source 1..80: mol_type = other DNA
attttctcatagtaccaatttcttcttcagtttctttcttttccgtctggcctcactggaatacaagctccacaggtgct

SEQ ID NO: 50187 - DNA, 80 bp, synthetic construct
  source 1..80: mol_type = other DNA
taaagttcaactttaggcttgtggctcagattggacttacatttagagtcagatttaagtttagtgttaggagtggtggt

SEQ ID NO: 50188 - DNA, 80 bp, synthetic construct
  source 1..80: mol_type = other DNA
agtttgagttgtgatttgggttgaggttaaatttgggttagggttgatgttggtattaaatcccaattcaggttttgagg

SEQ ID NO: 50189 - DNA, 80 bp, synthetic construct
  source 1..80: mol_type = other DNA
aactgctggcctgcccaagaaagaaaccaaattcatacaacctccgaaactgagattgaaaccaagattggcccatctca

SEQ ID NO: 50190 - DNA, 80 bp, synthetic construct; identical to SEQ ID NO: 13291
  source 1..80: mol_type = other DNA

SEQ ID NO: 50191 - DNA, 80 bp, synthetic construct
  source 1..80: mol_type = other DNA
cagttctcctgcctcagcttccctagtagctaggattacaggcgcgtgccaccatgctcggctaattttttgtattttta

SEQ ID NO: 50192 - DNA, 80 bp, synthetic construct
  source 1..80: mol_type = other DNA
taataacattttatattttaatatagctcagctggggtcccagtccatcagctcataccattagagaagcagaaagagac

SEQ ID NO: 50193 - DNA, 80 bp, synthetic construct
  source 1..80: mol_type = other DNA
ggaggccaaggctggtgggtcacctgtggtcaggaattcaagaccaacctggccaacatggtgagaccccgtctctacta

SEQ ID NO: 50194 - DNA, 80 bp, synthetic construct
  source 1..80: mol_type = other DNA
gtgccactgcactccagcctgtgcgacagtgagaaactgtctcaaaaaaaaaaaaaaaggaaaagaaattttctgaccta

SEQ ID NO: 50195 - DNA, 80 bp, synthetic construct; identical to SEQ ID NO: 13292
  source 1..80: mol_type = other DNA

SEQ ID NO: 50196 - DNA, 80 bp, synthetic construct
  source 1..80: mol_type = other DNA
aagggatcacccctttctgcccctacagaaataatagctaagactagtaaagcataaaaggcaaaggggcaggtcctcaa

SEQ ID NO: 50197 - DNA, 80 bp, synthetic construct
  source 1..80: mol_type = other DNA
ccaacccctctaacactctccaagtaaaatcacatcagtagcagtaataatatttgaggtgacaagttggtattatctca

SEQ ID NO: 50198 - DNA, 80 bp, synthetic construct
  source 1..80: mol_type = other DNA
agacaaaaactagaaacaaaccaaatccccatcaacagaatatattagaatatattgatacaatagaatattacatcata

SEQ ID NO: 50199 - DNA, 80 bp, synthetic construct; identical to SEQ ID NO: 13293
  source 1..80: mol_type = other DNA

SEQ ID NO: 50200 - DNA, 80 bp, synthetic construct
  source 1..80: mol_type = other DNA
tttttttgagacagagtcttgctctgtcccccaggctggaatacagtggtgcgatcttgactcactgcagcctccgcctc

SEQ ID NO: 50201 - DNA, 80 bp, synthetic construct
  source 1..80: mol_type = other DNA
agactcccaaagtgccaggattacaggtgtgagccactgcaccaggcctggaacaattttaaaataatgtattggctctg

SEQ ID NO: 50202 - DNA, 80 bp, synthetic construct
  source 1..80: mol_type = other DNA
ccacattgatcctggaatgtgtgtttatttggggttatataaatctgttctgtggaagccacctgaagtcaggaagagat

SEQ ID NO: 50203 - DNA, 80 bp, synthetic construct; identical to SEQ ID NO: 13294
  source 1..80: mol_type = other DNA

SEQ ID NO: 50204 - DNA, 80 bp, synthetic construct
  source 1..80: mol_type = other DNA
cctcctctctgaattgactgtcccttctttggaactctaggcctgaccccactccctggccctcccagcccacgattccc

SEQ ID NO: 50205 - DNA, 80 bp, synthetic construct
  source 1..80: mol_type = other DNA
tgccacgctgccactgccgcttcctctataaagggacctgagcgtccgggcccaggggctccgcacagcaggtgaggctc

SEQ ID NO: 50206 - DNA, 80 bp, synthetic construct
  source 1..80: mol_type = other DNA
ctgtctctgactctccatctgtcagtctcattgtctctgtcacacattctctgtttctgccatgattcctctctgttccc

SEQ ID NO: 50207 - DNA, 80 bp, synthetic construct; identical to SEQ ID NO: 13295
  source 1..80: mol_type = other DNA

SEQ ID NO: 50208 - DNA, 80 bp, synthetic construct
  source 1..80: mol_type = other DNA
ccttcagctgcccagactgcccgtcagcaccccaagatgcatcttgcccacagcaccctcaaacctgctgctcacctcat

SEQ ID NO: 50209 - DNA, 80 bp, synthetic construct
  source 1..80: mol_type = other DNA
tcagttgttcagtgcccacttcctcagggattgagacctctgatccagacccctgatctcccacccccatcccctatggc

SEQ ID NO: 50210 - DNA, 80 bp, synthetic construct
  source 1..80: mol_type = other DNA
ctactctcccaaggccacctcctccccactctacctggcccatgaggtccagctcttctcctcccagtaccccttccatg

SEQ ID NO: 50211 - DNA, 80 bp, synthetic construct; identical to SEQ ID NO: 13296
  source 1..80: mol_type = other DNA

SEQ ID NO: 50212 - DNA, 80 bp, synthetic construct
  source 1..80: mol_type = other DNA
accacacctccctgaaccatccctgatgtctgtctggctgaggatttcaagcctgcctaggaattcccagcccaaagctg

SEQ ID NO: 50213 - DNA, 80 bp, synthetic construct
  source 1..80: mol_type = other DNA
taaattatttatttatggaggatggagagaggggaataatagaagaacatccaaggagaaacagagacaggcccaagaga

SEQ ID NO: 50214 - DNA, 80 bp, synthetic construct
  source 1..80: mol_type = other DNA
cttttctctgaaatgctgtctgcttgtgtgtgtgtgtctgggagtgagaacttcccagtctatctaaggaatggagggag

SEQ ID NO: 50215 - DNA, 80 bp, synthetic construct; identical to SEQ ID NO: 13297
  source 1..80: mol_type = other DNA

SEQ ID NO: 50216 - DNA, 80 bp, synthetic construct
  source 1..80: mol_type = other DNA
atggccacacactggggccctgagaagtgagagcttcatgaaaaaaatcagggaccccagagttccttggaagccaagac

SEQ ID NO: 50217 - DNA, 80 bp, synthetic construct
  source 1..80: mol_type = other DNA
gcccccagctccttctccccgcagggacccaaacacaggcctcaggactcaacacagcttttccctccaaccccgttttc

SEQ ID NO: 50218 - DNA, 80 bp, synthetic construct
  source 1..80: mol_type = other DNA
cagggtcctacacacaaatcagtcagtggcccagaagacccccctcggaatcggagcagggaggatggggagtgtgaggg

SEQ ID NO: 50219 - DNA, 80 bp, synthetic construct; identical to SEQ ID NO: 13298
  source 1..80: mol_type = other DNA

SEQ ID NO: 50220 - DNA, 80 bp, synthetic construct
  source 1..80: mol_type = other DNA
aaagcatgatccgggacgtggagctggccgaggaggcgctccccaagaagacaggggggccccagggctccaggcggtgc

SEQ ID NO: 50221 - DNA, 80 bp, synthetic construct
  source 1..80: mol_type = other DNA
agagagatgggatgggtgaaagatgtgcgctgatagggagggatggagagaaaaaaacgtggagaaagacggggatgcag

SEQ ID NO: 50222 - DNA, 80 bp, synthetic construct
  source 1..80: mol_type = other DNA
gtgagaagagagatgggggaagaaacaagtgatatgaataaagatggtgagacagaaagagcgggaaatatgacagctaa

SEQ ID NO: 50223 - DNA, 80 bp, synthetic construct; identical to SEQ ID NO: 13299
  source 1..80: mol_type = other DNA

SEQ ID NO: 50224 - DNA, 80 bp, synthetic construct
  source 1..80: mol_type = other DNA
gtattttctaggaagtttaagggtctcagctttttcttttctctctcctcttcaggatcatcttctcgaaccccgagtga

SEQ ID NO: 50225 - DNA, 80 bp, synthetic construct
  source 1..80: mol_type = other DNA
ggccttagtgggatactcagaacgtcatggccaggtgggatgtgggatgacagacagagaggacaggaaccggatgtggg

SEQ ID NO: 50226 - DNA, 80 bp, synthetic construct
  source 1..80: mol_type = other DNA
gagagataaccagctggtggtgccatcagagggcctgtacctcatctactcccaggtcctcttcaagggccaaggctgcc

SEQ ID NO: 50227 - DNA, 80 bp, synthetic construct; identical to SEQ ID NO: 13300
  source 1..80: mol_type = other DNA

SEQ ID NO: 50228 - DNA, 80 bp, synthetic construct
  source 1..80: mol_type = other DNA
aagagaattgggggcttagggtcggaacccaagcttagaactttaagcaacaagaccaccacttcgaaacctgggattca

SEQ ID NO: 50229 - DNA, 80 bp, synthetic construct
  source 1..80: mol_type = other DNA
ctcacctagaaattgacacaagtggaccttaggccttcctctctccagatgtttccagacttccttgagacacggagccc

SEQ ID NO: 50230 - DNA, 80 bp, synthetic construct
  source 1..80: mol_type = other DNA
ccgtgaaaacggagctgaacaataggctgttcccatgtagccccctggcctctgtgccttcttttgattatgttttttaa

SEQ ID NO: 50231 - DNA, 80 bp, synthetic construct; identical to SEQ ID NO: 13301
  source 1..80: mol_type = other DNA

SEQ ID NO: 50232 - DNA, 80 bp, synthetic construct
  source 1..80: mol_type = other DNA
caggaaacaagagcctgaacctaattacctctccctcagggcatgggaatttccaactctgggaattccaatccttgctg

SEQ ID NO: 50233 - DNA, 80 bp, synthetic construct
  source 1..80: mol_type = other DNA
attcgggtgtctaggcttcaaatcaccctgtcctaactctgcaacctgaaccagccacttaacctatctatccaatgggg

SEQ ID NO: 50234 - DNA, 80 bp, synthetic construct
  source 1..80: mol_type = other DNA
agctgttctatccccttccattctctcagtgggtgaaatcgaagagactgaggacaataaagaacaaggaaccgaactgc

SEQ ID NO: 50235 - DNA, 80 bp, synthetic construct
  source 1..80: mol_type = other DNA
taaaaaagaatgaaacataggaataagatgtgggtgaaggactcacatgccggcttggtcccactggtctttgtggtgaa

SEQ ID NO: 50236 - DNA, 80 bp, synthetic construct; identical to SEQ ID NO: 13302
  source 1..80: mol_type = other DNA

SEQ ID NO: 50237 - DNA, 80 bp, synthetic construct
  source 1..80: mol_type = other DNA
aatatggagacggaaattgagcccccctagactgggagcccccactgagttcggaaattaggctttacctccagccctgg

SEQ ID NO: 50238 - DNA, 80 bp, synthetic construct
  source 1..80: mol_type = other DNA
cacacttactcacttttgggaagggggacctaaagtgtgaaaaaaaggtgaggattttccgtctcaccctaaatgggaca

SEQ ID NO: 50239 - DNA, 80 bp, synthetic construct
  source 1..80: mol_type = other DNA
tggaggagaagagttgactgtcgggtaggagacagagaggccttcaggcagctctagggggagaagtgcggggcccctcc

SEQ ID NO: 50240 - DNA, 80 bp, synthetic construct; identical to SEQ ID NO: 13303
  source 1..80: mol_type = other DNA

SEQ ID NO: 50241 - DNA, 80 bp, synthetic construct
  source 1..80: mol_type = other DNA
agcatctttatcggcagcactgaagctttccattctttattttcatcaggttcaaaatcaatttccaaacagtctcctac

SEQ ID NO: 50242 - DNA, 80 bp, synthetic construct
  source 1..80: mol_type = other DNA
tctcgcccctccggagctgcaccaggccgccgaaccccacgctcgtgtaccagagaggcccgtacccttgtctcctggcc

SEQ ID NO: 50243 - DNA, 80 bp, synthetic construct
  source 1..80: mol_type = other DNA
gacagtagaggtaatagaggccgtcctgcgggagcgccagcccctcggcgtccgagaactgcgtcccgctcgtcagaaac

SEQ ID NO: 50244 - DNA, 80 bp, synthetic construct; identical to SEQ ID NO: 13304
  source 1..80: mol_type = other DNA

SEQ ID NO: 50245 - DNA, 80 bp, synthetic construct
  source 1..80: mol_type = other DNA
aaccttcggattatttacactcttattcaggtcttggaggtccttacctatgaggtgggcagctgggagcccggggctga

SEQ ID NO: 50246 - DNA, 80 bp, synthetic construct
  source 1..80: mol_type = other DNA
cagcagggagctgggagcccctgagggtctgaagcggggaaggagagacagtctgctcttacccagtccttgctgggcct

SEQ ID NO: 50247 - DNA, 80 bp, synthetic construct
  source 1..80: mol_type = other DNA
agggagaacaagcaaggcataggtacttgggcggagaaacagatgtacctcgggaagaggagaggagacacaaggggctt

SEQ ID NO: 50248 - DNA, 80 bp, synthetic construct; identical to SEQ ID NO: 13305
  source 1..80: mol_type = other DNA

SEQ ID NO: 50249 - DNA, 80 bp, synthetic construct
  source 1..80: mol_type = other DNA
ccccctccctgtagacctgcacacctggctgggactttccgcacacccctgctcccctcacccagcttcctgtttaccca

SEQ ID NO: 50250 - DNA, 80 bp, synthetic construct
  source 1..80: mol_type = other DNA
aagccagtcagcagagctgaaatgagaacacagatctccaggtttccaatgtggtttgcattcttctataccctcaaggt

SEQ ID NO: 50251 - DNA, 80 bp, synthetic construct
  source 1..80: mol_type = other DNA
ctgagtgagaaagggagaggtaagccttagcctcaccactgactactgactcactaaggagggatggaaatggagcttta

SEQ ID NO: 50252 - DNA, 80 bp, synthetic construct; identical to SEQ ID NO: 13306
  source 1..80: mol_type = other DNA

SEQ ID NO: 50253 - DNA, 80 bp, synthetic construct
  source 1..80: mol_type = other DNA
cgggcgtggtggcacgcgcctgtaattccagctacacaggaggctgaggcaggagaatcacttaaacctgggaggcagag

SEQ ID NO: 50254 - DNA, 80 bp, synthetic construct
  source 1..80: mol_type = other DNA
catctctatgtgtttccgtaatactaataataatatagctgacccacaaaatgcacttaacatgtttatgccactgattt

SEQ ID NO: 50255 - DNA, 80 bp, synthetic construct
  source 1..80: mol_type = other DNA
ccatgcccagctaatttttgcattttttgtagagatggatttttgccacattgcccaggctgggctcaaactcctggact

SEQ ID NO: 50256 - DNA, 80 bp, synthetic construct; identical to SEQ ID NO: 13307
  source 1..80: mol_type = other DNA

SEQ ID NO: 50257 - DNA, 80 bp, synthetic construct
  source 1..80: mol_type = other DNA
tgggaggctgaggcaggagaatcacttgaacccaggaggcggaagttgcagtgagccgaaatcatgccattgcactccag

SEQ ID NO: 50258 - DNA, 80 bp, synthetic construct
  source 1..80: mol_type = other DNA
atcacttgaggtcaagagtttgagaccagcctggccaacatggtgaaaccccttctccattaaaaatacaaaaattagct

SEQ ID NO: 50259 - DNA, 80 bp, synthetic construct
  source 1..80: mol_type = other DNA
ctgacttgagatttgtatgtaaaatttgccttcctcaggccagaaaagaaatggggaaataaatactgaactccagtcaa

SEQ ID NO: 50260 - DNA, 80 bp, synthetic construct; identical to SEQ ID NO: 13308
  source 1..80: mol_type = other DNA

SEQ ID NO: 50261 - DNA, 80 bp, synthetic construct
  source 1..80: mol_type = other DNA
aaaaaatgttaatagtagcatctaggtggtaagaatatgttcactgtacaattattctcatttcaccctatgtttgcact

SEQ ID NO: 50262 - DNA, 80 bp, synthetic construct
  source 1..80: mol_type = other DNA
accacatctcctcctcaccccttgccttacaggcgctccccagtcttcaccctcctcaaggagtgggtgtgcaatcctcc

SEQ ID NO: 50263 - DNA, 80 bp, synthetic construct
  source 1..80: mol_type = other DNA
accaacttgtcaccaactttctgtccttgatctatccacagggctcatgtagatctagtatggctgcctttaactctcat

SEQ ID NO: 50264 - DNA, 80 bp, synthetic construct; identical to SEQ ID NO: 13309
  source 1..80: mol_type = other DNA

SEQ ID NO: 50265 - DNA, 80 bp, synthetic construct
  source 1..80: mol_type = other DNA
ccaggctgggggagaagttaaagccagaggaggggcaggaatgtctgaggtggcaacacttctcttcagccagacagcac

SEQ ID NO: 50266 - DNA, 80 bp, synthetic construct
  source 1..80: mol_type = other DNA
gggagagtatgggtttgagtttccctgggccgtcgaggaatcctctgagtctctgctccccaaagaaattaaagacaatt

SEQ ID NO: 50267 - DNA, 80 bp, synthetic construct
  source 1..80: mol_type = other DNA
gggtgaagagaacggccccctcttcaccctcaaacaggaaccagtggttggaggggaggaagtgcctgaggggaagttat

SEQ ID NO: 50268 - DNA, 80 bp, synthetic construct
  source 1..80: mol_type = other DNA
ttccccccagtgcccacacccacccaggcccaggctccttcccctccatcatccccttaccagcacctagaaccatccag

SEQ ID NO: 50269 - DNA, 80 bp, synthetic construct; identical to SEQ ID NO: 13310
  source 1..80: mol_type = other DNA

SEQ ID NO: 50270 - DNA, 80 bp, synthetic construct
  source 1..80: mol_type = other DNA
tccaggccagtccctgatccctgacctaatgttatcgcggaatgatggtaagtaaagtgtctcttgcatctgcatagaga

SEQ ID NO: 50271 - DNA, 80 bp, synthetic construct
  source 1..80: mol_type = other DNA
cctggtaagaggtgaggtattaaggtctgggatggagaagctctgagggtatatttttctgcctctaaaactgttggaga

SEQ ID NO: 50272 - DNA, 80 bp, synthetic construct
  source 1..80: mol_type = other DNA
cgggctcctgcttctggcagtggtccttctgtccgcctgcctgtgttggctgcatcgaagaggtgagcgctgcactccct

SEQ ID NO: 50273 - DNA, 80 bp, synthetic construct; identical to SEQ ID NO: 13311
  source 1..80: mol_type = other DNA

SEQ ID NO: 50274 - DNA, 80 bp, synthetic construct
  source 1..80: mol_type = other DNA
aaaagtgagacagaggataggagagacagggagaaaatgagagtgagagagacacaaagagaagagcaatgaaagagaga

SEQ ID NO: 50275 - DNA, 80 bp, synthetic construct
  source 1..80: mol_type = other DNA
gagagagagagggagagagagagagagagagggagagaagtaagaaaggctggaggtgggagcagaactcacagggaagg

SEQ ID NO: 50276 - DNA, 80 bp, synthetic construct
  source 1..80: mol_type = other DNA
ccaagagctgactatgcctgcattgctgagaacaaacccacctgagcaccccagacaccttcctcaacccaggcgggtgg

SEQ ID NO: 50277 - DNA, 80 bp, synthetic construct; identical to SEQ ID NO: 13312
  source 1..80: mol_type = other DNA

SEQ ID NO: 50278 - DNA, 80 bp, synthetic construct
  source 1..80: mol_type = other DNA
ctcctgggactgggggaagcagatgtgctgagctcccacatggtggtgggaggggcgctgggaccacagccggcagctgc

SEQ ID NO: 50279 - DNA, 80 bp, synthetic construct
  source 1..80: mol_type = other DNA
ttagtggtggggcagatttattggggtcttttgaagaggactagggacatctgggctctggaatcactcctcggggccca

SEQ ID NO: 50280 - DNA, 80 bp, synthetic construct
  source 1..80: mol_type = other DNA
gctccattactcacatttgccctggtaatagacggtgctgcccacggccacagagagaaagctgacagcatagaatccag

SEQ ID NO: 50281 - DNA, 80 bp, synthetic construct; identical to SEQ ID NO: 13313
  source 1..80: mol_type = other DNA

SEQ ID NO: 50282 - DNA, 80 bp, synthetic construct
  source 1..80: mol_type = other DNA
cctcatctcggaaccacgtgacggagccaatggccagtctcccttggctggcattgaaggagcagggcaggaaggcagag

SEQ ID NO: 50283 - DNA, 80 bp, synthetic construct
  source 1..80: mol_type = other DNA
gcatgggaatagatactttgggtgcctcattaaacccttccctcttaaccaatctgatttcttaacattgcttattaaat

SEQ ID NO: 50284 - DNA, 80 bp, synthetic construct
  source 1..80: mol_type = other DNA
tgcacctgtaatcccagctactcgggaggctgaggcaggagaatcgcttgaacccgggaggcagaggttgcagtgagcca

SEQ ID NO: 50285 - DNA, 80 bp, synthetic construct; identical to SEQ ID NO: 13314
  source 1..80: mol_type = other DNA

SEQ ID NO: 50286 - DNA, 80 bp, synthetic construct
  source 1..80: mol_type = other DNA
gcctcagcctcccaagtagctgggactacaggcacccaccaccacgactggctaatttttgtattttcagtcgagacagg

SEQ ID NO: 50287 - DNA, 80 bp, synthetic construct
  source 1..80: mol_type = other DNA
ccaggtgaagacgtggccttaattggttgagattcctatttaacccgtccatgttgatgaattaaaccaaatattaaaat

SEQ ID NO: 50288 - DNA, 80 bp, synthetic construct
  source 1..80: mol_type = other DNA
aatttgttctaggttcccagaaatccacattttgagaactcctgcatttagttaataatatgcctgatagttaaggtctc

SEQ ID NO: 50289 - DNA, 80 bp, synthetic construct
  source 1..80: mol_type = other DNA
cctgcatttagttaataatatgcctgatagttaaggtctctcagttcattaaaaacagtttcggccgggtgcagtggctc

SEQ ID NO: 50290 - DNA, 80 bp, synthetic construct; identical to SEQ ID NO: 13315
  source 1..80: mol_type = other DNA

SEQ ID NO: 50291 - DNA, 80 bp, synthetic construct
  source 1..80: mol_type = other DNA
ctaaaaatacaaaaatggctgggcgcagtggctcaggcctgtaatccccgcactttaggaggccgaggcaggcagatcac

SEQ ID NO: 50292 - DNA, 80 bp, synthetic construct
  source 1..80: mol_type = other DNA
gtgagccaagatcatgccactgcactccagcctaggtgacagagcaagactccgtctcaaaaaaaaaaaaaattagccag

SEQ ID NO: 50293 - DNA, 80 bp, synthetic construct
  source 1..80: mol_type = other DNA
ttcaccaagaaatttatcatagatttacttggatctctcaaactaaaaagcctcacagtgggtgacacagagagactgtg

SEQ ID NO: 50294 - DNA, 80 bp, synthetic construct; identical to SEQ ID NO: 13316
  source 1..80: mol_type = other DNA

SEQ ID NO: 50295 - DNA, 80 bp, synthetic construct
  source 1..80: mol_type = other DNA
gcttcctatgacacacgggactcacacatcacttgccaaggaccacaactgccagggacctcgagcatcaaatgcttgcc

SEQ ID NO: 50296 - DNA, 80 bp, synthetic construct
  source 1..80: mol_type = other DNA
ctaacccaagggtgagtgggcggttgggcgggtgagaccaggatgtgggttcccccaccttccgaggttcaaggagacca

SEQ ID NO: 50297 - DNA, 80 bp, synthetic construct
  source 1..80: mol_type = other DNA
tcactgcaccccagggctactccaagatttctatgagggattaggagaagcaagctgattggtgaagctatatttaattt

SEQ ID NO: 50298 - DNA, 80 bp, synthetic construct
  source 1..80: mol_type = other DNA
tgcaacctctgcctcctgggttcaagcaattctcttgcctcagcctcccaagtagctgggattacaggcgcacatcacca

SEQ ID NO: 50299 - DNA, 80 bp, synthetic construct; identical to SEQ ID NO: 13317
  source 1..80: mol_type = other DNA

SEQ ID NO: 50300 - DNA, 80 bp, synthetic construct
  source 1..80: mol_type = other DNA
tggcgaaatgtatttcttaaataatgagacttgaaagtctaaattactccttaaaccatggactacaggatggatgttat

SEQ ID NO: 50301 - DNA, 80 bp, synthetic construct
  source 1..80: mol_type = other DNA
gccgggtgtggtggggcgcacctgtaatcccagctactcgggaggctgaggcaggagaatcacttgaacccaggaggcgg

SEQ ID NO: 50302 - DNA, 80 bp, synthetic construct
  source 1..80: mol_type = other DNA
taatcattttaaagaaatcttgtttttcggagcagtagacctcaacagtaggcttaaaatattcagtaaaccagcggggc

SEQ ID NO: 50303 - DNA, 80 bp, synthetic construct; identical to SEQ ID NO: 13318
  source 1..80: mol_type = other DNA

SEQ ID NO: 50304 - DNA, 80 bp, synthetic construct
  source 1..80: mol_type = other DNA
ttgagttaaagagttggaggccaggccaggcatggtggctcatgcctgtaatcccagcactttgggaggctgaggcgggc

SEQ ID NO: 50305 - DNA, 80 bp, synthetic construct
  source 1..80: mol_type = other DNA
gttgcagttagccgagattgcgccactgcactccagcctgggtgacagagcaagactttgtctcaaaaaaaaaaaaaaaa

SEQ ID NO: 50306 - DNA, 80 bp, synthetic construct
  source 1..80: mol_type = other DNA
gttgagatcatgctgctgtactacagcctgggcaacatattgagaccgtgtctcaaaaaaaaacaaacaaacaaaaaaaa

SEQ ID NO: 50307 - DNA, 80 bp, synthetic construct
  source 1..80: mol_type = other DNA
ccctctgggttcaagtgattttcctgcctcagcctccctagtatctgggattacaggtgactgccaccacacccggctaa

SEQ ID NO: 50308 - DNA, 80 bp, synthetic construct; identical to SEQ ID NO: 13319
  source 1..80: mol_type = other DNA

SEQ ID NO: 50309 - DNA, 80 bp, synthetic construct
  source 1..80: mol_type = other DNA
agtgcagtggcacaatcacggctcactgcagcttcaacctcatgggctcacaccatcttcccacctcagcctcctgagta

SEQ ID NO: 50310 - DNA, 80 bp, synthetic construct
  source 1..80: mol_type = other DNA
aacctcagctctacaaaaaagaaaaaaaaagtccaggcacagtggctgactcctgtcatcccagcactttgggaggccaa

SEQ ID NO: 50311 - DNA, 80 bp, synthetic construct
  source 1..80: mol_type = other DNA
gtagtggtgaactgggatcgtgccattgtactccagcttgggcaacaagaacaaaactctgcctaaataaataaatagat

SEQ ID NO: 50312 - DNA, 80 bp, synthetic construct; identical to SEQ ID NO: 13320
  source 1..80: mol_type = other DNA

SEQ ID NO: 50313 - DNA, 80 bp, synthetic construct
  source 1..80: mol_type = other DNA
gacactcttgtatgtgtatcacacagctacaggagataatacagcacatagaagtgaaggatgacatgtaatatgccatg

SEQ ID NO: 50314 - DNA, 80 bp, synthetic construct
  source 1..80: mol_type = other DNA
cccaagtagcttggaatactggtatgtgccatcacacctgactttttacttttatttatttttgaaagacagcatcttgc

SEQ ID NO: 50315 - DNA, 80 bp, synthetic construct
  source 1..80: mol_type = other DNA
ctcactgcaacctctgcctcccgggttcaagcgattctcctgcctccgcctcccgagtagctgggagtacagacgtgcgc

SEQ ID NO: 50316 - DNA, 80 bp, synthetic construct
  source 1..80: mol_type = other DNA
tacaggcgtgagccaccgcgcccagcctggctcattttatatgaatacatgttgttgttgttgctgttgttgttgtgaga

SEQ ID NO: 50317 - DNA, 80 bp, synthetic construct; identical to SEQ ID NO: 13321
  source 1..80: mol_type = other DNA

SEQ ID NO: 50318 - DNA, 80 bp, synthetic construct
  source 1..80: mol_type = other DNA
gaagtaattcagagctttcttttggagaagcagtcatctcatggttaagaatgctggtttggaatgagtctaggttcaaa

SEQ ID NO: 50319 - DNA, 80 bp, synthetic construct
  source 1..80: mol_type = other DNA
cacgtcagcctccagagtatttgggactacagacacacatcatcacgtttggctcacttatttttattttttgtacagac

SEQ ID NO: 50320 - DNA, 80 bp, synthetic construct
  source 1..80: mol_type = other DNA
acaaattattttacctccctaagctaccggaacaaccacacatgccacacaacctgggaaggaccaactcagccattctc

SEQ ID NO: 50321 - DNA, 80 bp, synthetic construct; identical to SEQ ID NO: 13322
  source 1..80: mol_type = other DNA

SEQ ID NO: 50322 - DNA, 80 bp, synthetic construct
  source 1..80: mol_type = other DNA
cagatcacctgaggtcgggagttcgagaccagtctggccaacatggtgaatccccatctctactaaaaatacaaaactta

SEQ ID NO: 50323 - DNA, 80 bp, synthetic construct
  source 1..80: mol_type = other DNA
caaactccactcttccacagtgtacactcaatcacatggttctactccacgtcccaaggcaatgtggcttagaagacaaa

SEQ ID NO: 50324 - DNA, 80 bp, synthetic construct
  source 1..80: mol_type = other DNA
ggcatcctgctctcccagctcttttctatatctaagacttctaaacatttgtcatagctaaaaatgttccagattccaaa

SEQ ID NO: 50325 - DNA, 80 bp, synthetic construct; identical to SEQ ID NO: 13323
  source 1..80: mol_type = other DNA

SEQ ID NO: 50326 - DNA, 80 bp, synthetic construct
  source 1..80: mol_type = other DNA
actgcaacctccgcctcccgggttcaagagattctcctgcctcagcctcctgagtagccaggattacaggcacccactac

SEQ ID NO: 50327 - DNA, 80 bp, synthetic construct
  source 1..80: mol_type = other DNA
ttttctaaagaaattattcccaggcactcaagaggaaaggcaacaaataaaacagtgttgaagtggatgtgcactggtct

SEQ ID NO: 50328 - DNA, 80 bp, synthetic construct
  source 1..80: mol_type = other DNA
agcgcctgtcaccatgcctggctaacttttttgtatttttactagagacagggtttcaccatgttggccaggctggtttt

SEQ ID NO: 50329 - DNA, 80 bp, synthetic construct; identical to SEQ ID NO: 13324
  source 1..80: mol_type = other DNA

SEQ ID NO: 50330 - DNA, 80 bp, synthetic construct
  source 1..80: mol_type = other DNA
tgatactttcagcttctgagaacagcttctcctctgaggctcatagcatctgacctcacgaccttcaatctctccttggt

SEQ ID NO: 50331 - DNA, 80 bp, synthetic construct
  source 1..80: mol_type = other DNA
caacctctgcctcccaggttcaagcgattctcctgccccagcctccagagtagctgggattacaggcacctgccaccatg

SEQ ID NO: 50332 - DNA, 80 bp, synthetic construct
  source 1..80: mol_type = other DNA
ctctgccaactccttaatggacttaatgtccatatgaatgactttttttttttttttttttgagagagagtcttgctctg

SEQ ID NO: 50333 - DNA, 80 bp, synthetic construct
  source 1..80: mol_type = other DNA
ttcaccatgttagccaggatggtctcaatctcctgacctcgtgatccacctgcctcggcctcccaaagtgctgggattac

SEQ ID NO: 50334 - DNA, 80 bp, synthetic construct; identical to SEQ ID NO: 13325
  source 1..80: mol_type = other DNA

SEQ ID NO: 50335 - DNA, 80 bp, synthetic construct
  source 1..80: mol_type = other DNA
cagctaattttttaacagtttttttgtaggctgggtgcagtggtttaggcctataatcctagcactttgggaggccgagg

SEQ ID NO: 50336 - DNA, 80 bp, synthetic construct
  source 1..80: mol_type = other DNA
aacctgggaggcagaggttgcagtgagccgagatcgcgtcattgcactccagcccgggtgacagagcaagactctgtctc

SEQ ID NO: 50337 - DNA, 80 bp, synthetic construct
  source 1..80: mol_type = other DNA
ttcttgaacatcatattaatggagtcatatagtacatactcttgtatctggctcctttcattctgcttaatgtctgtgag

SEQ ID NO: 50338 - DNA, 80 bp, synthetic construct; identical to SEQ ID NO: 13326
  source 1..80: mol_type = other DNA

SEQ ID NO: 50339 - DNA, 80 bp, synthetic construct
  source 1..80: mol_type = other DNA
cccagactcctgtaccctaaacgtgtgcttttataccactgtcctgttggaaaatttttgggttgtttctcccacttttt

SEQ ID NO: 50340 - DNA, 80 bp, synthetic construct
  source 1..80: mol_type = other DNA
gctaattttgtatttttggtagagatggggtttcaccatgtcggtcaggctggtctcgaactcctgacctcaagtgatcc

SEQ ID NO: 50341 - DNA, 80 bp, synthetic construct
  source 1..80: mol_type = other DNA
ggctttaggtgttcctccgacctcagcctttcacgtagctgggattataggcatgcacctggcttcccactttcattcaa

SEQ ID NO: 50342 - DNA, 80 bp, synthetic construct; identical to SEQ ID NO: 13327
  source 1..80: mol_type = other DNA

SEQ ID NO: 50343 - DNA, 80 bp, synthetic construct
  source 1..80: mol_type = other DNA
ctaaatccctcatcaactcaaggggaaacgagcagagttgcttctctgatgggtagtgtggtttctgcacagcatcccct

SEQ ID NO: 50344 - DNA, 80 bp, synthetic construct
  source 1..80: mol_type = other DNA
tctttctgtctcaccatgttattcatattacttgtttcttcccccgtgtccactcaaacgccacatctctacacacccct

SEQ ID NO: 50345 - DNA, 80 bp, synthetic construct
  source 1..80: mol_type = other DNA
tctcctgccccagcctccagagtagctgggattacaggcacatgccaccacccctggctaatttttgtatttttagtaga

SEQ ID NO: 50346 - DNA, 80 bp, synthetic construct; identical to SEQ ID NO: 13328
  source 1..80: mol_type = other DNA

SEQ ID NO: 50347 - DNA, 80 bp, synthetic construct
  source 1..80: mol_type = other DNA
ttaaaaaaaaaagtttaggccaggcacagtggctaccgcttgtaatcccaacactttgggaggccgaggagggtgcatca

SEQ ID NO: 50348 - DNA, 80 bp, synthetic construct
  source 1..80: mol_type = other DNA
tcacgccactgcactccagtctgggcgacagagtgagactccatctcaaaaaaaaaaaaaaatttgtgcagcagcgacag

SEQ ID NO: 50349 - DNA, 80 bp, synthetic construct
  source 1..80: mol_type = other DNA
gctatcctggctaacacggtgaagccccatctctactgaaaatacaaaaaattagccaggcgtggtggcatgcatctgta

SEQ ID NO: 50350 - DNA, 80 bp, synthetic construct; identical to SEQ ID NO: 13329
  source 1..80: mol_type = other DNA

SEQ ID NO: 50351 - DNA, 80 bp, synthetic construct
  source 1..80: mol_type = other DNA
caggagttcgagagcagcctggccaacatgacaaaaccctgtctctactaaaaacaaaaaattagctaggcatggtggtc

SEQ ID NO: 50352 - DNA, 80 bp, synthetic construct
  source 1..80: mol_type = other DNA
cagttatcaaaatattaataaaaactttcaatagagtaaattgaaactgtcccaagattgacaagaattgcatgctggga

SEQ ID NO: 50353 - DNA, 80 bp, synthetic construct
  source 1..80: mol_type = other DNA
aaaaaaaaaaaaaaagaagccaggcacggtgacttacgcctgtaatcctgacactttgggaggctgaggagggcggatca

SEQ ID NO: 50354 - DNA, 80 bp, synthetic construct
  source 1..80: mol_type = other DNA
agtgagccaagatcatgccactgcactccagcctgggtgacaaagcaagactctatctaaaaaaaaaaaaaaaaaagacc

SEQ ID NO: 50355 - DNA, 80 bp, synthetic construct; identical to SEQ ID NO: 13330
  source 1..80: mol_type = other DNA

SEQ ID NO: 50356 - DNA, 80 bp, synthetic construct
  source 1..80: mol_type = other DNA
taattagtcaccatggctgggtgcagtggctcatgtctgtaatcccagcactttaggagggcaaggcaggtggatcacct

SEQ ID NO: 50357 - DNA, 80 bp, synthetic construct
  source 1..80: mol_type = other DNA
gtgagctgagatcatgtcactgcactccagcctgggtgacagagagagactccatctcaaaaaaaaaaaaaaaaaaaacc

SEQ ID NO: 50358 - DNA, 80 bp, synthetic construct
  source 1..80: mol_type = other DNA
agagaagaaaagtctatctgggtatgatgatgactcctaatatcttctctctggtggttgatctggtcatttgataagat

SEQ ID NO: 50359 - DNA, 80 bp, synthetic construct; identical to SEQ ID NO: 13331
  source 1..80: mol_type = other DNA

SEQ ID NO: 50360 - DNA, 80 bp, synthetic construct
  source 1..80: mol_type = other DNA
tgggattacaggcatgcgccaccatgcctggctaattttgtacatttagtagaaacggggtttctccatgtttgtcgggc

SEQ ID NO: 50361 - DNA, 80 bp, synthetic construct
  source 1..80: mol_type = other DNA
tgtcattctctctatcccaggcagtttttctgagcatctaagcactgtctcaccccagtagtctgtcaagccattctcaa

SEQ ID NO: 50362 - DNA, 80 bp, synthetic construct; identical to SEQ ID NO: 13332
  source 1..80: mol_type = other DNA

SEQ ID NO: 50363 - DNA, 80 bp, synthetic construct
  source 1..80: mol_type = other DNA
gtagtcccagctactcgggaggctgaggcaggagaatggcgtgaaaccaggaggcggagcttgcagtgagccgagatcgc

SEQ ID NO: 50364 - DNA, 80 bp, synthetic construct
  source 1..80: mol_type = other DNA
ccccgtctctactaaaaacacaaaaaattagccgggcgtggtggcaggcgcctgtagtcccagctactcaggaggctgag

SEQ ID NO: 50365 - DNA, 80 bp, synthetic construct
  source 1..80: mol_type = other DNA
agcactctagaaggctgagaccagaggatcacttgagcccaggagttcaagaccagcctgggcaacctggcgagacttca

SEQ ID NO: 50366 - DNA, 80 bp, synthetic construct; identical to SEQ ID NO: 13333
  source 1..80: mol_type = other DNA

SEQ ID NO: 50367 - DNA, 80 bp, synthetic construct
  source 1..80: mol_type = other DNA
ggaggtcaaagctgcagtagccatgtttgtgccactgcactccagcctggataacagaacgagaccctgtctccctgtct

SEQ ID NO: 50368 - DNA, 80 bp, synthetic construct
  source 1..80: mol_type = other DNA
acaactgagtttatgttagtaagttgacttttagaaagcccctaaggttggggtttgttgccaaggtaggcaactgtgtg

SEQ ID NO: 50369 - DNA, 80 bp, synthetic construct
  source 1..80: mol_type = other DNA
cagagaggacaagaaaactccaaatcccccttccccgatactttgtccggagcaactcttccatctgactgttcctaagt

SEQ ID NO: 50370 - DNA, 80 bp, synthetic construct; identical to SEQ ID NO: 13334
  source 1..80: mol_type = other DNA

SEQ ID NO: 50371 - DNA, 80 bp, synthetic construct
  source 1..80: mol_type = other DNA
gaccatcctggctaacatggtgaaaccctgtctctactaaaaatacaaaaaattagccaggcatggtggcgggtgcctgt

SEQ ID NO: 50372 - DNA, 80 bp, synthetic construct
  source 1..80: mol_type = other DNA
ctttgcaaagagcctggaataacttccttttagtcctggactataatgatgatgataaatatacctcgatgtaaccctga

SEQ ID NO: 50373 - DNA, 80 bp, synthetic construct
  source 1..80: mol_type = other DNA
ttatagttacacaaattagaaacaaatgttatatttaaaaccatagagaaatgcccaggtgatgaaagctggggtgaagg

SEQ ID NO: 50374 - DNA, 80 bp, synthetic construct; identical to SEQ ID NO: 13335
  source 1..80: mol_type = other DNA

SEQ ID NO: 50375 - DNA, 80 bp, synthetic construct
  source 1..80: mol_type = other DNA
tttgggaggccaaggtgggtggatcacaaggtcaagagatcgagaccatcttggccaacatggtgaaacctcgtctccac

SEQ ID NO: 50376 - DNA, 80 bp, synthetic construct
  source 1..80: mol_type = other DNA
tcaaaaaaaaaaaaataagtatttttctttctagccgtatatccaccttacatggtccctcaactccccaagcccactct

SEQ ID NO: 50377 - DNA, 80 bp, synthetic construct
  source 1..80: mol_type = other DNA
tacccaaagaaatacataaagtttgaccagaatggaaacagagatatcagtgaaaaaaggtgatttggggaagtgtgcag

SEQ ID NO: 50378 - DNA, 80 bp, synthetic construct
  source 1..80: mol_type = other DNA
ccgtctcactaaaaatacaaaaaattagccagctgggcgtggtggcaggtgcctgtaatcccagctactctggaggctga

SEQ ID NO: 50379 - DNA, 80 bp, synthetic construct; identical to SEQ ID NO: 13336
  source 1..80: mol_type = other DNA

SEQ ID NO: 50380 - DNA, 80 bp, synthetic construct
  source 1..80: mol_type = other DNA
aggccaaggtgggaggatcacaaggttaggagttcaagaccagcctggccaacttggtgaaaccccatctctactaaaaa

SEQ ID NO: 50381 - DNA, 80 bp, synthetic construct
  source 1..80: mol_type = other DNA
aaaaaaagctgggtgcagtggctcacgcctgtaatcctagcactttgggagtccgaggtgggtagatcacctaaggtcag

SEQ ID NO: 50382 - DNA, 80 bp, synthetic construct
  source 1..80: mol_type = other DNA
tcaagccattgcactctagcctgggcgacagagtgagactccgtttaaaaaaaaaacaaaaaacaaaaaacaaaaaactg

SEQ ID NO: 50383 - DNA, 80 bp, synthetic construct
  source 1..80: mol_type = other DNA
cctctgcctcccgggtttaagcgattcgcctgcgtcagcctcctgagcagctgggattacaggcacgcaccaccaggccc

SEQ ID NO: 50384 - DNA, 80 bp, synthetic construct; identical to SEQ ID NO: 13337
  source 1..80: mol_type = other DNA

SEQ ID NO: 50385 - DNA, 80 bp, synthetic construct
  source 1..80: mol_type = other DNA
aagccagagtccagccaggtgcagtggctcatgcctgtaatcccagcactttgggaggctgaggtgggtggatcacaagg

SEQ ID NO: 50386 - DNA, 80 bp, synthetic construct
  source 1..80: mol_type = other DNA
cgagattgcaccattgcactcccgcctgggcgacagagcaagactccgactcaaaaaaaaaaaaaaaagcagcagcagca

SEQ ID NO: 50387 - DNA, 80 bp, synthetic construct
  source 1..80: mol_type = other DNA
gggagtttggaccaggaaatctcaatgagggaaatgtgctgtcctcacctctccaagaagcgactggccaaacagagtga

SEQ ID NO: 50388 - DNA, 80 bp, synthetic construct; identical to SEQ ID NO: 13338
  source 1..80: mol_type = other DNA

SEQ ID NO: 50389 - DNA, 80 bp, synthetic construct
  source 1..80: mol_type = other DNA
ctgtgcccatcttgtcaccctcctggagctgccagcagacttcagattcttctccgatctacagagcagaaaaattcagc

SEQ ID NO: 50390 - DNA, 80 bp, synthetic construct
  source 1..80: mol_type = other DNA
agtggcttatcaaaatatttgtttcatgcgcacactgggctctcatttaagaggaatttgggagaatgttattttctaat

SEQ ID NO: 50391 - DNA, 80 bp, synthetic construct
  source 1..80: mol_type = other DNA
gcagacagaggcctccagcttggtctgtctccccacctctaccagcatctgctgagctatgagccaaaccagggatttac

SEQ ID NO: 50392 - DNA, 80 bp, synthetic construct; identical to SEQ ID NO: 13339
  source 1..80: mol_type = other DNA

SEQ ID NO: 50393 - DNA, 80 bp, synthetic construct
  source 1..80: mol_type = other DNA
attcctagacgatcccaaatatagcagtgatgaggatctgccctccaaactggaaggcttcaaaggtgagggggaaactg

SEQ ID NO: 50394 - DNA, 80 bp, synthetic construct
  source 1..80: mol_type = other DNA
tcagcatcccctctagctccttacaccctagcggggcccctcaactccccaaccccacttcctctgcctgcccctcctcc

SEQ ID NO: 50395 - DNA, 80 bp, synthetic construct
  source 1..80: mol_type = other DNA
atggagtttgaccttaatggaaatggcgatattggtgagaaacgggtgatttgcgggggcagggtggtgtgcaggcctaa

SEQ ID NO: 50396 - DNA, 80 bp, synthetic construct; identical to SEQ ID NO: 13340
  source 1..80: mol_type = other DNA

SEQ ID NO: 50397 - DNA, 80 bp, synthetic construct
  source 1..80: mol_type = other DNA
cacgttgcccatcatcccttcttccatccttagagggacccttccaaggtcccgaccccatccctatccatagtcctggt

SEQ ID NO: 50398 - DNA, 80 bp, synthetic construct
  source 1..80: mol_type = other DNA
gaaaaagcgagagaaaaggaaaagccaacaggccccccagccaagaaagctatctctgagttgccctgatttgaagggaa

SEQ ID NO: 50399 - DNA, 80 bp, synthetic construct
  source 1..80: mol_type = other DNA
tttttatttgggtgatttttttcctgggtttgggaaggagagacaggtcttgagggaaaggtggcaaggatttggccata

SEQ ID NO: 50400 - DNA, 80 bp, synthetic construct; identical to SEQ ID NO: 13341
  source 1..80: mol_type = other DNA

SEQ ID NO: 50401 - DNA, 80 bp, synthetic construct
  source 1..80: mol_type = other DNA
ggagttcgagaccagcctgacgaacatgaagaaaccccgtctctactaaaaatacaaaattagcctggtgtggtggcgca

SEQ ID NO: 50402 - DNA, 80 bp, synthetic construct
  source 1..80: mol_type = other DNA
aaaaaacacttgaatgggtagatgaatgaaagaactggtgctattaaataaagcaaagaatttacagctgggcgtggtgg

SEQ ID NO: 50403 - DNA, 80 bp, synthetic construct
  source 1..80: mol_type = other DNA
gggagactgaggcaggagaatcgcttgaacccgggaggtggaggttgcggtgagccgagatcacgccatggcactccagc

SEQ ID NO: 50404 - DNA, 80 bp, synthetic construct; identical to SEQ ID NO: 13342
  source 1..80: mol_type = other DNA

SEQ ID NO: 50405 - DNA, 80 bp, synthetic construct
  source 1..80: mol_type = other DNA
ctcgttcttcatatctatttatttatatatttttgacagatatctactccgatcattcttcatatcattttttttttttt

SEQ ID NO: 50406 - DNA, 80 bp, synthetic construct
  source 1..80: mol_type = other DNA
gacgtagtctcactctgtcgctaggctggagtgcagtggcgtgatctcagctcactgcaacctccgtctcccaggttcaa

SEQ ID NO: 50407 - DNA, 80 bp, synthetic construct; identical to SEQ ID NO: 13343
  source 1..80: mol_type = other DNA

SEQ ID NO: 50408 - DNA, 80 bp, synthetic construct
  source 1..80: mol_type = other DNA
ccgagtagctgggatcataggcatgcgccaccacgcctgggtaattgtatttttagtagagacggggtttctccatgttg

SEQ ID NO: 50409 - DNA, 80 bp, synthetic construct
  source 1..80: mol_type = other DNA
gcaacctccgcctccctggttcaaggaattctctgcctcagcttcccgagtagttgggattacaggcgcccgccaccacg

SEQ ID NO: 50410 - DNA, 80 bp, synthetic construct
  source 1..80: mol_type = other DNA
tatcctgtgcattatctccagcgccttcaaatcatagtcattgaatgatctgttgaatgggtataactctgatgggagca

SEQ ID NO: 50411 - DNA, 80 bp, synthetic construct; identical to SEQ ID NO: 13344
  source 1..80: mol_type = other DNA

SEQ ID NO: 50412 - DNA, 80 bp, synthetic construct
  source 1..80: mol_type = other DNA
actcacggcaaagggatgcgagagctggaactcttaccaggcctgcggaaactcagccctccggcagctaatcccgcccg

SEQ ID NO: 50413 - DNA, 80 bp, synthetic construct
  source 1..80: mol_type = other DNA
tgcgtcccaaccgcccagccgacctgcaccgcattcccgccccctcaacacggctcaacggccgacgctgggggcccgcc

SEQ ID NO: 50414 - DNA, 80 bp, synthetic construct
  source 1..80: mol_type = other DNA
ttaaggggcgtgtctaggcgcggagggaggtgggaggtgggagggggtgctcccgggggcggcggttgcccggatgggcc

SEQ ID NO: 50415 - DNA, 80 bp, synthetic construct; identical to SEQ ID NO: 13345
  source 1..80: mol_type = other DNA

SEQ ID NO: 50416 - DNA, 80 bp, synthetic construct
  source 1..80: mol_type = other DNA
gggtgacccctgcgcctgggtccgtaactccctaccctccgctgcgctcctggcttttcacccccatttgtgggccccct

SEQ ID NO: 50417 - DNA, 80 bp, synthetic construct
  source 1..80: mol_type = other DNA
tcccagcatctttgctttctatgttgctcagtcgccctatgtctgctttttcatttttcctgttcctcgtctcctttctc

SEQ ID NO: 50418 - DNA, 80 bp, synthetic construct
  source 1..80: mol_type = other DNA
ttcccttcatatatttatcttcacagattggcctcctcaaacacctacgaagcaacatccatcttatctctagcttgtca

SEQ ID NO: 50419 - DNA, 80 bp, synthetic construct; identical to SEQ ID NO: 13346
  source 1..80: mol_type = other DNA

SEQ ID NO: 50420 - DNA, 80 bp, synthetic construct
  source 1..80: mol_type = other DNA
tacaggagcaagtttaggaaaagatgggatatttcaaatacttgaggttcctatagcctgggagtatgtacagccctagt

SEQ ID NO: 50421 - DNA, 80 bp, synthetic construct
  source 1..80: mol_type = other DNA
gcttgtgtccaataaacagggaatctaaagtgttgtttcttcttctctgatggaattgtatgcttcttttttagttttct

SEQ ID NO: 50422 - DNA, 80 bp, synthetic construct
  source 1..80: mol_type = other DNA
tctttgtagacaggcacaaagggcagagtgtttatactaggaggatgctggatttttacttagatttccttgacaaaggt

SEQ ID NO: 50423 - DNA, 80 bp, synthetic construct
  source 1..80: mol_type = other DNA
tctgagtccctaatgataatgcaatggagtttttaagtttctgttatggtctgtacaggggacagagactgagacacttg

SEQ ID NO: 50424 - DNA, 80 bp, synthetic construct; identical to SEQ ID NO: 13347
  source 1..80: mol_type = other DNA

SEQ ID NO: 50425 - DNA, 80 bp, synthetic construct
  source 1..80: mol_type = other DNA
ctttggacacgtaagaattggaggaaaataaatgtggatttgggaaactttgaggccagcttgcttcttgcaggctcatg

SEQ ID NO: 50426 - DNA, 80 bp, synthetic construct
  source 1..80: mol_type = other DNA
ccacctcctgggtttaagcgattatcctgcctcagcctcctgagtagctgggattacaggcatgcgccaccacacccggc

SEQ ID NO: 50427 - DNA, 80 bp, synthetic construct
  source 1..80: mol_type = other DNA
ggggaaggaatcccttctaagagaagtttggaggaagtaggtaataaaatattcaacatgtataaatgtgtcccaggata

SEQ ID NO: 50428 - DNA, 80 bp, synthetic construct; identical to SEQ ID NO: 13348
  source 1..80: mol_type = other DNA

SEQ ID NO: 50429 - DNA, 80 bp, synthetic construct
  source 1..80: mol_type = other DNA
cacgtctgagccagagacgaagaggtccctttcttacctattgcaggttccttgttaaatgactaaggaatggtactaaa

SEQ ID NO: 50430 - DNA, 80 bp, synthetic construct
  source 1..80: mol_type = other DNA
tatttgtaaatggtagcaatgggcatgatttcagtcctgagtctccaccagttggagaagtcagggaggcatctcaggtg

SEQ ID NO: 50431 - DNA, 80 bp, synthetic construct
  source 1..80: mol_type = other DNA
gaatggttcatagctgccccacccacatcatttatcatctttctgaacacttccccagaacactcctttggttccaagcg

SEQ ID NO: 50432 - DNA, 80 bp, synthetic construct; identical to SEQ ID NO: 13349
  source 1..80: mol_type = other DNA

SEQ ID NO: 50433 - DNA, 80 bp, synthetic construct
  source 1..80: mol_type = other DNA
cactgcaacctctgcctcctgggttcaagcgattttcctgcctcagcctccagagtagcgggactacaggcacacgccaa

SEQ ID NO: 50434 - DNA, 80 bp, synthetic construct
  source 1..80: mol_type = other DNA
ttatagcatgtcctcaggaaatgtcttctgtctcctgttctgcatccccatcctaataggtggaagggcatcaagcctac

SEQ ID NO: 50435 - DNA, 80 bp, synthetic construct
  source 1..80: mol_type = other DNA
catctcagagctaggtgctggcttattcaccttcctccccatcactttcagctgtgttcacttgtcctccaatcattgat

SEQ ID NO: 50436 - DNA, 80 bp, synthetic construct; identical to SEQ ID NO: 13350
  source 1..80: mol_type = other DNA

SEQ ID NO: 50437 - DNA, 80 bp, synthetic construct
  source 1..80: mol_type = other DNA
ggatgattgatagcaggcttaaggagctagaagggtatatgactgtccctctgagcagctactgttggacccttttacag

SEQ ID NO: 50438 - DNA, 80 bp, synthetic construct
  source 1..80: mol_type = other DNA
tcagtctaggatcagtctcgcatgtggttatacaacatgccatatttcattttcttttttgtgtacagccgttttccccg

SEQ ID NO: 50439 - DNA, 80 bp, synthetic construct
  source 1..80: mol_type = other DNA
gatcttgaaaggcaaaacctaatgaggaaaaaaaaatacagggttatgtgggtgaaaggcagacattgaagtgtaggaag

SEQ ID NO: 50440 - DNA, 80 bp, synthetic construct
  source 1..80: mol_type = other DNA
ctgtggtcccagctactctggaggttgtggtgggaggatcagttgagcccaggagttggaggtcacagtgagctatgatc

SEQ ID NO: 50441 - DNA, 80 bp, synthetic construct; identical to SEQ ID NO: 13351
  source 1..80: mol_type = other DNA

SEQ ID NO: 50442 - DNA, 80 bp, synthetic construct
  source 1..80: mol_type = other DNA
ttggtaatatactcttagaggagtatattagttgcagctgattttaatttcactgttgatctgctcacagcagggattcc

SEQ ID NO: 50443 - DNA, 80 bp, synthetic construct
  source 1..80: mol_type = other DNA
ctcaccggggccccgccgggaactggggcccccctggggactacccagtgagtgtctccaataagggattgagagggtca

SEQ ID NO: 50444 - DNA, 80 bp, synthetic construct
  source 1..80: mol_type = other DNA
gggatgctaatgaggaaagaagaaaaaggagccctgggtgtttgggtttcggaaggagagagggaacagaaaaataaaaa

SEQ ID NO: 50445 - DNA, 80 bp, synthetic construct; identical to SEQ ID NO: 13352
  source 1..80: mol_type = other DNA

SEQ ID NO: 50446 - DNA, 80 bp, synthetic construct
  source 1..80: mol_type = other DNA
gaaagcagtcgtcatctgagatttccctggcagtggagcgggcccggcgacggcgagaagaagaggagcggcgcatgcaa

SEQ ID NO: 50447 - DNA, 80 bp, synthetic construct
  source 1..80: mol_type = other DNA
ctccacctccagcatcagccccaacaccagagacagaacctgaagagccagcacaggcccctcctgcccaatctactcct

SEQ ID NO: 50448 - DNA, 80 bp, synthetic construct
  source 1..80: mol_type = other DNA
aggctggggataaatgaagtagaaggcagttgttttggtttattggactatcagtgatagtgttctatcatttgtatatc

SEQ ID NO: 50449 - DNA, 80 bp, synthetic construct; identical to SEQ ID NO: 13353
  source 1..80: mol_type = other DNA

SEQ ID NO: 50450 - DNA, 80 bp, synthetic construct
  source 1..80: mol_type = other DNA
gaccatgccattgcactccagcctgggtgacagagcaagactctgtctcaaaaaaaaatcctgtctcacaagaaatacat

SEQ ID NO: 50451 - DNA, 80 bp, synthetic construct
  source 1..80: mol_type = other DNA
aatagaatattttagtcttaagggagctagagatgagacgtgagattcctggggtgttcatggagtgtctattgttggac

SEQ ID NO: 50452 - DNA, 80 bp, synthetic construct
  source 1..80: mol_type = other DNA
cagggcttgggctaccccaaatatcagaagtcgttgcctcctcgtttccagcggcagcagcaggtgaaatcaagttgttt

SEQ ID NO: 50453 - DNA, 80 bp, synthetic construct; identical to SEQ ID NO: 13354
  source 1..80: mol_type = other DNA

SEQ ID NO: 50454 - DNA, 80 bp, synthetic construct
  source 1..80: mol_type = other DNA
tctgggccggcccccacccatgcccccaatgaactttgatccccgatggatgatgattcctccttatgtggacccccggc

SEQ ID NO: 50455 - DNA, 80 bp, synthetic construct
  source 1..80: mol_type = other DNA
gtgatgagggaagggcatatgcttggcactgctgagatagctctgttgcaaaaatgggcttagttaagaaataagcagtg

SEQ ID NO: 50456 - DNA, 80 bp, synthetic construct
  source 1..80: mol_type = other DNA
actaaaaatacaaaaaagtagccggcgtggtggcgctcgcctgtagtcccagctactcgggagactgaggcaggagaaac

SEQ ID NO: 50457 - DNA, 80 bp, synthetic construct
  source 1..80: mol_type = other DNA
aaatgaatgaatgaatgaaagaagcagtggtccttcatttgccaggatttatttggggtgggttgattctcttgtaggga

SEQ ID NO: 50458 - DNA, 80 bp, synthetic construct; identical to SEQ ID NO: 13355
  source 1..80: mol_type = other DNA

SEQ ID NO: 50459 - DNA, 80 bp, synthetic construct
  source 1..80: mol_type = other DNA
aggggatgaggtgagtcttggtcatgagaaatgggtgagttcacagtgaaaggatctaggcctgggagaaaggtactttg

SEQ ID NO: 50460 - DNA, 80 bp, synthetic construct
  source 1..80: mol_type = other DNA
cagaaaaatagtaaaagagagtctgcatcataataaagtgttcttttcccacctagttctggttttcctgagatacttat

SEQ ID NO: 50461 - DNA, 80 bp, synthetic construct
  source 1..80: mol_type = other DNA
cccccaggcagtgatgaagtggccaagatacaaactccaccacccaagaaggagccccctaaggaggagactgcacagct

SEQ ID NO: 50462 - DNA, 80 bp, synthetic construct; identical to SEQ ID NO: 13356
  source 1..80: mol_type = other DNA

SEQ ID NO: 50463 - DNA, 80 bp, synthetic construct
  source 1..80: mol_type = other DNA
ggccgaggcgagtattttgccagagggaggggttttcgggggacctatgggggacgagggcggggagcccgaagccggga

SEQ ID NO: 50464 - DNA, 80 bp, synthetic construct
  source 1..80: mol_type = other DNA
gaaacaggcagcgagacccatgagagtgatctggctccttcagacaaggaggctcccacacccaaggagggaacactcac

SEQ ID NO: 50465 - DNA, 80 bp, synthetic construct
  source 1..80: mol_type = other DNA
cctccagccaagtctctggctcccaagaaacctcccacaggccctttgccaccaagtaaggagcctttgaaagagaagtt

SEQ ID NO: 50466 - DNA, 80 bp, synthetic construct; identical to SEQ ID NO: 13357
  source 1..80: mol_type = other DNA

SEQ ID NO: 50467 - DNA, 80 bp, synthetic construct
  source 1..80: mol_type = other DNA
acacccaaggctgtgggaactcctgggggaggtggaggtggagccgtaccaggtatttcagccatgtcccgcggagatct

SEQ ID NO: 50468 - DNA, 80 bp, synthetic construct
  source 1..80: mol_type = other DNA
cgaggcgacaagaggagctggccctctcccaagaaccgaaggtgggtaggaacaaacaaatttattgtggtttaaaaatt

SEQ ID NO: 50469 - DNA, 80 bp, synthetic construct
  source 1..80: mol_type = other DNA
gtattcattgctggttctttgctttccagtctgtgcatctgtatgcataggaatccttagaaggactcaaaaacacctgg

SEQ ID NO: 50470 - DNA, 80 bp, synthetic construct
  source 1..80: mol_type = other DNA
gaaacataacttgtgggaaaaagtaacgatttagtggatactggagctaatgctctgttttctccagtcgtcctccagag

SEQ ID NO: 50471 - DNA, 80 bp, synthetic construct; identical to SEQ ID NO: 13358
  source 1..80: mol_type = other DNA

SEQ ID NO: 50472 - DNA, 80 bp, synthetic construct
  source 1..80: mol_type = other DNA
agtagagaggaaaagttagggtcagtggcagagccaggcagatgctgaccctttttctctttcccagacccccactttga

SEQ ID NO: 50473 - DNA, 80 bp, synthetic construct
  source 1..80: mol_type = other DNA
aagggatgggtttgagattgtgcttcactgcactcttactcgtgaaaattcttctgggttatgttttctctgttttcttt

SEQ ID NO: 50474 - DNA, 80 bp, synthetic construct
  source 1..80: mol_type = other DNA
tcccacccaattcatgttttgcttctggcccttctcatctgtaggaatctttgccacctcctcatagctctggattcttg

SEQ ID NO: 50475 - DNA, 80 bp, synthetic construct; identical to SEQ ID NO: 13359
  source 1..80: mol_type = other DNA

SEQ ID NO: 50476 - DNA, 80 bp, synthetic construct
  source 1..80: mol_type = other DNA
tgcagtttgtatgtgtgcatcagtcaggtattggggtgctttctaccctgacttaactagctccttctccactcctctca

SEQ ID NO: 50477 - DNA, 80 bp, synthetic construct
  source 1..80: mol_type = other DNA
gagggtccacctggctctgaacctcctaggagaccaccacctgccccccacgatggggacagaaaggtaaaagaccaaaa

SEQ ID NO: 50478 - DNA, 80 bp, synthetic construct
  source 1..80: mol_type = other DNA
tctgccccctggccccattggcacagaacgatcacagcgtacagaccgaggcacagagcctggccccattcggccatccc

SEQ ID NO: 50479 - DNA, 80 bp, synthetic construct; identical to SEQ ID NO: 13360
  source 1..80: mol_type = other DNA

SEQ ID NO: 50480 - DNA, 80 bp, synthetic construct
  source 1..80: mol_type = other DNA
tgctgagccacaatccaagaacctggattctgggcactgtgtcccggagcccagctcctcaggccagcgcctgtatcctg

SEQ ID NO: 50481 - DNA, 80 bp, synthetic construct
  source 1..80: mol_type = other DNA
ttttctccctactttttgcttctatgggtgggatggtgatcttttttcttgaccacagatactaaagctgtttcaaccgt

SEQ ID NO: 50482 - DNA, 80 bp, synthetic construct
  source 1..80: mol_type = other DNA
ggaagacacagttctagggtactagaagctagtggacttaaggcattgctaggactctggcttcctaacagcttttctcc

SEQ ID NO: 50483 - DNA, 80 bp, synthetic construct; identical to SEQ ID NO: 13361
  source 1..80: mol_type = other DNA

SEQ ID NO: 50484 - DNA, 80 bp, synthetic construct
  source 1..80: mol_type = other DNA
gggctcctgcccagcaggtatattgtatcttcacacttccccttcatttgatttctctgtccagttgctggctttgattt

SEQ ID NO: 50485 - DNA, 80 bp, synthetic construct
  source 1..80: mol_type = other DNA
gtgggccctgctctgcagccccccagcctggctgtgcggcccccacctgctcctgctactcgggtgctgccttcacctgc

SEQ ID NO: 50486 - DNA, 80 bp, synthetic construct
  source 1..80: mol_type = other DNA
gattatcaaaaactgagcagcaaccttgggggacctggatcatcacggactcccccaactggaaggtgaaacggaatagg

SEQ ID NO: 50487 - DNA, 80 bp, synthetic construct; identical to SEQ ID NO: 13362
  source 1..80: mol_type = other DNA

SEQ ID NO: 50488 - DNA, 80 bp, synthetic construct
  source 1..80: mol_type = other DNA
gggacaaggagcctgggttgcccccaccccgctgagggagttcctcttgccccctacccccggggcttgtatatagatta

SEQ ID NO: 50489 - DNA, 80 bp, synthetic construct
  source 1..80: mol_type = other DNA
atgagttgtttgcattgtcttaaagcatggtgctgagtgatctgtagtttcagtcagggaaatattcattacttattcca

SEQ ID NO: 50490 - DNA, 80 bp, synthetic construct
  source 1..80: mol_type = other DNA
tatggcttcctttgcatatctagggccttggtgggacatctgtaacattactgggttatcaaccagtgtcttcacatgga

SEQ ID NO: 50491 - DNA, 80 bp, synthetic construct; identical to SEQ ID NO: 13363
  source 1..80: mol_type = other DNA

SEQ ID NO: 50492 - DNA, 80 bp, synthetic construct
  source 1..80: mol_type = other DNA
gctcagaaactttttttgatgggtaatttgagagctctatgctagtgtgcacctggaatatgctcccaactcaaaataca

SEQ ID NO: 50493 - DNA, 80 bp, synthetic construct
  source 1..80: mol_type = other DNA
tctctactaaaaatacaaaaattagccgggcgtcgtggcggacgcctgtagtcccagctactcaggaggctgaggcatga

SEQ ID NO: 50494 - DNA, 80 bp, synthetic construct
  source 1..80: mol_type = other DNA
aacagtgttccaaggaagtattaatttaaaaaagttcacacaagattaagggacacactacctaatggagacaatgtaga

SEQ ID NO: 50495 - DNA, 80 bp, synthetic construct; identical to SEQ ID NO: 13364
  source 1..80: mol_type = other DNA

SEQ ID NO: 50496 - DNA, 80 bp, synthetic construct
  source 1..80: mol_type = other DNA
aaatggtagcaccaggctgaccagttcatcgctgaagggatccagggaagagggaccctagcccaacccctcccactaga

SEQ ID NO: 50497 - DNA, 80 bp, synthetic construct
  source 1..80: mol_type = other DNA
ctgcccggctcacagcctctgagagaagcagctgggggccctcaccctgcatcgtctgggggacagggggttgggaggga

SEQ ID NO: 50498 - DNA, 80 bp, synthetic construct
  source 1..80: mol_type = other DNA
ttacagcagaaatgccttcctaattctctttggcactagccaaaactaaagtgaatgtgcttgaacgtgctcttcaaaac

SEQ ID NO: 50499 - DNA, 80 bp, synthetic construct
  source 1..80: mol_type = other DNA
ttatgcaacaaccaagagcaagtctgaatcccagaaaaagtttcctcattaaacgaggggaggggagactgaataacaag

SEQ ID NO: 50500 - DNA, 80 bp, synthetic construct; identical to SEQ ID NO: 13365
  source 1..80: mol_type = other DNA

SEQ ID NO: 50501 - DNA, 80 bp, synthetic construct
  source 1..80: mol_type = other DNA
ggggaagcattctcccgctgggtgtcagatggcgggaagagccaggcttcagaatttttagcctccaaacctttctcccc

SEQ ID NO: 50502 - DNA, 80 bp, synthetic construct
  source 1..80: mol_type = other DNA
attaaagaacaccatacttcctctcagatctctccagttctctcaagtaccctgaccccatcgcccaacaggtcccttac

SEQ ID NO: 50503 - DNA, 80 bp, synthetic construct
  source 1..80: mol_type = other DNA
agcagatttagaacacaaaaccctcaaccacctttagaaatagattagatccaggttacagaatgtcagtttagaaaaga

SEQ ID NO: 50504 - DNA, 80 bp, synthetic construct; identical to SEQ ID NO: 13366
  source 1..80: mol_type = other DNA

SEQ ID NO: 50505 - DNA, 80 bp, synthetic construct
  source 1..80: mol_type = other DNA
aagataacacaaagatcccaaaatcaagaatcataagactgggagtggaggaggcagctgccttgaccagacccaggaga

SEQ ID NO: 50506 - DNA, 80 bp, synthetic construct
  source 1..80: mol_type = other DNA
cttgtgtgggggcaattggagctttacctggcagagaagcagtcagaaataaggaataaaatgtgcaaaagaggagagtt

SEQ ID NO: 50507 - DNA, 80 bp, synthetic construct
  source 1..80: mol_type = other DNA
tggcacagaagagaaagcaaggccccaaagaatcctgggggacaagggcagatgttagcaatggcctttaccacctggcc

SEQ ID NO: 50508 - DNA, 80 bp, synthetic construct; identical to SEQ ID NO: 13367
  source 1..80: mol_type = other DNA

SEQ ID NO: 50509 - DNA, 80 bp, synthetic construct
  source 1..80: mol_type = other DNA
tgtctgtgttgcctggcaaataaagaaagaacaaagaacagaaagtgaggtgagaatgaagacacacggaaataatacgg

SEQ ID NO: 50510 - DNA, 80 bp, synthetic construct
  source 1..80: mol_type = other DNA
cttcctctgaacaggctgtcagaaagcagtgacactaattactatactttctttttctaaacctcattttcttcatcttt

SEQ ID NO: 50511 - DNA, 80 bp, synthetic construct
  source 1..80: mol_type = other DNA
caagaagtcagtcatgccttggagaaaggcagggacaccaggcatcgccacagtgatggtgggagaagccacaccagacc

SEQ ID NO: 50512 - DNA, 80 bp, synthetic construct; identical to SEQ ID NO: 13368
  source 1..80: mol_type = other DNA

SEQ ID NO: 50513 - DNA, 80 bp, synthetic construct
  source 1..80: mol_type = other DNA
gaggtgggagaactgtttgagcccaggagttcaaggttacagtgagctttaactcactggattgcaccattgcactccag

SEQ ID NO: 50514 - DNA, 80 bp, synthetic construct
  source 1..80: mol_type = other DNA
ttctctactaaaaacataaaaaattagctgggcgtggtggcgtgcacctgtagtcccagctactcaggaggctgaggcag

SEQ ID NO: 50515 - DNA, 80 bp, synthetic construct
  source 1..80: mol_type = other DNA
aaagcaggaaccaagaaaatatggaaagaactggaaagtgccagtgagcagactaggaaaggagtttaaactctgagtgg

SEQ ID NO: 50516 - DNA, 80 bp, synthetic construct; identical to SEQ ID NO: 13369
  source 1..80: mol_type = other DNA

SEQ ID NO: 50517 - DNA, 80 bp, synthetic construct
  source 1..80: mol_type = other DNA
gggccaggcccttgccagccagctgccaccatggactgtgccctacctcccaagcctccccttccaggtcattacctgcg

SEQ ID NO: 50518 - DNA, 80 bp, synthetic construct
  source 1..80: mol_type = other DNA
cccttccctttctctacccagagctcagcctgccctgatgccctcactcttacccagggtttggccatgaccagggggtc

SEQ ID NO: 50519 - DNA, 80 bp, synthetic construct
  source 1..80: mol_type = other DNA
ctgcctttccctccatctaaacagggagaggtactcccttcaccacacaaacacacctccaaagacaaaccaacccccac

SEQ ID NO: 50520 - DNA, 80 bp, synthetic construct; identical to SEQ ID NO: 13370
  source 1..80: mol_type = other DNA

SEQ ID NO: 50521 - DNA, 80 bp, synthetic construct
  source 1..80: mol_type = other DNA
cattgatctgaaaaagacagatggacaggcagatgtgagaaaaatacaagagcctaaccaagaaaacctcatgataaacc

SEQ ID NO: 50522 - DNA, 80 bp, synthetic construct
  source 1..80: mol_type = other DNA
ctccccctaacccacctgtatgggaatggctgcctgctggagcaccatgggggtggtgtagtgagacataggccggacca

SEQ ID NO: 50523 - DNA, 80 bp, synthetic construct
  source 1..80: mol_type = other DNA
ggcagaaaatatcaagctggagtccatctcactaataaaagcaataatgcctactgagaataccatgtcctccaaaactt

SEQ ID NO: 50524 - DNA, 80 bp, synthetic construct; identical to SEQ ID NO: 13371
  source 1..80: mol_type = other DNA

SEQ ID NO: 50525 - DNA, 80 bp, synthetic construct
  source 1..80: mol_type = other DNA
tcctcccgagttctagcgattctcctgcctcagcctcctgagtagctgggattacaggtgtgcaccactacatccagcta

SEQ ID NO: 50526 - DNA, 80 bp, synthetic construct
  source 1..80: mol_type = other DNA
aaagagttatctgcatttcagcctgttctgttttgggagtactggggctgaggagaaagggcagggccatcaaagggctc

SEQ ID NO: 50527 - DNA, 80 bp, synthetic construct
  source 1..80: mol_type = other DNA
caaagccttcctcagattcccaccctcacagtcaacagggaccacatgtgccctctttctccctggtctcccagagccct

SEQ ID NO: 50528 - DNA, 80 bp, synthetic construct
  source 1..80: mol_type = other DNA
gagacagagtctcgctctatcacccaggctggagtgcagtggtgcgacctcagctcactgcaagctccgtctcctgggtt

SEQ ID NO: 50529 - DNA, 80 bp, synthetic construct; identical to SEQ ID NO: 13372
  source 1..80: mol_type = other DNA

SEQ ID NO: 50530 - DNA, 80 bp, synthetic construct
  source 1..80: mol_type = other DNA
caccacaatcctgcacctacaatggtgaaagactaattctaagaaagagagcaggccttcgtgaactcagaggagaattc

SEQ ID NO: 50531 - DNA, 80 bp, synthetic construct
  source 1..80: mol_type = other DNA
gctaacccttcaactaagacctccaagtaatcctttccctcccttgccatggttcatttccttctccccatacttcactt

SEQ ID NO: 50532 - DNA, 80 bp, synthetic construct
  source 1..80: mol_type = other DNA
cgctcctccacttcttctgcctccatgggctcccggggaggtgcttcactttcaactggttctgatgtttgagagctcaa

SEQ ID NO: 50533 - DNA, 80 bp, synthetic construct
  source 1..80: mol_type = other DNA
ctgcagaggattactctacaggagactgaacagagaaagtatcctaactagactccctgaaggcatggctctgcaatttt

SEQ ID NO: 50534 - DNA, 80 bp, synthetic construct; identical to SEQ ID NO: 13373
  source 1..80: mol_type = other DNA

SEQ ID NO: 50535 - DNA, 80 bp, synthetic construct
  source 1..80: mol_type = other DNA
ggccacagcatctgtaatatttgtaaataaatttctaacaaagagtagagattgtggtttcctttcctccacaagttggt

SEQ ID NO: 50536 - DNA, 80 bp, synthetic construct
  source 1..80: mol_type = other DNA
gcctcacaaagatactttttctgcccaaaagaatgaatactgcagagaagactagattatgaaggccaaaccctgtggat

SEQ ID NO: 50537 - DNA, 80 bp, synthetic construct
  source 1..80: mol_type = other DNA
ctacaatgagagaaggtttatcagggtaggttacagatgaagccatgagttctaccacctactaaatcaggtcccagcca

SEQ ID NO: 50538 - DNA, 80 bp, synthetic construct
  source 1..80: mol_type = other DNA
cagagccgtcactctggggaaagggtaagggaagttgttctgggagaagccaacactaaggcctccacacctccaattca

SEQ ID NO: 50539 - DNA, 80 bp, synthetic construct; identical to SEQ ID NO: 13374
  source 1..80: mol_type = other DNA

SEQ ID NO: 50540 - DNA, 80 bp, synthetic construct
  source 1..80: mol_type = other DNA
acatctgcagaaaaatagacacacaccaaaacatagtatgaacaggtaaacccatggcctcagttcatccctccagacag

SEQ ID NO: 50541 - DNA, 80 bp, synthetic construct
  source 1..80: mol_type = other DNA
ggcagcaatgtgctccttaaactcttttacattcatctgaaaagaagaggcatgcacaggaatggaaagaatggaggaaa

SEQ ID NO: 50542 - DNA, 80 bp, synthetic construct
  source 1..80: mol_type = other DNA
ccgtgagatcattactgtgcaaacccttaaactaaagtaacagctgtcaaaatacagacaataaatttggcttggcgcgg

SEQ ID NO: 50543 - DNA, 80 bp, synthetic construct
  source 1..80: mol_type = other DNA
tagggaggctgaagcaagagaatcacttgaattcgggaggcggaggttgcagtgagccgagatcgcatcactacactcta

SEQ ID NO: 50544 - DNA, 80 bp, synthetic construct; identical to SEQ ID NO: 13375
  source 1..80: mol_type = other DNA

SEQ ID NO: 50545 - DNA, 80 bp, synthetic construct
  source 1..80: mol_type = other DNA
gccaacacggtaaaaccctgtctctactaaaaatacaaaaattagccgggcgtggtagtaggcgtcgtctgtaatcccag

SEQ ID NO: 50546 - DNA, 80 bp, synthetic construct
  source 1..80: mol_type = other DNA
aactgactcttgggaagtaccagagtatttatatacatctaatcacaagtctatatatggctttcttatatccaggtaat

SEQ ID NO: 50547 - DNA, 80 bp, synthetic construct
  source 1..80: mol_type = other DNA
ctccattatgggttctgatttctaccctttaagaacacagcatagacctgaccaatgtctatcagtaagacacacttgct

SEQ ID NO: 50548 - DNA, 80 bp, synthetic construct; identical to SEQ ID NO: 13376
  source 1..80: mol_type = other DNA

SEQ ID NO: 50549 - DNA, 80 bp, synthetic construct
  source 1..80: mol_type = other DNA
aacatggtgaaaccccgtctctactaaaaatacaaaaatcagctgggtatagtggcacacgcctataatcccagctactc

SEQ ID NO: 50550 - DNA, 80 bp, synthetic construct
  source 1..80: mol_type = other DNA
aaaaagaaaatctggtgaccagaaaatcaagctcatctctcaggctaaggggcctaaacgaggaaaagctaaaggtgtct

SEQ ID NO: 50551 - DNA, 80 bp, synthetic construct
  source 1..80: mol_type = other DNA
ggaaggaaggcccgctgttgcccagaccagagtgtacccgaaagactccctagcattaatccctgccccaatacctaaaa

SEQ ID NO: 50552 - DNA, 80 bp, synthetic construct; identical to SEQ ID NO: 13377
  source 1..80: mol_type = other DNA

SEQ ID NO: 50553 - DNA, 80 bp, synthetic construct
  source 1..80: mol_type = other DNA
tgccttcccacggtgttccagcagaacggcacaactaacccacagccaaacacacacacacacacacacacacacacaca

SEQ ID NO: 50554 - DNA, 80 bp, synthetic construct
  source 1..80: mol_type = other DNA
cttttgtggggcacgacgagaaagtccgcagccccaaacagtgagtttctgagggcgagtcgggccggggccggcctagg

SEQ ID NO: 50555 - DNA, 80 bp, synthetic construct
  source 1..80: mol_type = other DNA
gaagattgaggtggctaccgtaaatgcctgaaaaacagtcaccagctgggactctaccactgcctcgagaggggctatgg

SEQ ID NO: 50556 - DNA, 80 bp, synthetic construct; identical to SEQ ID NO: 13378
  source 1..80: mol_type = other DNA

SEQ ID NO: 50557 - DNA, 80 bp, synthetic construct
  source 1..80: mol_type = other DNA
agtaaacgtgctactaagttgcacgacttgtcaagaaaagaggcgcttccgagtttgagaattgggagcaaatggagtcc

SEQ ID NO: 50558 - DNA, 80 bp, synthetic construct
  source 1..80: mol_type = other DNA
aaagacacatcgctgttggggtgtccaacctttctgggattcgtagtttatacccaggtcctggttatattttagttaag

SEQ ID NO: 50559 - DNA, 80 bp, synthetic construct
  source 1..80: mol_type = other DNA
actccagatcgagcacttgtactttactgccccaataaaaagctgttaacattttagcttatttttttgagagagggtct

SEQ ID NO: 50560 - DNA, 80 bp, synthetic construct; identical to SEQ ID NO: 13379
  source 1..80: mol_type = other DNA

SEQ ID NO: 50561 - DNA, 80 bp, synthetic construct
  source 1..80: mol_type = other DNA
ccatctctactaaaaatacaaaaattagcctggcgtggtggcgggcgcctgtaatcccagctacttgggaggctgaggca

SEQ ID NO: 50562 - DNA, 80 bp, synthetic construct
  source 1..80: mol_type = other DNA
ctggtcacccaaattttgtttgttttttaactaaatcgcaagcctcagccctcggcaaattttttgtggcagtccatggg

SEQ ID NO: 50563 - DNA, 80 bp, synthetic construct
  source 1..80: mol_type = other DNA
gcacctatacctcctactcgggaatcatctgagccggggaagtcaaagtcatgcctgggcgacagagtgagaccctgtct

SEQ ID NO: 50564 - DNA, 80 bp, synthetic construct; identical to SEQ ID NO: 13380
  source 1..80: mol_type = other DNA

SEQ ID NO: 50565 - DNA, 80 bp, synthetic construct
  source 1..80: mol_type = other DNA
cccaggctcaagcaatcctccctcctcagcctccctagtagctgggactacaggcgtgtgccaccacatcggctaatttt

SEQ ID NO: 50566 - DNA, 80 bp, synthetic construct
  source 1..80: mol_type = other DNA
accaacatctatcctctctaacagccagattacatagcctctttgtagtaataaatgttgagtgaatgtgtcagtgaaca

SEQ ID NO: 50567 - DNA, 80 bp, synthetic construct
  source 1..80: mol_type = other DNA
gctatgtcttattcgtttttttatgtccccggggattagctagttcttgggaaacaactgggacttgggattcaaaacag

SEQ ID NO: 50568 - DNA, 80 bp, synthetic construct; identical to SEQ ID NO: 13381
  source 1..80: mol_type = other DNA

SEQ ID NO: 50569 - DNA, 80 bp, synthetic construct
  source 1..80: mol_type = other DNA
ccctcctgcctgaagatgttccaccaaatttgggcagctctgctctacttctatggtattatccttaactccatctacca

SEQ ID NO: 50570 - DNA, 80 bp, synthetic construct
  source 1..80: mol_type = other DNA
ggagaccatcttgggaaaggaagagaggaagggggtgtgagtgttgtgataatgaaagcaagaagaaaaatatcagtact

SEQ ID NO: 50571 - DNA, 80 bp, synthetic construct
  source 1..80: mol_type = other DNA
agtcatttaatgactctttgtcatggatccaatccccagttggaaagaggaaggcagccaacacctctacccctaaatct

SEQ ID NO: 50572 - DNA, 80 bp, synthetic construct
  source 1..80: mol_type = other DNA
gggcagctcccaccaaggaggagttggcaacttttgaccctgtggacaacattgtcttcaatatggctgctggctctgcc

SEQ ID NO: 50573 - DNA, 80 bp, synthetic construct; identical to SEQ ID NO: 13382
  source 1..80: mol_type = other DNA

SEQ ID NO: 50574 - DNA, 80 bp, synthetic construct
  source 1..80: mol_type = other DNA
aaaaactagctgggcatggtggtgggcacctgtagtcccagctactcacgaggttgaggcaggagaatggcgtgaacccg

SEQ ID NO: 50575 - DNA, 80 bp, synthetic construct
  source 1..80: mol_type = other DNA
gggctctgtgtgccccggaaatggatctaccacctgactgaagggagcacagatctcagaactgaaggttggttcttccc

SEQ ID NO: 50576 - DNA, 80 bp, synthetic construct
  source 1..80: mol_type = other DNA
ctctacagtgagtagggatacaaggcaggaagggttggagggaaacaagggagggcaggagaactcctcactctgggtcc

SEQ ID NO: 50577 - DNA, 80 bp, synthetic construct; identical to SEQ ID NO: 13383
  source 1..80: mol_type = other DNA

SEQ ID NO: 50578 - DNA, 80 bp, synthetic construct
  source 1..80: mol_type = other DNA
ccctttgacacagggaatgaaagaacacgttctcccccaccccattactatcaactttgcttttctccctggacttccct

SEQ ID NO: 50579 - DNA, 80 bp, synthetic construct
  source 1..80: mol_type = other DNA
ctggagacttccagctccagctcccactcaagataataaagataatttttcaatcctcatctcattctggggtttgtctc

SEQ ID NO: 50580 - DNA, 80 bp, synthetic construct
  source 1..80: mol_type = other DNA
atttaggatttgatgtgacacagttatttattgctgagtgagcaaacccctagcccccaagtggggactacaggcttcag

SEQ ID NO: 50581 - DNA, 80 bp, synthetic construct; identical to SEQ ID NO: 13384
  source 1..80: mol_type = other DNA

SEQ ID NO: 50582 - DNA, 80 bp, synthetic construct
  source 1..80: mol_type = other DNA
aaagtaaaagcaaaaataacagctggtgaatccaagagcagtgccctcactgtccataaacacaaacaccctaaatagtt

SEQ ID NO: 50583 - DNA, 80 bp, synthetic construct
  source 1..80: mol_type = other DNA
ctttcccgggtctcccctctgctcctcaccttccctctccaacccctcactctcccagtcagtggccgcctcatccccat

SEQ ID NO: 50584 - DNA, 80 bp, synthetic construct
  source 1..80: mol_type = other DNA
acgcaggcccagtgtgtccaaggctgcccgcagtggtcgtgagcacagggccagcagggcagaggccagcagctccagaa

SEQ ID NO: 50585 - DNA, 80 bp, synthetic construct; identical to SEQ ID NO: 13385
  source 1..80: mol_type = other DNA

SEQ ID NO: 50586 - DNA, 80 bp, synthetic construct
  source 1..80: mol_type = other DNA
atcttccatggtttctggggcactatcccagtcacttcctgaattctccgaggagctgtccacccgtctgggttctgggt

SEQ ID NO: 50587 - DNA, 80 bp, synthetic construct
  source 1..80: mol_type = other DNA
tctttctggctcagaacaggtatttgcctggtgatgcagtcctactctgaattcagaagtggctcctcccttctctgaat

SEQ ID NO: 50588 - DNA, 80 bp, synthetic construct
  source 1..80: mol_type = other DNA
gcgtttccggatttccttcccagcaggcagcaccccaagtttcactcaccaaggccacaccccaaggtgtcccagaaact

SEQ ID NO: 50589 - DNA, 80 bp, synthetic construct; identical to SEQ ID NO: 13386
  source 1..80: mol_type = other DNA

SEQ ID NO: 50590 - DNA, 80 bp, synthetic construct
  source 1..80: mol_type = other DNA
aagcccggaagcagctgcaccaggactggaaggacccgcgggggcggtgccgcagctcatggggcggaccctgcgaatag

SEQ ID NO: 50591 - DNA, 80 bp, synthetic construct
  source 1..80: mol_type = other DNA
ttccacatcccccaccactcctccatttcgcatccaagacttcatgaaaggctttcccagaaaagaaaaaatgaggagtc

SEQ ID NO: 50592 - DNA, 80 bp, synthetic construct
  source 1..80: mol_type = other DNA
tggaacaaagaagtttaaagtttagatttgggggctagagttctggtcccagttcaactaagtgtacaagcttgataatc

SEQ ID NO: 50593 - DNA, 80 bp, synthetic construct
  source 1..80: mol_type = other DNA
cggcggatcacctgaggtcgggagttcaagaccagcttggccaacatggagaaaccccgtctctactaaaaatacaaaat

SEQ ID NO: 50594 - DNA, 80 bp, synthetic construct; identical to SEQ ID NO: 13387
  source 1..80: mol_type = other DNA

SEQ ID NO: 50595 - DNA, 80 bp, synthetic construct
  source 1..80: mol_type = other DNA
gcacatagtatatggacttatgtttgtgaaatcagtgaattggctgtagtcagggaactcctcctgggggaagtgagact

SEQ ID NO: 50596 - DNA, 80 bp, synthetic construct
  source 1..80: mol_type = other DNA
gtggctcccaggcttctgtttggcttcctcaaaatagcttccagaaaagtgaataaaccacaaatggttgatttatttct

SEQ ID NO: 50597 - DNA, 80 bp, synthetic construct
  source 1..80: mol_type = other DNA
ctcgaggttcatgtaagtccttagatcccgctcccaagccctgtctttctcctccctccttctctcctccctccagctca

SEQ ID NO: 50598 - DNA, 80 bp, synthetic construct
  source 1..80: mol_type = other DNA
tcccagccccattcctggctcccagccccccctcagcagcagtttgaagcccgggctggagatgggcaccccaagtggaa

SEQ ID NO: 50599 - DNA, 80 bp, synthetic construct; identical to SEQ ID NO: 13388
  source 1..80: mol_type = other DNA

SEQ ID NO: 50600 - DNA, 80 bp, synthetic construct
  source 1..80: mol_type = other DNA
aggttggagtgcagtgccatgatcctggctcactgcaacttccaccttagcgattctcctgcctcagcctcccaagtagc

SEQ ID NO: 50601 - DNA, 80 bp, synthetic construct
  source 1..80: mol_type = other DNA
aaaaaaaaaaaaaagggacaaattgccttccttcctacttaacagtgagggatccaggctggtccaaaggtggtggtgag

SEQ ID NO: 50602 - DNA, 80 bp, synthetic construct
  source 1..80: mol_type = other DNA
tagcaaactcttgggcaaggggagggacattagtcataatgactatagctaacattcatgtattgcatactatgcggcat

SEQ ID NO: 50603 - DNA, 80 bp, synthetic construct; identical to SEQ ID NO: 13389
  source 1..80: mol_type = other DNA

SEQ ID NO: 50604 - DNA, 80 bp, synthetic construct
  source 1..80: mol_type = other DNA
ctcagctcacagacccccacccaggcagccccacggcccaggagatagctcacagctgccccctggcccgctcgagcagc

SEQ ID NO: 50605 - DNA, 80 bp, synthetic construct
  source 1..80: mol_type = other DNA
ctcccttgtccatgtcttcctgatgctccttctgccactgcttctgctgctggtgccttcattattcttcttttctttct

SEQ ID NO: 50606 - DNA, 80 bp, synthetic construct
  source 1..80: mol_type = other DNA
ctggggtcagtggctggggtgaaggtgatgagcaagggccgggacatggcttttgggagaactgagaaaatgataccagg

SEQ ID NO: 50607 - DNA, 80 bp, synthetic construct; identical to SEQ ID NO: 13390
  source 1..80: mol_type = other DNA

SEQ ID NO: 50608 - DNA, 80 bp, synthetic construct
  source 1..80: mol_type = other DNA
acaaaaatagatgggtcactccctagaagatctcggggagagtctcctatacgtgttgctgtgtagcttccgtaccgcaa

SEQ ID NO: 50609 - DNA, 80 bp, synthetic construct
  source 1..80: mol_type = other DNA
caatagtaaacgagcaaagctccgcgcgcccaggtggcgcgagcactaggatctgtcggttggggtcctacttttacata

SEQ ID NO: 50610 - DNA, 80 bp, synthetic construct
  source 1..80: mol_type = other DNA
cccctcaccattactctgaccagggttcgaaggtcacacttagagcctaaggggaaatggagaagtgcaaagggacgagc

SEQ ID NO: 50611 - DNA, 80 bp, synthetic construct; identical to SEQ ID NO: 13391
  source 1..80: mol_type = other DNA

SEQ ID NO: 50612 - DNA, 80 bp, synthetic construct
  source 1..80: mol_type = other DNA
ttccggtggcttctcgttgtgccccgcccgcaagcgccctcctccgggccttcgtgacagccaggtcgtgcgcgggtcat

SEQ ID NO: 50613 - DNA, 80 bp, synthetic construct
  source 1..80: mol_type = other DNA
cgcggtcgggtccgcggcctgcgctgtagcggtcgccgccgttccctggaagtagcaacttccctaccccaccccagtcc

SEQ ID NO: 50614 - DNA, 80 bp, synthetic construct
  source 1..80: mol_type = other DNA
atgtgtggattccggtgaaagggacctgacaatcgcccccaacccgtgagaaaaggaggagcccagttcttgcttgagaa

SEQ ID NO: 50615 - DNA, 80 bp, synthetic construct; identical to SEQ ID NO: 13392
  source 1..80: mol_type = other DNA

SEQ ID NO: 50616 - DNA, 80 bp, synthetic construct
  source 1..80: mol_type = other DNA
atgagcagctcagaggaggtgtcctggatttcctggttctgtgggctccgtggcaatgaattcttctgtgaagtgagttc

SEQ ID NO: 50617 - DNA, 80 bp, synthetic construct
  source 1..80: mol_type = other DNA
tggggcccaagtcctgagtctgccaccgtccagcaatataacgttgggctagtcaatttgtgtctttttcttttttttga

SEQ ID NO: 50618 - DNA, 80 bp, synthetic construct
  source 1..80: mol_type = other DNA
agtagagacagggtttcactatgttggccaggctggtctcgaactccagacctcaggtgatctgcctgcctcggcctccc

SEQ ID NO: 50619 - DNA, 80 bp, synthetic construct; identical to SEQ ID NO: 13393
  source 1..80: mol_type = other DNA

SEQ ID NO: 50620 - DNA, 80 bp, synthetic construct
  source 1..80: mol_type = other DNA
aaacaagcacaacagatgcagttgtgttgatgataaggcatcacttagagcattttgcccaggtcaaagatgaggatttt

SEQ ID NO: 50621 - DNA, 80 bp, synthetic construct
  source 1..80: mol_type = other DNA
tttgtgtgtgtgcgtgcactatttttctcttcaaatctctattcacttgcctgaattttgaaatttcctttggttctctg

SEQ ID NO: 50622 - DNA, 80 bp, synthetic construct
  source 1..80: mol_type = other DNA
gctttgcaccttccagtctagaatttcatcttctgcattgacattgttgcagttatgtattgaggagggagttgggaggg

SEQ ID NO: 50623 - DNA, 80 bp, synthetic construct; identical to SEQ ID NO: 13394
  source 1..80: mol_type = other DNA

SEQ ID NO: 50624 - DNA, 80 bp, synthetic construct
  source 1..80: mol_type = other DNA
ctacctgcctccttctgagcagtaagagacacaggttcctgcagcaagaagtcatgtttaagccctgtttaaggaagcta

SEQ ID NO: 50625 - DNA, 80 bp, synthetic construct
  source 1..80: mol_type = other DNA
actgcctcttcctcaaggaacaaacaacaaatggctctgatggtttgtagcctgcctaattggaagaaaggcaacacaga

SEQ ID NO: 50626 - DNA, 80 bp, synthetic construct
  source 1..80: mol_type = other DNA
caaggagactttggttactgtcctcgtgtgtactgtgagaaccagccaatgcttcccattggtgagtgttgaagaaggga

SEQ ID NO: 50627 - DNA, 80 bp, synthetic construct; identical to SEQ ID NO: 13395
  source 1..80: mol_type = other DNA

SEQ ID NO: 50628 - DNA, 80 bp, synthetic construct
  source 1..80: mol_type = other DNA
tgaggtctgcttctcccagaatcagggcatctccctgctgagtgactgtgggaaagttatttgattatctgtgcttgagt

SEQ ID NO: 50629 - DNA, 80 bp, synthetic construct
  source 1..80: mol_type = other DNA
atggggctcatgctgctgcctctctgacctctgccctggcctaggctctacggtttcaagatccatccgatggcctacca

SEQ ID NO: 50630 - DNA, 80 bp, synthetic construct
  source 1..80: mol_type = other DNA
cctgtatggtttttagtttaaattaaaggagtcgttatcgtggtgggaatatgaaataaagtagaagaaaaggccatgag

SEQ ID NO: 50631 - DNA, 80 bp, synthetic construct
  source 1..80: mol_type = other DNA
attgggtggtgtttttagtatggagcagaacagaattcctaggactgcgtgtgatgaaatgcaaggtcaaaaggaaaaga

SEQ ID NO: 50632 - DNA, 80 bp, synthetic construct; identical to SEQ ID NO: 13396
  source 1..80: mol_type = other DNA

SEQ ID NO: 50633 - DNA, 80 bp, synthetic construct
  source 1..80: mol_type = other DNA
tagatactaacccatggactttccaagggagggaataggtctttggagggtatgcaagacaaaggtagacactggataaa

SEQ ID NO: 50634 - DNA, 80 bp, synthetic construct
  source 1..80: mol_type = other DNA
gatcctgccccaagtaggaatatagctctgcatttacagcagctcctgctcagaccttgtcaaaaccaccctgcagctta

SEQ ID NO: 50635 - DNA, 80 bp, synthetic construct
  source 1..80: mol_type = other DNA
agggaggaaggggtaactgagtccaggaagggggtggagcgtggccatggataatcgggcttcctactggcccagggtat

SEQ ID NO: 50636 - DNA, 80 bp, synthetic construct; identical to SEQ ID NO: 13397
  source 1..80: mol_type = other DNA

SEQ ID NO: 50637 - DNA, 80 bp, synthetic construct
  source 1..80: mol_type = other DNA
tcaagaccagcctaggcaacatagtgagaccctgtctctacaaaaaaatagccaggcatggtggtatgcacctgtagtcc

SEQ ID NO: 50638 - DNA, 80 bp, synthetic construct
  source 1..80: mol_type = other DNA
aaaccagaagaatcttggaaggaggggtctaaggttctagggggccagcagagctcacttttctagcctcttgaaggact

SEQ ID NO: 50639 - DNA, 80 bp, synthetic construct
  source 1..80: mol_type = other DNA
accgctgccaagaaaaacgcaacacctactttgcagagtactggtatcaggcccagtgctgtcagtacgattattgcaac

SEQ ID NO: 50640 - DNA, 80 bp, synthetic construct; identical to SEQ ID NO: 13398
  source 1..80: mol_type = other DNA

SEQ ID NO: 50641 - DNA, 80 bp, synthetic construct
  source 1..80: mol_type = other DNA
attctttggtcactgtgatttcttaggcctccgtctgttgtaccactagcatctatatgacttttgtgtaattttctctc

SEQ ID NO: 50642 - DNA, 80 bp, synthetic construct
  source 1..80: mol_type = other DNA
gcaccaccacgcctggctaattttttgtatttttagtagagacggggtttcaccatgttggtcaggctggtctcgaactc

SEQ ID NO: 50643 - DNA, 80 bp, synthetic construct
  source 1..80: mol_type = other DNA
ctccattccttccccatcatctgagtgttccagtatcccccatccctctcaatccagtcacctgcctattgacatctagc

SEQ ID NO: 50644 - DNA, 80 bp, synthetic construct; identical to SEQ ID NO: 13399
  source 1..80: mol_type = other DNA

SEQ ID NO: 50645 - DNA, 80 bp, synthetic construct
  source 1..80: mol_type = other DNA
ggcaattttgtgtccctgcctcactgtctccaccaacccccgcctgtcctagtgttgttctgcctcctgtcctctcttgc

SEQ ID NO: 50646 - DNA, 80 bp, synthetic construct
  source 1..80: mol_type = other DNA
tcacattgtttgtggggtcaggctcaggtgtgggcaggtaaacacagattaaagagggttaatgcctggcgcagtggctc

SEQ ID NO: 50647 - DNA, 80 bp, synthetic construct
  source 1..80: mol_type = other DNA
ggctgaggccggagaatcacttgaacctggaaggtggaggtggcgatgagccgagattgcaccattgcactccagcctgg

SEQ ID NO: 50648 - DNA, 80 bp, synthetic construct; identical to SEQ ID NO: 13400
  source 1..80: mol_type = other DNA

SEQ ID NO: 50649 - DNA, 80 bp, synthetic construct
  source 1..80: mol_type = other DNA
atgaaaaattagctgggcatggtggctcatgcttgtaatcccagctacttgggaggctgaggcaggagaattgcttgaac

SEQ ID NO: 50650 - DNA, 80 bp, synthetic construct
  source 1..80: mol_type = other DNA
tcaggagttcgacaccagcctgaccaacatggtgaaagcccatctctactaaaaaaaaaaaaaaaaaaattagttgggca

SEQ ID NO: 50651 - DNA, 80 bp, synthetic construct
  source 1..80: mol_type = other DNA
ctctttaaaccagaaagactcaggaactcagagccacatgccagagttacctgctgctggggccctggactcctgccatt

SEQ ID NO: 50652 - DNA, 80 bp, synthetic construct; identical to SEQ ID NO: 13401
  source 1..80: mol_type = other DNA

SEQ ID NO: 50653 - DNA, 80 bp, synthetic construct
  source 1..80: mol_type = other DNA
cttggtcacctgtcaagtagggatagtgcctcagatgattgagaaaacacatgtaaatgtgcatacacaagtagaagtta

SEQ ID NO: 50654 - DNA, 80 bp, synthetic construct
  source 1..80: mol_type = other DNA
agatgcacaccaccatgctcacctggctgatttacttattttcaaacctttttggtaaaacattcagaagcttgcacata

SEQ ID NO: 50655 - DNA, 80 bp, synthetic construct
  source 1..80: mol_type = other DNA
ttctgtctgtgcttgatggaaatggcatcgtacgcatctgcttttacctatatagtgttttgcacacgtgttaacaaatc

SEQ ID NO: 50656 - DNA, 80 bp, synthetic construct
  source 1..80: mol_type = other DNA
cttttacctatatagtgttttgcacacgtgttaacaaatctgtgtggcctgtactctgacggaaaataccaaaccaatga

SEQ ID NO: 50657 - DNA, 80 bp, synthetic construct; identical to SEQ ID NO: 13402
  source 1..80: mol_type = other DNA

SEQ ID NO: 50658 - DNA, 80 bp, synthetic construct
  source 1..80: mol_type = other DNA
taatcccagctactcgggaggctgaggcagaagaatcacttgaacctgggaggcagaagttgcaatgagccaagatcaca

SEQ ID NO: 50659 - DNA, 80 bp, synthetic construct
  source 1..80: mol_type = other DNA
ctgccgaggatgcccactaactttctggcattcaccataggagggctttcatttcctctttctctttttgtgtctagagc

SEQ ID NO: 50660 - DNA, 80 bp, synthetic construct
  source 1..80: mol_type = other DNA
agagacataccaaacagtttacacacaaatttatttgggagaaacatccagggactaggggacaagagaggaaacctggt

SEQ ID NO: 50661 - DNA, 80 bp, synthetic construct; identical to SEQ ID NO: 13403
  source 1..80: mol_type = other DNA

SEQ ID NO: 50662 - DNA, 80 bp, synthetic construct
  source 1..80: mol_type = other DNA
gaagtccccaggaagagccccaaatcctctcatccccacactcataagtcaaaaaaaaaagaaaaagaaaagattcctgt

SEQ ID NO: 50663 - DNA, 80 bp, synthetic construct
  source 1..80: mol_type = other DNA
tgagaaaaagctgggaaatgttttggagattgggtggcaggaaggaggtgtattgttatttatttttcagaccaaaagag

SEQ ID NO: 50664 - DNA, 80 bp, synthetic construct
  source 1..80: mol_type = other DNA
catcaatagtgggatggggaaatcagctgtgatatgcgcatgctatggagtagtatacagcaggtcaataaaacaaggaa

SEQ ID NO: 50665 - DNA, 80 bp, synthetic construct; identical to SEQ ID NO: 13404
  source 1..80: mol_type = other DNA

SEQ ID NO: 50666 - DNA, 80 bp, synthetic construct
  source 1..80: mol_type = other DNA
ctggagccatcacaaattctggctcagcatctgtgagactcaggcaaggttatgacctttctgcacctgtttcctcatct

SEQ ID NO: 50667 - DNA, 80 bp, synthetic construct
  source 1..80: mol_type = other DNA
tccagtggtcaacgggatatgaggagagcggtttgacataacattcagattcagaaggaagtggtatgtggctgctggtt

SEQ ID NO: 50668 - DNA, 80 bp, synthetic construct
  source 1..80: mol_type = other DNA
agactgaagaagccgtggaggatgcaggagaagagcaacaccagcagtaactgcagacagatgcggaagcagacagcttg

SEQ ID NO: 50669 - DNA, 80 bp, synthetic construct
  source 1..80: mol_type = other DNA
ctcacgcctgtaatcccagcactctgggaagctaaggtgggtggatcacctgaggtcaggagttcgagaccagcctggcc

SEQ ID NO: 50670 - DNA, 80 bp, synthetic construct; identical to SEQ ID NO: 13405
  source 1..80: mol_type = other DNA

SEQ ID NO: 50671 - DNA, 80 bp, synthetic construct
  source 1..80: mol_type = other DNA
gaggcatcggtagcagcgcaggtatttggggaatggaagtggttgagggggttcccaattgacaggaacaaacttaccta

SEQ ID NO: 50672 - DNA, 80 bp, synthetic construct
  source 1..80: mol_type = other DNA
ccccaattctctgcttccttccccaactgcatacacatacatcccccttttcctctggtcctaaggccagaccacatgtt

SEQ ID NO: 50673 - DNA, 80 bp, synthetic construct
  source 1..80: mol_type = other DNA
tggactcagtcttgttctatcctgtggattctggttttctcatccagcacactccctaaccctccctattctatgttgcc

SEQ ID NO: 50674 - DNA, 80 bp, synthetic construct
  source 1..80: mol_type = other DNA
aggtcaggagttcgagaccagcctggccaacatggtgaaaccccgtctctactaaatatacaaaaattagctgggcttgg

SEQ ID NO: 50675 - DNA, 80 bp, synthetic construct; identical to SEQ ID NO: 13406
  source 1..80: mol_type = other DNA

SEQ ID NO: 50676 - DNA, 80 bp, synthetic construct
  source 1..80: mol_type = other DNA
ctgctgtggaagcacaggggacccagactctggctccctgcagggcctgccataaaacgcatgactgcctgctggcctcc

SEQ ID NO: 50677 - DNA, 80 bp, synthetic construct
  source 1..80: mol_type = other DNA
caataggggaatgagaaaaggaactgtctttcctattaattggacagatgtttattgaatcactgcatcagatgctgggg

SEQ ID NO: 50678 - DNA, 80 bp, synthetic construct
  source 1..80: mol_type = other DNA
tgaccagagggatttcggcagaggagtaacttgatcggatttctgtttataaaagattgccatggctgcacattgcattt

SEQ ID NO: 50679 - DNA, 80 bp, synthetic construct; identical to SEQ ID NO: 13407
  source 1..80: mol_type = other DNA

SEQ ID NO: 50680 - DNA, 80 bp, synthetic construct
  source 1..80: mol_type = other DNA
catcctttttcctgccccgcctgtgctcagctgcggctcagtgggcctgaactccggagcccacagaatctggcgctggg

SEQ ID NO: 50681 - DNA, 80 bp, synthetic construct
  source 1..80: mol_type = other DNA
tccccaggaaggcggcgccgtagcgccactctccctcccaggcgaattctggagaccgcggccccaggcgtctcacccat

SEQ ID NO: 50682 - DNA, 80 bp, synthetic construct
  source 1..80: mol_type = other DNA
tgctccaatttcccgtctggaggttctggtcgaggctccgaactcgggttccctgctacctcccagactattcaagaatt

SEQ ID NO: 50683 - DNA, 80 bp, synthetic construct; identical to SEQ ID NO: 13408
  source 1..80: mol_type = other DNA

SEQ ID NO: 50684 - DNA, 80 bp, synthetic construct
  source 1..80: mol_type = other DNA
ggtcaggagttcgcaaccagcctgagcaacatggtgaaaccccgtctctatcaaaaaatacaaaaacattagccaggtgt

SEQ ID NO: 50685 - DNA, 80 bp, synthetic construct
  source 1..80: mol_type = other DNA
attgtattagagaaaagccagagtagtggagaactgcagaggaacgcggggcacctacataaatgtcttgaatgaatgag

SEQ ID NO: 50686 - DNA, 80 bp, synthetic construct
  source 1..80: mol_type = other DNA
aattagccaggagtggtggcgcctgcctgtagtcccagctactcaggaggctgaggcaggagaatcgcttgaacccggga

SEQ ID NO: 50687 - DNA, 80 bp, synthetic construct; identical to SEQ ID NO: 13409
  source 1..80: mol_type = other DNA

SEQ ID NO: 50688 - DNA, 80 bp, synthetic construct
  source 1..80: mol_type = other DNA
ggccttcttcggagggggcgcggcctccgagtaattaatcccgtctttgttgcgttttgctcctctcctgtccacccagc

SEQ ID NO: 50689 - DNA, 80 bp, synthetic construct
  source 1..80: mol_type = other DNA
gatgacggtgtcccttctgagtgctcctacctagagttaagggatacctgagggtaagcaaccgagtgacgaaacaaaga

SEQ ID NO: 50690 - DNA, 80 bp, synthetic construct
  source 1..80: mol_type = other DNA
tgcgttctagagaggaaccagagagagggtctttaacctaaatataaatgaatgactggattcctgaagaatccggaatg

SEQ ID NO: 50691 - DNA, 80 bp, synthetic construct
  source 1..80: mol_type = other DNA
cactcgcttgtgacagctgtacgagaaatacatgcctctcctaggagcaaaccctcaacccaaacaggcagcacagagcc

SEQ ID NO: 50692 - DNA, 80 bp, synthetic construct; identical to SEQ ID NO: 13410
  source 1..80: mol_type = other DNA

SEQ ID NO: 50693 - DNA, 80 bp, synthetic construct
  source 1..80: mol_type = other DNA
cacccctgggtggggattagttctgaaaacaaacacagctgctctgaaccttattgcatagggagtaatctgaagtaggc

SEQ ID NO: 50694 - DNA, 80 bp, synthetic construct
  source 1..80: mol_type = other DNA
taagatgggggaaagtggcagtaggggcagttcagcagagtccctaatggccatgtccagggaggggtgtcctttgtccc

SEQ ID NO: 50695 - DNA, 80 bp, synthetic construct
  source 1..80: mol_type = other DNA
agcctccagagtagcttggaacacgggtgcatgccaccatgcctgggtaatttttaaattttttgtactgatggagtctc

SEQ ID NO: 50696 - DNA, 80 bp, synthetic construct; identical to SEQ ID NO: 13411
  source 1..80: mol_type = other DNA

SEQ ID NO: 50697 - DNA, 80 bp, synthetic construct
  source 1..80: mol_type = other DNA
catcacatcacctgattaagtctcagatctccacttccagtggagactcagtatatcttcccttaaggagttgcagcgct

SEQ ID NO: 50698 - DNA, 80 bp, synthetic construct
  source 1..80: mol_type = other DNA
cggtggctcacgcctgtaatcccagcactttgggaggcagaggcgggtggatcacgaggtcaggagatcgagaccatcct

SEQ ID NO: 50699 - DNA, 80 bp, synthetic construct
  source 1..80: mol_type = other DNA
ccagcctgggtgacagagcgagactccgtctcaaaaaaaaaaaaaaaaaaagaatggagtcggctgaggtgggtggattg

SEQ ID NO: 50700 - DNA, 80 bp, synthetic construct; identical to SEQ ID NO: 13412
  source 1..80: mol_type = other DNA

SEQ ID NO: 50701 - DNA, 80 bp, synthetic construct
  source 1..80: mol_type = other DNA
tcacctgaggtcaggagttcgagaccaacttggccaacatggcgaaacctcatcttcactaaaaatacaaaaatcaactg

SEQ ID NO: 50702 - DNA, 80 bp, synthetic construct
  source 1..80: mol_type = other DNA
tgccaggcaacaaaccaatgggtggaagagggatttattcactgtgttccacaaggtccaaagttagagatagatggcag

SEQ ID NO: 50703 - DNA, 80 bp, synthetic construct
  source 1..80: mol_type = other DNA
cagagacttgatgacatggcaaggtgggtgtgcagggtttgctgcataagacgtggggagcaggcccttcctcactcttc

SEQ ID NO: 50704 - DNA, 80 bp, synthetic construct; identical to SEQ ID NO: 13413
  source 1..80: mol_type = other DNA

SEQ ID NO: 50705 - DNA, 80 bp, synthetic construct
  source 1..80: mol_type = other DNA
tgcccctggctccctggacacttgagaagttatacaattagcctgatagtagaaaaaatacctttttattaattattagg

SEQ ID NO: 50706 - DNA, 80 bp, synthetic construct
  source 1..80: mol_type = other DNA
gagggtctttcctcatgtctcctctcaccccattcttccataatgagtcccagttggtccctagaggtgccagggcatct

SEQ ID NO: 50707 - DNA, 80 bp, synthetic construct
  source 1..80: mol_type = other DNA
cactctacaaaagctgccacttccaatgcttatagggtatccccagtccccctatgtgagccctggccattcaagaaccc

SEQ ID NO: 50708 - DNA, 80 bp, synthetic construct; identical to SEQ ID NO: 13414
  source 1..80: mol_type = other DNA

SEQ ID NO: 50709 - DNA, 80 bp, synthetic construct
  source 1..80: mol_type = other DNA
gaccctcctctgccatcacccggggatacctacggaggaagtgccaggacaggtcagggctgattttttttcattcacca

SEQ ID NO: 50710 - DNA, 80 bp, synthetic construct
  source 1..80: mol_type = other DNA
gagaagaatgtaccctggaggggctggaggttaggaggaagggtctagatacccaggtttctggtgggcagaggtagaag

SEQ ID NO: 50711 - DNA, 80 bp, synthetic construct
  source 1..80: mol_type = other DNA
gtgacaactggcccacccctatccctgcactggtagcattcttaccctccccttgctatagcacagcccttgacctagcc

SEQ ID NO: 50712 - DNA, 80 bp, synthetic construct; identical to SEQ ID NO: 13415
  source 1..80: mol_type = other DNA

SEQ ID NO: 50713 - DNA, 80 bp, synthetic construct
  source 1..80: mol_type = other DNA
cccaacataaaggtcctcactattcacggagaaagaaaactgaggcccccagacaaaggagtcctcctgcttccaacaat

SEQ ID NO: 50714 - DNA, 80 bp, synthetic construct
  source 1..80: mol_type = other DNA
ccaggatcatggcactaacatctgggtaggacatggctgcccacgtggctggtaccagggcagggaagaagagtaagaac

SEQ ID NO: 50715 - DNA, 80 bp, synthetic construct
  source 1..80: mol_type = other DNA
actgaagataatgggcaggaaacattcactttccctgatctccccacccaggacctgggtctgcttttccttttaatgac

SEQ ID NO: 50716 - DNA, 80 bp, synthetic construct; identical to SEQ ID NO: 13416
  source 1..80: mol_type = other DNA

SEQ ID NO: 50717 - DNA, 80 bp, synthetic construct
  source 1..80: mol_type = other DNA
cctatgacaggcagagaaggtgtagaaggaagggatggtaggagaggttgttctctccagaagacggatgtgtacaatga

SEQ ID NO: 50718 - DNA, 80 bp, synthetic construct
  source 1..80: mol_type = other DNA
acagacataattcaggaaaaggaagggattcctgagatggtctcaccgtgcttccagcaaagcctggatgattccagccc

SEQ ID NO: 50719 - DNA, 80 bp, synthetic construct
  source 1..80: mol_type = other DNA
tctgaggcagcacagggagcagcatgtgattgtgtggggtgtgtggtgggggaatggaacagaatgaaaagcataatagc

SEQ ID NO: 50720 - DNA, 80 bp, synthetic construct; identical to SEQ ID NO: 13417
  source 1..80: mol_type = other DNA

SEQ ID NO: 50721 - DNA, 80 bp, synthetic construct
  source 1..80: mol_type = other DNA
aggtttctgttttctccaaggggaatggaagcttctcattccacagggtccataagaggagaagcaaagggattacaaat

SEQ ID NO: 50722 - DNA, 80 bp, synthetic construct
  source 1..80: mol_type = other DNA
tgctctccctatccctctctgagctccagtcttatggtcagataaactgtaatgccatggcgccccaagctgaaacccac

SEQ ID NO: 50723 - DNA, 80 bp, synthetic construct
  source 1..80: mol_type = other DNA
tactgtgaggtccaggaaaggttttctgtgccccagtttcatctcctgtaaaatgggctaatataagcagtacctatctc

SEQ ID NO: 50724 - DNA, 80 bp, synthetic construct; identical to SEQ ID NO: 13418
  source 1..80: mol_type = other DNA

SEQ ID NO: 50725 - DNA, 80 bp, synthetic construct
  source 1..80: mol_type = other DNA
caatctcattgccatcacaggccagcagctttgcccggcgcccattacactgagtacggaagacgcaatggccaagatgc

SEQ ID NO: 50726 - DNA, 80 bp, synthetic construct
  source 1..80: mol_type = other DNA
agcctggatacagcatccggcgccctagggtgtgcgccaccaggtagctgtggggaacacaggttaacaaaccccaaccc

SEQ ID NO: 50727 - DNA, 80 bp, synthetic construct
  source 1..80: mol_type = other DNA
gtaccaggctagtgttttgcaaacttttcttactgcaacctttgtaagataaacattttatattgtggctcagtgcacac

SEQ ID NO: 50728 - DNA, 80 bp, synthetic construct; identical to SEQ ID NO: 13419
  source 1..80: mol_type = other DNA

SEQ ID NO: 50729 - DNA, 80 bp, synthetic construct
  source 1..80: mol_type = other DNA
ggcaggagcccttcagaacatgttaccttacttaatctcctcagcaaccttgcagggcaggttcatcacaggtgcagaca

SEQ ID NO: 50730 - DNA, 80 bp, synthetic construct
  source 1..80: mol_type = other DNA
ttttgttcatatcccagttctttacttactacatttgagactccagacctctctgagcctcttttcttcaaacataaata

SEQ ID NO: 50731 - DNA, 80 bp, synthetic construct
  source 1..80: mol_type = other DNA
gatctgacaaggcagcttcttaacccggttgaggagggtgtctgctgtcccccggtgcaggggctctgggcgaagcaggg

SEQ ID NO: 50732 - DNA, 80 bp, synthetic construct; identical to SEQ ID NO: 13420
  source 1..80: mol_type = other DNA

SEQ ID NO: 50733 - DNA, 80 bp, synthetic construct
  source 1..80: mol_type = other DNA
atccaggggtctgatccccacacatcatggggaaaccaagcggaggtcaataccctcccaattctcagatggaaaattct

SEQ ID NO: 50734 - DNA, 80 bp, synthetic construct
  source 1..80: mol_type = other DNA
gacgggtagtaggggtcgctggctggtcacggtctattccccacctgggtcccttatagggtgctgtcttagaagcttag

SEQ ID NO: 50735 - DNA, 80 bp, synthetic construct
  source 1..80: mol_type = other DNA
atggatcagtgttgccctacagcccatccgaacctcgggccaccccactgagccagtccacatgcctttttttttttttt

SEQ ID NO: 50736 - DNA, 80 bp, synthetic construct; identical to SEQ ID NO: 13421
  source 1..80: mol_type = other DNA

SEQ ID NO: 50737 - DNA, 80 bp, synthetic construct
  source 1..80: mol_type = other DNA
gctctgcctcccggcttcacgccattctcccgcctcagcctccaagtagctgggactacaggtgcctgccaccaccatgc

SEQ ID NO: 50738 - DNA, 80 bp, synthetic construct
  source 1..80: mol_type = other DNA
ctatattcgtcccccaccccctgagctcctagcactctattttgagggtttttattttctgcacagaaattttttgacat

SEQ ID NO: 50739 - DNA, 80 bp, synthetic construct
  source 1..80: mol_type = other DNA
atctggacttagccactttcttgctctatgactccgaatgggtcacttaacctctttttgcctctgttttctcacattta

SEQ ID NO: 50740 - DNA, 80 bp, synthetic construct; identical to SEQ ID NO: 13422
  source 1..80: mol_type = other DNA

SEQ ID NO: 50741 - DNA, 80 bp, synthetic construct
  source 1..80: mol_type = other DNA
gcatggtattcaatgcatacaacaaaattaaacatttatagaactgagctgctgtgatacagagaaaactaccttctaag

SEQ ID NO: 50742 - DNA, 80 bp, synthetic construct
  source 1..80: mol_type = other DNA
gcatgcctgtaatcccagctacttgggaggctgaggcaggagaatcgcttgaacccaggaggcggaggttgcagtgagct

SEQ ID NO: 50743 - DNA, 80 bp, synthetic construct
  source 1..80: mol_type = other DNA
actagcctggccaacatgatgaaaccctgtctctgctaaaaatacaaaaattggccaggcacggtggctcacgcctgtaa

SEQ ID NO: 50744 - DNA, 80 bp, synthetic construct; identical to SEQ ID NO: 13423
  source 1..80: mol_type = other DNA

SEQ ID NO: 50745 - DNA, 80 bp, synthetic construct
  source 1..80: mol_type = other DNA
gagtgagactctgtctcaaagaagaaaaaaaaaaaaagaggccaggagtggtggctcacgcctgtaatcccagcactttg

SEQ ID NO: 50746 - DNA, 80 bp, synthetic construct
  source 1..80: mol_type = other DNA
gaacctgggaggtggagagtgcagtgagccgagatcgtgccattgcactccagcctgggcaacaagagcgaaactccatc

SEQ ID NO: 50747 - DNA, 80 bp, synthetic construct
  source 1..80: mol_type = other DNA
tgagaagggatacagcaatgtgcaagcaaacacccagtgtggtgggtggtaaaacacacctcctcttcctgcagaagcca

SEQ ID NO: 50748 - DNA, 80 bp, synthetic construct; identical to SEQ ID NO: 13424
  source 1..80: mol_type = other DNA

SEQ ID NO: 50749 - DNA, 80 bp, synthetic construct
  source 1..80: mol_type = other DNA
cttcttctccctagcttctgcagtttgtgtctttatagacaatccttaacctaccatcttccagaatgttcctcttcctc

SEQ ID NO: 50750 - DNA, 80 bp, synthetic construct
  source 1..80: mol_type = other DNA
tctggcttcagagtctccgactcctgcccataattacttcctcactgaattcctgactcttctatcctcattctcttcaa

SEQ ID NO: 50751 - DNA, 80 bp, synthetic construct
  source 1..80: mol_type = other DNA
ctctcttttcacttacacagtcagtgattgcatccactctcctttcactgctgagccacctcaaaccctaacttctctcc

SEQ ID NO: 50752 - DNA, 80 bp, synthetic construct; identical to SEQ ID NO: 13425
  source 1..80: mol_type = other DNA

SEQ ID NO: 50753 - DNA, 80 bp, synthetic construct
  source 1..80: mol_type = other DNA
aattgatggcagcttagacttgaggaactgaggtatatgtttcataaaagtatgtgccagaaaaaaaaaaaacccacacc

SEQ ID NO: 50754 - DNA, 80 bp, synthetic construct
  source 1..80: mol_type = other DNA
tcacaaaactatatataaaaaaaaaatcacaaaactatacatcaaaaaatttaaaaaggcttttatattttgttctctgg

SEQ ID NO: 50755 - DNA, 80 bp, synthetic construct
  source 1..80: mol_type = other DNA
cccgccaccatgcacagctaattttttctgtattttttctaaattaaaaataaataaaataaaaaactaagacaaaactg

SEQ ID NO: 50756 - DNA, 80 bp, synthetic construct; identical to SEQ ID NO: 13426
  source 1..80: mol_type = other DNA

SEQ ID NO: 50757 - DNA, 80 bp, synthetic construct
  source 1..80: mol_type = other DNA
aaaaccatgcccttgctgggcgcggtggctcaagcctgtaatctcagcactttgggaggccgaggcgggtggatcacgag

SEQ ID NO: 50758 - DNA, 80 bp, synthetic construct
  source 1..80: mol_type = other DNA
tgagccgagatcgcgccactgcactccagcctgggggacagagcgagactccgtctcaaaaaaaaaaaaaaaaaaaaaga

SEQ ID NO: 50759 - DNA, 80 bp, synthetic construct
  source 1..80: mol_type = other DNA
agacagagtctcgctctgtcacccagactggagtgcagtggtgctatcttggctcactgcaacctctgcctcccaggttc

SEQ ID NO: 50760 - DNA, 80 bp, synthetic construct
  source 1..80: mol_type = other DNA
ctcttggattcaagcaattctactgcctcagcctcccgaatagctgggattacaggtgctcaccaccatacctggctaat

SEQ ID NO: 50761 - DNA, 80 bp, synthetic construct; identical to SEQ ID NO: 13427
  source 1..80: mol_type = other DNA

SEQ ID NO: 50762 - DNA, 80 bp, synthetic construct
  source 1..80: mol_type = other DNA
gacggggttttaccatgttggtcaggctggtctcaaattcctgacctcgtgatccactggcctctgcctcccaaagtgct

SEQ ID NO: 50763 - DNA, 80 bp, synthetic construct
  source 1..80: mol_type = other DNA
ttcctagtatgtatacatatatagaattgttgtagggtatatgcatcttttctagataaaagcagccaggcatagtggct

SEQ ID NO: 50764 - DNA, 80 bp, synthetic construct
  source 1..80: mol_type = other DNA
caagtcttttaaggaaaagatcatgccttaaaccattctcaatgattccctctcggaggcccatcactaaaatgtatttg

SEQ ID NO: 50765 - DNA, 80 bp, synthetic construct; identical to SEQ ID NO: 13428
  source 1..80: mol_type = other DNA

SEQ ID NO: 50766 - DNA, 80 bp, synthetic construct
  source 1..80: mol_type = other DNA
tcccctctcctctttagggagctggctcatctgccaacaacctgcccatttgctaccccaccacctttgaaaccacactg

SEQ ID NO: 50767 - DNA, 80 bp, synthetic construct
  source 1..80: mol_type = other DNA
tgccattccaggcatatactatacactctgagcaagatggacaacctgagggatatcatatcatatttggtgtatgacac

SEQ ID NO: 50768 - DNA, 80 bp, synthetic construct
  source 1..80: mol_type = other DNA
catctccagacataattccatcacatttaaaggcagtctctctgtctactcaagttaatcaagccttttcaattggccct

SEQ ID NO: 50769 - DNA, 80 bp, synthetic construct
  source 1..80: mol_type = other DNA
agtaaacatgttttccttacggctcaggttgcccccagagaaagcagtgctacataccaaaggggagtgccaagtatgca

SEQ ID NO: 50770 - DNA, 80 bp, synthetic construct; identical to SEQ ID NO: 13429
  source 1..80: mol_type = other DNA

SEQ ID NO: 50771 - DNA, 80 bp, synthetic construct
  source 1..80: mol_type = other DNA
tgaccatgggaacaaacacagggagctggatttggaagcaaaagtgaaagcagcattggacgatttttgctccttttcca

SEQ ID NO: 50772 - DNA, 80 bp, synthetic construct
  source 1..80: mol_type = other DNA
tgactaagaagagaatgtgggtaggagcgggcagtttgtaggagacagtaacacaatgagacaactgataaaaaggaaga

SEQ ID NO: 50773 - DNA, 80 bp, synthetic construct
  source 1..80: mol_type = other DNA
agagccgggggaggcatgaagaggcactgaagaagaggaaactgggagtctgacagcaaaattcaacggctccccagtcc

SEQ ID NO: 50774 - DNA, 80 bp, synthetic construct; identical to SEQ ID NO: 13430
  source 1..80: mol_type = other DNA

SEQ ID NO: 50775 - DNA, 80 bp, synthetic construct
  source 1..80: mol_type = other DNA
tagattttgtagagccgggggcctaggacgcagctcagcagcttcgccatggccccggctcgggccgctgctcttccagc

SEQ ID NO: 50776 - DNA, 80 bp, synthetic construct
  source 1..80: mol_type = other DNA
aactagtggaagaccactagaacgcggagaatcagaaaattaccgggcatggttcaataatttttttctgtctcattatt

SEQ ID NO: 50777 - DNA, 80 bp, synthetic construct
  source 1..80: mol_type = other DNA
ccggcgcagtggctcacgcctgtagtcctagcactttgggaggccgaggcggggggatcacttgaggccaggagttcgag

SEQ ID NO: 50778 - DNA, 80 bp, synthetic construct; identical to SEQ ID NO: 13431
  source 1..80: mol_type = other DNA

SEQ ID NO: 50779 - DNA, 80 bp, synthetic construct
  source 1..80: mol_type = other DNA
ccccatctctacacaaaataccaagggggaaaaaaaaaagacctagcagggtgtggtggtgcccacctgtagtcccagct

SEQ ID NO: 50780 - DNA, 80 bp, synthetic construct
  source 1..80: mol_type = other DNA
atggaaagctacaccatggtcctggatacgaaaattcagcacagtaagatatgcggaatatttgtaaaaagaaaataaat

SEQ ID NO: 50781 - DNA, 80 bp, synthetic construct
  source 1..80: mol_type = other DNA
atgataaagcaagtggagaagaaagagaaaattcagaattgtggttacacagcatagaggatctctgactgaaacggaat

SEQ ID NO: 50782 - DNA, 80 bp, synthetic construct; identical to SEQ ID NO: 13432
  source 1..80: mol_type = other DNA

SEQ ID NO: 50783 - DNA, 80 bp, synthetic construct
  source 1..80: mol_type = other DNA
caacctctgcctctggggttcaagcgattctcctgcctcagcctcccaagtagctgagattacaggcatgtaccaccatg

SEQ ID NO: 50784 - DNA, 80 bp, synthetic construct
  source 1..80: mol_type = other DNA
tatttatttatttatttattatttatttatttttttgagacggagtctcgctctgtcaccaggctggagtatagtggcat

SEQ ID NO: 50785 - DNA, 80 bp, synthetic construct
  source 1..80: mol_type = other DNA
agagacagggtttcaccatgttggccaggatagtctcgatctcttgacctcgtgatccgcctgcctcagcctcccaaagt

SEQ ID NO: 50786 - DNA, 80 bp, synthetic construct; identical to SEQ ID NO: 13433
  source 1..80: mol_type = other DNA

SEQ ID NO: 50787 - DNA, 80 bp, synthetic construct
  source 1..80: mol_type = other DNA
ggatgaatcagcccgttagccttgtccctgagtaataatttaatacacttattagggtttcaggagaggtccggggtatg

SEQ ID NO: 50788 - DNA, 80 bp, synthetic construct
  source 1..80: mol_type = other DNA
ttttttttttttttttttttgagatgaagtctcgctctgtctcccaggctggagtgcagtagcacgatctcggctcactg

SEQ ID NO: 50789 - DNA, 80 bp, synthetic construct
  source 1..80: mol_type = other DNA
gtgatccacccaactcatggctgacctttcttaggagtgaaagagacctcagaatgtacttccagactgacaagagctag

SEQ ID NO: 50790 - DNA, 80 bp, synthetic construct; identical to SEQ ID NO: 13434
  source 1..80: mol_type = other DNA

SEQ ID NO: 50791 - DNA, 80 bp, synthetic construct
  source 1..80: mol_type = other DNA
agtcttattcctcctcctgttcctatgtggaactccccaggctgcaggtaaggggcaagaggtacgggattccttagcta

SEQ ID NO: 50792 - DNA, 80 bp, synthetic construct
  source 1..80: mol_type = other DNA
aataagaagaatgagtaaatgcttccagaaaagtagaaatgagtagaagagatgtgggcatttgccaactttcagccttt

SEQ ID NO: 50793 - DNA, 80 bp, synthetic construct
  source 1..80: mol_type = other DNA
gaagatcaaatggggggttattgatctgatggaggtctctggcctcatacaaccctcttcccacagacaacatgcaggcc

SEQ ID NO: 50794 - DNA, 80 bp, synthetic construct; identical to SEQ ID NO: 13435
  source 1..80: mol_type = other DNA

SEQ ID NO: 50795 - DNA, 80 bp, synthetic construct
  source 1..80: mol_type = other DNA
tccaggtgaagaactgaggaatccctctctcccctacaggatcccagttatctgcaagggctgcagatggatccccctgc

SEQ ID NO: 50796 - DNA, 80 bp, synthetic construct
  source 1..80: mol_type = other DNA
gaagaccaagaatcatccgctgcctcatgactcacaacaaaggggtcagctttagcctggcaggtaaactgaggaaggag

SEQ ID NO: 50797 - DNA, 80 bp, synthetic construct
  source 1..80: mol_type = other DNA
gctggtatcaacctcctgacttctagtgatctgcctgcctcagtctcccaaagtgctgggattataggcatgagccaccg

SEQ ID NO: 50798 - DNA, 80 bp, synthetic construct; identical to SEQ ID NO: 13436
  source 1..80: mol_type = other DNA

SEQ ID NO: 50799 - DNA, 80 bp, synthetic construct
  source 1..80: mol_type = other DNA
aggttgggagttcaagaccagcctgactaacatggagaaattctgtctctactaaaaatacaaaattagccgggtatggt

SEQ ID NO: 50800 - DNA, 80 bp, synthetic construct
  source 1..80: mol_type = other DNA
gcgaagctctatctcaaaaaaaaaattgtatttttagtagagacggggtttcaccatgttggccaggatggccttgatct

SEQ ID NO: 50801 - DNA, 80 bp, synthetic construct
  source 1..80: mol_type = other DNA
aacctctgcctcttgggttcaagctattctcccatctcagcctcctgagtagctggactacaggtgcctgccaccacgcc

SEQ ID NO: 50802 - DNA, 80 bp, synthetic construct
  source 1..80: mol_type = other DNA
taggattacaggcatatgccaccacgtccagctaatttttgtatttttagtggagccggggtttcaccatgttggccagg

SEQ ID NO: 50803 - DNA, 80 bp, synthetic construct; identical to SEQ ID NO: 13437
  source 1..80: mol_type = other DNA

SEQ ID NO: 50804 - DNA, 80 bp, synthetic construct
  source 1..80: mol_type = other DNA
agagtagggtggaggatattgtgggcagggaagcttacaaagtcttctgttggaagagcccaccagactgtggaggggaa

SEQ ID NO: 50805 - DNA, 80 bp, synthetic construct
  source 1..80: mol_type = other DNA
ggacatgccttggattctgatgctgctgctcacaatgggccagggagttgtcatcctggccctcagcatcgtgctctgga

SEQ ID NO: 50806 - DNA, 80 bp, synthetic construct
  source 1..80: mol_type = other DNA
tgacttctcttctgtatccctgatggctccttctccccagatgcctcgattcctcagttcaaacccgaaatccaggtcta

SEQ ID NO: 50807 - DNA, 80 bp, synthetic construct; identical to SEQ ID NO: 13438
  source 1..80: mol_type = other DNA

SEQ ID NO: 50808 - DNA, 80 bp, synthetic construct
  source 1..80: mol_type = other DNA
ggggactgaaggaaaggaggagcattattctgtgatgtaacctacaaaaaggtttggtctcctgtcttgtagcagcagtg

SEQ ID NO: 50809 - DNA, 80 bp, synthetic construct
  source 1..80: mol_type = other DNA
aacgggggaagagagagaagggaagagactcaagtcagagaaagtggaaagagatggacagagggagaaaaatagaagca

SEQ ID NO: 50810 - DNA, 80 bp, synthetic construct
  source 1..80: mol_type = other DNA
agtcaggatagagatgcctgtgctcagctcccacccggggccccctccttatccttccttatcctaggcacacactcttc

SEQ ID NO: 50811 - DNA, 80 bp, synthetic construct; identical to SEQ ID NO: 13439
  source 1..80: mol_type = other DNA

SEQ ID NO: 50812 - DNA, 80 bp, synthetic construct
  source 1..80: mol_type = other DNA
gaagtctcacctaaaggcttcaggctgcaggggcttaaactaagccattggcaagaaaaaggacgaaaatgacacagatg

SEQ ID NO: 50813 - DNA, 80 bp, synthetic construct
  source 1..80: mol_type = other DNA
agaccttttattaaaggtactcttcatagtcccccaagccctccatcctgagttcccgacctaccacattagtctttcct

SEQ ID NO: 50814 - DNA, 80 bp, synthetic construct
  source 1..80: mol_type = other DNA
atgaggttggactctgggcaggtgcctccccaggccttgtgaggggtctgtgaggggtctgctgagagatctggggtctc

SEQ ID NO: 50815 - DNA, 80 bp, synthetic construct; identical to SEQ ID NO: 13440
  source 1..80: mol_type = other DNA

SEQ ID NO: 50816 - DNA, 80 bp, synthetic construct
  source 1..80: mol_type = other DNA
cctggagaagggccattggaccagagtcctacctgaagtgccaatactgatgccacaagcttcatcgtcccgacactcgg

SEQ ID NO: 50817 - DNA, 80 bp, synthetic construct
  source 1..80: mol_type = other DNA
cacagagagaggtgacacatgaagcagagagaggaaagctgtggaataagggaggaaagctgacagaagtagaaaaaata

SEQ ID NO: 50818 - DNA, 80 bp, synthetic construct
  source 1..80: mol_type = other DNA
aatacaaaaaattagccgggcatggtggcacatgcctctagtcccagctacttgggaggctgaggcaggagaatctcttg

SEQ ID NO: 50819 - DNA, 80 bp, synthetic construct; identical to SEQ ID NO: 13441
  source 1..80: mol_type = other DNA

SEQ ID NO: 50820 - DNA, 80 bp, synthetic construct
  source 1..80: mol_type = other DNA
cggatcaaagatgcagcaagggggagacagttattctcaaatgccttgaaaggaaactcttcctttcccacctcatcagg

SEQ ID NO: 50821 - DNA, 80 bp, synthetic construct
  source 1..80: mol_type = other DNA
ccccacccccagccccctgaccactgaaggttccccagcccacccttacccagtgccccacagaggaacagcacgcagag

SEQ ID NO: 50822 - DNA, 80 bp, synthetic construct
  source 1..80: mol_type = other DNA
taaacaaacacacctagggagtgaatctggggggcggaaccatgaccagattcaccagcctgacccagcaggcagcgggg

SEQ ID NO: 50823 - DNA, 80 bp, synthetic construct
  source 1..80: mol_type = other DNA
tccctggctctctcagcttctctctgtctttgttttctctgtctttccccctcagtgctttcatgtctctcaaagtcacc

SEQ ID NO: 50824 - DNA, 80 bp, synthetic construct; identical to SEQ ID NO: 13442
  source 1..80: mol_type = other DNA

SEQ ID NO: 50825 - DNA, 80 bp, synthetic construct
  source 1..80: mol_type = other DNA
tgaagataggggagacacaggtgcccaggagagcagctcttttcaaaaatattgatctcaggacctctttacacttttca

SEQ ID NO: 50826 - DNA, 80 bp, synthetic construct
  source 1..80: mol_type = other DNA
ataactattatttctccacagcacagtgagaagctgagcattgctttacatttttgtgaatctagtgtcaggcttcgtgg

SEQ ID NO: 50827 - DNA, 80 bp, synthetic construct
  source 1..80: mol_type = other DNA
tcttgttggtccacagactgctgctgaggataaaggagtttgaggactccagaggatgctgagagcatgctgtggggccc

SEQ ID NO: 50828 - DNA, 80 bp, synthetic construct; identical to SEQ ID NO: 13443
  source 1..80: mol_type = other DNA

SEQ ID NO: 50829 - DNA, 80 bp, synthetic construct
  source 1..80: mol_type = other DNA
caggcctggaacagatcaagctacctggaaaccgtgagtcctcagtttctccctcttccagcagcctttccctgcctcca

SEQ ID NO: 50830 - DNA, 80 bp, synthetic construct
  source 1..80: mol_type = other DNA
ttattctcctaaaagaatctcataggcccattagctcacaaatgaagagctctggccctgaaaggccaaagttaaaacca

SEQ ID NO: 50831 - DNA, 80 bp, synthetic construct
  source 1..80: mol_type = other DNA
cagaaaagttgcagaaatactcaacttctcctaatgctaacatcttacataaccatagcacaattatcaaaatcacaaaa

SEQ ID NO: 50832 - DNA, 80 bp, synthetic construct
  source 1..80: mol_type = other DNA
tgtctttcatgaccctgacacatttgaagagccctgataaattattttatacctggagtttaaaaaattacttttagggc

SEQ ID NO: 50833 - DNA, 80 bp, synthetic construct; identical to SEQ ID NO: 13444
  source 1..80: mol_type = other DNA

SEQ ID NO: 50834 - DNA, 80 bp, synthetic construct
  source 1..80: mol_type = other DNA
gcactttgggaggccaaggctgaagagtcacctgaggtcaggagtttgacaccagcctgggcagcaaagtgagaccccca

SEQ ID NO: 50835 - DNA, 80 bp, synthetic construct
  source 1..80: mol_type = other DNA
gcaagatcttttctctaaaattaaataaaatcatttttagattaaacaaaaattacgtgccggatgcagtggctcacgcc

SEQ ID NO: 50836 - DNA, 80 bp, synthetic construct
  source 1..80: mol_type = other DNA
aggcaggagaattgcttgaacccaagaggtggaggtcgcggtgagccgagatcacaccattgcactccagctgggcaata

SEQ ID NO: 50837 - DNA, 80 bp, synthetic construct; identical to SEQ ID NO: 13445
  source 1..80: mol_type = other DNA

SEQ ID NO: 50838 - DNA, 80 bp, synthetic construct
  source 1..80: mol_type = other DNA
ttgattcaccaacatccagcctgcgtcgcagcccatcattgcaatcaagtggagacagagtcggtgggagacgtgactta

SEQ ID NO: 50839 - DNA, 80 bp, synthetic construct
  source 1..80: mol_type = other DNA
gggagcaagggaacaagggacatctgaacatctaatgtgagaagagaaacatccttctgtgagtcattaaaatctatgaa

SEQ ID NO: 50840 - DNA, 80 bp, synthetic construct
  source 1..80: mol_type = other DNA
ctagtttgggggttaccaagcaacagcgggcttaattacagtggtgcactccttaaccaactaaaccccaaagggcaatg

SEQ ID NO: 50841 - DNA, 80 bp, synthetic construct
  source 1..80: mol_type = other DNA
ttgagaaaagaaatgtaaaaactgtgataggtaaaaactgcttgatgccctacttactaactaggctaggtgaggccttt

SEQ ID NO: 50842 - DNA, 80 bp, synthetic construct; identical to SEQ ID NO: 13446
  source 1..80: mol_type = other DNA

SEQ ID NO: 50843 - DNA, 80 bp, synthetic construct
  source 1..80: mol_type = other DNA
aaatggaaagaggtgagtatgggggatggggtacatatgggagcctgggtttggggagtcagctctgtacagtgaggtca

SEQ ID NO: 50844 - DNA, 80 bp, synthetic construct
  source 1..80: mol_type = other DNA
cagaaaaaggagagtgaagggtgtgaggtgggaaggatggatgaggagaccactcggaacagtgtttaattaaagaaatg

SEQ ID NO: 50845 - DNA, 80 bp, synthetic construct
  source 1..80: mol_type = other DNA
gggctggagtgggccggggtcctgcgctgttgcagttgtccttgttgcagcaggtggtgttatatgtcagacccagcttg

SEQ ID NO: 50846 - DNA, 80 bp, synthetic construct; identical to SEQ ID NO: 13447
  source 1..80: mol_type = other DNA

SEQ ID NO: 50847 - DNA, 80 bp, synthetic construct
  source 1..80: mol_type = other DNA
gttcaagcgattctcctgcctcagcctcccgagtagctgggattacaggcgcccactaccatgcctggctaatttttgta

SEQ ID NO: 50848 - DNA, 80 bp, synthetic construct
  source 1..80: mol_type = other DNA
cggctgtgttactgtctctttttgaggccgttttctcagtataataatagcacccacatcacagggttgtcatgaacatt

SEQ ID NO: 50849 - DNA, 80 bp, synthetic construct
  source 1..80: mol_type = other DNA
cactaaggaaggggatgttaccaaggtatgcatgtgttgtcaggcattgctgtcctggctccaggcggcaggactgccgg

SEQ ID NO: 50850 - DNA, 80 bp, synthetic construct; identical to SEQ ID NO: 13448
  source 1..80: mol_type = other DNA

SEQ ID NO: 50851 - DNA, 80 bp, synthetic construct
  source 1..80: mol_type = other DNA
tggaatgtgaggaagataccatggggaaagaatgtggatggtgaaggaggagatggaaacttgaaagaaggagaaataat

SEQ ID NO: 50852 - DNA, 80 bp, synthetic construct
  source 1..80: mol_type = other DNA
ctctcaccccagtagctcttcagcagaaaggaatgatacctgagagacagatcaccagattccatcttagcaccttatca

SEQ ID NO: 50853 - DNA, 80 bp, synthetic construct
  source 1..80: mol_type = other DNA
gttgtcccctcttcagaaggctcaagaaaacgctctgtttccatggaggctcttagatgtcactgcaaccatctagaaag

SEQ ID NO: 50854 - DNA, 80 bp, synthetic construct; identical to SEQ ID NO: 13449
  source 1..80: mol_type = other DNA

SEQ ID NO: 50855 - DNA, 80 bp, synthetic construct
  source 1..80: mol_type = other DNA
atagggaagcctggtcttggtggcacaggagagctgagccagttggggctgggggtgttgggatcccgagtggtgggtag

SEQ ID NO: 50856 - DNA, 80 bp, synthetic construct
  source 1..80: mol_type = other DNA
cagctgatagagtagattttcaaggatccagctctaggagttgagtggcctttttggaatttataaacccaaaggctcct

SEQ ID NO: 50857 - DNA, 80 bp, synthetic construct
  source 1..80: mol_type = other DNA
gttcttggtttcaggccaagatgcccttcctggtccccagctaagagtcctgctgctcagtcctctgaatgagcatcatc

SEQ ID NO: 50858 - DNA, 80 bp, synthetic construct; identical to SEQ ID NO: 13450
  source 1..80: mol_type = other DNA

SEQ ID NO: 50859 - DNA, 80 bp, synthetic construct
  source 1..80: mol_type = other DNA
attgtcctaggtgtggctgtgtgcacctgctccaaagcacctccccagtcaaaacctgccaacttgggcagggtaccaag

SEQ ID NO: 50860 - DNA, 80 bp, synthetic construct
  source 1..80: mol_type = other DNA
tggtgaaaccccatctctactgaaaatacaaaaattagtcaggtgtggtggcatgcacctgtagttccagctactcagga

SEQ ID NO: 50861 - DNA, 80 bp, synthetic construct
  source 1..80: mol_type = other DNA
atgtattctaagcagtttacatgtattactttatttcgttatcacaatcccctacaaaacaggagttttttttgttgttg

SEQ ID NO: 50862 - DNA, 80 bp, synthetic construct; identical to SEQ ID NO: 13451
  source 1..80: mol_type = other DNA

SEQ ID NO: 50863 - DNA, 80 bp, synthetic construct
  source 1..80: mol_type = other DNA
gtttctgcagctgctaccgctgctgctctcgagggcccaagggaaccctgggggtaagcgatccctgggagagttgtgat

SEQ ID NO: 50864 - DNA, 80 bp, synthetic construct
  source 1..80: mol_type = other DNA
ctcctagcttctctggacggccgccctggggaccgggtgaatctctcctgcggaggagtctctcatcccatccgctgggt

SEQ ID NO: 50865 - DNA, 80 bp, synthetic construct
  source 1..80: mol_type = other DNA
agcgcgggggactcgggcacttttttctgcaagggccgccacgaggacgagagccgtacagtgcttcacgtgctggggga

SEQ ID NO: 50866 - DNA, 80 bp, synthetic construct; identical to SEQ ID NO: 13452
  source 1..80: mol_type = other DNA

SEQ ID NO: 50867 - DNA, 80 bp, synthetic construct
  source 1..80: mol_type = other DNA
atgggagaggtcaaaggtgggagcgaggccgctgactggtgagtagagccccaccagagcagatgagctggaagtgcagc

SEQ ID NO: 50868 - DNA, 80 bp, synthetic construct
  source 1..80: mol_type = other DNA
tgcccccgcaaccgattcgaccactccctagatttggtgagactaattccaccccattttctttctcctacatgcccact

SEQ ID NO: 50869 - DNA, 80 bp, synthetic construct
  source 1..80: mol_type = other DNA
ggaccaggaaccggtaagggcatggggatgggaaggggatagccagaatctctgaggaaaatggaccaaaaaaaaaaagg

SEQ ID NO: 50870 - DNA, 80 bp, synthetic construct; identical to SEQ ID NO: 13453
  source 1..80: mol_type = other DNA

SEQ ID NO: 50871 - DNA, 80 bp, synthetic construct
  source 1..80: mol_type = other DNA
ccactggtcttacttctaaacttactcccatctctcctataacctccatgtctccctcaccaccagtgtcctctctatac

SEQ ID NO: 50872 - DNA, 80 bp, synthetic construct
  source 1..80: mol_type = other DNA
attctcctgcctcaggctcctgagtagctgggactacaggcgcccgccaccacgcccagctaattttttgtatttttagt

SEQ ID NO: 50873 - DNA, 80 bp, synthetic construct
  source 1..80: mol_type = other DNA
ctttaagctgtttttctttgttgctggtgttttctttttggactcctcttccttgctccatatccctacagtatttccca

SEQ ID NO: 50874 - DNA, 80 bp, synthetic construct
  source 1..80: mol_type = other DNA
ggcatttcgcactctgaatgtcaaacccaactcattgtcatctctgaagctgctcacttaattctcctctgtattctctt

SEQ ID NO: 50875 - DNA, 80 bp, synthetic construct; identical to SEQ ID NO: 13454
  source 1..80: mol_type = other DNA

SEQ ID NO: 50876 - DNA, 80 bp, synthetic construct
  source 1..80: mol_type = other DNA
aatgccagccttagagaattctccctagccccaaaatgtctttgcccagtgcaattccttcttcctgtattacccctttc

SEQ ID NO: 50877 - DNA, 80 bp, synthetic construct
  source 1..80: mol_type = other DNA
ttccatgacaacctgtatttcaatttgtaagaaatttgcatgtactgtgagctccccaacgtcaggagactgaccctttt

SEQ ID NO: 50878 - DNA, 80 bp, synthetic construct
  source 1..80: mol_type = other DNA
catttagataaattcagtgagcaatccacccatacactcttttctctgccctggacacacttcccatgatagaaattctg

SEQ ID NO: 50879 - DNA, 80 bp, synthetic construct; identical to SEQ ID NO: 13455
  source 1..80: mol_type = other DNA

SEQ ID NO: 50880 - DNA, 80 bp, synthetic construct
  source 1..80: mol_type = other DNA
gggagctgagcccggcgccagccttctccagttctgagcaggacacaggtaccagggtgacatcagagagcttctgcagt

SEQ ID NO: 50881 - DNA, 80 bp, synthetic construct
  source 1..80: mol_type = other DNA
gcttggtgttggagttcctgccctctctcacctcctggctgttgggcagatccccacctccacggtgcaggaggaaaggg

SEQ ID NO: 50882 - DNA, 80 bp, synthetic construct
  source 1..80: mol_type = other DNA
caaccaccactaagggctggggacggactgacatttgtggaaaataatgacagcaagcacatagagcttacgatatgtca

SEQ ID NO: 50883 - DNA, 80 bp, synthetic construct; identical to SEQ ID NO: 13456
  source 1..80: mol_type = other DNA

SEQ ID NO: 50884 - DNA, 80 bp, synthetic construct
  source 1..80: mol_type = other DNA
tgccgcagagaccgcgcaggtgggagggacccgagactggcacagtggagacggcgaagtcctagggagagcgaagggag

SEQ ID NO: 50885 - DNA, 80 bp, synthetic construct
  source 1..80: mol_type = other DNA
ctcagctcctcggtgattggtccatttggagaggcctacgaaaaactcccggcctgagtccgggaggccgcggaggtttg

SEQ ID NO: 50886 - DNA, 80 bp, synthetic construct
  source 1..80: mol_type = other DNA
ccaggtcttgcagggctttgcggactccatcgaccttaggataggagaagagggcacggagctgtgacacccccatcctc

SEQ ID NO: 50887 - DNA, 80 bp, synthetic construct; identical to SEQ ID NO: 13457
  source 1..80: mol_type = other DNA

SEQ ID NO: 50888 - DNA, 80 bp, synthetic construct
  source 1..80: mol_type = other DNA
tcggatttcttagttttcttgtttcttcacctgtctgggagaagaaacagaaaaggaggagacagagaaaaagacatgca

SEQ ID NO: 50889 - DNA, 80 bp, synthetic construct
  source 1..80: mol_type = other DNA
acaaggctagggtctctaatctccaaaacacctgttgcccctgcttgggggcttgtgaggtccctgtcgggcgcccctct

SEQ ID NO: 50890 - DNA, 80 bp, synthetic construct
  source 1..80: mol_type = other DNA
gtcctgaatacccgaacgagaagggagagaggtgggtaggaagggaggagttcgagcctaaggagttaagcatcctctct

SEQ ID NO: 50891 - DNA, 80 bp, synthetic construct; identical to SEQ ID NO: 13458
  source 1..80: mol_type = other DNA

SEQ ID NO: 50892 - DNA, 80 bp, synthetic construct
  source 1..80: mol_type = other DNA
cggggactgggagctctggcttttagcgcgggtccttgtgtaggcgagctcatatactacgatggggcaggggcgcgacg

SEQ ID NO: 50893 - DNA, 80 bp, synthetic construct
  source 1..80: mol_type = other DNA
ggccggccctggcgacggggctgcaaacgcttcgtagacctcagaacagcgcaacggcggaccggcggaccggcacgaaa

SEQ ID NO: 50894 - DNA, 80 bp, synthetic construct
  source 1..80: mol_type = other DNA
gtcctactcatcccaccccacaataaaaatctgacccaggccccccatttctttccctcatcccctcttccaccacacca

SEQ ID NO: 50895 - DNA, 80 bp, synthetic construct; identical to SEQ ID NO: 13459
  source 1..80: mol_type = other DNA

SEQ ID NO: 50896 - DNA, 80 bp, synthetic construct
  source 1..80: mol_type = other DNA
cttgtactgtcgttagccttccttctcacttactgaaatcctggcttttaataaccagccatttttcctgagtttttaaa

SEQ ID NO: 50897 - DNA, 80 bp, synthetic construct
  source 1..80: mol_type = other DNA
agtgcaatggcgcgatcttggctcactgcaacctccgcctcccgggttcaagtgattctcctgcctcagcctcccaaata

SEQ ID NO: 50898 - DNA, 80 bp, synthetic construct
  source 1..80: mol_type = other DNA
acgcccggcccatctgacttttcatcatatattcttaactttcatgtgaatattttattgtctcagatttcaaccctttg

SEQ ID NO: 50899 - DNA, 80 bp, synthetic construct; identical to SEQ ID NO: 13460
  source 1..80: mol_type = other DNA

SEQ ID NO: 50900 - DNA, 80 bp, synthetic construct
  source 1..80: mol_type = other DNA
tttgcacccatgacttacatcatggaatataattatctcaagcagtggtcttgttagcaatgactgctgcaaaggactgg

SEQ ID NO: 50901 - DNA, 80 bp, synthetic construct
  source 1..80: mol_type = other DNA
ctttggcaacaggttgcagtcagccagggtgagctcgttgccatccaaaaacttcctctgagagacaccttcatcttcag

SEQ ID NO: 50902 - DNA, 80 bp, synthetic construct
  source 1..80: mol_type = other DNA
gaaaagattgacatagtccgaaaaggcccgttgggggtggatactaatggtgagtccaaaataataatagctaacactca

SEQ ID NO: 50903 - DNA, 80 bp, synthetic construct; identical to SEQ ID NO: 13461
  source 1..80: mol_type = other DNA

SEQ ID NO: 50904 - DNA, 80 bp, synthetic construct
  source 1..80: mol_type = other DNA
gggagttcaagaccagcctggccaacatggtgaaaccctgtctctactaaaaatacaaaaattagctgggcgtggtgatg

SEQ ID NO: 50905 - DNA, 80 bp, synthetic construct
  source 1..80: mol_type = other DNA
ccatgaaataggtattgtcatcctaattttgtggatctggaaatggacttacagagaggtgaaatgattgctcaaaatta

SEQ ID NO: 50906 - DNA, 80 bp, synthetic construct
  source 1..80: mol_type = other DNA
caatgaaaatgcagggaaatatagaggtaaagcaaaaatgggaagctgggggaaatttacgaacatctgcttcatctccc

SEQ ID NO: 50907 - DNA, 80 bp, synthetic construct; identical to SEQ ID NO: 13462
  source 1..80: mol_type = other DNA

SEQ ID NO: 50908 - DNA, 80 bp, synthetic construct
  source 1..80: mol_type = other DNA
atcttgttggtgtctgtgtgcacttcagtgccatacagcaggaatgggagctgcccccctgggcacagcttctgcactgt

SEQ ID NO: 50909 - DNA, 80 bp, synthetic construct
  source 1..80: mol_type = other DNA
tgtgtacaccaggggtgtttcaaggaacataagcaggcctaccttttggtgtcaacggtggtaacattgaaggtgactcc

SEQ ID NO: 50910 - DNA, 80 bp, synthetic construct
  source 1..80: mol_type = other DNA
ttttctgcctagtcatgacacatacactgtcccctcactatgggctctttgcccttgggcctgggtcaaacctaaggcag

SEQ ID NO: 50911 - DNA, 80 bp, synthetic construct; identical to SEQ ID NO: 13463
  source 1..80: mol_type = other DNA

SEQ ID NO: 50912 - DNA, 80 bp, synthetic construct
  source 1..80: mol_type = other DNA
ggtgacctcattggcccaagggacacctccccctaagctgagggtgattcatctctctgtctccggcttccttcctgtca

SEQ ID NO: 50913 - DNA, 80 bp, synthetic construct
  source 1..80: mol_type = other DNA
aaatagccccggaggcgaatgtgagagtgaggtggggaccacacctaagggggcggacccaagcaggctccgacttccct

SEQ ID NO: 50914 - DNA, 80 bp, synthetic construct
  source 1..80: mol_type = other DNA
acaaacggagcggggagaagaggacactgttaaggaagggagggaggggcacagccaggaggtcccaagactgggaaatg

SEQ ID NO: 50915 - DNA, 80 bp, synthetic construct; identical to SEQ ID NO: 13464
  source 1..80: mol_type = other DNA

SEQ ID NO: 50916 - DNA, 80 bp, synthetic construct
  source 1..80: mol_type = other DNA
ttgctctcactctcaggcctccctcaacacaccgtcttccctgaagcgtctccatccacacacacacacacacacacaca

SEQ ID NO: 50917 - DNA, 80 bp, synthetic construct
  source 1..80: mol_type = other DNA
tgggaattctcctttttctccacttcccttcctttagtctgctagaaacttgcacttttacaaacttttcagggttgatc

SEQ ID NO: 50918 - DNA, 80 bp, synthetic construct
  source 1..80: mol_type = other DNA
ttgggtggctgaggagagaagtgttcttaccttcacgaacaattcgacctgcggttgttcttcagccatggttgcgtcgg

SEQ ID NO: 50919 - DNA, 80 bp, synthetic construct; identical to SEQ ID NO: 13465
  source 1..80: mol_type = other DNA

SEQ ID NO: 50920 - DNA, 80 bp, synthetic construct
  source 1..80: mol_type = other DNA
aggactcttttctgcctcagtttccctgcttcattaatctgagtacaacccgactgaccctcatataaaaaacttgacac

SEQ ID NO: 50921 - DNA, 80 bp, synthetic construct
  source 1..80: mol_type = other DNA
cttcaaatggaaaggtggtcgtttaatcattctgcatttcttccagactccaatccaaattctgggttgctgggactgtg

SEQ ID NO: 50922 - DNA, 80 bp, synthetic construct
  source 1..80: mol_type = other DNA
ccagctcagcactaggacttgcagtccttgtggcctacacttgggattgggcataggaaatagagttaggggccgggtga

SEQ ID NO: 50923 - DNA, 80 bp, synthetic construct
  source 1..80: mol_type = other DNA
tacttgggaggctgaggcaggagaatcaattgaacccgggaggtgaaggttgcagtgagctgagatggtgccattgcact

SEQ ID NO: 50924 - DNA, 80 bp, synthetic construct; identical to SEQ ID NO: 13466
  source 1..80: mol_type = other DNA

SEQ ID NO: 50925 - DNA, 80 bp, synthetic construct
  source 1..80: mol_type = other DNA
gggacacctaaataaataagcagggaggacataggaggagcagctctctctccagtaaccttgatttctattaaaccttt

SEQ ID NO: 50926 - DNA, 80 bp, synthetic construct
  source 1..80: mol_type = other DNA
cagaaaaccatggtggagtgcaagaacacagaactaaaacagagcttgaaacttaaagaaagggagagacttgggggagg

SEQ ID NO: 50927 - DNA, 80 bp, synthetic construct
  source 1..80: mol_type = other DNA
aaaggctatctttggtgttcgttcccttgaactgtaacatcctgtaagggtatgattccatgcctctgtgtgggtgtgaa

SEQ ID NO: 50928 - DNA, 80 bp, synthetic construct; identical to SEQ ID NO: 13467
  source 1..80: mol_type = other DNA

SEQ ID NO: 50929 - DNA, 80 bp, synthetic construct
  source 1..80: mol_type = other DNA
ctcagtagctcctctttccctctctgggcttctctttccactccctccccttcctgggcttggtaaactagtccctaatc

SEQ ID NO: 50930 - DNA, 80 bp, synthetic construct
  source 1..80: mol_type = other DNA
gattttccaattactggttagcacagctaggtcatctcacccccaccatctttcctaacttcttgggttggggggctggg

SEQ ID NO: 50931 - DNA, 80 bp, synthetic construct
  source 1..80: mol_type = other DNA
acgcacaaataagctttatggagcagtgacttcattatgttcaccgctttgagtccaacccctggcccaaaataggcact

SEQ ID NO: 50932 - DNA, 80 bp, synthetic construct; identical to SEQ ID NO: 13468
  source 1..80: mol_type = other DNA

SEQ ID NO: 50933 - DNA, 80 bp, synthetic construct
  source 1..80: mol_type = other DNA
gtacaaatattaacttaagagttgttgcaggaaaaaaaataagcgcctctggctctttaagtttggcctccccctcaaaa

SEQ ID NO: 50934 - DNA, 80 bp, synthetic construct
  source 1..80: mol_type = other DNA
gacccgccccgaaggcaaataggccaatcagcgtccagactcttcagctacggcagtccgcttctcctcctcgccctgtc

SEQ ID NO: 50935 - DNA, 80 bp, synthetic construct
  source 1..80: mol_type = other DNA
aaggcgggaaaacgctgcgatggcggcagctgggggaggaggaagataagcgcgtgaggctggggtcctggcgcgtggtt

SEQ ID NO: 50936 - DNA, 80 bp, synthetic construct; identical to SEQ ID NO: 13469
  source 1..80: mol_type = other DNA

SEQ ID NO: 50937 - DNA, 80 bp, synthetic construct
  source 1..80: mol_type = other DNA
cagtgccgggccccagggaggccgaggaggaggaagtcgaggaggaggaggagctggccgaggtctctgaggggagtaga

SEQ ID NO: 50938 - DNA, 80 bp, synthetic construct
  source 1..80: mol_type = other DNA
ctctactaaaaatataaaaattagccgagcgtggtggcacgtgcctgttatcccagctactgggaaggctgaggcaggag

SEQ ID NO: 50939 - DNA, 80 bp, synthetic construct
  source 1..80: mol_type = other DNA
cacattcactaaatgggggtgatgatgcctatctcagagatttgagaaaatgattaaattatataagacatggtaaaccc

SEQ ID NO: 50940 - DNA, 80 bp, synthetic construct; identical to SEQ ID NO: 13470
  source 1..80: mol_type = other DNA

SEQ ID NO: 50941 - DNA, 80 bp, synthetic construct
  source 1..80: mol_type = other DNA
gggttcaagcaattctcctgactcaacctcccgagtagctgggactacaggcgtgtgccaccacacccagctagtttttt

SEQ ID NO: 50942 - DNA, 80 bp, synthetic construct
  source 1..80: mol_type = other DNA
acgcccagccatgttttacttacattaactcacctcactgtctagcatattttgtgttgctgtaaggaaatacctgactc

SEQ ID NO: 50943 - DNA, 80 bp, synthetic construct
  source 1..80: mol_type = other DNA
aagcaagggggagggagatgccaggctctttttgacaaccagctctctcaggaactaatagagtgagaacctctcactca

SEQ ID NO: 50944 - DNA, 80 bp, synthetic construct
  source 1..80: mol_type = other DNA
acacgatatttggcagggacaaatcacatccaaactatagcactgactcaatatattttacagttgcttcacagaggctc

SEQ ID NO: 50945 - DNA, 80 bp, synthetic construct; identical to SEQ ID NO: 13471
  source 1..80: mol_type = other DNA

SEQ ID NO: 50946 - DNA, 80 bp, synthetic construct
  source 1..80: mol_type = other DNA
ctggccacaaatatatatgacgtatttacaatgtttcaggtgcttcagattcagccctgggcaaatcagtcatgtctgtt

SEQ ID NO: 50947 - DNA, 80 bp, synthetic construct
  source 1..80: mol_type = other DNA
ggggtaggaagaggagggctatgggttttctcttagtcaaagacaaagatcctttaactcatttgatctctgttctcctt

SEQ ID NO: 50948 - DNA, 80 bp, synthetic construct
  source 1..80: mol_type = other DNA
gaaggactaatatatggaatattccagggggctagaattgggtgagagggagtgtcagacagaggtagaaggactgagat

SEQ ID NO: 50949 - DNA, 80 bp, synthetic construct
  source 1..80: mol_type = other DNA
tctaccttcatcatcacagatctcccctctgccttatgtcatcctaaacctttgtgctcctcatgccctatgacctgtcc

SEQ ID NO: 50950 - DNA, 80 bp, synthetic construct; identical to SEQ ID NO: 13472
  source 1..80: mol_type = other DNA

SEQ ID NO: 50951 - DNA, 80 bp, synthetic construct
  source 1..80: mol_type = other DNA
aaatcctcaattccagacagatgtctactttcctcagccatttatctttctcaggctgtgctttcagacaagtatcttta

SEQ ID NO: 50952 - DNA, 80 bp, synthetic construct
  source 1..80: mol_type = other DNA
tgtctcattcttaaaatggggtgaaaaaattgagctacaagaccgttccctttgcttgcctccctcaaataggtctggag

SEQ ID NO: 50953 - DNA, 80 bp, synthetic construct
  source 1..80: mol_type = other DNA
tagggctgaattctgggaggtactggcctagccctggaaaatagtaactttccctggtgctctgcagcccccaggagatt

SEQ ID NO: 50954 - DNA, 80 bp, synthetic construct
  source 1..80: mol_type = other DNA
ccatcctgggctttaagaaatttatgttgtaggtgattcaccccaaccccaaccaaagtaatgtgggattgggaggcctg

SEQ ID NO: 50955 - DNA, 80 bp, synthetic construct; identical to SEQ ID NO: 13473
  source 1..80: mol_type = other DNA

SEQ ID NO: 50956 - DNA, 80 bp, synthetic construct
  source 1..80: mol_type = other DNA
gaaggggggttttgagggaaagagaggaagaaaagcataaagatactagctttcttttctatagggagaaactgaggcaa

SEQ ID NO: 50957 - DNA, 80 bp, synthetic construct
  source 1..80: mol_type = other DNA
atataaaaattagctgggtgtgttgtgcgcctgtaatcccagccactcaggaggctgaggcaggattgcttgaatccagg

SEQ ID NO: 50958 - DNA, 80 bp, synthetic construct
  source 1..80: mol_type = other DNA
tcaaaagtccaagttaccccaaactcctccatttctcctcgacagtgttctacagatttttaagagtgagtctcacccct

SEQ ID NO: 50959 - DNA, 80 bp, synthetic construct; identical to SEQ ID NO: 13474
  source 1..80: mol_type = other DNA

SEQ ID NO: 50960 - DNA, 80 bp, synthetic construct
  source 1..80: mol_type = other DNA
agagtctttatcagttgtctctggctttagggtatattagggacatctccgcaaatatccatatagtttcatatctcagt

SEQ ID NO: 50961 - DNA, 80 bp, synthetic construct
  source 1..80: mol_type = other DNA
tgcccaccacgatgcctggctaatttttgtatttttagtagagaacgggtttcactgtgttagccaggatgatctcgatc

SEQ ID NO: 50962 - DNA, 80 bp, synthetic construct
  source 1..80: mol_type = other DNA
aatggtgcgatctcggctcaatgcaacctctgcctcctgggttcaagcgattctcctgcctcagcctcctgagtaactgg

SEQ ID NO: 50963 - DNA, 80 bp, synthetic construct; identical to SEQ ID NO: 13475
  source 1..80: mol_type = other DNA

SEQ ID NO: 50964 - DNA, 80 bp, synthetic construct
  source 1..80: mol_type = other DNA
gtagagatggtgtttcgccatgttgcccaggctggtctcaaactcctgagctcaagtgatcctcctgccttggcctccca

SEQ ID NO: 50965 - DNA, 80 bp, synthetic construct
  source 1..80: mol_type = other DNA
gagtgcagtggcgcgatctccgctcactgcaagctctgcctcccgggttcatgccattctgcttcagcctcccgagtagc

SEQ ID NO: 50966 - DNA, 80 bp, synthetic construct
  source 1..80: mol_type = other DNA
cctggccagttcttgagttttaactaggtctgctttgtgtatttttctggctaagtgtccctgtgagtgtccatcccttc

SEQ ID NO: 50967 - DNA, 80 bp, synthetic construct; identical to SEQ ID NO: 13476
  source 1..80: mol_type = other DNA

SEQ ID NO: 50968 - DNA, 80 bp, synthetic construct
  source 1..80: mol_type = other DNA
aaagcaactgccctttactgagcactggctaactgcatttcatccttataacagctttgtgtagtagctgatatgcatct

SEQ ID NO: 50969 - DNA, 80 bp, synthetic construct
  source 1..80: mol_type = other DNA
ggtcaggagtttgagaccagctggccaacatggtaaagccccatctctactaaaatgcaaaaattagccaagcgtgttgg

SEQ ID NO: 50970 - DNA, 80 bp, synthetic construct
  source 1..80: mol_type = other DNA
atggctatgttagcatggttatctttagttatagaaaacacacttcacatttctgtgatgactctcaaatttgtgtctct

SEQ ID NO: 50971 - DNA, 80 bp, synthetic construct; identical to SEQ ID NO: 13477
  source 1..80: mol_type = other DNA

SEQ ID NO: 50972 - DNA, 80 bp, synthetic construct
  source 1..80: mol_type = other DNA
ccaagtagctgggattacaggcgcccaccaccacacctggctaatttttgtattttcagtagaggcggggtttcaccatg

SEQ ID NO: 50973 - DNA, 80 bp, synthetic construct
  source 1..80: mol_type = other DNA
ttcaggattaagattagcatcttaagcagtataatgatgttcagggtccatcacgtttaccccagttttaatttccagac

SEQ ID NO: 50974 - DNA, 80 bp, synthetic construct
  source 1..80: mol_type = other DNA
gtcacccaggctggagtgcagtggcgcggtctttgctcactgcaacctccacctcccaggttcaagcaattctcctgcct

SEQ ID NO: 50975 - DNA, 80 bp, synthetic construct; identical to SEQ ID NO: 13478
  source 1..80: mol_type = other DNA

SEQ ID NO: 50976 - DNA, 80 bp, synthetic construct
  source 1..80: mol_type = other DNA
ctcaggaggctgaggcaggagaattgcttgaactcgggaggtagaggttgaagtgagcccagattgccccactgcactcc

SEQ ID NO: 50977 - DNA, 80 bp, synthetic construct
  source 1..80: mol_type = other DNA
tgcactgtcacatcatgttagaattagcagtcagtgaatctgcttgcctccatagctatgaactctatctagtagctata

SEQ ID NO: 50978 - DNA, 80 bp, synthetic construct
  source 1..80: mol_type = other DNA
aatatgtatcttgtaggagttaatttaggataatctctgaggtcatctccaggtaatcagcatctccaggaatcggcagg

SEQ ID NO: 50979 - DNA, 80 bp, synthetic construct; identical to SEQ ID NO: 13479
  source 1..80: mol_type = other DNA

SEQ ID NO: 50980 - DNA, 80 bp, synthetic construct
  source 1..80: mol_type = other DNA
gaggccaggagttcaagaactaaaagctgtacaggcaccaagaatatgactgaatgtcacagtatgctctaaagggcact

SEQ ID NO: 50981 - DNA, 80 bp, synthetic construct
  source 1..80: mol_type = other DNA
agagatacctaagtgtttagtgcagcgcatgtgctttctaaagtggggatggctatttacagactggcctacactgttct

SEQ ID NO: 50982 - DNA, 80 bp, synthetic construct
  source 1..80: mol_type = other DNA
tgttggctcttatataagatggcatccttagtacttgttctatgtagaaaagaatttgtgggctcacaagtccctacaga

SEQ ID NO: 50983 - DNA, 80 bp, synthetic construct; identical to SEQ ID NO: 13480
  source 1..80: mol_type = other DNA

SEQ ID NO: 50984 - DNA, 80 bp, synthetic construct
  source 1..80: mol_type = other DNA
tattaggaaatacctccaacacacaaaaagatgtaaataattagccgggcgtggtggctcatgactgtaatcccagcact

SEQ ID NO: 50985 - DNA, 80 bp, synthetic construct
  source 1..80: mol_type = other DNA
cttgaacctgggaggcggaggttgcagtgagctgagatcgcaccactgcactccagcctggacaacagagcaagactctg

SEQ ID NO: 50986 - DNA, 80 bp, synthetic construct
  source 1..80: mol_type = other DNA
aaaaactattaatagtaatacaaatggccaggcgcagtagctcatgcctgtaattccagcactttaggaggctgaggcag

SEQ ID NO: 50987 - DNA, 80 bp, synthetic construct; identical to SEQ ID NO: 13481
  source 1..80: mol_type = other DNA

SEQ ID NO: 50988 - DNA, 80 bp, synthetic construct
  source 1..80: mol_type = other DNA
ctactaaaaatacaaaaattagctgagcacagtggcgggtgcctgtaattccagaacctgggaggtggaggttgcagtaa

SEQ ID NO: 50989 - DNA, 80 bp, synthetic construct
  source 1..80: mol_type = other DNA
gagatcgagatcattctggccaacatagtgaaaccctgactctactaaaaatacaacaattagctgggcatggtggcgca

SEQ ID NO: 50990 - DNA, 80 bp, synthetic construct
  source 1..80: mol_type = other DNA
gttgaagccccttaaatgtccctccccaatccttttttctctgcagtgttgaccattattatgaattaaagcttatcatc

SEQ ID NO: 50991 - DNA, 80 bp, synthetic construct; identical to SEQ ID NO: 13482
  source 1..80: mol_type = other DNA

SEQ ID NO: 50992 - DNA, 80 bp, synthetic construct
  source 1..80: mol_type = other DNA
tttttggcaaactgagatcaagatgatagatgtaacttgtagtacccccacccaaaccctcacttccaggctatggttca

SEQ ID NO: 50993 - DNA, 80 bp, synthetic construct
  source 1..80: mol_type = other DNA
aaggaggttgagggctgatactgggcagtgggcttcttgaggggcattagagtgagggaagagaaaacagcggctgtaac

SEQ ID NO: 50994 - DNA, 80 bp, synthetic construct
  source 1..80: mol_type = other DNA
tgtccaattttattctaccctcttttttttttttttggagacagcctcgctctgtcgcccaggctgaagtgccatggggc

SEQ ID NO: 50995 - DNA, 80 bp, synthetic construct; identical to SEQ ID NO: 13483
  source 1..80: mol_type = other DNA

SEQ ID NO: 50996 - DNA, 80 bp, synthetic construct
  source 1..80: mol_type = other DNA
caggctggattgcagtggtgcgatctcggctcactgcaacctctgcctcccaagttcaagtgattctcctacctcagcct

SEQ ID NO: 50997 - DNA, 80 bp, synthetic construct
  source 1..80: mol_type = other DNA
gagccaccgtgcccagcctagtatgtgtcatctatatctttttctactttcccctcttggattattttgtgggttttgtt

SEQ ID NO: 50998 - DNA, 80 bp, synthetic construct
  source 1..80: mol_type = other DNA
tggctttcttggattattttgaagcaagtcccagccattatatcatttcatccataaatatttcagtgtaatttcttttt

SEQ ID NO: 50999 - DNA, 80 bp, synthetic construct; identical to SEQ ID NO: 13484
  source 1..80: mol_type = other DNA

SEQ ID NO: 51000 - DNA, 80 bp, synthetic construct
  source 1..80: mol_type = other DNA
ctgaaatttttcttttttgagacagggtctcactctgtcacccaggcttgagtgcaatggcacaattgtagctcactgca

SEQ ID NO: 51001 - DNA, 80 bp, synthetic construct
  source 1..80: mol_type = other DNA
tgctcttgtagcccaggctggagtgcaatggtgtgatctcggctcaccgcaacctccacctcctgggttcaagtgattct

SEQ ID NO: 51002 - DNA, 80 bp, synthetic construct
  source 1..80: mol_type = other DNA
gattacaggcgtgagccattgcacctgaccaattttttattttttgtagagacaggatctcactatgttgctcaaggtgg

SEQ ID NO: 51003 - DNA, 80 bp, synthetic construct; identical to SEQ ID NO: 13485
  source 1..80: mol_type = other DNA

SEQ ID NO: 51004 - DNA, 80 bp, synthetic construct
  source 1..80: mol_type = other DNA
gaagtagaggaacataatgtctgatatgtccgattgtctctctttttctgatgttggcaaatgttctgatgtttaatacc

SEQ ID NO: 51005 - DNA, 80 bp, synthetic construct
  source 1..80: mol_type = other DNA
caggcgcacaccaccacgcccagctaatttttgtatttttagtagagacgggatttcaccatgttggccaggatggtctt

SEQ ID NO: 51006 - DNA, 80 bp, synthetic construct
  source 1..80: mol_type = other DNA
gtaaagagaaacttccttttatgtactatttggttgccaagtgatagaaatcatatagaaatacagaaaattgcttgata

SEQ ID NO: 51007 - DNA, 80 bp, synthetic construct
  source 1..80: mol_type = other DNA
caccatgcctggctaatttttgtatttttagtagagacagggtttcaccatgatggccaggatggtcttgatctcttgac

SEQ ID NO: 51008 - DNA, 80 bp, synthetic construct; identical to SEQ ID NO: 13486
  source 1..80: mol_type = other DNA

SEQ ID NO: 51009 - DNA, 80 bp, synthetic construct
  source 1..80: mol_type = other DNA
gtgcctgggactacaggcgcccgccaccacgcctggctaattttttgtacttttagtagagacagggtttcaccctctta

SEQ ID NO: 51010 - DNA, 80 bp, synthetic construct
  source 1..80: mol_type = other DNA
ctatatttctctttctcccgactctgtacaaactcctttgttttagagtttgcacaaccctctatcaaagcacctaccac

SEQ ID NO: 51011 - DNA, 80 bp, synthetic construct
  source 1..80: mol_type = other DNA
ctccacctcccgggttcaagagattctcctgcctcagcctcccaagtagctggaattacatgtgcatgccaccaagccca

SEQ ID NO: 51012 - DNA, 80 bp, synthetic construct; identical to SEQ ID NO: 13487
  source 1..80: mol_type = other DNA

SEQ ID NO: 51013 - DNA, 80 bp, synthetic construct
  source 1..80: mol_type = other DNA
gggacattgcccaagagttctctgatgacctgcaccatatcgccagcctcattgggaaagtagtgagtagaaggaaaaag

SEQ ID NO: 51014 - DNA, 80 bp, synthetic construct
  source 1..80: mol_type = other DNA
agaattggggcccaaggagagctgaggaacaggacagagggtgccaggtcctaagaaacagtacttatctcctcaggtgg

SEQ ID NO: 51015 - DNA, 80 bp, synthetic construct
  source 1..80: mol_type = other DNA
gcaaccagggcaggagactcacttttgataaccacgtgtcttccaccctcgtagaaaagcgaagactgatgggacttccc

SEQ ID NO: 51016 - DNA, 80 bp, synthetic construct; identical to SEQ ID NO: 13488
  source 1..80: mol_type = other DNA

SEQ ID NO: 51017 - DNA, 80 bp, synthetic construct
  source 1..80: mol_type = other DNA
ttgagattaatggactggacttcatggtaagaccctcaacctctgtaaggtgagtgatgaggaaaatgagtcagcagctg

SEQ ID NO: 51018 - DNA, 80 bp, synthetic construct
  source 1..80: mol_type = other DNA
gcaaagtccacagctttgaacccctgtacccagtttctctcagaggagaagctgcactatcgtagtgcccgaaccaagga

SEQ ID NO: 51019 - DNA, 80 bp, synthetic construct
  source 1..80: mol_type = other DNA
ctgtctcgctcactctgactctatcttttcctctgaatgtcttgaggtctcagattgtatctgcaacctgtttccagatc

SEQ ID NO: 51020 - DNA, 80 bp, synthetic construct; identical to SEQ ID NO: 13489
  source 1..80: mol_type = other DNA

SEQ ID NO: 51021 - DNA, 80 bp, synthetic construct
  source 1..80: mol_type = other DNA
gcccgaacctttgtgcccaactccacagaatgtggtggggacaaagggagggtcaaagtcatcactggacccaactcatc

SEQ ID NO: 51022 - DNA, 80 bp, synthetic construct
  source 1..80: mol_type = other DNA
attttctgaccccgctcttcatgaaaggaccatcacccacatccctgtgcttccacctcacatgttcttattctccactg

SEQ ID NO: 51023 - DNA, 80 bp, synthetic construct
  source 1..80: mol_type = other DNA
cagagtcagtgtgtctgttacctatttctcctgtttcaccctgtccatttctctttgatgtgccattcatgccttgagcc

SEQ ID NO: 51024 - DNA, 80 bp, synthetic construct; identical to SEQ ID NO: 13490
  source 1..80: mol_type = other DNA

SEQ ID NO: 51025 - DNA, 80 bp, synthetic construct
  source 1..80: mol_type = other DNA
ttggcaaagaggatgaacaaagcgtgcacctcaccattcaagaacttgcagtgcagtagggagggcatgtatacagcttt

SEQ ID NO: 51026 - DNA, 80 bp, synthetic construct
  source 1..80: mol_type = other DNA
gaaactgatgaggggagaaactaaggaggggaaaatggaggaggatgaaggagcatgacagtgaggctgggcctctggaa

SEQ ID NO: 51027 - DNA, 80 bp, synthetic construct
  source 1..80: mol_type = other DNA
ggctggcacgtggacccacatgcccccacatctttgtggccaccaactttctgagccttgttcagctacaactgctgcca

SEQ ID NO: 51028 - DNA, 80 bp, synthetic construct; identical to SEQ ID NO: 13491
  source 1..80: mol_type = other DNA

SEQ ID NO: 51029 - DNA, 80 bp, synthetic construct
  source 1..80: mol_type = other DNA
gagctccctttcattcctagtcctactgggcctgggtctaggtccacaggatttctgacccttatttccccttctcttcc

SEQ ID NO: 51030 - DNA, 80 bp, synthetic construct
  source 1..80: mol_type = other DNA
gcaactcttctccccttttcagggactcagccttcctccagcactttgcccttcagaaacccaccatttctttctgaaat

SEQ ID NO: 51031 - DNA, 80 bp, synthetic construct
  source 1..80: mol_type = other DNA
agtggataagtttatgaaactggatttggaagatcctaacctggacttgaacgttttcatgagccaggaagtgctgcctg

SEQ ID NO: 51032 - DNA, 80 bp, synthetic construct; identical to SEQ ID NO: 13492
  source 1..80: mol_type = other DNA

SEQ ID NO: 51033 - DNA, 80 bp, synthetic construct
  source 1..80: mol_type = other DNA
gaacaccccagcctcagacagacacagcaggaaggggcctgagaggctgacagaggcaggatgggtgcaaggcaggggtg

SEQ ID NO: 51034 - DNA, 80 bp, synthetic construct
  source 1..80: mol_type = other DNA
agagcttcttcctttgggtgagtatcagcccaacaagaggtcccaggggaactctctcaatagatctgccctttatattt

SEQ ID NO: 51035 - DNA, 80 bp, synthetic construct
  source 1..80: mol_type = other DNA
gcctctgtgattgcctttcccagctacgcaggatgcaggctctggagagagaacaggatgccctgtggcagggtctggag

SEQ ID NO: 51036 - DNA, 80 bp, synthetic construct; identical to SEQ ID NO: 13493
  source 1..80: mol_type = other DNA

SEQ ID NO: 51037 - DNA, 80 bp, synthetic construct
  source 1..80: mol_type = other DNA
tgctatttgagggagatggaggaactgatgtgctaaagagatggaggtggagagtactggattttcccacctgcctggga

SEQ ID NO: 51038 - DNA, 80 bp, synthetic construct
  source 1..80: mol_type = other DNA
cagattcaaaaggtgaacatctgtttgcagaatctgattcatgagaaggtgagtttattgttttcagtttagacttttgg

SEQ ID NO: 51039 - DNA, 80 bp, synthetic construct
  source 1..80: mol_type = other DNA
acaggtaaacttcaagaaggagggcaggagccccaccctacagggctgggaggagcccagaggccccatctgtttctcct

SEQ ID NO: 51040 - DNA, 80 bp, synthetic construct; identical to SEQ ID NO: 13494
  source 1..80: mol_type = other DNA

SEQ ID NO: 51041 - DNA, 80 bp, synthetic construct
  source 1..80: mol_type = other DNA
aagcagctttctccaaaaatgtctttggtttgtttctcatagggttaggaaaagtgcattgtgggaatatccattgccct

SEQ ID NO: 51042 - DNA, 80 bp, synthetic construct
  source 1..80: mol_type = other DNA
acaggcgtgagccactgcacccagccccagtctcgaagtttctaagaaaggaaagggatgtgatggagaaagaaaacctt

SEQ ID NO: 51043 - DNA, 80 bp, synthetic construct
  source 1..80: mol_type = other DNA
tactaaaaatacaaaaaattagccgggcgtggtggcgggcacctgtgatcccagctacttgggaggctgaggcaggagaa

SEQ ID NO: 51044 - DNA, 80 bp, synthetic construct; identical to SEQ ID NO: 13495
  source 1..80: mol_type = other DNA

SEQ ID NO: 51045 - DNA, 80 bp, synthetic construct
  source 1..80: mol_type = other DNA
taggggtggtgtgccggtcctgtggggaaaaggaagagaatgacagggtgtgctagagctgtactcaaattaaacctaca

SEQ ID NO: 51046 - DNA, 80 bp, synthetic construct
  source 1..80: mol_type = other DNA
gccgctgaatctgggacctccagccacaggcggccccaggccgactcattcagttccaggtgagccctggagagaggata

SEQ ID NO: 51047 - DNA, 80 bp, synthetic construct
  source 1..80: mol_type = other DNA
aagcattggccgggcaagatgccagagggagctggagggttcatgagcctcacctggagaggttggaggtgagggagaag

SEQ ID NO: 51048 - DNA, 80 bp, synthetic construct
  source 1..80: mol_type = other DNA
gaagggttcttcagggaaggggccgctctaactctctccagccccagccgcactttcccctggcgtctcacctccagaag

SEQ ID NO: 51049 - DNA, 80 bp, synthetic construct; identical to SEQ ID NO: 13496
  source 1..80: mol_type = other DNA

SEQ ID NO: 51050 - DNA, 80 bp, synthetic construct
  source 1..80: mol_type = other DNA
attgtgagattcggagacacagggagaaaagaattaatggccttcaaaataggggttccctctggggagtatggatggga

SEQ ID NO: 51051 - DNA, 80 bp, synthetic construct
  source 1..80: mol_type = other DNA
catatgcacagatgtatgtatacatatatacattatatatataatatatatattatatattatatattttatatatatat

SEQ ID NO: 51052 - DNA, 80 bp, synthetic construct
  source 1..80: mol_type = other DNA
cagagcccttcctgaaaggaatgtgactgatcgtgttctctgaggcctgcagtctctgcttccccttcccaggaacacct

SEQ ID NO: 51053 - DNA, 80 bp, synthetic construct; identical to SEQ ID NO: 13497
  source 1..80: mol_type = other DNA

SEQ ID NO: 51054 - DNA, 80 bp, synthetic construct
  source 1..80: mol_type = other DNA
caccttgagggattggcaggaccagaaaatggggaagaagatgaggtatgggatgaggaacaaagaagaaaggggagata

SEQ ID NO: 51055 - DNA, 80 bp, synthetic construct
  source 1..80: mol_type = other DNA
tagccaggtgtggtggtgggctcctgtaatcccagctacttgggaggctggagcaggagaatcgcttgaacccaacaggc

SEQ ID NO: 51056 - DNA, 80 bp, synthetic construct
  source 1..80: mol_type = other DNA
ggggccagggatgaagttattatggtcagagacaaagttggaggcaagggattcaggatgagacaatcacatcttgtgcc

SEQ ID NO: 51057 - DNA, 80 bp, synthetic construct; identical to SEQ ID NO: 13498
  source 1..80: mol_type = other DNA

SEQ ID NO: 51058 - DNA, 80 bp, synthetic construct
  source 1..80: mol_type = other DNA
gctctactaaaaaaatacaaaaattagccaggcctggtggtgggcactggtaactctagcgacttgggaggctgaggcag

SEQ ID NO: 51059 - DNA, 80 bp, synthetic construct
  source 1..80: mol_type = other DNA
ggaagaacaacacagcagtgagagtgattcccctttctcctataagaagagaggtgcagcctgaccacccttcagttcct

SEQ ID NO: 51060 - DNA, 80 bp, synthetic construct
  source 1..80: mol_type = other DNA
gccgagctcgaccctgaacccttgatgtatcttcagtcaccaggaatgttacctgtacccagaagagagctcagtgattg

SEQ ID NO: 51061 - DNA, 80 bp, synthetic construct
  source 1..80: mol_type = other DNA
ccttgtaactgtcacagtggatttttggcgactagagccccagttcttcacattgtttattaggcagggtcaaataaaaa

SEQ ID NO: 51062 - DNA, 80 bp, synthetic construct; identical to SEQ ID NO: 13499
  source 1..80: mol_type = other DNA

SEQ ID NO: 51063 - DNA, 80 bp, synthetic construct
  source 1..80: mol_type = other DNA
ttggtgagaaaggcatccttgggggaggcatccgtgaagacaaagatatctgagagtggaggtgtgtgcagcagggccag

SEQ ID NO: 51064 - DNA, 80 bp, synthetic construct
  source 1..80: mol_type = other DNA
tccccctggtggtggggccaggaaacggggaagaagggaggggccagacctgcagggctgacaggcacatctcaggctcg

SEQ ID NO: 51065 - DNA, 80 bp, synthetic construct
  source 1..80: mol_type = other DNA
ggggcctggtgtgcttctggagccgacaggtattgaaataacaatactccattataagactcatacttggccgggtgcgg

SEQ ID NO: 51066 - DNA, 80 bp, synthetic construct; identical to SEQ ID NO: 13500
  source 1..80: mol_type = other DNA

SEQ ID NO: 51067 - DNA, 80 bp, synthetic construct
  source 1..80: mol_type = other DNA
tccctgaaaaaaatggtggcatttcctgtaggcctttattggctacatgtgcgtatataaaaaaaaaaatggtcacacct

SEQ ID NO: 51068 - DNA, 80 bp, synthetic construct
  source 1..80: mol_type = other DNA
atggtggtgctcatctgtagtcccagctactcaggaggctgtggcaggaggattgcttgaatcgaggctgcagtgaggca

SEQ ID NO: 51069 - DNA, 80 bp, synthetic construct
  source 1..80: mol_type = other DNA
accgaatagcacttacctcagaggtttattgggaggactaaatgagttgattttgcaaatcttaagatagtgctttgaca

SEQ ID NO: 51070 - DNA, 80 bp, synthetic construct
  source 1..80: mol_type = other DNA
tcagtccagtaggcattttatttgatcatcatttcaactctgggagttaggcaggatgagggaggtgtcaggcctctgag

SEQ ID NO: 51071 - DNA, 80 bp, synthetic construct; identical to SEQ ID NO: 13501
  source 1..80: mol_type = other DNA

SEQ ID NO: 51072 - DNA, 80 bp, synthetic construct
  source 1..80: mol_type = other DNA
caatggaaaaggaatacaatgtagctagttatctcagatgcttcccagaagcctggccccaacaaccccatcttgatacc

SEQ ID NO: 51073 - DNA, 80 bp, synthetic construct
  source 1..80: mol_type = other DNA
aatacaaaaattagccgggcgtggtggcgggcgcctgtagtcccagctactcaggaggctgagacaggagaatggcgtga

SEQ ID NO: 51074 - DNA, 80 bp, synthetic construct
  source 1..80: mol_type = other DNA
tgaatcatgcattaaactcatggaaagtgctgccattttagaaagagtgggaggcaagtctgctagttatcttttttttt

SEQ ID NO: 51075 - DNA, 80 bp, synthetic construct
  source 1..80: mol_type = other DNA
taatttttattaatttttttgtagagacctgtgtttctctgtgttgcccaggttggtcttgaaatcctgggctcaaacga

SEQ ID NO: 51076 - DNA, 80 bp, synthetic construct; identical to SEQ ID NO: 13502
  source 1..80: mol_type = other DNA

SEQ ID NO: 51077 - DNA, 80 bp, synthetic construct
  source 1..80: mol_type = other DNA
tttctccatattagtcaggctggtctcaaactcccgacctcaggtgatccacctgcctcagcctcccaaagtgctgggat

SEQ ID NO: 51078 - DNA, 80 bp, synthetic construct
  source 1..80: mol_type = other DNA
cctggattttggcagcgttgatctcctcacccatgctgcccgtggtgtccaggacaaagctcaggctggaggctggggtg

SEQ ID NO: 51079 - DNA, 80 bp, synthetic construct
  source 1..80: mol_type = other DNA
cgcagaaggctgaaggcctggatggaggctagaagggccagttttgcagcctggaggtgcagcatgtggtgaggggagaa

SEQ ID NO: 51080 - DNA, 80 bp, synthetic construct; identical to SEQ ID NO: 13503
  source 1..80: mol_type = other DNA

SEQ ID NO: 51081 - DNA, 80 bp, synthetic construct
  source 1..80: mol_type = other DNA
aaggaaaatagcttgatcccaagaggcggaggttgcagtgaaccgagatcacgccactgcactccagcctgggtggcaga

SEQ ID NO: 51082 - DNA, 80 bp, synthetic construct
  source 1..80: mol_type = other DNA
taaaagtacaaaattagccgggcgtggtggcacatgcccgtaatcccagctactcgggaggctgaggcaggagaatcgct

SEQ ID NO: 51083 - DNA, 80 bp, synthetic construct
  source 1..80: mol_type = other DNA
gtggtcagtcaccacagcacatggtggatcccctgatccctccagccagtcccccaaaactgcctatgacaagggagaaa

SEQ ID NO: 51084 - DNA, 80 bp, synthetic construct; identical to SEQ ID NO: 13504
  source 1..80: mol_type = other DNA

SEQ ID NO: 51085 - DNA, 80 bp, synthetic construct
  source 1..80: mol_type = other DNA
tcccagctgggatgaggcgaacacccagaagttccctagcaaagctttctgaactaaaacctaggatcatgggcccgcag

SEQ ID NO: 51086 - DNA, 80 bp, synthetic construct
  source 1..80: mol_type = other DNA
aataataagaaaaaaacaaacacagtacgtgtagggaccaatcctatggggattatgccctctgtgagttgtggacagga

SEQ ID NO: 51087 - DNA, 80 bp, synthetic construct
  source 1..80: mol_type = other DNA
gttgcttggactgggggacctcagtccttgtggagattaagtaacatcataccctctgggacttcagaatgtgacacagt

SEQ ID NO: 51088 - DNA, 80 bp, synthetic construct; identical to SEQ ID NO: 13505
  source 1..80: mol_type = other DNA

SEQ ID NO: 51089 - DNA, 80 bp, synthetic construct
  source 1..80: mol_type = other DNA
tcggcctgcagagtcctgctgcgtgtgctgctccctcagctctctgacctcgcagccttcctctctcaccctcacttctc

SEQ ID NO: 51090 - DNA, 80 bp, synthetic construct
  source 1..80: mol_type = other DNA
acaggcacggaagtgaagacccctctgaccatcaacccaaccctgttctcacctgcagggcatgaagtgcagccccgagg

SEQ ID NO: 51091 - DNA, 80 bp, synthetic construct
  source 1..80: mol_type = other DNA
gagacacctcacctaaggctgctcggaaccgccgagaagaaccaggtccaaagtaggcggcaaagaggtcatcagcaagg

SEQ ID NO: 51092 - DNA, 80 bp, synthetic construct; identical to SEQ ID NO: 13506
  source 1..80: mol_type = other DNA

SEQ ID NO: 51093 - DNA, 80 bp, synthetic construct
  source 1..80: mol_type = other DNA
cagttaggtcttggtgggtgatggagccaggggcagccagcaggctccagatgttggggaagaaggcagatgtggggggc

SEQ ID NO: 51094 - DNA, 80 bp, synthetic construct
  source 1..80: mol_type = other DNA
gaacctgctttacctcaaaagtcgtgtctgctccagcctggcttccccaccctctcgctgtcacccagacaacctgaggg

SEQ ID NO: 51095 - DNA, 80 bp, synthetic construct
  source 1..80: mol_type = other DNA
gttgctgggtctcctgggcagggctggcccgggcttgacgtcacagggcacttaggtcagagttataattaaccgaggct

SEQ ID NO: 51096 - DNA, 80 bp, synthetic construct; identical to SEQ ID NO: 13507
  source 1..80: mol_type = other DNA

SEQ ID NO: 51097 - DNA, 80 bp, synthetic construct
  source 1..80: mol_type = other DNA
gatcacagcatcttctggaatagggcgatggcctcatccaccttcctgagctctgcttctgtctgttggagctggagtgg

SEQ ID NO: 51098 - DNA, 80 bp, synthetic construct
  source 1..80: mol_type = other DNA
acttccaccaccacctcttgggtcttgcctttttccaccaagtggtgagtccccaagaacaaaggaacctcagagcctac

SEQ ID NO: 51099 - DNA, 80 bp, synthetic construct
  source 1..80: mol_type = other DNA
cctccatgactggttttctctgtgtctgtgcagtttactccactgcttctctctggcggaacccaggaggcaggggacaa

SEQ ID NO: 51100 - DNA, 80 bp, synthetic construct; identical to SEQ ID NO: 13508
  source 1..80: mol_type = other DNA

SEQ ID NO: 51101 - DNA, 80 bp, synthetic construct
  source 1..80: mol_type = other DNA
caggctcaagtgcagtggcatgatctcggctcactgcagtcttgacctcccaggctcaagcaatccgcccacctcagccc

SEQ ID NO: 51102 - DNA, 80 bp, synthetic construct
  source 1..80: mol_type = other DNA
ccactgagccaggctgttttgttttttaaggctagtgggagtggagaaggaacaaagaaatctgtaactggttacgatca

SEQ ID NO: 51103 - DNA, 80 bp, synthetic construct
  source 1..80: mol_type = other DNA
gttcccgcagacgctgggcctgccgctgggcctcaactcgcttggcttgcagcttgcccagctcccgtgcagggtccacc

SEQ ID NO: 51104 - DNA, 80 bp, synthetic construct; identical to SEQ ID NO: 13509
  source 1..80: mol_type = other DNA

SEQ ID NO: 51105 - DNA, 80 bp, synthetic construct
  source 1..80: mol_type = other DNA
ctgcctcggggtccttccaggagcactgtggggtggaggagggggtgagggggcctggagggcaggtcagactcccctct

SEQ ID NO: 51106 - DNA, 80 bp, synthetic construct
  source 1..80: mol_type = other DNA
ggtctggcgggcacactcagctgccacctggtccaccccattcagtacaggtttcaggcactcctaggggacgagaggta

SEQ ID NO: 51107 - DNA, 80 bp, synthetic construct
  source 1..80: mol_type = other DNA
tctcaccaagtagacatcacagagctcatagagccagaagctgtactgggcagtggtgacggccgggaagtcgtaggcct

SEQ ID NO: 51108 - DNA, 80 bp, synthetic construct; identical to SEQ ID NO: 13510
  source 1..80: mol_type = other DNA

SEQ ID NO: 51109 - DNA, 80 bp, synthetic construct
  source 1..80: mol_type = other DNA
ccaaggccacgaagggcaaacttggtggcattccagagcttgttgcagaagtggcggtaacccagtatccggttcacatc

SEQ ID NO: 51110 - DNA, 80 bp, synthetic construct
  source 1..80: mol_type = other DNA
catgtaggcacataatccaaaccggagagcatcggtgccacattcaggaatccccgctgggaagtcagctttctacaggg

SEQ ID NO: 51111 - DNA, 80 bp, synthetic construct
  source 1..80: mol_type = other DNA
gggagcagtcaggtggctgtgaccacagccccacggcccttcctggctggcccagcacccagcccacctgcagggagatt

SEQ ID NO: 51112 - DNA, 80 bp, synthetic construct; identical to SEQ ID NO: 13511
  source 1..80: mol_type = other DNA

SEQ ID NO: 51113 - DNA, 80 bp, synthetic construct
  source 1..80: mol_type = other DNA
gtaggagaggaggctgggggcgatgggagggtctcggctgtctccgcacctctctaaagggcagcctgcccgtgagcttc

SEQ ID NO: 51114 - DNA, 80 bp, synthetic construct
  source 1..80: mol_type = other DNA
cccggccccaggaacacacctggttgggccagcccaaaatggataaggggaagaggccagaggagaaccaggtatccaat

SEQ ID NO: 51115 - DNA, 80 bp, synthetic construct
  source 1..80: mol_type = other DNA
gcctcattgcgtccactcacccagtaccgcccatcagggtcctgccacaggtgcagtgattacccaagggggtgtgtctg

SEQ ID NO: 51116 - DNA, 80 bp, synthetic construct; identical to SEQ ID NO: 13512
  source 1..80: mol_type = other DNA

SEQ ID NO: 51117 - DNA, 80 bp, synthetic construct
  source 1..80: mol_type = other DNA
gagtcacagcggcgctggcagcctgggccatctccccgcagcgaacgtaccactgcggccgcagcagaggctctaccacg

SEQ ID NO: 51118 - DNA, 80 bp, synthetic construct
  source 1..80: mol_type = other DNA
ggttgtcctcaatgccacggaacagtccccgctccttcagcgccaccagcaccgctttcctggcctcaaacctgggcagg

SEQ ID NO: 51119 - DNA, 80 bp, synthetic construct
  source 1..80: mol_type = other DNA
gctgcccaacttcatagtcattttggtcatgtgcgggggtgatcttcacagcacctgggtgtacatcaggatgcccaggt

SEQ ID NO: 51120 - DNA, 80 bp, synthetic construct; identical to SEQ ID NO: 13513
  source 1..80: mol_type = other DNA

SEQ ID NO: 51121 - DNA, 80 bp, synthetic construct
  source 1..80: mol_type = other DNA
ccgtgattcccacctgtaatcccagaactttgggaggctgaggtgggcagatcacttgaggccgggagttggagaccagc

SEQ ID NO: 51122 - DNA, 80 bp, synthetic construct
  source 1..80: mol_type = other DNA
tgcactctagcctgggcgatagagtgagaccctctctcaaaaataaataaataaataaaagcatgaaggggcctggtgcc

SEQ ID NO: 51123 - DNA, 80 bp, synthetic construct
  source 1..80: mol_type = other DNA
agtgcagcagagtgatctcagctcactgcaacctccgcatcccaggttcaagcgattctcctgcctcagcctcctgagta

SEQ ID NO: 51124 - DNA, 80 bp, synthetic construct; identical to SEQ ID NO: 13514
  source 1..80: mol_type = other DNA

SEQ ID NO: 51125 - DNA, 80 bp, synthetic construct
  source 1..80: mol_type = other DNA
cccataaggatgggagccctttttggccagaactccttccctaactgtggacagtcccccacctggtatctggtatcttt

SEQ ID NO: 51126 - DNA, 80 bp, synthetic construct
  source 1..80: mol_type = other DNA
acctgagccttggaccttataggcaaaggacacgaggaccccgaactccaccttctccttgtagccaggcacggagagca

SEQ ID NO: 51127 - DNA, 80 bp, synthetic construct
  source 1..80: mol_type = other DNA
cagttaacaaggcgggtactgcgatagatgatgccttcctcgtgaagccggacaaaggcctctgtcacagctgctgagag

SEQ ID NO: 51128 - DNA, 80 bp, synthetic construct; identical to SEQ ID NO: 13515
  source 1..80: mol_type = other DNA

SEQ ID NO: 51129 - DNA, 80 bp, synthetic construct
  source 1..80: mol_type = other DNA
atggaaagggccatggcgaggggtgggaagtggcatttgcagctgagccctccatggtgttttacatgggccagctcctg

SEQ ID NO: 51130 - DNA, 80 bp, synthetic construct
  source 1..80: mol_type = other DNA
aatccggtcacctttcctggaagcagacaggctgaggtcagcactcgtgcctgggctagagggagacatcaggtggctga

SEQ ID NO: 51131 - DNA, 80 bp, synthetic construct
  source 1..80: mol_type = other DNA
ggatgctgcatactcactcctccttccacttccagacttcctgtagaaaggcctcgcggcccagctggtgccggctcagt

SEQ ID NO: 51132 - DNA, 80 bp, synthetic construct; identical to SEQ ID NO: 13516
  source 1..80: mol_type = other DNA

SEQ ID NO: 51133 - DNA, 80 bp, synthetic construct
  source 1..80: mol_type = other DNA
gggtggatcacctgaggtggggacttcaagataagcctggccaatatggtaaaaccctgtctgtattaaaaatacaaaat

SEQ ID NO: 51134 - DNA, 80 bp, synthetic construct
  source 1..80: mol_type = other DNA
aaaaaaaaaaagaaagaagcaggggtggagctggaacccttgtgattctaaagctagtcaaggagaaaagatttgaagga

SEQ ID NO: 51135 - DNA, 80 bp, synthetic construct
  source 1..80: mol_type = other DNA
taaaaattagccaggatggtggtgcatacctgtaatcccagctacttgggaggctgaagcacgagaatcgcttgaagctg

SEQ ID NO: 51136 - DNA, 80 bp, synthetic construct; identical to SEQ ID NO: 13517
  source 1..80: mol_type = other DNA

SEQ ID NO: 51137 - DNA, 80 bp, synthetic construct
  source 1..80: mol_type = other DNA
aaggtgagaggactgcttgagcccaggagttgcagactagcctgggcaacatagtgagacctagtctctgcaaaaaaaaa

SEQ ID NO: 51138 - DNA, 80 bp, synthetic construct
  source 1..80: mol_type = other DNA
acaaataaataaaaataaaaagttgatataactctattccattaaagtaatgggagtgtctcacattttatttaaaccac

SEQ ID NO: 51139 - DNA, 80 bp, synthetic construct
  source 1..80: mol_type = other DNA
gttaggagttcaagaccagcttggccaacatggcaaaactctgtctactaaaaatgcaaaagaattagctgggcgtggtg

SEQ ID NO: 51140 - DNA, 80 bp, synthetic construct; identical to SEQ ID NO: 13518
  source 1..80: mol_type = other DNA

SEQ ID NO: 51141 - DNA, 80 bp, synthetic construct
  source 1..80: mol_type = other DNA
atcgagaccatcttggctaacacggtgaaaccccgtctctactaaaaatacaaaaaaaattagccaggcgtggtggtggg

SEQ ID NO: 51142 - DNA, 80 bp, synthetic construct
  source 1..80: mol_type = other DNA
aacaaaaacgcaaacacaaacgcaaacaacttggccattgtatgttatgtgtatttaacagaactgttggctggacgaag

SEQ ID NO: 51143 - DNA, 80 bp, synthetic construct
  source 1..80: mol_type = other DNA
cagaaggctgaggcaggagaatcgcttgagctcaggaggcagaggttgcagtaagcgcgcatcactgcactccagcctgg

SEQ ID NO: 51144 - DNA, 80 bp, synthetic construct
  source 1..80: mol_type = other DNA
ctgtctctactaaaaaaaatacaaaaaattagccaggcgtggtggcgggcgcctgtagtcccagctactcaggaggctga

SEQ ID NO: 51145 - DNA, 80 bp, synthetic construct; identical to SEQ ID NO: 13519
  source 1..80: mol_type = other DNA

SEQ ID NO: 51146 - DNA, 80 bp, synthetic construct
  source 1..80: mol_type = other DNA
tattaacagtgaaaacaaatagtaacagaaaacaggagaaacatttacaattaacaggaaaactaccacacaataataca

SEQ ID NO: 51147 - DNA, 80 bp, synthetic construct
  source 1..80: mol_type = other DNA
tacagacaattcacatatgggtaaacctgactggccaaaaaacatgaaaataggcacaacttcaatagcaatcagaaagg

SEQ ID NO: 51148 - DNA, 80 bp, synthetic construct
  source 1..80: mol_type = other DNA
gcttccgtttgtacttaatataggtgtgcccctgccgacctagcagtttcacttcttgatagctacaccagcgaaaccct

SEQ ID NO: 51149 - DNA, 80 bp, synthetic construct
  source 1..80: mol_type = other DNA
gggcggatcacgaggtcaggagatcgagaccatcctggctaacatggtgaaaccccgtctctactaaaaatacaaaaaaa

SEQ ID NO: 51150 - DNA, 80 bp, synthetic construct; identical to SEQ ID NO: 13520
  source 1..80: mol_type = other DNA

SEQ ID NO: 51151 - DNA, 80 bp, synthetic construct
  source 1..80: mol_type = other DNA
gcatgtggcccacaggctgcaggttggacaaacttgatatacagggatgtgcattagagtaaggttttcaacagaaaaaa

SEQ ID NO: 51152 - DNA, 80 bp, synthetic construct
  source 1..80: mol_type = other DNA
tctctactaaaaatacaaaaattagccaggcgcggtggcaggtgcctgtaatgccagctacttgggaggctgaggcaaga

SEQ ID NO: 51153 - DNA, 80 bp, synthetic construct
  source 1..80: mol_type = other DNA
tggaacaattaaaaagaaggaagtcagtatgtgtggtatgtgtgtaaggacaaggaaagatctccaagagaaagtattaa

SEQ ID NO: 51154 - DNA, 80 bp, synthetic construct; identical to SEQ ID NO: 13521
  source 1..80: mol_type = other DNA

SEQ ID NO: 51155 - DNA, 80 bp, synthetic construct
  source 1..80: mol_type = other DNA
ccaaaaaaaaatatatatattcatatgttcctaattaaattcaaaataatgttattgttactagaaaaagaagggagaga

SEQ ID NO: 51156 - DNA, 80 bp, synthetic construct
  source 1..80: mol_type = other DNA
ggatagaagagagtctgcaagtggcggtgttgcatgggagtactggactaggagaggaagctaaatgatcagattggaat

SEQ ID NO: 51157 - DNA, 80 bp, synthetic construct
  source 1..80: mol_type = other DNA
tggcgttggtgagtgcatggcccaggtgcagggagcctgtcacattggggggtgggatgcacatcatgaagacacctcgg

SEQ ID NO: 51158 - DNA, 80 bp, synthetic construct; identical to SEQ ID NO: 13522
  source 1..80: mol_type = other DNA

SEQ ID NO: 51159 - DNA, 80 bp, synthetic construct
  source 1..80: mol_type = other DNA
ctgcaattcctcaccaaacaaagtggtgagagcaagaatagagcaagatagggtgaaaacttagaaggggctgctgaggg

SEQ ID NO: 51160 - DNA, 80 bp, synthetic construct
  source 1..80: mol_type = other DNA
gcacacatcaactttccttccagctccaccctcgcctcacctcccctggaggtggctgctgctgttggatcttctgcttc

SEQ ID NO: 51161 - DNA, 80 bp, synthetic construct
  source 1..80: mol_type = other DNA
gtattttagatgcccgaggtcttgcccatgctgacctcccccctctccctcctctcccgcaggaccctgccccagtgatt

SEQ ID NO: 51162 - DNA, 80 bp, synthetic construct; identical to SEQ ID NO: 13523
  source 1..80: mol_type = other DNA

SEQ ID NO: 51163 - DNA, 80 bp, synthetic construct
  source 1..80: mol_type = other DNA
gccactcctccaaggggctcagggccctgcccagggcccccagcacagcctggcaggaaggggaagaagtgtgagacaag

SEQ ID NO: 51164 - DNA, 80 bp, synthetic construct
  source 1..80: mol_type = other DNA
gctaacatggtgaaacctcatctctactaaaaatacaaaaaaaaaatagccaggcgtggtggcgggcgcctgtagtccca

SEQ ID NO: 51165 - DNA, 80 bp, synthetic construct
  source 1..80: mol_type = other DNA
ctcaatacttatgtgttagatgcaatatgttaagcatagaagtaaagattatatgaggcatctcaataactgccaggttc

SEQ ID NO: 51166 - DNA, 80 bp, synthetic construct; identical to SEQ ID NO: 13524
  source 1..80: mol_type = other DNA

SEQ ID NO: 51167 - DNA, 80 bp, synthetic construct
  source 1..80: mol_type = other DNA
tactcagaaggctgaggcaggagaatcgcttgagcagtgagctgagatcgcaccatcgcaccgtggcactccagcctggg

SEQ ID NO: 51168 - DNA, 80 bp, synthetic construct
  source 1..80: mol_type = other DNA
cacaatatgagggagcaagtcagggtctgccacattcattcatccattcaagaaatactaattttccatcatgtgctcaa

SEQ ID NO: 51169 - DNA, 80 bp, synthetic construct
  source 1..80: mol_type = other DNA
gtcttttcctacaattcaaataacttctatcctcatcaatttcagactcatcaaacttttactaagagactttaaaagtg

SEQ ID NO: 51170 - DNA, 80 bp, synthetic construct; identical to SEQ ID NO: 13525
  source 1..80: mol_type = other DNA

SEQ ID NO: 51171 - DNA, 80 bp, synthetic construct
  source 1..80: mol_type = other DNA
ccccctgggccccccaggcctgctggccacagcagctgggccacagccgtggccccccacacccagagcccaccgggccc

SEQ ID NO: 51172 - DNA, 80 bp, synthetic construct
  source 1..80: mol_type = other DNA
tgaggggagacgtagagggtggacatagttatgagaaggtccgaacgaagtggaaaaacctaaggagaaagagagacagg

SEQ ID NO: 51173 - DNA, 80 bp, synthetic construct
  source 1..80: mol_type = other DNA
ggagttcctggggaagaggaactatccaccatcgcggggcttcggggagtgtggaaggctctcaggagcgggtcggcgtc

SEQ ID NO: 51174 - DNA, 80 bp, synthetic construct; identical to SEQ ID NO: 13526
  source 1..80: mol_type = other DNA

SEQ ID NO: 51175 - DNA, 80 bp, synthetic construct
  source 1..80: mol_type = other DNA
gagcacgacgctcccgtcaggcgccgccacgggcaccttgtgcgggtcctcggccgggtggcgagggcggcgcccagcgg

SEQ ID NO: 51176 - DNA, 80 bp, synthetic construct
  source 1..80: mol_type = other DNA
tctcctcatgtatgaaaaaagggtgacggccgggcgcagtggctcacgcctataatcccagcactttgggaggccgaggt

SEQ ID NO: 51177 - DNA, 80 bp, synthetic construct
  source 1..80: mol_type = other DNA
actaaaaatacaaaaattagccaggtgtggtggcaggcgcctgtaatcccagctaccccggagcctgaggcagggaattg

SEQ ID NO: 51178 - DNA, 80 bp, synthetic construct
  source 1..80: mol_type = other DNA
cttgaacctgggaggcggagattgcagagctaagatcacaccactgcagtccagcctgggtgacaaagtgagactccatc

SEQ ID NO: 51179 - DNA, 80 bp, synthetic construct; identical to SEQ ID NO: 13527
  source 1..80: mol_type = other DNA

SEQ ID NO: 51180 - DNA, 80 bp, synthetic construct
  source 1..80: mol_type = other DNA
atgtatcttatgacactatcacattaatggaaggacagcaagcactccagttgcaggtatggtataagcaaaaggccaca

SEQ ID NO: 51181 - DNA, 80 bp, synthetic construct
  source 1..80: mol_type = other DNA
cccagccccctgcccaacacatagtaacagaaccaaaacacaaatttgcatcataaattttattcccgatgcgggacaga

SEQ ID NO: 51182 - DNA, 80 bp, synthetic construct
  source 1..80: mol_type = other DNA
ttccctattactcctctcatccactcatcccttaaaaaaaacccacaaaaccatcattagtaaaaaaacaaaaccccttc

SEQ ID NO: 51183 - DNA, 80 bp, synthetic construct; identical to SEQ ID NO: 13528
  source 1..80: mol_type = other DNA

SEQ ID NO: 51184 - DNA, 80 bp, synthetic construct
  source 1..80: mol_type = other DNA
tgtgagggtatttctcagggtctgtgacactgatgtcagttagtttgatgttgagatactaggaaaggaagatgaacacc

SEQ ID NO: 51185 - DNA, 80 bp, synthetic construct
  source 1..80: mol_type = other DNA
ccaccacgcccagctaattttttgtatttttagtagagacggggtttcaccatgtttgtcaggcttgtcttgaactcctg

SEQ ID NO: 51186 - DNA, 80 bp, synthetic construct
  source 1..80: mol_type = other DNA
ctcacctgatccacagaatggagggttccacagatgctgtcaagggcagagggagagaagaatcaaattagtttataaca

SEQ ID NO: 51187 - DNA, 80 bp, synthetic construct; identical to SEQ ID NO: 13529
  source 1..80: mol_type = other DNA

SEQ ID NO: 51188 - DNA, 80 bp, synthetic construct
  source 1..80: mol_type = other DNA
gacttcaggcgcatgccatcatgcccggctaattttttatttttagtagagatggggtttcaccatgttggccaggctgt

SEQ ID NO: 51189 - DNA, 80 bp, synthetic construct
  source 1..80: mol_type = other DNA
ctttacagccatctttcaaagtagttattaccttccaggggctcagagaggttgttttaaactttatgagtttagaacaa

SEQ ID NO: 51190 - DNA, 80 bp, synthetic construct
  source 1..80: mol_type = other DNA
ctgtggccacttgagtagctgtgattacaggcttgagccaccatgcccagctgatttttttttgagatggagtctcgctc

SEQ ID NO: 51191 - DNA, 80 bp, synthetic construct
  source 1..80: mol_type = other DNA
actcctggctaattttttgtatttttagtagagacggggtttcaccgtgttagccaggatggtctcgatctcctgacctc

SEQ ID NO: 51192 - DNA, 80 bp, synthetic construct; identical to SEQ ID NO: 13530
  source 1..80: mol_type = other DNA

SEQ ID NO: 51193 - DNA, 80 bp, synthetic construct
  source 1..80: mol_type = other DNA
gggaggctgaggcaggaggatcgcctgaagccagctggagaacagcccagacaacatagcaagacctcatctctatttta

SEQ ID NO: 51194 - DNA, 80 bp, synthetic construct
  source 1..80: mol_type = other DNA
tcgtgaaaccccatctctactaaaaatacaaaaaattagctgggcatagtggcagacgcctgtaatcccagctactcggg

SEQ ID NO: 51195 - DNA, 80 bp, synthetic construct
  source 1..80: mol_type = other DNA
tatcttgccaaaaataaagttggcagttctctgccccaatttttgtaaaattctgaaagtctttaaaacccagcgtctag

SEQ ID NO: 51196 - DNA, 80 bp, synthetic construct
  source 1..80: mol_type = other DNA
aatctcagcactttgggaggccgaggcgggtggatcacgaggtcaggagatcgagaccatcctggctaacacggtgaaac

SEQ ID NO: 51197 - DNA, 80 bp, synthetic construct; identical to SEQ ID NO: 13531
  source 1..80: mol_type = other DNA

SEQ ID NO: 51198 - DNA, 80 bp, synthetic construct
  source 1..80: mol_type = other DNA
agtgagccaagatcatgccactgcattccagcctcggtgacagagtaaggatctgtctcaaaaaaaaaaaaaaaaaaaaa

SEQ ID NO: 51199 - DNA, 80 bp, synthetic construct
  source 1..80: mol_type = other DNA
tgctagctgctgaaaaacatttgacagcaccccaccatctccagcagtgaaataacatttgggaattgtacaaagtggtg

SEQ ID NO: 51200 - DNA, 80 bp, synthetic construct
  source 1..80: mol_type = other DNA
tgaggccagcctggccaacatggtgaaaccccatccctactaaaaatacaaaaaattagctgggagtggtggcatgcacc

SEQ ID NO: 51201 - DNA, 80 bp, synthetic construct; identical to SEQ ID NO: 13532
  source 1..80: mol_type = other DNA

SEQ ID NO: 51202 - DNA, 80 bp, synthetic construct
  source 1..80: mol_type = other DNA
agcactttgggaggccgaggcaggtggatcacgaggtcaggagttcaagaccagcctgacgaagatggtgaaacccgatg

SEQ ID NO: 51203 - DNA, 80 bp, synthetic construct
  source 1..80: mol_type = other DNA
cccatctcaaacaaaaataaataaataaatagaaaaaaaagaaggctgggcgcagtggctcacacctgtaatcacagtac

SEQ ID NO: 51204 - DNA, 80 bp, synthetic construct
  source 1..80: mol_type = other DNA
ttgaaccagggagtcggaggttacagcaccactgcactccagcctggcgtagactcgaccagagcgagactcgtctcaat

SEQ ID NO: 51205 - DNA, 80 bp, synthetic construct
  source 1..80: mol_type = other DNA
agatacaaaaaatgagccaggcgttgtggcgcatgcctgtaatcccagctaccagggaggctgaggcaggagaatcactt

SEQ ID NO: 51206 - DNA, 80 bp, synthetic construct; identical to SEQ ID NO: 13533
  source 1..80: mol_type = other DNA

SEQ ID NO: 51207 - DNA, 80 bp, synthetic construct
  source 1..80: mol_type = other DNA
agaaatgtggaagacagccagacacagtggcacacacctgtaattccagcactttgggaggccaaggtggcaggactgct

SEQ ID NO: 51208 - DNA, 80 bp, synthetic construct
  source 1..80: mol_type = other DNA
agacccccatctcaaaaaaataaatgtggaagacgcttttgggaagagaatacaattgatcccatctttctaaaggataa

SEQ ID NO: 51209 - DNA, 80 bp, synthetic construct
  source 1..80: mol_type = other DNA
ctaggattacaggcgcacaacacaacatctggctaatttttgtatttttagtagagatggagtttcaccatgttggccaa

SEQ ID NO: 51210 - DNA, 80 bp, synthetic construct; identical to SEQ ID NO: 13534
  source 1..80: mol_type = other DNA

SEQ ID NO: 51211 - DNA, 80 bp, synthetic construct
  source 1..80: mol_type = other DNA
agagttcaagaccagcctggcctagatggtgaaactccatctctactaaaaatacaaaatttagccgggcatggtggtgg

SEQ ID NO: 51212 - DNA, 80 bp, synthetic construct
  source 1..80: mol_type = other DNA
acagaatcatatttcagttgtgtcacttactagttttgtagacttgaacaagtggtatagctgatctaagcctcagtttc

SEQ ID NO: 51213 - DNA, 80 bp, synthetic construct; identical to SEQ ID NO: 13535
  source 1..80: mol_type = other DNA

SEQ ID NO: 51214 - DNA, 80 bp, synthetic construct
  source 1..80: mol_type = other DNA
ttcttttttttctttttttttttttttttttttgagacggagtcttgctctgtcacccaggctggagtgcggtggcacca

SEQ ID NO: 51215 - DNA, 80 bp, synthetic construct
  source 1..80: mol_type = other DNA
tcctgaccttgtgatccgcctgcctcggcctcccaaagtgctgggattacaggcgtgagccaccgcgcccggcctggcct

SEQ ID NO: 51216 - DNA, 80 bp, synthetic construct; identical to SEQ ID NO: 13536
  source 1..80: mol_type = other DNA

SEQ ID NO: 51217 - DNA, 80 bp, synthetic construct
  source 1..80: mol_type = other DNA
ctcctgcctcaccctcccgagtagctgggattacaggcaccagccaccgtgcccggctaatttttgtatttttagtagag

SEQ ID NO: 51218 - DNA, 80 bp, synthetic construct
  source 1..80: mol_type = other DNA
ttgtattgttttccaatacacgatacaatctctaagcttatctgtaaatttaaggcacaaggcatttatttattgctaaa

SEQ ID NO: 51219 - DNA, 80 bp, synthetic construct
  source 1..80: mol_type = other DNA
tatccatttatttcttctgtacatcttccacctcgcctagccctgaaatatttctcaaattaaagaggttccagggccct

SEQ ID NO: 51220 - DNA, 80 bp, synthetic construct; identical to SEQ ID NO: 13537
  source 1..80: mol_type = other DNA

SEQ ID NO: 51221 - DNA, 80 bp, synthetic construct
  source 1..80: mol_type = other DNA
actcctttcaatgaattgtagaaaatatcccacccgcaccctgccgaagcttgcctggcagagaagtgctctgaggtcta

SEQ ID NO: 51222 - DNA, 80 bp, synthetic construct
  source 1..80: mol_type = other DNA
agtactaaagatgaagataaaaactccggacctaactccagcctaggggtacaaaggccagatcccccgccccaaccatg

SEQ ID NO: 51223 - DNA, 80 bp, synthetic construct
  source 1..80: mol_type = other DNA
gcagcgggaagcgacgcagaaagctccaagcgctgacgggcaaagcgcggccgacttgcggctggggagcgcaagctggg

SEQ ID NO: 51224 - DNA, 80 bp, synthetic construct; identical to SEQ ID NO: 13538
  source 1..80: mol_type = other DNA

SEQ ID NO: 51225 - DNA, 80 bp, synthetic construct
  source 1..80: mol_type = other DNA
ggtgggtggattgtgtgaggtcaggagttcgagaccagtctagccaacatggtgaaaccccatcttcactaaaaatacaa

SEQ ID NO: 51226 - DNA, 80 bp, synthetic construct
  source 1..80: mol_type = other DNA
aaaaaaaaaaatgaccgggagcagtggctcacacctgtaatcccagcactttgggcggccaaggcaagtggatcgcctga

SEQ ID NO: 51227 - DNA, 80 bp, synthetic construct
  source 1..80: mol_type = other DNA
gcaaaactccatcccaaaaaacaaaaaatgttgaggcctgtaaatcccagcatttggggaggctgaggcaggaggatcat

SEQ ID NO: 51228 - DNA, 80 bp, synthetic construct; identical to SEQ ID NO: 13539
  source 1..80: mol_type = other DNA

SEQ ID NO: 51229 - DNA, 80 bp, synthetic construct
  source 1..80: mol_type = other DNA
ggtaaaagaaaaaaatgtttttgagatggagtctcgctctatcaccaggctggagtgtggtgccacgatctcagctcact

SEQ ID NO: 51230 - DNA, 80 bp, synthetic construct
  source 1..80: mol_type = other DNA
atccgcccgcctcggcctcccaaagtgctgggattacaggcgtgagccactgtgcccagctggtaaaaatattttttcat

SEQ ID NO: 51231 - DNA, 80 bp, synthetic construct
  source 1..80: mol_type = other DNA
agttcagaacagcctggtcaacatggtgaaatcccgtctctactaaaaacacaaacattagccgggcatggtggtgagcg

SEQ ID NO: 51232 - DNA, 80 bp, synthetic construct; identical to SEQ ID NO: 13540
  source 1..80: mol_type = other DNA

SEQ ID NO: 51233 - DNA, 80 bp, synthetic construct
  source 1..80: mol_type = other DNA
agtttgccatctgttccatctgtgctaaaggtgtctgaggatcaaaaattatgtggctgattgaaacaatgagttcatgg

SEQ ID NO: 51234 - DNA, 80 bp, synthetic construct
  source 1..80: mol_type = other DNA
cagtcccagctactcgggaggctgaggcaggagaatggcgtgaacccaggaggcagagcttgcagtaagctgagattgtg

SEQ ID NO: 51235 - DNA, 80 bp, synthetic construct
  source 1..80: mol_type = other DNA
catgctctctccatgaactctccccttcaaggtacattcacagcctaaataccagaagtaattttctttacgaacaaatt

SEQ ID NO: 51236 - DNA, 80 bp, synthetic construct
  source 1..80: mol_type = other DNA
tgagactccttctccagaatttccaagggatggtaacttagattcaggtctggtcaagaataataatgatgtttgaagat

SEQ ID NO: 51237 - DNA, 80 bp, synthetic construct; identical to SEQ ID NO: 13541
  source 1..80: mol_type = other DNA

SEQ ID NO: 51238 - DNA, 80 bp, synthetic construct
  source 1..80: mol_type = other DNA
ttgcagcaattttctccctctggacctcatcttcagctttatatttctcagcatccagaaccatgcgctcaatctcctcc

SEQ ID NO: 51239 - DNA, 80 bp, synthetic construct
  source 1..80: mol_type = other DNA
accgccccagcaggttgttgtcctttgtcatggccctctcgccctcatacacctggatcagcaccccgggttggttgtca

SEQ ID NO: 51240 - DNA, 80 bp, synthetic construct
  source 1..80: mol_type = other DNA
tggctgcttgtaccgcagccccatatgctacggcctcatcagggttgatgctcttgttgagatcacgtccattgaagtag

SEQ ID NO: 51241 - DNA, 80 bp, synthetic construct; identical to SEQ ID NO: 13542
  source 1..80: mol_type = other DNA

SEQ ID NO: 51242 - DNA, 80 bp, synthetic construct
  source 1..80: mol_type = other DNA
cctcaaaaatcccatcatctatggtcagaattgacacatcaaatgtgcctccacccagatcaaaaatcaggacatgtcgt

SEQ ID NO: 51243 - DNA, 80 bp, synthetic construct
  source 1..80: mol_type = other DNA
tcattgaaataggctggcacggtaatcactgcattggtgacagggtggcccaaaaaggcctcagcagtctccttcaactt

SEQ ID NO: 51244 - DNA, 80 bp, synthetic construct
  source 1..80: mol_type = other DNA
tgcttgtacaacaggatcattaaatttcctgccgatcagacgtttagcatcaaaaacagtgttctggggattcattgcta

SEQ ID NO: 51245 - DNA, 80 bp, synthetic construct; identical to SEQ ID NO: 13543
  source 1..80: mol_type = other DNA

SEQ ID NO: 51246 - DNA, 80 bp, synthetic construct
  source 1..80: mol_type = other DNA
tttttgagacggagtcttgctttggactgcagtggtgtgatctaggctcactgcaacctccacctcctgagttcaagcga

SEQ ID NO: 51247 - DNA, 80 bp, synthetic construct
  source 1..80: mol_type = other DNA
caaagtgctgggattacatacgtgagccaccgtgaccagctctctgcctggctaatgttttaattttgtgtacagatggg

SEQ ID NO: 51248 - DNA, 80 bp, synthetic construct
  source 1..80: mol_type = other DNA
accatttttaagtgtagagtttggtagtgagttcaatcacagcggtgttcaaccaatttccagaattctgttcatctcgc

SEQ ID NO: 51249 - DNA, 80 bp, synthetic construct; identical to SEQ ID NO: 13544
  source 1..80: mol_type = other DNA

SEQ ID NO: 51250 - DNA, 80 bp, synthetic construct
  source 1..80: mol_type = other DNA
ggcgcccgacctcttttttctatctctatgaatttgactactcttgtaacttcatataagtggaattatacagtatttat

SEQ ID NO: 51251 - DNA, 80 bp, synthetic construct
  source 1..80: mol_type = other DNA
ggagtgcagtggcatgatcttggctcactgcaacctccacctcctgggttcaagctaattctccagcctcagcctcccga

SEQ ID NO: 51252 - DNA, 80 bp, synthetic construct
  source 1..80: mol_type = other DNA
accaccgcacccggcctatatacattttgcttatctatctctcgatggatacagattacagaatttacagaataatgttg

SEQ ID NO: 51253 - DNA, 80 bp, synthetic construct; identical to SEQ ID NO: 13545
  source 1..80: mol_type = other DNA

SEQ ID NO: 51254 - DNA, 80 bp, synthetic construct
  source 1..80: mol_type = other DNA
cctaaataaaactcctgttttctggagccaataactgatcaataaagggtttaagggcggggggcggtggctcacgcctg

SEQ ID NO: 51255 - DNA, 80 bp, synthetic construct
  source 1..80: mol_type = other DNA
tcggatggctgaggcaggagaatagcttgaacccgggaggtggagcaattagccgggcgcggtggcgggcgcctgcagtc

SEQ ID NO: 51256 - DNA, 80 bp, synthetic construct
  source 1..80: mol_type = other DNA
aaagggtttagtgtctatccctctccacaccgcagattcctaggccgcactccctttcccccgcttcccagttaccccgc

SEQ ID NO: 51257 - DNA, 80 bp, synthetic construct; identical to SEQ ID NO: 13546
  source 1..80: mol_type = other DNA

SEQ ID NO: 51258 - DNA, 80 bp, synthetic construct
  source 1..80: mol_type = other DNA
gctccaactcagtaatctttttccaaactggcccatgaggtcagagacagtatctccattgtaacgtggccgggcggtgt

SEQ ID NO: 51259 - DNA, 80 bp, synthetic construct
  source 1..80: mol_type = other DNA
atggagaccaacacccttcccaccgccactcccccttcctctcagggtccctgtcccctccagtgaatcccagaagactc

SEQ ID NO: 51260 - DNA, 80 bp, synthetic construct
  source 1..80: mol_type = other DNA
ttataaaagcccaggggcaagcggtccggataacggctagcctgaggagctgctgcgacagtccactacctttttcgaga

SEQ ID NO: 51261 - DNA, 80 bp, synthetic construct; identical to SEQ ID NO: 13547
  source 1..80: mol_type = other DNA

SEQ ID NO: 51262 - DNA, 80 bp, synthetic construct
  source 1..80: mol_type = other DNA
gcgacccggtggtgcagtcggacatgaagcactggcctttccaggtgatcaacgacggagacaagcccaaggtgcaggtg

SEQ ID NO: 51263 - DNA, 80 bp, synthetic construct
  source 1..80: mol_type = other DNA
aggatgcgggtgtgatcgcggggctcaacgtgctgcggatcatcaacgagcccacggccgccgccatcgcctacggcctg

SEQ ID NO: 51264 - DNA, 80 bp, synthetic construct
  source 1..80: mol_type = other DNA
accacttcgtggaggagttcaagagaaaacacaagaaggacatcagccagaacaagcgagccgtgaggcggctgcgcacc

SEQ ID NO: 51265 - DNA, 80 bp, synthetic construct; identical to SEQ ID NO: 13548
  source 1..80: mol_type = other DNA

SEQ ID NO: 51266 - DNA, 80 bp, synthetic construct
  source 1..80: mol_type = other DNA
tgtcgctggggctggagacggccggaggcgtgatgactgccctgatcaagcgcaactccaccatccccaccaagcagacg

SEQ ID NO: 51267 - DNA, 80 bp, synthetic construct
  source 1..80: mol_type = other DNA
acatcgatgccaacggcatcctgaacgtcacggccacggacaagagcaccggcaaggccaacaagatcaccatcaccaac

SEQ ID NO: 51268 - DNA, 80 bp, synthetic construct
  source 1..80: mol_type = other DNA
agggcaagatcagcgaggcggacaagaagaaggtgctggacaagtgtcaagaggtcatctcgtggctggacgccaacacc

SEQ ID NO: 51269 - DNA, 80 bp, synthetic construct; identical to SEQ ID NO: 13549
  source 1..80: mol_type = other DNA

SEQ ID NO: 51270 - DNA, 80 bp, synthetic construct
  source 1..80: mol_type = other DNA
tggtgaagtactgaacttgctttttttccggtttctacatgcagagatgaatttatactgccatcttacgactatttctt

SEQ ID NO: 51271 - DNA, 80 bp, synthetic construct
  source 1..80: mol_type = other DNA
tgtttttcccatagcgtctaaaatggaatggcatttttgcttccagtaagggcagattttgcagaggtgtgactattgta

SEQ ID NO: 51272 - DNA, 80 bp, synthetic construct
  source 1..80: mol_type = other DNA
tgaggtcaggagttccagaccaacctggccaatgtggtgaaaccctgtctctactaaaaacacaaaaattagctgggcgt

SEQ ID NO: 51273 - DNA, 80 bp, synthetic construct
  source 1..80: mol_type = other DNA
gatgctgattgggtttagcctgagggtacagaaaaagtttaacacctgggagggtagccttaaagtgatgtttgtgtaag

SEQ ID NO: 51274 - DNA, 80 bp, synthetic construct; identical to SEQ ID NO: 13550
  source 1..80: mol_type = other DNA

SEQ ID NO: 51275 - DNA, 80 bp, synthetic construct
  source 1..80: mol_type = other DNA
agatgcttcatgccccagccgctagcatcctagaagtaattccctcctccttggaaaacgcccactacaatccttaaagc

SEQ ID NO: 51276 - DNA, 80 bp, synthetic construct
  source 1..80: mol_type = other DNA
cctcctgcactaaaagtacaaaaatcagccaggcgcgatggtgtgcgcctgtaatcccagctattcgggaggctgaggca

SEQ ID NO: 51277 - DNA, 80 bp, synthetic construct
  source 1..80: mol_type = other DNA
aggtgggtggatcacctgaggtcaggagttcaagaccagcctggccaacagggtgaaaccccatctctactaaaaataca

SEQ ID NO: 51278 - DNA, 80 bp, synthetic construct; identical to SEQ ID NO: 13551
  source 1..80: mol_type = other DNA

SEQ ID NO: 51279 - DNA, 80 bp, synthetic construct
  source 1..80: mol_type = other DNA
tatgagcttatgtgtacctcaaagcccatcaaaccattcactaaatacttgttaatgaagaaaatccagtgttatgggaa

SEQ ID NO: 51280 - DNA, 80 bp, synthetic construct
  source 1..80: mol_type = other DNA
tacagaggaacatttatctcttatggtagttaaactgtagtactgtggactctggccacaatgtaaatcaatcttcatgg

SEQ ID NO: 51281 - DNA, 80 bp, synthetic construct
  source 1..80: mol_type = other DNA
aggacctaccaaatgcctttgttgacacagtagagaagtcatcagacataacattgaatggaggcaataagagagttcct

SEQ ID NO: 51282 - DNA, 80 bp, synthetic construct
  source 1..80: mol_type = other DNA
tggtgaaaccccacctctactaaaaatacaaaaattagctaggcgtggtggtgggcgcctgtaatcccagctactcagga

SEQ ID NO: 51283 - DNA, 80 bp, synthetic construct; identical to SEQ ID NO: 13552
  source 1..80: mol_type = other DNA

SEQ ID NO: 51284 - DNA, 80 bp, synthetic construct
  source 1..80: mol_type = other DNA
accttcctataccaggcctcagaaggcagcaggctatgataataaatttgattttatatggctttgaacccaggatttta

SEQ ID NO: 51285 - DNA, 80 bp, synthetic construct
  source 1..80: mol_type = other DNA
aggttatttcttgggggagccaatattggcgatttctgagggagcgatccttacgtgaatataaaaaattgtgacagcca

SEQ ID NO: 51286 - DNA, 80 bp, synthetic construct
  source 1..80: mol_type = other DNA
tccagacacggagttaaacccgccccaccccgctggcccacgtccagcccgatcaagaattggaggagagaggagcaggg

SEQ ID NO: 51287 - DNA, 80 bp, synthetic construct; identical to SEQ ID NO: 13553
  source 1..80: mol_type = other DNA

SEQ ID NO: 51288 - DNA, 80 bp, synthetic construct
  source 1..80: mol_type = other DNA
ctcttctcgcctctggccacccaatgcatctgatttagttgtatgaaagttacaaaattctccaatattttcgtcttgta

SEQ ID NO: 51289 - DNA, 80 bp, synthetic construct
  source 1..80: mol_type = other DNA
ccccccgcactccccacctttcctcccctttggctgaggctttttcccccgtcgctggctctgcccgaagtttctagagt

SEQ ID NO: 51290 - DNA, 80 bp, synthetic construct
  source 1..80: mol_type = other DNA
actctatatttaacgtccggaagattctgtgaactatatgccaaccttgccctagtaacggggctcccccctcctttccc

SEQ ID NO: 51291 - DNA, 80 bp, synthetic construct; identical to SEQ ID NO: 13554
  source 1..80: mol_type = other DNA

SEQ ID NO: 51292 - DNA, 80 bp, synthetic construct
  source 1..80: mol_type = other DNA
aaatgaaaaggtttgactgaatggcctgtgcccgcagatcttaggacagtttttacattaagctgaaagcagctgtagtc

SEQ ID NO: 51293 - DNA, 80 bp, synthetic construct
  source 1..80: mol_type = other DNA
gctggaatgcagtggcgtgatcatagctcactgcagccttgacctcttgtgctcaagcgatcctcctgcctcagcctccc

SEQ ID NO: 51294 - DNA, 80 bp, synthetic construct
  source 1..80: mol_type = other DNA
cacacgcagttcagttattgttaattatgttttagagatgaacacgtcgaaacttgtgttatttagtcaatgtacaagta

SEQ ID NO: 51295 - DNA, 80 bp, synthetic construct; identical to SEQ ID NO: 13555
  source 1..80: mol_type = other DNA

SEQ ID NO: 51296 - DNA, 80 bp, synthetic construct
  source 1..80: mol_type = other DNA
caacctccacctcccaggttcaagtgattctcctgcctcagctcctgagtagctgggattacagatgtgcaccaccacgt

SEQ ID NO: 51297 - DNA, 80 bp, synthetic construct
  source 1..80: mol_type = other DNA
aacaaaattaagaaaactactgtttgaggaactataaaaaggagagggagaaggaaggaaaagaccctgcagcgtcagcc

SEQ ID NO: 51298 - DNA, 80 bp, synthetic construct
  source 1..80: mol_type = other DNA
gatccttccaaacacagaatccaataaaaacctaattctgaaattaatcacattaaagttctgaaaaatctcctggggtt

SEQ ID NO: 51299 - DNA, 80 bp, synthetic construct
  source 1..80: mol_type = other DNA
cgagaccagactggccaacatgacgaaaccccctctctactaaaaatacaaaaattagccaggcgtggtggtgtgcacct

SEQ ID NO: 51300 - DNA, 80 bp, synthetic construct; identical to SEQ ID NO: 13556
  source 1..80: mol_type = other DNA

SEQ ID NO: 51301 - DNA, 80 bp, synthetic construct
  source 1..80: mol_type = other DNA
catgccaatagagaggttttttctccccctctcccaccccccactccccactttttatgtttctcagcagaatcagagaa

SEQ ID NO: 51302 - DNA, 80 bp, synthetic construct
  source 1..80: mol_type = other DNA
taattttttttttttttttttttggtatttttagtagagaccggctttctccatgttggtcaggctggtctcgaatttct

SEQ ID NO: 51303 - DNA, 80 bp, synthetic construct
  source 1..80: mol_type = other DNA
gtgaggttaagggtctctggaagtgttgatacactgtgcagctaagatgaacatagtttgggagaatctccagccagaca

SEQ ID NO: 51304 - DNA, 80 bp, synthetic construct; identical to SEQ ID NO: 13557
  source 1..80: mol_type = other DNA

SEQ ID NO: 51305 - DNA, 80 bp, synthetic construct
  source 1..80: mol_type = other DNA
acacagtactattgcttcaaccccctcacattttcctttcagacgcctaacaaagggtcttgcattcacactaagaatga

SEQ ID NO: 51306 - DNA, 80 bp, synthetic construct
  source 1..80: mol_type = other DNA
ccggcgtggtggcacatcctgtaattccagctattggggaggctgaggcagcagaattgtttgaaccccaggggcagagg

SEQ ID NO: 51307 - DNA, 80 bp, synthetic construct
  source 1..80: mol_type = other DNA
gttcgagaccagcctgaccaacatgggcggatcacgaggtcaggagttcgagaccagcctgaccaacatggggaaaccct

SEQ ID NO: 51308 - DNA, 80 bp, synthetic construct; identical to SEQ ID NO: 13558
  source 1..80: mol_type = other DNA

SEQ ID NO: 51309 - DNA, 80 bp, synthetic construct
  source 1..80: mol_type = other DNA
gtcaccatcttgttaaatttgacctaaaaacggtaacagcctaggggtttcagggacagacagaaaatcttactcgggac

SEQ ID NO: 51310 - DNA, 80 bp, synthetic construct
  source 1..80: mol_type = other DNA
ctaggaatggggagggaaatggaggaatcccaaatgccttaaggacggcctacatactaaggaaaatttttttctaactc

SEQ ID NO: 51311 - DNA, 80 bp, synthetic construct
  source 1..80: mol_type = other DNA
ctgcctgtttacacaactgctttccttgtgaaaatttaaaggctcctattcccagttgttctatccttgtaggttaaaga

SEQ ID NO: 51312 - DNA, 80 bp, synthetic construct
  source 1..80: mol_type = other DNA
cagagtttcccaggcacatcgatgcaccgcctccttcgagaaacaaggtaactttcgggttctggttgtctccaaagtca

SEQ ID NO: 51313 - DNA, 80 bp, synthetic construct; identical to SEQ ID NO: 13559
  source 1..80: mol_type = other DNA

SEQ ID NO: 51314 - DNA, 80 bp, synthetic construct
  source 1..80: mol_type = other DNA
ctcccgcggtcccaaggctttccagagcgaacctgtgcggctgcaggcaccggcgtgttgagtttccggcgttccgaagg

SEQ ID NO: 51315 - DNA, 80 bp, synthetic construct
  source 1..80: mol_type = other DNA
atcatcgccaacgaccagggcaaccgcaccacccccagctacgtggccttcacggacaccgagcggctcatcggggatgc

SEQ ID NO: 51316 - DNA, 80 bp, synthetic construct
  source 1..80: mol_type = other DNA
aagggggagaccaaggcattctaccccgaggagatctcgtccatggtgctgaccaagatgaaggagatcgccgaggcgta

SEQ ID NO: 51317 - DNA, 80 bp, synthetic construct; identical to SEQ ID NO: 13560
  source 1..80: mol_type = other DNA

SEQ ID NO: 51318 - DNA, 80 bp, synthetic construct
  source 1..80: mol_type = other DNA
gagagggccaagaggaccctgtcgtccagcacccaggccagcctggagatcgactccctgtttgagggcatcgacttcta

SEQ ID NO: 51319 - DNA, 80 bp, synthetic construct
  source 1..80: mol_type = other DNA
aagctgctgcaggacttcttcaacgggcgcgacctgaacaagagcatcaaccccgacgaggctgtggcctacggggcggc

SEQ ID NO: 51320 - DNA, 80 bp, synthetic construct
  source 1..80: mol_type = other DNA
caagcgcaactccaccatccccaccaagcagacgcagatcttcaccacctactccgacaaccaacccggggtgctgatcc

SEQ ID NO: 51321 - DNA, 80 bp, synthetic construct; identical to SEQ ID NO: 13561
  source 1..80: mol_type = other DNA

SEQ ID NO: 51322 - DNA, 80 bp, synthetic construct
  source 1..80: mol_type = other DNA
agatcagcgaggcggacaagaagaaggttctggacaagtgtcaagaggtcatctcgtggctggacgccaacaccttggcc

SEQ ID NO: 51323 - DNA, 80 bp, synthetic construct
  source 1..80: mol_type = other DNA
attaggggcctttgttctttagtatgtttgtctttgaggtggactgttgggactcaaggactttgctgctgttttcctat

SEQ ID NO: 51324 - DNA, 80 bp, synthetic construct
  source 1..80: mol_type = other DNA
taatgttgatactgtaagggtgtttcgttccctttaaatgaatcaacactgccaccttctgtacgagtttgtttgttttt

SEQ ID NO: 51325 - DNA, 80 bp, synthetic construct; identical to SEQ ID NO: 13562
  source 1..80: mol_type = other DNA

SEQ ID NO: 51326 - DNA, 80 bp, synthetic construct
  source 1..80: mol_type = other DNA
gggattatggtggttttctctccctcttctacttagtgagcggagtccacaaaaaaatgctgactttttttttttttttt

SEQ ID NO: 51327 - DNA, 80 bp, synthetic construct
  source 1..80: mol_type = other DNA
tttttgtatttttggtagagacagggttttaccgtgttagccaggatggtctcaatctcctgacctcggctcatattcat

SEQ ID NO: 51328 - DNA, 80 bp, synthetic construct
  source 1..80: mol_type = other DNA
cccaggctggagcacagtagagctcactgtagtctcaaactcctgggttcaagcaatcctcccaccttagcctcctgagt

SEQ ID NO: 51329 - DNA, 80 bp, synthetic construct; identical to SEQ ID NO: 13563
  source 1..80: mol_type = other DNA

SEQ ID NO: 51330 - DNA, 80 bp, synthetic construct
  source 1..80: mol_type = other DNA
atgcaactaaagtttgtcaatttacaaaaagaatttaaaaatcaaataaaatgggccaggtgcgatggctcatgcctata

SEQ ID NO: 51331 - DNA, 80 bp, synthetic construct
  source 1..80: mol_type = other DNA
gaggtgggacggttggatcacctaaggtcaggagttccagaccagcctggtcaacatggtgaaaccctgtctctactagg

SEQ ID NO: 51332 - DNA, 80 bp, synthetic construct
  source 1..80: mol_type = other DNA
aacggttaaagtcctgtgttgcacctttgtgtaaatccttaccctctagggttttaaaatgttttaaatccttaaaacgt

SEQ ID NO: 51333 - DNA, 80 bp, synthetic construct
  source 1..80: mol_type = other DNA
tttcacttttgttgcccaggctggagtacagtggagcaatctcggctcactgcaacctctacctcccaggttcaaacgat

SEQ ID NO: 51334 - DNA, 80 bp, synthetic construct; identical to SEQ ID NO: 13564
  source 1..80: mol_type = other DNA

SEQ ID NO: 51335 - DNA, 80 bp, synthetic construct
  source 1..80: mol_type = other DNA
ctactaaaaatacaaaattagccgggtgtggtggcgcatgcctgtaatcccagctaccctggaggctgaggcaggagaat

SEQ ID NO: 51336 - DNA, 80 bp, synthetic construct
  source 1..80: mol_type = other DNA
agcctctgaccatagcacttagtaaaggcagcttaactgccaaaacagcaggaattagggctttctgtatatatatatat

SEQ ID NO: 51337 - DNA, 80 bp, synthetic construct
  source 1..80: mol_type = other DNA
tatacttgccaggcagtagagggaacaaatactttagctttgagccatggctctccaccgtaatggaacaataaaacgat

SEQ ID NO: 51338 - DNA, 80 bp, synthetic construct
  source 1..80: mol_type = other DNA
aatcccagcactttgggaggccgaggtgggaggatcactgaggttcaccagttcaaaaccagcctgggccaacatggtga

SEQ ID NO: 51339 - DNA, 80 bp, synthetic construct; identical to SEQ ID NO: 13565
  source 1..80: mol_type = other DNA

SEQ ID NO: 51340 - DNA, 80 bp, synthetic construct
  source 1..80: mol_type = other DNA
aggctgaggcaggaaaatcgcttgaaccgaggaagcggaggttgcagtgagccgagatcccgccactgctctccagcctg

SEQ ID NO: 51341 - DNA, 80 bp, synthetic construct
  source 1..80: mol_type = other DNA
cagagtctcgccctgtcgcccaggctggagtgcagtggcgcaatctcggctcactgcaagctcggcgtcctgggttcacg

SEQ ID NO: 51342 - DNA, 80 bp, synthetic construct
  source 1..80: mol_type = other DNA
ggattacaggcgtgagccaccgcgcccggcctaatttttaaataaatagagacgggggttgggtgtcactatttgcccag

SEQ ID NO: 51343 - DNA, 80 bp, synthetic construct; identical to SEQ ID NO: 13566
  source 1..80: mol_type = other DNA

SEQ ID NO: 51344 - DNA, 80 bp, synthetic construct
  source 1..80: mol_type = other DNA
aaattcagaaagcatctccgaatatttgcccagaggagtgtgaaacatactttcctggtctttctttcactttgttttat

SEQ ID NO: 51345 - DNA, 80 bp, synthetic construct
  source 1..80: mol_type = other DNA
gagttgtaatggcccgactgttgagtgagggggagcaggggatcccaacggcttgcgctgcctttgcgcagcagccggcg

SEQ ID NO: 51346 - DNA, 80 bp, synthetic construct
  source 1..80: mol_type = other DNA
aaaacaactgtgagtggggttgggcgagtgattgcaaaatgggggtggcggtcgcccggggataggaagggagtgatgat

SEQ ID NO: 51347 - DNA, 80 bp, synthetic construct; identical to SEQ ID NO: 13567
  source 1..80: mol_type = other DNA

SEQ ID NO: 51348 - DNA, 80 bp, synthetic construct
  source 1..80: mol_type = other DNA
gctgggattacaggcgcatgccaccaagcctggctaattttttgtattttttaatagataaggggtttcactgtgttagc

SEQ ID NO: 51349 - DNA, 80 bp, synthetic construct
  source 1..80: mol_type = other DNA
cagtgcggccttcaactcccgggtttaaccgattctcccaccttagccaattttttcctttttttttttttttttttgag

SEQ ID NO: 51350 - DNA, 80 bp, synthetic construct
  source 1..80: mol_type = other DNA
ggtttcaccatgttggccaggatggtctccatctcctgacctcgtgagccgctgtgcccggccactttttcttttttgag

SEQ ID NO: 51351 - DNA, 80 bp, synthetic construct; identical to SEQ ID NO: 13568
  source 1..80: mol_type = other DNA

SEQ ID NO: 51352 - DNA, 80 bp, synthetic construct
  source 1..80: mol_type = other DNA
ttagtttacatcattttccttgtgactattctatttttacttttttagggggcggggggacatgagtctcactcatgttg

SEQ ID NO: 51353 - DNA, 80 bp, synthetic construct
  source 1..80: mol_type = other DNA
catttctactgcaaaataggagtacactggggcctcccagtggagctgttctctgctgttttaaattactttctactcct

SEQ ID NO: 51354 - DNA, 80 bp, synthetic construct
  source 1..80: mol_type = other DNA
aattgggaatgatgatttcacagactagagtctccgatgctggtcatgatgtcaaaactaagttctgactcatttaggga

SEQ ID NO: 51355 - DNA, 80 bp, synthetic construct; identical to SEQ ID NO: 13569
  source 1..80: mol_type = other DNA

SEQ ID NO: 51356 - DNA, 80 bp, synthetic construct
  source 1..80: mol_type = other DNA
cggcaatctcctgtaattcatgtttttatggccagttacttacatgatgaggtttaattggctatggttctgcaggatgt

SEQ ID NO: 51357 - DNA, 80 bp, synthetic construct
  source 1..80: mol_type = other DNA
ggtgccacacatttttaataaattgatctctagagaactgactgtcatgagcacagcatcaaggaggatggtgcttaagc

SEQ ID NO: 51358 - DNA, 80 bp, synthetic construct
  source 1..80: mol_type = other DNA
gttttttgagactgtcttgctctgtcatccaggctggagtgcagtggtacactcttggcttactgcagcctctgcctccc

SEQ ID NO: 51359 - DNA, 80 bp, synthetic construct; identical to SEQ ID NO: 13570
  source 1..80: mol_type = other DNA

SEQ ID NO: 51360 - DNA, 80 bp, synthetic construct
  source 1..80: mol_type = other DNA
atctcaggtgatttgcccgccctagcctcccaaagtgctgggattacaggtgtgagccatagcatctgacaattttattc

SEQ ID NO: 51361 - DNA, 80 bp, synthetic construct
  source 1..80: mol_type = other DNA
tttttttttaaatttgaggatgggtgtggtggctcatgcctgtaatctcagctctttgggaggccaaggtgggtggatca

SEQ ID NO: 51362 - DNA, 80 bp, synthetic construct
  source 1..80: mol_type = other DNA
gtgagctgatatggcgccattgcactgcgccattgcacttcaccctgggcaacagagcaagactccatctcaaaaaaaaa

SEQ ID NO: 51363 - DNA, 80 bp, synthetic construct; identical to SEQ ID NO: 13571
  source 1..80: mol_type = other DNA

SEQ ID NO: 51364 - DNA, 80 bp, synthetic construct
  source 1..80: mol_type = other DNA
tcactgaggatcatggcctgtggttgcatccatgttgctgcaaaggatatgaaatcgtttttttattggtgcatctcata

SEQ ID NO: 51365 - DNA, 80 bp, synthetic construct
  source 1..80: mol_type = other DNA
accttattgggggaaaaatgcctgaaaattagggggcacttcaagtagatagcttctatttcctatatttgtcttatata

SEQ ID NO: 51366 - DNA, 80 bp, synthetic construct
  source 1..80: mol_type = other DNA
caaggtcaggagattgagattatcctggccaacatggtgaaaccctgtctctactaaaacaaaaaaaggacaaaaattag

SEQ ID NO: 51367 - DNA, 80 bp, synthetic construct; identical to SEQ ID NO: 13572
  source 1..80: mol_type = other DNA

SEQ ID NO: 51368 - DNA, 80 bp, synthetic construct
  source 1..80: mol_type = other DNA
gcctcctgagtagctgggattacaggcgcctggcacctcccctagctattttttgtacttttagtagagacaaggtttca

SEQ ID NO: 51369 - DNA, 80 bp, synthetic construct
  source 1..80: mol_type = other DNA
tacccaattagccatctttttttttttgagacagttgcaccttgtcacctgggctggaatatagtggcgcagtttgggtt

SEQ ID NO: 51370 - DNA, 80 bp, synthetic construct
  source 1..80: mol_type = other DNA
ggccagaacattaccaataactttgaaacaaacctgtctgattcaatttctctttttcttcttcctacttggagaattaa

SEQ ID NO: 51371 - DNA, 80 bp, synthetic construct; identical to SEQ ID NO: 13573
  source 1..80: mol_type = other DNA

SEQ ID NO: 51372 - DNA, 80 bp, synthetic construct
  source 1..80: mol_type = other DNA
acaaacagccaccatgctggcccatttttcatttttcaaaaagaataaatcttcatgtgttctactgcaactttctgctt

SEQ ID NO: 51373 - DNA, 80 bp, synthetic construct
  source 1..80: mol_type = other DNA
atttttgtatttttactagagacggggtttcaccacattggccagggtggtctccaactcctagcctcaccgtccgcccg

SEQ ID NO: 51374 - DNA, 80 bp, synthetic construct
  source 1..80: mol_type = other DNA
ttctcctgcctcagcctccggagtagctgggactacaggtgcccggctaatttttttgtatttttagtagagacgggttt

SEQ ID NO: 51375 - DNA, 80 bp, synthetic construct; identical to SEQ ID NO: 13574
  source 1..80: mol_type = other DNA

SEQ ID NO: 51376 - DNA, 80 bp, synthetic construct
  source 1..80: mol_type = other DNA
ttgttgttgttcatgtattttcctgtagttcatttggagtccacccttccatacacatttgtggacataaaaaacttcag

SEQ ID NO: 51377 - DNA, 80 bp, synthetic construct
  source 1..80: mol_type = other DNA
gaggccgaggcgggcagatcacgaggtcaggagatcaagaccatcctgtctaacacggtgaaaccccgtctctactaaaa

SEQ ID NO: 51378 - DNA, 80 bp, synthetic construct
  source 1..80: mol_type = other DNA
ttagggccaggcatggtggctcacgcctgtaatcccagcactttgggaggccgaggcaggtggatcacctaaggtcagga

SEQ ID NO: 51379 - DNA, 80 bp, synthetic construct; identical to SEQ ID NO: 13575
  source 1..80: mol_type = other DNA

SEQ ID NO: 51380 - DNA, 80 bp, synthetic construct
  source 1..80: mol_type = other DNA
agactgaacacttactgctaggttaactttggctaagttcctcagtgattcccataacaatttccttgtttgtaaataga

SEQ ID NO: 51381 - DNA, 80 bp, synthetic construct
  source 1..80: mol_type = other DNA
ccctctcttttttttgagacagggtgtcactgttgcccaggctcgagtacagtggcaagattacagctcactacagcctt

SEQ ID NO: 51382 - DNA, 80 bp, synthetic construct
  source 1..80: mol_type = other DNA
tccacctcctgggttcacaccattctcctgcctcagcctcccgactagctgggactacaggcacccaccaccacggccag

SEQ ID NO: 51383 - DNA, 80 bp, synthetic construct
  source 1..80: mol_type = other DNA
gtcttgctctgtcacccaggctggagtgcagtggcgcgatcttggctcactgcaagctctgcctctcaggttcacgccat

SEQ ID NO: 51384 - DNA, 80 bp, synthetic construct; identical to SEQ ID NO: 13576
  source 1..80: mol_type = other DNA

SEQ ID NO: 51385 - DNA, 80 bp, synthetic construct
  source 1..80: mol_type = other DNA
ggaggccatggtgggcagatctcttgaacccaggagtttgagaccagtctgcctgggcaacacggtgaaatccagttcct

SEQ ID NO: 51386 - DNA, 80 bp, synthetic construct
  source 1..80: mol_type = other DNA
ctaaataaataaatgaagaggtagagtcatgctctgttgcccaggtctgacttgaactcctgggctgaagtgatcctccc

SEQ ID NO: 51387 - DNA, 80 bp, synthetic construct
  source 1..80: mol_type = other DNA
taagactgagctacagccatggtaagatggtcacgtgaacttcttttctcacacagtggtgatgctgaaagacctcaacc

SEQ ID NO: 51388 - DNA, 80 bp, synthetic construct
  source 1..80: mol_type = other DNA
acaggcgtccaccactacacccggctaattttttgtatatttagtagagacggggtttcaccgtgttagccaggatggtc

SEQ ID NO: 51389 - DNA, 80 bp, synthetic construct; identical to SEQ ID NO: 13577
  source 1..80: mol_type = other DNA

SEQ ID NO: 51390 - DNA, 80 bp, synthetic construct
  source 1..80: mol_type = other DNA
gctacatctaatttgtcagcaaatcatactgtctgtatcttagaaatgacacgaggatctgtgtctcacacctttactgc

SEQ ID NO: 51391 - DNA, 80 bp, synthetic construct
  source 1..80: mol_type = other DNA
gttccttccaaatcaggagtcaggtcatgtctcccctcttctgaagatcctgtaacagctgccatttcactcagagtaaa

SEQ ID NO: 51392 - DNA, 80 bp, synthetic construct
  source 1..80: mol_type = other DNA
aggagctgcttggagctcttttgtcagtgttcgaggagtaaaatttctacccattggccagagtcacagccgcaggcttt

SEQ ID NO: 51393 - DNA, 80 bp, synthetic construct
  source 1..80: mol_type = other DNA
gtggatcacttgaggccaggagtttgagaccaacctggtcaacatggcgaaaccctgtctctactaaaaatacaaaaatt

SEQ ID NO: 51394 - DNA, 80 bp, synthetic construct; identical to SEQ ID NO: 13578
  source 1..80: mol_type = other DNA

SEQ ID NO: 51395 - DNA, 80 bp, synthetic construct
  source 1..80: mol_type = other DNA
tgggaggccaaggtgggaggatcacctgagcccaggagttcgagaccagcctgggtaatattgcaagacaccatctctaa

SEQ ID NO: 51396 - DNA, 80 bp, synthetic construct
  source 1..80: mol_type = other DNA
gaggtgatatgaaaaggaagttttgaaacatgaaggatggaatgagatactccaactccagagctgctttgtttttgttt

SEQ ID NO: 51397 - DNA, 80 bp, synthetic construct
  source 1..80: mol_type = other DNA
ttttagtagagacaaggtttcaccgtgttggtcaggttggtcttgaactcctgaccttgtgattcacctgcctcgccctc

SEQ ID NO: 51398 - DNA, 80 bp, synthetic construct; identical to SEQ ID NO: 13579
  source 1..80: mol_type = other DNA

SEQ ID NO: 51399 - DNA, 80 bp, synthetic construct
  source 1..80: mol_type = other DNA
ggttaaagtacctgctgactcttgaaatgttaaactttattgcctccagtcaggtgaacctcaggtggaagtgggtcaca

SEQ ID NO: 51400 - DNA, 80 bp, synthetic construct
  source 1..80: mol_type = other DNA
ttctaggctggctgttgcctgtcttaaattctaaagaatgtagtgaagataaaggtgtcagctgataatccccagttatt

SEQ ID NO: 51401 - DNA, 80 bp, synthetic construct
  source 1..80: mol_type = other DNA
ctgtgctccacactgggttgattgcctctaaaagaggcagaggaactgttataaaacaaaaaaaaaacttttaaaagttt

SEQ ID NO: 51402 - DNA, 80 bp, synthetic construct
  source 1..80: mol_type = other DNA
cttgggaggctgagatggaaggatcacttgagcccagaaggtcgaggctacagagccatgattgttccactcactgctct

SEQ ID NO: 51403 - DNA, 80 bp, synthetic construct; identical to SEQ ID NO: 13580
  source 1..80: mol_type = other DNA

SEQ ID NO: 51404 - DNA, 80 bp, synthetic construct
  source 1..80: mol_type = other DNA
tggcacacacctgtggttccaaccactcatggggctgaggtgggaggattgcttgagcctgggaggtcaaggctgaagtg

SEQ ID NO: 51405 - DNA, 80 bp, synthetic construct
  source 1..80: mol_type = other DNA
ggccaacatggagaaaccccatcgctactaaaaatacaaaaattagccgggtgtggtggtgaacacctgtaatcccagct

SEQ ID NO: 51406 - DNA, 80 bp, synthetic construct
  source 1..80: mol_type = other DNA
gagagtgagagagtagaggaggaaaaagtttaaaacagtttgggagtttggagagtttttcgtgaaacacagactcatca

SEQ ID NO: 51407 - DNA, 80 bp, synthetic construct
  source 1..80: mol_type = other DNA
ggctcccgccaccacgcccggctaatattttgtatttttagtagagacagtgtttcaccgtgttagccaggaggtctgga

SEQ ID NO: 51408 - DNA, 80 bp, synthetic construct; identical to SEQ ID NO: 13581
  source 1..80: mol_type = other DNA

SEQ ID NO: 51409 - DNA, 80 bp, synthetic construct
  source 1..80: mol_type = other DNA
ttacaggcatgtaattaccgcctctggccagctttttttttttttttttttttttgagacagagtctcgctcttgttgcc

SEQ ID NO: 51410 - DNA, 80 bp, synthetic construct
  source 1..80: mol_type = other DNA
tgttggccaggctggtcttgaactcctgacctcaggtgatccgcccgccttggcctccccaaagtgctgggtggcgtgag

SEQ ID NO: 51411 - DNA, 80 bp, synthetic construct
  source 1..80: mol_type = other DNA
ttttttttgggacagagtctcactgtgtcaccaggctggagtgcagtggcatgatctcggcttactgcaacctctgcctc

SEQ ID NO: 51412 - DNA, 80 bp, synthetic construct
  source 1..80: mol_type = other DNA
gtggtgggcacctataatcccaaatactcaggaggctgaggcaggagaatcacttgaacctgggacacggaggttgcagt

SEQ ID NO: 51413 - DNA, 80 bp, synthetic construct; identical to SEQ ID NO: 13582
  source 1..80: mol_type = other DNA

SEQ ID NO: 51414 - DNA, 80 bp, synthetic construct
  source 1..80: mol_type = other DNA
cagctactcaggaggctgaggtgggaagattgcttgaacccaggtggtcaaggttgcagtgagctgtgatcatgctactg

SEQ ID NO: 51415 - DNA, 80 bp, synthetic construct
  source 1..80: mol_type = other DNA
attgttactgtctctttcccttatttaagggacagctgagaagacagagagagcttgagctggtttgatcctaagcaaag

SEQ ID NO: 51416 - DNA, 80 bp, synthetic construct
  source 1..80: mol_type = other DNA
atgatgtgcaaagtccaccgtaaaaagaaaacaaaacttcaggactctaagtttatgccaagatggaagttaagccttgg

SEQ ID NO: 51417 - DNA, 80 bp, synthetic construct; identical to SEQ ID NO: 13583
  source 1..80: mol_type = other DNA

SEQ ID NO: 51418 - DNA, 80 bp, synthetic construct
  source 1..80: mol_type = other DNA
gtgggagccttctctgggctggccgaggccggagccggctccctcggcttgcggggaggtgtggagggagaggcgcgggc

SEQ ID NO: 51419 - DNA, 80 bp, synthetic construct
  source 1..80: mol_type = other DNA
cacggggccttagctgcctcaccacaggacaggactcaggacctgcagcccgccatgcctgagccccaaccccgccgtgg

SEQ ID NO: 51420 - DNA, 80 bp, synthetic construct
  source 1..80: mol_type = other DNA
tgggctcctgagtgtggtggggacttggagaacctttatgtctagctaagggattgtaaatacaccaatcggcactctgt

SEQ ID NO: 51421 - DNA, 80 bp, synthetic construct
  source 1..80: mol_type = other DNA
aaatggaccaatcagctctctgtaaaacggaccaatcagctctctgtaaaatggaccaatcagcaggatgtgggtggggc

SEQ ID NO: 51422 - DNA, 80 bp, synthetic construct; identical to SEQ ID NO: 13584
  source 1..80: mol_type = other DNA

SEQ ID NO: 51423 - DNA, 80 bp, synthetic construct
  source 1..80: mol_type = other DNA
catagactaatattctttggaatcttcagctctagacgggccacttcctcaacatttgcagttggataaactcttttttt

SEQ ID NO: 51424 - DNA, 80 bp, synthetic construct
  source 1..80: mol_type = other DNA
cttccgcagtgtttgtgtccctgattacttgagattagggattggtgatgactcccaacgagcaccctgccttcaagcat

SEQ ID NO: 51425 - DNA, 80 bp, synthetic construct; identical to SEQ ID NO: 13585
  source 1..80: mol_type = other DNA

SEQ ID NO: 51426 - DNA, 80 bp, synthetic construct
  source 1..80: mol_type = other DNA
ggctgaccccccccacctccctcccggacggggcggctggccgggcggggggctgacacccccacctccctcccggacgg

SEQ ID NO: 51427 - DNA, 80 bp, synthetic construct
  source 1..80: mol_type = other DNA
cctccctcccggaccgggcggctggccgggtgggggggctgacccccccatctccctcccggacggggtggctggccggg

SEQ ID NO: 51428 - DNA, 80 bp, synthetic construct; identical to SEQ ID NO: 13586
  source 1..80: mol_type = other DNA

SEQ ID NO: 51429 - DNA, 80 bp, synthetic construct
  source 1..80: mol_type = other DNA
gtctcctcacttctcagacggggcggccgggcagagacgctcctcacctcccagacggggtctcggccaggcagaggcac

SEQ ID NO: 51430 - DNA, 80 bp, synthetic construct
  source 1..80: mol_type = other DNA
cactttccagactgggcagccaggcagaggggctcctcacatcccagacgatgggcggccaggcagagacgctcctcact

SEQ ID NO: 51431 - DNA, 80 bp, synthetic construct
  source 1..80: mol_type = other DNA
cccggcacctcgggaggctgaggttggcgggatcactcgcggttaggggctggagacctgcccggccaacacagcgaaac

SEQ ID NO: 51432 - DNA, 80 bp, synthetic construct; identical to SEQ ID NO: 13587
  source 1..80: mol_type = other DNA

SEQ ID NO: 51433 - DNA, 80 bp, synthetic construct
  source 1..80: mol_type = other DNA
gtctcccagactggaatgcaatggtatgatcttggcccactgtaacctctcgctcccgggttcaagcgattctccttcct

SEQ ID NO: 51434 - DNA, 80 bp, synthetic construct
  source 1..80: mol_type = other DNA
aggtgtgagccacagcgcctggcctagattctgaactttttaattattattttttagattgataacacttaccccgattt

SEQ ID NO: 51435 - DNA, 80 bp, synthetic construct
  source 1..80: mol_type = other DNA
tttttgaatttttagtagagacagtgtttcaccatgttggccagactggtcttgaactcctgacctcaagtgatccccct

SEQ ID NO: 51436 - DNA, 80 bp, synthetic construct
  source 1..80: mol_type = other DNA
cgggagtattgcctgaggtcaggagttcgagaccagtctggccaacatggtgaaaccgggtctctactaaaaataccaaa

SEQ ID NO: 51437 - DNA, 80 bp, synthetic construct; identical to SEQ ID NO: 13588
  source 1..80: mol_type = other DNA

SEQ ID NO: 51438 - DNA, 80 bp, synthetic construct
  source 1..80: mol_type = other DNA
tgcctcaggctcccgagtagctgggactacaggcgtgtgccaccacatatggctaatatttgtatttttagtagagatgg

SEQ ID NO: 51439 - DNA, 80 bp, synthetic construct
  source 1..80: mol_type = other DNA
ctatttctgcaactttgacatacatataattcattttagctggacacttgcacttgtttaaaagttctgaccctggtttt

SEQ ID NO: 51440 - DNA, 80 bp, synthetic construct
  source 1..80: mol_type = other DNA
tggacacttgcacttgtttaaaagttctgaccctggttttcaaacttaaacgtattacgaatcacccagaaggcttgtta

SEQ ID NO: 51441 - DNA, 80 bp, synthetic construct
  source 1..80: mol_type = other DNA
caatcatagctcactactgcctcgaactcctggggtcaaagagatcaagccatcctcccatgtagctaggactataggtg

SEQ ID NO: 51442 - DNA, 80 bp, synthetic construct; identical to SEQ ID NO: 13589
  source 1..80: mol_type = other DNA

SEQ ID NO: 51443 - DNA, 80 bp, synthetic construct
  source 1..80: mol_type = other DNA
catctgcatttcacacacttgcaccctatttcatggaggatggtatcctaccccatgttagaaatataaaacagcgtgga

SEQ ID NO: 51444 - DNA, 80 bp, synthetic construct
  source 1..80: mol_type = other DNA
tttttgtatttttagtagagatgggatttcaccatattggccaggctggtctcgaactcctgaccttgtgatccgcccac

SEQ ID NO: 51445 - DNA, 80 bp, synthetic construct
  source 1..80: mol_type = other DNA
accaacctaggcaatatagtgagactttgtctctactaaaaattaaaaaaatcagcccgccggcaccatggctcatgctt

SEQ ID NO: 51446 - DNA, 80 bp, synthetic construct
  source 1..80: mol_type = other DNA
aggcagaagaatcgcttgaacctgggaggcagaggttgcagtgagccgagatcgcaccactgcactctagcctgggtgcc

SEQ ID NO: 51447 - DNA, 80 bp, synthetic construct; identical to SEQ ID NO: 13590
  source 1..80: mol_type = other DNA

SEQ ID NO: 51448 - DNA, 80 bp, synthetic construct
  source 1..80: mol_type = other DNA
agcctgggtgacagagcgagccctgtctcaaaaaaagcaacaacaaaaaaagagggcatgtcaaaaggaaaagaggattt

SEQ ID NO: 51449 - DNA, 80 bp, synthetic construct
  source 1..80: mol_type = other DNA
taagttacaaacattttgattgatagtcagtcatggtggtgcacctagtccttactctgaaaccaaatatcctgccatct

SEQ ID NO: 51450 - DNA, 80 bp, synthetic construct
  source 1..80: mol_type = other DNA
ggccacacttagccatatggaaagacagtattctcagatgagggcaggacttttttgtgggagaggacgcctagctttca

SEQ ID NO: 51451 - DNA, 80 bp, synthetic construct; identical to SEQ ID NO: 13591
  source 1..80: mol_type = other DNA

SEQ ID NO: 51452 - DNA, 80 bp, synthetic construct
  source 1..80: mol_type = other DNA
agagcaggagagtcagggagagagggtctctgcccaggccttgtctagacacagggctctccctgctgaccccacccatg

SEQ ID NO: 51453 - DNA, 80 bp, synthetic construct
  source 1..80: mol_type = other DNA
ggccttagtgtatcacaggcatcatagctgcggaggacaattcggcagtggcagtggtagttgttctggtttcgggcatt

SEQ ID NO: 51454 - DNA, 80 bp, synthetic construct
  source 1..80: mol_type = other DNA
gggcagggagggtcaaatgggtagggaacatctcatggactcctgacctggcattcatcaggattgaaatcattttcctg

SEQ ID NO: 51455 - DNA, 80 bp, synthetic construct; identical to SEQ ID NO: 13592
  source 1..80: mol_type = other DNA

SEQ ID NO: 51456 - DNA, 80 bp, synthetic construct
  source 1..80: mol_type = other DNA
gtgctcactcgccaagctgtgcaccctggcacaggcttgtgtctgtccaaagaggcagtgcctttttctactttgcatga

SEQ ID NO: 51457 - DNA, 80 bp, synthetic construct
  source 1..80: mol_type = other DNA
cccaagccagaaaatctgacttcagagaatcttccccttggaaaggagtccatttgggggtatccctcagactctccaca

SEQ ID NO: 51458 - DNA, 80 bp, synthetic construct
  source 1..80: mol_type = other DNA
cagccggccttgtgagcacaaagggagtagaaaagaaatactactcctgtctcaacatcgctcactactgccccaaggtt

SEQ ID NO: 51459 - DNA, 80 bp, synthetic construct; identical to SEQ ID NO: 13593
  source 1..80: mol_type = other DNA

SEQ ID NO: 51460 - DNA, 80 bp, synthetic construct
  source 1..80: mol_type = other DNA
acctaaaatagtgcctggtataggtatatagtacccaataaatgtttgctaagtgaatgtccaactccttggtgatccca

SEQ ID NO: 51461 - DNA, 80 bp, synthetic construct
  source 1..80: mol_type = other DNA
cacccatccaacctagcaccggctctttcacccagacatctttataccctggtccatggacctccgcagggcgatgaact

SEQ ID NO: 51462 - DNA, 80 bp, synthetic construct
  source 1..80: mol_type = other DNA
ctgtcatgggaggaggaagggtcaacaaagacaaacttgtcttgggggttttaggaacccacgttccgatgggagaggga

SEQ ID NO: 51463 - DNA, 80 bp, synthetic construct; identical to SEQ ID NO: 13594
  source 1..80: mol_type = other DNA

SEQ ID NO: 51464 - DNA, 80 bp, synthetic construct
  source 1..80: mol_type = other DNA
gaagatcgcggcaaacacccaaaccctacagcctccccagaagcccagaatccgcggcccccagcgtctgtccgggagcg

SEQ ID NO: 51465 - DNA, 80 bp, synthetic construct
  source 1..80: mol_type = other DNA
taattggtcttcaagtagctcatctcctcccacgtgatcacgcagcatctcgaagcttgcccttccgattggccctcttg

SEQ ID NO: 51466 - DNA, 80 bp, synthetic construct
  source 1..80: mol_type = other DNA
aaaaaggccgcctgtcgtcgtggagagaatgagtcacagatttactgagttaacaaaatatctttaataaaatctttttg

SEQ ID NO: 51467 - DNA, 80 bp, synthetic construct
  source 1..80: mol_type = other DNA
atttttgtatttttaatagagacggaggtttcaccatgttggccaggctggtctcgaactcctgactcaggtgatccgcc

SEQ ID NO: 51468 - DNA, 80 bp, synthetic construct; identical to SEQ ID NO: 13595
  source 1..80: mol_type = other DNA

SEQ ID NO: 51469 - DNA, 80 bp, synthetic construct
  source 1..80: mol_type = other DNA
tgtaatctcagtttcctcctgtgaagtggggtcgggaatattatgttgcatagagcgatgataagaattagcggaaaaaa

SEQ ID NO: 51470 - DNA, 80 bp, synthetic construct
  source 1..80: mol_type = other DNA
ttttaatcttttttctttgttttgagacggagtcttgctgtcgcccaagctgaagtgcagtagcgcaatctcggctcgct

SEQ ID NO: 51471 - DNA, 80 bp, synthetic construct
  source 1..80: mol_type = other DNA
gtgatctgcccacctcggtcccccaaagtgctggcatgacaggcgtgagccaccatgcctggcctctaatggctaacttc

SEQ ID NO: 51472 - DNA, 80 bp, synthetic construct; identical to SEQ ID NO: 13596
  source 1..80: mol_type = other DNA

SEQ ID NO: 51473 - DNA, 80 bp, synthetic construct
  source 1..80: mol_type = other DNA
gcagcagagaggggagtcactcaccatgatgggcagccagtaatagttgaggtgggggctcttaaagtctttacccagcc

SEQ ID NO: 51474 - DNA, 80 bp, synthetic construct
  source 1..80: mol_type = other DNA
cttcccaaagaacagcagcaggtctgtgactttgtccaggacgaccaccctgtgccagaagttagggcaggttgagggtg

SEQ ID NO: 51475 - DNA, 80 bp, synthetic construct
  source 1..80: mol_type = other DNA
gatcagaggagggagccacaaagcggggggggagcagcctaacctgacaatgtttcgcatgagtagcatgaacgcatttt

SEQ ID NO: 51476 - DNA, 80 bp, synthetic construct; identical to SEQ ID NO: 13597
  source 1..80: mol_type = other DNA

SEQ ID NO: 51477 - DNA, 80 bp, synthetic construct
  source 1..80: mol_type = other DNA
agggctccaaatgccaatgacccagtgtggtaactgcagagggtgttatgcagtcagagacagctccaggacccctgggg

SEQ ID NO: 51478 - DNA, 80 bp, synthetic construct
  source 1..80: mol_type = other DNA
ccagttaagggtccagaagagccccaggaccccatagatttgcagattgaagacagaacgttggattaggcctttggatg

SEQ ID NO: 51479 - DNA, 80 bp, synthetic construct
  source 1..80: mol_type = other DNA
tgggaagtagcttctctggactgcgggaatcaagttctgtcggagagttccatctccaggctcaaactcagtttggtctg

SEQ ID NO: 51480 - DNA, 80 bp, synthetic construct; identical to SEQ ID NO: 13598
  source 1..80: mol_type = other DNA

SEQ ID NO: 51481 - DNA, 80 bp, synthetic construct
  source 1..80: mol_type = other DNA
cgcctgaggtcaggagttcaagactagcttggccaacatggtgaaatcccatctctactgaaaatacaaaaaattagccg

SEQ ID NO: 51482 - DNA, 80 bp, synthetic construct
  source 1..80: mol_type = other DNA
taggtgaggatatagatgaaataagaatagcaaaaagttgagggttgtggaatctgggtacagggaactcactgtgctat

SEQ ID NO: 51483 - DNA, 80 bp, synthetic construct
  source 1..80: mol_type = other DNA
tcactgcaacctctgcctcccgtgttcaagcaatcctcctgcttcaacctcccaagtagctgggactgcaggtgtgtgcc

SEQ ID NO: 51484 - DNA, 80 bp, synthetic construct; identical to SEQ ID NO: 13599
  source 1..80: mol_type = other DNA

SEQ ID NO: 51485 - DNA, 80 bp, synthetic construct
  source 1..80: mol_type = other DNA
gagaagatcacttgagcctgggagatcaaggcttcagtgagccatgatcgcatcactgcactccagcctgtgtaacagcc

SEQ ID NO: 51486 - DNA, 80 bp, synthetic construct
  source 1..80: mol_type = other DNA
caatggcgcgatctcagctcactgcaacctccgcctcccgagttcaagcaattctcctgcctcagcctcctgagtagctg

SEQ ID NO: 51487 - DNA, 80 bp, synthetic construct
  source 1..80: mol_type = other DNA
tgccaaacctcccctttttaataggggtggggctaatgcctgcagcacagctcatgttcccagctcagacgaggtgaaga

SEQ ID NO: 51488 - DNA, 80 bp, synthetic construct; identical to SEQ ID NO: 13600
  source 1..80: mol_type = other DNA

SEQ ID NO: 51489 - DNA, 80 bp, synthetic construct
  source 1..80: mol_type = other DNA
actcctataatcccagtactttgggaggttaagccagaggattgcttgggtacctgactacatcggggcaaccccaggag

SEQ ID NO: 51490 - DNA, 80 bp, synthetic construct
  source 1..80: mol_type = other DNA
cactgctgcactccagcctgggcaacagagcaagaccctgtctcaaaacaaacaaacaaacaaacaaacaaacaaacaaa

SEQ ID NO: 51491 - DNA, 80 bp, synthetic construct
  source 1..80: mol_type = other DNA
ctccccacatgatggatggctcaacaggagtaccaggtattctgggaactggtttcttctagctctgctgggggttgagt

SEQ ID NO: 51492 - DNA, 80 bp, synthetic construct
  source 1..80: mol_type = other DNA
taccgtggggttgcatgatgtatttattggcactttctcacagccgggggagctgatgttggatgcccagagcacatact

SEQ ID NO: 51493 - DNA, 80 bp, synthetic construct; identical to SEQ ID NO: 13601
  source 1..80: mol_type = other DNA

SEQ ID NO: 51494 - DNA, 80 bp, synthetic construct
  source 1..80: mol_type = other DNA
acagccctgcagggagacaaagctgttaaccggcaccgccccagctgtccatcttctcaaggggctgaccccggccgggc

SEQ ID NO: 51495 - DNA, 80 bp, synthetic construct
  source 1..80: mol_type = other DNA
ctactccggaggctgaggcaggagaatggcgtgaacccgggaggcggagtttgcagtgagctgacatcgcaccactgcac

SEQ ID NO: 51496 - DNA, 80 bp, synthetic construct
  source 1..80: mol_type = other DNA
ctaggcatactgtaggtgctcactggataaacagaactgaataaatcaggctcacaggacccttagaggaaactggggtc

SEQ ID NO: 51497 - DNA, 80 bp, synthetic construct; identical to SEQ ID NO: 13602
  source 1..80: mol_type = other DNA

SEQ ID NO: 51498 - DNA, 80 bp, synthetic construct
  source 1..80: mol_type = other DNA
caggccctaacttgctggcctccttcaggagggcgatggcaatacgaatccgctgccgcaggaagatgagcatcagcagc

SEQ ID NO: 51499 - DNA, 80 bp, synthetic construct
  source 1..80: mol_type = other DNA
tgcacgctctggtaggcactgaggttggtggtgaaacccagctgggagatggaggcgcccttgtcccgcagcactcggta

SEQ ID NO: 51500 - DNA, 80 bp, synthetic construct
  source 1..80: mol_type = other DNA
ggttcagccctagcccctcaaatctttccccttacagaggccctccctgcctttccacacaccacccaatgtccccagat

SEQ ID NO: 51501 - DNA, 80 bp, synthetic construct; identical to SEQ ID NO: 13603
  source 1..80: mol_type = other DNA

SEQ ID NO: 51502 - DNA, 80 bp, synthetic construct
  source 1..80: mol_type = other DNA
tgggagcgccggtggagtaacgttggtccatggaaagcagcgccccagagctggaagggagagccgggctgctgggttgg

SEQ ID NO: 51503 - DNA, 80 bp, synthetic construct
  source 1..80: mol_type = other DNA
cctgtcgtgccttggtttggaccctcctctccgctggcctcaactcttagaacaccctgtcacccttccatccaccctcc

SEQ ID NO: 51504 - DNA, 80 bp, synthetic construct
  source 1..80: mol_type = other DNA
atgttcccttctactctgtacctttgctcttactgtgcctctctctcagggctctctttccaccagaaatcccatccatg

SEQ ID NO: 51505 - DNA, 80 bp, synthetic construct; identical to SEQ ID NO: 13604
  source 1..80: mol_type = other DNA

SEQ ID NO: 51506 - DNA, 80 bp, synthetic construct
  source 1..80: mol_type = other DNA
gcaatcctcccacctcagccccccaaagtgttgggattacaggtgtgagtcacctcacctagcttatttattttttagag

SEQ ID NO: 51507 - DNA, 80 bp, synthetic construct
  source 1..80: mol_type = other DNA
aaagatgaggaaacaaggttcagagaggttgcatagttgggtcaagaccatagggctggaaagtgctagaatttatattc

SEQ ID NO: 51508 - DNA, 80 bp, synthetic construct
  source 1..80: mol_type = other DNA
accgtaaactccgcctctgggctcaagcaattctcctacttcagcctcccgagtagctgggatttcaggtgcccaccacc

SEQ ID NO: 51509 - DNA, 80 bp, synthetic construct; identical to SEQ ID NO: 13605
  source 1..80: mol_type = other DNA

SEQ ID NO: 51510 - DNA, 80 bp, synthetic construct
  source 1..80: mol_type = other DNA
ctcagcctcccaaagtgctaggattacaagcatgagccaccatgcctggcctaaaaattgttttatattaaaaatgacat

SEQ ID NO: 51511 - DNA, 80 bp, synthetic construct
  source 1..80: mol_type = other DNA
acactgtaaaagaaaaaaagttcaactgtgatcctaccacccagccacgttcacttataacatttgaacaaatatccttc

SEQ ID NO: 51512 - DNA, 80 bp, synthetic construct
  source 1..80: mol_type = other DNA
aaaatacaaatttaataaataaatttaataaataaaataaaaataaaaattagccgggcgtggtggcgggcaccatgtgc

SEQ ID NO: 51513 - DNA, 80 bp, synthetic construct; identical to SEQ ID NO: 13606
  source 1..80: mol_type = other DNA

SEQ ID NO: 51514 - DNA, 80 bp, synthetic construct
  source 1..80: mol_type = other DNA
acaaagagcaaaatgaagacctgatgctaattccaattttgccaccaacaagctatgtgacttcactctctctgggcctg

SEQ ID NO: 51515 - DNA, 80 bp, synthetic construct
  source 1..80: mol_type = other DNA
gatcaccgtctgtggcaggagtgaaaggacagacacacagacacagagcaggatgaagaagcaggtcccctcaccaccac

SEQ ID NO: 51516 - DNA, 80 bp, synthetic construct
  source 1..80: mol_type = other DNA
aatattcaccatattccagggtacccctggcagacaaaagttcctgttttttgtatagaagacttccccaacagtctgtg

SEQ ID NO: 51517 - DNA, 80 bp, synthetic construct
  source 1..80: mol_type = other DNA
cgttctcagcaactgagatgatgttgctggacaggatgcagctgaagatgttgaagtacaggagatacggcttatctctg

SEQ ID NO: 51518 - DNA, 80 bp, synthetic construct; identical to SEQ ID NO: 13607
  source 1..80: mol_type = other DNA

SEQ ID NO: 51519 - DNA, 80 bp, synthetic construct
  source 1..80: mol_type = other DNA
tcggtcttagttctactccatataaaacagtagtgcctacctcatgagatttcaatgcgcttgtgtgtgtaaagtttact

SEQ ID NO: 51520 - DNA, 80 bp, synthetic construct
  source 1..80: mol_type = other DNA
acaaccaaaacttggtccagttggggatccaaacaccaatctctgaactgtaaaactcatacacttaacacgactctcca

SEQ ID NO: 51521 - DNA, 80 bp, synthetic construct
  source 1..80: mol_type = other DNA
gtctcctgcccaccctacctcgcctcgctcctgcactcctcttctcgcctttgtactcacttgttctcccccatgccaca

SEQ ID NO: 51522 - DNA, 80 bp, synthetic construct
  source 1..80: mol_type = other DNA
atggtccctccctgggttcctgtccctcacccactgccctggctctgagcagctggaaactcacccacaatccccaccac

SEQ ID NO: 51523 - DNA, 80 bp, synthetic construct; identical to SEQ ID NO: 13608
  source 1..80: mol_type = other DNA

SEQ ID NO: 51524 - DNA, 80 bp, synthetic construct
  source 1..80: mol_type = other DNA
gctaattttttttaaatattttatttagaaaacctagccaggcacagtggctcacgactgtaatactagctacttgggag

SEQ ID NO: 51525 - DNA, 80 bp, synthetic construct
  source 1..80: mol_type = other DNA
gagcctgcagtgaacccccatctccaaaacacaaaaagaaagaaaacctttttctgggtgggtaaactttcttctgaagt

SEQ ID NO: 51526 - DNA, 80 bp, synthetic construct
  source 1..80: mol_type = other DNA
gggcaggagtttctctttttcacaagtttcctactaatattttagcaaatacaaagcaaatactggattccacactgcac

SEQ ID NO: 51527 - DNA, 80 bp, synthetic construct; identical to SEQ ID NO: 13609
  source 1..80: mol_type = other DNA

SEQ ID NO: 51528 - DNA, 80 bp, synthetic construct
  source 1..80: mol_type = other DNA
aaggaaggcctttatagtttccggctcacatctcaaggcagtcagtctgggaaatggccttggtcccctgccctaccctg

SEQ ID NO: 51529 - DNA, 80 bp, synthetic construct
  source 1..80: mol_type = other DNA
ccctaccttaccctctggttcaaggctatggggaaagaaactggagacaaaggtgtcaaccccagcagggcctggggagg

SEQ ID NO: 51530 - DNA, 80 bp, synthetic construct
  source 1..80: mol_type = other DNA
ggagggctgggcagtcagggttccttgtgggcactgaggagggagagccgagggctgggcaggagtctgggaaggagcgg

SEQ ID NO: 51531 - DNA, 80 bp, synthetic construct; identical to SEQ ID NO: 13610
  source 1..80: mol_type = other DNA

SEQ ID NO: 51532 - DNA, 80 bp, synthetic construct
  source 1..80: mol_type = other DNA
ctgctcctagctcctcacagagacccctaggcaggaccccagccccctttccacaaagaccctcagccccaactcctcac

SEQ ID NO: 51533 - DNA, 80 bp, synthetic construct
  source 1..80: mol_type = other DNA
cttacagggaccctggcctcactggttgcaggctctgcagcacaggacactcccagcatccagccctattctgctcaggg

SEQ ID NO: 51534 - DNA, 80 bp, synthetic construct
  source 1..80: mol_type = other DNA
agcccccgggccccatcctcctcccaggaccctgactccctccctccatggctcccggttcccgggccctcccctcaggg

SEQ ID NO: 51535 - DNA, 80 bp, synthetic construct; identical to SEQ ID NO: 13611
  source 1..80: mol_type = other DNA

SEQ ID NO: 51536 - DNA, 80 bp, synthetic construct
  source 1..80: mol_type = other DNA
cgccaactaccttaactgccgtacactcccaacacgctcccgccaaagattaaagtgtggaaattggacctgttttttcc

SEQ ID NO: 51537 - DNA, 80 bp, synthetic construct
  source 1..80: mol_type = other DNA
tctattttgaaagatggggtttcaccaagttggccaggctggtcttgaactcctgatctcaggtgattcgcctgccttgg

SEQ ID NO: 51538 - DNA, 80 bp, synthetic construct
  source 1..80: mol_type = other DNA
cctctagccaagtatgctttctccccaccccaacacaaaaatcgcagtttattaccaaacccaacatttattgagaacaa

SEQ ID NO: 51539 - DNA, 80 bp, synthetic construct; identical to SEQ ID NO: 13612
  source 1..80: mol_type = other DNA

SEQ ID NO: 51540 - DNA, 80 bp, synthetic construct
  source 1..80: mol_type = other DNA
gcacttctcagagccacattggcaggtgaaatatttgcttttgatgtcccagaagcggtcgccatagtcaaacctgtcag

SEQ ID NO: 51541 - DNA, 80 bp, synthetic construct
  source 1..80: mol_type = other DNA
gggacccgacacccaacctatcttctccagatgggatctgagccccttgtatgttctatggactttcagcatcagcattg

SEQ ID NO: 51542 - DNA, 80 bp, synthetic construct
  source 1..80: mol_type = other DNA
aaatctgagaagctctgcactactccatgcctggacaccaggtacatgccagccttcaggtcccaggtttgctgcatctc

SEQ ID NO: 51543 - DNA, 80 bp, synthetic construct
  source 1..80: mol_type = other DNA
gatgaagcggctgatgttgccatagtaacgggcatctatgcagtacacctctccatcctggggcagggggatggcactct

SEQ ID NO: 51544 - DNA, 80 bp, synthetic construct; identical to SEQ ID NO: 13613
  source 1..80: mol_type = other DNA

SEQ ID NO: 51545 - DNA, 80 bp, synthetic construct
  source 1..80: mol_type = other DNA
agaggaagccttcagtcagcacagagacagacaacaagctctgtggttaaggggattaatgtgtaggggcagttggcctg

SEQ ID NO: 51546 - DNA, 80 bp, synthetic construct
  source 1..80: mol_type = other DNA
cacatatctggacaccagagggaggagaggagccagctatctaaggagggtgagcagacatgggagattcagacacacgg

SEQ ID NO: 51547 - DNA, 80 bp, synthetic construct
  source 1..80: mol_type = other DNA
aaagaaactggatggtctgttgaacaggcaagtatggttagaggactatcttttttaaaggccaaagaatggtcaggcac

SEQ ID NO: 51548 - DNA, 80 bp, synthetic construct
  source 1..80: mol_type = other DNA
ctacttgggaggctgaggcaggagaatcgcttgaacctgggaggtggagactgcagtgagccaagattgtgccattgcac

SEQ ID NO: 51549 - DNA, 80 bp, synthetic construct; identical to SEQ ID NO: 13614
  source 1..80: mol_type = other DNA

SEQ ID NO: 51550 - DNA, 80 bp, synthetic construct
  source 1..80: mol_type = other DNA
aggtagagggtggaggtggaggggagggaagacaagctctgtggtctgggcagagtggaggcaggtgccattctcagctg

SEQ ID NO: 51551 - DNA, 80 bp, synthetic construct
  source 1..80: mol_type = other DNA
ggtgttaaggtgctcccggtgacttactcgcagatgaaggtcccctgtgggatggtctgcagggcgcggaccccccagcc

SEQ ID NO: 51552 - DNA, 80 bp, synthetic construct
  source 1..80: mol_type = other DNA
acccggttcttgcagtttctccagcatgagcacgcctggttacactcgaaaatcagcggaggctcaatcttgttaaattc

SEQ ID NO: 51553 - DNA, 80 bp, synthetic construct; identical to SEQ ID NO: 13615
  source 1..80: mol_type = other DNA

SEQ ID NO: 51554 - DNA, 80 bp, synthetic construct
  source 1..80: mol_type = other DNA
gccgcacaggcagttggagctagagcagtcgtccacacacgtgcagtgctggggcgaggaggcagaggtcagctcaaccc

SEQ ID NO: 51555 - DNA, 80 bp, synthetic construct
  source 1..80: mol_type = other DNA
ccttgctgtgacctaggaaaaggatccctcccctggtggggatgcgaccccacaccagggctccctttcagccaaccctt

SEQ ID NO: 51556 - DNA, 80 bp, synthetic construct
  source 1..80: mol_type = other DNA
gtaatcctcagggcagggctccccatccacaccgttgacacagggaatgggcacgttctcatagccccgagccacgtccc

SEQ ID NO: 51557 - DNA, 80 bp, synthetic construct; identical to SEQ ID NO: 13616
  source 1..80: mol_type = other DNA

SEQ ID NO: 51558 - DNA, 80 bp, synthetic construct
  source 1..80: mol_type = other DNA
aggaggtggtcttgggtgcagagaggggcccagggctcaccggcagatgatcttctctgtgcggatggcccgatttccca

SEQ ID NO: 51559 - DNA, 80 bp, synthetic construct
  source 1..80: mol_type = other DNA
ctgaggctgcaagaagtgggggcaggggcatcaagggcggggcaggggctcacagcacgcagtcatggtagctctcccga

SEQ ID NO: 51560 - DNA, 80 bp, synthetic construct
  source 1..80: mol_type = other DNA
aggcagctgggcccttgaatccagcctccaccttgctcaggggcctggggctgccctacctcaaccaaacgctcactcac

SEQ ID NO: 51561 - DNA, 80 bp, synthetic construct; identical to SEQ ID NO: 13617
  source 1..80: mol_type = other DNA

SEQ ID NO: 51562 - DNA, 80 bp, synthetic construct
  source 1..80: mol_type = other DNA
tggaggccattgtggccaacacggtgaaaccctgtctctactaaaaaatagaaaaaattagctgggcgtggtggcaggcg

SEQ ID NO: 51563 - DNA, 80 bp, synthetic construct
  source 1..80: mol_type = other DNA
accatctgatgccagagagaaaataaagtaattgttctctttccaaaaaatacagccaggagctggtcatggaggtgcat

SEQ ID NO: 51564 - DNA, 80 bp, synthetic construct
  source 1..80: mol_type = other DNA
ttcctaagtctgcccactcaaaagtcctagaagcagcgacaacccaataacaataaacactcctaggaacatagattgta

SEQ ID NO: 51565 - DNA, 80 bp, synthetic construct
  source 1..80: mol_type = other DNA
caggagaatggcgtgaacctgggaggcggagcttgcagtaagctgtgatcacgccattgcactccagcctgggcaacaga

SEQ ID NO: 51566 - DNA, 80 bp, synthetic construct; identical to SEQ ID NO: 13618
  source 1..80: mol_type = other DNA

SEQ ID NO: 51567 - DNA, 80 bp, synthetic construct
  source 1..80: mol_type = other DNA
gagaaatacaaatgaggaagaagaaagcaatgaggacagacacgagcagtgtgaggtcagatgtaggaaaggcggcccaa

SEQ ID NO: 51568 - DNA, 80 bp, synthetic construct
  source 1..80: mol_type = other DNA
ccgtcctcctcctgagggagacacgggcaaatgagcctttgggctggcaccccaaacctggtccctgactccgggggcca

SEQ ID NO: 51569 - DNA, 80 bp, synthetic construct
  source 1..80: mol_type = other DNA
gagggctggcaccagggaggcatggggcaggggaggggcctaagggcctggtgaatgaggcatggggccgggcccgtgct

SEQ ID NO: 51570 - DNA, 80 bp, synthetic construct; identical to SEQ ID NO: 13619
  source 1..80: mol_type = other DNA

SEQ ID NO: 51571 - DNA, 80 bp, synthetic construct
  source 1..80: mol_type = other DNA
ggacccagcacctatgagtcaccacatccccatcgttatgggttacatgtgtcttttccccaccacactaagtccttcag

SEQ ID NO: 51572 - DNA, 80 bp, synthetic construct
  source 1..80: mol_type = other DNA
ccgagggtggaaacggagcttcttccgcctgccaagggagcacgggagcggggagagaaggggagctcctcagattccag

SEQ ID NO: 51573 - DNA, 80 bp, synthetic construct
  source 1..80: mol_type = other DNA
agggtcagggagggccctgagctgtcaatggtgtcagccaggggatcgcagggcgggcgccggggttccccatgccctcg

SEQ ID NO: 51574 - DNA, 80 bp, synthetic construct; identical to SEQ ID NO: 13620
  source 1..80: mol_type = other DNA

SEQ ID NO: 51575 - DNA, 80 bp, synthetic construct
  source 1..80: mol_type = other DNA
tggtcactcaccgccgtgcagaagtagccgcagcccgggcagcagtggtgtttgaccatgcgggcgcggtgggtctcaca

SEQ ID NO: 51576 - DNA, 80 bp, synthetic construct
  source 1..80: mol_type = other DNA
gccccacctctccgtccacactctcagtggccatgcacttgtgccccgccctctcgctgatgcggtcaatcttgggtgcc

SEQ ID NO: 51577 - DNA, 80 bp, synthetic construct
  source 1..80: mol_type = other DNA
ccccaccccgccatgccccagaacccctaaagcctggccatggacaccccggctctggcgtggttcccctccttcccttt

SEQ ID NO: 51578 - DNA, 80 bp, synthetic construct; identical to SEQ ID NO: 13621
  source 1..80: mol_type = other DNA

SEQ ID NO: 51579 - DNA, 80 bp, synthetic construct
  source 1..80: mol_type = other DNA
tcttggccttgcgccggccactggaaccactctgggaagggggaggaggaggagttaggaaccctcacccccaggggccc

SEQ ID NO: 51580 - DNA, 80 bp, synthetic construct
  source 1..80: mol_type = other DNA
ttcctcctcctcctcttcacttagttgttcagttagagcttcaacttcagactgggagagaggcagaacagacatatcca

SEQ ID NO: 51581 - DNA, 80 bp, synthetic construct
  source 1..80: mol_type = other DNA
taaagagagggtgcatggaatattacacagcagtgaaaaagttacagacagcaatgtgcacagatcttggtaatgtgata

SEQ ID NO: 51582 - DNA, 80 bp, synthetic construct
  source 1..80: mol_type = other DNA
gagaaactttatatgaaaggttcaggctgacatcacctgaacccactggtcaatcttatcactaacaagaaaaatgacca

SEQ ID NO: 51583 - DNA, 80 bp, synthetic construct; identical to SEQ ID NO: 13622
  source 1..80: mol_type = other DNA

SEQ ID NO: 51584 - DNA, 80 bp, synthetic construct
  source 1..80: mol_type = other DNA
gattataggcacccgccaccacacccagctaattttcgtatttttattagagatgtgttttcaccatgttggctaggctg

SEQ ID NO: 51585 - DNA, 80 bp, synthetic construct
  source 1..80: mol_type = other DNA
gaggtgggcagatcacgagatcaggagtttgagaccagcctggccaacatagtgaaaccctgcctctactaaaaatacaa

SEQ ID NO: 51586 - DNA, 80 bp, synthetic construct
  source 1..80: mol_type = other DNA
tccagcctgggtgacagtgtgagactccatctcaaaaaacaaaaacaaacaaacaaacaaacacaaagaagatggggaaa

SEQ ID NO: 51587 - DNA, 80 bp, synthetic construct
  source 1..80: mol_type = other DNA
tcccaggttcaagcgattctcctgcctcagcctcccgagtagctggaattacaggcacgtaccactacgtccagctaatt

SEQ ID NO: 51588 - DNA, 80 bp, synthetic construct; identical to SEQ ID NO: 13623
  source 1..80: mol_type = other DNA

SEQ ID NO: 51589 - DNA, 80 bp, synthetic construct
  source 1..80: mol_type = other DNA
aggtctgggatttgctttaaaataacctagtaggtgtgtgtgctgggagatgtacagatgggtcaagatggactgtgtac

SEQ ID NO: 51590 - DNA, 80 bp, synthetic construct
  source 1..80: mol_type = other DNA
ttctactgtgtaggcaaacatataagataaaaccagacaaagagcaacgaaataagcaaataaatgacaatgcaatgctt

SEQ ID NO: 51591 - DNA, 80 bp, synthetic construct
  source 1..80: mol_type = other DNA
aaaaaaaaaagaatactaaatcccatgtgcagggtggtggccacctttgtggatgaaacgggcagaatacacattgaaaa

SEQ ID NO: 51592 - DNA, 80 bp, synthetic construct
  source 1..80: mol_type = other DNA
tctctactaaaaatacaaaaattagccgggcgtggtggcaggtgcctgtaatcccagctactcgggaggctgaggcagga

SEQ ID NO: 51593 - DNA, 80 bp, synthetic construct; identical to SEQ ID NO: 13624
  source 1..80: mol_type = other DNA

SEQ ID NO: 51594 - DNA, 80 bp, synthetic construct
  source 1..80: mol_type = other DNA
tttcgtcagggtcacttctcctgaacgccgggcagaacctaactcctctgactagaaaaagatcagaaaaattgaggcca

SEQ ID NO: 51595 - DNA, 80 bp, synthetic construct
  source 1..80: mol_type = other DNA
cagcttcctccttttggccagatctggaagaagagagagaatggtgtggggcctatcaccgaaaccttcagaacagacca

SEQ ID NO: 51596 - DNA, 80 bp, synthetic construct
  source 1..80: mol_type = other DNA
tacagttttgcctgggttagcctggagccccaggcgggggtggggtagtgagccacacctccaaatgccatgtgaggctc

SEQ ID NO: 51597 - DNA, 80 bp, synthetic construct; identical to SEQ ID NO: 13625
  source 1..80: mol_type = other DNA

SEQ ID NO: 51598 - DNA, 80 bp, synthetic construct
  source 1..80: mol_type = other DNA
ctcacttcagcctcgaactggactcaagccattctcctgcctcagcttcctgggaagctgggattacaggcacatgtcac

SEQ ID NO: 51599 - DNA, 80 bp, synthetic construct
  source 1..80: mol_type = other DNA
aaacttcttttagagatggggtcttggtatgctgcccaggtgaaaggaaagaaattctgacatggtacaacatagatgaa

SEQ ID NO: 51600 - DNA, 80 bp, synthetic construct
  source 1..80: mol_type = other DNA
tgggtacagagtttcagttttacaagatgagttatggtgactgatgattgcacatgatgaaagtatttaataccattaaa

SEQ ID NO: 51601 - DNA, 80 bp, synthetic construct; identical to SEQ ID NO: 13626
  source 1..80: mol_type = other DNA

SEQ ID NO: 51602 - DNA, 80 bp, synthetic construct
  source 1..80: mol_type = other DNA
cgtccggctggtctcgaactcctgacctcaggtgatccacctgccttggcctcccaaagtgctgggattacatgcgtgag

SEQ ID NO: 51603 - DNA, 80 bp, synthetic construct
  source 1..80: mol_type = other DNA
ttttagatggtaaattttacgtgacactagtcccctcttatccagttcatcagcagtgatggtggcatattgttagaatt

SEQ ID NO: 51604 - DNA, 80 bp, synthetic construct
  source 1..80: mol_type = other DNA
agttagagacggggtttggacatgtttaccaggctggtctcgaactcctgacctcaagtgattgccggccttggcctctg

SEQ ID NO: 51605 - DNA, 80 bp, synthetic construct; identical to SEQ ID NO: 13627
  source 1..80: mol_type = other DNA

SEQ ID NO: 51606 - DNA, 80 bp, synthetic construct
  source 1..80: mol_type = other DNA
ctgcttaaaggcattttgtacctgactagggtgctgcttcacccattatcttcatgtgcctaatatctgtgagacaaaga

SEQ ID NO: 51607 - DNA, 80 bp, synthetic construct
  source 1..80: mol_type = other DNA
cgcagtgtgcccagagtcagcctgttttttttcaatatcttcacgtcatccaatcttcttttcctttaaaaacctacttg

SEQ ID NO: 51608 - DNA, 80 bp, synthetic construct
  source 1..80: mol_type = other DNA
ctgctaatcagagtgtattttcacggcaacttgaatctttgctcctaaaggctgtcctcaaaacctgaccaaatatactt

SEQ ID NO: 51609 - DNA, 80 bp, synthetic construct
  source 1..80: mol_type = other DNA
aaactttacaaatagagcagtgacagatgagttccccaagggcttgctttgaggtagaaaggaagagtggtttgaaattc

SEQ ID NO: 51610 - DNA, 80 bp, synthetic construct; identical to SEQ ID NO: 13628
  source 1..80: mol_type = other DNA

SEQ ID NO: 51611 - DNA, 80 bp, synthetic construct
  source 1..80: mol_type = other DNA
tagcctcatagccaaactctggacagatggaggtgattttcccgcccctgtcattgacatcttggcccggctaggacagg

SEQ ID NO: 51612 - DNA, 80 bp, synthetic construct
  source 1..80: mol_type = other DNA
tccccatctccctcaagattctcagattcatccccaatgagtggtgtagcccctacaggggtgtcagccccctcatcacc

SEQ ID NO: 51613 - DNA, 80 bp, synthetic construct
  source 1..80: mol_type = other DNA
ggaagagaaaaagttcagagctaagggctcaggagatcctgtgtttagggaaggtgacggtccaattggggcccgtttta

SEQ ID NO: 51614 - DNA, 80 bp, synthetic construct; identical to SEQ ID NO: 13629
  source 1..80: mol_type = other DNA

SEQ ID NO: 51615 - DNA, 80 bp, synthetic construct
  source 1..80: mol_type = other DNA
ggaccccgggcaccaacccctccagcacccgctgccccccagcccggtggacggcccctcgtgcccctcacgcgtgctcc

SEQ ID NO: 51616 - DNA, 80 bp, synthetic construct
  source 1..80: mol_type = other DNA
cacccccggagcattgcacgggcgcgcgcttcccccgggcgcgcgcgcgggcatgcacccgcctctccccctccccttcc

SEQ ID NO: 51617 - DNA, 80 bp, synthetic construct
  source 1..80: mol_type = other DNA
ccctgagagcggcctcggagatggctgtgactgtcctaagctgggagctgcaagggagaattcctgtcattcctggcctc

SEQ ID NO: 51618 - DNA, 80 bp, synthetic construct; identical to SEQ ID NO: 13630
  source 1..80: mol_type = other DNA

SEQ ID NO: 51619 - DNA, 80 bp, synthetic construct
  source 1..80: mol_type = other DNA
gcgtgcccttctgaaaacctgtggctaaatgtctcttctgtttatatcaggcgtgttacaccttcacacgcactagggat

SEQ ID NO: 51620 - DNA, 80 bp, synthetic construct
  source 1..80: mol_type = other DNA
gatagctgtatttagggtaccatccctttaggtattacgttttggtcgagtttggaaaagatctgtatgatttcacacgc

SEQ ID NO: 51621 - DNA, 80 bp, synthetic construct
  source 1..80: mol_type = other DNA
agacatgacctatttaccccagacaaaatatgaccaaacagactcctgcttacaatttccgtgggcaggttggccacctg

SEQ ID NO: 51622 - DNA, 80 bp, synthetic construct; identical to SEQ ID NO: 13631
  source 1..80: mol_type = other DNA

SEQ ID NO: 51623 - DNA, 80 bp, synthetic construct
  source 1..80: mol_type = other DNA
taaaaaatatgttttttcttaaaaaatactgtatgtctctactcctctccctccctcccaacagcccttcttgtgttctt

SEQ ID NO: 51624 - DNA, 80 bp, synthetic construct
  source 1..80: mol_type = other DNA
actttgttctccctcaaatttcagcaagcctcatactcgcagtctcatttccccagcatgcaagaactgtctcccacttc

SEQ ID NO: 51625 - DNA, 80 bp, synthetic construct
  source 1..80: mol_type = other DNA
gccaggaataaaacatttttgtcttccctcattctataggacccttttccctccctccacatatacatgcacttctaaga

SEQ ID NO: 51626 - DNA, 80 bp, synthetic construct; identical to SEQ ID NO: 13632
  source 1..80: mol_type = other DNA

SEQ ID NO: 51627 - DNA, 80 bp, synthetic construct
  source 1..80: mol_type = other DNA
gcgaagcgcacgtcgcagtaggagcagcggtagggccgcgctcccgagtgcaggttgaggtggtcgtgaagggtggactt

SEQ ID NO: 51628 - DNA, 80 bp, synthetic construct
  source 1..80: mol_type = other DNA
acgccctggaacacttccgggcacttggtgcacttgatgttctttaaggggtttccacctgagaagcccccaggcagggg

SEQ ID NO: 51629 - DNA, 80 bp, synthetic construct
  source 1..80: mol_type = other DNA
gccttcaccacaccctgcggtggggctacagtgctggggggaacgctgctctgggccagctccccaaggtggccacccac

SEQ ID NO: 51630 - DNA, 80 bp, synthetic construct; identical to SEQ ID NO: 13633
  source 1..80: mol_type = other DNA

SEQ ID NO: 51631 - DNA, 80 bp, synthetic construct
  source 1..80: mol_type = other DNA
gtaaggtagttgacgatgtccctaacagcgaattccaaggcgcccgtgtagcaggagaggagcaagtcggccacgatgcg

SEQ ID NO: 51632 - DNA, 80 bp, synthetic construct
  source 1..80: mol_type = other DNA
tggttcatgttccgtagcgttgcggcctcgtggccgggcagctggaagcgcaggacttccaccccagaggccattgtggc

SEQ ID NO: 51633 - DNA, 80 bp, synthetic construct
  source 1..80: mol_type = other DNA
gaggtgctgtccctctgagaggagggaggcgtggttctcgggggcggggcagcggcgtccacaccccccagcccagcagc

SEQ ID NO: 51634 - DNA, 80 bp, synthetic construct; identical to SEQ ID NO: 13634
  source 1..80: mol_type = other DNA

SEQ ID NO: 51635 - DNA, 80 bp, synthetic construct
  source 1..80: mol_type = other DNA
cacgggacgcgcgcgcgcgcggggccggctccgcgtgggcgtaaggggggaggggcgggggcggctcgtgccgtgtgttc

SEQ ID NO: 51636 - DNA, 80 bp, synthetic construct
  source 1..80: mol_type = other DNA
gggattatttgtccgccagagcggaaatacgttccacacccccctctttctcgctccccctcctctgtacctccaagccc

SEQ ID NO: 51637 - DNA, 80 bp, synthetic construct
  source 1..80: mol_type = other DNA
gggcgctgccacctgctcccaggggtggtgcgtctccggtccagctgtgccgagcgctgccctgggtgcatccgtggcac

SEQ ID NO: 51638 - DNA, 80 bp, synthetic construct; identical to SEQ ID NO: 13635
  source 1..80: mol_type = other DNA

SEQ ID NO: 51639 - DNA, 80 bp, synthetic construct
  source 1..80: mol_type = other DNA
ctaatcttccaccgctccgtcccccttattcctcacctctcctccagactgacaaggtccagctctaaacaaaacttccc

SEQ ID NO: 51640 - DNA, 80 bp, synthetic construct
  source 1..80: mol_type = other DNA
tgaagatgccactgtttcctgccaattggatttcttttttacgtccttcaggagactagtgcgttttccatacatttcaa

SEQ ID NO: 51641 - DNA, 80 bp, synthetic construct
  source 1..80: mol_type = other DNA
ggccgaggcaggtggatcacctgaggtcaggagttcgagaccagcctggccaacatggtgaaaccctgactctactaaat

SEQ ID NO: 51642 - DNA, 80 bp, synthetic construct; identical to SEQ ID NO: 13636
  source 1..80: mol_type = other DNA

SEQ ID NO: 51643 - DNA, 80 bp, synthetic construct
  source 1..80: mol_type = other DNA
ttctctgatttgtatgcccgcacccagttccctctgttgaatctaagagtctgttctaaactgctctctttgtatttagg

SEQ ID NO: 51644 - DNA, 80 bp, synthetic construct
  source 1..80: mol_type = other DNA
aaaaaaataaaataaaagccctattcctgtaccaaatgaggcccactgggcaagttacttaattctctgaatcacagtgt

SEQ ID NO: 51645 - DNA, 80 bp, synthetic construct
  source 1..80: mol_type = other DNA
aatgtgaggtttaaatgagcctggcatgcagtagttgctgagtaaacaatagctctgttctccttttcctaatctgggaa

SEQ ID NO: 51646 - DNA, 80 bp, synthetic construct
  source 1..80: mol_type = other DNA
acctcccaagtagctgggattacaggtgcccgccaccatgcctagctaattttcgcatttttagtagagacggggtttca

SEQ ID NO: 51647 - DNA, 80 bp, synthetic construct; identical to SEQ ID NO: 13637
  source 1..80: mol_type = other DNA

SEQ ID NO: 51648 - DNA, 80 bp, synthetic construct
  source 1..80: mol_type = other DNA
aatgaatccttcaagtgtccagcccacccagttacaactctgcgtaaaaacaagcagaggtgcacaaactcttttccatg

SEQ ID NO: 51649 - DNA, 80 bp, synthetic construct
  source 1..80: mol_type = other DNA
ctgtccttagcttgcagtaccaaatgccttggtgtggtgtcaagaacagataaatttaggagatacttttaggatttttg

SEQ ID NO: 51650 - DNA, 80 bp, synthetic construct
  source 1..80: mol_type = other DNA
cttgggatcccagttacatgagaggctgaggtgggaggactgcttaagcccaggcagttgaggctgcagtgaaccatgat

SEQ ID NO: 51651 - DNA, 80 bp, synthetic construct; identical to SEQ ID NO: 13638
  source 1..80: mol_type = other DNA

SEQ ID NO: 51652 - DNA, 80 bp, synthetic construct
  source 1..80: mol_type = other DNA
ctatgagtccatagcagcttactttgaaaaggggtgtttatgtttgtgggcatctctgagagaagctagctcacagctta

SEQ ID NO: 51653 - DNA, 80 bp, synthetic construct
  source 1..80: mol_type = other DNA
agcaatctataggaaaggaagaggtaagtcagcctggacttttaaatccataggctgatgaaactgtcttacattacaac

SEQ ID NO: 51654 - DNA, 80 bp, synthetic construct
  source 1..80: mol_type = other DNA
atccatctgcaaaaccaccttttctgaactcccatccatcccccttgactgctcctcaatgctggctcctcctccttctt

SEQ ID NO: 51655 - DNA, 80 bp, synthetic construct; identical to SEQ ID NO: 13639
  source 1..80: mol_type = other DNA

SEQ ID NO: 51656 - DNA, 80 bp, synthetic construct
  source 1..80: mol_type = other DNA
ccccaggcctgcctgtgtccctgcaaatgacctaatccatatcccaagtttaaaaaaaaaattgttcattttattttttt

SEQ ID NO: 51657 - DNA, 80 bp, synthetic construct
  source 1..80: mol_type = other DNA
catggtgaaacctcgtttctactgaaaatgcaaaaaaaattagctgggcgtggtggtgcatgcctgtaatcccagctact

SEQ ID NO: 51658 - DNA, 80 bp, synthetic construct
  source 1..80: mol_type = other DNA
caaactcaaaattcaaagttcaaaattcaaaatgtagttttgttcaaaattcaaaatgtgtaagtacaattccaaattca

SEQ ID NO: 51659 - DNA, 80 bp, synthetic construct; identical to SEQ ID NO: 13640
  source 1..80: mol_type = other DNA

SEQ ID NO: 51660 - DNA, 80 bp, synthetic construct
  source 1..80: mol_type = other DNA
tggactaatttatttatttattttttagacagagtcttgctctgtcgccaggctggggtgcagtggcacaatctcggctt

SEQ ID NO: 51661 - DNA, 80 bp, synthetic construct
  source 1..80: mol_type = other DNA
tctcagctcactgcaacctctgcttcccaggttcaagcaattctcctgcctcagcctcctgagtagctaggattacggac

SEQ ID NO: 51662 - DNA, 80 bp, synthetic construct
  source 1..80: mol_type = other DNA
tttttttttttaattaaaagtggcaagactgggtcttcccgtgttgcccagtcattgatcttgaattcttgggttcaagt

SEQ ID NO: 51663 - DNA, 80 bp, synthetic construct
  source 1..80: mol_type = other DNA
ctgtaatcccagcactttgggaggctgaggtgggcggatcacctgaggtcaggagttcgaggccagcctgggccaacatg

SEQ ID NO: 51664 - DNA, 80 bp, synthetic construct; identical to SEQ ID NO: 13641
  source 1..80: mol_type = other DNA

SEQ ID NO: 51665 - DNA, 80 bp, synthetic construct
  source 1..80: mol_type = other DNA
tgaatagactacagtacagtgtaaacataacttgtgtgcactgggaaaccaaaaagttgttgatatgactggctttattg

SEQ ID NO: 51666 - DNA, 80 bp, synthetic construct
  source 1..80: mol_type = other DNA
ctggggctggccttttcactcaacattatggttttgttgacttgtgtagctgtaattcattcattgtcttttaattggat

SEQ ID NO: 51667 - DNA, 80 bp, synthetic construct
  source 1..80: mol_type = other DNA
agtggtgtgatcttggctcactgcaacctccacctcccaggcttagcctcccgccttagcctcccgagtagctaggacta

SEQ ID NO: 51668 - DNA, 80 bp, synthetic construct; identical to SEQ ID NO: 13642
  source 1..80: mol_type = other DNA

SEQ ID NO: 51669 - DNA, 80 bp, synthetic construct
  source 1..80: mol_type = other DNA
ttcaatttctccatatccttgccaacagttgttattttctgtttttttttgttttttgtttttttttgagacagcgtctc

SEQ ID NO: 51670 - DNA, 80 bp, synthetic construct
  source 1..80: mol_type = other DNA
ggtttcaccatattggccaggctggtctcgaactcctgaccttgtgatccgcccacctcagcctcccaaagtgctgggat

SEQ ID NO: 51671 - DNA, 80 bp, synthetic construct
  source 1..80: mol_type = other DNA
gagaaatatctattcaagtcctttgctcatttttttttttttgacaaggtctcactctgttgcccaggctggaatgcaca

SEQ ID NO: 51672 - DNA, 80 bp, synthetic construct; identical to SEQ ID NO: 13643
  source 1..80: mol_type = other DNA

SEQ ID NO: 51673 - DNA, 80 bp, synthetic construct
  source 1..80: mol_type = other DNA
caacatgatgaaaccccatctctactaaaaatacaaaaattagccaggcgtggtggcgcatgcctgtaatcccagctact

SEQ ID NO: 51674 - DNA, 80 bp, synthetic construct
  source 1..80: mol_type = other DNA
ctcatgcctgtaatcccagcactttgggagaccaaagcgggtggatcacctgaagtcaggagttcgagaccagcctgagc

SEQ ID NO: 51675 - DNA, 80 bp, synthetic construct
  source 1..80: mol_type = other DNA
ctaggagacagagggagactcttgtctcaaaaaataaacaaataaatacataaaaaaaaaaataaaatgaatcatgaagg

SEQ ID NO: 51676 - DNA, 80 bp, synthetic construct; identical to SEQ ID NO: 13644
  source 1..80: mol_type = other DNA

SEQ ID NO: 51677 - DNA, 80 bp, synthetic construct
  source 1..80: mol_type = other DNA
cccaagtagctgggactacaggcacatgccaccacgcctggctaatttttgtatttttagtagaaatggggtttcaccat

SEQ ID NO: 51678 - DNA, 80 bp, synthetic construct
  source 1..80: mol_type = other DNA
aatttgagaccgggtcactacgttgccaaggctggtctctaactcctgggctcaagcgatccgcccactgcagtctccca

SEQ ID NO: 51679 - DNA, 80 bp, synthetic construct
  source 1..80: mol_type = other DNA
ctgttcagcttccctgctaatgctaaactattttctgaagcagttgtacaccagccatgagactgttgcttcttgggaaa

SEQ ID NO: 51680 - DNA, 80 bp, synthetic construct; identical to SEQ ID NO: 13645
  source 1..80: mol_type = other DNA

SEQ ID NO: 51681 - DNA, 80 bp, synthetic construct
  source 1..80: mol_type = other DNA
tctactgaaaatacaaaaaattaaccagggtgatggtgtgtgcctgtaatcccagctactcaggaggctgaggcaggaga

SEQ ID NO: 51682 - DNA, 80 bp, synthetic construct
  source 1..80: mol_type = other DNA
ggccaagcgcagtggctcacgcctgtaatcccagcactttaggagggcaaggtgggaggattacttgagcccaggatttc

SEQ ID NO: 51683 - DNA, 80 bp, synthetic construct
  source 1..80: mol_type = other DNA
tccaggctgaacttgaactcccagtctcaagtgattctcctgcctcagcctcctgggtatctgggactacaagcatgcca

SEQ ID NO: 51684 - DNA, 80 bp, synthetic construct
  source 1..80: mol_type = other DNA
atggtgaaccgctatctctactaaaaatacaaaaattagctgggtgtggtggcaggcacctgtaatcccagctagttggg

SEQ ID NO: 51685 - DNA, 80 bp, synthetic construct; identical to SEQ ID NO: 13646
  source 1..80: mol_type = other DNA

SEQ ID NO: 51686 - DNA, 80 bp, synthetic construct
  source 1..80: mol_type = other DNA
tcgtgatctgcccgccttggcctccagaagtgctgggattacaggcatgagccaccgtgcctggcccttttttttttaag

SEQ ID NO: 51687 - DNA, 80 bp, synthetic construct
  source 1..80: mol_type = other DNA
tatgttggccaggatggtctcaatctcatgaccttgtgatccgcctgcctcggcctctcaaagtgctgggatttcaggtg

SEQ ID NO: 51688 - DNA, 80 bp, synthetic construct
  source 1..80: mol_type = other DNA
ggaggccgaggtgggcggatcatgaggtcaggagttcgagaccagcctggccaatatggtgaaaccccatctctactaaa

SEQ ID NO: 51689 - DNA, 80 bp, synthetic construct; identical to SEQ ID NO: 13647
  source 1..80: mol_type = other DNA

SEQ ID NO: 51690 - DNA, 80 bp, synthetic construct
  source 1..80: mol_type = other DNA
gaacccgggaggcggagcttgcagtgagccaagatcacaccactgcactccagcctgggcgacagagcaagactccatca

SEQ ID NO: 51691 - DNA, 80 bp, synthetic construct
  source 1..80: mol_type = other DNA
agcccctgttgtcttgccaggactctaaatgtctcttaactggtcttccagcccctacatactgattccagaataatatt

SEQ ID NO: 51692 - DNA, 80 bp, synthetic construct
  source 1..80: mol_type = other DNA
ctgaacttgcagttcctttaatgcgctctggggtttcattgctcacctggatgcttgcatctcttccttgtcaggtaaac

SEQ ID NO: 51693 - DNA, 80 bp, synthetic construct; identical to SEQ ID NO: 13648
  source 1..80: mol_type = other DNA

SEQ ID NO: 51694 - DNA, 80 bp, synthetic construct
  source 1..80: mol_type = other DNA
gcctcttgcagtggcctaacttcaggagggctgaggaattccatcctatcatgtgcctggaaggcagaaaacgggaaaat

SEQ ID NO: 51695 - DNA, 80 bp, synthetic construct
  source 1..80: mol_type = other DNA
ataactctgtgttaatgttacagtctgggtttgctggcgtggaaggagtttgtggaagaagggcagtagtttatagggag

SEQ ID NO: 51696 - DNA, 80 bp, synthetic construct
  source 1..80: mol_type = other DNA
atgttggccgggtatggtggctcacgcctgtaatcccagcactttgggaggctgaggtgggtggatcacctgaggtcagg

SEQ ID NO: 51697 - DNA, 80 bp, synthetic construct; identical to SEQ ID NO: 13649
  source 1..80: mol_type = other DNA

SEQ ID NO: 51698 - DNA, 80 bp, synthetic construct
  source 1..80: mol_type = other DNA
tttttttttttttttttgagacagagttttgctccttttgcccaggctggagttgtagtgagctgagatagcgccactgt

SEQ ID NO: 51699 - DNA, 80 bp, synthetic construct
  source 1..80: mol_type = other DNA
tgaaacctcgtctctactaaaaatacaaaaattagccggcgtgctggtgggcacttgtaatccgagctacttgggaggct

SEQ ID NO: 51700 - DNA, 80 bp, synthetic construct
  source 1..80: mol_type = other DNA
tatagttcaaaagaaacattttattttggtaaaagccaagaagtgaaagataaatagttttgcagccataaaaaaaaaaa

SEQ ID NO: 51701 - DNA, 80 bp, synthetic construct; identical to SEQ ID NO: 13650
  source 1..80: mol_type = other DNA

SEQ ID NO: 51702 - DNA, 80 bp, synthetic construct
  source 1..80: mol_type = other DNA
cctggccaacatggtgaaaccccgtctctactaaaaatgcaaaaattagctgggcgtggtgtcagccgtttgtaatccca

SEQ ID NO: 51703 - DNA, 80 bp, synthetic construct
  source 1..80: mol_type = other DNA
tgaaaaaagaaaaaagagaaatattttaaaatgaaaaatttgagcttttccgtaaaaaaatttttaatgaattcccagca

SEQ ID NO: 51704 - DNA, 80 bp, synthetic construct
  source 1..80: mol_type = other DNA
ggaggattgtggaagcccaggagtttgaggctgccgtgagctatgatcaggtctctgcactccagcctgggcaacaaagc

SEQ ID NO: 51705 - DNA, 80 bp, synthetic construct; identical to SEQ ID NO: 13651
  source 1..80: mol_type = other DNA

SEQ ID NO: 51706 - DNA, 80 bp, synthetic construct
  source 1..80: mol_type = other DNA
ggcggatcacgaggtcaggagttcaagaccagcctggccaagttggtgaaaccccatctctactaaaaatacaaaaaaat

SEQ ID NO: 51707 - DNA, 80 bp, synthetic construct
  source 1..80: mol_type = other DNA
aaggaatggttggtgggtggtatatagacatgaacccagaccgtctatgaaccgagaccgtctatgaactgaagctagat

SEQ ID NO: 51708 - DNA, 80 bp, synthetic construct
  source 1..80: mol_type = other DNA
ccgtctatgaaccgagaccgtctatgaactgaagctagatgatggatacatacatgaaagttcattttactattctctct

SEQ ID NO: 51709 - DNA, 80 bp, synthetic construct
  source 1..80: mol_type = other DNA
tggagtgcagtggtgcaatctcagctcacagcaacctctgcctcccaggttcaagcaattctcctgcctcagcctcctga

SEQ ID NO: 51710 - DNA, 80 bp, synthetic construct; identical to SEQ ID NO: 13652
  source 1..80: mol_type = other DNA

SEQ ID NO: 51711 - DNA, 80 bp, synthetic construct
  source 1..80: mol_type = other DNA
ggcatcccatacatacagttctgaatgtctatctagtttaaaagtgtatattatataacatatatatctggagacattca

SEQ ID NO: 51712 - DNA, 80 bp, synthetic construct
  source 1..80: mol_type = other DNA
ttttatacctgtagggtagccgatcttctccttttgatggtcctaattctcaaaggtaaccttaaggggagtgtattttg

SEQ ID NO: 51713 - DNA, 80 bp, synthetic construct
  source 1..80: mol_type = other DNA
gctcttctcaggtataacctttcatttgtgttgggcaggaaagcaaggcatgaacgtatgtctttctactgggcaagttc

SEQ ID NO: 51714 - DNA, 80 bp, synthetic construct; identical to SEQ ID NO: 13653
  source 1..80: mol_type = other DNA

SEQ ID NO: 51715 - DNA, 80 bp, synthetic construct
  source 1..80: mol_type = other DNA
tgtttaccaccctcttacctgggttacccagggcagctcccctgatgggtagcaagaagtgggtgataacatgcaccatg

SEQ ID NO: 51716 - DNA, 80 bp, synthetic construct
  source 1..80: mol_type = other DNA
ttctgtttcttgggaggccctaccccaccccttagttcctcgttccattctcaggaattgtttgtgcaatggatggacaa

SEQ ID NO: 51717 - DNA, 80 bp, synthetic construct
  source 1..80: mol_type = other DNA
atagttgggcaatcacttcaaagttagtaggcagtgcctgctaggatgggggatggtgtgtgtaccgaggaacttagcag

SEQ ID NO: 51718 - DNA, 80 bp, synthetic construct; identical to SEQ ID NO: 13654
  source 1..80: mol_type = other DNA

SEQ ID NO: 51719 - DNA, 80 bp, synthetic construct
  source 1..80: mol_type = other DNA
aaggagctcccagcagtcactaaagagaagacgtgaggaagaggcactaccacttggtggctatgagtgtggacccagga

SEQ ID NO: 51720 - DNA, 80 bp, synthetic construct
  source 1..80: mol_type = other DNA
tacatttaagacttaaaaatactgtctggcactatgtcctgctaatatgaagtcttcctcccccagaagcagacctggag

SEQ ID NO: 51721 - DNA, 80 bp, synthetic construct
  source 1..80: mol_type = other DNA
ggtgcagagttatcccatggtccagggtgagggagcccagtatttataccaatcagtcattggttgaaggccttaattct

SEQ ID NO: 51722 - DNA, 80 bp, synthetic construct; identical to SEQ ID NO: 13655
  source 1..80: mol_type = other DNA

SEQ ID NO: 51723 - DNA, 80 bp, synthetic construct
  source 1..80: mol_type = other DNA
ctgcaaggtgctgagctctccaggggagaataaggcatcctgagaggccatcagagcatcatttctgatttttaaactct

SEQ ID NO: 51724 - DNA, 80 bp, synthetic construct
  source 1..80: mol_type = other DNA
tctctactaaaaatacaaaaattagctgggcatggtagcacatgcctgtaatcccagctacttgggagtctgaggcagga

SEQ ID NO: 51725 - DNA, 80 bp, synthetic construct
  source 1..80: mol_type = other DNA
aaaatccaactctgactaggagatgaagtacagaattggggtattggttttttctctttggaattgtacccttggaagca

SEQ ID NO: 51726 - DNA, 80 bp, synthetic construct
  source 1..80: mol_type = other DNA
cggttacatttgctgggcttttgaatggtacaagaaatagagaagccaaggtcgccctcatctggtggggtctactgaaa

SEQ ID NO: 51727 - DNA, 80 bp, synthetic construct; identical to SEQ ID NO: 13656
  source 1..80: mol_type = other DNA

SEQ ID NO: 51728 - DNA, 80 bp, synthetic construct
  source 1..80: mol_type = other DNA
ccgctcactgcaagctccatctcccgggttcacgccattcgcctgcctcagcctcccgagtagctgggactacaggcgcc

SEQ ID NO: 51729 - DNA, 80 bp, synthetic construct
  source 1..80: mol_type = other DNA
gaggctcttatttatttattttttttgagatggagtctcgctctgtctcccaggctggagtgcagtagcgcgatctcagc

SEQ ID NO: 51730 - DNA, 80 bp, synthetic construct
  source 1..80: mol_type = other DNA
ccttgtgatccacccgcctcggcctcccaaagtgctgggattacaggcgtgaaccaccgcgcccggcctctgaggctctt

SEQ ID NO: 51731 - DNA, 80 bp, synthetic construct; identical to SEQ ID NO: 13657
  source 1..80: mol_type = other DNA

SEQ ID NO: 51732 - DNA, 80 bp, synthetic construct
  source 1..80: mol_type = other DNA
tctccttaagaacatactctgtgggcccagaaaacttgggagttttattacttaagcaggaagagagaatgaattctgcc

SEQ ID NO: 51733 - DNA, 80 bp, synthetic construct
  source 1..80: mol_type = other DNA
tctggtaaccaacaacctagaaatatttgttgccataggagggcttacaaaatatagccatcagtctctcctattctgat

SEQ ID NO: 51734 - DNA, 80 bp, synthetic construct
  source 1..80: mol_type = other DNA
ttgcagcttatgttttggattcctcagaagttgtcctgagactgccatgctatgagggctagggaggaaggacctgctgt

SEQ ID NO: 51735 - DNA, 80 bp, synthetic construct; identical to SEQ ID NO: 13658
  source 1..80: mol_type = other DNA

SEQ ID NO: 51736 - DNA, 80 bp, synthetic construct
  source 1..80: mol_type = other DNA
acaggcgtatgccaccacgcccagctaatttttgtatttttagtagagatggggtttcaccatgttggtcaggctggtct

SEQ ID NO: 51737 - DNA, 80 bp, synthetic construct
  source 1..80: mol_type = other DNA
agagcagggtgaagactacattgagcttccatcaggaagtgatacatatcacttgtactcacatcttattggctaaaaca

SEQ ID NO: 51738 - DNA, 80 bp, synthetic construct
  source 1..80: mol_type = other DNA
ccacctttacgatagtttatttctctcttgtaacaatctaagtggctgtgcagggctggtatgacatcaacactgtgtca

SEQ ID NO: 51739 - DNA, 80 bp, synthetic construct
  source 1..80: mol_type = other DNA
gcctttttattttagggacataacttggaaatgacatacataagttctactaacatcccattagccagaaccaagtcacc

SEQ ID NO: 51740 - DNA, 80 bp, synthetic construct; identical to SEQ ID NO: 13659
  source 1..80: mol_type = other DNA

SEQ ID NO: 51741 - DNA, 80 bp, synthetic construct
  source 1..80: mol_type = other DNA
ttagtagagacggggtttcaccatgttggccgggctggtctcaaattcctgacctcatgatccacccgcctcagcctccc

SEQ ID NO: 51742 - DNA, 80 bp, synthetic construct
  source 1..80: mol_type = other DNA
tcacttataaatcaaaagggtttttacgaacctaaatgatcacttcagagaggtttcatgttcatttttttattggtctt

SEQ ID NO: 51743 - DNA, 80 bp, synthetic construct
  source 1..80: mol_type = other DNA
tttaaaggcatatcccagcccccgcaaaagttttattcctttgagtaaccaaccccaaatgtatttactttgccagttgg

SEQ ID NO: 51744 - DNA, 80 bp, synthetic construct; identical to SEQ ID NO: 13660
  source 1..80: mol_type = other DNA

SEQ ID NO: 51745 - DNA, 80 bp, synthetic construct
  source 1..80: mol_type = other DNA
ctttagactattgactattcacacaagagcaaggtgcatgtgtgcacacacgagcccaaatatgtgtttgcctgcgtgtt

SEQ ID NO: 51746 - DNA, 80 bp, synthetic construct
  source 1..80: mol_type = other DNA
ttattatttccctaacagaagaccatcccccttgccactccctggtttttcttctctggcagcaatgaagcagctgctga

SEQ ID NO: 51747 - DNA, 80 bp, synthetic construct
  source 1..80: mol_type = other DNA
tgtgtgtgaggttggtgctcccagcttgaattcccatgtgtgaaacagtctcttttgctttccttttctcatctgtgtct

SEQ ID NO: 51748 - DNA, 80 bp, synthetic construct
  source 1..80: mol_type = other DNA
tgtacccatccccagcatcacggctgtgcaagagcagcggacagtggcagaccccaggagccacccggtctctgtctaag

SEQ ID NO: 51749 - DNA, 80 bp, synthetic construct; identical to SEQ ID NO: 13661
  source 1..80: mol_type = other DNA

SEQ ID NO: 51750 - DNA, 80 bp, synthetic construct
  source 1..80: mol_type = other DNA
agtggctatttatcaatcagttcgcttagactctgtgaaattggcaatattcaatcagttgccaaaaacagcaatttcac

SEQ ID NO: 51751 - DNA, 80 bp, synthetic construct
  source 1..80: mol_type = other DNA
gtctcctttgagaatggcatttataccccacggctggggtcctatcccgtgggtggcaatgtgagcttcgagtgtgagga

SEQ ID NO: 51752 - DNA, 80 bp, synthetic construct
  source 1..80: mol_type = other DNA
ggaagcctctgtggggataggagtctgttgttcagtgtgccataataatattcctggattttggtaaattgaggtctaca

SEQ ID NO: 51753 - DNA, 80 bp, synthetic construct; identical to SEQ ID NO: 13662
  source 1..80: mol_type = other DNA

SEQ ID NO: 51754 - DNA, 80 bp, synthetic construct
  source 1..80: mol_type = other DNA
cccatctgtaagacaaggatagtgagtgctgacctgagattgccatctggattaaatgagttgacattagtaagcatata

SEQ ID NO: 51755 - DNA, 80 bp, synthetic construct
  source 1..80: mol_type = other DNA
gcctgtaataccagctattcaggaggctgaggcaggagaatcatttgaaccaggaagtggagattgcagtgagccgagat

SEQ ID NO: 51756 - DNA, 80 bp, synthetic construct
  source 1..80: mol_type = other DNA
tggtcaacgtggtgaaacctcgtctatactaaaaatacaaaaattagctgggcgtggttaatcccagctactcaggaggc

SEQ ID NO: 51757 - DNA, 80 bp, synthetic construct; identical to SEQ ID NO: 13663
  source 1..80: mol_type = other DNA

SEQ ID NO: 51758 - DNA, 80 bp, synthetic construct
  source 1..80: mol_type = other DNA
ggtttctccatgttggccaggctggtctcaaactcctgacctcaggggattctgcccaccttggcctcccaaagtgctgg

SEQ ID NO: 51759 - DNA, 80 bp, synthetic construct
  source 1..80: mol_type = other DNA
ggccataagcacttttgtcatagttattgctgcccctgtgaatggtgaggggctctgcttggcagaagtagggctcctag

SEQ ID NO: 51760 - DNA, 80 bp, synthetic construct
  source 1..80: mol_type = other DNA
ggccatttattctgtaggagggtgaagtagatgcctggtaagactgtgataagtaatgcttgaattattagacgtgactc

SEQ ID NO: 51761 - DNA, 80 bp, synthetic construct; identical to SEQ ID NO: 13664
  source 1..80: mol_type = other DNA

SEQ ID NO: 51762 - DNA, 80 bp, synthetic construct
  source 1..80: mol_type = other DNA
ggccattaggagtaaagctctaggaacattctttttttttttttttttttaattgatcattcttgggtgtttctcacaga

SEQ ID NO: 51763 - DNA, 80 bp, synthetic construct
  source 1..80: mol_type = other DNA
agcatgctgccttcaagcatctgtttaacaaagcacatcttgcaccgctcttaatccattcaaccctgagtggatacagc

SEQ ID NO: 51764 - DNA, 80 bp, synthetic construct
  source 1..80: mol_type = other DNA
ctttcccccctttctattccacaaaaccgtcattgtcatcatggccccttctcaatgagctgttgggtacacctcccaga

SEQ ID NO: 51765 - DNA, 80 bp, synthetic construct
  source 1..80: mol_type = other DNA
cacctccctcccggacggggcggctggccgggcggggggctgacccccccacctccctcccggacagagtggctggccgg

SEQ ID NO: 51766 - DNA, 80 bp, synthetic construct; identical to SEQ ID NO: 13665
  source 1..80: mol_type = other DNA

SEQ ID NO: 51767 - DNA, 80 bp, synthetic construct
  source 1..80: mol_type = other DNA
tctcagacggggcggccgggcagagacgctcctcacatcccggatggggcggccgggcagaggtgctccccacatctcag

SEQ ID NO: 51768 - DNA, 80 bp, synthetic construct
  source 1..80: mol_type = other DNA
tgggtggccaggcggagacgctcctcacttcccagacggggtggcggccgggcagaggctgcaatctcggcactttggga

SEQ ID NO: 51769 - DNA, 80 bp, synthetic construct
  source 1..80: mol_type = other DNA
gagaccagcccggccaacacagcgaaaccccgtctccactaacaaaatacgaaaaccagtcaggcgtggcggcgcgcgcc

SEQ ID NO: 51770 - DNA, 80 bp, synthetic construct; identical to SEQ ID NO: 13666
  source 1..80: mol_type = other DNA

SEQ ID NO: 51771 - DNA, 80 bp, synthetic construct
  source 1..80: mol_type = other DNA
tacctgttgtttcagtgttagccgttttgatgggtgtgtagggatgcctcactgtggtttatgaaatataaatgttctct

SEQ ID NO: 51772 - DNA, 80 bp, synthetic construct
  source 1..80: mol_type = other DNA
gaggcagagcctgatgggagggggctactcacctctgccttcctttgttcactcgcagctggccactgccccaacccagg

SEQ ID NO: 51773 - DNA, 80 bp, synthetic construct
  source 1..80: mol_type = other DNA
ggtctggagtggaacggagcccatctgccgccgtgagtagctgccctgccctcctgagattcctcggcacacccggccac

SEQ ID NO: 51774 - DNA, 80 bp, synthetic construct
  source 1..80: mol_type = other DNA
ccagaagacaaagggtgagtgtttgaggtggggtttctggttgagcagggtgctggatctgggccggagcaagggaggat

SEQ ID NO: 51775 - DNA, 80 bp, synthetic construct; identical to SEQ ID NO: 13667
  source 1..80: mol_type = other DNA

SEQ ID NO: 51776 - DNA, 80 bp, synthetic construct
  source 1..80: mol_type = other DNA
atgtaggaatcatgaattcaatttatacaatcataatttttattccacaagcactgttgggacactgtgctggggctggg

SEQ ID NO: 51777 - DNA, 80 bp, synthetic construct
  source 1..80: mol_type = other DNA
aataatttccttttaaaacttcaacattttgtgcaggctttaaaatgtgtgtgatagactgggcatggtggctagtgcct

SEQ ID NO: 51778 - DNA, 80 bp, synthetic construct
  source 1..80: mol_type = other DNA
gcaggagaatcgcttggatccgggaggtggaggttgcagtgggctgagatcacgccattgcactccagcctgggcaacta

SEQ ID NO: 51779 - DNA, 80 bp, synthetic construct; identical to SEQ ID NO: 13668
  source 1..80: mol_type = other DNA

SEQ ID NO: 51780 - DNA, 80 bp, synthetic construct
  source 1..80: mol_type = other DNA
gtgaagagagtctgtcaaagagaaagatgttcaacaaaggtttcttccttagctgctgctgttccttatttttattatta

SEQ ID NO: 51781 - DNA, 80 bp, synthetic construct
  source 1..80: mol_type = other DNA
gctaatttttgtatttttagtagagatgggttttgccatgttggtcaggctggtctcgaactcctgacctcaggtgatcc

SEQ ID NO: 51782 - DNA, 80 bp, synthetic construct
  source 1..80: mol_type = other DNA
tcccctttggcttcagggccctttacgctgcctctcacttgccccgcacagatcttcagctttgagatcaatgtgagcgt

SEQ ID NO: 51783 - DNA, 80 bp, synthetic construct; identical to SEQ ID NO: 13669
  source 1..80: mol_type = other DNA

SEQ ID NO: 51784 - DNA, 80 bp, synthetic construct
  source 1..80: mol_type = other DNA
cccatgtcattagccacccatacaccatgtaaagtgcctggttggcacttagcaaatggctgaagccactcaaggttttg

SEQ ID NO: 51785 - DNA, 80 bp, synthetic construct
  source 1..80: mol_type = other DNA
ctgcctccagggttcaggcaattctcctgcctcagcttcccgagtagctgagatttcgggcacctgccaccatgcctggc

SEQ ID NO: 51786 - DNA, 80 bp, synthetic construct
  source 1..80: mol_type = other DNA
gaaaggcttttaaagtttgaacaagcaatgatgccacatctctatctgaatggcaaatgtctgagtttatcaaaacaatc

SEQ ID NO: 51787 - DNA, 80 bp, synthetic construct
  source 1..80: mol_type = other DNA
ggtggctggcacctgtaatcccagctacttgggagactgaggcatgagaatcacttgaactggggaggtggaggttgcag

SEQ ID NO: 51788 - DNA, 80 bp, synthetic construct; identical to SEQ ID NO: 13670
  source 1..80: mol_type = other DNA

SEQ ID NO: 51789 - DNA, 80 bp, synthetic construct
  source 1..80: mol_type = other DNA
ccactttgggccccagttttgtttttgtttttagagatggggccttgctatgttgcccagctgatctcaaactcctggct

SEQ ID NO: 51790 - DNA, 80 bp, synthetic construct
  source 1..80: mol_type = other DNA
taggagtttgagatcagactggctaacatggtgaaaccccgtctctactaaaaatacaaaaccattagctgggtgtggtg

SEQ ID NO: 51791 - DNA, 80 bp, synthetic construct
  source 1..80: mol_type = other DNA
agaattagtgttgatgatgatgaccgtaaccacaatgacagcaatgatgatcatgatggctgtcctcctttccttacaca

SEQ ID NO: 51792 - DNA, 80 bp, synthetic construct; identical to SEQ ID NO: 13671
  source 1..80: mol_type = other DNA

SEQ ID NO: 51793 - DNA, 80 bp, synthetic construct
  source 1..80: mol_type = other DNA
gtatacatacatatatatatatatatatttatttttttgagacagggtctcactctattgcccaggctggactacagtgg

SEQ ID NO: 51794 - DNA, 80 bp, synthetic construct
  source 1..80: mol_type = other DNA
tgcaatggcgcgatttcggctcaccgcaacctccgcctcccaggttcaagcgattctcctgcctcctgagtagctgggat

SEQ ID NO: 51795 - DNA, 80 bp, synthetic construct
  source 1..80: mol_type = other DNA
cacacctggctaattttttgtggttttagtagagacagggtttcaccatgttgcccaggctggtctggaactcctgagct

SEQ ID NO: 51796 - DNA, 80 bp, synthetic construct; identical to SEQ ID NO: 13672
  source 1..80: mol_type = other DNA

SEQ ID NO: 51797 - DNA, 80 bp, synthetic construct
  source 1..80: mol_type = other DNA
cagcatcttagctatggtccagagccacatggttttatttctgcgttgttctgtacaaaggcaactcatgttgaagagcc

SEQ ID NO: 51798 - DNA, 80 bp, synthetic construct
  source 1..80: mol_type = other DNA
ccatgaagtgcagtggtgcaatcatagcttactgcagcctcaaattcctggtttcaagtgatcccctcaactcagcttcc

SEQ ID NO: 51799 - DNA, 80 bp, synthetic construct
  source 1..80: mol_type = other DNA
cttcaaatgattctcctgcctcagcctccagagtagctgggattacaggtgtgtgccaccatgcccggctcatttttgca

SEQ ID NO: 51800 - DNA, 80 bp, synthetic construct; identical to SEQ ID NO: 13673
  source 1..80: mol_type = other DNA

SEQ ID NO: 51801 - DNA, 80 bp, synthetic construct
  source 1..80: mol_type = other DNA
atcatcatcatcatagcatctcatgtttcaggaaactttccaggaagaagggacctcgattccctctggggaatgtccct

SEQ ID NO: 51802 - DNA, 80 bp, synthetic construct
  source 1..80: mol_type = other DNA
tttggcagttgcagcctctaaaggaaaaattcctcaggttcagactaaacacaaattgcactgacctttgatcagaaagt

SEQ ID NO: 51803 - DNA, 80 bp, synthetic construct
  source 1..80: mol_type = other DNA
gaagacaaaatttaaagcccactcccttcctccttagcatcactggaccaaggtcaaatgctacaaaaacattttattga

SEQ ID NO: 51804 - DNA, 80 bp, synthetic construct
  source 1..80: mol_type = other DNA
cggggctctctgagaacaaaaatgggccacaaggggtgcaaaggctgggagaggagtagactctgtggtctgtctgaggg

SEQ ID NO: 51805 - DNA, 80 bp, synthetic construct; identical to SEQ ID NO: 13674
  source 1..80: mol_type = other DNA

SEQ ID NO: 51806 - DNA, 80 bp, synthetic construct
  source 1..80: mol_type = other DNA
tcgccttcttttctgtgtgtgcctctgtgtcattacatgctgttctcttatatagataggagacccactacctgtgtctt

SEQ ID NO: 51807 - DNA, 80 bp, synthetic construct
  source 1..80: mol_type = other DNA
gctgggattacaggcatgtgccaccatgcccggcaaatttttgtatttttagtagagacatggtctcgccatgttggcta

SEQ ID NO: 51808 - DNA, 80 bp, synthetic construct
  source 1..80: mol_type = other DNA
gcagtggtgcaatctcggctcactgcaacatccgcctcccggttcaagcgattctcctgcctcagcctcctgagtagctg

SEQ ID NO: 51809 - DNA, 80 bp, synthetic construct; identical to SEQ ID NO: 13675
  source 1..80: mol_type = other DNA

SEQ ID NO: 51810 - DNA, 80 bp, synthetic construct
  source 1..80: mol_type = other DNA
aaataaagtcacagatactggggattaggactcgaacacatctttctgggggacacaattccaccattacagggaataaa

SEQ ID NO: 51811 - DNA, 80 bp, synthetic construct
  source 1..80: mol_type = other DNA
aaagtggggatgaaagtttgtctggggcattgcagttttagacaggaagaccagggaaggcctcactgagaaggtgacat

SEQ ID NO: 51812 - DNA, 80 bp, synthetic construct
  source 1..80: mol_type = other DNA
aggaacttcaaagaggctgtgtgctgcaggagagtgaagggcagggagtggcaggaaatgaaggcagacaggtagcagtg

SEQ ID NO: 51813 - DNA, 80 bp, synthetic construct; identical to SEQ ID NO: 13676
  source 1..80: mol_type = other DNA

SEQ ID NO: 51814 - DNA, 80 bp, synthetic construct
  source 1..80: mol_type = other DNA
caagctcacagacaccatctgcggggtggggaacatgtcagcaaacgcctctgaccaggagaggacaccctggcatgtca

SEQ ID NO: 51815 - DNA, 80 bp, synthetic construct
  source 1..80: mol_type = other DNA
agcagctcattgcttccgcgatggcaacgaccactccctgtggagggtcaatgtgggtaaggcaggggatgcaccagcct

SEQ ID NO: 51816 - DNA, 80 bp, synthetic construct
  source 1..80: mol_type = other DNA
gtctttgccaaaaagaaccagggaatcctggagttctatggtgatgacatagctctgctgaagctggcccagaaagtaaa

SEQ ID NO: 51817 - DNA, 80 bp, synthetic construct; identical to SEQ ID NO: 13677
  source 1..80: mol_type = other DNA

SEQ ID NO: 51818 - DNA, 80 bp, synthetic construct
  source 1..80: mol_type = other DNA
gcaaactgaacattaaccttaagatgggagtggaggtgagggtctcaggttggggatgctgggatccccctgtgacagct

SEQ ID NO: 51819 - DNA, 80 bp, synthetic construct
  source 1..80: mol_type = other DNA
agtgcagtggcacgacctcagctcactgcaacttctgcctcctgggttcaagcgattctcctacttcagcctcccgagta

SEQ ID NO: 51820 - DNA, 80 bp, synthetic construct
  source 1..80: mol_type = other DNA
cacccacccgggtctgcttattctacccttctctctggttccacccctgctgcagtggacaagctgtgccgaggttgtct

SEQ ID NO: 51821 - DNA, 80 bp, synthetic construct; identical to SEQ ID NO: 13678
  source 1..80: mol_type = other DNA

SEQ ID NO: 51822 - DNA, 80 bp, synthetic construct
  source 1..80: mol_type = other DNA
ccagccagttctctccttttctccaggtgggtctggtgagctggggtctttacaacccctgccttggctctgctgacaaa

SEQ ID NO: 51823 - DNA, 80 bp, synthetic construct
  source 1..80: mol_type = other DNA
atctgccgcccctccatcttctacctctgaatggccacccttagaccctgtgatccatcctctctcctagctgagtaaat

SEQ ID NO: 51824 - DNA, 80 bp, synthetic construct
  source 1..80: mol_type = other DNA
tttcccagttatgaaattaataaaaatcaatggtttccacatctctcagtgcctctatctggaggccaggtagggctggc

SEQ ID NO: 51825 - DNA, 80 bp, synthetic construct; identical to SEQ ID NO: 13679
  source 1..80: mol_type = other DNA

SEQ ID NO: 51826 - DNA, 80 bp, synthetic construct
  source 1..80: mol_type = other DNA
aggtctaggtctggagtttcagcttggacactgagccaagcagacaagcaaagcaagccaggacacaccatcctgcccca

SEQ ID NO: 51827 - DNA, 80 bp, synthetic construct
  source 1..80: mol_type = other DNA
ttcatcagcctttctcttcaggtgtgaccaccactccatggtctttggcccggccccagggatcctgctctctggagggg

SEQ ID NO: 51828 - DNA, 80 bp, synthetic construct
  source 1..80: mol_type = other DNA
aggcagagtgcagaggtttgagggcaatgagtgtgggcagtggcctaaggcagaaacagggcaggcggcagcaaggtcag

SEQ ID NO: 51829 - DNA, 80 bp, synthetic construct; identical to SEQ ID NO: 13680
  source 1..80: mol_type = other DNA

SEQ ID NO: 51830 - DNA, 80 bp, synthetic construct
  source 1..80: mol_type = other DNA
aatgtgagtgatgagatctctttccactgctatgacggttacactctccggggctctgccaatcgcacctgccaagtgaa

SEQ ID NO: 51831 - DNA, 80 bp, synthetic construct
  source 1..80: mol_type = other DNA
cttcagtgcttacctcgatgtctcatacctctgcagcggggtactgctccaacccgggcatccccattggcacaaggaag

SEQ ID NO: 51832 - DNA, 80 bp, synthetic construct
  source 1..80: mol_type = other DNA
tcctggtcttccatcctactgtcttctctccccacctcaaccctgctctttcctcactttgtttaaacctccctgtacaa

SEQ ID NO: 51833 - DNA, 80 bp, synthetic construct; identical to SEQ ID NO: 13681
  source 1..80: mol_type = other DNA

SEQ ID NO: 51834 - DNA, 80 bp, synthetic construct
  source 1..80: mol_type = other DNA
aacatctacctggtgctagatggatcagacagcattggggccagcaacttcacaggagccaaaaagtgtctagtcaactt

SEQ ID NO: 51835 - DNA, 80 bp, synthetic construct
  source 1..80: mol_type = other DNA
caggtcctattctgtcctccttcccttttacttgaagcagtttcttgactggtaattcctccatgaacctcagcccttga

SEQ ID NO: 51836 - DNA, 80 bp, synthetic construct
  source 1..80: mol_type = other DNA
aaatttgggtcaaagtgtctgaagcagacagcagtaatgcagactgggtcacgaagcagctcaatgaaatcaattatgaa

SEQ ID NO: 51837 - DNA, 80 bp, synthetic construct; identical to SEQ ID NO: 13682
  source 1..80: mol_type = other DNA

SEQ ID NO: 51838 - DNA, 80 bp, synthetic construct
  source 1..80: mol_type = other DNA
aggcagtgtacagcatgatgagctggccagatgacgtccctcctgaaggctggaaccgcacccgccatgtcatcatcctc

SEQ ID NO: 51839 - DNA, 80 bp, synthetic construct
  source 1..80: mol_type = other DNA
catagctggctgttcatctctcctgtgacccttcataaggaattcttcctaagccctgtgatcaactatctctaaccctt

SEQ ID NO: 51840 - DNA, 80 bp, synthetic construct
  source 1..80: mol_type = other DNA
actgtcattgatgagatccgggacttgctatacattggcaaggatcgcaaaaacccaagggaggattatctgggtgagta

SEQ ID NO: 51841 - DNA, 80 bp, synthetic construct
  source 1..80: mol_type = other DNA
gtcaaggatatggaaaacctggaagatgttttctaccaaatgatcggtagggagatacaagggaataaagaacacaactc

SEQ ID NO: 51842 - DNA, 80 bp, synthetic construct; identical to SEQ ID NO: 13683
  source 1..80: mol_type = other DNA

SEQ ID NO: 51843 - DNA, 80 bp, synthetic construct
  source 1..80: mol_type = other DNA
ttttgggcctttgctccccatagactcctacccaaaaggctgctgccatttgggaatgaagtgttccgagttttcagcac

SEQ ID NO: 51844 - DNA, 80 bp, synthetic construct
  source 1..80: mol_type = other DNA
caaggtgaaatgggagtaggggaaggaaaaaatggccataagagatggtggtttgtgaaagttgagctttccctctctac

SEQ ID NO: 51845 - DNA, 80 bp, synthetic construct
  source 1..80: mol_type = other DNA
gcacctatgctctccaggcaacacctcccactttctacagatcctacactccacccatcctcaatgcagccccattcctt

SEQ ID NO: 51846 - DNA, 80 bp, synthetic construct; identical to SEQ ID NO: 13684
  source 1..80: mol_type = other DNA

SEQ ID NO: 51847 - DNA, 80 bp, synthetic construct
  source 1..80: mol_type = other DNA
ggcttcctccaactaccacttgccagcaacaaagtaagacatacttggcaagaggataaggatgagatcccaagagacaa

SEQ ID NO: 51848 - DNA, 80 bp, synthetic construct
  source 1..80: mol_type = other DNA
ctgctccctgcacaggatatcaaagctctgtttgtgtctgaggaggagaaaaagctgactcggaaggaggtctacatcaa

SEQ ID NO: 51849 - DNA, 80 bp, synthetic construct
  source 1..80: mol_type = other DNA
tgagagagatgctcaatatgccccaggctatgacaaagtcaaggacatctcagaggtggtcacccctcggttcctttgta

SEQ ID NO: 51850 - DNA, 80 bp, synthetic construct
  source 1..80: mol_type = other DNA
caggtgattctggcggccccttgatagttcacaagagaagtcgtttcattcaagtgagtcctccctttcctatctgggga

SEQ ID NO: 51851 - DNA, 80 bp, synthetic construct; identical to SEQ ID NO: 13685
  source 1..80: mol_type = other DNA

SEQ ID NO: 51852 - DNA, 80 bp, synthetic construct
  source 1..80: mol_type = other DNA
agactttcacatcaacctctttcaagtgctgccctggctgaaggagaaactccaagatgaggatttgggttttctataag

SEQ ID NO: 51853 - DNA, 80 bp, synthetic construct
  source 1..80: mol_type = other DNA
atcaaacctgacagccgtttttaaaggtttaaccccaatcccaagtgctgaaaaaccagaggctgagggagatgtgtaag

SEQ ID NO: 51854 - DNA, 80 bp, synthetic construct
  source 1..80: mol_type = other DNA
tggacagctagggagggaggagaggaacagttaaggtctaaaggagatcatagaacagaccctgaggctgactcctgacc

SEQ ID NO: 51855 - DNA, 80 bp, synthetic construct
  source 1..80: mol_type = other DNA
gtcattgttgagacacgtgaatgatattaacccactacttacagtcagtatgtcagaagctaaaaactagaaaacctctg

SEQ ID NO: 51856 - DNA, 80 bp, synthetic construct; identical to SEQ ID NO: 13686
  source 1..80: mol_type = other DNA

SEQ ID NO: 51857 - DNA, 80 bp, synthetic construct
  source 1..80: mol_type = other DNA
ctcccatcctgtgatctctgtgcctcaacactgctggctactccctctttctcaaagtgtgtgtccttttgcttcagtgg

SEQ ID NO: 51858 - DNA, 80 bp, synthetic construct
  source 1..80: mol_type = other DNA
aaactgagtcctgggtcgtttttttttctctgaaatcagagtctccctgatgatcctattgtttggcagccaccctgtga

SEQ ID NO: 51859 - DNA, 80 bp, synthetic construct
  source 1..80: mol_type = other DNA
tccctgttccagtcactgctttggaagctgttttcaatccttttctctcctttctttacctctaactgacagaggatctg

SEQ ID NO: 51860 - DNA, 80 bp, synthetic construct; identical to SEQ ID NO: 13687
  source 1..80: mol_type = other DNA

SEQ ID NO: 51861 - DNA, 80 bp, synthetic construct
  source 1..80: mol_type = other DNA
tttctgtgtgaatagggagaggctttctttatcaagaggaaccaacttcttcctggcatctagtattttgaggagaacac

SEQ ID NO: 51862 - DNA, 80 bp, synthetic construct
  source 1..80: mol_type = other DNA
aaacccagtgataataggcggctgcagggagggcagcttcttccctcaggtctcacaccccaggattctcccaggacttc

SEQ ID NO: 51863 - DNA, 80 bp, synthetic construct
  source 1..80: mol_type = other DNA
tgaatccgaccctttgggagcacaaatcatagtcacaagacatagaccatgccacatttcacttagtaggacccacataa

SEQ ID NO: 51864 - DNA, 80 bp, synthetic construct; identical to SEQ ID NO: 13688
  source 1..80: mol_type = other DNA

SEQ ID NO: 51865 - DNA, 80 bp, synthetic construct
  source 1..80: mol_type = other DNA
cgatcactagaagacacaaagctggggagatgcagactgaagatcaaaggggggttttaccttctcccctcagaccctgt

SEQ ID NO: 51866 - DNA, 80 bp, synthetic construct
  source 1..80: mol_type = other DNA
agaacagttaagatgatttccagttgctgacatgtggtccaaaatatatttgtctctcatattcctccatccccaacccc

SEQ ID NO: 51867 - DNA, 80 bp, synthetic construct
  source 1..80: mol_type = other DNA
gaggtgttcctcttccctcaccctcttctaggtttcctctgatcttttcttcccttttaattctacatacatttcttatt

SEQ ID NO: 51868 - DNA, 80 bp, synthetic construct; identical to SEQ ID NO: 13689
  source 1..80: mol_type = other DNA

SEQ ID NO: 51869 - DNA, 80 bp, synthetic construct
  source 1..80: mol_type = other DNA
cgcacctgccattgtggcttgttttgttttgtttttgagacagaatcttgctctgtcgtccaggctggagtgcagtggtg

SEQ ID NO: 51870 - DNA, 80 bp, synthetic construct
  source 1..80: mol_type = other DNA
acaatctcgactcactgcaagctccgcctcctgggttcaagcaattctcctgcctcagcctcccaagtagctgggactac

SEQ ID NO: 51871 - DNA, 80 bp, synthetic construct
  source 1..80: mol_type = other DNA
caccctgctgatttttgtatttttagtagagacggggttttaccatgttggccaggttggtcttaaactcctaatctcaa

SEQ ID NO: 51872 - DNA, 80 bp, synthetic construct; identical to SEQ ID NO: 13690
  source 1..80: mol_type = other DNA

SEQ ID NO: 51873 - DNA, 80 bp, synthetic construct
  source 1..80: mol_type = other DNA
gttcgagaacgcttgaagcctgagttcttggtctcagccttgatggcactgatggctcctgacttcaccagctgctttgc

SEQ ID NO: 51874 - DNA, 80 bp, synthetic construct
  source 1..80: mol_type = other DNA
ccaccttggctggttgtgctgctgctactttgcttcttcagagccagcaatgcctttttctgggaacaagggtgagaaga

SEQ ID NO: 51875 - DNA, 80 bp, synthetic construct
  source 1..80: mol_type = other DNA
aatctaaccaaaccacggaacccagaggttttccagagtgttacatttttgaagttgaagacaaataactcaatcatgga

SEQ ID NO: 51876 - DNA, 80 bp, synthetic construct; identical to SEQ ID NO: 13691
  source 1..80: mol_type = other DNA

SEQ ID NO: 51877 - DNA, 80 bp, synthetic construct
  source 1..80: mol_type = other DNA
tttgggaatgcatcttttggaagtagtgaatagttctactttactagacaaggctgccaaactaaggttttgaggctttt

SEQ ID NO: 51878 - DNA, 80 bp, synthetic construct
  source 1..80: mol_type = other DNA
aaagccctgctcgggggaatgcacagtgaagaataaacaggaaaaattacttcaaaagaagaaacaataagacttggcaa

SEQ ID NO: 51879 - DNA, 80 bp, synthetic construct
  source 1..80: mol_type = other DNA
aaaacaaacttggggatcatcagctcttaagcggtactaaaagccatgggaaaggaagacaatccatggcaaattgcata

SEQ ID NO: 51880 - DNA, 80 bp, synthetic construct; identical to SEQ ID NO: 13692
  source 1..80: mol_type = other DNA

SEQ ID NO: 51881 - DNA, 80 bp, synthetic construct
  source 1..80: mol_type = other DNA
gcctactcttgtctttggctttccctaccccttgcttaaaccaggctgctgtccaagctcccgctggtcgggatcatcca

SEQ ID NO: 51882 - DNA, 80 bp, synthetic construct
  source 1..80: mol_type = other DNA
cggtggagccagcgtagcgcccgcagagcaacgcaaagaggaagaacagagaaacggctatgagaaaaagggccgaagag

SEQ ID NO: 51883 - DNA, 80 bp, synthetic construct
  source 1..80: mol_type = other DNA
cttccaccggtccaggtctgcccctccgcagcgatagttcacgctctcggcggggctgtaccggaagttgcctctacttc

SEQ ID NO: 51884 - DNA, 80 bp, synthetic construct; identical to SEQ ID NO: 13693
  source 1..80: mol_type = other DNA

SEQ ID NO: 51885 - DNA, 80 bp, synthetic construct
  source 1..80: mol_type = other DNA
gcattgagtccaaacctccttcaccctcctcacagtaggatctagcttaaccttgttcatctgtgcctgtactcctgtcc

SEQ ID NO: 51886 - DNA, 80 bp, synthetic construct
  source 1..80: mol_type = other DNA
acttggtgactgagatgataggctttgagcctccaacctttcatccttaggtctgggacccctttttctaaaatcagtga

SEQ ID NO: 51887 - DNA, 80 bp, synthetic construct
  source 1..80: mol_type = other DNA
tctgccatttctgatctgaacacaagtcccatcatctcttttgtctgcattttatcctctttccttacctaatgcctctc

SEQ ID NO: 51888 - DNA, 80 bp, synthetic construct; identical to SEQ ID NO: 13694
  source 1..80: mol_type = other DNA

SEQ ID NO: 51889 - DNA, 80 bp, synthetic construct
  source 1..80: mol_type = other DNA
gtcatgagaaacagttggggagaaggggaggtggtcagagacaagctcagcctcattggggctctgatctcttgccttag

SEQ ID NO: 51890 - DNA, 80 bp, synthetic construct
  source 1..80: mol_type = other DNA
tcttgtggagatgggatggtagaagagggtgtctttaatctccagggaagggttccccacctatctcgtattaccctcat

SEQ ID NO: 51891 - DNA, 80 bp, synthetic construct
  source 1..80: mol_type = other DNA
actgggctactgctagccctcccatgtttttgagaaaattagaaaaagatattctgtccataacaacctttactgtcatc

SEQ ID NO: 51892 - DNA, 80 bp, synthetic construct
  source 1..80: mol_type = other DNA
atttgttcaccagtgtgcagtgacctgatttcatgtccctatcctacagatcttcttactattccacctggtttcaagaa

SEQ ID NO: 51893 - DNA, 80 bp, synthetic construct; identical to SEQ ID NO: 13695
  source 1..80: mol_type = other DNA

SEQ ID NO: 51894 - DNA, 80 bp, synthetic construct
  source 1..80: mol_type = other DNA
gacatcttttgggaggagtgctaattgagagccctctggttgtatctttatcactgctacccctgactcttccaggaagc

SEQ ID NO: 51895 - DNA, 80 bp, synthetic construct
  source 1..80: mol_type = other DNA
tttctgggtcacactcccagccgaccccttgtctcctctattggccagaggtcagatccatcccaggccagtcttggtac

SEQ ID NO: 51896 - DNA, 80 bp, synthetic construct
  source 1..80: mol_type = other DNA
acttggaacggcatgactctgtctttgtcgcagctcacacatctgcaggaaaaacagttgtggctgaatatgccattgcc

SEQ ID NO: 51897 - DNA, 80 bp, synthetic construct; identical to SEQ ID NO: 13696
  source 1..80: mol_type = other DNA

SEQ ID NO: 51898 - DNA, 80 bp, synthetic construct
  source 1..80: mol_type = other DNA
gccatgagtctgcggagggactggctaacttcatgctctcttcccagcaccatctacacttcgcccatcaaggccctgag

SEQ ID NO: 51899 - DNA, 80 bp, synthetic construct
  source 1..80: mol_type = other DNA
gatggacactcaatacaggggagttttggctgggaagatgtggccgttgtggagagtgtgctgtctgaggagggggtgga

SEQ ID NO: 51900 - DNA, 80 bp, synthetic construct
  source 1..80: mol_type = other DNA
cctctcctttgggaccagttgagcgtctcccttattccacacactcagggccccttactgctttctttacccccatatgg

SEQ ID NO: 51901 - DNA, 80 bp, synthetic construct; identical to SEQ ID NO: 13697
  source 1..80: mol_type = other DNA

SEQ ID NO: 51902 - DNA, 80 bp, synthetic construct
  source 1..80: mol_type = other DNA
tgggatgagatgttgggggatagccttccattctgggtctcagaaaagactgggtaaagttggaggggtagggaaggggg

SEQ ID NO: 51903 - DNA, 80 bp, synthetic construct
  source 1..80: mol_type = other DNA
ggagctctttttgttgctggactcccgaggagccttccatacaaaagggtaagcctcgagatgggggaaagagttagggc

SEQ ID NO: 51904 - DNA, 80 bp, synthetic construct
  source 1..80: mol_type = other DNA
ttgtacctgccagcacctgtttttcctcctatcttttttttccccttgtcccccaggggttttgacttgagctttgagca

SEQ ID NO: 51905 - DNA, 80 bp, synthetic construct; identical to SEQ ID NO: 13698
  source 1..80: mol_type = other DNA

SEQ ID NO: 51906 - DNA, 80 bp, synthetic construct
  source 1..80: mol_type = other DNA
gtcctgcacatgtcagagctcctgaatcgcggcctgggtgtgcaccatagcggcatcctgcccatcctcaaggagatcgt

SEQ ID NO: 51907 - DNA, 80 bp, synthetic construct
  source 1..80: mol_type = other DNA
tacctgggtttgaatcccaggtacaccatgtattcacagtatcatcctggaccaattatttaaccttcctgaactttagg

SEQ ID NO: 51908 - DNA, 80 bp, synthetic construct
  source 1..80: mol_type = other DNA
tcacaagatacgactttacagctattagactggtaaaatttaggaaactagttcatgccgagtgttgccagagatatagg

SEQ ID NO: 51909 - DNA, 80 bp, synthetic construct
  source 1..80: mol_type = other DNA
gatcgagaccatcctggccaacatggtgaaaccctgtctctactaaaaatacaaaaattagctgggcatggtggcaggtg

SEQ ID NO: 51910 - DNA, 80 bp, synthetic construct; identical to SEQ ID NO: 13699
  source 1..80: mol_type = other DNA

SEQ ID NO: 51911 - DNA, 80 bp, synthetic construct
  source 1..80: mol_type = other DNA
gtgggttagatgtggccacaggaacatggacagatgttgaaacactaggtggagaaaaagaagcaaaaaaaaatcagata

SEQ ID NO: 51912 - DNA, 80 bp, synthetic construct
  source 1..80: mol_type = other DNA
agtagctacataagtaaaatgaggaaaacaataatacctgccctatagatttgcctggagagttcagtgagatcccataa

SEQ ID NO: 51913 - DNA, 80 bp, synthetic construct
  source 1..80: mol_type = other DNA
gccacagagacctttgccatgggagtaaacatgcctgctcgtacagtagtgtttgactccatgcgcaaacacgatggctc

SEQ ID NO: 51914 - DNA, 80 bp, synthetic construct; identical to SEQ ID NO: 13700
  source 1..80: mol_type = other DNA

SEQ ID NO: 51915 - DNA, 80 bp, synthetic construct
  source 1..80: mol_type = other DNA
ttttttttatgctttgtagagatgaggttttgctatgttgcacaggttggtcttgaacttctgggctcaagcagtctgtc

SEQ ID NO: 51916 - DNA, 80 bp, synthetic construct
  source 1..80: mol_type = other DNA
agctagatggggcctttgagtccatttatttcagtttgctcccttatgttacagaagaggtgagcaagtggtttgtccaa

SEQ ID NO: 51917 - DNA, 80 bp, synthetic construct
  source 1..80: mol_type = other DNA
ctatgatcctcaacttgctgcgagtggatgccctcagggtggaggacatgatgaagaggagcttctctgagtttccctcc

SEQ ID NO: 51918 - DNA, 80 bp, synthetic construct; identical to SEQ ID NO: 13701
  source 1..80: mol_type = other DNA

SEQ ID NO: 51919 - DNA, 80 bp, synthetic construct
  source 1..80: mol_type = other DNA
gtgagtgctgaggaggtgataggagaagggaagagaagatcgtgttactctaggtgctactaaacttagtccaagtgtct

SEQ ID NO: 51920 - DNA, 80 bp, synthetic construct
  source 1..80: mol_type = other DNA
acaacgcattgggagtgatcctacaggtgagggtgatgggaatttggactccagagggtgggagggagcaagccctctct

SEQ ID NO: 51921 - DNA, 80 bp, synthetic construct
  source 1..80: mol_type = other DNA
cctctctactggtgagctctgcatggttgcttcctgattcctgcccaagggtgggtatctggtctctgcctttgatgtct

SEQ ID NO: 51922 - DNA, 80 bp, synthetic construct
  source 1..80: mol_type = other DNA
ctcgtgggattcaagctgttcctgcctgaaggtgagagtgtggcagatgtctgttttctgccagcagtataagcaggatg

SEQ ID NO: 51923 - DNA, 80 bp, synthetic construct; identical to SEQ ID NO: 13702
  source 1..80: mol_type = other DNA

SEQ ID NO: 51924 - DNA, 80 bp, synthetic construct
  source 1..80: mol_type = other DNA
ggcttctgggggagagaagatcttaccccagatcttaagatctgctccctcttcaggaaggatcctccccttgcagccgt

SEQ ID NO: 51925 - DNA, 80 bp, synthetic construct
  source 1..80: mol_type = other DNA
gtacacagcccccgttttcctgcccaggtaggaccctgggtggtaactcccaagctgggagtaggggcttttcctctgtg

SEQ ID NO: 51926 - DNA, 80 bp, synthetic construct
  source 1..80: mol_type = other DNA
gatcagtcattgctgctgcttcctgagtaccatcagcgagtagaggtgggtggggcagtggttggggcaggggggctagg

SEQ ID NO: 51927 - DNA, 80 bp, synthetic construct; identical to SEQ ID NO: 13703
  source 1..80: mol_type = other DNA

SEQ ID NO: 51928 - DNA, 80 bp, synthetic construct
  source 1..80: mol_type = other DNA
tgtcctggagcaggaaggcaggccttaacctctccttctttcctgcagggaatagaacgtgtccgggctgtggccaagcg

SEQ ID NO: 51929 - DNA, 80 bp, synthetic construct
  source 1..80: mol_type = other DNA
cccaggctgagtgcatccagtcctcaccctactttccccacagcccttctccgagttggcagggctctcagggacccctg

SEQ ID NO: 51930 - DNA, 80 bp, synthetic construct
  source 1..80: mol_type = other DNA
gtgaatgccccatgtaaaaacatgatgataaaacagcaaagcactgttgtgtgcttgagttgctggacagggatgactca

SEQ ID NO: 51931 - DNA, 80 bp, synthetic construct; identical to SEQ ID NO: 13704
  source 1..80: mol_type = other DNA

SEQ ID NO: 51932 - DNA, 80 bp, synthetic construct
  source 1..80: mol_type = other DNA
gtcacggtcattctggagcaggcagaggaggaggcagaagatgggcagtgggggtggtgggaggagagaaggcaggctgt

SEQ ID NO: 51933 - DNA, 80 bp, synthetic construct
  source 1..80: mol_type = other DNA
ggacccctgggaggaatgactgagcccaccatttcaggagcttgtgtctgacaggaaaagcaagggatcagtgggacccc

SEQ ID NO: 51934 - DNA, 80 bp, synthetic construct
  source 1..80: mol_type = other DNA
gttgggggctgtgtggatggggcttgggggtctgtgcagtctacctcccctgagaagagcagagggtggcttcccaggcg

SEQ ID NO: 51935 - DNA, 80 bp, synthetic construct; identical to SEQ ID NO: 13705
  source 1..80: mol_type = other DNA

SEQ ID NO: 51936 - DNA, 80 bp, synthetic construct
  source 1..80: mol_type = other DNA
gaggcaggagttacaggctgaaggtctgacacaagcattagtgagatgctcccctcgaagaatagtcttgtttcttctaa

SEQ ID NO: 51937 - DNA, 80 bp, synthetic construct
  source 1..80: mol_type = other DNA
cggggctggtatcgatccgggtatccgtctctgaggtcaaagttggggcctggaccgttagtggggggtgggctatagta

SEQ ID NO: 51938 - DNA, 80 bp, synthetic construct
  source 1..80: mol_type = other DNA
acctctgtcttctcagctcctctcttggtccccctgggatccatgaggtcctaagacaagcaggggtacagagtttccat

SEQ ID NO: 51939 - DNA, 80 bp, synthetic construct; identical to SEQ ID NO: 13706
  source 1..80: mol_type = other DNA

SEQ ID NO: 51940 - DNA, 80 bp, synthetic construct
  source 1..80: mol_type = other DNA
ccaccggcgcccctccacgccgccaacgagtccccgggcgtgcgtgcccttggagggagccaatccgcggccggcgtggg

SEQ ID NO: 51941 - DNA, 80 bp, synthetic construct
  source 1..80: mol_type = other DNA
attttcaggttctcttccctccattcctaccccttccccggtaccataaaatcccgggatatgagctggaagaggcatca

SEQ ID NO: 51942 - DNA, 80 bp, synthetic construct
  source 1..80: mol_type = other DNA
agccgagagttttgttagaaccgcgtccccgccccagttccctgtccgtgagccgatttatctgcccagggtcggcgcgc

SEQ ID NO: 51943 - DNA, 80 bp, synthetic construct; identical to SEQ ID NO: 13707
  source 1..80: mol_type = other DNA

SEQ ID NO: 51944 - DNA, 80 bp, synthetic construct
  source 1..80: mol_type = other DNA
catgacaggccttgtacatcagtgttgtttccatcttacactgaggcgatgggctggtagagaatatcatagagagaggg

SEQ ID NO: 51945 - DNA, 80 bp, synthetic construct
  source 1..80: mol_type = other DNA
cgtggctggtggtattaggagcacatttagttgttggactacagataatgtgtttaattttatacaagttgagttgatgg

SEQ ID NO: 51946 - DNA, 80 bp, synthetic construct
  source 1..80: mol_type = other DNA
ctgtgatgtggtgagatccagtaggaagagtgggtagaggagtgatttctaacctttttgtaatctttagaaggtgataa

SEQ ID NO: 51947 - DNA, 80 bp, synthetic construct
  source 1..80: mol_type = other DNA
ttagagtggaagttaatagggtcaaatccacaatgctgggaaacaccatcatttaaggcagtgttactgaatatatgagc

SEQ ID NO: 51948 - DNA, 80 bp, synthetic construct; identical to SEQ ID NO: 13708
  source 1..80: mol_type = other DNA

SEQ ID NO: 51949 - DNA, 80 bp, synthetic construct
  source 1..80: mol_type = other DNA
catctctacaaaaaatacaaaaattagccaggcgtggtggtacgcgcctatagagctactggggaggctgaggtgggagg

SEQ ID NO: 51950 - DNA, 80 bp, synthetic construct
  source 1..80: mol_type = other DNA
gtagttggcagtattagaacctgtgattcaagacagtggtctaagaagagggaagaggtaaagtaaaatataaactgaaa

SEQ ID NO: 51951 - DNA, 80 bp, synthetic construct
  source 1..80: mol_type = other DNA
ttaaaacacaaaaattcttagctgggcatggtggtgtgcacctattgttctagctgtttgggaagttgaggcagaaggag

SEQ ID NO: 51952 - DNA, 80 bp, synthetic construct; identical to SEQ ID NO: 13709
  source 1..80: mol_type = other DNA

SEQ ID NO: 51953 - DNA, 80 bp, synthetic construct
  source 1..80: mol_type = other DNA
ctagccactccctaggtcaaactatagaatatgaccagtatcccacatatatccctctctgatcaaaatgtctctgatca

SEQ ID NO: 51954 - DNA, 80 bp, synthetic construct
  source 1..80: mol_type = other DNA
ctgcctcactgtcctgattagctgagactacaggcacgcgccaccatgcccagctaattttggtatttttagtagagatg

SEQ ID NO: 51955 - DNA, 80 bp, synthetic construct; identical to SEQ ID NO: 13710
  source 1..80: mol_type = other DNA

SEQ ID NO: 51956 - DNA, 80 bp, synthetic construct
  source 1..80: mol_type = other DNA
aaccaccattgtcatcgtggcccgttctcaatgagctgttgggcacacctcccagatggggtggtggccgggcagagggg

SEQ ID NO: 51957 - DNA, 80 bp, synthetic construct
  source 1..80: mol_type = other DNA
ggcgcccctcacctcccggacgaggcggctggccgggcggggggggctgaccccaccacctccctcccagacggggcggc

SEQ ID NO: 51958 - DNA, 80 bp, synthetic construct
  source 1..80: mol_type = other DNA
cccggacggggtggctggccgggcagggggctgacccccccacctccctcctggagggggcggctgccgggcggagatgc

SEQ ID NO: 51959 - DNA, 80 bp, synthetic construct
  source 1..80: mol_type = other DNA
catctcagacgatgagcggccgggcagagacgctcctcacttcctagatgggatggcggccgggcagagacactcctcac

SEQ ID NO: 51960 - DNA, 80 bp, synthetic construct; identical to SEQ ID NO: 13711
  source 1..80: mol_type = other DNA

SEQ ID NO: 51961 - DNA, 80 bp, synthetic construct
  source 1..80: mol_type = other DNA
cgcgcgcctgcaatcgcaggcactcggcaggctgaggcaggagagtcaggcagggaggttgcagtgagctgagatggcag

SEQ ID NO: 51962 - DNA, 80 bp, synthetic construct
  source 1..80: mol_type = other DNA
agttacttttgaaaatgttctgggcagatttgcctagattaataaatgccctccatgttccaattacttttttttttttg

SEQ ID NO: 51963 - DNA, 80 bp, synthetic construct
  source 1..80: mol_type = other DNA
tttttttttgagacggagtctcgctctgtcacccaggctggagttcagtggcatgatcttggcttactgcaagctctgcc

SEQ ID NO: 51964 - DNA, 80 bp, synthetic construct; identical to SEQ ID NO: 13712
  source 1..80: mol_type = other DNA

SEQ ID NO: 51965 - DNA, 80 bp, synthetic construct
  source 1..80: mol_type = other DNA
cacccaggctggagcgcagtggcatgatctcggctcacagcaactttctgggttcaagcagttctcctgtgtcagcctcc

SEQ ID NO: 51966 - DNA, 80 bp, synthetic construct
  source 1..80: mol_type = other DNA
gccatctcgcccggcctacttagatgttatattagtggtaattcctgttatcctgtgagctctttagtgtctaaacaatt

SEQ ID NO: 51967 - DNA, 80 bp, synthetic construct
  source 1..80: mol_type = other DNA
gatgtggcgggtgggggggtctcactgtgttgcccagactggtctcgaactcctgtcctcaattgatcctgctacctcag

SEQ ID NO: 51968 - DNA, 80 bp, synthetic construct; identical to SEQ ID NO: 13713
  source 1..80: mol_type = other DNA

SEQ ID NO: 51969 - DNA, 80 bp, synthetic construct
  source 1..80: mol_type = other DNA
gaaaatgcccccatattggcaaacaaaatctccctgcctgagagcgcccagagtatagcagagcatcttaccctgatacg

SEQ ID NO: 51970 - DNA, 80 bp, synthetic construct
  source 1..80: mol_type = other DNA
gagggcacaggttgggggagacagggaacttgggaaacagaaataaaaacaaaagaaagaatttccctgcccccacatcc

SEQ ID NO: 51971 - DNA, 80 bp, synthetic construct
  source 1..80: mol_type = other DNA
aagaggaggaggaagaagaagggtatgagaggtggaaggatctgagcaagaggtaagacaggaagagaaatgctgtcctg

SEQ ID NO: 51972 - DNA, 80 bp, synthetic construct; identical to SEQ ID NO: 13714
  source 1..80: mol_type = other DNA

SEQ ID NO: 51973 - DNA, 80 bp, synthetic construct
  source 1..80: mol_type = other DNA
aagagccctgaaatagaattcagttcttggtggcttatcaaaagcacacaggggcctggcaggaagtgtaaaagcttgat

SEQ ID NO: 51974 - DNA, 80 bp, synthetic construct
  source 1..80: mol_type = other DNA
tctaattttgagaggctgtatctggctcaggcctcctactttgtaacccatggaatatgtgaaagcatttgaaaaactat

SEQ ID NO: 51975 - DNA, 80 bp, synthetic construct
  source 1..80: mol_type = other DNA
cgaatgtgtgtcaggacatgtggtcagggaagagaagctatttaactgaaccagtaatagtagcaggaaaagaaaaagtg

SEQ ID NO: 51976 - DNA, 80 bp, synthetic construct
  source 1..80: mol_type = other DNA
cccgtgtttctggagacttgtgtaaacattaatggatgaggaggagagatggttctcagagcccagccctcatctctgct

SEQ ID NO: 51977 - DNA, 80 bp, synthetic construct; identical to SEQ ID NO: 13715
  source 1..80: mol_type = other DNA

SEQ ID NO: 51978 - DNA, 80 bp, synthetic construct
  source 1..80: mol_type = other DNA
tggagcaatgacccaaagtgggatttcctcccagctcatgcttagtttcctagtgaaggccagtggctctcattcttctc

SEQ ID NO: 51979 - DNA, 80 bp, synthetic construct
  source 1..80: mol_type = other DNA
cgcctgccagagacatgaagattctgctcatcattgctcagctcctcagagtgggccgggaggggactagaagagctgca

SEQ ID NO: 51980 - DNA, 80 bp, synthetic construct
  source 1..80: mol_type = other DNA
tggaaccagaaatggtgccaaggctgtggctgttccctttcgtgtaaaatggtgctgttattactctgtcttgaaatagg

SEQ ID NO: 51981 - DNA, 80 bp, synthetic construct
  source 1..80: mol_type = other DNA
tacctctgcctgtgatattttctggatgtcctttatttactgtgacgtgtgtttgggtgccttgtttaggggtagaggtg

SEQ ID NO: 51982 - DNA, 80 bp, synthetic construct; identical to SEQ ID NO: 13716
  source 1..80: mol_type = other DNA

SEQ ID NO: 51983 - DNA, 80 bp, synthetic construct
  source 1..80: mol_type = other DNA
tggacacccaggtgtccggggtgcccccacaactctgggcctgaggccagttgcacttcttggctgtcacgtggtttccc

SEQ ID NO: 51984 - DNA, 80 bp, synthetic construct
  source 1..80: mol_type = other DNA
cttatctctgcagaagcccaggtcctggaggcgggatgctgggtgcttggattggggcagggctggcatcgggacccgat

SEQ ID NO: 51985 - DNA, 80 bp, synthetic construct
  source 1..80: mol_type = other DNA
agtgaaaggatcagtgttcctgagaaacccatctcgtaataatgtcccctgctccccaaaggtggacttcacccttagct

SEQ ID NO: 51986 - DNA, 80 bp, synthetic construct; identical to SEQ ID NO: 13717
  source 1..80: mol_type = other DNA

SEQ ID NO: 51987 - DNA, 80 bp, synthetic construct
  source 1..80: mol_type = other DNA
acctctttttgcagacggaccagcccatttacaaccctggccagcggggtgagtctcagccccagggcctcaacctttaa

SEQ ID NO: 51988 - DNA, 80 bp, synthetic construct
  source 1..80: mol_type = other DNA
tcctcctccactcccagttcggtaccgggtctttgctctggatcagaagatgcgcccgagcactgacaccatcacagtca

SEQ ID NO: 51989 - DNA, 80 bp, synthetic construct
  source 1..80: mol_type = other DNA
cccagacatctcagagtgagcgctcccaatgtgggggctgcccccaagctacaccaccccaattcctgttaggctctcca

SEQ ID NO: 51990 - DNA, 80 bp, synthetic construct; identical to SEQ ID NO: 13718
  source 1..80: mol_type = other DNA

SEQ ID NO: 51991 - DNA, 80 bp, synthetic construct
  source 1..80: mol_type = other DNA
ggtcagtccttcccaactttgaggtgaagatcacccctggaaagccctacatcctgacggtgccaggccatcttgatgaa

SEQ ID NO: 51992 - DNA, 80 bp, synthetic construct
  source 1..80: mol_type = other DNA
ggtacatctatgggaagccagtgcagggggtggcatatgtgcgctttgggctcctagatgaggatggtaagaagactttc

SEQ ID NO: 51993 - DNA, 80 bp, synthetic construct
  source 1..80: mol_type = other DNA
gcagagttccaggacgccctggagaagctgaatatgggcattactgacctccaggggctgcgcctctacgttgctgcagc

SEQ ID NO: 51994 - DNA, 80 bp, synthetic construct; identical to SEQ ID NO: 13719
  source 1..80: mol_type = other DNA

SEQ ID NO: 51995 - DNA, 80 bp, synthetic construct
  source 1..80: mol_type = other DNA
cagggggccaattgcaaaatggaggctgcaaaaggctcagagctctggtctccacactattttttgagtacagtcactca

SEQ ID NO: 51996 - DNA, 80 bp, synthetic construct
  source 1..80: mol_type = other DNA
ttatcggagagtagctggtggaagtgggcttagctagaagactgcatgtctgtccaatgcttcaaaggagggtctttctc

SEQ ID NO: 51997 - DNA, 80 bp, synthetic construct
  source 1..80: mol_type = other DNA
tttcccaacatgcccccctccctttttttttttttaaccgctattgctattatggcttatttgtggtgtttggtctgttt

SEQ ID NO: 51998 - DNA, 80 bp, synthetic construct; identical to SEQ ID NO: 13720
  source 1..80: mol_type = other DNA

SEQ ID NO: 51999 - DNA, 80 bp, synthetic construct
  source 1..80: mol_type = other DNA
aagtttattgtacgatcttccatttaaataacagtctgtctaagatcatttgtttgatttgtcaattgttggtctatttg

SEQ ID NO: 52000 - DNA, 80 bp, synthetic construct
  source 1..80: mol_type = other DNA
tttggtaaacacttttttttaaaacatttttgtgacaatatgaatggaaggagaggctttctaaggtctattgagggaaa

SEQ ID NO: 52001 - DNA, 80 bp, synthetic construct
  source 1..80: mol_type = other DNA
gaatgtcaatatttttgaccattaacataaaaggagggttgacacaactctgaatgggcactgttttgttggaagaaaac

SEQ ID NO: 52002 - DNA, 80 bp, synthetic construct
  source 1..80: mol_type = other DNA
ttggattaattattttgggatgtgggccagctgtactaaaattggtccaaattatgggaaaatgagcacgtttttcagtg

SEQ ID NO: 52003 - DNA, 80 bp, synthetic construct; identical to SEQ ID NO: 13721
  source 1..80: mol_type = other DNA

SEQ ID NO: 52004 - DNA, 80 bp, synthetic construct
  source 1..80: mol_type = other DNA
gaattttaactagtcaatgttgtcggtagccttttaggcaaccgatagttggccttatgtaaagaggggggaactgataa

SEQ ID NO: 52005 - DNA, 80 bp, synthetic construct
  source 1..80: mol_type = other DNA
ccaataggtataattttgggctgttgtagccacaggtttgttaggcgaggaggtcactgtttttattttggctttgtatt

SEQ ID NO: 52006 - DNA, 80 bp, synthetic construct
  source 1..80: mol_type = other DNA
ccccactgggggtatgttaatttattctagctaagcagttatgttattagaagctgagaagggggtgtttgttaaagtaa

SEQ ID NO: 52007 - DNA, 80 bp, synthetic construct; identical to SEQ ID NO: 13722
  source 1..80: mol_type = other DNA

SEQ ID NO: 52008 - DNA, 80 bp, synthetic construct
  source 1..80: mol_type = other DNA
tgtttagtttatagaaaactggatgatatctttttaactttagtaaatacgtttacacacggaattttttacaattatca

SEQ ID NO: 52009 - DNA, 80 bp, synthetic construct
  source 1..80: mol_type = other DNA
atttttttacttttttgtatttttttgatttttgtcttagtcttttttttacttttatttttttaaatgtgtaataatta

SEQ ID NO: 52010 - DNA, 80 bp, synthetic construct
  source 1..80: mol_type = other DNA
tgggataatttgtttagccagcctctgtgtaagttgaaattatttagataagtttctccaattttggtggaataatcgat

SEQ ID NO: 52011 - DNA, 80 bp, synthetic construct; identical to SEQ ID NO: 13723
  source 1..80: mol_type = other DNA

SEQ ID NO: 52012 - DNA, 80 bp, synthetic construct
  source 1..80: mol_type = other DNA
cagtaaaaacagctatggctccttccaaaggggcatcacaagtaatttttggaagaacctatgtagttaattttaagaat

SEQ ID NO: 52013 - DNA, 80 bp, synthetic construct
  source 1..80: mol_type = other DNA
atgagcctgtccaattagaattgccatctgatttaagtatactgtaagtgcttttatggtattatgtggcaaaaaggacc

SEQ ID NO: 52014 - DNA, 80 bp, synthetic construct
  source 1..80: mol_type = other DNA
attttgttttcaattactgataactctttcatggcctcgggtgttagttctctgttactgcgtaagttggtatttcccct

SEQ ID NO: 52015 - DNA, 80 bp, synthetic construct
  source 1..80: mol_type = other DNA
ttgaaccttttgaggcttaatggctctatcctgtacttgtattttcaaatactgaaaaggagtggttgtttgaattttgt

SEQ ID NO: 52016 - DNA, 80 bp, synthetic construct; identical to SEQ ID NO: 13724
  source 1..80: mol_type = other DNA

SEQ ID NO: 52017 - DNA, 80 bp, synthetic construct
  source 1..80: mol_type = other DNA
atcggttgaattacagcgttgacgccatctaccggactttttcttaattacaaatactggggaattccaaggagagaaag

SEQ ID NO: 52018 - DNA, 80 bp, synthetic construct
  source 1..80: mol_type = other DNA
ctccttcactgtaataactgtagggtgaacctgaattgccccatctccataatgaactgtgggtcgggcaataatgggca

SEQ ID NO: 52019 - DNA, 80 bp, synthetic construct
  source 1..80: mol_type = other DNA
gactggggagattggcataaatcatcttcagactctcctttttgttagtactcggtagaggtggttcagagttctgatta

SEQ ID NO: 52020 - DNA, 80 bp, synthetic construct
  source 1..80: mol_type = other DNA
tatgctcttttaaggtcctttccaactccttcttaatgttttaatttcaaagtttcctgttttgggaaccaagggcaaaa

SEQ ID NO: 52021 - DNA, 80 bp, synthetic construct; identical to SEQ ID NO: 13725
  source 1..80: mol_type = other DNA

SEQ ID NO: 52022 - DNA, 80 bp, synthetic construct
  source 1..80: mol_type = other DNA
gcaaaaggctcagagctctggtctccacactatttattgagtacaataacttagatctaagaagcagatgttcagggcaa

SEQ ID NO: 52023 - DNA, 80 bp, synthetic construct
  source 1..80: mol_type = other DNA
ttcaaaggagggtctttctccttgaatacagtgtttacagataagagagagcaggtctcgctctgagcatggcaattagg

SEQ ID NO: 52024 - DNA, 80 bp, synthetic construct
  source 1..80: mol_type = other DNA
tcaagccactccccacttgtcctcctgtccctctcttcttgggctctgtcccccacctctctctgtcctttgtcttgcag

SEQ ID NO: 52025 - DNA, 80 bp, synthetic construct; identical to SEQ ID NO: 13726
  source 1..80: mol_type = other DNA

SEQ ID NO: 52026 - DNA, 80 bp, synthetic construct
  source 1..80: mol_type = other DNA
actcctcggacccctgggagatggtgggggaaggggaggagggtgagctggggtcccaaggatccatggcctgacttggg

SEQ ID NO: 52027 - DNA, 80 bp, synthetic construct
  source 1..80: mol_type = other DNA
gacctcctcgtgttggggacactctgaacctgaacttgcgagccgtgggcagtggggccaccttttctcattactactac

SEQ ID NO: 52028 - DNA, 80 bp, synthetic construct
  source 1..80: mol_type = other DNA
tcatgaatcgagagcccaagaggaccctgacctcggtctcggtgtttgtggaccatcacctggcaccctccttctacttt

SEQ ID NO: 52029 - DNA, 80 bp, synthetic construct; identical to SEQ ID NO: 13727
  source 1..80: mol_type = other DNA

SEQ ID NO: 52030 - DNA, 80 bp, synthetic construct
  source 1..80: mol_type = other DNA
agcaagtcccacaagcccctcaacatgggcaaggtttgtccagaccctctccacagctctctcacccctccatggctcat

SEQ ID NO: 52031 - DNA, 80 bp, synthetic construct
  source 1..80: mol_type = other DNA
ccctcagccacacttggctcctagcattcctgcctttcttgcaggtctttgaagctatgaacagctatgacctcggctgt

SEQ ID NO: 52032 - DNA, 80 bp, synthetic construct
  source 1..80: mol_type = other DNA
gctggaagagtccgggcaggaagggctgggcaggggaaggggaggaggggaggaggccgagtgcctgacggctggactgc

SEQ ID NO: 52033 - DNA, 80 bp, synthetic construct; identical to SEQ ID NO: 13728
  source 1..80: mol_type = other DNA

SEQ ID NO: 52034 - DNA, 80 bp, synthetic construct
  source 1..80: mol_type = other DNA
gtgacacgtctgcccatgatgcgttcctgcgagcagcgggcagcccgcgtgcagcagccggactgccgggagcccttcct

SEQ ID NO: 52035 - DNA, 80 bp, synthetic construct
  source 1..80: mol_type = other DNA
agccctggagatcctgcaggaggaggacctgattgatgaggatgacattcccgtgcgcagcttcttcccagagaactggc

SEQ ID NO: 52036 - DNA, 80 bp, synthetic construct
  source 1..80: mol_type = other DNA
ggagatccatggcctgagcctgtccaaaaccaaaggtgatgtcaccctgtctgggcctcaggtgaccctgcttccatttc

SEQ ID NO: 52037 - DNA, 80 bp, synthetic construct; identical to SEQ ID NO: 13729
  source 1..80: mol_type = other DNA

SEQ ID NO: 52038 - DNA, 80 bp, synthetic construct
  source 1..80: mol_type = other DNA
gcccagtgaggggtggggaggctaaccgggccaggactctggccatcctcgttttcctgccctcaggtgagcgtccacgt

SEQ ID NO: 52039 - DNA, 80 bp, synthetic construct
  source 1..80: mol_type = other DNA
gtgggagatgcggtgtccaaggttctgcagattgaggtgaatggagcacccctgaatataagtccccgggcccccagctt

SEQ ID NO: 52040 - DNA, 80 bp, synthetic construct
  source 1..80: mol_type = other DNA
agtcctgtgtgacctcacaaccatgttttccctgagacagaaggaaggggccatccatagagaggagctggtctatgaac

SEQ ID NO: 52041 - DNA, 80 bp, synthetic construct; identical to SEQ ID NO: 13730
  source 1..80: mol_type = other DNA

SEQ ID NO: 52042 - DNA, 80 bp, synthetic construct
  source 1..80: mol_type = other DNA
aggctctgagggggccttgtcaccaggaggcgtggcctccctcttgaggcttcctcgaggctgtggggagcaaaccatga

SEQ ID NO: 52043 - DNA, 80 bp, synthetic construct
  source 1..80: mol_type = other DNA
aagatggacagcccaggaggctacagagggaaagaaagggggcccctgatgaggatggggagcatggccttgggctcaaa

SEQ ID NO: 52044 - DNA, 80 bp, synthetic construct
  source 1..80: mol_type = other DNA
tcagggctggggcaggggtgggacagagctggtatgatgggagggtggataaccaggcacctgggggcgtgggcataatg

SEQ ID NO: 52045 - DNA, 80 bp, synthetic construct; identical to SEQ ID NO: 13731
  source 1..80: mol_type = other DNA

SEQ ID NO: 52046 - DNA, 80 bp, synthetic construct
  source 1..80: mol_type = other DNA
aagcagagagtggtaagttcagtggcgtttctgccctctgctggcccccagctctctccctttttcctcaggaacccagg

SEQ ID NO: 52047 - DNA, 80 bp, synthetic construct
  source 1..80: mol_type = other DNA
ctcggtgttgcccacaacaacctcatggcaatggcccaggagactggaggtgaggggtgaggcgctcctggcagtgagcc

SEQ ID NO: 52048 - DNA, 80 bp, synthetic construct
  source 1..80: mol_type = other DNA
gccttcctgtttactcgtggtctcccttcactttcagataacctgtactggggctcagtcactggttctcagagcaatgc

SEQ ID NO: 52049 - DNA, 80 bp, synthetic construct; identical to SEQ ID NO: 13732
  source 1..80: mol_type = other DNA

SEQ ID NO: 52050 - DNA, 80 bp, synthetic construct
  source 1..80: mol_type = other DNA
gaacaaccgccagattcgcggcctggaggaggagctgcaggtgaaccactccctggtgaaccactccctcgcctgggtag

SEQ ID NO: 52051 - DNA, 80 bp, synthetic construct
  source 1..80: mol_type = other DNA
tacacagagttcaccctacagggtcgttagaaggctgaagtgagataattcatgtgctggtataaactttgtggaaatgt

SEQ ID NO: 52052 - DNA, 80 bp, synthetic construct
  source 1..80: mol_type = other DNA
aggaaccctgaaggtgagggccagggaaggggtggggccaggcactggtggaggagagggtgtggagtgagaggcctgtg

SEQ ID NO: 52053 - DNA, 80 bp, synthetic construct; identical to SEQ ID NO: 13733
  source 1..80: mol_type = other DNA

SEQ ID NO: 52054 - DNA, 80 bp, synthetic construct
  source 1..80: mol_type = other DNA
cttggtgctgcatcctagattctgtgctgagacggccttctccctacctggaacttctctctacctcctgtctcccctgt

SEQ ID NO: 52055 - DNA, 80 bp, synthetic construct
  source 1..80: mol_type = other DNA
ctttcctgtccttccctgcttcttggcccacaggacaagctctttcttctccttcaagccttggccagaagcctttcctg

SEQ ID NO: 52056 - DNA, 80 bp, synthetic construct
  source 1..80: mol_type = other DNA
gcctcaaatcctgtagcccagggagatgcccttaggtatggcaccagagaggtctgtggcctcacatgtcccacgtcctc

SEQ ID NO: 52057 - DNA, 80 bp, synthetic construct; identical to SEQ ID NO: 13734
  source 1..80: mol_type = other DNA

SEQ ID NO: 52058 - DNA, 80 bp, synthetic construct
  source 1..80: mol_type = other DNA
gtgggcgccgggagctgccctgggccaggggagggagggcaggacccaggctggggctgggcttctggagcccgcgcagg

SEQ ID NO: 52059 - DNA, 80 bp, synthetic construct
  source 1..80: mol_type = other DNA
caggtactgagccctgtcatgtgcagggcctgtgaccaactccccttttccacagctgacctccctctctgaccgttacg

SEQ ID NO: 52060 - DNA, 80 bp, synthetic construct
  source 1..80: mol_type = other DNA
tctcaggagacagctgtgtcagcggctggtgctcttgagaacttgtgatgtcatcagagagaaggacaagaatgtgagcc

SEQ ID NO: 52061 - DNA, 80 bp, synthetic construct; identical to SEQ ID NO: 13735
  source 1..80: mol_type = other DNA

SEQ ID NO: 52062 - DNA, 80 bp, synthetic construct
  source 1..80: mol_type = other DNA
gccaccatgcccggccttcaaaaaaagttttggaacatttactgtaacctctgggagaaaatgtgagaaaggtgtggtgg

SEQ ID NO: 52063 - DNA, 80 bp, synthetic construct
  source 1..80: mol_type = other DNA
gcagcctagctcaggagggacactggcacggcaccgtgtggactgggcccgcgtgggcacgaggaggggtcaggcctggg

SEQ ID NO: 52064 - DNA, 80 bp, synthetic construct
  source 1..80: mol_type = other DNA
atcctaatgcaaggatggagctgcaagttcagtttgggaatcatcagcctggattggtttggtggaagccagggagtggt

SEQ ID NO: 52065 - DNA, 80 bp, synthetic construct; identical to SEQ ID NO: 13736
  source 1..80: mol_type = other DNA

SEQ ID NO: 52066 - DNA, 80 bp, synthetic construct
  source 1..80: mol_type = other DNA
gcgtgggctttgaggctgtgcaggaagtgccggtggggctggtgcagccggccagcgcaaccctgtacgactactacaac

SEQ ID NO: 52067 - DNA, 80 bp, synthetic construct
  source 1..80: mol_type = other DNA
gttctccagagcgcagatgttctgtgttttacggggcaccaagtaagagcagactcttggccaccttgtgttctgctgaa

SEQ ID NO: 52068 - DNA, 80 bp, synthetic construct
  source 1..80: mol_type = other DNA
tacaggatgaagtttgcctgctactacccccgtgtggagtacggtcagtcttcccaccgaggccctggcctgaccctccc

SEQ ID NO: 52069 - DNA, 80 bp, synthetic construct; identical to SEQ ID NO: 13737
  source 1..80: mol_type = other DNA

SEQ ID NO: 52070 - DNA, 80 bp, synthetic construct
  source 1..80: mol_type = other DNA
gaatgagaggatctacacagagtccccagcctgggctcaccctgcaccttctcttcccctctgaccacttttgcgcacgt

SEQ ID NO: 52071 - DNA, 80 bp, synthetic construct
  source 1..80: mol_type = other DNA
cctcagtctcttgtcctccccatgcctcgccacctaggccttgcccctcagaagccagatgcctgtgctctccgtttcca

SEQ ID NO: 52072 - DNA, 80 bp, synthetic construct
  source 1..80: mol_type = other DNA
agtatggcactcaggggtgccaggtgtgagggctgccctcccacctccgctgggaggaacctgaacctgggaaccatgaa

SEQ ID NO: 52073 - DNA, 80 bp, synthetic construct; identical to SEQ ID NO: 13738
  source 1..80: mol_type = other DNA

SEQ ID NO: 52074 - DNA, 80 bp, synthetic construct
  source 1..80: mol_type = other DNA
tgtcgccagtcaccacggcctcagacagggcttgtgctcagctgacacctgtgacacagctcttctgcctcatgagctgt

SEQ ID NO: 52075 - DNA, 80 bp, synthetic construct
  source 1..80: mol_type = other DNA
cagtgtcttcttccagttactggtttcaaacaagccaaaagtctgactttggtgtgtttgtgaatcctctgaggaagccg

SEQ ID NO: 52076 - DNA, 80 bp, synthetic construct
  source 1..80: mol_type = other DNA
cattcgacagaaattcgggaatctttcacttcatgccatgccctgtgccaggtgccagagatacagctgctcactccagg

SEQ ID NO: 52077 - DNA, 80 bp, synthetic construct; identical to SEQ ID NO: 13739
  source 1..80: mol_type = other DNA

SEQ ID NO: 52078 - DNA, 80 bp, synthetic construct
  source 1..80: mol_type = other DNA
ttatcccacgtaactttgagaagtttgggcctttcccactgtggcagaggtttcctgaggctcttgcatacatggcccta

SEQ ID NO: 52079 - DNA, 80 bp, synthetic construct
  source 1..80: mol_type = other DNA
aagaaggcagtagctgtcattgcccaaccccagaaatcccaatcctgttttctccctctcagtcctgatcatggattcag

SEQ ID NO: 52080 - DNA, 80 bp, synthetic construct
  source 1..80: mol_type = other DNA
cctctgacctctcaggtaccatccaggaggccctggcctctcactgaacccggccactcctctttggcatggcctcttcc

SEQ ID NO: 52081 - DNA, 80 bp, synthetic construct; identical to SEQ ID NO: 13740
  source 1..80: mol_type = other DNA

SEQ ID NO: 52082 - DNA, 80 bp, synthetic construct
  source 1..80: mol_type = other DNA
ctttctaagaccagtggggtcccctcctctgcttctttttcctgagttctgtgaaattccccaatccttactttttgtct

SEQ ID NO: 52083 - DNA, 80 bp, synthetic construct
  source 1..80: mol_type = other DNA
caatacccgtgttgcatatagagcatggctgtgaagagttgagtgagtgcccacaaagcacttagagcagtgtctggtac

SEQ ID NO: 52084 - DNA, 80 bp, synthetic construct
  source 1..80: mol_type = other DNA
actaacaaacaaacccacacaaatcacattttgttcttcaggcgattcaggaaggcctattaggcagggactgccatttt

SEQ ID NO: 52085 - DNA, 80 bp, synthetic construct
  source 1..80: mol_type = other DNA
tggatgcaggaaaaaggtcagggttgcatttcccttccttgcttctcgatgggtgattaattttttttgaaatacggacg

SEQ ID NO: 52086 - DNA, 80 bp, synthetic construct; identical to SEQ ID NO: 13741
  source 1..80: mol_type = other DNA

SEQ ID NO: 52087 - DNA, 80 bp, synthetic construct
  source 1..80: mol_type = other DNA
ctccaccttgggctgcaaggtgagaggctgatctcgctctggccctcaccataggagggggcggaggtgacggagagggt

SEQ ID NO: 52088 - DNA, 80 bp, synthetic construct
  source 1..80: mol_type = other DNA
aattttttttttgttagagatggggtcttgctatgttgcccaggctggtcttgaattcctggtctcaagtgatcctccca

SEQ ID NO: 52089 - DNA, 80 bp, synthetic construct
  source 1..80: mol_type = other DNA
agctcctcctgcagacaagctggtgtctaagaactacccggacctgtcgttggtctctgctctggaaagcccacaagaag

SEQ ID NO: 52090 - DNA, 80 bp, synthetic construct; identical to SEQ ID NO: 13742
  source 1..80: mol_type = other DNA

SEQ ID NO: 52091 - DNA, 80 bp, synthetic construct
  source 1..80: mol_type = other DNA
attacaaatgtatccaggaggtgttaaaaacctggagccactggtccatccaaattgtggacgtgattccctttctcagg

SEQ ID NO: 52092 - DNA, 80 bp, synthetic construct
  source 1..80: mol_type = other DNA
tccggaggctgaagcaggccatagagaagagggaccacaacgaggagaagcagctgaggcagcacaaggtggggactgtg

SEQ ID NO: 52093 - DNA, 80 bp, synthetic construct
  source 1..80: mol_type = other DNA
agcctggtggcaggccagtggagggacatgatggactacatgctccaaggggtggcgcagccgagcatggaagagggctc

SEQ ID NO: 52094 - DNA, 80 bp, synthetic construct; identical to SEQ ID NO: 13743
  source 1..80: mol_type = other DNA

SEQ ID NO: 52095 - DNA, 80 bp, synthetic construct
  source 1..80: mol_type = other DNA
ccctggtgcctccagctcccgggtcccctacaaggaccgtgcacggctgcccttgctcaatgccaccatcgccgaggtgc

SEQ ID NO: 52096 - DNA, 80 bp, synthetic construct
  source 1..80: mol_type = other DNA
cctgagggcacagtcatcattccgaacctccaaggcgcccacctggatgagacggtctgggagaggccacatgagttctg

SEQ ID NO: 52097 - DNA, 80 bp, synthetic construct
  source 1..80: mol_type = other DNA
cgtgtgcctgggcgagccgctggcgcgcctggagctcttcgtggtgctgacccgactgctgcaggccttcacgctgctgc

SEQ ID NO: 52098 - DNA, 80 bp, synthetic construct; identical to SEQ ID NO: 13744
  source 1..80: mol_type = other DNA

SEQ ID NO: 52099 - DNA, 80 bp, synthetic construct
  source 1..80: mol_type = other DNA
ggcaccgagaactcgaagcccttccagtggtaccagctcactccctgggaaaggggttgtcaagagagagtcaaagccgg

SEQ ID NO: 52100 - DNA, 80 bp, synthetic construct
  source 1..80: mol_type = other DNA
aggctggcatgattgttccatttcacccagccgctcagtcccttgcctgttacactgtggggctgaaacctaggcaggcc

SEQ ID NO: 52101 - DNA, 80 bp, synthetic construct
  source 1..80: mol_type = other DNA
gatcacgggcagagaagacactgccgctgtggtagctcatggagtcccctgggcagggtggaggaaggagccatgagggc

SEQ ID NO: 52102 - DNA, 80 bp, synthetic construct; identical to SEQ ID NO: 13745
  source 1..80: mol_type = other DNA

SEQ ID NO: 52103 - DNA, 80 bp, synthetic construct
  source 1..80: mol_type = other DNA
gaagcaagtgggggcaccatcagcctctggctcccggggcaacagccccttgccctgcacagacccctgggcttcccaat

SEQ ID NO: 52104 - DNA, 80 bp, synthetic construct
  source 1..80: mol_type = other DNA
cctgggagaggagagcaggggccagtccttttccaagccttaggccctggctgcccacccagcccccggccccgggcccg

SEQ ID NO: 52105 - DNA, 80 bp, synthetic construct
  source 1..80: mol_type = other DNA
agggggggtcaggggagagggaggtggagaccctccgggagggccagaggcagcacctcctggaatcacccagggagggg

SEQ ID NO: 52106 - DNA, 80 bp, synthetic construct; identical to SEQ ID NO: 13746
  source 1..80: mol_type = other DNA

SEQ ID NO: 52107 - DNA, 80 bp, synthetic construct
  source 1..80: mol_type = other DNA
tgtagagaggggcatcaaggcctgccccctccatcctcggccagagtccagcctcccccctgcaatccccaccctgaaca

SEQ ID NO: 52108 - DNA, 80 bp, synthetic construct
  source 1..80: mol_type = other DNA
ggggaggggctcagaagggtccccgcggctctctctactccgtgcctccccagactccactggcctcccgtccgcaatcg

SEQ ID NO: 52109 - DNA, 80 bp, synthetic construct
  source 1..80: mol_type = other DNA
aaccccagggcggctggagggtgggcagagtgcaggggggagaggaaatgcgaggcgatgagcacatggcaaaggcacca

SEQ ID NO: 52110 - DNA, 80 bp, synthetic construct; identical to SEQ ID NO: 13747
  source 1..80: mol_type = other DNA

SEQ ID NO: 52111 - DNA, 80 bp, synthetic construct
  source 1..80: mol_type = other DNA
ctggatgctgtcggccttgtggggtcctcgcagcccatacagtgtcaggctgtacagagtcccggaacgcaggtcccgga

SEQ ID NO: 52112 - DNA, 80 bp, synthetic construct
  source 1..80: mol_type = other DNA
cacgtcagtcacagacagctgggacaggcggggccttgactcctctgaggtctgaccagcaggagccagccctgcacgga

SEQ ID NO: 52113 - DNA, 80 bp, synthetic construct
  source 1..80: mol_type = other DNA
agcccatccatcctctctccctggtacccgcctcacgctctttccctgcgaccaccccttctgagcccccgtttctccct

SEQ ID NO: 52114 - DNA, 80 bp, synthetic construct; identical to SEQ ID NO: 13748
  source 1..80: mol_type = other DNA

SEQ ID NO: 52115 - DNA, 80 bp, synthetic construct
  source 1..80: mol_type = other DNA
cgccatggggtgctccatttttatcttccaggcttggcccaaggctgaggtgggaagtttataggtccaggcccagtcag

SEQ ID NO: 52116 - DNA, 80 bp, synthetic construct
  source 1..80: mol_type = other DNA
gagtgtggtgctcccttctgagagaagctgagggtggaactggctggttgaggtgactggcaaatcccaccagccgtgcc

SEQ ID NO: 52117 - DNA, 80 bp, synthetic construct
  source 1..80: mol_type = other DNA
tgccactatctggacaaggccacccttcggggaggcgacagcagccccagcgagtaatgaggagcagcggcagtgacggg

SEQ ID NO: 52118 - DNA, 80 bp, synthetic construct; identical to SEQ ID NO: 13749
  source 1..80: mol_type = other DNA

SEQ ID NO: 52119 - DNA, 80 bp, synthetic construct
  source 1..80: mol_type = other DNA
cctgtcgtggtgcggcttggcctcacctaccatgtgcacgacctcattggggcccagctagtggactggtgagtctttcc

SEQ ID NO: 52120 - DNA, 80 bp, synthetic construct
  source 1..80: mol_type = other DNA
ccaagttctaagttctcctcacagcttgagcctaggcgtctggctccagccttgtctttctcctgcacagcatctctacc

SEQ ID NO: 52121 - DNA, 80 bp, synthetic construct
  source 1..80: mol_type = other DNA
tcgtgtgtgcaaaaggtcagatgtgactgctgctgtttgcctggtttctgacccagtggtggggtttgagcaatgcttct

SEQ ID NO: 52122 - DNA, 80 bp, synthetic construct; identical to SEQ ID NO: 13750
  source 1..80: mol_type = other DNA

SEQ ID NO: 52123 - DNA, 80 bp, synthetic construct
  source 1..80: mol_type = other DNA
ctagtatagttcaatttgtgttggaatgaaagtaagagacaagtgtcttagaagcctgtcattgttttgtgagggccttt

SEQ ID NO: 52124 - DNA, 80 bp, synthetic construct
  source 1..80: mol_type = other DNA
aagattcagagtttcccatggacacccaggtgtccggggtgcccccacaactctgggcctgaggccagttgcacttcttg

SEQ ID NO: 52125 - DNA, 80 bp, synthetic construct
  source 1..80: mol_type = other DNA
ggcatccagcttcttcaccttatctctgcagaagcccaggtcctggaggcgggatgctgggtgcttggattggggcaggg

SEQ ID NO: 52126 - DNA, 80 bp, synthetic construct; identical to SEQ ID NO: 13751
  source 1..80: mol_type = other DNA

SEQ ID NO: 52127 - DNA, 80 bp, synthetic construct
  source 1..80: mol_type = other DNA
accctggcattctccttccacgtttctcccttggtctctgtcctttttggtcagctgtctcttgctctgtgacccgctcc

SEQ ID NO: 52128 - DNA, 80 bp, synthetic construct
  source 1..80: mol_type = other DNA
tctcctctcgccgggggcacctctttttgcagacggaccagcccatttacaaccctggccagcggggtgagtctcagccc

SEQ ID NO: 52129 - DNA, 80 bp, synthetic construct
  source 1..80: mol_type = other DNA
gacccctgctcacctctctcctcctccactcccagttcggtaccgggtctttgctctggatcagaagatgcgcccgagca

SEQ ID NO: 52130 - DNA, 80 bp, synthetic construct; identical to SEQ ID NO: 13752
  source 1..80: mol_type = other DNA

SEQ ID NO: 52131 - DNA, 80 bp, synthetic construct
  source 1..80: mol_type = other DNA
tccattctcaggccagggacctggaagatctcagcccgattctcagatggcctggaatccaacagcagcacccagtttga

SEQ ID NO: 52132 - DNA, 80 bp, synthetic construct
  source 1..80: mol_type = other DNA
gcctatcccttcaccctgggtcagtccttcccaactttgaggtgaagatcacccctggaaagccctacatcctgacggtg

SEQ ID NO: 52133 - DNA, 80 bp, synthetic construct
  source 1..80: mol_type = other DNA
cttctctctgccacgacaggtacatctatgggaagccagtgcagggggtggcatatgtgcgctttgggctcctagatgag

SEQ ID NO: 52134 - DNA, 80 bp, synthetic construct; identical to SEQ ID NO: 13753
  source 1..80: mol_type = other DNA

SEQ ID NO: 52135 - DNA, 80 bp, synthetic construct
  source 1..80: mol_type = other DNA
cacttctcacatctcatctcagactcaaaaccaggaaacacccaggagacctggtttctctccaactctgtctctgtgac

SEQ ID NO: 52136 - DNA, 80 bp, synthetic construct
  source 1..80: mol_type = other DNA
tccattggtgacacaggaatgagaagagacaggttaagagttcataaagagtgggggccagggggccaattgcaaaatgg

SEQ ID NO: 52137 - DNA, 80 bp, synthetic construct
  source 1..80: mol_type = other DNA
aaacagcatgtctttaaattatcggagagtagctggtggaagtgggcttagctagaagactgcatgtctgtccaatgctt

SEQ ID NO: 52138 - DNA, 80 bp, synthetic construct; identical to SEQ ID NO: 13754
  source 1..80: mol_type = other DNA

SEQ ID NO: 52139 - DNA, 80 bp, synthetic construct
  source 1..80: mol_type = other DNA
atgagaatgtcagtctcaggcaggagggttaaatgagcctgagatgctttaaaaacctgtttttttaaaatttggttata

SEQ ID NO: 52140 - DNA, 80 bp, synthetic construct
  source 1..80: mol_type = other DNA
tttaaataacagtctgtctaagatcatttgtttgatttgtcaattgttggtctatttgggtctgagaattccacaatttt

SEQ ID NO: 52141 - DNA, 80 bp, synthetic construct
  source 1..80: mol_type = other DNA
aacatttttgtgacaatatgaatggaaggagaggctttctaaggtctattgagggaaaccagtatccaaactcctttctt

SEQ ID NO: 52142 - DNA, 80 bp, synthetic construct; identical to SEQ ID NO: 13755
  source 1..80: mol_type = other DNA

SEQ ID NO: 52143 - DNA, 80 bp, synthetic construct
  source 1..80: mol_type = other DNA
tgggccagctgtactaaaattggtccaaattatgggaaaatgagcacgtttttcagtgtaagtagtgttacctttttgat

SEQ ID NO: 52144 - DNA, 80 bp, synthetic construct
  source 1..80: mol_type = other DNA
taaattatttgaccattgttaaggttgttggcacctcttttttgggggcttaaactgttaattgaattgaactctgtgaa

SEQ ID NO: 52145 - DNA, 80 bp, synthetic construct
  source 1..80: mol_type = other DNA
agaggggggaactgataacctatggacacatttattaacttttttttttttcctttgggtgagagggcccatgagtattt

SEQ ID NO: 52146 - DNA, 80 bp, synthetic construct
  source 1..80: mol_type = other DNA
gttgtagccacaggtttgttaggcgaggaggtcactgtttttattttggctttgtattctaggattagtaaataacagaa

SEQ ID NO: 52147 - DNA, 80 bp, synthetic construct; identical to SEQ ID NO: 13756
  source 1..80: mol_type = other DNA

SEQ ID NO: 52148 - DNA, 80 bp, synthetic construct
  source 1..80: mol_type = other DNA
taattttttatcctttgatgaggatgtagtctttaggctggtactggaaattttaggagtggcgtctgtgttaagagact

SEQ ID NO: 52149 - DNA, 80 bp, synthetic construct
  source 1..80: mol_type = other DNA
taaaacaaaattaaacaaccttttttgtataaattttttataactttttttatgacttttacagacaatttttaacatgt

SEQ ID NO: 52150 - DNA, 80 bp, synthetic construct
  source 1..80: mol_type = other DNA
tgtatgtacatattttagtttttaaaatttagggatgtgtttaacatctgtttgccagaactgactaggttccaattctt

SEQ ID NO: 52151 - DNA, 80 bp, synthetic construct; identical to SEQ ID NO: 13757
  source 1..80: mol_type = other DNA

SEQ ID NO: 52152 - DNA, 80 bp, synthetic construct
  source 1..80: mol_type = other DNA
gtgattggattatgtggtctccaccagactgttgctttttcatgtttaccagacccaccagtaaaaacagctatggctcc

SEQ ID NO: 52153 - DNA, 80 bp, synthetic construct
  source 1..80: mol_type = other DNA
atttattggaactataatttttattgggctcagtgccacaaaatttaataattcatatatgagcctgtccaattagaatt

SEQ ID NO: 52154 - DNA, 80 bp, synthetic construct
  source 1..80: mol_type = other DNA
ctgacctgggcttgctgaattttgttttcaattactgataactctttcatggcctcgggtgttagttctctgttactgcg

SEQ ID NO: 52155 - DNA, 80 bp, synthetic construct; identical to SEQ ID NO: 13758
  source 1..80: mol_type = other DNA

SEQ ID NO: 52156 - DNA, 80 bp, synthetic construct
  source 1..80: mol_type = other DNA
aaactgtgggactatttaacataccctggggcaaaactttccaatgatatttggctgcaggttttttgttattaacggca

SEQ ID NO: 52157 - DNA, 80 bp, synthetic construct
  source 1..80: mol_type = other DNA
ccaggttgtaaggctcccatcggttgaattacagcgttgacgccatctaccggactttttcttaattacaaatactgggg

SEQ ID NO: 52158 - DNA, 80 bp, synthetic construct
  source 1..80: mol_type = other DNA
ccattttaagggaaattgctccttcactgtaataactgtagggtgaacctgaattgccccatctccataatgaactgtgg

SEQ ID NO: 52159 - DNA, 80 bp, synthetic construct
  source 1..80: mol_type = other DNA
catcttcagactctcctttttgttagtactcggtagaggtggttcagagttctgattatcaaactcctctctctcctcct

SEQ ID NO: 52160 - DNA, 80 bp, synthetic construct; identical to SEQ ID NO: 13759
  source 1..80: mol_type = other DNA

SEQ ID NO: 52161 - DNA, 80 bp, synthetic construct
  source 1..80: mol_type = other DNA
cttgagcgtttcctcaccagattcttttgggccccacgttgggcgccagaatgttggggaccagcctcaacaccacctgt

SEQ ID NO: 52162 - DNA, 80 bp, synthetic construct
  source 1..80: mol_type = other DNA
agcagatgttcagggcaaaacagtgaaagggtagcagtgcgtcacaggcataatctacagcagaagcgctttaaatgaat

SEQ ID NO: 52163 - DNA, 80 bp, synthetic construct
  source 1..80: mol_type = other DNA
ctgagcatggcaattaggaggcttttctcctcagaggcctcttgtggctttccacaacttattgtcccatatttttatgg

SEQ ID NO: 52164 - DNA, 80 bp, synthetic construct; identical to SEQ ID NO: 13760
  source 1..80: mol_type = other DNA

SEQ ID NO: 52165 - DNA, 80 bp, synthetic construct
  source 1..80: mol_type = other DNA
tccgtgagatgtcaggctccccagcttctggcattcctgtcaaagtttctgccacggtgtcttctcctgggtctgttcct

SEQ ID NO: 52166 - DNA, 80 bp, synthetic construct
  source 1..80: mol_type = other DNA
tccatggcctgacttggggggaaggtggggtacttggctctgagctactaccctattcgcacctgaccccctctccaggt

SEQ ID NO: 52167 - DNA, 80 bp, synthetic construct
  source 1..80: mol_type = other DNA
ttttctcattactactacatggtgtgcatgagctggggagtcacggagggctggggtgcagggaagagccctctgggtgg

SEQ ID NO: 52168 - DNA, 80 bp, synthetic construct; identical to SEQ ID NO: 13761
  source 1..80: mol_type = other DNA

SEQ ID NO: 52169 - DNA, 80 bp, synthetic construct
  source 1..80: mol_type = other DNA
cgcccctgccagctggagctcagcgtggacggtgccaagcagtaccggaacggggagtccgtgaagctccacttagaaac

SEQ ID NO: 52170 - DNA, 80 bp, synthetic construct
  source 1..80: mol_type = other DNA
ggcgcagcccctggatcccactgaggctccccacagtctcttccccacttggccctgtggtctccatctcctggctctgt

SEQ ID NO: 52171 - DNA, 80 bp, synthetic construct
  source 1..80: mol_type = other DNA
cccttcaggtgttccaggcagcgggcctggccttttctgatggagaccagtggaccttatccagaaagagtgagaacaga

SEQ ID NO: 52172 - DNA, 80 bp, synthetic construct; identical to SEQ ID NO: 13762
  source 1..80: mol_type = other DNA

SEQ ID NO: 52173 - DNA, 80 bp, synthetic construct
  source 1..80: mol_type = other DNA
ctcttatgttgctggtctcaaggggtcggggcgggggctgaggtgtatgtcctttttgtcctctcatgctcacccccacc

SEQ ID NO: 52174 - DNA, 80 bp, synthetic construct
  source 1..80: mol_type = other DNA
ctgccgggagcccttcctgtcctgctgccaatttgctgagagtctgcgcaagaagagcagggacaagggccaggcgggcc

SEQ ID NO: 52175 - DNA, 80 bp, synthetic construct
  source 1..80: mol_type = other DNA
gaggacctgattgatgaggatgacattcccgtgcgcagcttcttcccagagaactggctctggagagtggaaacagtgga

SEQ ID NO: 52176 - DNA, 80 bp, synthetic construct
  source 1..80: mol_type = other DNA
tccaaaaccaaaggtgatgtcaccctgtctgggcctcaggtgaccctgcttccatttccctgtaccccagctccctgttc

SEQ ID NO: 52177 - DNA, 80 bp, synthetic construct; identical to SEQ ID NO: 13763
  source 1..80: mol_type = other DNA

SEQ ID NO: 52178 - DNA, 80 bp, synthetic construct
  source 1..80: mol_type = other DNA
ggagttgggggagccagggcccagtgaggggtggggaggctaaccgggccaggactctggccatcctcgttttcctgccc

SEQ ID NO: 52179 - DNA, 80 bp, synthetic construct
  source 1..80: mol_type = other DNA
gggtccttcgaattccctgtgggagatgcggtgtccaaggttctgcagattgaggtgaatggagcacccctgaatataag

SEQ ID NO: 52180 - DNA, 80 bp, synthetic construct
  source 1..80: mol_type = other DNA
gctagcagggcaggctgtagtcctgtgtgacctcacaaccatgttttccctgagacagaaggaaggggccatccatagag

SEQ ID NO: 52181 - DNA, 80 bp, synthetic construct; identical to SEQ ID NO: 13764
  source 1..80: mol_type = other DNA

SEQ ID NO: 52182 - DNA, 80 bp, synthetic construct
  source 1..80: mol_type = other DNA
ccaggaggcgtggcctccctcttgaggcttcctcgaggctgtggggagcaaaccatgatctacttggctccgacactggc

SEQ ID NO: 52183 - DNA, 80 bp, synthetic construct
  source 1..80: mol_type = other DNA
acagagggaaagaaagggggcccctgatgaggatggggagcatggccttgggctcaaacagcagaagggtgagtgtcacc

SEQ ID NO: 52184 - DNA, 80 bp, synthetic construct
  source 1..80: mol_type = other DNA
acagagctggtatgatgggagggtggataaccaggcacctgggggcgtgggcataatgagaagcaagtccttatccccaa

SEQ ID NO: 52185 - DNA, 80 bp, synthetic construct; identical to SEQ ID NO: 13765
  source 1..80: mol_type = other DNA

SEQ ID NO: 52186 - DNA, 80 bp, synthetic construct
  source 1..80: mol_type = other DNA
gagggtgcagagccattgaagcagagagtggtaagttcagtggcgtttctgccctctgctggcccccagctctctccctt

SEQ ID NO: 52187 - DNA, 80 bp, synthetic construct
  source 1..80: mol_type = other DNA
aaggcccctgcggacctgcggggtgttgcccacaacaacctcatggcaatggcccaggagactggaggtgaggggtgagg

SEQ ID NO: 52188 - DNA, 80 bp, synthetic construct
  source 1..80: mol_type = other DNA
accaggctcttctccctgccttcctgtttactcgtggtctcccttcactttcagataacctgtactggggctcagtcact

SEQ ID NO: 52189 - DNA, 80 bp, synthetic construct; identical to SEQ ID NO: 13766
  source 1..80: mol_type = other DNA

SEQ ID NO: 52190 - DNA, 80 bp, synthetic construct
  source 1..80: mol_type = other DNA
tcccacgcgctgcagctgaacaaccgccagattcgcggcctggaggaggagctgcaggtgaaccactccctggtgaacca

SEQ ID NO: 52191 - DNA, 80 bp, synthetic construct
  source 1..80: mol_type = other DNA
tcacttgtagagtaacatacacagagttcaccctacagggtcgttagaaggctgaagtgagataattcatgtgctggtat

SEQ ID NO: 52192 - DNA, 80 bp, synthetic construct
  source 1..80: mol_type = other DNA
gtgggaggaaacagcaaaggaaccctgaaggtgagggccagggaaggggtggggccaggcactggtggaggagagggtgt

SEQ ID NO: 52193 - DNA, 80 bp, synthetic construct; identical to SEQ ID NO: 13767
  source 1..80: mol_type = other DNA

SEQ ID NO: 52194 - DNA, 80 bp, synthetic construct
  source 1..80: mol_type = other DNA
ccctgctgcctgtggcccttggtgctgcatcctagattctgtgctgagacggccttctccctacctggaacttctctcta

SEQ ID NO: 52195 - DNA, 80 bp, synthetic construct
  source 1..80: mol_type = other DNA
tacacagatccccttgcctttcctgtccttccctgcttcttggcccacaggacaagctctttcttctccttcaagccttg

SEQ ID NO: 52196 - DNA, 80 bp, synthetic construct
  source 1..80: mol_type = other DNA
aggaaaaggggctgaaggcctcaaatcctgtagcccagggagatgcccttaggtatggcaccagagaggtctgtggcctc

SEQ ID NO: 52197 - DNA, 80 bp, synthetic construct; identical to SEQ ID NO: 13768
  source 1..80: mol_type = other DNA

SEQ ID NO: 52198 - DNA, 80 bp, synthetic construct
  source 1..80: mol_type = other DNA
tacaccgtgtgcatctggtgggcgccgggagctgccctgggccaggggagggagggcaggacccaggctggggctgggct

SEQ ID NO: 52199 - DNA, 80 bp, synthetic construct
  source 1..80: mol_type = other DNA
ggcaaccccctctgtcccaggtactgagccctgtcatgtgcagggcctgtgaccaactccccttttccacagctgacctc

SEQ ID NO: 52200 - DNA, 80 bp, synthetic construct
  source 1..80: mol_type = other DNA
ggctggtgctcttgagaacttgtgatgtcatcagagagaaggacaagaatgtgagcccgtgagacacagcagagtaaggg

SEQ ID NO: 52201 - DNA, 80 bp, synthetic construct; identical to SEQ ID NO: 13769
  source 1..80: mol_type = other DNA

SEQ ID NO: 52202 - DNA, 80 bp, synthetic construct
  source 1..80: mol_type = other DNA
aaagttttggaacatttactgtaacctctgggagaaaatgtgagaaaggtgtggtggctgtcattagccagctgtttgta

SEQ ID NO: 52203 - DNA, 80 bp, synthetic construct
  source 1..80: mol_type = other DNA
agggagctgacggtgcagcagcctagctcaggagggacactggcacggcaccgtgtggactgggcccgcgtgggcacgag

SEQ ID NO: 52204 - DNA, 80 bp, synthetic construct
  source 1..80: mol_type = other DNA
ttacaggtcctgccacaatcctaatgcaaggatggagctgcaagttcagtttgggaatcatcagcctggattggtttggt

SEQ ID NO: 52205 - DNA, 80 bp, synthetic construct; identical to SEQ ID NO: 13770
  source 1..80: mol_type = other DNA

SEQ ID NO: 52206 - DNA, 80 bp, synthetic construct
  source 1..80: mol_type = other DNA
ccccacctcccgggagtgcgtgggctttgaggctgtgcaggaagtgccggtggggctggtgcagccggccagcgcaaccc

SEQ ID NO: 52207 - DNA, 80 bp, synthetic construct
  source 1..80: mol_type = other DNA
tgccctaactcctctctgttctccagagcgcagatgttctgtgttttacggggcaccaagtaagagcagactcttggcca

SEQ ID NO: 52208 - DNA, 80 bp, synthetic construct
  source 1..80: mol_type = other DNA
tgcaggacgaggatggctacaggatgaagtttgcctgctactacccccgtgtggagtacggtcagtcttcccaccgaggc

SEQ ID NO: 52209 - DNA, 80 bp, synthetic construct; identical to SEQ ID NO: 13771
  source 1..80: mol_type = other DNA

SEQ ID NO: 52210 - DNA, 80 bp, synthetic construct
  source 1..80: mol_type = other DNA
tgggcttggccataaatagggaggcagtggcacctctccatgggggtggcgaaggtggaatgagaggatctacacagagt

SEQ ID NO: 52211 - DNA, 80 bp, synthetic construct
  source 1..80: mol_type = other DNA
atcatgggtctggatggggccacctatgacctcgagggacagtgagtcatctggtcccctcagtctcttgtcctccccat

SEQ ID NO: 52212 - DNA, 80 bp, synthetic construct
  source 1..80: mol_type = other DNA
tgtgccggagcacccgccagcgggcagcctgtgcccagctcaacgacttcctccaggagtatggcactcaggggtgccag

SEQ ID NO: 52213 - DNA, 80 bp, synthetic construct; identical to SEQ ID NO: 13772
  source 1..80: mol_type = other DNA

SEQ ID NO: 52214 - DNA, 80 bp, synthetic construct
  source 1..80: mol_type = other DNA
gccctccactgcccggctgtcgccagtcaccacggcctcagacagggcttgtgctcagctgacacctgtgacacagctct

SEQ ID NO: 52215 - DNA, 80 bp, synthetic construct
  source 1..80: mol_type = other DNA
gcaatcctcaggtccggcagtgtcttcttccagttactggtttcaaacaagccaaaagtctgactttggtgtgtttgtga

SEQ ID NO: 52216 - DNA, 80 bp, synthetic construct
  source 1..80: mol_type = other DNA
gtttggtgagatcagtttccgtagaggtcatgacagttcagcagcctgccatccagtcattcgacagaaattcgggaatc

SEQ ID NO: 52217 - DNA, 80 bp, synthetic construct; identical to SEQ ID NO: 13773
  source 1..80: mol_type = other DNA

SEQ ID NO: 52218 - DNA, 80 bp, synthetic construct
  source 1..80: mol_type = other DNA
agacaagtagtaagcacgtcagccttccaggtgcgctcctttccgatgagcactgtcttatcccacgtaactttgagaag

SEQ ID NO: 52219 - DNA, 80 bp, synthetic construct
  source 1..80: mol_type = other DNA
ctgggaggtcaaccatgaagaaggcagtagctgtcattgcccaaccccagaaatcccaatcctgttttctccctctcagt

SEQ ID NO: 52220 - DNA, 80 bp, synthetic construct
  source 1..80: mol_type = other DNA
ggtatggggctgggtcgcctctgacctctcaggtaccatccaggaggccctggcctctcactgaacccggccactcctct

SEQ ID NO: 52221 - DNA, 80 bp, synthetic construct; identical to SEQ ID NO: 13774
  source 1..80: mol_type = other DNA

SEQ ID NO: 52222 - DNA, 80 bp, synthetic construct
  source 1..80: mol_type = other DNA
tcctctgcttctttttcctgagttctgtgaaattccccaattcttattttttatctcaaaccagctcaaggtgggctgtt

SEQ ID NO: 52223 - DNA, 80 bp, synthetic construct
  source 1..80: mol_type = other DNA
atggctgtgaagagttgagtgagtgcccacaaagcacttagagcagtgtctggtacatgctattactccgcagcgggaaa

SEQ ID NO: 52224 - DNA, 80 bp, synthetic construct
  source 1..80: mol_type = other DNA
tctatctgtagcttaaactaacaaacaacccacacaaatcacattttgttcttcaggcgattcaggaaggcctattaggc

SEQ ID NO: 52225 - DNA, 80 bp, synthetic construct; identical to SEQ ID NO: 13775
  source 1..80: mol_type = other DNA

SEQ ID NO: 52226 - DNA, 80 bp, synthetic construct
  source 1..80: mol_type = other DNA
ctgggcctgctgctgctgctgcccctgctggctggcgcccgcctgctgtggaactggtggaagctccggagcctccacct

SEQ ID NO: 52227 - DNA, 80 bp, synthetic construct
  source 1..80: mol_type = other DNA
gtgacggagagggtcctctctccgctgacgctgctttggctgtctcccagatgtggtggtgctgaactccaagaggacca

SEQ ID NO: 52228 - DNA, 80 bp, synthetic construct
  source 1..80: mol_type = other DNA
tgatcctcccacctcagcctcaagtgtgagccacctttggggcatccccaatccaggtccctggaagctcttgggggggc

SEQ ID NO: 52229 - DNA, 80 bp, synthetic construct; identical to SEQ ID NO: 13776
  source 1..80: mol_type = other DNA

SEQ ID NO: 52230 - DNA, 80 bp, synthetic construct
  source 1..80: mol_type = other DNA
gaggaggaattctctctcctcacctgcagcatcatctgttacctcaccttcggagacaagatcaaggtgcctcacagccc

SEQ ID NO: 52231 - DNA, 80 bp, synthetic construct
  source 1..80: mol_type = other DNA
gattccctttctcagggtgaggacctggagcctagacacccctgggttgtaggggagaggctggggtggagggagaggct

SEQ ID NO: 52232 - DNA, 80 bp, synthetic construct
  source 1..80: mol_type = other DNA
cagccagtgatgctaccggcctcagcattgctatgaggcgggttcttttgcataccccagttatgggcctgttgccactc

SEQ ID NO: 52233 - DNA, 80 bp, synthetic construct; identical to SEQ ID NO: 13777
  source 1..80: mol_type = other DNA

SEQ ID NO: 52234 - DNA, 80 bp, synthetic construct
  source 1..80: mol_type = other DNA
gaggctgggcagctgtgggctgctggggcaggactccacccgatcattccccagattcagcagcgactgcaggaggagct

SEQ ID NO: 52235 - DNA, 80 bp, synthetic construct
  source 1..80: mol_type = other DNA
ccgagggttggggatgagtgaggaaagcccgagcccagggaggtcctggccagcctctaactccagcccccttcagcatc

SEQ ID NO: 52236 - DNA, 80 bp, synthetic construct
  source 1..80: mol_type = other DNA
tgaacgcctccccacccacctgtccacccgcccgcagatcgcttcctggagccaggcaagaactccagagctctggcctt

SEQ ID NO: 52237 - DNA, 80 bp, synthetic construct; identical to SEQ ID NO: 13778
  source 1..80: mol_type = other DNA

SEQ ID NO: 52238 - DNA, 80 bp, synthetic construct
  source 1..80: mol_type = other DNA
gcagtcatactggggtgcgagagaggtgggcagcagctcagcctccccccgctggggagcgaaagtttcttggtctcagc

SEQ ID NO: 52239 - DNA, 80 bp, synthetic construct
  source 1..80: mol_type = other DNA
cagagctcccttcctgaccctccgctgcagaggattgaggcttaattctgagctggccctttccagccaataaatcaact

SEQ ID NO: 52240 - DNA, 80 bp, synthetic construct
  source 1..80: mol_type = other DNA
gtagagcccgttgaggttggcgtagtggcagttcctgtaccaccaggcccctcggtaggagacagcgcaggagatgagca

SEQ ID NO: 52241 - DNA, 80 bp, synthetic construct; identical to SEQ ID NO: 13779
  source 1..80: mol_type = other DNA

SEQ ID NO: 52242 - DNA, 80 bp, synthetic construct
  source 1..80: mol_type = other DNA
agaactctccagagatgttcccaaaaccatgggcatagtcctcccagtccctccagaagtctgtctgtccatccatgcgg

SEQ ID NO: 52243 - DNA, 80 bp, synthetic construct
  source 1..80: mol_type = other DNA
gttgccgttgaggaagatggtgctggtcctggaggcaccggctccgttctgcatctcctccccgcagtccctggggaagg

SEQ ID NO: 52244 - DNA, 80 bp, synthetic construct
  source 1..80: mol_type = other DNA
tggagccgtgcattgtaggaggtggagggaaagaggccaaggagctggtgagatgtgatccctcctgggagcaggatctc

SEQ ID NO: 52245 - DNA, 80 bp, synthetic construct; identical to SEQ ID NO: 13780
  source 1..80: mol_type = other DNA

SEQ ID NO: 52246 - DNA, 80 bp, synthetic construct
  source 1..80: mol_type = other DNA
ctgtggcggtgtagttggtgtggaggacaaggtcatgcagggggtagtccaccgcgctgcctggggtctccgcctgcaga

SEQ ID NO: 52247 - DNA, 80 bp, synthetic construct
  source 1..80: mol_type = other DNA
acaggattctgggggggcttccagtgcagcacggcgaatccctcggtcaagttcagtgcacgcaactgtgtgggaccgtc

SEQ ID NO: 52248 - DNA, 80 bp, synthetic construct
  source 1..80: mol_type = other DNA
gctcccacctcttgccccgggtcccagtccatctcacccgtggtgaggaagcctgtgagaggctcactctcctcaaagcc

SEQ ID NO: 52249 - DNA, 80 bp, synthetic construct; identical to SEQ ID NO: 13781
  source 1..80: mol_type = other DNA

SEQ ID NO: 52250 - DNA, 80 bp, synthetic construct
  source 1..80: mol_type = other DNA
ccccctcgcctctgctccagcacaggctcaccaccccttttcctctagtccccaggaatggaagtcgctctgcagattcc

SEQ ID NO: 52251 - DNA, 80 bp, synthetic construct
  source 1..80: mol_type = other DNA
gtgcgggcggttccctggatgctgtcggccttgtggggtcctcgcagcccatacagtgtcaggctgtacagagtcccgga

SEQ ID NO: 52252 - DNA, 80 bp, synthetic construct
  source 1..80: mol_type = other DNA
agtgaactggtggtcacgtcagtcacagacagctgggacaggcggggccttgactcctctgaggtctgaccagcaggagc

SEQ ID NO: 52253 - DNA, 80 bp, synthetic construct; identical to SEQ ID NO: 13782
  source 1..80: mol_type = other DNA

SEQ ID NO: 52254 - DNA, 80 bp, synthetic construct
  source 1..80: mol_type = other DNA
gctctggtcgccgtccacgagcaaggcctggggctgcccgttcgtgtcctcatactggaccacgaaggaatcaaaggggc

SEQ ID NO: 52255 - DNA, 80 bp, synthetic construct
  source 1..80: mol_type = other DNA
atctgagtgaggggcgccatggggtgctccatttttatcttccaggcttggcccaaggctgaggtgggaagtttataggt

SEQ ID NO: 52256 - DNA, 80 bp, synthetic construct
  source 1..80: mol_type = other DNA
tcactgagcttgaggagtgtggtgctcccttctgagagaagctgagggtggaactggctggttgaggtgactggcaaatc

SEQ ID NO: 52257 - DNA, 80 bp, synthetic construct; identical to SEQ ID NO: 13783
  source 1..80: mol_type = other DNA

SEQ ID NO: 52258 - DNA, 80 bp, synthetic construct
  source 1..80: mol_type = other DNA
ccactccggcctgcccactcctgcagtcatctttgtcttcagcccaaatgcacaaggaaacccacacaagctggcttgct

SEQ ID NO: 52259 - DNA, 80 bp, synthetic construct
  source 1..80: mol_type = other DNA
ggctgcccgtccgtgtccctgtactggaccacgaaggagtcaaaggggccctgggctaccgtccaggacaggcgcagaga

SEQ ID NO: 52260 - DNA, 80 bp, synthetic construct
  source 1..80: mol_type = other DNA
ctccagtgtagccccagggacagctccttgaggagacacacaggcctgctcccgccatgccccacaggaatgagggagaa

SEQ ID NO: 52261 - DNA, 80 bp, synthetic construct; identical to SEQ ID NO: 13784
  source 1..80: mol_type = other DNA

SEQ ID NO: 52262 - DNA, 80 bp, synthetic construct
  source 1..80: mol_type = other DNA
gacaggggattagctgggagaacagagggcagagcagaggcttgcccgggtggggctggggccgatgggtggggatctgt

SEQ ID NO: 52263 - DNA, 80 bp, synthetic construct
  source 1..80: mol_type = other DNA
gagtcataggcatagtgacaccaggtttttccatcgtctttccatagccaagccctcccttttcttccacccctcggctc

SEQ ID NO: 52264 - DNA, 80 bp, synthetic construct
  source 1..80: mol_type = other DNA
ccaaagcccgtgtcccttttatttcctcagcagtcagcgaatgaaaggaagtaatgcatatgcttcagaactgtgcctga

SEQ ID NO: 52265 - DNA, 80 bp, synthetic construct; identical to SEQ ID NO: 13785
  source 1..80: mol_type = other DNA

SEQ ID NO: 52266 - DNA, 80 bp, synthetic construct
  source 1..80: mol_type = other DNA
gagacggtttggtgtctggggctggaaaagacagtgaggtgcatggagagtgggatggaggcaaaggggccacggagctt

SEQ ID NO: 52267 - DNA, 80 bp, synthetic construct
  source 1..80: mol_type = other DNA
ctgggttttcctggacccaataaatcagtgggtgctgaggactggagtgtggggcacagaacgtgaaattccaacaggtg

SEQ ID NO: 52268 - DNA, 80 bp, synthetic construct
  source 1..80: mol_type = other DNA
gaggtctccgctcacaggcactgcctggggctgcccctgcgcgtccctgtactgtaccaggaaggagtcaaaggggccct

SEQ ID NO: 52269 - DNA, 80 bp, synthetic construct; identical to SEQ ID NO: 13786
  source 1..80: mol_type = other DNA

SEQ ID NO: 52270 - DNA, 80 bp, synthetic construct
  source 1..80: mol_type = other DNA
cagctggatctgaagcactttctgagccactaaaatactccttaagggagcctgaagactaacaaatgagcacacgagca

SEQ ID NO: 52271 - DNA, 80 bp, synthetic construct
  source 1..80: mol_type = other DNA
catgggagaaaagacagaaacctagaggcccagtcaaaagaggtgccaagatccaaaggagaaacacaagggggctgcag

SEQ ID NO: 52272 - DNA, 80 bp, synthetic construct
  source 1..80: mol_type = other DNA
acacgcaccacctggggctgcccgtccctgtccttgtactgcacggtgaaggagtcgaagcggccctgggggacggtcca

SEQ ID NO: 52273 - DNA, 80 bp, synthetic construct; identical to SEQ ID NO: 13787
  source 1..80: mol_type = other DNA

SEQ ID NO: 52274 - DNA, 80 bp, synthetic construct
  source 1..80: mol_type = other DNA
agccccagccacaagcagttctgtggtgctgaccagacccctgtcccattccccaccagtcatcaccaaagagcaagagg

SEQ ID NO: 52275 - DNA, 80 bp, synthetic construct
  source 1..80: mol_type = other DNA
gccccggcacccgcaccgccttgggctgcccatccccattcctgtactggaccaggaagtggtcaaactggccctcggga

SEQ ID NO: 52276 - DNA, 80 bp, synthetic construct
  source 1..80: mol_type = other DNA
ccctgggttctcagttcagcatagaaaggatgtgtcacaaaacacaaagtgcccaagaacaggacgatgctgcccacagc

SEQ ID NO: 52277 - DNA, 80 bp, synthetic construct; identical to SEQ ID NO: 13788
  source 1..80: mol_type = other DNA

SEQ ID NO: 52278 - DNA, 80 bp, synthetic construct
  source 1..80: mol_type = other DNA
acctctcaccagggccaccaactgcctattggcttccctgcctctaggctccctgccaccccatccccatctttagcccc

SEQ ID NO: 52279 - DNA, 80 bp, synthetic construct
  source 1..80: mol_type = other DNA
cacacaccatgctctttctagcctcctggcctttgcaccacctgtgctgatctgacacgcttcaccttctctctaaagct

SEQ ID NO: 52280 - DNA, 80 bp, synthetic construct
  source 1..80: mol_type = other DNA
ccccattaggacaggaacttttcccattaggacaggaaccctaactctgagcctaacctctgtgaggattcatgaatgca

SEQ ID NO: 52281 - DNA, 80 bp, synthetic construct; identical to SEQ ID NO: 13789
  source 1..80: mol_type = other DNA

SEQ ID NO: 52282 - DNA, 80 bp, synthetic construct
  source 1..80: mol_type = other DNA
ccttaaagacattgtatttaatgaaatgaaccattcaaaaaagacaaatattgtatgattgcacttatatgaggtaccta

SEQ ID NO: 52283 - DNA, 80 bp, synthetic construct
  source 1..80: mol_type = other DNA
tggactgcaaactagaaagcgattagaatggcgaattatgtcaagtgtactttactacaataaaaaacaacaaaaaaagt

SEQ ID NO: 52284 - DNA, 80 bp, synthetic construct
  source 1..80: mol_type = other DNA
aaacccatctctactaaaaatatgaaaaaattagctgggcgtggtggcgcacgcctgtagtcccagttactcaggaggct

SEQ ID NO: 52285 - DNA, 80 bp, synthetic construct; identical to SEQ ID NO: 13790
  source 1..80: mol_type = other DNA

SEQ ID NO: 52286 - DNA, 80 bp, synthetic construct
  source 1..80: mol_type = other DNA
ctccaggccccccacggtgacctcgctctcctcgcccctgacacgcaccacctggggccgcccgtccctgtccttgtact

SEQ ID NO: 52287 - DNA, 80 bp, synthetic construct
  source 1..80: mol_type = other DNA
agctgagaagaggggacagagaaggtgaggcagcttccctgggggatgtccttgggtcttgtgaggaaggagagcgaagc

SEQ ID NO: 52288 - DNA, 80 bp, synthetic construct
  source 1..80: mol_type = other DNA
caggaagatctgtcagtcctcagggaagtggggaaagacaaaaaagtaccatggctcagccaagagcagaggggcttcct

SEQ ID NO: 52289 - DNA, 80 bp, synthetic construct; identical to SEQ ID NO: 13791
  source 1..80: mol_type = other DNA

SEQ ID NO: 52290 - DNA, 80 bp, synthetic construct
  source 1..80: mol_type = other DNA
ctggacagacacgtgtggggagagtgaggtccctgggttctcagttcagcatagaaaggatgtgtcacaaaacacaaagt

SEQ ID NO: 52291 - DNA, 80 bp, synthetic construct
  source 1..80: mol_type = other DNA
caccgcctctcttttgagcacagccccactcggcctctgcacccttagcctccctgcactggtgtctcctcgccatcttt

SEQ ID NO: 52292 - DNA, 80 bp, synthetic construct
  source 1..80: mol_type = other DNA
agtccccaatcctagtttgagccactgtcacctctcaccagggccaccaactgcctactggcctccctgcctccaggctc

SEQ ID NO: 52293 - DNA, 80 bp, synthetic construct; identical to SEQ ID NO: 13792
  source 1..80: mol_type = other DNA

SEQ ID NO: 52294 - DNA, 80 bp, synthetic construct
  source 1..80: mol_type = other DNA
catccttctttgcttactttccggttttctgcttgtgcccacaattgtgagccccatgaaaacatgaacttgtgtgtgtc

SEQ ID NO: 52295 - DNA, 80 bp, synthetic construct
  source 1..80: mol_type = other DNA
aggccatttgtcagtaggatggatcaagacaagaacaaggccagtctgtgatcatgtctcagtaaggatgaactctaaca

SEQ ID NO: 52296 - DNA, 80 bp, synthetic construct
  source 1..80: mol_type = other DNA
cgtctaataaagagcaaaaccttgcttccttaaatgctttcctaaaacaccaaacacaagcccagttccttaacaatctc

SEQ ID NO: 52297 - DNA, 80 bp, synthetic construct; identical to SEQ ID NO: 13793
  source 1..80: mol_type = other DNA

SEQ ID NO: 52298 - DNA, 80 bp, synthetic construct
  source 1..80: mol_type = other DNA
ggacgcagaaaaattctcttcaacagatttcaaaagagggtccaattcctttgtcgtgaagaactttgctactcaagggg

SEQ ID NO: 52299 - DNA, 80 bp, synthetic construct
  source 1..80: mol_type = other DNA
tgcaaaagaagcccggctggtgagaatatttttgttttcatgaagttgcagagaaagcaacatcttctagggccatcttc

SEQ ID NO: 52300 - DNA, 80 bp, synthetic construct
  source 1..80: mol_type = other DNA
gcccgtccctgtccttgtactgcacggtgaaggagtcgaagtggccctgggggatggtccaggagaggctcagcgagtca

SEQ ID NO: 52301 - DNA, 80 bp, synthetic construct; identical to SEQ ID NO: 13794
  source 1..80: mol_type = other DNA

SEQ ID NO: 52302 - DNA, 80 bp, synthetic construct
  source 1..80: mol_type = other DNA
agcaggtctgtggtgctgaccggacccctggcccattccccaccagtcatcaccaaagagcaagagggtgaccctcccac

SEQ ID NO: 52303 - DNA, 80 bp, synthetic construct
  source 1..80: mol_type = other DNA
gcaccgccttgggctgcccatccccattcctgtactggaccaggaagtggtcaaactggccctcgggaaccgtccaggac

SEQ ID NO: 52304 - DNA, 80 bp, synthetic construct
  source 1..80: mol_type = other DNA
agttcagcatagaaaggatgtgtcacaaaacacaaagtgcccaagagcaggacgatgctgcccacagcccctccagcaca

SEQ ID NO: 52305 - DNA, 80 bp, synthetic construct; identical to SEQ ID NO: 13795
  source 1..80: mol_type = other DNA

SEQ ID NO: 52306 - DNA, 80 bp, synthetic construct
  source 1..80: mol_type = other DNA
gccaccaactgcctactggcctcgctgcctccaggctccctgccaccccatccccatcttcagcccccacggatgagctt

SEQ ID NO: 52307 - DNA, 80 bp, synthetic construct
  source 1..80: mol_type = other DNA
ctcacgtgccatgctctttctagcctcctggcctttgcaccagctgtgattatctgacacacttcaccttctctctaaag

SEQ ID NO: 52308 - DNA, 80 bp, synthetic construct
  source 1..80: mol_type = other DNA
tctctccatgacatgtctttccataatgttgctatattcctttcactgtgagccccatcaagacagaaatatgtatagga

SEQ ID NO: 52309 - DNA, 80 bp, synthetic construct; identical to SEQ ID NO: 13796
  source 1..80: mol_type = other DNA

SEQ ID NO: 52310 - DNA, 80 bp, synthetic construct
  source 1..80: mol_type = other DNA
tgaaaggtaatatagggggatacagagtttaagggtttaagggcaacttgctttgctggtgctgtcaacagaggtcatac

SEQ ID NO: 52311 - DNA, 80 bp, synthetic construct
  source 1..80: mol_type = other DNA
agtgtcaggagccaaagtaattctcatttcctttgacccaataatcccagttctgggcatctgtcctaagaaaattatta

SEQ ID NO: 52312 - DNA, 80 bp, synthetic construct
  source 1..80: mol_type = other DNA
acgcatcaaataaccattgaaacgatgatgaatgctggttgtgtagccgtgaggtgaatgattacaatgtacttgtgtac

SEQ ID NO: 52313 - DNA, 80 bp, synthetic construct; identical to SEQ ID NO: 13797
  source 1..80: mol_type = other DNA

SEQ ID NO: 52314 - DNA, 80 bp, synthetic construct
  source 1..80: mol_type = other DNA
aggaggctgaggcaggacaatcacttgaacctgggaggcagaggttgcagtgagctgagatcacaccactgcactccagc

SEQ ID NO: 52315 - DNA, 80 bp, synthetic construct
  source 1..80: mol_type = other DNA
tctgtcagttctgtggttccccacagtggagacaggaacacaaaactgaacgtggaccaggacagcttacccccggaatg

SEQ ID NO: 52316 - DNA, 80 bp, synthetic construct
  source 1..80: mol_type = other DNA
tgaatttttctaatgttcattttccaataatttccctattccccctgtttcccaacactcagatggtcctctgaacatgc

SEQ ID NO: 52317 - DNA, 80 bp, synthetic construct; identical to SEQ ID NO: 13798
  source 1..80: mol_type = other DNA

SEQ ID NO: 52318 - DNA, 80 bp, synthetic construct
  source 1..80: mol_type = other DNA
atcacctgaggtcaggagtttgagcagcctgaccaacatggagaaactccctctctactaaaaatacaaaattagccaga

SEQ ID NO: 52319 - DNA, 80 bp, synthetic construct
  source 1..80: mol_type = other DNA
ataaatgaaataagccacaagagcgatagaggagtaggacagatggagtgtaaagaaggagaagacattatatattttct

SEQ ID NO: 52320 - DNA, 80 bp, synthetic construct
  source 1..80: mol_type = other DNA
caacccgtgggatgtgtttctttccagtcttcttgccatgcctgttactttcaaatggttgtgattagcatccttacaaa

SEQ ID NO: 52321 - DNA, 80 bp, synthetic construct
  source 1..80: mol_type = other DNA
ccatgcttggctaatttttgtatttttagtagagatggggtttcaccatgttggctagactggtctggaactcctgacct

SEQ ID NO: 52322 - DNA, 80 bp, synthetic construct; identical to SEQ ID NO: 13799
  source 1..80: mol_type = other DNA

SEQ ID NO: 52323 - DNA, 80 bp, synthetic construct
  source 1..80: mol_type = other DNA
gaatgctgttattaagatggaaagaaaggaaaattctcgtaagtcaggcttggtgtgcgcctgacatatttcactcttgg

SEQ ID NO: 52324 - DNA, 80 bp, synthetic construct
  source 1..80: mol_type = other DNA
ccatgagggaaaggtggttaccccgagactccaagcactactcaccagtcacgcccacggtggacaccgggcccacgcgc

SEQ ID NO: 52325 - DNA, 80 bp, synthetic construct
  source 1..80: mol_type = other DNA
cggtccaggagaggctcagcgagtcaggggaggatcctgtcactgttagctcccccaggagcggctcctcagggggctcc

SEQ ID NO: 52326 - DNA, 80 bp, synthetic construct
  source 1..80: mol_type = other DNA
tatgactaggggacctgaggtcagttcagagaggcccattcttggggtcctgctcagctgacagctaacacacatgacaa

SEQ ID NO: 52327 - DNA, 80 bp, synthetic construct; identical to SEQ ID NO: 13800
  source 1..80: mol_type = other DNA

SEQ ID NO: 52328 - DNA, 80 bp, synthetic construct
  source 1..80: mol_type = other DNA
ttgtactggaccaggaagtggtcaaactgtccctcgggaaccgtccaggacaggctgagggagtcaggggtcgcatctgt

SEQ ID NO: 52329 - DNA, 80 bp, synthetic construct
  source 1..80: mol_type = other DNA
ctcttagacacaccaagggcccacagtctggatgctggtgccccaagcttagaatatcatttttctgctttgaatgttca

SEQ ID NO: 52330 - DNA, 80 bp, synthetic construct
  source 1..80: mol_type = other DNA
aggcctgtaatctcagcactttgggaggccgaggcgggcggatcatgaggtcaggagattgagaccatcctggctaacac

SEQ ID NO: 52331 - DNA, 80 bp, synthetic construct; identical to SEQ ID NO: 13801
  source 1..80: mol_type = other DNA

SEQ ID NO: 52332 - DNA, 80 bp, synthetic construct
  source 1..80: mol_type = other DNA
cagctactcggaaggctgaggcaggagaactgcttggacctgggaggcagaggttgcaatgagctgagatcgcaccacgg

SEQ ID NO: 52333 - DNA, 80 bp, synthetic construct
  source 1..80: mol_type = other DNA
ttagaaaccaacttagattttatagctgagggtagagagatgagaccacatgagggcatctttgcagctgagttgtctct

SEQ ID NO: 52334 - DNA, 80 bp, synthetic construct
  source 1..80: mol_type = other DNA
tcatcacatttcatttgtctgttctttttgagaactgagtcttaagcatctagggggtaacagctataaaagagcttaca

SEQ ID NO: 52335 - DNA, 80 bp, synthetic construct; identical to SEQ ID NO: 13802
  source 1..80: mol_type = other DNA

SEQ ID NO: 52336 - DNA, 80 bp, synthetic construct
  source 1..80: mol_type = other DNA
agacagggtctcactctgtcacacaggctggagtgcagtggctcgatctcggctcactgcaacctccgcctcctgggttc

SEQ ID NO: 52337 - DNA, 80 bp, synthetic construct
  source 1..80: mol_type = other DNA
ccaaagtgctgggattacaggcatgagccaccgtgcccagacaggttgtgtgagtctcttgaggacacacagctcaaatg

SEQ ID NO: 52338 - DNA, 80 bp, synthetic construct
  source 1..80: mol_type = other DNA
ttgggaggcttggtctcagggaaagtaaaataaagccaccagatactgacaataaaagggaaactgagtctagttcaggg

SEQ ID NO: 52339 - DNA, 80 bp, synthetic construct; identical to SEQ ID NO: 13803
  source 1..80: mol_type = other DNA

SEQ ID NO: 52340 - DNA, 80 bp, synthetic construct
  source 1..80: mol_type = other DNA
gtcagaaggtgggcccagtctggccctaacttaagatcgatttctgattataatcataatcagattttgtggcttcctta

SEQ ID NO: 52341 - DNA, 80 bp, synthetic construct
  source 1..80: mol_type = other DNA
ttttacaatgactgttccctctacctaaatgttctttccccagatatcttcatggctcatccccacacttcctttaagtc

SEQ ID NO: 52342 - DNA, 80 bp, synthetic construct
  source 1..80: mol_type = other DNA
caacaattatgagacactcgggagactgtagcactacctggatacttgatatcaaggcatgattgttcacttatcaaggt

SEQ ID NO: 52343 - DNA, 80 bp, synthetic construct
  source 1..80: mol_type = other DNA
agctgggactacaggcacgtgccaccacgctccgcttttttgtactttttaaaatttattattattattattatttttag

SEQ ID NO: 52344 - DNA, 80 bp, synthetic construct; identical to SEQ ID NO: 13804
  source 1..80: mol_type = other DNA

SEQ ID NO: 52345 - DNA, 80 bp, synthetic construct
  source 1..80: mol_type = other DNA
tatcagcctgggtaacactgtgagaccccatctctacaaaaaatttttttaaattagctgagtgtggtggcgagcacctg

SEQ ID NO: 52346 - DNA, 80 bp, synthetic construct
  source 1..80: mol_type = other DNA
gcaatgtagtaagtatagtacttctacatgctacattgatgaacctcaaaaacattatgctcagtgaaagaagctagaca

SEQ ID NO: 52347 - DNA, 80 bp, synthetic construct
  source 1..80: mol_type = other DNA
tggtgatggctgcacaagtaggtaaagatactaaaatcagtaagttgtacactaaaaacaagtgtattttatgccacatg

SEQ ID NO: 52348 - DNA, 80 bp, synthetic construct; identical to SEQ ID NO: 13805
  source 1..80: mol_type = other DNA

SEQ ID NO: 52349 - DNA, 80 bp, synthetic construct
  source 1..80: mol_type = other DNA
aaagaaagaaagaaagaaagaaagaaagaaagaaaacattctagtgattctagtggaggaagtgggtggggcagagatga

SEQ ID NO: 52350 - DNA, 80 bp, synthetic construct
  source 1..80: mol_type = other DNA
atttcaaaaatgtgttccaatctcacaaaaagagttatgtatagagttccaaggaaaagcggagagccacaaaccagcca

SEQ ID NO: 52351 - DNA, 80 bp, synthetic construct
  source 1..80: mol_type = other DNA
ggtgtattacaggtttgaggtcttggggttctgggtccctagtggaggagatgctggaggctgtactttgctaagaccca

SEQ ID NO: 52352 - DNA, 80 bp, synthetic construct; identical to SEQ ID NO: 13806
  source 1..80: mol_type = other DNA

SEQ ID NO: 52353 - DNA, 80 bp, synthetic construct
  source 1..80: mol_type = other DNA
gaaaaggagggagaagccaaggctatgactgggggacccgaggtcagttcagagaggcctactcttggggctgggtggtc

SEQ ID NO: 52354 - DNA, 80 bp, synthetic construct
  source 1..80: mol_type = other DNA
cacaagcaggtctgtggtgctgaccagacccttgtcccattccccaccagtcatcaccaaagagcaagagggtgaccctc

SEQ ID NO: 52355 - DNA, 80 bp, synthetic construct
  source 1..80: mol_type = other DNA
accctcactgccttgggctgcccatctccattcctgtactggaccaggaagtggtcaaactgtccctcgggaactgtcca

SEQ ID NO: 52356 - DNA, 80 bp, synthetic construct; identical to SEQ ID NO: 13807
  source 1..80: mol_type = other DNA

SEQ ID NO: 52357 - DNA, 80 bp, synthetic construct
  source 1..80: mol_type = other DNA
aaggagtcaaattctccctcagtcaccatccaggagagatgcagggtgtgtgacgtggcctcctccactgtcaactcccc

SEQ ID NO: 52358 - DNA, 80 bp, synthetic construct
  source 1..80: mol_type = other DNA
gtcagcaatcgaaagaccagcttttgctgcacatgggtgaatttcaaaagcattgtgctaattgcaagaaatgaaacaca

SEQ ID NO: 52359 - DNA, 80 bp, synthetic construct
  source 1..80: mol_type = other DNA
ggaaactttctggatcaatggaaatgatataaaatgggaagctcagagatcttatggctcagtcagaccaggagagccag

SEQ ID NO: 52360 - DNA, 80 bp, synthetic construct; identical to SEQ ID NO: 13808
  source 1..80: mol_type = other DNA

SEQ ID NO: 52361 - DNA, 80 bp, synthetic construct
  source 1..80: mol_type = other DNA
ggtgacctcgacgggcaggattgagaggtctggagacagggctttgcgtggctgagtcctgccgggctgtgctaggggct

SEQ ID NO: 52362 - DNA, 80 bp, synthetic construct
  source 1..80: mol_type = other DNA
gccatggcgcttcttgcccaggaggccatagaggaggaatctgtacttgcggccggcatccagaggggtgacagtgacag

SEQ ID NO: 52363 - DNA, 80 bp, synthetic construct
  source 1..80: mol_type = other DNA
tgggctggcgtcacctcgggcaactggagaggaaaggttcttgtgtttattttttccaaaacgactccttgactgcctcc

SEQ ID NO: 52364 - DNA, 80 bp, synthetic construct; identical to SEQ ID NO: 13809
  source 1..80: mol_type = other DNA

SEQ ID NO: 52365 - DNA, 80 bp, synthetic construct
  source 1..80: mol_type = other DNA
ttacgacacaggtagttctcacccttctccgttccctttcttattctgcaccggctggcccgggagaactaaggctccca

SEQ ID NO: 52366 - DNA, 80 bp, synthetic construct
  source 1..80: mol_type = other DNA
acattgttattgcaagttttctggcaatagggagcccccaggggcaggggagggcttggactgaaccctcggaaaggggc

SEQ ID NO: 52367 - DNA, 80 bp, synthetic construct
  source 1..80: mol_type = other DNA
tcaggaggtgatggattcgcaaggcaggaagggttcctggctcccctcgccccttctcccagcacccccaggctcccaca

SEQ ID NO: 52368 - DNA, 80 bp, synthetic construct; identical to SEQ ID NO: 13810
  source 1..80: mol_type = other DNA

SEQ ID NO: 52369 - DNA, 80 bp, synthetic construct
  source 1..80: mol_type = other DNA
aaagtgctgggattacaggcatgagtcactgtgctagccccatgtggcttttcaaatgagacagagcaggtggacaaagg

SEQ ID NO: 52370 - DNA, 80 bp, synthetic construct
  source 1..80: mol_type = other DNA
ttccaggtcagggatagtgacctcccgctgatctgcagccacgggcaccacctggggctgcccgtccctgtccttgtact

SEQ ID NO: 52371 - DNA, 80 bp, synthetic construct
  source 1..80: mol_type = other DNA
agacaaagaacatggttgagatctctgaggggagaacccctgggctttgagggcctcaggggggctgtgaactgagatgg

SEQ ID NO: 52372 - DNA, 80 bp, synthetic construct; identical to SEQ ID NO: 13811
  source 1..80: mol_type = other DNA

SEQ ID NO: 52373 - DNA, 80 bp, synthetic construct
  source 1..80: mol_type = other DNA
ccagcctggccaacatggcgaaaccctgtttctactaaaaatacaaaaaattagctgggtgtggtggcacgtgcccgtaa

SEQ ID NO: 52374 - DNA, 80 bp, synthetic construct
  source 1..80: mol_type = other DNA
taatgtttcctttgtaatcctatacagcttattttacagatttaaaaacattgccttcaggtggggtaggggtttcacca

SEQ ID NO: 52375 - DNA, 80 bp, synthetic construct
  source 1..80: mol_type = other DNA
ggactcaggatgtaaagcacttcgcctcaacaaaaaagggcagaagcaggaggtggcagctgtgtccaagtcacagcagg

SEQ ID NO: 52376 - DNA, 80 bp, synthetic construct; identical to SEQ ID NO: 13812
  source 1..80: mol_type = other DNA

SEQ ID NO: 52377 - DNA, 80 bp, synthetic construct
  source 1..80: mol_type = other DNA
ttatattttctctcaggctccaggttgtagactgtgacctctcgctggtctgccgccaccggcaccacctggggctgccc

SEQ ID NO: 52378 - DNA, 80 bp, synthetic construct
  source 1..80: mol_type = other DNA
gctgggacagagatggtagggggctgttagtaaagaatcccccttttcttatagtaatgatgtctagttatttatttttt

SEQ ID NO: 52379 - DNA, 80 bp, synthetic construct
  source 1..80: mol_type = other DNA
gactacaggcgtgcgccaccatgcctgcctaattttgtgtgtgtgtgtatttttagtggagacggcatttgccatgttgg

SEQ ID NO: 52380 - DNA, 80 bp, synthetic construct; identical to SEQ ID NO: 13813
  source 1..80: mol_type = other DNA

SEQ ID NO: 52381 - DNA, 80 bp, synthetic construct
  source 1..80: mol_type = other DNA
acttgtgtgtcaaactcaacaagtccaaaactgagcctctgagcttcctgacacctgctcccgccacagcctccccacct

SEQ ID NO: 52382 - DNA, 80 bp, synthetic construct
  source 1..80: mol_type = other DNA
caccacgtccggctaattttgtattttcagtagagatggggtttctccacgttagtcaggttggtcttgaactcccgacc

SEQ ID NO: 52383 - DNA, 80 bp, synthetic construct
  source 1..80: mol_type = other DNA
atccgcctgttgtcactaccttcagagtctgacccctccttgccacctccaagcaccactggctcctcctggattatcac

SEQ ID NO: 52384 - DNA, 80 bp, synthetic construct; identical to SEQ ID NO: 13814
  source 1..80: mol_type = other DNA

SEQ ID NO: 52385 - DNA, 80 bp, synthetic construct
  source 1..80: mol_type = other DNA
taggctctgcttttccccaccactcatcactgtcacatccggtgccactgacatatttgtgcaatttgttgcctgtccct

SEQ ID NO: 52386 - DNA, 80 bp, synthetic construct
  source 1..80: mol_type = other DNA
gaagcactcattagtgagcaaactagaaggtggtcccaagaggcaaaatggcagagaaggtggctggatgggtggggctc

SEQ ID NO: 52387 - DNA, 80 bp, synthetic construct
  source 1..80: mol_type = other DNA
agtgaccaccaagtattgaacatctactatgtacaggtaccaggctgggcattttctctcatttcatttgccttctaacc

SEQ ID NO: 52388 - DNA, 80 bp, synthetic construct; identical to SEQ ID NO: 13815
  source 1..80: mol_type = other DNA

SEQ ID NO: 52389 - DNA, 80 bp, synthetic construct
  source 1..80: mol_type = other DNA
caggacgtgtaaaatacatgtttcaaaatatccagcattagaacatggatatacagggattccctcacgggaaggtctga

SEQ ID NO: 52390 - DNA, 80 bp, synthetic construct
  source 1..80: mol_type = other DNA
gcaaaagatgaatgagctgagaagatgccagacatgttacatcaccacctttaaccgtgacaacaagctgggcagcgttt

SEQ ID NO: 52391 - DNA, 80 bp, synthetic construct
  source 1..80: mol_type = other DNA
gctaacatggtgaaaccctgtctctactaaaaatacaaaaattagccgggtgtggtggtgggcgcctgtaatcccagcta

SEQ ID NO: 52392 - DNA, 80 bp, synthetic construct
  source 1..80: mol_type = other DNA
aggaagacaggaaggaactcagtttgtcagattcccaaactccatttatctctactgcaccgacttggtcagtgcctgac

SEQ ID NO: 52393 - DNA, 80 bp, synthetic construct; identical to SEQ ID NO: 13816
  source 1..80: mol_type = other DNA

SEQ ID NO: 52394 - DNA, 80 bp, synthetic construct
  source 1..80: mol_type = other DNA
gttatttttgagaaaggtgtgtctttgtttctgtgagcaaaggaaaaaagagattcccctcactgtgactaaaccgggca

SEQ ID NO: 52395 - DNA, 80 bp, synthetic construct
  source 1..80: mol_type = other DNA
agagaaagggtggaagggatgttcttctttgctgtaaagtcactcactggatgagtattaaagaaagccttgtggccggg

SEQ ID NO: 52396 - DNA, 80 bp, synthetic construct
  source 1..80: mol_type = other DNA
agctactcgggaggctgaggcaggagaatcacttgaacctgggaggcaaaggttgcagtgagccaagattgcaccactgc

SEQ ID NO: 52397 - DNA, 80 bp, synthetic construct; identical to SEQ ID NO: 13817
  source 1..80: mol_type = other DNA

SEQ ID NO: 52398 - DNA, 80 bp, synthetic construct
  source 1..80: mol_type = other DNA
gagctgagatcgcaccactgcactccaggctgggcaacagagtgagactctgtctcaaaaaaaaaaaaaaaaaaaaaaag

SEQ ID NO: 52399 - DNA, 80 bp, synthetic construct
  source 1..80: mol_type = other DNA
tgtgcattctgaccaagtaactgaaccagccaaaggggacaaagcagacctcagagtaagaatatttataacaattctca

SEQ ID NO: 52400 - DNA, 80 bp, synthetic construct
  source 1..80: mol_type = other DNA
aaacagaggtgcagaaagtttaaaacttgctcagggccatgaaagctggtggtacgccagtccccagtgacatgctcttt

SEQ ID NO: 52401 - DNA, 80 bp, synthetic construct; identical to SEQ ID NO: 13818
  source 1..80: mol_type = other DNA

SEQ ID NO: 52402 - DNA, 80 bp, synthetic construct
  source 1..80: mol_type = other DNA
cctccgtgcccagttctgtggggctgggggtctcgtccacatcctcctgaggagctgagagaagagatagaggcataaag

SEQ ID NO: 52403 - DNA, 80 bp, synthetic construct
  source 1..80: mol_type = other DNA
gggggtgaggggtctcccttcgtgtctgagaaaggagctgagatgggaagagaggaagcctctgagggttcttccaaacc

SEQ ID NO: 52404 - DNA, 80 bp, synthetic construct
  source 1..80: mol_type = other DNA
ctcccctttaaccccaaggaatgaattgctaaggcagggctccaggcatgagtgggagaaaaattctggggtgagtggga

SEQ ID NO: 52405 - DNA, 80 bp, synthetic construct; identical to SEQ ID NO: 13819
  source 1..80: mol_type = other DNA

SEQ ID NO: 52406 - DNA, 80 bp, synthetic construct
  source 1..80: mol_type = other DNA
gcgatctcggctcactgcaagctccgcctcccgggttcacgccattctcctgcctcatcctcttgagtagctgggactac

SEQ ID NO: 52407 - DNA, 80 bp, synthetic construct
  source 1..80: mol_type = other DNA
tctaagtgttatacatatattaactcatgtaattccaacagctctgtgcagagggactgaaatccagccacctgacagaa

SEQ ID NO: 52408 - DNA, 80 bp, synthetic construct
  source 1..80: mol_type = other DNA
cgggcagttggctccggagtctttgctcctaaccactatccacactatctctcatcaaataattcacaggccaggggaat

SEQ ID NO: 52409 - DNA, 80 bp, synthetic construct
  source 1..80: mol_type = other DNA
cctcttcatgctgcaaaaaggctagagaaacgtggtgctcttgtcacttggatctgccacctctgaacacagcagaaatg

SEQ ID NO: 52410 - DNA, 80 bp, synthetic construct; identical to SEQ ID NO: 13820
  source 1..80: mol_type = other DNA

SEQ ID NO: 52411 - DNA, 80 bp, synthetic construct
  source 1..80: mol_type = other DNA
ggcagccatgactcaccagtcttggccaccacagactcgggccccacacgctgcctgccacgaagcccgtagaggttcat

SEQ ID NO: 52412 - DNA, 80 bp, synthetic construct
  source 1..80: mol_type = other DNA
gtcacgccggtcactgtcagttcccccaggaggggctgctccaggaactcagggcgggggggctcctctttcctctctgg

SEQ ID NO: 52413 - DNA, 80 bp, synthetic construct
  source 1..80: mol_type = other DNA
accttctgggccacggggagctgctgcttgggatggaaggggcccagcagtgcgggggagtctggctgcccctcagccct

SEQ ID NO: 52414 - DNA, 80 bp, synthetic construct; identical to SEQ ID NO: 13821
  source 1..80: mol_type = other DNA

SEQ ID NO: 52415 - DNA, 80 bp, synthetic construct
  source 1..80: mol_type = other DNA
ggtcactctgaggcactaggaagagtgggtagagagaagggagagacttaggtccaaggagaatggggaagccaaatccc

SEQ ID NO: 52416 - DNA, 80 bp, synthetic construct
  source 1..80: mol_type = other DNA
gaggagtggtgtccactttaaggaatgggtgccttctttcaaacggcatggaagcactgcgtggactagtgtggctctgc

SEQ ID NO: 52417 - DNA, 80 bp, synthetic construct
  source 1..80: mol_type = other DNA
cttgaagcgttttaacgtgggacagcctccctcatctatgctgcaggcctctcctcctctttgggaactttgacccatgg

SEQ ID NO: 52418 - DNA, 80 bp, synthetic construct; identical to SEQ ID NO: 13822
  source 1..80: mol_type = other DNA

SEQ ID NO: 52419 - DNA, 80 bp, synthetic construct
  source 1..80: mol_type = other DNA
ctccgcaagctaccctgtgggctcttcttcctctgcctccgctgtgagtgtaggctgtcgacagggttccagtggccctg

SEQ ID NO: 52420 - DNA, 80 bp, synthetic construct
  source 1..80: mol_type = other DNA
gtgtctcttagatattgatctaagtttatctaaggcgttgttccccacctctgctgctccctgcctcagggaatgggact

SEQ ID NO: 52421 - DNA, 80 bp, synthetic construct
  source 1..80: mol_type = other DNA
tacagtggcacaatcatggctctctgcagcctcggtctcctgggctcaagcgatcctcccacctcaagcctctcaagtag

SEQ ID NO: 52422 - DNA, 80 bp, synthetic construct; identical to SEQ ID NO: 13823
  source 1..80: mol_type = other DNA

SEQ ID NO: 52423 - DNA, 80 bp, synthetic construct
  source 1..80: mol_type = other DNA
tactggccatgctctccccaccttactcaccgtgactccctcaggctgcactgagcttctcaaactctttgcctgcccca

SEQ ID NO: 52424 - DNA, 80 bp, synthetic construct
  source 1..80: mol_type = other DNA
cagcggaccatgcctcttcttgccaacaaacccatacaggacaaatttgtacttgcggccaggatccagggaggtgatga

SEQ ID NO: 52425 - DNA, 80 bp, synthetic construct
  source 1..80: mol_type = other DNA
tgggcctgaggacttcccaggcttctcctcatccttgtctggagtttgagaggcaaaagcaaagcatagtggactcaacc

SEQ ID NO: 52426 - DNA, 80 bp, synthetic construct; identical to SEQ ID NO: 13824
  source 1..80: mol_type = other DNA

SEQ ID NO: 52427 - DNA, 80 bp, synthetic construct
  source 1..80: mol_type = other DNA
agtcagccaccctggtcccacagagaggaacaaagaggggatgtgaaagccaggtaccccaggacctgtctttcactggt

SEQ ID NO: 52428 - DNA, 80 bp, synthetic construct
  source 1..80: mol_type = other DNA
gctcccagggacgaggtattgggggctgagggtcagtgtccagaggccttcccatgcccaccctgaaagatttatagggc

SEQ ID NO: 52429 - DNA, 80 bp, synthetic construct
  source 1..80: mol_type = other DNA
attgttttaagatccccctcgatccatcttcctgctgaacctgcaattccttttctctccttttctcctctatccagccc

SEQ ID NO: 52430 - DNA, 80 bp, synthetic construct; identical to SEQ ID NO: 13825
  source 1..80: mol_type = other DNA

SEQ ID NO: 52431 - DNA, 80 bp, synthetic construct
  source 1..80: mol_type = other DNA
ggagaggagcctgggccccttgcgtcgtcgaggggcctgagggaggaggctcatcggtagtccccaagaggcccaagggt

SEQ ID NO: 52432 - DNA, 80 bp, synthetic construct
  source 1..80: mol_type = other DNA
cagccaatcctccaaacacccccatctaccacattcctgagcagacgggcctgtgcttcaggcaggtaataggtaaaata

SEQ ID NO: 52433 - DNA, 80 bp, synthetic construct
  source 1..80: mol_type = other DNA
cagtgagaagcctggaagaaagacagtggtgttagagagggaggatgcaagaggagagtgggcagtgggaagagagagag

SEQ ID NO: 52434 - DNA, 80 bp, synthetic construct; identical to SEQ ID NO: 13826
  source 1..80: mol_type = other DNA

SEQ ID NO: 52435 - DNA, 80 bp, synthetic construct
  source 1..80: mol_type = other DNA
ctcaaactgctccagtgaatctttgcaggtgccccaaccacatcaccctctattgcctaaaataacaatcctggaagtgt

SEQ ID NO: 52436 - DNA, 80 bp, synthetic construct
  source 1..80: mol_type = other DNA
cagtggggggtggcagtgggaggaattcatgaatgcaggctccaacggcaggtgaggctggacaagggataggtgtcccg

SEQ ID NO: 52437 - DNA, 80 bp, synthetic construct
  source 1..80: mol_type = other DNA
ggccctctgcaggcggctgaggccgccagcgcagcaccacgcgctcgaactggccgcggagcccgtcgagagacacgaga

SEQ ID NO: 52438 - DNA, 80 bp, synthetic construct; identical to SEQ ID NO: 13827
  source 1..80: mol_type = other DNA

SEQ ID NO: 52439 - DNA, 80 bp, synthetic construct
  source 1..80: mol_type = other DNA
tgggacaggcttggcctgggcggggactcctcctccctttcctctgctggcctcgagggccaagggggccgtgggggccg

SEQ ID NO: 52440 - DNA, 80 bp, synthetic construct
  source 1..80: mol_type = other DNA
tccctcccaccagagccagaggcctcttccctgtgccccagccccacctggaaagagaacggagggaaatcggtcagtgt

SEQ ID NO: 52441 - DNA, 80 bp, synthetic construct
  source 1..80: mol_type = other DNA
aaaaatatccaggtatctgttaagaaacctcgaggtttagtggaaaatcactgctgtgagacccacctcccagcaatccc

SEQ ID NO: 52442 - DNA, 80 bp, synthetic construct; identical to SEQ ID NO: 13828
  source 1..80: mol_type = other DNA

SEQ ID NO: 52443 - DNA, 80 bp, synthetic construct
  source 1..80: mol_type = other DNA
ggccctgacagaagctgggtagctgactgcccggccccgctccgctgtgacagtcaccacatattctacgcctggcatca

SEQ ID NO: 52444 - DNA, 80 bp, synthetic construct
  source 1..80: mol_type = other DNA
ctggggcccatcgatcactagccaggttaaagaggaggactcaggtgggtgtctggttcttcaatcatcatctttccttc

SEQ ID NO: 52445 - DNA, 80 bp, synthetic construct
  source 1..80: mol_type = other DNA
tggtcttggaggcaggaaggccccagctggtccctcgaagggctcggacagtgacctggtactcctgtccaggggccagt

SEQ ID NO: 52446 - DNA, 80 bp, synthetic construct; identical to SEQ ID NO: 13829
  source 1..80: mol_type = other DNA

SEQ ID NO: 52447 - DNA, 80 bp, synthetic construct
  source 1..80: mol_type = other DNA
tgccaacgtcaccaacaccaagaaaatggcaagaatttaggccctagcagtgtgatcccagagtcccctctcatgggcac

SEQ ID NO: 52448 - DNA, 80 bp, synthetic construct
  source 1..80: mol_type = other DNA
catgaggagccttttcctaagcttggtcctgtcagaacaaatgaagtagatcaaggatgccccttcaagttgcactttct

SEQ ID NO: 52449 - DNA, 80 bp, synthetic construct
  source 1..80: mol_type = other DNA
gttgtaggctcctcaaaacaagaaccacctgctcaaagttccacaaatatgtttcctgattgttgattttgtacctggca

SEQ ID NO: 52450 - DNA, 80 bp, synthetic construct; identical to SEQ ID NO: 13830
  source 1..80: mol_type = other DNA

SEQ ID NO: 52451 - DNA, 80 bp, synthetic construct
  source 1..80: mol_type = other DNA
gattggaaatttcaaaaggtactctcctaaaccaagagaactgtggggaaatcaacatagtaaataccgaagtataaaac

SEQ ID NO: 52452 - DNA, 80 bp, synthetic construct
  source 1..80: mol_type = other DNA
actcaagacccatgaaatccttacccttcccagaatttatttgttcattttctctgtgtgtgtgtatgtctctttctctt

SEQ ID NO: 52453 - DNA, 80 bp, synthetic construct
  source 1..80: mol_type = other DNA
aacagtcccctgaaagtccatcaacctaacccatgtctcctacgtctcctagcaccatcttactggtctgaagcaggctt

SEQ ID NO: 52454 - DNA, 80 bp, synthetic construct
  source 1..80: mol_type = other DNA
ggctaattttgtatttttagtagagacggggtttctccatgttggtcaggctggtctcgaactcccgacctcaggtgatc

SEQ ID NO: 52455 - DNA, 80 bp, synthetic construct; identical to SEQ ID NO: 13831
  source 1..80: mol_type = other DNA

SEQ ID NO: 52456 - DNA, 80 bp, synthetic construct
  source 1..80: mol_type = other DNA
gcatgagccactgcgcctggcctgcttcactgattttgttcttgggaagttttagagtttatctcaatattaacctcgtg

SEQ ID NO: 52457 - DNA, 80 bp, synthetic construct
  source 1..80: mol_type = other DNA
gacaaggaatatctgaacctctttctcattcaggaactcatctccctcagtttccccatgctttctctcacattcatagt

SEQ ID NO: 52458 - DNA, 80 bp, synthetic construct
  source 1..80: mol_type = other DNA
catgcctaacatactcccaggtgatgctgatgctgcaggtccagggaacacactttgagaaccactgagtcagagtaaca

SEQ ID NO: 52459 - DNA, 80 bp, synthetic construct; identical to SEQ ID NO: 13832
  source 1..80: mol_type = other DNA

SEQ ID NO: 52460 - DNA, 80 bp, synthetic construct
  source 1..80: mol_type = other DNA
aagaaaagaaaagaaatagatggcacttgccaaggcagaaggtacgatgccagggaccagctacagacagcagaaagcat

SEQ ID NO: 52461 - DNA, 80 bp, synthetic construct
  source 1..80: mol_type = other DNA
caacttggcaccaccatcctggctctgagtgagggagaaagtctagggcttcaactggaaagcggcgcccttgacaacac

SEQ ID NO: 52462 - DNA, 80 bp, synthetic construct
  source 1..80: mol_type = other DNA
atatatacagagaagaagagagtgggagaaacactttaaaatgttagcagtgcttgttttagtgaggagcagccaggaat

SEQ ID NO: 52463 - DNA, 80 bp, synthetic construct; identical to SEQ ID NO: 13833
  source 1..80: mol_type = other DNA

SEQ ID NO: 52464 - DNA, 80 bp, synthetic construct
  source 1..80: mol_type = other DNA
atttgtgggatgatgcaggaaaacatgagttggatggtagaaatgtcagaagatttgcagctggggaaacgaccatatct

SEQ ID NO: 52465 - DNA, 80 bp, synthetic construct
  source 1..80: mol_type = other DNA
ttgagcccaggagttcaggaccagcctgggcatgcaacatggagaaaccccgtctctactaaaaatacaaacattagcag

SEQ ID NO: 52466 - DNA, 80 bp, synthetic construct
  source 1..80: mol_type = other DNA
aaaaaaaaaaaaaagagcaagttggagggagacagagaaaaaactggtttgcatgtactgatgacaaggaggtgggagat

SEQ ID NO: 52467 - DNA, 80 bp, synthetic construct; identical to SEQ ID NO: 13834
  source 1..80: mol_type = other DNA

SEQ ID NO: 52468 - DNA, 80 bp, synthetic construct
  source 1..80: mol_type = other DNA
atgaaaaaagcaagaatcacaggaaggtaaaggattcagagaataaagacttagggaaaaggggcgaagaaactgggagg

SEQ ID NO: 52469 - DNA, 80 bp, synthetic construct
  source 1..80: mol_type = other DNA
tgataacagctaacagtgatgaccaacaatggactggacagcctcaggaagtactgagctctctgttaccaggtgttcca

SEQ ID NO: 52470 - DNA, 80 bp, synthetic construct
  source 1..80: mol_type = other DNA
tcctgcccactcagtcccctcctggagcctggcatctctctcaccgtggggatgaactgaatttcataggcatccacggg

SEQ ID NO: 52471 - DNA, 80 bp, synthetic construct; identical to SEQ ID NO: 13835
  source 1..80: mol_type = other DNA

SEQ ID NO: 52472 - DNA, 80 bp, synthetic construct
  source 1..80: mol_type = other DNA
atgctctccctccactcttcctcaggctcaggtcttccccatggctcctgttcacagaatcacagtcccagagtacactg

SEQ ID NO: 52473 - DNA, 80 bp, synthetic construct
  source 1..80: mol_type = other DNA
ctgcccggcacagttcccggggcccgcagcctccagggcaggcgctggctggaggctcttcctgcccgcagtcctcaccg

SEQ ID NO: 52474 - DNA, 80 bp, synthetic construct
  source 1..80: mol_type = other DNA
aggtgcggatgctgcagtcctcactcacgtagccttcccaacagatgcacacaccgtcctggcacacgccgtgctggctg

SEQ ID NO: 52475 - DNA, 80 bp, synthetic construct; identical to SEQ ID NO: 13836
  source 1..80: mol_type = other DNA

SEQ ID NO: 52476 - DNA, 80 bp, synthetic construct
  source 1..80: mol_type = other DNA
agtcctcgccgctgtagcccgcattgcaaacacacacgccgttctcgcagcgcccgcgacctctacagtcgcgtgggcag

SEQ ID NO: 52477 - DNA, 80 bp, synthetic construct
  source 1..80: mol_type = other DNA
cgcggccccggcagtccctcggacatgtccgcgtgctgcagtcctcgcctgtgtacccgggccagcacacgcagcggccg

SEQ ID NO: 52478 - DNA, 80 bp, synthetic construct
  source 1..80: mol_type = other DNA
agccggggttacacacgcagcgcccattctcacagcgccccctctgactgcaaccgcgagggcagctcctcatgccacag

SEQ ID NO: 52479 - DNA, 80 bp, synthetic construct; identical to SEQ ID NO: 13837
  source 1..80: mol_type = other DNA

SEQ ID NO: 52480 - DNA, 80 bp, synthetic construct
  source 1..80: mol_type = other DNA
tccgcacatctgtctgacctggagtaggaggggagaggcaagtctcagtctctctcctgggagagaggctgagcctatgt

SEQ ID NO: 52481 - DNA, 80 bp, synthetic construct
  source 1..80: mol_type = other DNA
ctgcatccacacccctcatggtgaggaaggagtgccttcttctaattcataccaaggacctttatggactagcaatgccc

SEQ ID NO: 52482 - DNA, 80 bp, synthetic construct
  source 1..80: mol_type = other DNA
aggactgggggctcggtgcctgggggacagccacagccagtggaagggggcaggttaatgcggtgggtgaataccacctg

SEQ ID NO: 52483 - DNA, 80 bp, synthetic construct; identical to SEQ ID NO: 13838
  source 1..80: mol_type = other DNA

SEQ ID NO: 52484 - DNA, 80 bp, synthetic construct
  source 1..80: mol_type = other DNA
ctctgatatcatttatttaccctgctcctcacccccttttctattgtgttcccctacactggtttttttgttttgttttg

SEQ ID NO: 52485 - DNA, 80 bp, synthetic construct
  source 1..80: mol_type = other DNA
caccatgcctggctaattttgtacttttagtagagaccgggtttctccatgtcggtcaggctggtctcagactcctaacc

SEQ ID NO: 52486 - DNA, 80 bp, synthetic construct
  source 1..80: mol_type = other DNA
ttcactctgctcataaaggctggctccatcttcaaatcttaactcccagttagggcagtcttccattactctctatcaca

SEQ ID NO: 52487 - DNA, 80 bp, synthetic construct; identical to SEQ ID NO: 13839
  source 1..80: mol_type = other DNA

SEQ ID NO: 52488 - DNA, 80 bp, synthetic construct
  source 1..80: mol_type = other DNA
caacctctgtctcctagctcaagtgattttcctgcctcggcctcctgagtagctgggattataggtgcccacctccatgc

SEQ ID NO: 52489 - DNA, 80 bp, synthetic construct
  source 1..80: mol_type = other DNA
atgagtcaccgcacgacctctttctaatatagagacaggatcttgctcaaccccctggttgaagctggacttgaactcct

SEQ ID NO: 52490 - DNA, 80 bp, synthetic construct
  source 1..80: mol_type = other DNA
cctcaggacttacatgatcaaatatcaagacttattttaaaggtgcaaggatagacagatgaaacagaatagggcccaga

SEQ ID NO: 52491 - DNA, 80 bp, synthetic construct; identical to SEQ ID NO: 13840
  source 1..80: mol_type = other DNA

SEQ ID NO: 52492 - DNA, 80 bp, synthetic construct
  source 1..80: mol_type = other DNA
gtagcggggattacaggcatctgctcccacacccagctattttttgtatttttagtagagacggggcttcactatgttgg

SEQ ID NO: 52493 - DNA, 80 bp, synthetic construct
  source 1..80: mol_type = other DNA
aaaacctaaccataggccgggtgcagtggctcgtatctgtaatcccagcacttcaggaggcttaagtgtgaggattgcat

SEQ ID NO: 52494 - DNA, 80 bp, synthetic construct
  source 1..80: mol_type = other DNA
gctgtgatcatgccactgcactccagcctgggcaacagagctgatactctgtttcaaaaaaaagaaaaagaaaaaaacaa

SEQ ID NO: 52495 - DNA, 80 bp, synthetic construct
  source 1..80: mol_type = other DNA
tctactaaaaatacaaaaattagctgggcgtggtagcgggcacctgtagtcccagctactcgggaggctgaggaggagaa

SEQ ID NO: 52496 - DNA, 80 bp, synthetic construct; identical to SEQ ID NO: 13841
  source 1..80: mol_type = other DNA

SEQ ID NO: 52497 - DNA, 80 bp, synthetic construct
  source 1..80: mol_type = other DNA
cattctcctgcctcagcctcctgagtagctgggactacaggcgcccaccaccatacttggctcatttttttgtattttta

SEQ ID NO: 52498 - DNA, 80 bp, synthetic construct
  source 1..80: mol_type = other DNA
tttttttttttttttttagtagagacagggtttcaccaagttggccaggctggtctcaaactcctgacctcaagtgatct

SEQ ID NO: 52499 - DNA, 80 bp, synthetic construct
  source 1..80: mol_type = other DNA
tcctgcctcagcctccagagtagctggaactacagatgggcatcaccatgcctggctaatttttaaattttttgtagaga

SEQ ID NO: 52500 - DNA, 80 bp, synthetic construct; identical to SEQ ID NO: 13842
  source 1..80: mol_type = other DNA

SEQ ID NO: 52501 - DNA, 80 bp, synthetic construct
  source 1..80: mol_type = other DNA
atatctataactaaatatccggtgggaatgactgcatagttcttccaaaagacgtagaccataatgttcatgagatttat

SEQ ID NO: 52502 - DNA, 80 bp, synthetic construct
  source 1..80: mol_type = other DNA
gcaacatgggtgaatttcacacacatagtgctgagtaaaaaatatcacacacagaaagagaatgctcttatactcttata

SEQ ID NO: 52503 - DNA, 80 bp, synthetic construct
  source 1..80: mol_type = other DNA
gagatggagaccatcctggccaacacggtgaaaccctgtctctactaaaaatacaaaaattagctgggcatggtggcaca

SEQ ID NO: 52504 - DNA, 80 bp, synthetic construct; identical to SEQ ID NO: 13843
  source 1..80: mol_type = other DNA

SEQ ID NO: 52505 - DNA, 80 bp, synthetic construct
  source 1..80: mol_type = other DNA
aggcggatcacttgaggtcaggagttcaaaaccagcctggcgatcatgctgaaaccccgtctctactaaaaataaaaaat

SEQ ID NO: 52506 - DNA, 80 bp, synthetic construct
  source 1..80: mol_type = other DNA
aaaaaaaaaaaaatgaaaccttaaaaaacctatccccaatctcacaccccctccagccaccacatatttctctcctctac

SEQ ID NO: 52507 - DNA, 80 bp, synthetic construct
  source 1..80: mol_type = other DNA
caatgacttcggtgccacaaaatctaagggacatttgtcttcatcttgcttgacctttgacttctctcaaaatcactaga

SEQ ID NO: 52508 - DNA, 80 bp, synthetic construct
  source 1..80: mol_type = other DNA
caggcacccgctaccacacctagctaattttttatttttagtagagacgaggtttcaccatcttgaccaggctggtcttg

SEQ ID NO: 52509 - DNA, 80 bp, synthetic construct; identical to SEQ ID NO: 13844
  source 1..80: mol_type = other DNA

SEQ ID NO: 52510 - DNA, 80 bp, synthetic construct
  source 1..80: mol_type = other DNA
caccaatttgtaaaacaccccagtcatcttcctctcgctccacagcaatatatccacctgcctacttggcatctccactt

SEQ ID NO: 52511 - DNA, 80 bp, synthetic construct
  source 1..80: mol_type = other DNA
tatctacctgtattttctcataaacatctctttaattcatttccttctctcccacttaccttcattctaatccaagcttc

SEQ ID NO: 52512 - DNA, 80 bp, synthetic construct
  source 1..80: mol_type = other DNA
cagcctcctgagtagttgggactacaggtgtgtgccatcacgctcagctaatttttaattttttttgcaaagacaggatc

SEQ ID NO: 52513 - DNA, 80 bp, synthetic construct; identical to SEQ ID NO: 13845
  source 1..80: mol_type = other DNA

SEQ ID NO: 52514 - DNA, 80 bp, synthetic construct
  source 1..80: mol_type = other DNA
tctgttccatccgtgtggaacactgttcccttctctcttggccttctcatccttcaggtctcagcccgccatttttttca

SEQ ID NO: 52515 - DNA, 80 bp, synthetic construct
  source 1..80: mol_type = other DNA
actttcttgcccactagactataaagtccatgagggcaggcatggcacctatttttttttcttggctgctgtatccctgc

SEQ ID NO: 52516 - DNA, 80 bp, synthetic construct
  source 1..80: mol_type = other DNA
acagccaccagggctgaggcagaatcagaggccaggccagggaagatcctggcaggaccagatggtacaagcactttgga

SEQ ID NO: 52517 - DNA, 80 bp, synthetic construct; identical to SEQ ID NO: 13846
  source 1..80: mol_type = other DNA

SEQ ID NO: 52518 - DNA, 80 bp, synthetic construct
  source 1..80: mol_type = other DNA
tgctaaaggtgtcttgtttcttgatctggatgacggttacccagttgtatgtgtttgtggagtttactgaggcagggatt

SEQ ID NO: 52519 - DNA, 80 bp, synthetic construct
  source 1..80: mol_type = other DNA
aagagttgaggagagatgttgaaaggtgcccagctcttccagaccagaggctggggaaaggaggagggcagggtgggtgt

SEQ ID NO: 52520 - DNA, 80 bp, synthetic construct
  source 1..80: mol_type = other DNA
tcacattctgctaccagccagcaagagacggaaagggagctgaacagggacagagtgtttccacaccaagaggctcccca

SEQ ID NO: 52521 - DNA, 80 bp, synthetic construct; identical to SEQ ID NO: 13847
  source 1..80: mol_type = other DNA

SEQ ID NO: 52522 - DNA, 80 bp, synthetic construct
  source 1..80: mol_type = other DNA
acctagtcattgggtgatgcctaagaaggctgatttcttgttggctccgagggcagctctgtgagtgaaagaacctggat

SEQ ID NO: 52523 - DNA, 80 bp, synthetic construct
  source 1..80: mol_type = other DNA
agagagggtctttgcaccaggaaggagtgaagagagctcaccagcttttctggaaagctggtgagattggtctagaagag

SEQ ID NO: 52524 - DNA, 80 bp, synthetic construct
  source 1..80: mol_type = other DNA
ctccccttcaccattccccctgccactatgtctggggtggttctctgtagtgtgtgtttggagagagatatggcctcacc

SEQ ID NO: 52525 - DNA, 80 bp, synthetic construct; identical to SEQ ID NO: 13848
  source 1..80: mol_type = other DNA

SEQ ID NO: 52526 - DNA, 80 bp, synthetic construct
  source 1..80: mol_type = other DNA
gggaatggaaaaattaagagaaaggatttccaggccccagctgaaaatggttaggggtgcaatgagagacaggaaggcag

SEQ ID NO: 52527 - DNA, 80 bp, synthetic construct
  source 1..80: mol_type = other DNA
cgagttgcttcccagtagttcctctcagttccacttccagttgtttctatgccattaaattctttccaggcgagataagg

SEQ ID NO: 52528 - DNA, 80 bp, synthetic construct
  source 1..80: mol_type = other DNA
gccatcccagccctgctgaaccgtgagtcatgagtgcagagctctggccaagaacaagttttaggatcctctctgcaggc

SEQ ID NO: 52529 - DNA, 80 bp, synthetic construct; identical to SEQ ID NO: 13849
  source 1..80: mol_type = other DNA

SEQ ID NO: 52530 - DNA, 80 bp, synthetic construct
  source 1..80: mol_type = other DNA
gacacatactgcccaccccaacacacacataccaccctctcctcccagacactccttcacagggagcctggttcccagcg

SEQ ID NO: 52531 - DNA, 80 bp, synthetic construct
  source 1..80: mol_type = other DNA
agcagctgcagtgcctctgcacctgctctgtccccaaccccgggagggcggcgtctcagggcaggacagggaagtctccc

SEQ ID NO: 52532 - DNA, 80 bp, synthetic construct
  source 1..80: mol_type = other DNA
gccctcccacatgccacccctcctcttctcctgcccccaccccagcccccactccctgtctagcatcactgtctcaccat

SEQ ID NO: 52533 - DNA, 80 bp, synthetic construct; identical to SEQ ID NO: 13850
  source 1..80: mol_type = other DNA

SEQ ID NO: 52534 - DNA, 80 bp, synthetic construct
  source 1..80: mol_type = other DNA
cgtctctgggaccccaagtccccaccctgctccagtcccaccatttctatcttctcggcttatcccgtccccgagccact

SEQ ID NO: 52535 - DNA, 80 bp, synthetic construct
  source 1..80: mol_type = other DNA
ttggggcggacaaggaaggaaagcctgaaggttaggaggaaggtttagggttgaagaaagggctagagacaggaggcaaa

SEQ ID NO: 52536 - DNA, 80 bp, synthetic construct
  source 1..80: mol_type = other DNA
gaggacaggggggacagggagacagacacaccccacataagtctgttgggtgtttccctagcttcatctccccatgtgct

SEQ ID NO: 52537 - DNA, 80 bp, synthetic construct; identical to SEQ ID NO: 13851
  source 1..80: mol_type = other DNA

SEQ ID NO: 52538 - DNA, 80 bp, synthetic construct
  source 1..80: mol_type = other DNA
ttttttcctggctttgatggggaggatgaagtcagcatcttggacagagccaggctcagcttccttcctctgccttggcc

SEQ ID NO: 52539 - DNA, 80 bp, synthetic construct
  source 1..80: mol_type = other DNA
tccatggtcatatcctttagtgtgtgtgtgcacgcgcgtgtgcctatgccctatgtcctggctttattatttaggaagaa

SEQ ID NO: 52540 - DNA, 80 bp, synthetic construct
  source 1..80: mol_type = other DNA
ttccagatgtacacaagcttataaggcatttggggaagccactggaagcttagcagatatagtttcaggttctgaaatta

SEQ ID NO: 52541 - DNA, 80 bp, synthetic construct; identical to SEQ ID NO: 13852
  source 1..80: mol_type = other DNA

SEQ ID NO: 52542 - DNA, 80 bp, synthetic construct
  source 1..80: mol_type = other DNA
gagaaaaggaaaggaaagatagggaggagagaaggcagacacataagagtaagggcaattgagggcaaggacctgaagga

SEQ ID NO: 52543 - DNA, 80 bp, synthetic construct
  source 1..80: mol_type = other DNA
atagacattaagggtcttgttcaaggggctaagtcagtagtggtgaaggtgggtctcacccaggtgttctcattcctaag

SEQ ID NO: 52544 - DNA, 80 bp, synthetic construct
  source 1..80: mol_type = other DNA
gaaacttttctgcatccagttattgtgtagattcacttagaagaaatggcatcagatggggaagggggtggtcaacattc

SEQ ID NO: 52545 - DNA, 80 bp, synthetic construct; identical to SEQ ID NO: 13853
  source 1..80: mol_type = other DNA

SEQ ID NO: 52546 - DNA, 80 bp, synthetic construct
  source 1..80: mol_type = other DNA
caaacatcaggctccccagtgctggcccccacagctgggaagaggatggagaactggtgtgggaagtaaagggagtgggg

SEQ ID NO: 52547 - DNA, 80 bp, synthetic construct
  source 1..80: mol_type = other DNA
gagacaagcacagggtcagcagcagcagcagatgagaagaccaagaaaaacaaaggaaaaagacagtgaatttaaaaata

SEQ ID NO: 52548 - DNA, 80 bp, synthetic construct
  source 1..80: mol_type = other DNA
agacagtgaagcagtggatggggtggggaagatacaaaagaagaaaaaaacagtgatgaataatggttcaaaaagaggtt

SEQ ID NO: 52549 - DNA, 80 bp, synthetic construct
  source 1..80: mol_type = other DNA
tgaaggagatggtggcacaaggaaagcagaacagaaagacaaagtgggcatagggcaggaggggccaatgaggtgcagga

SEQ ID NO: 52550 - DNA, 80 bp, synthetic construct; identical to SEQ ID NO: 13854
  source 1..80: mol_type = other DNA

SEQ ID NO: 52551 - DNA, 80 bp, synthetic construct
  source 1..80: mol_type = other DNA
atgaggaaaaggtgtatctattatggaccaggcactgaggacgtcgtctttcatcctgtcatcaaccctgattaggaggt

SEQ ID NO: 52552 - DNA, 80 bp, synthetic construct
  source 1..80: mol_type = other DNA
ctctgggatagaaagcatagctgagaagctgggctgccctctggagggaggaaaggtctagttcctgggatccctggttc

SEQ ID NO: 52553 - DNA, 80 bp, synthetic construct
  source 1..80: mol_type = other DNA
cattgagcccaggcccagctcacaccctccagctgacccaggacactcctgcagggtcaggcctgaggcactgctgaaca

SEQ ID NO: 52554 - DNA, 80 bp, synthetic construct
  source 1..80: mol_type = other DNA
atatggtgaaaccctatctctattaaaaatacaaaaattagccgggtgtggtggcgtgcacctgtagtcccagctacttg

SEQ ID NO: 52555 - DNA, 80 bp, synthetic construct; identical to SEQ ID NO: 13855
  source 1..80: mol_type = other DNA

SEQ ID NO: 52556 - DNA, 80 bp, synthetic construct
  source 1..80: mol_type = other DNA
accctgaagggcgtggggccccatctttcctgttgactcacattccagggatgcgtatcctctagtctgtcacgccatga

SEQ ID NO: 52557 - DNA, 80 bp, synthetic construct
  source 1..80: mol_type = other DNA
ctccccatcacgagccaggaaggcagccaccattccttcaactccctccaagttgtttatttaataataataaaaaagaa

SEQ ID NO: 52558 - DNA, 80 bp, synthetic construct
  source 1..80: mol_type = other DNA
ataacactagagaaacaaaataaaaaatatgcagcagctcaccacccaccccacaactgaacctcacacaatcccctcaa

SEQ ID NO: 52559 - DNA, 80 bp, synthetic construct; identical to SEQ ID NO: 13856
  source 1..80: mol_type = other DNA

SEQ ID NO: 52560 - DNA, 80 bp, synthetic construct
  source 1..80: mol_type = other DNA
actcgatctgcatcatctcctcatagtcccccggggccccacggcctgacagggtctctgtgagaaggggagagttaagg

SEQ ID NO: 52561 - DNA, 80 bp, synthetic construct
  source 1..80: mol_type = other DNA
agagggtaggaaaagaaaagggcattgagtgtggggtcacacaggagaggacatcaagagaaaaaagtaagtgagagtct

SEQ ID NO: 52562 - DNA, 80 bp, synthetic construct
  source 1..80: mol_type = other DNA
tgccctgctcctctcccccttccccctcagctcccaggctggatctccctgttggaactgcccccatacccagcagggaa

SEQ ID NO: 52563 - DNA, 80 bp, synthetic construct; identical to SEQ ID NO: 13857
  source 1..80: mol_type = other DNA

SEQ ID NO: 52564 - DNA, 80 bp, synthetic construct
  source 1..80: mol_type = other DNA
acaggatttgaggggaactaagcccaatgctcagtttctaccagggaagcgggtaggatgagagaaaaagacaggagacc

SEQ ID NO: 52565 - DNA, 80 bp, synthetic construct
  source 1..80: mol_type = other DNA
cttaactggaggtgacttcttccgtggctgagacttctggaaggagaagtatctaaggacttggagagggtgaagggaaa

SEQ ID NO: 52566 - DNA, 80 bp, synthetic construct
  source 1..80: mol_type = other DNA
acccgccctacctgtctctcctgggccctctgagggatcttcctccggcctctctggtggcgctggacccagccactcaa

SEQ ID NO: 52567 - DNA, 80 bp, synthetic construct; identical to SEQ ID NO: 13858
  source 1..80: mol_type = other DNA

SEQ ID NO: 52568 - DNA, 80 bp, synthetic construct
  source 1..80: mol_type = other DNA
actgaaagcggggagaagaccaactcataccctcaaacgagagggggccctctctctctctcctcacctgaaactgggct

SEQ ID NO: 52569 - DNA, 80 bp, synthetic construct
  source 1..80: mol_type = other DNA
actgatgctgtggataaagaaggactgagcacaatgaagaatttcagctgtatcaagtatctaggtaagaataaagactc

SEQ ID NO: 52570 - DNA, 80 bp, synthetic construct
  source 1..80: mol_type = other DNA
agtaagcacttaatagtcactatttctaccagcattatcaccatcatctactctccactggaaaaataatggagcaggag

SEQ ID NO: 52571 - DNA, 80 bp, synthetic construct
  source 1..80: mol_type = other DNA
aaaaaatacaaaaaattagccgggcatggtggcgtgcgcctgtagtcccagctacttgggaggttgaggcaggagaatca

SEQ ID NO: 52572 - DNA, 80 bp, synthetic construct; identical to SEQ ID NO: 13859
  source 1..80: mol_type = other DNA

SEQ ID NO: 52573 - DNA, 80 bp, synthetic construct
  source 1..80: mol_type = other DNA
gaggctgtattcctgttggtctcccagggacagactggtcttacttcagccagcagggcctccagccgccgccggagggc

SEQ ID NO: 52574 - DNA, 80 bp, synthetic construct
  source 1..80: mol_type = other DNA
ggaaggtcaaaaaagaatgacagatgagttggcagaaggagactatgctctcaaaccccaaggaatgatttacccaaagc

SEQ ID NO: 52575 - DNA, 80 bp, synthetic construct
  source 1..80: mol_type = other DNA
gctggtggaaactctttccttcgtaactctttcttcctgtcagcccacatttgtagggttcaaagtttaaccttgttata

SEQ ID NO: 52576 - DNA, 80 bp, synthetic construct; identical to SEQ ID NO: 13860
  source 1..80: mol_type = other DNA

SEQ ID NO: 52577 - DNA, 80 bp, synthetic construct
  source 1..80: mol_type = other DNA
gctcttcctctcaggccgtggtagagagggagccggcccttcaggctggactcgaatagcaccctggatgaggacaactg

SEQ ID NO: 52578 - DNA, 80 bp, synthetic construct
  source 1..80: mol_type = other DNA
ttttgagatgcagtcttgctctgtcgaccaggctggagtgcagtggtgcgatctcggctcactgcaagctccgcctcccg

SEQ ID NO: 52579 - DNA, 80 bp, synthetic construct
  source 1..80: mol_type = other DNA
cctgccaaagtgctgggattacaggcgtgagccactgtgcctggccttttttttttaattaattaattaatttttatttt

SEQ ID NO: 52580 - DNA, 80 bp, synthetic construct
  source 1..80: mol_type = other DNA
aggcgcctgccaccactccacgctaatttttgtatttttagtagagacaaggtttcaccacgttggccaggctggtctta

SEQ ID NO: 52581 - DNA, 80 bp, synthetic construct; identical to SEQ ID NO: 13861
  source 1..80: mol_type = other DNA

SEQ ID NO: 52582 - DNA, 80 bp, synthetic construct
  source 1..80: mol_type = other DNA
gaaggggacagggactctgtcttcacttccaggacctcctctcctataaaagcctatgtggggcattccagagatacatt

SEQ ID NO: 52583 - DNA, 80 bp, synthetic construct
  source 1..80: mol_type = other DNA
gaacatggagagacaggttctatcttggtctggacatctgtgggaggcaggatgaggcaaaagctggatatcatgtaaac

SEQ ID NO: 52584 - DNA, 80 bp, synthetic construct
  source 1..80: mol_type = other DNA
gaccaacatggagaaaccccgtctctactaaaaatacaaaattagtcgggcatggtggcgcatccctgtgtcccagatac

SEQ ID NO: 52585 - DNA, 80 bp, synthetic construct
  source 1..80: mol_type = other DNA
aaaagagggttaagatggggaaatgggtcctttctctttgaacctgaaaataaaactcttctggccctagattacaggcc

SEQ ID NO: 52586 - DNA, 80 bp, synthetic construct; identical to SEQ ID NO: 13862
  source 1..80: mol_type = other DNA

SEQ ID NO: 52587 - DNA, 80 bp, synthetic construct
  source 1..80: mol_type = other DNA
ctgctggtcccttccattctcatgcctcaccagtcacccaaatctaactggccataaatgaggcttcctgattgccccgt

SEQ ID NO: 52588 - DNA, 80 bp, synthetic construct
  source 1..80: mol_type = other DNA
agcccacaggtcaacagtccaccactacctctggtccataccgttcactttggtacttaattatatgatcactaagattg

SEQ ID NO: 52589 - DNA, 80 bp, synthetic construct
  source 1..80: mol_type = other DNA
aggtcaggagatcgagaccatcctggctaacacggtgaaaccccgtctctactaaaaaaatagaaaaattagccaggcgt

SEQ ID NO: 52590 - DNA, 80 bp, synthetic construct; identical to SEQ ID NO: 13863
  source 1..80: mol_type = other DNA

SEQ ID NO: 52591 - DNA, 80 bp, synthetic construct
  source 1..80: mol_type = other DNA
caaaaaaatagccggacatggtggcacgtgcctgtagtcctagctattaggggggctgaggcaggacaatagcttaaacc

SEQ ID NO: 52592 - DNA, 80 bp, synthetic construct
  source 1..80: mol_type = other DNA
atgtattataaccctcacaaaactctccaaaagcaagaactatgtctcatgtccattgagggtaaagtacaggccctcaa

SEQ ID NO: 52593 - DNA, 80 bp, synthetic construct
  source 1..80: mol_type = other DNA
ccgagtagctgagactacaggtgcctgccaccatgcctggctaattttttgtatttttagtagagatggcgcttcactgt

SEQ ID NO: 52594 - DNA, 80 bp, synthetic construct
  source 1..80: mol_type = other DNA
tttgtgtatcttttttataacatgtattaatctgctagatataatctgtttgtccctccaaatccactttccatccctcc

SEQ ID NO: 52595 - DNA, 80 bp, synthetic construct; identical to SEQ ID NO: 13864
  source 1..80: mol_type = other DNA

SEQ ID NO: 52596 - DNA, 80 bp, synthetic construct
  source 1..80: mol_type = other DNA
aagctccataacaacaacaacaacagaatcaacatgtccaacgctgaattcatcatcttccctgaccagaaagcccctgc

SEQ ID NO: 52597 - DNA, 80 bp, synthetic construct
  source 1..80: mol_type = other DNA
tcttacttgatcaactgcataagcttcttccttggttctcttgcctctggccctgcccctctgcaacccattctctactt

SEQ ID NO: 52598 - DNA, 80 bp, synthetic construct
  source 1..80: mol_type = other DNA
cactctgaagaaatgcagggtcctcagacacaagtcaacccccacactgtcctcctggctaatttctacgtgtcctttaa

SEQ ID NO: 52599 - DNA, 80 bp, synthetic construct
  source 1..80: mol_type = other DNA
atctcggctcactgcaagctccgcctcccgggttcatgccattctcctgcctcagcctcccaagtagctgggactacagg

SEQ ID NO: 52600 - DNA, 80 bp, synthetic construct; identical to SEQ ID NO: 13865
  source 1..80: mol_type = other DNA

SEQ ID NO: 52601 - DNA, 80 bp, synthetic construct
  source 1..80: mol_type = other DNA
ctttaaaaatagaacaaataatgttaattgtagaatctagtttagtatatggtgttctagcctttctgtatgtttaaaaa

SEQ ID NO: 52602 - DNA, 80 bp, synthetic construct
  source 1..80: mol_type = other DNA
gtgcctgtaatcccagctacttgggaggctgagacaggagaatcacttgaacctgggaggtggaggttgcagtgagctga

SEQ ID NO: 52603 - DNA, 80 bp, synthetic construct
  source 1..80: mol_type = other DNA
aatactaggaacaagaaaaagagagaaaaataatatccatctcctcagcactgcccttgctgtggttccctgaaatgttt

SEQ ID NO: 52604 - DNA, 80 bp, synthetic construct; identical to SEQ ID NO: 13866
  source 1..80: mol_type = other DNA

SEQ ID NO: 52605 - DNA, 80 bp, synthetic construct
  source 1..80: mol_type = other DNA
ttgacagtaagagcgagaacaaaagctttagaagtttagggcttacaagccatcaattatttgacattctggtctgaatg

SEQ ID NO: 52606 - DNA, 80 bp, synthetic construct
  source 1..80: mol_type = other DNA
ttctcagcagtcaataactctcttcttcccagccccacataactctttatattaaaaagacccaagatcaggcgtggtgg

SEQ ID NO: 52607 - DNA, 80 bp, synthetic construct
  source 1..80: mol_type = other DNA
caggaggctgaggcaggaggatcacctgagctcaggaggtcaaggctacagtgagctgtgaccctgtcactacactgtag

SEQ ID NO: 52608 - DNA, 80 bp, synthetic construct
  source 1..80: mol_type = other DNA
ctcatgactcatagcacacaaatcatttaaatcatttctttgtcacccacgggtgaagggaatgaagcagagtccccgtc

SEQ ID NO: 52609 - DNA, 80 bp, synthetic construct; identical to SEQ ID NO: 13867
  source 1..80: mol_type = other DNA

SEQ ID NO: 52610 - DNA, 80 bp, synthetic construct
  source 1..80: mol_type = other DNA
gtgaggatataggaagctacgtagtttctgggaaacagtgggaagatgagggtttctggaaatctgagggaacgacaaag

SEQ ID NO: 52611 - DNA, 80 bp, synthetic construct
  source 1..80: mol_type = other DNA
tgtgagaaaggatgagaaagtaggggtgactccagatgagttatggcctgtgaatgggtccaggttctgggctcactttc

SEQ ID NO: 52612 - DNA, 80 bp, synthetic construct
  source 1..80: mol_type = other DNA
cagcctacagatcgcacacaagcccccgccccatccctcattggctccgctcggccagacccaccgcccgcccacttgaa

SEQ ID NO: 52613 - DNA, 80 bp, synthetic construct
  source 1..80: mol_type = other DNA
cagacttcctctttaggcccccgcttctttcccgcgtgcctcagggacagtttgccacagccctctcccctccccggtgc

SEQ ID NO: 52614 - DNA, 80 bp, synthetic construct; identical to SEQ ID NO: 13868
  source 1..80: mol_type = other DNA

SEQ ID NO: 52615 - DNA, 80 bp, synthetic construct
  source 1..80: mol_type = other DNA
gggagatgtagtacccagtattaaggtccaccatctcccccagccactactaagtttagtttagacagcttctatgtgtc

SEQ ID NO: 52616 - DNA, 80 bp, synthetic construct
  source 1..80: mol_type = other DNA
atctcacagcacagaccacaattcacaagttcctgtctcttttaaggtttaacttttaatcagccaaacatcttgcgcag

SEQ ID NO: 52617 - DNA, 80 bp, synthetic construct
  source 1..80: mol_type = other DNA
ttccaggttcccaagggcagcctgggcaaccccccttcggtataaggcctttaaatggccaggctcccgctccaacaccc

SEQ ID NO: 52618 - DNA, 80 bp, synthetic construct
  source 1..80: mol_type = other DNA
gagcccgtccatagcatcgggcagctccttcagggttcccagctcgaaatagttctgtgccccttgcacgttcttccctg

SEQ ID NO: 52619 - DNA, 80 bp, synthetic construct; identical to SEQ ID NO: 13869
  source 1..80: mol_type = other DNA

SEQ ID NO: 52620 - DNA, 80 bp, synthetic construct
  source 1..80: mol_type = other DNA
gcctctggcatctgactggttgatccatgagacttatgagagtctccttcaagttcagcaaccagtttttcagctccttg

SEQ ID NO: 52621 - DNA, 80 bp, synthetic construct
  source 1..80: mol_type = other DNA
cttttcccactcttgttgcggctgagaggtgtccttttctccaattgtattgactggtggcgtctccatatggatgctta

SEQ ID NO: 52622 - DNA, 80 bp, synthetic construct
  source 1..80: mol_type = other DNA
aagtccccagttttgctttcctccaaaaatctgctccagcttccccgttccacccacatataatttagaactataaattc

SEQ ID NO: 52623 - DNA, 80 bp, synthetic construct; identical to SEQ ID NO: 13870
  source 1..80: mol_type = other DNA

SEQ ID NO: 52624 - DNA, 80 bp, synthetic construct
  source 1..80: mol_type = other DNA
cgcaaccatgaagctccaggccttagcaactgaactaggccagagcaaccgaactaggcagaatcgaacagaatttggcg

SEQ ID NO: 52625 - DNA, 80 bp, synthetic construct; identical to SEQ ID NO: 13871
  source 1..80: mol_type = other DNA

SEQ ID NO: 52626 - DNA, 80 bp, synthetic construct
  source 1..80: mol_type = other DNA
gcgggcgcctatatcccagctacccaggaggctgaggcaggagaatggcttacctgggaagcggaggttgcagtgagccg

SEQ ID NO: 52627 - DNA, 80 bp, synthetic construct
  source 1..80: mol_type = other DNA
aatcccagctacttgggaggctgaggtgggagaatcgcttgaaccagggagtcggaggttgcagtgagccgagatggtgc

SEQ ID NO: 52628 - DNA, 80 bp, synthetic construct
  source 1..80: mol_type = other DNA
ggatcacttgaggtcaggggttcgagaccagcctggacaacatggtgaaaccccgtctctactaaaaatacaaaaaatta

SEQ ID NO: 52629 - DNA, 80 bp, synthetic construct; identical to SEQ ID NO: 13872
  source 1..80: mol_type = other DNA

SEQ ID NO: 52630 - DNA, 80 bp, synthetic construct
  source 1..80: mol_type = other DNA
aggcttctctttacctttcctttcacatccatcattgcctttcaagtcctccttcatcaagaaatcttagtgcttttcaa

SEQ ID NO: 52631 - DNA, 80 bp, synthetic construct
  source 1..80: mol_type = other DNA
gttcataaaccgtatgtttttctttttttttttttttttttagagagatggggtctgctgtgtttaccaggctggtctca

SEQ ID NO: 52632 - DNA, 80 bp, synthetic construct
  source 1..80: mol_type = other DNA
cattttacatgtataactggtgtgacctgctccactggatgttgcaggttctcctcctaatagaagatgtagagacctat

SEQ ID NO: 52633 - DNA, 80 bp, synthetic construct; identical to SEQ ID NO: 13873
  source 1..80: mol_type = other DNA

SEQ ID NO: 52634 - DNA, 80 bp, synthetic construct
  source 1..80: mol_type = other DNA
cctcccaagtagcggggatgacaggcacctgccaccatgcctggctaatttttgtatttttagtgaagatggggtttcac

SEQ ID NO: 52635 - DNA, 80 bp, synthetic construct
  source 1..80: mol_type = other DNA
tctctactaaaaatacaaaaattagctggtgtggcgcatgcctgtagtcccagctactcaggagactgaggcaggagaat

SEQ ID NO: 52636 - DNA, 80 bp, synthetic construct
  source 1..80: mol_type = other DNA
ttgggaggctgagacagaagaatcgcttgaacccaggaggcggaggttgcagtgagccaagatcacaccattgcactcca

SEQ ID NO: 52637 - DNA, 80 bp, synthetic construct; identical to SEQ ID NO: 13874
  source 1..80: mol_type = other DNA

SEQ ID NO: 52638 - DNA, 80 bp, synthetic construct
  source 1..80: mol_type = other DNA
ccgtctttactaaaaatacaaaaattaggctggtgtggaggtgtgtgcctgtagtctcagctacttaggaggctgaggca

SEQ ID NO: 52639 - DNA, 80 bp, synthetic construct
  source 1..80: mol_type = other DNA
agaaataagaaagagtataggctctcccccaaagtgtagatactacatgcttgttgactgactcacactatctccctcaa

SEQ ID NO: 52640 - DNA, 80 bp, synthetic construct
  source 1..80: mol_type = other DNA
ttgggatagatgcttggactggaaagtggggaaacagcaatgtctctctcctctccctttcccctaaagatttgagaatg

SEQ ID NO: 52641 - DNA, 80 bp, synthetic construct; identical to SEQ ID NO: 13875
  source 1..80: mol_type = other DNA

SEQ ID NO: 52642 - DNA, 80 bp, synthetic construct
  source 1..80: mol_type = other DNA
cgcctgtaatcccagctacttgggaggctgaggcaggagaatcgcttgaacctgggaggcagaggttgcagtgagccagg

SEQ ID NO: 52643 - DNA, 80 bp, synthetic construct
  source 1..80: mol_type = other DNA
tccactcctttaagtgaagaaaattggactgagggaaaccatatttgacaagtttctggggatttacctgcaaatatatt

SEQ ID NO: 52644 - DNA, 80 bp, synthetic construct
  source 1..80: mol_type = other DNA
agagaccctgcctctacaaaataaaaattagctaggcagggtggtgcacctgtagtcctagctattcaggaggctaaggc

SEQ ID NO: 52645 - DNA, 80 bp, synthetic construct; identical to SEQ ID NO: 13876
  source 1..80: mol_type = other DNA

SEQ ID NO: 52646 - DNA, 80 bp, synthetic construct
  source 1..80: mol_type = other DNA
taagtggcaggggagttattttcaactggggttgatctgaaaatacctcatggatggcttcagagagttgagacttgaaa

SEQ ID NO: 52647 - DNA, 80 bp, synthetic construct
  source 1..80: mol_type = other DNA
tatcctggctaacatggtgaaaccccgtctctactaaaaatacaaaaattatctgggcgtggtcgcatgtgcctgtagtc

SEQ ID NO: 52648 - DNA, 80 bp, synthetic construct
  source 1..80: mol_type = other DNA
aaaagaaatggaagagatttattgcaggtggaagaagcagcacaaggtaggagaagtaaggaaagccacttaacacccag

SEQ ID NO: 52649 - DNA, 80 bp, synthetic construct; identical to SEQ ID NO: 13877
  source 1..80: mol_type = other DNA

SEQ ID NO: 52650 - DNA, 80 bp, synthetic construct
  source 1..80: mol_type = other DNA
ttcaccttactaaacgctggccatgcattatgaccgtaatactcagcattgttctaaatgtcttgtatatattagctatt

SEQ ID NO: 52651 - DNA, 80 bp, synthetic construct
  source 1..80: mol_type = other DNA
tacgcctcctgggttcaagtgattctcctgcctcagcctcctgagtagctgggactacaggtgtgcacccccacgcccgg

SEQ ID NO: 52652 - DNA, 80 bp, synthetic construct
  source 1..80: mol_type = other DNA
cctttgtaccaagcactgtgctacatgctgggaataaggcagtggaaaaagccttggatctctggtaacttacattgaat

SEQ ID NO: 52653 - DNA, 80 bp, synthetic construct
  source 1..80: mol_type = other DNA
agggtgaggggtaagggaatgggatagaaagtgctcccaggtatgcatggtgctatatttattgatgatgatgattatta

SEQ ID NO: 52654 - DNA, 80 bp, synthetic construct; identical to SEQ ID NO: 13878
  source 1..80: mol_type = other DNA

SEQ ID NO: 52655 - DNA, 80 bp, synthetic construct
  source 1..80: mol_type = other DNA
taaaggagcagtcatgcaagtatctggagggagagtgtccaggaaaagaaaaagagagtgcaaaggccctgaggtagaaa

SEQ ID NO: 52656 - DNA, 80 bp, synthetic construct
  source 1..80: mol_type = other DNA
gtgatcaggaggcatcagagggttttgagcaggtaaatgatatcatctggtaattttaaagatcactctggtttcttcat

SEQ ID NO: 52657 - DNA, 80 bp, synthetic construct
  source 1..80: mol_type = other DNA
agaggctctctaatatttaaaggtctggaaaaggaataggagctgtcagtgaagactgagaaggagcagtaaataaggaa

SEQ ID NO: 52658 - DNA, 80 bp, synthetic construct
  source 1..80: mol_type = other DNA
tcatcctcccaaatagctgggaccacaggtgtgtgccattatgcccagataattttttaattttttgtagagatggggac

SEQ ID NO: 52659 - DNA, 80 bp, synthetic construct; identical to SEQ ID NO: 13879
  source 1..80: mol_type = other DNA

SEQ ID NO: 52660 - DNA, 80 bp, synthetic construct
  source 1..80: mol_type = other DNA
ccaggttcaagtgattctcctgcctcagcctcctgagtagctgcaattacaggctcacgccaccatgtcaggctaatttt

SEQ ID NO: 52661 - DNA, 80 bp, synthetic construct
  source 1..80: mol_type = other DNA
tgcccgactttttttttttttttttttttcccgtgatggggtctcactctgtaacccaggctggagtgcagtggtgtgac

SEQ ID NO: 52662 - DNA, 80 bp, synthetic construct
  source 1..80: mol_type = other DNA
cctgcctcggcctcccaaagtgctgggattacaggcatgagccgtcacacccagccaaatatttggttttctatgtttga

SEQ ID NO: 52663 - DNA, 80 bp, synthetic construct
  source 1..80: mol_type = other DNA
caggttcaagtgattctcctgcctcagcctcctgagtagctgggattacaggcacgtgctaccatgcctggctaattttg

SEQ ID NO: 52664 - DNA, 80 bp, synthetic construct; identical to SEQ ID NO: 13880
  source 1..80: mol_type = other DNA

SEQ ID NO: 52665 - DNA, 80 bp, synthetic construct
  source 1..80: mol_type = other DNA
actggtcaagatgtcccacaggagatacttggcaagacaatgcacaggtcagacccccatgacaaagaactatctgaccc

SEQ ID NO: 52666 - DNA, 80 bp, synthetic construct
  source 1..80: mol_type = other DNA
gggaaagggtcggagataattccaccagaccaactcaaagtgttacaattttctttttttcttttttttgagacggagtc

SEQ ID NO: 52667 - DNA, 80 bp, synthetic construct
  source 1..80: mol_type = other DNA
ccaccacgcccagctaatttttgtatttttagtagagacagggtttcaccatgttggccaggatggtctcgatctcttga

SEQ ID NO: 52668 - DNA, 80 bp, synthetic construct
  source 1..80: mol_type = other DNA
cagtatggcattcaccaaagtctatcagtaactaattttgtttcaactagagggtcagaggcaaaaaaattcttgctaag

SEQ ID NO: 52669 - DNA, 80 bp, synthetic construct; identical to SEQ ID NO: 13881
  source 1..80: mol_type = other DNA

SEQ ID NO: 52670 - DNA, 80 bp, synthetic construct
  source 1..80: mol_type = other DNA
gtcagggagaattggcctgccacaaactgacccttgaccattgggtttagaaacttggaggtcatttgtgactctgacat

SEQ ID NO: 52671 - DNA, 80 bp, synthetic construct
  source 1..80: mol_type = other DNA
gtgagaagttttgttaagtggagagagaagtggaacactgagggagtgagctgggtcagggaagagtttttaaatttaaa

SEQ ID NO: 52672 - DNA, 80 bp, synthetic construct
  source 1..80: mol_type = other DNA
gaggtgggcggatcacctgaggtcaggagttggagaccagcctggctaacatggtgaaatcctgtctctactaaaacatt

SEQ ID NO: 52673 - DNA, 80 bp, synthetic construct
  source 1..80: mol_type = other DNA
aaaaaaaaagaaagcaaaaacaagaggtaaaatcttccccagtatagttaaggctccctgaatttccctttccagattgc

SEQ ID NO: 52674 - DNA, 80 bp, synthetic construct; identical to SEQ ID NO: 13882
  source 1..80: mol_type = other DNA

SEQ ID NO: 52675 - DNA, 80 bp, synthetic construct
  source 1..80: mol_type = other DNA
ataggaagaaaagtcatcatcttgtgaagttgtggtctcagatttggggaatgtgaactgagtagggaaaggcgagctgg

SEQ ID NO: 52676 - DNA, 80 bp, synthetic construct
  source 1..80: mol_type = other DNA
ggcgattaccatgttgaaccttggaatctaaactgggtaatgaggaaagtgaagaattgagatcaaacaatgaaaagtaa

SEQ ID NO: 52677 - DNA, 80 bp, synthetic construct
  source 1..80: mol_type = other DNA
taaatcactgcaagagaagggcagggtgctagagaatctgcatgaacattgaaaacaaaaataataaaacggggccaggc

SEQ ID NO: 52678 - DNA, 80 bp, synthetic construct
  source 1..80: mol_type = other DNA
cagcactttggaaggccgaggcgggtggatcacgaggtcaagagtttgagaccagcctgaccaatatggtgaaaccccat

SEQ ID NO: 52679 - DNA, 80 bp, synthetic construct; identical to SEQ ID NO: 13883
  source 1..80: mol_type = other DNA

SEQ ID NO: 52680 - DNA, 80 bp, synthetic construct
  source 1..80: mol_type = other DNA
cgggagaatggcatgaacccgggaggcagagcttgcagtgagccgagatcgcaccactgcactccaggctaggcgacagg

SEQ ID NO: 52681 - DNA, 80 bp, synthetic construct
  source 1..80: mol_type = other DNA
tctgggcgacagagccagactccatctcaaaaaaaaaaaataaaataaaaataaaaaaaattagctgggaggatcacttg

SEQ ID NO: 52682 - DNA, 80 bp, synthetic construct
  source 1..80: mol_type = other DNA
cagataacctaagatcaggagttcaagaccagcctggccaacatggtgaaaccctgtctctagtaaaaatacaaaaatta

SEQ ID NO: 52683 - DNA, 80 bp, synthetic construct; identical to SEQ ID NO: 13884
  source 1..80: mol_type = other DNA

SEQ ID NO: 52684 - DNA, 80 bp, synthetic construct
  source 1..80: mol_type = other DNA
gatcacattgtaacttttttttttttttgagacggagtctcgccctgttgcccaggctggagtgcagtggcacaatctcg

SEQ ID NO: 52685 - DNA, 80 bp, synthetic construct
  source 1..80: mol_type = other DNA
acctcgtgatccgcccatctcggcctcccaaagtgctaggattacaggagtgagccaccgcgcccggccacacattgtaa

SEQ ID NO: 52686 - DNA, 80 bp, synthetic construct
  source 1..80: mol_type = other DNA
gaggaggttttatctgatgaggatctgaaaaacagagataagccagatttgactcttgccttcaagtagctcacaaggta

SEQ ID NO: 52687 - DNA, 80 bp, synthetic construct; identical to SEQ ID NO: 13885
  source 1..80: mol_type = other DNA

SEQ ID NO: 52688 - DNA, 80 bp, synthetic construct
  source 1..80: mol_type = other DNA
tttttttttctttttctttttgagactgagtgcctctctgccacccaggctggagtgcagtggtgcaatctgggctcact

SEQ ID NO: 52689 - DNA, 80 bp, synthetic construct
  source 1..80: mol_type = other DNA
tgatccacccacctcggcctcccaaagtgctgagattatatgtgtgagccaccgcgctcggcctaggctaattttttttt

SEQ ID NO: 52690 - DNA, 80 bp, synthetic construct
  source 1..80: mol_type = other DNA
atttttttgtatttttagtagagacgcggtttcaccatgttagccaggatggtctcgatctggcctaggctagtttttaa

SEQ ID NO: 52691 - DNA, 80 bp, synthetic construct; identical to SEQ ID NO: 13886
  source 1..80: mol_type = other DNA

SEQ ID NO: 52692 - DNA, 80 bp, synthetic construct
  source 1..80: mol_type = other DNA
atgagcaagagcctagatgtggtctaaagcctctgaaatttgtgacaagctgcaaacaatttggtttataataggcagag

SEQ ID NO: 52693 - DNA, 80 bp, synthetic construct
  source 1..80: mol_type = other DNA
tgagtaggcaatagggaaccttgaagggcttttgagcagtggagttatgaaagtgtgtttagggaggctgatctgacaat

SEQ ID NO: 52694 - DNA, 80 bp, synthetic construct
  source 1..80: mol_type = other DNA
cacaccaaaaataaggcaggagggagagggaggaggcggcaaatttctagataaggaagagtgattgggaaaatggtcta

SEQ ID NO: 52695 - DNA, 80 bp, synthetic construct; identical to SEQ ID NO: 13887
  source 1..80: mol_type = other DNA

SEQ ID NO: 52696 - DNA, 80 bp, synthetic construct
  source 1..80: mol_type = other DNA
caaacatgggagggcttagagaggcagaatactgtgaaaatgccattgatttgggatctgggtaattggttgccatttga

SEQ ID NO: 52697 - DNA, 80 bp, synthetic construct
  source 1..80: mol_type = other DNA
ctggagtgcaatgacttgatcttggctcactgcaacctccgcctcccaagttcaagcgattctcctgcctcagccttcca

SEQ ID NO: 52698 - DNA, 80 bp, synthetic construct
  source 1..80: mol_type = other DNA
accgtgcccagccgtgaattctgtttttcaagaagtttggtaaggtaggcacattaaatgcgaaacatccaagggcgaac

SEQ ID NO: 52699 - DNA, 80 bp, synthetic construct; identical to SEQ ID NO: 13888
  source 1..80: mol_type = other DNA

SEQ ID NO: 52700 - DNA, 80 bp, synthetic construct
  source 1..80: mol_type = other DNA
tctgctctctttgcctttcctataccccctacagtccagcatgtggggctctaatccaagttatctgccaccctccagcc

SEQ ID NO: 52701 - DNA, 80 bp, synthetic construct
  source 1..80: mol_type = other DNA
ctcactaagaaaataaagcctcactgagaatggaccccaaggtcttccttggtggattcccagggagctcccctccgtcc

SEQ ID NO: 52702 - DNA, 80 bp, synthetic construct
  source 1..80: mol_type = other DNA
cgggcgataaatcaactaagtctctttaatattgtctttcagaagttcacacacactcacacacagatcagaacaaggcg

SEQ ID NO: 52703 - DNA, 80 bp, synthetic construct; identical to SEQ ID NO: 13889
  source 1..80: mol_type = other DNA

SEQ ID NO: 52704 - DNA, 80 bp, synthetic construct
  source 1..80: mol_type = other DNA
gcggagcctgccgacctggaggcggggttttgtcagagctggggcggtgcttatagaggaggcggggttttagggaccaa

SEQ ID NO: 52705 - DNA, 80 bp, synthetic construct
  source 1..80: mol_type = other DNA
gagacgttccgtggaggcggagtttacgatgtatccaagtctgacggccccagaaacgggtgtgcagggcgcccattggg

SEQ ID NO: 52706 - DNA, 80 bp, synthetic construct
  source 1..80: mol_type = other DNA
ggccagggagatgaaggagaagttccgggcctcgcgtgaagcgatctcggccgacaccatgtctccgcgggccaaggccg

SEQ ID NO: 52707 - DNA, 80 bp, synthetic construct; identical to SEQ ID NO: 13890
  source 1..80: mol_type = other DNA

SEQ ID NO: 52708 - DNA, 80 bp, synthetic construct
  source 1..80: mol_type = other DNA
tggcagagtggctttaaaagcacaatttttacctatggcttctcaaaataaagcacccattacccttccaggacacccat

SEQ ID NO: 52709 - DNA, 80 bp, synthetic construct
  source 1..80: mol_type = other DNA
cccccttagtcccaggcttctcccacatccctcttggttcccagcttccattccccccgtcccccgccaggcggtttcct

SEQ ID NO: 52710 - DNA, 80 bp, synthetic construct
  source 1..80: mol_type = other DNA
ttgttcctctatcctaccagcccccagcgtatccccaatttcaagtcctgtatcgcgtccccctctttcccatgtccctg

SEQ ID NO: 52711 - DNA, 80 bp, synthetic construct; identical to SEQ ID NO: 13891
  source 1..80: mol_type = other DNA

SEQ ID NO: 52712 - DNA, 80 bp, synthetic construct
  source 1..80: mol_type = other DNA
gcgcgggagggtggcggtgccagactgatggtagtggtggtggtggtgatggtgtgaggaaggggctgcctgtggcggtg

SEQ ID NO: 52713 - DNA, 80 bp, synthetic construct
  source 1..80: mol_type = other DNA
cagggatggagaaagataatgggagagacacatagagagagacgggtgagaaaccatctctaatttgaggggcaagagag

SEQ ID NO: 52714 - DNA, 80 bp, synthetic construct
  source 1..80: mol_type = other DNA
gcctatccgagctagtcctgtgtgtgcgtatgcgtagacatgcaaccctgtgttaatatgtgctcaattcaacagttgta

SEQ ID NO: 52715 - DNA, 80 bp, synthetic construct; identical to SEQ ID NO: 13892
  source 1..80: mol_type = other DNA

SEQ ID NO: 52716 - DNA, 80 bp, synthetic construct
  source 1..80: mol_type = other DNA
accacagctgaggaggggtaagggagggggttggggcaagggggacggagagtctggagacagtggagggggtgggaggt

SEQ ID NO: 52717 - DNA, 80 bp, synthetic construct
  source 1..80: mol_type = other DNA
ggggggggggggcggggggggcgggcggagggagagcggggagggggggagcttaaagggaccgaggcgagggaggggga

SEQ ID NO: 52718 - DNA, 80 bp, synthetic construct
  source 1..80: mol_type = other DNA
aggagaactctctggagtctcccccaccaagactcagtgattgtattgtgggaggaagtgaacaggttctcagtggagtt

SEQ ID NO: 52719 - DNA, 80 bp, synthetic construct; identical to SEQ ID NO: 13893
  source 1..80: mol_type = other DNA

SEQ ID NO: 52720 - DNA, 80 bp, synthetic construct
  source 1..80: mol_type = other DNA
tttccctttgcttttgaggctgcttagagtctctgggctggtcaatgttcagatccattccctaaacccccctactccca

SEQ ID NO: 52721 - DNA, 80 bp, synthetic construct
  source 1..80: mol_type = other DNA
tttaaacaaaaacacagccagataattattattcttcccttacgtccccccagcccccacctggggcagtcgctctcccg

SEQ ID NO: 52722 - DNA, 80 bp, synthetic construct
  source 1..80: mol_type = other DNA
tcatcgtcactctacaccattctgagcgcaaaaatgttttgattgagacaaatttagaccaagcaatgaccttgtaaaca

SEQ ID NO: 52723 - DNA, 80 bp, synthetic construct; identical to SEQ ID NO: 13894
  source 1..80: mol_type = other DNA

SEQ ID NO: 52724 - DNA, 80 bp, synthetic construct
  source 1..80: mol_type = other DNA
gagttgtaagtcgctgacctggggcggactggagggtggggtggggtgggtgttgaggggcacgcccgggctggcatcag

SEQ ID NO: 52725 - DNA, 80 bp, synthetic construct
  source 1..80: mol_type = other DNA
atcggacttttgggtcgctgggggcaacgaagcctggagaggccttctttccattcccagaatatgtttgctgctttttc

SEQ ID NO: 52726 - DNA, 80 bp, synthetic construct
  source 1..80: mol_type = other DNA
tgccagagaaagccccggacgtgacggatttgcgcgaccccaagcagcccgcccttccccctcccatccgtcattcccct

SEQ ID NO: 52727 - DNA, 80 bp, synthetic construct; identical to SEQ ID NO: 13895
  source 1..80: mol_type = other DNA

SEQ ID NO: 52728 - DNA, 80 bp, synthetic construct
  source 1..80: mol_type = other DNA
tgattgccgggcgtctgttccgagggaggagggtgttgccatctccctcacatgcccttatcacccctttctcaggcggg

SEQ ID NO: 52729 - DNA, 80 bp, synthetic construct
  source 1..80: mol_type = other DNA
gccacctgctggaatacatcaatgaggtctggcaggggacacctgggtgcagggcgttagaggcgtctactgtggcaggg

SEQ ID NO: 52730 - DNA, 80 bp, synthetic construct
  source 1..80: mol_type = other DNA
agcctatccccggtggctgcattgcccccttcccacagacacaccccgggactgtggtgacagtgctcgatctcttcgat

SEQ ID NO: 52731 - DNA, 80 bp, synthetic construct; identical to SEQ ID NO: 13896
  source 1..80: mol_type = other DNA

SEQ ID NO: 52732 - DNA, 80 bp, synthetic construct
  source 1..80: mol_type = other DNA
catctaattcgggctcagtcacttatatgatgtgtgaccttttggcacagggtgtgcctgccttctgtaagcctcagtct

SEQ ID NO: 52733 - DNA, 80 bp, synthetic construct
  source 1..80: mol_type = other DNA
tttctgtcatggatgatcacaacgtggattctttcatctccctctcctctccacagatgggacagtatggaggtgagtgg

SEQ ID NO: 52734 - DNA, 80 bp, synthetic construct
  source 1..80: mol_type = other DNA
aattctccatctgcaactactggcatggtgagtggggatgctgaactggggcttccatggatcaggtcagttgcttccac

SEQ ID NO: 52735 - DNA, 80 bp, synthetic construct
  source 1..80: mol_type = other DNA
gctggagtgcagtgcaccatcttggctcactgcaacctccgcctcccaggttcaagtgatcctcctgcctcagtccccct

SEQ ID NO: 52736 - DNA, 80 bp, synthetic construct; identical to SEQ ID NO: 13897
  source 1..80: mol_type = other DNA

SEQ ID NO: 52737 - DNA, 80 bp, synthetic construct
  source 1..80: mol_type = other DNA
tagcaggctggatttggtcctttggtcacagtttgccaacctctagaccagaccatggggccagaatacttgggtttgaa

SEQ ID NO: 52738 - DNA, 80 bp, synthetic construct
  source 1..80: mol_type = other DNA
atgaatgcaatgtactttgaatagtacctggctcatatagtagatactagatagaagtacttgctattgccaggtgtggt

SEQ ID NO: 52739 - DNA, 80 bp, synthetic construct
  source 1..80: mol_type = other DNA
tcaggatgctgagtcaggagaattgcttgaacccgggaggcagatgttgcagtgagcggagatcctgccactgcacttca

SEQ ID NO: 52740 - DNA, 80 bp, synthetic construct; identical to SEQ ID NO: 13898
  source 1..80: mol_type = other DNA

SEQ ID NO: 52741 - DNA, 80 bp, synthetic construct
  source 1..80: mol_type = other DNA
ctacattatcactactattttattactatccaccttgactattgctgcagcttccttattgggcttttcaccaccagtct

SEQ ID NO: 52742 - DNA, 80 bp, synthetic construct
  source 1..80: mol_type = other DNA
atgccacaggtgagaattcaggctcctacctgtgttgctttttctgcttctttgactccctatgtctccctctccaacct

SEQ ID NO: 52743 - DNA, 80 bp, synthetic construct
  source 1..80: mol_type = other DNA
cctggcagtccaggtaataagggattttgtggcctgaagattggctaaagacatcccccaaccccagttggtctttatct

SEQ ID NO: 52744 - DNA, 80 bp, synthetic construct
  source 1..80: mol_type = other DNA
aagtcctgctgactcttctcctctccatccctatcaccccctcccccactttataaaaacttttaattttgaaattctta

SEQ ID NO: 52745 - DNA, 80 bp, synthetic construct; identical to SEQ ID NO: 13899
  source 1..80: mol_type = other DNA

SEQ ID NO: 52746 - DNA, 80 bp, synthetic construct
  source 1..80: mol_type = other DNA
tgtgtgatctgtaatgtcacctgagctacttgaattgctcaacaaatatttattcaacattatgggcgcaggcttgttct

SEQ ID NO: 52747 - DNA, 80 bp, synthetic construct
  source 1..80: mol_type = other DNA
gaaaggattagaggatgtccggggcctagtttcaatagtggccgaagaagtcctcctggaaaagtcaccattcaattaga

SEQ ID NO: 52748 - DNA, 80 bp, synthetic construct; identical to SEQ ID NO: 13900
  source 1..80: mol_type = other DNA

SEQ ID NO: 52749 - DNA, 80 bp, synthetic construct
  source 1..80: mol_type = other DNA
agactgggtgtggtggctcacgcctgtaatcccagcactttgggaggccgaggcagtggatcacctgaggtcgggagttc

SEQ ID NO: 52750 - DNA, 80 bp, synthetic construct
  source 1..80: mol_type = other DNA
cattgcactccagcctgggcaacaagagcgaaactccatctcaaaaaaaaaaaaaaaaaaatatatatatatatatatat

SEQ ID NO: 52751 - DNA, 80 bp, synthetic construct; identical to SEQ ID NO: 13901
  source 1..80: mol_type = other DNA

SEQ ID NO: 52752 - DNA, 80 bp, synthetic construct
  source 1..80: mol_type = other DNA
caccatgcctggctaatttttagtatttctggtagagacggggtttcactgtgttagccaggatggtctcgatctcctga

SEQ ID NO: 52753 - DNA, 80 bp, synthetic construct
  source 1..80: mol_type = other DNA
tcggctcactgcaagctctgcctcccaggttcacgccattctcctgcctcagcctcctgagtcgctgggactacaggcac

SEQ ID NO: 52754 - DNA, 80 bp, synthetic construct; identical to SEQ ID NO: 13902
  source 1..80: mol_type = other DNA

SEQ ID NO: 52755 - DNA, 80 bp, synthetic construct
  source 1..80: mol_type = other DNA
ggaggcggaggttgcaatgagccgacagggtgccactgcactccagcctgggtgacagagcaaggctctgtctcaaaaaa

SEQ ID NO: 52756 - DNA, 80 bp, synthetic construct
  source 1..80: mol_type = other DNA
acaaaaattagctgggcgtggtggtgtgcccttgtagtcccagctacttgggaggctgaggtacgagaattgcttgagcc

SEQ ID NO: 52757 - DNA, 80 bp, synthetic construct
  source 1..80: mol_type = other DNA
catgtttacattaatatcttttttctctaaatatatatacatttatttatatacgttaatgttatatttaaatataaaca

SEQ ID NO: 52758 - DNA, 80 bp, synthetic construct
  source 1..80: mol_type = other DNA
tggagtttcactcttgttgcccaggctggagtgcaatggcaaatctcggcccactgcaacctccgcctgccaggttcaag

SEQ ID NO: 52759 - DNA, 80 bp, synthetic construct; identical to SEQ ID NO: 13903
  source 1..80: mol_type = other DNA

SEQ ID NO: 52760 - DNA, 80 bp, synthetic construct
  source 1..80: mol_type = other DNA
caggctggtctcgaattcctgacctcagatgatccaccctcctcggcctcccaaagtgctgggattacaggcttgagcca

SEQ ID NO: 52761 - DNA, 80 bp, synthetic construct
  source 1..80: mol_type = other DNA
gatggggtttctacagaagtgaggtcgtatcttcagtgtatcacctcatgaagtacattatatccagtaaggtagttttg

SEQ ID NO: 52762 - DNA, 80 bp, synthetic construct
  source 1..80: mol_type = other DNA
tgcagtggtgcgatctcgactcaatgcaacctccacctcccgggttcaagtaattatcctgcctcagcctcttgggtagc

SEQ ID NO: 52763 - DNA, 80 bp, synthetic construct; identical to SEQ ID NO: 13904
  source 1..80: mol_type = other DNA

SEQ ID NO: 52764 - DNA, 80 bp, synthetic construct
  source 1..80: mol_type = other DNA
tgtctctccttgtgtctctcttccatgcttccacgccccttcgaccaccttgaaggtttatctgcgggattcttttgggt

SEQ ID NO: 52765 - DNA, 80 bp, synthetic construct
  source 1..80: mol_type = other DNA
ccaagtggtggccttggaaagcagatgtcaggctttggtgtgcctgtgaccacctcattgctcccatattatcccccatt

SEQ ID NO: 52766 - DNA, 80 bp, synthetic construct
  source 1..80: mol_type = other DNA
cgtgctgtccctttctctcaaggccgaagttgggaagtgagaaaccatgtttttaacttgtggctgcttttgctgctgct

SEQ ID NO: 52767 - DNA, 80 bp, synthetic construct
  source 1..80: mol_type = other DNA
tttttagcttctctcctccccatgttcccttttttctctaaagtcccctgacatcagccctcccaactcctaagagggac

SEQ ID NO: 52768 - DNA, 80 bp, synthetic construct; identical to SEQ ID NO: 13905
  source 1..80: mol_type = other DNA

SEQ ID NO: 52769 - DNA, 80 bp, synthetic construct
  source 1..80: mol_type = other DNA
tccgctctctctcaatgcccattctttgtgggttcctggttctctgcgggttctttcctgctgaagacaattctcttcct

SEQ ID NO: 52770 - DNA, 80 bp, synthetic construct
  source 1..80: mol_type = other DNA
ggtgtagggctggacaatgagcctcctcttccttgaaagaaggaattttggctgagacaatagggccctgtctgttctgg

SEQ ID NO: 52771 - DNA, 80 bp, synthetic construct
  source 1..80: mol_type = other DNA
tgcccttctagctttcctcagctgatcttgctttttctcccataacctgaactgctttgttccctgcagctggttctctc

SEQ ID NO: 52772 - DNA, 80 bp, synthetic construct; identical to SEQ ID NO: 13906
  source 1..80: mol_type = other DNA

SEQ ID NO: 52773 - DNA, 80 bp, synthetic construct
  source 1..80: mol_type = other DNA
agagtggggtttactcagagccttagggtgggcatgagttgcggggtgttttgttggagcaagggatgtgcatttagggc

SEQ ID NO: 52774 - DNA, 80 bp, synthetic construct
  source 1..80: mol_type = other DNA
cccaggctagagtgcagtggcatgatcttggttcactgcaacctctgcctccagggttcaagggattctcctgcctcagc

SEQ ID NO: 52775 - DNA, 80 bp, synthetic construct
  source 1..80: mol_type = other DNA
gtgagccaccgcgcccaaccagctagggttttgaaggtatgaagttataagagggcatgttaaagacaggagggttggcc

SEQ ID NO: 52776 - DNA, 80 bp, synthetic construct
  source 1..80: mol_type = other DNA
tagtcccagctactcgggaggctgaggcaggagaatggcatgaacccgggaggcggagcttgcagcaagccgagatcgca

SEQ ID NO: 52777 - DNA, 80 bp, synthetic construct; identical to SEQ ID NO: 13907
  source 1..80: mol_type = other DNA

SEQ ID NO: 52778 - DNA, 80 bp, synthetic construct
  source 1..80: mol_type = other DNA
gtgtgctggggtgtgagcttttatgatgctgaaaggatcatgatatgctaaggacaggatagtgttgggttgtacacaca

SEQ ID NO: 52779 - DNA, 80 bp, synthetic construct
  source 1..80: mol_type = other DNA
atccattaaccttttcttgcctgcagcctgtagggtccagcgtcaaagcgaatcatggggtccagggctgagctgtgcac

SEQ ID NO: 52780 - DNA, 80 bp, synthetic construct
  source 1..80: mol_type = other DNA
actgtaagtttagaatgggggtgagaggctgtcatctggagggagagcggggggcctcagtagcctcttgagggaagtgg

SEQ ID NO: 52781 - DNA, 80 bp, synthetic construct; identical to SEQ ID NO: 13908
  source 1..80: mol_type = other DNA

SEQ ID NO: 52782 - DNA, 80 bp, synthetic construct
  source 1..80: mol_type = other DNA
cttgcgggaggcgcgccccacggagctggggagctgggtcgtcggtttgagtctgaaccccacttcctctgtcctcagcc

SEQ ID NO: 52783 - DNA, 80 bp, synthetic construct
  source 1..80: mol_type = other DNA
tttttcggtaactagacgtggatgaatgtaggaccagcatcaccctctgctcgcaccattgttttaatacggcaggcagc

SEQ ID NO: 52784 - DNA, 80 bp, synthetic construct
  source 1..80: mol_type = other DNA
cgggtagtggtcacactcttggtctcctttgtccctagttcgggaggcggaaaaagatgagcgcgctctgaagcaggaga

SEQ ID NO: 52785 - DNA, 80 bp, synthetic construct; identical to SEQ ID NO: 13909
  source 1..80: mol_type = other DNA

SEQ ID NO: 52786 - DNA, 80 bp, synthetic construct
  source 1..80: mol_type = other DNA
ctccaacattcactatcctcatgcctctccactttaccatcgttctcttctgaaatcctgtccccagcccaacagtttca

SEQ ID NO: 52787 - DNA, 80 bp, synthetic construct
  source 1..80: mol_type = other DNA
gataagaagcctctacagcacccctgccccctaatttatacagaaaccggacccactaatcctctgggattggccgactg

SEQ ID NO: 52788 - DNA, 80 bp, synthetic construct
  source 1..80: mol_type = other DNA
gttgcctgggcaagaactgcttcttcaattccttaacaaatgcaaccaccaacacccagatctctctctctctttatttt

SEQ ID NO: 52789 - DNA, 80 bp, synthetic construct
  source 1..80: mol_type = other DNA
cagggagtggctaatgccaccaggaagaaatgaaaactggctcagagagggggaagcctcaacagaaaaagaaataaatt

SEQ ID NO: 52790 - DNA, 80 bp, synthetic construct; identical to SEQ ID NO: 13910
  source 1..80: mol_type = other DNA

SEQ ID NO: 52791 - DNA, 80 bp, synthetic construct
  source 1..80: mol_type = other DNA
aaatggatgagtccattgaatccatggactttggagtgggggggatttgttccaaagaatggatgagtccactggccaat

SEQ ID NO: 52792 - DNA, 80 bp, synthetic construct
  source 1..80: mol_type = other DNA
ggcaagagtccatggatggggccaagagggggcaggagtggcgctgtatccacattcacttcagaagttgaagattccaa

SEQ ID NO: 52793 - DNA, 80 bp, synthetic construct
  source 1..80: mol_type = other DNA
accaccccggccatcagtggagatttcccggaaaacagtgagcatggagtgccggactctgtcagccagagctgggacgt

SEQ ID NO: 52794 - DNA, 80 bp, synthetic construct; identical to SEQ ID NO: 13911
  source 1..80: mol_type = other DNA

SEQ ID NO: 52795 - DNA, 80 bp, synthetic construct
  source 1..80: mol_type = other DNA
atctggcagggtatggtgggtgcttagtaaagacttattggctgatgtggggttagactagatgactgtgtagacatctc

SEQ ID NO: 52796 - DNA, 80 bp, synthetic construct
  source 1..80: mol_type = other DNA
tgggaacctggggaagggttaaagcaggtcagtccacagctctcttcagagactcctacaataagcccctgcccagagat

SEQ ID NO: 52797 - DNA, 80 bp, synthetic construct
  source 1..80: mol_type = other DNA
agagggtcaaagaagacaaatacatatggaggagtcagaataggtgtgatgttataatgggacctttgaggcccactggc

SEQ ID NO: 52798 - DNA, 80 bp, synthetic construct; identical to SEQ ID NO: 13912
  source 1..80: mol_type = other DNA

SEQ ID NO: 52799 - DNA, 80 bp, synthetic construct
  source 1..80: mol_type = other DNA
accaaaagtatatgtaacctgcttatgagggcagttctacccagggaatgaaggcctgagtgggaggcaagggggcaatg

SEQ ID NO: 52800 - DNA, 80 bp, synthetic construct
  source 1..80: mol_type = other DNA
agggaagtggtgagcccctcgcacctccactcggatcccgtacaggtatttgatgtggagcagcattagacgcaagatcc

SEQ ID NO: 52801 - DNA, 80 bp, synthetic construct
  source 1..80: mol_type = other DNA
ccccaatccactactcactttgtacccttaggttccctcattgcccaagaccccttgcccctcacttcatgttctcgacg

SEQ ID NO: 52802 - DNA, 80 bp, synthetic construct; identical to SEQ ID NO: 13913
  source 1..80: mol_type = other DNA

SEQ ID NO: 52803 - DNA, 80 bp, synthetic construct
  source 1..80: mol_type = other DNA
tcttcccaaaggctccggatatattcagacaagagacacaagacacagacatctacaattcacagatacctgataataaa

SEQ ID NO: 52804 - DNA, 80 bp, synthetic construct
  source 1..80: mol_type = other DNA
caaagactgaataaaaaacaaaatgtgagatatccattactaatcttttatgctgactacattttgaaattataatcttg

SEQ ID NO: 52805 - DNA, 80 bp, synthetic construct
  source 1..80: mol_type = other DNA
aaatacaaaaattagccgggcctgttggcgcatgcctttaatcccagctactcgggaggctgaggcaggagaatcgcttg

SEQ ID NO: 52806 - DNA, 80 bp, synthetic construct; identical to SEQ ID NO: 13914
  source 1..80: mol_type = other DNA

SEQ ID NO: 52807 - DNA, 80 bp, synthetic construct
  source 1..80: mol_type = other DNA
tcctaaccactccattacgctgacactggtatgtattgcatatatatatacgaacacagcacacagcatatatggtgatt

SEQ ID NO: 52808 - DNA, 80 bp, synthetic construct
  source 1..80: mol_type = other DNA
tttataattacacccagtgacagataaaagaatgtaaatgcataactagaaaaatccctctccacccaggcagctcccct

SEQ ID NO: 52809 - DNA, 80 bp, synthetic construct
  source 1..80: mol_type = other DNA
tggagtaaaggtgacctaacagcacttgccctgggagaggaaagggctcaagaggaagagaggcaggaacacagaacctg

SEQ ID NO: 52810 - DNA, 80 bp, synthetic construct; identical to SEQ ID NO: 13915
  source 1..80: mol_type = other DNA

SEQ ID NO: 52811 - DNA, 80 bp, synthetic construct
  source 1..80: mol_type = other DNA
aaggctcttcttgataagttgacttctgcttacatcttcgaccacatcctcacaaaactctttgttccagtcaaactgat

SEQ ID NO: 52812 - DNA, 80 bp, synthetic construct
  source 1..80: mol_type = other DNA
ttttatcttgatcagcgggtctcgaagtatagaaatgcaaattattagacttcaccccagatctactgaatcagaaattc

SEQ ID NO: 52813 - DNA, 80 bp, synthetic construct
  source 1..80: mol_type = other DNA
gccctctggtgagtctgatgtgcgcctgaatttaagaaccactgatcttgacaacacactatgtgttgactggcgttttt

SEQ ID NO: 52814 - DNA, 80 bp, synthetic construct; identical to SEQ ID NO: 13916
  source 1..80: mol_type = other DNA

SEQ ID NO: 52815 - DNA, 80 bp, synthetic construct
  source 1..80: mol_type = other DNA
caacagtgcaaagaatggaggataatgtccataaataaataccaacaatggggttcacagcaggattgaccctgtgacat

SEQ ID NO: 52816 - DNA, 80 bp, synthetic construct
  source 1..80: mol_type = other DNA
tgaccctctttggagaacaaaagtccaaggatttagaaatgcaatggagggccaaatttaatgagcatacggctcacaaa

SEQ ID NO: 52817 - DNA, 80 bp, synthetic construct
  source 1..80: mol_type = other DNA
atgggatcccacacatgaagactactgcaaatggtaggaccatggacatgtcagccaaagcaaaataaggtatataacct

SEQ ID NO: 52818 - DNA, 80 bp, synthetic construct; identical to SEQ ID NO: 13917
  source 1..80: mol_type = other DNA

SEQ ID NO: 52819 - DNA, 80 bp, synthetic construct
  source 1..80: mol_type = other DNA
ttctcccctcatgacccttcaagagtcatgtggggtcaaagggcaagaaaaggaattggggaaggtgtagggaattccct

SEQ ID NO: 52820 - DNA, 80 bp, synthetic construct
  source 1..80: mol_type = other DNA
tcccccagtcggccctcccagacccaatctctccccttcccctcatcctagtcgctttcagcaccctcttccctcctcct

SEQ ID NO: 52821 - DNA, 80 bp, synthetic construct
  source 1..80: mol_type = other DNA
ccggccgatggaggggaggtgggagtgggaggttgggcccatagcggtaggaatggtggggggctgtccccccagcaccc

SEQ ID NO: 52822 - DNA, 80 bp, synthetic construct; identical to SEQ ID NO: 13918
  source 1..80: mol_type = other DNA

SEQ ID NO: 52823 - DNA, 80 bp, synthetic construct
  source 1..80: mol_type = other DNA
ttattccccccaactattcttaaggaccccttttcccgtacccattcaattctaaacatttatcaagcatctacctacca

SEQ ID NO: 52824 - DNA, 80 bp, synthetic construct
  source 1..80: mol_type = other DNA
agagaagagatctctttggccttatccctgaccctttccttttccatgctcttttacctctgtaccttttctttcctact

SEQ ID NO: 52825 - DNA, 80 bp, synthetic construct
  source 1..80: mol_type = other DNA
caatggaaatttggcttcaggggtgctttctagaaaaataaaaagtgaggaagaatgccgattcctctggaatgcgcgtg

SEQ ID NO: 52826 - DNA, 80 bp, synthetic construct
  source 1..80: mol_type = other DNA
tcatctgccccagtccttctttacgcaactgctaacttctcatctttccttactcttgagtcacatgggatcttttatca

SEQ ID NO: 52827 - DNA, 80 bp, synthetic construct; identical to SEQ ID NO: 13919
  source 1..80: mol_type = other DNA

SEQ ID NO: 52828 - DNA, 80 bp, synthetic construct
  source 1..80: mol_type = other DNA
ggcctttagttcagttttgctctgtaaatcacctaatatggggagggctgagtcgtccagccgaatgagttgggttaaca

SEQ ID NO: 52829 - DNA, 80 bp, synthetic construct
  source 1..80: mol_type = other DNA
tcctagctcttcgccgtctttcccgatgtcggccaatcaggggaaaaggaaaaggcccaatcagcagaaagtccacagct

SEQ ID NO: 52830 - DNA, 80 bp, synthetic construct
  source 1..80: mol_type = other DNA
gcgttttacctaaccaccattttccgtcaagttttagccaatgagttgatttggagccatacgctccaaagtccaatagc

SEQ ID NO: 52831 - DNA, 80 bp, synthetic construct; identical to SEQ ID NO: 13920
  source 1..80: mol_type = other DNA

SEQ ID NO: 52832 - DNA, 80 bp, synthetic construct
  source 1..80: mol_type = other DNA
ggggggactgaagggtacgtggggcgaaacaaaaccggccatggcagcagcggaggaggaggacgggggccccgaagggc

SEQ ID NO: 52833 - DNA, 80 bp, synthetic construct
  source 1..80: mol_type = other DNA
gagcgaataatcatacagtcatacagataatcggagggcacgttcccataggtgaagcccgacaggagacataagacttt

SEQ ID NO: 52834 - DNA, 80 bp, synthetic construct
  source 1..80: mol_type = other DNA
atgtgagacccgagccaccttaccccagagaagtgaggggtcttagctgtgcaggtggaaacaagtgagacacaaaggtt

SEQ ID NO: 52835 - DNA, 80 bp, synthetic construct
  source 1..80: mol_type = other DNA
gtcataaagatagggacattattgagcttgaaagtgagtaatgggggaatgtgctagtaaaggggtttggtttggagtga

SEQ ID NO: 52836 - DNA, 80 bp, synthetic construct; identical to SEQ ID NO: 13921
  source 1..80: mol_type = other DNA

SEQ ID NO: 52837 - DNA, 80 bp, synthetic construct
  source 1..80: mol_type = other DNA
ttcatcaggtgcgtactcaggagatgaagagggaaatggggaggtctgaggagctgtaagaccctcttgtatactggaaa

SEQ ID NO: 52838 - DNA, 80 bp, synthetic construct
  source 1..80: mol_type = other DNA
agattgaaggcttctgcccttggaaaacggtgtggaagatgggaggagaaaaatccctgttaactttctctctccacttc

SEQ ID NO: 52839 - DNA, 80 bp, synthetic construct
  source 1..80: mol_type = other DNA
cgggggcttccacttctcatttggtgttggtgcttttccctttggctttttcaccaccgtcttcaatgcccatgagcctt

SEQ ID NO: 52840 - DNA, 80 bp, synthetic construct; identical to SEQ ID NO: 13922
  source 1..80: mol_type = other DNA

SEQ ID NO: 52841 - DNA, 80 bp, synthetic construct
  source 1..80: mol_type = other DNA
gctcagaggctcactcagtaacgttgtttaattctctgccctggggaaggaggatggattgagagaatgtctttctcctc

SEQ ID NO: 52842 - DNA, 80 bp, synthetic construct
  source 1..80: mol_type = other DNA
ctacctcctttaatacaaattcaataaaaaaggtgaaatatattgatgggatctcttcccaagttcgcccccacccccga

SEQ ID NO: 52843 - DNA, 80 bp, synthetic construct
  source 1..80: mol_type = other DNA
acacagacacacaagagcaagatgtgtcaggtgtttaatcatcattgtggggggctctggttgtagaagaaagcttggca

SEQ ID NO: 52844 - DNA, 80 bp, synthetic construct; identical to SEQ ID NO: 13923
  source 1..80: mol_type = other DNA

SEQ ID NO: 52845 - DNA, 80 bp, synthetic construct
  source 1..80: mol_type = other DNA
cccagggccagggctagagttcccagccctgatcctcccacagagcctgtacggagacagggaaaattgagagcacagcc

SEQ ID NO: 52846 - DNA, 80 bp, synthetic construct
  source 1..80: mol_type = other DNA
cgggttgagagagggttatttagtgggagccccagtggagtctttccctttctttttttttttgagatggagtttcactt

SEQ ID NO: 52847 - DNA, 80 bp, synthetic construct
  source 1..80: mol_type = other DNA
tagtagaaatggggtttctccatgttggtcaggctggtctcgaactccctacctcaggtgatctgcccgcctcagcctcc

SEQ ID NO: 52848 - DNA, 80 bp, synthetic construct; identical to SEQ ID NO: 13924
  source 1..80: mol_type = other DNA

SEQ ID NO: 52849 - DNA, 80 bp, synthetic construct
  source 1..80: mol_type = other DNA
gtgggggaaggggagaggagactatttcaaaacccttgtctttttgtctccatatcttcagataccctctcttcctcctc

SEQ ID NO: 52850 - DNA, 80 bp, synthetic construct
  source 1..80: mol_type = other DNA
ccaccaggagctactgctccaccttctggctccaccaccaattggacctcctccagaggcacaggctctgggagttggaa

SEQ ID NO: 52851 - DNA, 80 bp, synthetic construct
  source 1..80: mol_type = other DNA
caaggcccggtgtcggggaaggcctgggctgaagctacaggagaaggtgggacggggatctcctccccgggctggggtca

SEQ ID NO: 52852 - DNA, 80 bp, synthetic construct; identical to SEQ ID NO: 13925
  source 1..80: mol_type = other DNA

SEQ ID NO: 52853 - DNA, 80 bp, synthetic construct
  source 1..80: mol_type = other DNA
gaggcagaatctacaatttctggcttcccaggaatctctgaaggaggaaaaatccagtcagaggctgtaattgtgaaggt

SEQ ID NO: 52854 - DNA, 80 bp, synthetic construct
  source 1..80: mol_type = other DNA
tccattcctgttcattgcctggcaccggaaaatcccctcatcctggatcccgacagccggaaggaagagggagccgttgg

SEQ ID NO: 52855 - DNA, 80 bp, synthetic construct
  source 1..80: mol_type = other DNA
ttgctggtctccctggaagttgggaggctgcaacaggagccccgcttaccagtttccattccagccgctggggtggtttc

SEQ ID NO: 52856 - DNA, 80 bp, synthetic construct; identical to SEQ ID NO: 13926
  source 1..80: mol_type = other DNA

SEQ ID NO: 52857 - DNA, 80 bp, synthetic construct
  source 1..80: mol_type = other DNA
ccatctttcagtcgtcttgtcacagggaatgctaggaattcatgcctttgggacaagagtccttcaggtactagagaaat

SEQ ID NO: 52858 - DNA, 80 bp, synthetic construct
  source 1..80: mol_type = other DNA
tgattgcgcaaagttgcatcaatagggttcaggccagactgttgtctgcaagggtgcaattgggcctgcatcatgaaggc

SEQ ID NO: 52859 - DNA, 80 bp, synthetic construct
  source 1..80: mol_type = other DNA
tctttatttaaaactgcattttgttttttttctgtgaaactacacaagtttacaagtgaggagagaactgcccccggccc

SEQ ID NO: 52860 - DNA, 80 bp, synthetic construct; identical to SEQ ID NO: 13927
  source 1..80: mol_type = other DNA

SEQ ID NO: 52861 - DNA, 80 bp, synthetic construct
  source 1..80: mol_type = other DNA
aaaaaattaaagacatgtcactcacaggggaagatggcatcttcaatttcctcaaaattactgagtccagccctgcccaa

SEQ ID NO: 52862 - DNA, 80 bp, synthetic construct
  source 1..80: mol_type = other DNA
ctgcatgaacaaagaacacctaagggattttagggggcaaagcttggtgccctgtaaaatttacttcctgatggacaggc

SEQ ID NO: 52863 - DNA, 80 bp, synthetic construct
  source 1..80: mol_type = other DNA
ctaaattaaaaattaagaaccaccaccaccaccaccaccaacaacaacaaaaacaacaacaacaacaaaaaaaacagatg

SEQ ID NO: 52864 - DNA, 80 bp, synthetic construct
  source 1..80: mol_type = other DNA
tgaggtaagtaagccgtccggaggggcgggggtggggatgcatgggggcgtggcccatgtcctctgtccagaagtcatgt

SEQ ID NO: 52865 - DNA, 80 bp, synthetic construct; identical to SEQ ID NO: 13928
  source 1..80: mol_type = other DNA

SEQ ID NO: 52866 - DNA, 80 bp, synthetic construct
  source 1..80: mol_type = other DNA
cccttctctgtcttgtgcttctcctgtattggggtttgtcctctggaagcctgcgtcctcttcaagtcgccttgtgagag

SEQ ID NO: 52867 - DNA, 80 bp, synthetic construct
  source 1..80: mol_type = other DNA
tgcctgaaaggagagacagagtacagaaaacagagaaagccctgggaaccctgtgtgggcacaacattactagggaaaat

SEQ ID NO: 52868 - DNA, 80 bp, synthetic construct
  source 1..80: mol_type = other DNA
atgacagtgaagagaagcctcagaggaaagaggtcttgtatcctaaagtagaggaaatggagttggggaaagccctattc

SEQ ID NO: 52869 - DNA, 80 bp, synthetic construct; identical to SEQ ID NO: 13929
  source 1..80: mol_type = other DNA

SEQ ID NO: 52870 - DNA, 80 bp, synthetic construct
  source 1..80: mol_type = other DNA
aaaagcaggaagtgtgcaaaacagtcagccggggtgacagtgggatccacctgcagaggaagggggtgtcggggagctgg

SEQ ID NO: 52871 - DNA, 80 bp, synthetic construct
  source 1..80: mol_type = other DNA
gcctctgaagtccttcactgaataagatgtgagtgacagcattttttttttttttgcttcctggtctcactatgctgttg

SEQ ID NO: 52872 - DNA, 80 bp, synthetic construct
  source 1..80: mol_type = other DNA
ttggcaagctcctccttggcctcctcactaggatatgggttactcaggtgggagtagaaatactcatttaggacctcagt

SEQ ID NO: 52873 - DNA, 80 bp, synthetic construct; identical to SEQ ID NO: 13930
  source 1..80: mol_type = other DNA

SEQ ID NO: 52874 - DNA, 80 bp, synthetic construct
  source 1..80: mol_type = other DNA
catgcctgtagtgggggccagtgggctggtgaggaggagccctttgaccatgggattcccctgcaagagcccttccctcc

SEQ ID NO: 52875 - DNA, 80 bp, synthetic construct
  source 1..80: mol_type = other DNA
tgagccgccccctttctcgggcccagccacaccctctgccagaagcatgttgtccaagcgcatcagctgtgggtccaccg

SEQ ID NO: 52876 - DNA, 80 bp, synthetic construct
  source 1..80: mol_type = other DNA
tttcctcagggccccaagttgtcacactctagccctataatgaacagggttctgttcccagagttgagcaatccgggggg

SEQ ID NO: 52877 - DNA, 80 bp, synthetic construct; identical to SEQ ID NO: 13931
  source 1..80: mol_type = other DNA

SEQ ID NO: 52878 - DNA, 80 bp, synthetic construct
  source 1..80: mol_type = other DNA
tctgggagtggatggagaaaggaaagtgacttggtaggtttcagagggagagagacagaggctggggttgagaagagtca

SEQ ID NO: 52879 - DNA, 80 bp, synthetic construct
  source 1..80: mol_type = other DNA
tggaggtctccacatctggagagaatgagggggctgggtggagagttaggggagaagataacgtagcccaagaacagttt

SEQ ID NO: 52880 - DNA, 80 bp, synthetic construct
  source 1..80: mol_type = other DNA
ctatgggctcccaggaataaggagagaagagagctgttggatcctggagagggccctggagttggggggggctcccagaa

SEQ ID NO: 52881 - DNA, 80 bp, synthetic construct; identical to SEQ ID NO: 13932
  source 1..80: mol_type = other DNA

SEQ ID NO: 52882 - DNA, 80 bp, synthetic construct
  source 1..80: mol_type = other DNA
cccccggctcccggctcccccgggggttcaccccggcactgaagggagacctgggataccggctgggccccccacaggag

SEQ ID NO: 52883 - DNA, 80 bp, synthetic construct
  source 1..80: mol_type = other DNA
gaggaggaacagggaggagctgggggcggagagagagacacagaaacagaggaactgagacctagtggaggaggggagag

SEQ ID NO: 52884 - DNA, 80 bp, synthetic construct
  source 1..80: mol_type = other DNA
gaatgcctgggttcaccggcagctcagttcatatttcttgttctaatgactcccctccctgttctacttaattaaaaccg

SEQ ID NO: 52885 - DNA, 80 bp, synthetic construct; identical to SEQ ID NO: 13933
  source 1..80: mol_type = other DNA

SEQ ID NO: 52886 - DNA, 80 bp, synthetic construct
  source 1..80: mol_type = other DNA
ccttcttactgggaggaagggtagagctgtctctcaggttataacctctcaggtggaggcctgagccctcagaccctact

SEQ ID NO: 52887 - DNA, 80 bp, synthetic construct
  source 1..80: mol_type = other DNA
ttgaggactttcaccctgtccagttcccagggaaggtgatgtgggagatgaatattgagatttgtgccgtgtctttcagt

SEQ ID NO: 52888 - DNA, 80 bp, synthetic construct
  source 1..80: mol_type = other DNA
cagcaactccaggagctcttgcccccctggagggaggggaggctctgaccgctgggcttccatccgctggcactggagga

SEQ ID NO: 52889 - DNA, 80 bp, synthetic construct; identical to SEQ ID NO: 13934
  source 1..80: mol_type = other DNA

SEQ ID NO: 52890 - DNA, 80 bp, synthetic construct
  source 1..80: mol_type = other DNA
gggagaggggtgtggagggctcagagacccagagaggttggcagacaggagccgtgggggagtgtggacagggtgacgtg

SEQ ID NO: 52891 - DNA, 80 bp, synthetic construct
  source 1..80: mol_type = other DNA
gtggcgggtccctggaggaggaggggatggaggagcagatcgccaaggccgagtggtggagtttggagggggccagcctt

SEQ ID NO: 52892 - DNA, 80 bp, synthetic construct
  source 1..80: mol_type = other DNA
tgtccctacatttctgccccaggtcctctcacctcccttctttcccagtgtcagcctccccaaccccgtgcccagctcac

SEQ ID NO: 52893 - DNA, 80 bp, synthetic construct; identical to SEQ ID NO: 13935
  source 1..80: mol_type = other DNA

SEQ ID NO: 52894 - DNA, 80 bp, synthetic construct
  source 1..80: mol_type = other DNA
tgctccctccaccccacctcctcttctgctctttctgtcaacacaggaactagctacacaggaagtggtttcactcctca

SEQ ID NO: 52895 - DNA, 80 bp, synthetic construct
  source 1..80: mol_type = other DNA
agtggaggattcagatccagggatgtggagctctcaaatatatacataaaaccctagcaccgggtccaacacatagtaag

SEQ ID NO: 52896 - DNA, 80 bp, synthetic construct
  source 1..80: mol_type = other DNA
gaacatggtgaaaccccatctttactaaaatacaaaaaattagctgggcgtggccacatgcgcctgtaatcccagctact

SEQ ID NO: 52897 - DNA, 80 bp, synthetic construct; identical to SEQ ID NO: 13936
  source 1..80: mol_type = other DNA

SEQ ID NO: 52898 - DNA, 80 bp, synthetic construct
  source 1..80: mol_type = other DNA
accctgtttcagaaaaagaaagaaatgaaatgaaattgaaaagggagaggactacctctctggcttggtctttgatcaat

SEQ ID NO: 52899 - DNA, 80 bp, synthetic construct
  source 1..80: mol_type = other DNA
gaagagatctggtcctgccgcttattccttgcaatcttgggcagatctctgtgcctcaatttctgagtgaaatagggttt

SEQ ID NO: 52900 - DNA, 80 bp, synthetic construct
  source 1..80: mol_type = other DNA
tcaaacctagcaacatattgctgcaaggtggacaaagtttcaagatactctctccatctacttgacttgtggccttagga

SEQ ID NO: 52901 - DNA, 80 bp, synthetic construct
  source 1..80: mol_type = other DNA
tgttccaccccagatcattaggcattagattcccgtaagaagcgagaaacttagatcccttgcatgcacagttcacaata

SEQ ID NO: 52902 - DNA, 80 bp, synthetic construct; identical to SEQ ID NO: 13937
  source 1..80: mol_type = other DNA

SEQ ID NO: 52903 - DNA, 80 bp, synthetic construct
  source 1..80: mol_type = other DNA
ccaaaaaaaggtaacacttcaaatcagctttattatgggtgacagatttagggttcttaaatagcgatagcagtggctag

SEQ ID NO: 52904 - DNA, 80 bp, synthetic construct
  source 1..80: mol_type = other DNA
ggacaatggatcataggggcaccctttggaaaccatatataggaaagaacatcttacatcccatatgcctgcaattcttg

SEQ ID NO: 52905 - DNA, 80 bp, synthetic construct
  source 1..80: mol_type = other DNA
ttttaggagagaaactaaactcacaacccttcattttgggggatccatcttaaaaccaggaaggccttccagcctgcctt

SEQ ID NO: 52906 - DNA, 80 bp, synthetic construct; identical to SEQ ID NO: 13938
  source 1..80: mol_type = other DNA

SEQ ID NO: 52907 - DNA, 80 bp, synthetic construct
  source 1..80: mol_type = other DNA
aagtctacggaccaagtccgagcctgcagacaagctccgcccccacgagggcctgctccggctgacagcgtccggcagcg

SEQ ID NO: 52908 - DNA, 80 bp, synthetic construct
  source 1..80: mol_type = other DNA
acgtccgccggcgctagcccagcctggtcccgcagctctcgggctgcccccagccccagcagtagctgggctacttccac

SEQ ID NO: 52909 - DNA, 80 bp, synthetic construct
  source 1..80: mol_type = other DNA
ccatctctcgtgcgcctgactgttttgtgggaagccctctgtcccatctaaccctgttgtcctgggcatctttatcggct

SEQ ID NO: 52910 - DNA, 80 bp, synthetic construct; identical to SEQ ID NO: 13939
  source 1..80: mol_type = other DNA

SEQ ID NO: 52911 - DNA, 80 bp, synthetic construct
  source 1..80: mol_type = other DNA
gggagttggggggggaaactcacgcggcccgtacttccaccgcatctcagattgaccgccgtaacagcaggatgagaggg

SEQ ID NO: 52912 - DNA, 80 bp, synthetic construct
  source 1..80: mol_type = other DNA
cttgggctgcaatcagttcttcaaccaggtcttccaccgccagcctggcagccagcatcaagggtgtggtcccgtcctct

SEQ ID NO: 52913 - DNA, 80 bp, synthetic construct
  source 1..80: mol_type = other DNA
ttcccaatcacaccaatttcctccttgtcaaactctaggggatgcttctgtccagctttacttgtaagctcgccccattc

SEQ ID NO: 52914 - DNA, 80 bp, synthetic construct; identical to SEQ ID NO: 13940
  source 1..80: mol_type = other DNA

SEQ ID NO: 52915 - DNA, 80 bp, synthetic construct
  source 1..80: mol_type = other DNA
atcaaaacctgaggtgttgggaagctaagttctggctctgtgtggctttagccaagtgacttttctgcttttctctgact

SEQ ID NO: 52916 - DNA, 80 bp, synthetic construct
  source 1..80: mol_type = other DNA
cccaggttcacgccattctcctgccttagcctccagagcagctgggactacaggctcccgccaccacgcccggctaattt

SEQ ID NO: 52917 - DNA, 80 bp, synthetic construct
  source 1..80: mol_type = other DNA
agattcacctgaagggcttgttaaaacagattgcctaacattttaaattcctgagtcagtagctctgtagtggagcccaa

SEQ ID NO: 52918 - DNA, 80 bp, synthetic construct; identical to SEQ ID NO: 13941
  source 1..80: mol_type = other DNA

SEQ ID NO: 52919 - DNA, 80 bp, synthetic construct
  source 1..80: mol_type = other DNA
tcttcagcctttgggtaacagcaaggatcagtgaaggttgatttgccctttcatcccttccatcacctccagaccattct

SEQ ID NO: 52920 - DNA, 80 bp, synthetic construct
  source 1..80: mol_type = other DNA
tccagcaggcttcccacccctctctccttcccctatctttgacttctgcaatagtatttcttatcttttctgattgtaaa

SEQ ID NO: 52921 - DNA, 80 bp, synthetic construct
  source 1..80: mol_type = other DNA
cgtcgagtgaaaccagggggcagccagagagctccatgctctcggcgtcgacgccggatgagctggaggacgagaagagc

SEQ ID NO: 52922 - DNA, 80 bp, synthetic construct
  source 1..80: mol_type = other DNA
ggagagacagagtcacaaagagaggccactcctggtgagactgattactattgggagacctttggacaagtttagtagcc

SEQ ID NO: 52923 - DNA, 80 bp, synthetic construct; identical to SEQ ID NO: 13942
  source 1..80: mol_type = other DNA

SEQ ID NO: 52924 - DNA, 80 bp, synthetic construct
  source 1..80: mol_type = other DNA
aggtggagcttgcagtgagccgagatcgcgccactgcactccggcctgggcgacaaggcaagactctgtctcaaacaaaa

SEQ ID NO: 52925 - DNA, 80 bp, synthetic construct
  source 1..80: mol_type = other DNA
ctgtctcagaaaacaaacacacaaaaaaaggctgagtatccataaccccaatcccaaatctgaaatgttccaaagtctga

SEQ ID NO: 52926 - DNA, 80 bp, synthetic construct
  source 1..80: mol_type = other DNA
aaccagcagtacgtgcctcatggggttgtgggggaggattaaatgaggtaacaatgtaaaatgcttagagtaaggcacaa

SEQ ID NO: 52927 - DNA, 80 bp, synthetic construct
  source 1..80: mol_type = other DNA
aagcacccgccaccacagccggctaatttttttatttttagtagagacagggtttcaccgcattagccaggatggtctca

SEQ ID NO: 52928 - DNA, 80 bp, synthetic construct; identical to SEQ ID NO: 13943
  source 1..80: mol_type = other DNA

SEQ ID NO: 52929 - DNA, 80 bp, synthetic construct
  source 1..80: mol_type = other DNA
gggaacagaggtcagagaaagtggcaaggggtcacctaccggtccctgcatgagggtggacagccagcagtggtccaggc

SEQ ID NO: 52930 - DNA, 80 bp, synthetic construct
  source 1..80: mol_type = other DNA
tctgtattggtccctggctccctttcctccctctgccctcttaaaaaaactggtgtctggcccttccctccacctagctt

SEQ ID NO: 52931 - DNA, 80 bp, synthetic construct
  source 1..80: mol_type = other DNA
ccagagtcctaccctcagagtcagggacagcacccgggccagggcaaacagctgctggtctagggctggggggctcagta

SEQ ID NO: 52932 - DNA, 80 bp, synthetic construct; identical to SEQ ID NO: 13944
  source 1..80: mol_type = other DNA

SEQ ID NO: 52933 - DNA, 80 bp, synthetic construct
  source 1..80: mol_type = other DNA
caggcccttttccctctgtgaggtgctgactgctaggggaaatactccatggcagcaaggcttagggaaggaggcttgag

SEQ ID NO: 52934 - DNA, 80 bp, synthetic construct
  source 1..80: mol_type = other DNA
actgtaactcagagccatctacgtccttcctcctcctctcacccacccctctccttccctggctccagtggatttcaggc

SEQ ID NO: 52935 - DNA, 80 bp, synthetic construct
  source 1..80: mol_type = other DNA
ccatcccagtttcctcccgggccactgcagccagcatcgcaggccccatctccacttctgccctcacaccccttggctcc

SEQ ID NO: 52936 - DNA, 80 bp, synthetic construct; identical to SEQ ID NO: 13945
  source 1..80: mol_type = other DNA

SEQ ID NO: 52937 - DNA, 80 bp, synthetic construct
  source 1..80: mol_type = other DNA
aaaggcgcctcagagagcatcaagttaatcattttgtggatgttgaaaccatgtcctgtggtaatttcacacaatgacat

SEQ ID NO: 52938 - DNA, 80 bp, synthetic construct
  source 1..80: mol_type = other DNA
ctggagtgcaatggtgcaatctcagctcattgcaacctctgcctcccgggttcaagcaattctcctgcctcagccttccc

SEQ ID NO: 52939 - DNA, 80 bp, synthetic construct
  source 1..80: mol_type = other DNA
ctgtgcccggccggctgttatattattatcttactccttagaaataggatcatatgtcttcctcttcctctggagaggga

SEQ ID NO: 52940 - DNA, 80 bp, synthetic construct; identical to SEQ ID NO: 13946
  source 1..80: mol_type = other DNA

SEQ ID NO: 52941 - DNA, 80 bp, synthetic construct
  source 1..80: mol_type = other DNA
cactgtgagcttggcatggctttttccaataatttccacatcagtgctcacccacagtcccttctgggattccaactgag

SEQ ID NO: 52942 - DNA, 80 bp, synthetic construct
  source 1..80: mol_type = other DNA
acaccactggcctgtaattatgggggagattagatgtcacacactgcatcagtcactgcctccatcctagctcattcctg

SEQ ID NO: 52943 - DNA, 80 bp, synthetic construct
  source 1..80: mol_type = other DNA
tggctctccatggtctgcttggctgtgctccagacacacttgtgccccttgtcttggggcctcacctgtgtgtccaggca

SEQ ID NO: 52944 - DNA, 80 bp, synthetic construct
  source 1..80: mol_type = other DNA
tccatggttgtgacagggttgggactgacaagcatcgagttcctttgagcagttctgtccatcgtagcctggggcacact

SEQ ID NO: 52945 - DNA, 80 bp, synthetic construct; identical to SEQ ID NO: 13947
  source 1..80: mol_type = other DNA

SEQ ID NO: 52946 - DNA, 80 bp, synthetic construct
  source 1..80: mol_type = other DNA
aggcactaggaatacaaagaaagttagaacccattcctatttcctggaagctctcagtcaaccagaggaaagaaatgact

SEQ ID NO: 52947 - DNA, 80 bp, synthetic construct
  source 1..80: mol_type = other DNA
atcaatgaaggtctgtgactccaaaccaatgctcttaaccattttctgcttcttcatgccactcagctagtgagagaagg

SEQ ID NO: 52948 - DNA, 80 bp, synthetic construct
  source 1..80: mol_type = other DNA
gagtggtcagagagctggaaggaacaggtgatgggggtgttttggaggagggagcttcataaaagaagaagtaaatagcc

SEQ ID NO: 52949 - DNA, 80 bp, synthetic construct
  source 1..80: mol_type = other DNA
cagctactcaggaggctgaggcaggagaatcgcttgaacccgggaggcggaggttgcagtgaaccgagatcgcgccactg

SEQ ID NO: 52950 - DNA, 80 bp, synthetic construct; identical to SEQ ID NO: 13948
  source 1..80: mol_type = other DNA

SEQ ID NO: 52951 - DNA, 80 bp, synthetic construct
  source 1..80: mol_type = other DNA
acacacatacacaaaattagctaggtgtggtggcaggcacctgtaatcccagctactggggaggctgaggcaggtgaatt

SEQ ID NO: 52952 - DNA, 80 bp, synthetic construct
  source 1..80: mol_type = other DNA
tgaatggggaaaagttgaaagcctttcctctaagatctggaacaagacaaggatgctcactttcactatttttattcaag

SEQ ID NO: 52953 - DNA, 80 bp, synthetic construct
  source 1..80: mol_type = other DNA
gctgtaggatacaaaatcaatgtagaaaaagtagtagcatttctatacgctaacagcaaacaatcagaaaaagaaatcaa

SEQ ID NO: 52954 - DNA, 80 bp, synthetic construct; identical to SEQ ID NO: 13949
  source 1..80: mol_type = other DNA

SEQ ID NO: 52955 - DNA, 80 bp, synthetic construct
  source 1..80: mol_type = other DNA
tggcataaaaaacagacacatagaccaatggaatgtaatagagagcccagaaaaacaagtccaaacatttaacagccaac

SEQ ID NO: 52956 - DNA, 80 bp, synthetic construct
  source 1..80: mol_type = other DNA
ggtgcgcaccaccatgcctggctaatttttgtatttttagtagagacgggggtttcactatgttggtcaggctggtctcg

SEQ ID NO: 52957 - DNA, 80 bp, synthetic construct
  source 1..80: mol_type = other DNA
gatatccatatgcagaagaaactaaacctaggccgggcggggtggctcacgcctgtaatcccagcactttgggaggcgga

SEQ ID NO: 52958 - DNA, 80 bp, synthetic construct; identical to SEQ ID NO: 13950
  source 1..80: mol_type = other DNA

SEQ ID NO: 52959 - DNA, 80 bp, synthetic construct
  source 1..80: mol_type = other DNA
aggagtttgagaccagcctggccaacatggtgaaaccccgtctctactaaaaatacaaaaaaatagctgggcgtggtggt

SEQ ID NO: 52960 - DNA, 80 bp, synthetic construct
  source 1..80: mol_type = other DNA
ggaaatgcttcaagacattggtctgggcaaaagttttttgggtaagacctcaacagccaggcaacaaaggcaacaacaga

SEQ ID NO: 52961 - DNA, 80 bp, synthetic construct
  source 1..80: mol_type = other DNA
atcagaacgtataaggaactcaacagcaaacaccaccactaccaccaccgacaaataatgtggtttaaaaaatgagcaaa

SEQ ID NO: 52962 - DNA, 80 bp, synthetic construct
  source 1..80: mol_type = other DNA
cctgtaatcccagcactttcagaggttgaggcgggaagatcatttgaggtcaggagttcgagaccatcctggccaacatg

SEQ ID NO: 52963 - DNA, 80 bp, synthetic construct; identical to SEQ ID NO: 13951
  source 1..80: mol_type = other DNA

SEQ ID NO: 52964 - DNA, 80 bp, synthetic construct
  source 1..80: mol_type = other DNA
catatttattgcagcactgttcacaatagctaacatatggaattaactgaagtgccatcaacaaatgaatggaaaaaaga

SEQ ID NO: 52965 - DNA, 80 bp, synthetic construct
  source 1..80: mol_type = other DNA
ccactgccttagttagtcctgacctttcttgcattccaggtagatacttgcatcagcctcctattgcatgtgtaatattg

SEQ ID NO: 52966 - DNA, 80 bp, synthetic construct
  source 1..80: mol_type = other DNA
tagatagcagagaaggatggtgatagttaacaatttgtatttcaaaataactaggagagaagatttgaaatgttctcaac

SEQ ID NO: 52967 - DNA, 80 bp, synthetic construct
  source 1..80: mol_type = other DNA
aggagttctgagaccagcctgcccaacatggtgaaaccccatctctactaaaaatacaaaaattagccaggcgtggtggc

SEQ ID NO: 52968 - DNA, 80 bp, synthetic construct; identical to SEQ ID NO: 13952
  source 1..80: mol_type = other DNA

SEQ ID NO: 52969 - DNA, 80 bp, synthetic construct
  source 1..80: mol_type = other DNA
cagcctgtggaagaggggttgggaaggccattccaggtagtgtcaatagcagggataaaggctgagaggcaagaatcagt

SEQ ID NO: 52970 - DNA, 80 bp, synthetic construct
  source 1..80: mol_type = other DNA
gggagagacaggtcaactggacattttcagtagagtaccctggccacggggtaaaggctgaacctatagaaggacaagtg

SEQ ID NO: 52971 - DNA, 80 bp, synthetic construct
  source 1..80: mol_type = other DNA
ggagataaagtggcatgactttgtggttagttgggtgtgtggggttaaaaaaaataaaaggaggtgaaatggatacattg

SEQ ID NO: 52972 - DNA, 80 bp, synthetic construct; identical to SEQ ID NO: 13953
  source 1..80: mol_type = other DNA

SEQ ID NO: 52973 - DNA, 80 bp, synthetic construct
  source 1..80: mol_type = other DNA
aacatggggaaaccccgtctctactaaaaatacaaaaaattggtcgggcgttgtggcaggcacctgtaatcccagctact

SEQ ID NO: 52974 - DNA, 80 bp, synthetic construct
  source 1..80: mol_type = other DNA
cgggcgtggtggctcacacctgtaattccagcactttgggaggctgagacgggtggatcactgaggttaggagttcgaga

SEQ ID NO: 52975 - DNA, 80 bp, synthetic construct
  source 1..80: mol_type = other DNA
cactgcactccaccctgggtgacagactgggactccatctcaaaaataaataaataaataaataaataaataaataaata

SEQ ID NO: 52976 - DNA, 80 bp, synthetic construct; identical to SEQ ID NO: 13954
  source 1..80: mol_type = other DNA

SEQ ID NO: 52977 - DNA, 80 bp, synthetic construct
  source 1..80: mol_type = other DNA
tcccatcagctatcccttaactccatcataatctctttcccgagctcttctcatatcaaaccttattttagtgttctttt

SEQ ID NO: 52978 - DNA, 80 bp, synthetic construct
  source 1..80: mol_type = other DNA
tcctgtggaatgggctggttggtgttgcttgaattgcgttaaatgaggtaacaggaattgtgttaggcttctctgattgc

SEQ ID NO: 52979 - DNA, 80 bp, synthetic construct
  source 1..80: mol_type = other DNA
attttcttcatttgctctccagtcagtgccggcgttggttaccttggctcagtgcagccttctggcaggaggacagtgga

SEQ ID NO: 52980 - DNA, 80 bp, synthetic construct; identical to SEQ ID NO: 13955
  source 1..80: mol_type = other DNA

SEQ ID NO: 52981 - DNA, 80 bp, synthetic construct
  source 1..80: mol_type = other DNA
ctgaacaagacagagacagggcatgataggaagaagttcgggcaacaaggggaaggtagtgtgtgatattgtcgggaggc

SEQ ID NO: 52982 - DNA, 80 bp, synthetic construct
  source 1..80: mol_type = other DNA
gcggagctttccctcacagcgcgggccctggaagcccatggcacagaggcaggagaaggtgccaggcctgttcacacagg

SEQ ID NO: 52983 - DNA, 80 bp, synthetic construct
  source 1..80: mol_type = other DNA
atgatattttattgtttttagatagggtcttgctctgttacccaggcagtggtgccatcagagctcactgcagtcttaac

SEQ ID NO: 52984 - DNA, 80 bp, synthetic construct; identical to SEQ ID NO: 13956
  source 1..80: mol_type = other DNA

SEQ ID NO: 52985 - DNA, 80 bp, synthetic construct
  source 1..80: mol_type = other DNA
aggtgggtcctgaaggaaacaggtgggggctgagaaagggtgtcctccttccctccctccgctctccttctctttcctct

SEQ ID NO: 52986 - DNA, 80 bp, synthetic construct
  source 1..80: mol_type = other DNA
accagcacagggtgtatatggtttagggagggtctcacctgtgtagcctgtagggcaggtgcagttgtagccagagggct

SEQ ID NO: 52987 - DNA, 80 bp, synthetic construct
  source 1..80: mol_type = other DNA
aggggagggtttttctcttctcctactgcttatgttcccctccctgctgcctggacccctatgacttcctcttcttttgg

SEQ ID NO: 52988 - DNA, 80 bp, synthetic construct; identical to SEQ ID NO: 13957
  source 1..80: mol_type = other DNA

SEQ ID NO: 52989 - DNA, 80 bp, synthetic construct
  source 1..80: mol_type = other DNA
caagtagctgggattacaggtgcgccaccatgcccagctaatttttgcatttttagtagctacagggtttcaccatgttg

SEQ ID NO: 52990 - DNA, 80 bp, synthetic construct
  source 1..80: mol_type = other DNA
ttctgctctgaccccctggtcctctgtttccaccagtttttgtggactctcttctccttggataacacttaccagttgag

SEQ ID NO: 52991 - DNA, 80 bp, synthetic construct
  source 1..80: mol_type = other DNA
cagtgcccgtggtggcaggtgcagttgtcctcaggtggggcacagccagggcttccatcaggacagaggcagttggcctt

SEQ ID NO: 52992 - DNA, 80 bp, synthetic construct; identical to SEQ ID NO: 13958
  source 1..80: mol_type = other DNA

SEQ ID NO: 52993 - DNA, 80 bp, synthetic construct
  source 1..80: mol_type = other DNA
ttatctccagctaaaacacactatctggcactctatttagacagactcctgaccatccatctttctatctttctctcttt

SEQ ID NO: 52994 - DNA, 80 bp, synthetic construct
  source 1..80: mol_type = other DNA
tcaagcgattctcttgcctcagcctccccaatagctgggattgcaggcgcccgccaccacgcctggctaatttttgtatt

SEQ ID NO: 52995 - DNA, 80 bp, synthetic construct
  source 1..80: mol_type = other DNA
atttttttgtatttttagttgagatggggtttcaccgtgttagccaggatagtgtcgatctcctgacctcatgatccacc

SEQ ID NO: 52996 - DNA, 80 bp, synthetic construct; identical to SEQ ID NO: 13959
  source 1..80: mol_type = other DNA

SEQ ID NO: 52997 - DNA, 80 bp, synthetic construct
  source 1..80: mol_type = other DNA
ccgtatctggcatagtaggcagttggtaagtgcttgctaaataagcaagtgaatgccttttctttgagccccgtcctctg

SEQ ID NO: 52998 - DNA, 80 bp, synthetic construct
  source 1..80: mol_type = other DNA
cattctcattctattctcacatcccaaccatcaaacacccaccaatgaactctgccccaacccaaatggaataaaatatt

SEQ ID NO: 52999 - DNA, 80 bp, synthetic construct
  source 1..80: mol_type = other DNA
ggcacagcaggaaggtcagggacctgcacggatgtctgcctcctgctcccgctgtcccccacagtgtgtgccccagttta

SEQ ID NO: 53000 - DNA, 80 bp, synthetic construct; identical to SEQ ID NO: 13960
  source 1..80: mol_type = other DNA

SEQ ID NO: 53001 - DNA, 80 bp, synthetic construct
  source 1..80: mol_type = other DNA
aaatgacataacgcctgaaaagtactcagccaaatggctagcctggagtaagtggtgaataagtgtagttattataatag

SEQ ID NO: 53002 - DNA, 80 bp, synthetic construct
  source 1..80: mol_type = other DNA
aggacagagatgagaatgggcaagtaagcaagggaagatttggggatgtaagagtagagattttggggagcaaagacaga

SEQ ID NO: 53003 - DNA, 80 bp, synthetic construct
  source 1..80: mol_type = other DNA
atggcaatccgcgtggttcaggcagggagctgaggcacactcgttggtctccacctcacagagctgcccttctaagcctg

SEQ ID NO: 53004 - DNA, 80 bp, synthetic construct; identical to SEQ ID NO: 13961
  source 1..80: mol_type = other DNA

SEQ ID NO: 53005 - DNA, 80 bp, synthetic construct
  source 1..80: mol_type = other DNA
agatcccaaagtggaggaatttgaagtgcatctgggaagcttgttgctcctatatttgtcccgttgctttgggttcatcc

SEQ ID NO: 53006 - DNA, 80 bp, synthetic construct
  source 1..80: mol_type = other DNA
tgttgggtgacctgagccagtatctttgggtgccgctcagtttagaaagtcaatatggggtagtggttataattgttgaa

SEQ ID NO: 53007 - DNA, 80 bp, synthetic construct
  source 1..80: mol_type = other DNA
agacagtacctggcataaagttggcgattatttttctgatttcattcaactccttgatgttggctctgttgctgtctccc

SEQ ID NO: 53008 - DNA, 80 bp, synthetic construct; identical to SEQ ID NO: 13962
  source 1..80: mol_type = other DNA

SEQ ID NO: 53009 - DNA, 80 bp, synthetic construct
  source 1..80: mol_type = other DNA
agcatctgtggtaacttacgccaattggcctgaagctgtccttactctggagggggcattcctagtgggttcaggactag

SEQ ID NO: 53010 - DNA, 80 bp, synthetic construct
  source 1..80: mol_type = other DNA
gacagaggcagttgaaggagccaggagtgttgaggcaggaaccgccatgttcacagggacttgggccttgctgggctggg

SEQ ID NO: 53011 - DNA, 80 bp, synthetic construct
  source 1..80: mol_type = other DNA
ggactgaggggctgaacattggagagagggtcatgtaggcaagagatgccaaatctgggcaaattcaaggaaaaagatgt

SEQ ID NO: 53012 - DNA, 80 bp, synthetic construct; identical to SEQ ID NO: 13963
  source 1..80: mol_type = other DNA

SEQ ID NO: 53013 - DNA, 80 bp, synthetic construct
  source 1..80: mol_type = other DNA
agaaagagcccacccggtcaatgcaggtggatcccggggcacaggtggcagcaatacagtcatccaggttctcctcacag

SEQ ID NO: 53014 - DNA, 80 bp, synthetic construct
  source 1..80: mol_type = other DNA
aaggctgggagccctatgagtaggggaggccaggggccaactctctgggccatgggtgtcatggatgtggcttaaacaac

SEQ ID NO: 53015 - DNA, 80 bp, synthetic construct
  source 1..80: mol_type = other DNA
ctccaacggagacatcctgccctgcccagagagaggggcggccggagagcccctgtgaggacacacctgggggacagagg

SEQ ID NO: 53016 - DNA, 80 bp, synthetic construct; identical to SEQ ID NO: 13964
  source 1..80: mol_type = other DNA

SEQ ID NO: 53017 - DNA, 80 bp, synthetic construct
  source 1..80: mol_type = other DNA
agtgctcactctggattatctctgggtctcattttcatatttccttccctttattaccatactttctttgctctgttcca

SEQ ID NO: 53018 - DNA, 80 bp, synthetic construct
  source 1..80: mol_type = other DNA
ggagactcaggtggcaccatgctgtgccacaactggttgtatacccttgggtgagccactttgcctttctgatcctcatt

SEQ ID NO: 53019 - DNA, 80 bp, synthetic construct
  source 1..80: mol_type = other DNA
ccattactctccctgtttgtcagctgacaactgaacaccagaaagctaaaatatcttatatgaggtcatgtagctgatca

SEQ ID NO: 53020 - DNA, 80 bp, synthetic construct; identical to SEQ ID NO: 13965
  source 1..80: mol_type = other DNA

SEQ ID NO: 53021 - DNA, 80 bp, synthetic construct
  source 1..80: mol_type = other DNA
ttgtgggtaagtggattgccaagaattggcatgttgattctcatggcttctgtcttcaaagggcttgcagtttctcaggc

SEQ ID NO: 53022 - DNA, 80 bp, synthetic construct
  source 1..80: mol_type = other DNA
gaggacaagggtcttcaagcttggcctggcatctctcaccagtgaagccagggaggcaagtgcacaagaagctgggtgtc

SEQ ID NO: 53023 - DNA, 80 bp, synthetic construct
  source 1..80: mol_type = other DNA
cacatcactggtccctcttcctattcttgcccactccctcctctgccttcatttgtttcccttcatctccttcacttcct

SEQ ID NO: 53024 - DNA, 80 bp, synthetic construct; identical to SEQ ID NO: 13966
  source 1..80: mol_type = other DNA

SEQ ID NO: 53025 - DNA, 80 bp, synthetic construct
  source 1..80: mol_type = other DNA
cccaagtccagcctcggactccatctctcggaagcaagacaacaggggtcagaagaggggcggaggtggctcccgggagg

SEQ ID NO: 53026 - DNA, 80 bp, synthetic construct
  source 1..80: mol_type = other DNA
tgtgttccctcttcccctcttccctatggctgcaagagtcctccagtgccagtgctgacgaggttcttcctggaggtggg

SEQ ID NO: 53027 - DNA, 80 bp, synthetic construct
  source 1..80: mol_type = other DNA
ccaccccactgatcatcctcctaagggagctgggtcccctcacctcacccacgccatgcctcacctctgggtctgaccac

SEQ ID NO: 53028 - DNA, 80 bp, synthetic construct; identical to SEQ ID NO: 13967
  source 1..80: mol_type = other DNA

SEQ ID NO: 53029 - DNA, 80 bp, synthetic construct
  source 1..80: mol_type = other DNA
ctgctgtttgttgatctggtctctcctttctagggatgagaattgcaaggtggctgccctgtgccccaggaggggcagga

SEQ ID NO: 53030 - DNA, 80 bp, synthetic construct
  source 1..80: mol_type = other DNA
cttatcttggctcttgccaggacttatttttctccttctggcaaatgggcaagatgctggccggttttggggaaatcttg

SEQ ID NO: 53031 - DNA, 80 bp, synthetic construct
  source 1..80: mol_type = other DNA
atgcagggaatgccagtcagaatgcaaaattggagtcaataaaatcacaaaagagaattctttgcctcagaatgctcatc

SEQ ID NO: 53032 - DNA, 80 bp, synthetic construct; identical to SEQ ID NO: 13968
  source 1..80: mol_type = other DNA

SEQ ID NO: 53033 - DNA, 80 bp, synthetic construct
  source 1..80: mol_type = other DNA
gataccctttacccttaaatccatcagtgcaaattttctaagaacaaaacattcttttacataatatagtacaattatcc

SEQ ID NO: 53034 - DNA, 80 bp, synthetic construct
  source 1..80: mol_type = other DNA
tggcatcctgcattgcatttagctgtcgagtctttttagtttcctttaatatgagtacagtaccttaaatgtactttgcc

SEQ ID NO: 53035 - DNA, 80 bp, synthetic construct
  source 1..80: mol_type = other DNA
tggctgactttttgtattttagtagagacagggtttcaccatggtgcccaggctggtctcaaactcctgagcttaggcaa

SEQ ID NO: 53036 - DNA, 80 bp, synthetic construct; identical to SEQ ID NO: 13969
  source 1..80: mol_type = other DNA

SEQ ID NO: 53037 - DNA, 80 bp, synthetic construct
  source 1..80: mol_type = other DNA
ctgggattacaggtgtgtaccaccacacctggccttcaatttttaaacatataataaactgagctgtggtaaatattctt

SEQ ID NO: 53038 - DNA, 80 bp, synthetic construct
  source 1..80: mol_type = other DNA
catgcctggctgatttttgtatttttagtagagacggggtttcatcatgttatccaggctggtctcgaactcctgacctc

SEQ ID NO: 53039 - DNA, 80 bp, synthetic construct
  source 1..80: mol_type = other DNA
taggctaaattctagaagtgaaacccctgagtgaaagggtgaagacatagacttgttttaaagctcttggtctctatgtg

SEQ ID NO: 53040 - DNA, 80 bp, synthetic construct; identical to SEQ ID NO: 13970
  source 1..80: mol_type = other DNA

SEQ ID NO: 53041 - DNA, 80 bp, synthetic construct
  source 1..80: mol_type = other DNA
aaaatgggaagagacaacaggtttctcatggaaccgcgaagaccttggtggaaagaactgaactcaccatttctgcaatg

SEQ ID NO: 53042 - DNA, 80 bp, synthetic construct
  source 1..80: mol_type = other DNA
tgggcagaagctgagtttaaagacagtgtcaggaagctgcctgcccacttcttgctttatcctgcttaaggtaaggcagt

SEQ ID NO: 53043 - DNA, 80 bp, synthetic construct
  source 1..80: mol_type = other DNA
tcactacagtgaactgcagcatgccagggatacagatagttccctctgggaaatgaccctttttcctacagtatttcatc

SEQ ID NO: 53044 - DNA, 80 bp, synthetic construct; identical to SEQ ID NO: 13971
  source 1..80: mol_type = other DNA

SEQ ID NO: 53045 - DNA, 80 bp, synthetic construct
  source 1..80: mol_type = other DNA
cccagctacttgggaggctgacgtgggaggatcacttgagcccaggaggttgaggctgcaacgagccataatcatgccac

SEQ ID NO: 53046 - DNA, 80 bp, synthetic construct
  source 1..80: mol_type = other DNA
gttggttactcttcatctctccaacctcttaccattgtagtgtccatggttattccctgggcctcttctagttttctgtc

SEQ ID NO: 53047 - DNA, 80 bp, synthetic construct
  source 1..80: mol_type = other DNA
gacctgatcttctcccttaaccttctcttccttcctgatagaattgagttttgcagttctattctttccattgtttaggc

SEQ ID NO: 53048 - DNA, 80 bp, synthetic construct
  source 1..80: mol_type = other DNA
atcatgaggtcaggagatcgagaccatcctggctaacaaggtgaaaccccgtctctactaaaaatacaaaaaattagccg

SEQ ID NO: 53049 - DNA, 80 bp, synthetic construct; identical to SEQ ID NO: 13972
  source 1..80: mol_type = other DNA

SEQ ID NO: 53050 - DNA, 80 bp, synthetic construct
  source 1..80: mol_type = other DNA
tgagtcagttgaaatacaagttagaccacctcactcctctgctcaaaagtctccaatcgcttctccactcactcagagta

SEQ ID NO: 53051 - DNA, 80 bp, synthetic construct
  source 1..80: mol_type = other DNA
ccgggttcaagcgattctcctgcctcagcctcctgagtagctgggactacaggtgcgtgccaccacgccgggctattttt

SEQ ID NO: 53052 - DNA, 80 bp, synthetic construct
  source 1..80: mol_type = other DNA
caaggcccttccctctctaacctcatctttgattacttctcaccatccagccccattagcttcctgctgttcttgaaaca

SEQ ID NO: 53053 - DNA, 80 bp, synthetic construct
  source 1..80: mol_type = other DNA
cccatttcaaaactggaagccttctctcatgttccccacccccattggcttttctccttattatttctcaccatctaact

SEQ ID NO: 53054 - DNA, 80 bp, synthetic construct; identical to SEQ ID NO: 13973
  source 1..80: mol_type = other DNA

SEQ ID NO: 53055 - DNA, 80 bp, synthetic construct
  source 1..80: mol_type = other DNA
tgggaaacaagtttctgcttcgattacatcagaaactacagatccagacattctcttatgcctttgctgacattcagtgc

SEQ ID NO: 53056 - DNA, 80 bp, synthetic construct
  source 1..80: mol_type = other DNA
atcagatagcgataaggagtatgagatgatataaggcagggtgaggggagagagaacttgggggctactttagattggga

SEQ ID NO: 53057 - DNA, 80 bp, synthetic construct
  source 1..80: mol_type = other DNA
gtagtctcagctactccagaggctgaggcaggagaaccacttgaacctgggaggtggaggttgcattgagctgaaattaa

SEQ ID NO: 53058 - DNA, 80 bp, synthetic construct
  source 1..80: mol_type = other DNA
gtttgagaccagcctgaccaatatggtgaaaccccatctctactaaaaatacaaaaattagccgggcatagtggtgcacg

SEQ ID NO: 53059 - DNA, 80 bp, synthetic construct; identical to SEQ ID NO: 13974
  source 1..80: mol_type = other DNA

SEQ ID NO: 53060 - DNA, 80 bp, synthetic construct
  source 1..80: mol_type = other DNA
actgaataaggggtacacaggttgggtctccaggaagtggactttgagatttaacccggagctgggatggcccttcagag

SEQ ID NO: 53061 - DNA, 80 bp, synthetic construct
  source 1..80: mol_type = other DNA
ggtaacactgtcaactaactaagcctaacggacatctataaaacactctgctaaacaatagcaggatataccatttttct

SEQ ID NO: 53062 - DNA, 80 bp, synthetic construct
  source 1..80: mol_type = other DNA
gtgtgaaaattaaacagcatgcttctaaacaaccaatgggtggaagaagaaatcacaaggaaaaccagaaaatatttcaa

SEQ ID NO: 53063 - DNA, 80 bp, synthetic construct; identical to SEQ ID NO: 13975
  source 1..80: mol_type = other DNA

SEQ ID NO: 53064 - DNA, 80 bp, synthetic construct
  source 1..80: mol_type = other DNA
tacaggtgcatacaaccacgcttggttaattgttaaattttttttttttttttttttttggtgtggagacagggtctcac

SEQ ID NO: 53065 - DNA, 80 bp, synthetic construct
  source 1..80: mol_type = other DNA
gggccaagagtttgagaccagcctggccaacatggtgaaaccctgtctctaaaaaatgcaaaaattagccgggcatggtg

SEQ ID NO: 53066 - DNA, 80 bp, synthetic construct
  source 1..80: mol_type = other DNA
agaaagtggaaattgccttcattaaggaaaaaaacaaacataaaaataacagcaaccataagaaagtgaaaagataaaca

SEQ ID NO: 53067 - DNA, 80 bp, synthetic construct; identical to SEQ ID NO: 13976
  source 1..80: mol_type = other DNA

SEQ ID NO: 53068 - DNA, 80 bp, synthetic construct
  source 1..80: mol_type = other DNA
taatttctcttctacctttaagttcgctgaatctttcctctgtcctctccaatctgctgttaagccaatctattgagtct

SEQ ID NO: 53069 - DNA, 80 bp, synthetic construct
  source 1..80: mol_type = other DNA
atcttggctcactgcaacctctgcctcccaggttcaagtgatactcctgcctcagcctcccaagtagctggaattacagg

SEQ ID NO: 53070 - DNA, 80 bp, synthetic construct
  source 1..80: mol_type = other DNA
gctgggattacaggtgtgagccacctcacccggcctgattcttctttatatcttccatttctttgccaaaatttctggtt

SEQ ID NO: 53071 - DNA, 80 bp, synthetic construct; identical to SEQ ID NO: 13977
  source 1..80: mol_type = other DNA

SEQ ID NO: 53072 - DNA, 80 bp, synthetic construct
  source 1..80: mol_type = other DNA
gctgtaaagcttttttttttttttgagacagagtctcactcggttgcccaggctggagtgcagcagtgcaatcttggctc

SEQ ID NO: 53073 - DNA, 80 bp, synthetic construct
  source 1..80: mol_type = other DNA
aagtgatctgcctacctcggcctcccagaatgctgggattacagatgtgagccaatgtgcctggcctgtgaagctttttt

SEQ ID NO: 53074 - DNA, 80 bp, synthetic construct
  source 1..80: mol_type = other DNA
cccagctaatatttgtatgtttagtggagacggggtttcgccatgttggtcaggctggtctcgaactcctgaccttgagt

SEQ ID NO: 53075 - DNA, 80 bp, synthetic construct; identical to SEQ ID NO: 13978
  source 1..80: mol_type = other DNA

SEQ ID NO: 53076 - DNA, 80 bp, synthetic construct
  source 1..80: mol_type = other DNA
tccttgttattgctaggtgtggatgggggttcaggcttcccactaggtctctgctgacacaccctggctgagagagtaag

SEQ ID NO: 53077 - DNA, 80 bp, synthetic construct
  source 1..80: mol_type = other DNA
cagctgggtgggagttgatggctaaactccccactcatcctttattggcagatatgggggtgagagtgttgttttttttt

SEQ ID NO: 53078 - DNA, 80 bp, synthetic construct
  source 1..80: mol_type = other DNA
tcttgtatatatgaggcaaaagccaaacccagggaactcaccactatattgttttttcgggtcttgagattcctagccag

SEQ ID NO: 53079 - DNA, 80 bp, synthetic construct; identical to SEQ ID NO: 13979
  source 1..80: mol_type = other DNA

SEQ ID NO: 53080 - DNA, 80 bp, synthetic construct
  source 1..80: mol_type = other DNA
catggtggtgcatgcctgtaatcccagctacttgggaggctgaggcaggagaatcacttgaacccaggaggcggaggttg

SEQ ID NO: 53081 - DNA, 80 bp, synthetic construct
  source 1..80: mol_type = other DNA
aaaacaaccaaatatccattgatcagtgaattggtgaacaaaatatggtgtgtccctttgggaggctgaggcaggtgcat

SEQ ID NO: 53082 - DNA, 80 bp, synthetic construct
  source 1..80: mol_type = other DNA
ttgcagtgagctgagatcacaccactgcactccagcctgggtgacagaacaagactctatctcaaaaaaaaaaaaaaaaa

SEQ ID NO: 53083 - DNA, 80 bp, synthetic construct; identical to SEQ ID NO: 13980
  source 1..80: mol_type = other DNA

SEQ ID NO: 53084 - DNA, 80 bp, synthetic construct
  source 1..80: mol_type = other DNA
attgaattgtacacttaaaatggatgatttttttttctttgagatggagtctcgatctgttgcccaggctagagtgcagt

SEQ ID NO: 53085 - DNA, 80 bp, synthetic construct
  source 1..80: mol_type = other DNA
ttagtagagacggggtttcaccgtgttggccaggctggtctcgaactcctgacctcaagtgatccatccacctcggcctc

SEQ ID NO: 53086 - DNA, 80 bp, synthetic construct
  source 1..80: mol_type = other DNA
tgtagaatttcttaaggaattttgctgtcaagagctgcagagaaagtatgtctagcgagacagcatatgaggtcatgaga

SEQ ID NO: 53087 - DNA, 80 bp, synthetic construct
  source 1..80: mol_type = other DNA
tgaggtcaggagttcaagaccatcctggccaacgtggtgaaaccccgtctctaataaaaaatacaaaaattagccggaca

SEQ ID NO: 53088 - DNA, 80 bp, synthetic construct; identical to SEQ ID NO: 13981
  source 1..80: mol_type = other DNA

SEQ ID NO: 53089 - DNA, 80 bp, synthetic construct
  source 1..80: mol_type = other DNA
ccattttgctagtattatttctgaaaagtttacataatttcttaatattatcaaatatgcaatgtttagttttcccaaat

SEQ ID NO: 53090 - DNA, 80 bp, synthetic construct
  source 1..80: mol_type = other DNA
atacagtttgaatcaatatcaaaacaatatccgtgcattgtattcagttgatatgtgtcttaagtctctctttctcttct

SEQ ID NO: 53091 - DNA, 80 bp, synthetic construct
  source 1..80: mol_type = other DNA
agagaaactgagaggatagtacagagtattcccatgtgccctccctggattcagtgtcccttattaataacatcttacgt

SEQ ID NO: 53092 - DNA, 80 bp, synthetic construct
  source 1..80: mol_type = other DNA
ggagtttgagaccagcctggccaacatggtgaaaccctctctctactaaaaatacaaaaattagccaggcgtggtggagc

SEQ ID NO: 53093 - DNA, 80 bp, synthetic construct; identical to SEQ ID NO: 13982
  source 1..80: mol_type = other DNA

SEQ ID NO: 53094 - DNA, 80 bp, synthetic construct
  source 1..80: mol_type = other DNA
atttttttgtattttgagtagagacggggtttccccatgttggacaggctggtctcgaactcctggcctcaagtgatctg

SEQ ID NO: 53095 - DNA, 80 bp, synthetic construct
  source 1..80: mol_type = other DNA
gtgtactagtcaggtgttatgcaggctgcccctcttttggaatttgtttggtgattttctcatggttagacttggagctt

SEQ ID NO: 53096 - DNA, 80 bp, synthetic construct
  source 1..80: mol_type = other DNA
gatttaaagactttatatgattcatgatctattttctggcaaggctacgtcataggtggtattgtgctgtgtttctatca

SEQ ID NO: 53097 - DNA, 80 bp, synthetic construct; identical to SEQ ID NO: 13983
  source 1..80: mol_type = other DNA

SEQ ID NO: 53098 - DNA, 80 bp, synthetic construct
  source 1..80: mol_type = other DNA
tgttttctggtgataagatgttcaggctcatcttgtacataagctgctatatgtttctttttagaggaaatggtactagg

SEQ ID NO: 53099 - DNA, 80 bp, synthetic construct
  source 1..80: mol_type = other DNA
gtgagaggcagtggggtctagtgcccaagtggaggagttggttgttagttgaaagtgaggaagatgagctgagcacattg

SEQ ID NO: 53100 - DNA, 80 bp, synthetic construct
  source 1..80: mol_type = other DNA
gccgggtgtggtggtgcatgcctgtaatcctagctaattgggaggccgaagcaggagaatcacttgaacccaggaggcag

SEQ ID NO: 53101 - DNA, 80 bp, synthetic construct; identical to SEQ ID NO: 13984
  source 1..80: mol_type = other DNA

SEQ ID NO: 53102 - DNA, 80 bp, synthetic construct
  source 1..80: mol_type = other DNA
ggcttttgacaggcaggcatgatggagggaatgagggaaataggagttgagatgcaagatagctcttacaacaatgcttc

SEQ ID NO: 53103 - DNA, 80 bp, synthetic construct
  source 1..80: mol_type = other DNA
agtgatctgcaaggacaggaagggggatacttaaaactgagattatggagaggtttcaggtacaggtacaggtaatgaca

SEQ ID NO: 53104 - DNA, 80 bp, synthetic construct
  source 1..80: mol_type = other DNA
agaaagacagtgacccagggactgaaaattttagtgaattgtgaagagtgaggagtgactggaaggctgttaaatgctgg

SEQ ID NO: 53105 - DNA, 80 bp, synthetic construct; identical to SEQ ID NO: 13985
  source 1..80: mol_type = other DNA

SEQ ID NO: 53106 - DNA, 80 bp, synthetic construct
  source 1..80: mol_type = other DNA
agtggtgcgatcttggctcactgcaacctctgcctcccaggttcaagcgattctcctgccctagcctcccaagtagctgg

SEQ ID NO: 53107 - DNA, 80 bp, synthetic construct
  source 1..80: mol_type = other DNA
cagccatattaaaactcttgtgtaataaattcgcagatatggaaatccttcattttccacaaaaaaaccccatcctgtgt

SEQ ID NO: 53108 - DNA, 80 bp, synthetic construct
  source 1..80: mol_type = other DNA
ggatggtcttgcctctggctttcaaactttttcttttcatcatgtcaaatgtagaggaattttgtccatcaaactcatat

SEQ ID NO: 53109 - DNA, 80 bp, synthetic construct; identical to SEQ ID NO: 13986
  source 1..80: mol_type = other DNA

SEQ ID NO: 53110 - DNA, 80 bp, synthetic construct
  source 1..80: mol_type = other DNA
actttggggacaaaagattttctttctttctttctttctttccttccttccttccttccttccttccttctttctttcct

SEQ ID NO: 53111 - DNA, 80 bp, synthetic construct
  source 1..80: mol_type = other DNA
ttggtgggtagagcagaagagtatataatagtgaaaaaaacacttagcttaggagtttgacacagtgtgatgttggtcag

SEQ ID NO: 53112 - DNA, 80 bp, synthetic construct
  source 1..80: mol_type = other DNA
ctggggcggcattactggttatccctttcctggggaggttgacaattaaccctggaaacagtctttaaaatttttactgg

SEQ ID NO: 53113 - DNA, 80 bp, synthetic construct; identical to SEQ ID NO: 13987
  source 1..80: mol_type = other DNA

SEQ ID NO: 53114 - DNA, 80 bp, synthetic construct
  source 1..80: mol_type = other DNA
gtgtgcgtgtatatttttttttcgttgttgtttctctgcctctctcgccaaactatatggagccctggctaaggatagag

SEQ ID NO: 53115 - DNA, 80 bp, synthetic construct
  source 1..80: mol_type = other DNA
gggagggtgggtgagagctagtaagggtgggtggggcactgggggtgggcagcgggtacttggctaggggttcaggacct

SEQ ID NO: 53116 - DNA, 80 bp, synthetic construct
  source 1..80: mol_type = other DNA
cacaactggtcttccctgtgtgtttggtaaacaccaaaggaggtaaactctccaatcctggcctgtgctgatggtgaggc

SEQ ID NO: 53117 - DNA, 80 bp, synthetic construct; identical to SEQ ID NO: 13988
  source 1..80: mol_type = other DNA

SEQ ID NO: 53118 - DNA, 80 bp, synthetic construct
  source 1..80: mol_type = other DNA
gttttcttcacattcttcacatcagccacctcctccactccccaccaggatgtcaactgaaacatgtctcagtccaaatt

SEQ ID NO: 53119 - DNA, 80 bp, synthetic construct
  source 1..80: mol_type = other DNA
tttggcagggcctgcatgaatggattaatgtcattataaaaggacttgatggaaagagttcatcccttttgcccttccac

SEQ ID NO: 53120 - DNA, 80 bp, synthetic construct
  source 1..80: mol_type = other DNA
ttttttttttttttaagacagagtcttactctgttgcccaggctggagtgtagtggcatgatcttggctcactgcaacct

SEQ ID NO: 53121 - DNA, 80 bp, synthetic construct; identical to SEQ ID NO: 13989
  source 1..80: mol_type = other DNA

SEQ ID NO: 53122 - DNA, 80 bp, synthetic construct
  source 1..80: mol_type = other DNA
ccacgagttactcccccccgcccacggagcaccttctgtccgggcgcctcccaggccgctgctgcttcttggttctgctt

SEQ ID NO: 53123 - DNA, 80 bp, synthetic construct
  source 1..80: mol_type = other DNA
aatcacattaaaagggcataagattgaagattttataatagttctaatatgttctctgccttctttcctgtctctccaga

SEQ ID NO: 53124 - DNA, 80 bp, synthetic construct
  source 1..80: mol_type = other DNA
taaagtgaggacagtaaggaccatctcatggtattaagctaaaacattcacggaaataaatatgtaatgctcagagtaag

SEQ ID NO: 53125 - DNA, 80 bp, synthetic construct; identical to SEQ ID NO: 13990
  source 1..80: mol_type = other DNA

SEQ ID NO: 53126 - DNA, 80 bp, synthetic construct
  source 1..80: mol_type = other DNA
agtacacatgctgctctcggcaactgtttcttctcctgacacttatgattttatatacaaattgttggaagttatgtcgt

SEQ ID NO: 53127 - DNA, 80 bp, synthetic construct
  source 1..80: mol_type = other DNA
tgagctatataatgactagggctctctttattttggggacagagtgagaacttcttcacttataaggtggctttgtcttg

SEQ ID NO: 53128 - DNA, 80 bp, synthetic construct
  source 1..80: mol_type = other DNA
gttccagaccagcctggccaacatagcaaaaccccatttctactaaaaatacaaaaattagctgggtgtgatggtgggtg

SEQ ID NO: 53129 - DNA, 80 bp, synthetic construct
  source 1..80: mol_type = other DNA
aaaactgtgcagccaaaggtgtgactggtgctcaatattattttattgcatctttgttccaaatccactccatctttgtc

SEQ ID NO: 53130 - DNA, 80 bp, synthetic construct; identical to SEQ ID NO: 13991
  source 1..80: mol_type = other DNA

SEQ ID NO: 53131 - DNA, 80 bp, synthetic construct
  source 1..80: mol_type = other DNA
gggtttcaccatgttggccaggctggtctcgaactcctgacctcaggtgatctgcctgccttggcctcccaaagtgctag

SEQ ID NO: 53132 - DNA, 80 bp, synthetic construct
  source 1..80: mol_type = other DNA
ctgtgttttgacatgtgtgtataactcctgttggaatgggaaatgttaatttagttcccccacacaacctgttgggctgc

SEQ ID NO: 53133 - DNA, 80 bp, synthetic construct
  source 1..80: mol_type = other DNA
tctgctcttctggaagcagctgagaaagggaagccataaacctgacaagctggtaaaaagctaatttcttaccagctagc

SEQ ID NO: 53134 - DNA, 80 bp, synthetic construct; identical to SEQ ID NO: 13992
  source 1..80: mol_type = other DNA

SEQ ID NO: 53135 - DNA, 80 bp, synthetic construct
  source 1..80: mol_type = other DNA
ctttgtaaccatgtaggggtactctctctcttgatctctgccatctggagggtggaaattcttgggttcaagtcaggtgg

SEQ ID NO: 53136 - DNA, 80 bp, synthetic construct
  source 1..80: mol_type = other DNA
ttgctatcttaaacccatttccaagagggaatacttggggatgcctcctctaggaatacttcttgctgcttatatggcaa

SEQ ID NO: 53137 - DNA, 80 bp, synthetic construct
  source 1..80: mol_type = other DNA
agcagttaaaatcattcgcaagcttgaaaatgactgctctagattctttctgggaagagcactggcaaccaccctatgct

SEQ ID NO: 53138 - DNA, 80 bp, synthetic construct; identical to SEQ ID NO: 13993
  source 1..80: mol_type = other DNA

SEQ ID NO: 53139 - DNA, 80 bp, synthetic construct
  source 1..80: mol_type = other DNA
aaactgatttagaatatatgtgtacagatattgttttaaagcctctgctctctctctgtaaaaacttcttaagcaactga

SEQ ID NO: 53140 - DNA, 80 bp, synthetic construct
  source 1..80: mol_type = other DNA
ctagaaggtatggaatgagggctaagactcccatggagcattaagtgattacagaataggctgattgttatagggttgcc

SEQ ID NO: 53141 - DNA, 80 bp, synthetic construct
  source 1..80: mol_type = other DNA
taggccatagaaactgcatgctttcctggccctgttccttaaagggctccaccctaaagccagtaattcaattaagaaac

SEQ ID NO: 53142 - DNA, 80 bp, synthetic construct; identical to SEQ ID NO: 13994
  source 1..80: mol_type = other DNA

SEQ ID NO: 53143 - DNA, 80 bp, synthetic construct
  source 1..80: mol_type = other DNA
tatgaattttctatttcatttcacttaagaattgtgcctttagaaatgcagatttggagtggcatagctgacaattattt

SEQ ID NO: 53144 - DNA, 80 bp, synthetic construct
  source 1..80: mol_type = other DNA
aatatatgaaaaagctgtaattaatggcttttagaaaaataagcacttaaatattttatcagagaaatatatatatatac

SEQ ID NO: 53145 - DNA, 80 bp, synthetic construct
  source 1..80: mol_type = other DNA
atttttgtatttttagtagggccagggtttcaccttgttggccaggatggtcttgatctcttgacctcgtgatctgccca

SEQ ID NO: 53146 - DNA, 80 bp, synthetic construct; identical to SEQ ID NO: 13995
  source 1..80: mol_type = other DNA

SEQ ID NO: 53147 - DNA, 80 bp, synthetic construct
  source 1..80: mol_type = other DNA
atgcttcaaggcacagaatagtttgaatcataaaaggcttcctacctccaggaaaagggaagagcagtgtagttaatatt

SEQ ID NO: 53148 - DNA, 80 bp, synthetic construct
  source 1..80: mol_type = other DNA
ggttagaaagattaaaataataagtcttttcaagaagtggggggatagccctaattttggcaggccataagacatgtagt

SEQ ID NO: 53149 - DNA, 80 bp, synthetic construct
  source 1..80: mol_type = other DNA
aaagtgcaatcgatggcgaggaagtaaagagtatggacatgattcctctgaaaagcttggttataaagaaaaggtgcagg

SEQ ID NO: 53150 - DNA, 80 bp, synthetic construct
  source 1..80: mol_type = other DNA
aatacaaaaaattagctgggcatggtggcacgtgcctataattctagctactcagtaggctgaggcaggagaattgcttg

SEQ ID NO: 53151 - DNA, 80 bp, synthetic construct; identical to SEQ ID NO: 13996
  source 1..80: mol_type = other DNA

SEQ ID NO: 53152 - DNA, 80 bp, synthetic construct
  source 1..80: mol_type = other DNA
aatcaccaggtgatttggatacatgctcaagtttgaaaatcacttggctagagcacaggtgaagggaaaaactttgtatg

SEQ ID NO: 53153 - DNA, 80 bp, synthetic construct
  source 1..80: mol_type = other DNA
gggatggccctaattgcggcaggccataagacatgtagtgtcttctagaactagggaaagaattaaggccaacagcatca

SEQ ID NO: 53154 - DNA, 80 bp, synthetic construct
  source 1..80: mol_type = other DNA
agagcacaggtgaagggagaaaatttgtatggaaaatctgtatggaagcaggaatgccacttccactgagatatgagata

SEQ ID NO: 53155 - DNA, 80 bp, synthetic construct; identical to SEQ ID NO: 13997
  source 1..80: mol_type = other DNA

SEQ ID NO: 53156 - DNA, 80 bp, synthetic construct
  source 1..80: mol_type = other DNA
aaagatattgggttttggttggagagtgagatgctgatgtgtaaggtttcagaagggacctcttagtctcattaaaatgc

SEQ ID NO: 53157 - DNA, 80 bp, synthetic construct
  source 1..80: mol_type = other DNA
acatctatgaaagaacaagatacttaaacaagggaaggattaacaagtaaacaactcctgaaaacttaaaatatgagagc

SEQ ID NO: 53158 - DNA, 80 bp, synthetic construct
  source 1..80: mol_type = other DNA
agtttatatcagttacttcattaaactttcctattatttatagtaatttgtctttagattaatttgtctttagattctat

SEQ ID NO: 53159 - DNA, 80 bp, synthetic construct; identical to SEQ ID NO: 13998
  source 1..80: mol_type = other DNA

SEQ ID NO: 53160 - DNA, 80 bp, synthetic construct
  source 1..80: mol_type = other DNA
ggttcaagagattctcctgcctcagcctcccaagtagctgggattacgggcaggcatcaccatacccagctaattttgta

SEQ ID NO: 53161 - DNA, 80 bp, synthetic construct
  source 1..80: mol_type = other DNA
gccagggatgagcaaactaccacccaatgggccaaatacagtctgcaacttgttttttttttttgtatagcccatgagct

SEQ ID NO: 53162 - DNA, 80 bp, synthetic construct
  source 1..80: mol_type = other DNA
aaaggcagaggtgagtagttgtgatggagcccatagggacctacaaagccaaagtaaacatttggccctttatagaaaaa

SEQ ID NO: 53163 - DNA, 80 bp, synthetic construct; identical to SEQ ID NO: 13999
  source 1..80: mol_type = other DNA

SEQ ID NO: 53164 - DNA, 80 bp, synthetic construct
  source 1..80: mol_type = other DNA
tgttccccttgtctgcctgattatttattttcagagtcattttagcagtgtttggggagggagttataccttttattcct

SEQ ID NO: 53165 - DNA, 80 bp, synthetic construct
  source 1..80: mol_type = other DNA
ggaagaggatgatggggtggggtggttcagggagtgaataggccgggttgggtgagatgaggctgggtgtatgtgcttga

SEQ ID NO: 53166 - DNA, 80 bp, synthetic construct
  source 1..80: mol_type = other DNA
aaaagaatggggagagaaatgggagggagagaaggaagctgagggagatttgaggagagaaggcgcttgagggggaacca

SEQ ID NO: 53167 - DNA, 80 bp, synthetic construct; identical to SEQ ID NO: 14000
  source 1..80: mol_type = other DNA

SEQ ID NO: 53168 - DNA, 80 bp, synthetic construct
  source 1..80: mol_type = other DNA
caatgcttttttgacttttactttctcccagaacaacagttgtgatatgatctgttttggggcccttcctgcgctccgcc

SEQ ID NO: 53169 - DNA, 80 bp, synthetic construct
  source 1..80: mol_type = other DNA
gcatggtttcctgaggtcgcaccatcactcacttcttcccttggctgggagtgggggttcctttggctctgtgtcgctcc

SEQ ID NO: 53170 - DNA, 80 bp, synthetic construct
  source 1..80: mol_type = other DNA
ctaatcagccatcttggcctggcaatctacagtagtaaatgttaacattggatagtgtgattcttcctactttactattc

SEQ ID NO: 53171 - DNA, 80 bp, synthetic construct
  source 1..80: mol_type = other DNA
atttgaagagaattgacatctttgttgtcttccagttaaatgacactgcatgtctctccgtttgtttagatctattttta

SEQ ID NO: 53172 - DNA, 80 bp, synthetic construct; identical to SEQ ID NO: 14001
  source 1..80: mol_type = other DNA

SEQ ID NO: 53173 - DNA, 80 bp, synthetic construct
  source 1..80: mol_type = other DNA
attatgatgtatctgagcatagatttctttgagtttattatattagaagttgctttagctttttgaattacacatttatg

SEQ ID NO: 53174 - DNA, 80 bp, synthetic construct; identical to SEQ ID NO: 14002
  source 1..80: mol_type = other DNA

SEQ ID NO: 53175 - DNA, 80 bp, synthetic construct
  source 1..80: mol_type = other DNA
actttaagttctgggttacatgtgcagaatgtacatttttcttacataggtatacatgtgccctggtggtttgttgcacc

SEQ ID NO: 53176 - DNA, 80 bp, synthetic construct
  source 1..80: mol_type = other DNA
tctgatcttgtgatagtttgctgaaaatgatggtttccagctttatccatgttcctgcaaaggacacaaactcatccttt

SEQ ID NO: 53177 - DNA, 80 bp, synthetic construct
  source 1..80: mol_type = other DNA
tttgggtatatgcccagtattgggattgctgggtcaaatggtatttccagttctagatccttgaggaatcgccacactgt

SEQ ID NO: 53178 - DNA, 80 bp, synthetic construct
  source 1..80: mol_type = other DNA
ctggtgaccagtgatgatgagcatttttttcatatgtctgttggctgcataaatgtcttcttttgagaagtgtctgttca

SEQ ID NO: 53179 - DNA, 80 bp, synthetic construct; identical to SEQ ID NO: 14003
  source 1..80: mol_type = other DNA

SEQ ID NO: 53180 - DNA, 80 bp, synthetic construct
  source 1..80: mol_type = other DNA
tcccaacaccatttactaaattgggaatcttttccccattgcttgtgtgtgtcaggtttgtcaaagatcagatggttgta

SEQ ID NO: 53181 - DNA, 80 bp, synthetic construct
  source 1..80: mol_type = other DNA
ttggctacgcaggctcttttttggttccatatgaagtttaaagtagtttttttccaattctgtgaagaaagtcagtggta

SEQ ID NO: 53182 - DNA, 80 bp, synthetic construct
  source 1..80: mol_type = other DNA
cttcacatcccttgtaagttgtattcctaggtattttattctcttagtagcaattgtgaatgggagttcactcatgattt

SEQ ID NO: 53183 - DNA, 80 bp, synthetic construct
  source 1..80: mol_type = other DNA
aatttgatttcctctcttcctatttgaatactctttattgctttctcttgcctgattgccctggccagaacttccaatac

SEQ ID NO: 53184 - DNA, 80 bp, synthetic construct; identical to SEQ ID NO: 14004
  source 1..80: mol_type = other DNA

SEQ ID NO: 53185 - DNA, 80 bp, synthetic construct
  source 1..80: mol_type = other DNA
ttcatcagggatattggcctgaaattttccttttttgttgtgtctctgccaggttttggtatcaggatgatgctggcctc

SEQ ID NO: 53186 - DNA, 80 bp, synthetic construct
  source 1..80: mol_type = other DNA
tttcagaaattgttattgctttattcagggattcgacttcttcctggcttagacttgggagggtgtatgtgtccaggaat

SEQ ID NO: 53187 - DNA, 80 bp, synthetic construct; identical to SEQ ID NO: 14005
  source 1..80: mol_type = other DNA

SEQ ID NO: 53188 - DNA, 80 bp, synthetic construct
  source 1..80: mol_type = other DNA
tcctgatttctcttgtgggcatttagtgctataaatttccctctaaacaccgctttaaatgtgtcccagagattctggta

SEQ ID NO: 53189 - DNA, 80 bp, synthetic construct
  source 1..80: mol_type = other DNA
tggtctgagagactgtttgttatggtttccattatttcgcatttgctgaggagtgttttacttctgattatgtggtcaat

SEQ ID NO: 53190 - DNA, 80 bp, synthetic construct; identical to SEQ ID NO: 14006
  source 1..80: mol_type = other DNA

SEQ ID NO: 53191 - DNA, 80 bp, synthetic construct
  source 1..80: mol_type = other DNA
cttggtaaatattcccccatccctttattttgagcctatgtttgtctttgcacatgagatgggtcttctgaatacagcat

SEQ ID NO: 53192 - DNA, 80 bp, synthetic construct; identical to SEQ ID NO: 14007
  source 1..80: mol_type = other DNA

SEQ ID NO: 53193 - DNA, 80 bp, synthetic construct
  source 1..80: mol_type = other DNA
ccactctcttctgtcttatagggtttctgcagagagttcggctgatagtctgatgagcttccctttgtgggtaacccgac

SEQ ID NO: 53194 - DNA, 80 bp, synthetic construct
  source 1..80: mol_type = other DNA
ctcctggataatatcctgaagagtgttttccaacttgattccattctccccgtcactttgaggtacaccaatcaaacgta

SEQ ID NO: 53195 - DNA, 80 bp, synthetic construct
  source 1..80: mol_type = other DNA
ggactacaggcgcccacccccacgcccagctaattttttgtatttttagtagagacggggtttcaccatgttagccagga

SEQ ID NO: 53196 - DNA, 80 bp, synthetic construct; identical to SEQ ID NO: 14008
  source 1..80: mol_type = other DNA

SEQ ID NO: 53197 - DNA, 80 bp, synthetic construct
  source 1..80: mol_type = other DNA
ctgaagcctacttctgtcagttcatcaaactcattctctgtccagttttgttcccttgctggcgaagagttgtgatcatt

SEQ ID NO: 53198 - DNA, 80 bp, synthetic construct
  source 1..80: mol_type = other DNA
acaggcccctttggtgccagtctgctggagtttgctggaggtccactcctgaccctgtttgcctgggtatcaccagcaga

SEQ ID NO: 53199 - DNA, 80 bp, synthetic construct
  source 1..80: mol_type = other DNA
cttgaggaggcagactgacccttagcagagcttcaataccgtgctgggaggtccactgctctcttcagagccatcaggca

SEQ ID NO: 53200 - DNA, 80 bp, synthetic construct; identical to SEQ ID NO: 14009
  source 1..80: mol_type = other DNA

SEQ ID NO: 53201 - DNA, 80 bp, synthetic construct
  source 1..80: mol_type = other DNA
gcgccactggggtatggaaaaaagaaaaaaagctcctacagctagttcagtgtctgcccaattggccacccagttttgtg

SEQ ID NO: 53202 - DNA, 80 bp, synthetic construct
  source 1..80: mol_type = other DNA
acttcccaggtgaggtgatgccccaccctgcttcggcttgccctccgtgggctgcacccactgtccaaccagtcccagtg

SEQ ID NO: 53203 - DNA, 80 bp, synthetic construct
  source 1..80: mol_type = other DNA
tggaaaatttcaattgctctatctttgagttcactgattgtttcttttgtcatattcattctgttattgaatccatccag

SEQ ID NO: 53204 - DNA, 80 bp, synthetic construct; identical to SEQ ID NO: 14010
  source 1..80: mol_type = other DNA

SEQ ID NO: 53205 - DNA, 80 bp, synthetic construct
  source 1..80: mol_type = other DNA
ggccctggtgtgtgatgttccctttcctgtgtccatgtgttctcattgttcaattcccatctatgagtgagaacatgtgg

SEQ ID NO: 53206 - DNA, 80 bp, synthetic construct
  source 1..80: mol_type = other DNA
atttgggttggttccaagtctttgctattgtgaatagtgccacaataaacatatgtgtgcatgtgtctttatagcagcac

SEQ ID NO: 53207 - DNA, 80 bp, synthetic construct
  source 1..80: mol_type = other DNA
ctctccagcacctgttgtttcctgactttttaatgattgccattctaactagtgtgagatggaatctcattgtggttttg

SEQ ID NO: 53208 - DNA, 80 bp, synthetic construct
  source 1..80: mol_type = other DNA
ttctggatattagccctttgtcagatgagtagatgcaaaaattttctcccattctgtaggttgcctgttcactctgatgg

SEQ ID NO: 53209 - DNA, 80 bp, synthetic construct; identical to SEQ ID NO: 14011
  source 1..80: mol_type = other DNA

SEQ ID NO: 53210 - DNA, 80 bp, synthetic construct
  source 1..80: mol_type = other DNA
ggaggcatcacgctacctgacttcaaactatactacaaggctacagtaaccaaaacagcatggtactggtaccaaaacag

SEQ ID NO: 53211 - DNA, 80 bp, synthetic construct
  source 1..80: mol_type = other DNA
caccttatacaaagattaattcaagatggattaaagacttaaatgcttctttcttatattttatatttgttgctaagatg

SEQ ID NO: 53212 - DNA, 80 bp, synthetic construct
  source 1..80: mol_type = other DNA
gacaggtgattttttgtttatatgttggacattttgaatatggtgcattgaggcctggtttctatttaacgtttctgttt

SEQ ID NO: 53213 - DNA, 80 bp, synthetic construct; identical to SEQ ID NO: 14012
  source 1..80: mol_type = other DNA

SEQ ID NO: 53214 - DNA, 80 bp, synthetic construct
  source 1..80: mol_type = other DNA
gggactacaggtgcgcaccaccacacctggctaatttttgtatttttagtagagatggggtttcaccatgttagccagga

SEQ ID NO: 53215 - DNA, 80 bp, synthetic construct
  source 1..80: mol_type = other DNA
ggctcactgcaacctccaccttctggattcaagtgattctcatgcctcagcctccgaagtagctgggactacaggtgtgt

SEQ ID NO: 53216 - DNA, 80 bp, synthetic construct
  source 1..80: mol_type = other DNA
gttctgcaccctgtctctacagctgctgcaccagataccttttgattcagaaattacttttttggaaatttaacttcagg

SEQ ID NO: 53217 - DNA, 80 bp, synthetic construct; identical to SEQ ID NO: 14013
  source 1..80: mol_type = other DNA

SEQ ID NO: 53218 - DNA, 80 bp, synthetic construct
  source 1..80: mol_type = other DNA
ctctaatttgaacaaatcagatctagtcacttatctgatgaccagtacagttttaatcttaataagtcttctattgccag

SEQ ID NO: 53219 - DNA, 80 bp, synthetic construct
  source 1..80: mol_type = other DNA
aggagaaggattgagacatgacctttggtgaaactgaagctataacttgaataatattcgttaatctggggagaataaaa

SEQ ID NO: 53220 - DNA, 80 bp, synthetic construct
  source 1..80: mol_type = other DNA
cccaatctacttttctgatatcatttctgatactacttttcacttatagtccagcaaggcctgtccactcactctcgtta

SEQ ID NO: 53221 - DNA, 80 bp, synthetic construct
  source 1..80: mol_type = other DNA
agatcaaatatcatctttttgtgaagtatcccagcactctattagggtgaaattatcattcctcctgtaatattttgttc

SEQ ID NO: 53222 - DNA, 80 bp, synthetic construct; identical to SEQ ID NO: 14014
  source 1..80: mol_type = other DNA

SEQ ID NO: 53223 - DNA, 80 bp, synthetic construct
  source 1..80: mol_type = other DNA
ttatttagtgtatgaagatgtccataagttacaaagcagtgtggtttcatcagaattgccactggaccacagggtacttc

SEQ ID NO: 53224 - DNA, 80 bp, synthetic construct
  source 1..80: mol_type = other DNA
tctcgactcactgcaagctccacctcccaggctcacgccattctcctgcctcagcctgtcatgtagctgggactacaggt

SEQ ID NO: 53225 - DNA, 80 bp, synthetic construct
  source 1..80: mol_type = other DNA
cggcccatttttttcttttcaacttttcttaggctggacagacacatttcagtgattggcaaagcacctcattaaacttg

SEQ ID NO: 53226 - DNA, 80 bp, synthetic construct; identical to SEQ ID NO: 14015
  source 1..80: mol_type = other DNA

SEQ ID NO: 53227 - DNA, 80 bp, synthetic construct
  source 1..80: mol_type = other DNA
gagtcttgctctcttgcccaggctggagtgcaatggcgtgatcttggctcactgcaacctctgcctcctgggttcaaaca

SEQ ID NO: 53228 - DNA, 80 bp, synthetic construct
  source 1..80: mol_type = other DNA
tgggatcacaggcgtgagacactgtgccctgccaaaaattttttttttttgagacagagtctcgctctgtcatccaggct

SEQ ID NO: 53229 - DNA, 80 bp, synthetic construct
  source 1..80: mol_type = other DNA
gccaggatgatctcaatctcttgaccttgtgatcgcccatctcggcctcccaaagtgctgggattacaggcgtgagccac

SEQ ID NO: 53230 - DNA, 80 bp, synthetic construct; identical to SEQ ID NO: 14016
  source 1..80: mol_type = other DNA

SEQ ID NO: 53231 - DNA, 80 bp, synthetic construct
  source 1..80: mol_type = other DNA
aactccatatttaaaaactttataaaattttcagagctcacacagacaaaattccttattgtcatgatcactacgtataa

SEQ ID NO: 53232 - DNA, 80 bp, synthetic construct
  source 1..80: mol_type = other DNA
ccgccaccacacccagctaatttttttgtatttttagttgagacggggttttaccatattggccagactggtctgaactc

SEQ ID NO: 53233 - DNA, 80 bp, synthetic construct
  source 1..80: mol_type = other DNA
aactatcctatcaactgacatttatattgccatttaatccagtttgataatttttatttttaaaatgtggcatttcttgt

SEQ ID NO: 53234 - DNA, 80 bp, synthetic construct; identical to SEQ ID NO: 14017
  source 1..80: mol_type = other DNA

SEQ ID NO: 53235 - DNA, 80 bp, synthetic construct
  source 1..80: mol_type = other DNA
agctccaaaaggaacctttaaaaccacgcaaatacatggaaattaaataacctgctcctgaatgatcattgggtcaacaa

SEQ ID NO: 53236 - DNA, 80 bp, synthetic construct
  source 1..80: mol_type = other DNA
aggtcacacctcaaggaactagagaaacaagaaccaagcccaaagccagcagaagaaaggaaataacccagatcagagca

SEQ ID NO: 53237 - DNA, 80 bp, synthetic construct; identical to SEQ ID NO: 14018
  source 1..80: mol_type = other DNA

SEQ ID NO: 53238 - DNA, 80 bp, synthetic construct
  source 1..80: mol_type = other DNA
caaagaagaattggtaccaatcctattgacactattccacaagatagagaaagaaggaatcctccctaaatcattttatg

SEQ ID NO: 53239 - DNA, 80 bp, synthetic construct
  source 1..80: mol_type = other DNA
accatgatcaagtgggtttcatagcagggatgcagggatggtctaacatatgcacgtcaataaatgtaatacaccacata

SEQ ID NO: 53240 - DNA, 80 bp, synthetic construct
  source 1..80: mol_type = other DNA
ataatactgaatggggaaaagttgaaagcattccctctgagaattggaacaagacaaggatgcccactttcaccacttca

SEQ ID NO: 53241 - DNA, 80 bp, synthetic construct; identical to SEQ ID NO: 14019
  source 1..80: mol_type = other DNA

SEQ ID NO: 53242 - DNA, 80 bp, synthetic construct
  source 1..80: mol_type = other DNA
caaacaaatggaaacacaccccatgctcgtggatgggtagaatcaatattgtgaaaatgaccatactgccaaaagcaatc

SEQ ID NO: 53243 - DNA, 80 bp, synthetic construct
  source 1..80: mol_type = other DNA
aactatactgtaaggccatagtcaccaaaacaggatagtactggtataaaaatagggacaaagaccaatggaacagaata

SEQ ID NO: 53244 - DNA, 80 bp, synthetic construct
  source 1..80: mol_type = other DNA
atacaaaaatcaactcaagaaggactaaggacttaaatctaagacctgaaactataaaaattctagaaggtaacattgga

SEQ ID NO: 53245 - DNA, 80 bp, synthetic construct; identical to SEQ ID NO: 14020
  source 1..80: mol_type = other DNA

SEQ ID NO: 53246 - DNA, 80 bp, synthetic construct
  source 1..80: mol_type = other DNA
ctctgaatcagggtttttctaaagaaatctttcagaatcagcaaaagtggggatgacccaggcatcttgatttgcaaagt

SEQ ID NO: 53247 - DNA, 80 bp, synthetic construct
  source 1..80: mol_type = other DNA
aaattacattatctgaaataacatacagctactaaactgctttgtattctattaagaaatagctcctaaagatgtagtct

SEQ ID NO: 53248 - DNA, 80 bp, synthetic construct
  source 1..80: mol_type = other DNA
ctgtttgtttacccgtttttctttggctgtatctgatgacagtataagatgttcttaataaagttttatgttctttttga

SEQ ID NO: 53249 - DNA, 80 bp, synthetic construct; identical to SEQ ID NO: 14021
  source 1..80: mol_type = other DNA

SEQ ID NO: 53250 - DNA, 80 bp, synthetic construct
  source 1..80: mol_type = other DNA
tgaagtaactcaggaatggaaaaccaaacatcatatgttctcactcataagtgggaactaaactatgaggatgcaaagcc

SEQ ID NO: 53251 - DNA, 80 bp, synthetic construct
  source 1..80: mol_type = other DNA
cccctaaaacctatggaaataataaataaataaataaaaacttaagtaaaaacaaataaaatgtggccatttagtccatt

SEQ ID NO: 53252 - DNA, 80 bp, synthetic construct
  source 1..80: mol_type = other DNA
cagtggtgtggtctctcttgcaacctccacctcccaggctcaagtcatcctgccacctcagcctcccgagtagctggggc

SEQ ID NO: 53253 - DNA, 80 bp, synthetic construct; identical to SEQ ID NO: 14022
  source 1..80: mol_type = other DNA

SEQ ID NO: 53254 - DNA, 80 bp, synthetic construct
  source 1..80: mol_type = other DNA
aattaacatatatcagctcatatacttatcctttttttatgatgagaacacttaaaatctactcagtgatttttcaagaa

SEQ ID NO: 53255 - DNA, 80 bp, synthetic construct
  source 1..80: mol_type = other DNA
ccattctactctctgcttcttcgttcaactttttaagattccacatataagtgagatcatgtggtatttatctttctgtg

SEQ ID NO: 53256 - DNA, 80 bp, synthetic construct
  source 1..80: mol_type = other DNA
acattttctttatccatttgatgcaggacagacatgccccaaaattagagcttagcccaggaaagttcttgactttgccc

SEQ ID NO: 53257 - DNA, 80 bp, synthetic construct; identical to SEQ ID NO: 14023
  source 1..80: mol_type = other DNA

SEQ ID NO: 53258 - DNA, 80 bp, synthetic construct
  source 1..80: mol_type = other DNA
tctgctagtttctgctgtttttttcacttatcctgtcagtactaggaaataagtcctgccagtctcctacctcattcccc

SEQ ID NO: 53259 - DNA, 80 bp, synthetic construct
  source 1..80: mol_type = other DNA
tcggaggaggggcctggtgggaggtgattggatcaagggggtggagttcccctttgccattcttatgatactgagttctc

SEQ ID NO: 53260 - DNA, 80 bp, synthetic construct
  source 1..80: mol_type = other DNA
caattaaacctcttttctttataaattacccagtttcaggcatttctttatagcaatgtgagaacggactaacacagaaa

SEQ ID NO: 53261 - DNA, 80 bp, synthetic construct; identical to SEQ ID NO: 14024
  source 1..80: mol_type = other DNA

SEQ ID NO: 53262 - DNA, 80 bp, synthetic construct
  source 1..80: mol_type = other DNA
tcaaaattgatgaaagacattactgtaaagttttaagatgcaccctcctaaagcaggaataatgaaaatggactggacac

SEQ ID NO: 53263 - DNA, 80 bp, synthetic construct
  source 1..80: mol_type = other DNA
aaaggccaaaaggcaatggataacatcttcaattagctgagaaaatacattgagttccttattcagcaaaactgttattt

SEQ ID NO: 53264 - DNA, 80 bp, synthetic construct
  source 1..80: mol_type = other DNA
tcgagaccagcctggccaacatggtgaaaccctgtttctattaaaaatagaaaaattagctgggtatggtggcacatatc

SEQ ID NO: 53265 - DNA, 80 bp, synthetic construct; identical to SEQ ID NO: 14025
  source 1..80: mol_type = other DNA

SEQ ID NO: 53266 - DNA, 80 bp, synthetic construct
  source 1..80: mol_type = other DNA
agtaatcatcataaatacaaatggtttaaacttgccccttaaaagatctatactctaagacagggaaaaaggatccagtt

SEQ ID NO: 53267 - DNA, 80 bp, synthetic construct
  source 1..80: mol_type = other DNA
tgaataggaacagctctggtctgcagctcccagtgagaccaatgcagaaggcgggtgatttctgcatttccaactgaggt

SEQ ID NO: 53268 - DNA, 80 bp, synthetic construct
  source 1..80: mol_type = other DNA
ggactgtgctatctggaccagatactatgcttttcccatggtttttgcaacccacagaccaggagattcccttgtgtgcc

SEQ ID NO: 53269 - DNA, 80 bp, synthetic construct; identical to SEQ ID NO: 14026
  source 1..80: mol_type = other DNA

SEQ ID NO: 53270 - DNA, 80 bp, synthetic construct
  source 1..80: mol_type = other DNA
ggccagactgcctctctagattcctcctcaatgggcagggcatctttgaaagaaaggcagccccagtcaggggcttatat

SEQ ID NO: 53271 - DNA, 80 bp, synthetic construct
  source 1..80: mol_type = other DNA
gtgggtccctgacccccatgcctcctaactggaagacacctcccatcagtggttgacagacacctcatacaggagagctc

SEQ ID NO: 53272 - DNA, 80 bp, synthetic construct
  source 1..80: mol_type = other DNA
ctgttagaaggaaaaccaaaaaacagaaagcaataacatcagctgggcatggtggtttattcccagaactttgggaagct

SEQ ID NO: 53273 - DNA, 80 bp, synthetic construct
  source 1..80: mol_type = other DNA
aggtggaggttgcagtgagccgagatcacgccgctgcactccaggttgggcaacagagcgagactttgtctcaaaaaaaa

SEQ ID NO: 53274 - DNA, 80 bp, synthetic construct; identical to SEQ ID NO: 14027
  source 1..80: mol_type = other DNA

SEQ ID NO: 53275 - DNA, 80 bp, synthetic construct
  source 1..80: mol_type = other DNA
gaaaaaacacagcacaagaacttcgtgaagtgtacacaagtatcaatagccaaattgatcaagtggaagaaaggatatca

SEQ ID NO: 53276 - DNA, 80 bp, synthetic construct
  source 1..80: mol_type = other DNA
gttggaaaacaagcttcaggatgttatccaggaaaacttccccagcttagcaagacaggccagcattcaaattcaggaaa

SEQ ID NO: 53277 - DNA, 80 bp, synthetic construct
  source 1..80: mol_type = other DNA
ctctgcagaaaccctataagccagaaaagagtgggggccaatactcagtattcttaaagaaaataattttcaactcagaa

SEQ ID NO: 53278 - DNA, 80 bp, synthetic construct; identical to SEQ ID NO: 14028
  source 1..80: mol_type = other DNA

SEQ ID NO: 53279 - DNA, 80 bp, synthetic construct
  source 1..80: mol_type = other DNA
gttcaaaataaagggatggaggaatatttaacaagcaaatggaaagaaaaaaaaaagcaggggttgcaatcttagtctct

SEQ ID NO: 53280 - DNA, 80 bp, synthetic construct
  source 1..80: mol_type = other DNA
aagagacttagactcccacacaataataataattcctggacacatacactctcccaagactaaacctggaagaagttgaa

SEQ ID NO: 53281 - DNA, 80 bp, synthetic construct
  source 1..80: mol_type = other DNA
aaaagagggactcctccctaactcattttatgaggccagcgtcatcctgataccaaaacctaacagagacacaacaaaaa

SEQ ID NO: 53282 - DNA, 80 bp, synthetic construct; identical to SEQ ID NO: 14029
  source 1..80: mol_type = other DNA

SEQ ID NO: 53283 - DNA, 80 bp, synthetic construct
  source 1..80: mol_type = other DNA
ccctctctcaccactcctgttcaacatagtgttggaaaatctggccggggcaatcaagcaagagaaagcaataaagagta

SEQ ID NO: 53284 - DNA, 80 bp, synthetic construct; identical to SEQ ID NO: 14030
  source 1..80: mol_type = other DNA

SEQ ID NO: 53285 - DNA, 80 bp, synthetic construct
  source 1..80: mol_type = other DNA
attcaatgctattcccatcaggctaccattgactttcttcacagaattagaaaaaacgacttcaaatttcatatggaacc

SEQ ID NO: 53286 - DNA, 80 bp, synthetic construct; identical to SEQ ID NO: 14031
  source 1..80: mol_type = other DNA

SEQ ID NO: 53287 - DNA, 80 bp, synthetic construct
  source 1..80: mol_type = other DNA
gacataggcatgggcaaaaaagatttcatgactaaaacaccaaaagcaatggcaacaaaagccaaaattgacaaatggga

SEQ ID NO: 53288 - DNA, 80 bp, synthetic construct
  source 1..80: mol_type = other DNA
caacctcatcaaaaagtgggcaaaggatatgaacagacacttctcaaaagaagacatttatgtggccaagaaacatatga

SEQ ID NO: 53289 - DNA, 80 bp, synthetic construct
  source 1..80: mol_type = other DNA
tgtaaattagttcaaccattgtggaagacagtgtggtgattcctcaaggatctagaaccagaaataccatttgacccagc

SEQ ID NO: 53290 - DNA, 80 bp, synthetic construct
  source 1..80: mol_type = other DNA
tatactatgcagtcataaaaaagaatgagttcatgttctttgcaggaacatggatgaagctataaaccatcattctcagc

SEQ ID NO: 53291 - DNA, 80 bp, synthetic construct; identical to SEQ ID NO: 14032
  source 1..80: mol_type = other DNA

SEQ ID NO: 53292 - DNA, 80 bp, synthetic construct
  source 1..80: mol_type = other DNA
aagcaaaattgtatctctttacacagtatactaagaaatccaagaaatggccagaaaattattagtaatgatatgagagt

SEQ ID NO: 53293 - DNA, 80 bp, synthetic construct
  source 1..80: mol_type = other DNA
tttcagaaagcaccaattgtaaagtcttgtgaaagcaccaatatgaagacctaaaccaatgaagactcatacaacatttc

SEQ ID NO: 53294 - DNA, 80 bp, synthetic construct
  source 1..80: mol_type = other DNA
cagaatgagacatgcttaatagatactcaaactttctatataccctgtataatcaaagcagtatgatatgacgtttttat

SEQ ID NO: 53295 - DNA, 80 bp, synthetic construct; identical to SEQ ID NO: 14033
  source 1..80: mol_type = other DNA

SEQ ID NO: 53296 - DNA, 80 bp, synthetic construct
  source 1..80: mol_type = other DNA
ggattaaatatttaattgaagagaaatagaaaataaaaattataaaagagaaaaaaattaagtgactataaatatgtgta

SEQ ID NO: 53297 - DNA, 80 bp, synthetic construct
  source 1..80: mol_type = other DNA
tagtgagcatagtagccaacaggtagattttcaaccctcatcctcctctcttcttcccctctcttcttgtctccagtatc

SEQ ID NO: 53298 - DNA, 80 bp, synthetic construct
  source 1..80: mol_type = other DNA
gtagtattccatggtatatatgtaccacatttctttatccagtccactactgatgggcacctaagttgattccgtgtctt

SEQ ID NO: 53299 - DNA, 80 bp, synthetic construct; identical to SEQ ID NO: 14034
  source 1..80: mol_type = other DNA

SEQ ID NO: 53300 - DNA, 80 bp, synthetic construct
  source 1..80: mol_type = other DNA
ttctaagcatggagattcagcagtgaacaaagtcccttagagtttacattcttgtggggcagaaagtcaataaacaaaaa

SEQ ID NO: 53301 - DNA, 80 bp, synthetic construct
  source 1..80: mol_type = other DNA
ttgagtagtgcatatgtttgagggggagtgttcaggctgattctgaagcaagaacatgcttggcaggcatgaggagaaat

SEQ ID NO: 53302 - DNA, 80 bp, synthetic construct
  source 1..80: mol_type = other DNA
ggctgaggcgggaggtttgcttgagcccaggagtttgagaccagcctgggcaacataagacctcatctctagcaaaccta

SEQ ID NO: 53303 - DNA, 80 bp, synthetic construct; identical to SEQ ID NO: 14035
  source 1..80: mol_type = other DNA

SEQ ID NO: 53304 - DNA, 80 bp, synthetic construct
  source 1..80: mol_type = other DNA
gatataattttagggtacaggttgatgaattggatgtagagaaagaatgagtagattgggaaaacattttcaacacaaat

SEQ ID NO: 53305 - DNA, 80 bp, synthetic construct
  source 1..80: mol_type = other DNA
aaagaaacagttagataccacttttctcaatagacaaagattaaaaatagctaccgcttccagcaccagtgcaagtatgg

SEQ ID NO: 53306 - DNA, 80 bp, synthetic construct
  source 1..80: mol_type = other DNA
tatagagatgtgtattgcagtatcatttggcaatggcagaatcatttagccaaaggcaaaaggttggaaacaagctaaat

SEQ ID NO: 53307 - DNA, 80 bp, synthetic construct; identical to SEQ ID NO: 14036
  source 1..80: mol_type = other DNA

SEQ ID NO: 53308 - DNA, 80 bp, synthetic construct
  source 1..80: mol_type = other DNA
gagtgtctttattcctgaaacactaagattacaggcttgtatttcttcaaaaccacaattggaacttctcaagtagagtg

SEQ ID NO: 53309 - DNA, 80 bp, synthetic construct
  source 1..80: mol_type = other DNA
ggttccctgtattcacttccttgatatgtcagttataacctagggtgagagatatttaggggaaaatgggaaattgcatt

SEQ ID NO: 53310 - DNA, 80 bp, synthetic construct
  source 1..80: mol_type = other DNA
tggctaatttttgtatttttagtagagacgggtttccccatgttggccaggctggtcttgaacttctgatctcatgatct

SEQ ID NO: 53311 - DNA, 80 bp, synthetic construct; identical to SEQ ID NO: 14037
  source 1..80: mol_type = other DNA

SEQ ID NO: 53312 - DNA, 80 bp, synthetic construct
  source 1..80: mol_type = other DNA
aaaattttcatcattttgttaaacatggtgtcattttgatagcttgtcctttctcccttgtttgtttggggtcctttaag

SEQ ID NO: 53313 - DNA, 80 bp, synthetic construct
  source 1..80: mol_type = other DNA
tacttgccttcaaagacctagtgggagtgcaaatgttttgaccccaagttagaagttatggagaagatacagggaggttt

SEQ ID NO: 53314 - DNA, 80 bp, synthetic construct
  source 1..80: mol_type = other DNA
ctgcttcttaccagaaatctgagagaagttgaattagtcatacccttctaaaacctagtagtggctgggcacagtggctc

SEQ ID NO: 53315 - DNA, 80 bp, synthetic construct
  source 1..80: mol_type = other DNA
ggctgaggcatgagaatcgcttgaacccaggaggaggaggttgcagtgagccaagatcatgccactgcactccagcctgg

SEQ ID NO: 53316 - DNA, 80 bp, synthetic construct; identical to SEQ ID NO: 14038
  source 1..80: mol_type = other DNA

SEQ ID NO: 53317 - DNA, 80 bp, synthetic construct
  source 1..80: mol_type = other DNA
aacacagtagacagccatacagtggattagattgtgctagaagttatggagatactcttttaaggttgtgattgggtagc

SEQ ID NO: 53318 - DNA, 80 bp, synthetic construct
  source 1..80: mol_type = other DNA
tctcaggaagtctatttggaagggaccataaagataacttattccaattactcagctgtttcctgagtctcctctatggc

SEQ ID NO: 53319 - DNA, 80 bp, synthetic construct
  source 1..80: mol_type = other DNA
gaaagtaattctcattgtttcctcatatttgtcttcccaggggaattctgcaacttcctgcacacttgagtctttctctc

SEQ ID NO: 53320 - DNA, 80 bp, synthetic construct; identical to SEQ ID NO: 14039
  source 1..80: mol_type = other DNA

SEQ ID NO: 53321 - DNA, 80 bp, synthetic construct
  source 1..80: mol_type = other DNA
tagttaaatttcttcaatatattacatataacaaactcagtccttggacttctgctttcgttggtcctgtacttcctcct

SEQ ID NO: 53322 - DNA, 80 bp, synthetic construct
  source 1..80: mol_type = other DNA
agttttgaaaccattgtttttttcacttttccttactcctatgcagtcagtcatcatgaagtaatgattcttctttgatt

SEQ ID NO: 53323 - DNA, 80 bp, synthetic construct
  source 1..80: mol_type = other DNA
aaatgatacaaccttattcatttcactctgtgtctcaaacattgtagaatgcttccagctgcctgaagagtaaaatataa

SEQ ID NO: 53324 - DNA, 80 bp, synthetic construct; identical to SEQ ID NO: 14040
  source 1..80: mol_type = other DNA

SEQ ID NO: 53325 - DNA, 80 bp, synthetic construct
  source 1..80: mol_type = other DNA
gaccagtgccttgcaaacattaggcttgccatgaggagttactggttgattggttggaaaggctatcatagacatacttg

SEQ ID NO: 53326 - DNA, 80 bp, synthetic construct
  source 1..80: mol_type = other DNA
agaaactgtgatatgaagatgaaagggattttataattgtaatctgtttaggcaatggctgggatatggtttgtatctgg

SEQ ID NO: 53327 - DNA, 80 bp, synthetic construct
  source 1..80: mol_type = other DNA
tgtcctttcctttgtcaccttttgtgtttttgtcacctttttcttttttatttggatctttctctgcatctctctccttt

SEQ ID NO: 53328 - DNA, 80 bp, synthetic construct; identical to SEQ ID NO: 14041
  source 1..80: mol_type = other DNA

SEQ ID NO: 53329 - DNA, 80 bp, synthetic construct
  source 1..80: mol_type = other DNA
tgggattcctgtcttcttggcacacccatctcactcttctctacctgggcttcctgtcctttcagtacaaccaacccact

SEQ ID NO: 53330 - DNA, 80 bp, synthetic construct
  source 1..80: mol_type = other DNA
tttggtattccagcgtcactgtctaccttgacctccattcctattttgtctttctctaaatcagtgccttttccttctct

SEQ ID NO: 53331 - DNA, 80 bp, synthetic construct
  source 1..80: mol_type = other DNA
tcttcatccatgtaacctgttaatataactgagcatacaacaaaagggcgtgatttagatatcaagtattttctctttat

SEQ ID NO: 53332 - DNA, 80 bp, synthetic construct; identical to SEQ ID NO: 14042
  source 1..80: mol_type = other DNA

SEQ ID NO: 53333 - DNA, 80 bp, synthetic construct
  source 1..80: mol_type = other DNA
gctgataattattaagtgcttaccacataccaagtactcactgctctaagcactttatgtattaaatcatttgatactca

SEQ ID NO: 53334 - DNA, 80 bp, synthetic construct
  source 1..80: mol_type = other DNA
gtagactacttcttgcaatatctgcaaactctgcaaaaatttcaggtcctttgatcatgttcaggtaaatcagctgttac

SEQ ID NO: 53335 - DNA, 80 bp, synthetic construct
  source 1..80: mol_type = other DNA
gccaccaaggaattgtgtgggttcttgccgtggagcagagggatgtcttgctttgagaaaatctaatatttaatatttac

SEQ ID NO: 53336 - DNA, 80 bp, synthetic construct
  source 1..80: mol_type = other DNA
tctactaaaaatacaaaaattagccaggcatggtggcacacacctgtaaccccagctactcatgaggctgaggcaggaga

SEQ ID NO: 53337 - DNA, 80 bp, synthetic construct; identical to SEQ ID NO: 14043
  source 1..80: mol_type = other DNA

SEQ ID NO: 53338 - DNA, 80 bp, synthetic construct
  source 1..80: mol_type = other DNA
tgagattaaataatgttatctaaataaaagcacttggtacagtgcatgggacataagtagtcaataaatattggccatta

SEQ ID NO: 53339 - DNA, 80 bp, synthetic construct
  source 1..80: mol_type = other DNA
aggctggagtgcaatggcacgatctcggctcaccgcaacctttgcctcccgagttcaagggattctcctgcctcagcctc

SEQ ID NO: 53340 - DNA, 80 bp, synthetic construct
  source 1..80: mol_type = other DNA
gccaccacacccagccaattacaggaaaatttcttgcttaaaagtgaattattggacttttcgttttttacatttagggt

SEQ ID NO: 53341 - DNA, 80 bp, synthetic construct; identical to SEQ ID NO: 14044
  source 1..80: mol_type = other DNA

SEQ ID NO: 53342 - DNA, 80 bp, synthetic construct
  source 1..80: mol_type = other DNA
tggtggtgtggaatggtaagatcatgctccgctgaagtttctaaccttaagaatttcatggaatgtactcctcacataag

SEQ ID NO: 53343 - DNA, 80 bp, synthetic construct
  source 1..80: mol_type = other DNA
gcacccagtgtttattctagctacacctttcctaatttcacagaattaaaaaactttttattctttctcccactacactg

SEQ ID NO: 53344 - DNA, 80 bp, synthetic construct
  source 1..80: mol_type = other DNA
taatctagctatcccataaagtgaggttcacttttatttcaactttgcattgcagaagtaagccacaaatcattattcca

SEQ ID NO: 53345 - DNA, 80 bp, synthetic construct; identical to SEQ ID NO: 14045
  source 1..80: mol_type = other DNA

SEQ ID NO: 53346 - DNA, 80 bp, synthetic construct
  source 1..80: mol_type = other DNA
gggctttattaggaaactaatcttaggttcttaatccagtggttgtcagggagagcacaattggatctagactgtaaaag

SEQ ID NO: 53347 - DNA, 80 bp, synthetic construct
  source 1..80: mol_type = other DNA
tgaatgaggaggtgagaaataagagactcagtttgctgggatgatgatgtttgttggtttaatctatcttaaacctttct

SEQ ID NO: 53348 - DNA, 80 bp, synthetic construct
  source 1..80: mol_type = other DNA
atctctattttttaaaaaaaatagaaaaacaatcaattgggaaaaatgtgtttgaaagagtatatcaataagaatatgtc

SEQ ID NO: 53349 - DNA, 80 bp, synthetic construct; identical to SEQ ID NO: 14046
  source 1..80: mol_type = other DNA

SEQ ID NO: 53350 - DNA, 80 bp, synthetic construct
  source 1..80: mol_type = other DNA
tcaggagttcgagaccagcctgaccaacatagtgaaaccctgtctctattaaaaatacaaaattagctgggcatggtggc

SEQ ID NO: 53351 - DNA, 80 bp, synthetic construct
  source 1..80: mol_type = other DNA
ttcaacttcatctccctgccttcctttccctccaaacccactctctttctagtgtgaactgagaaagaagaatgaggctt

SEQ ID NO: 53352 - DNA, 80 bp, synthetic construct
  source 1..80: mol_type = other DNA
gtttccttgcttgaagagctgagtcatatattaagtaatcccaatagagataaatctgaatccagaaaacagttaaaaaa

SEQ ID NO: 53353 - DNA, 80 bp, synthetic construct; identical to SEQ ID NO: 14047
  source 1..80: mol_type = other DNA

SEQ ID NO: 53354 - DNA, 80 bp, synthetic construct
  source 1..80: mol_type = other DNA
ctactgtctttcaaaggtagttatttagaaggcaatagaaaggagatggtattttgtttttaactagtttttttccccca

SEQ ID NO: 53355 - DNA, 80 bp, synthetic construct
  source 1..80: mol_type = other DNA
ggcaccctttcatatgagcttcatcttctctacagcaatctcttaaattgtagttatttaaaaacttggggcctggcaca

SEQ ID NO: 53356 - DNA, 80 bp, synthetic construct
  source 1..80: mol_type = other DNA
attcaaattggccttagaagcacaggcctctattttgggagtagaaacagacaggtcacaaaagaattaaaagcaatgta

SEQ ID NO: 53357 - DNA, 80 bp, synthetic construct; identical to SEQ ID NO: 14048
  source 1..80: mol_type = other DNA

SEQ ID NO: 53358 - DNA, 80 bp, synthetic construct
  source 1..80: mol_type = other DNA
cctttctttgttctttgataagtctttcatatgtcttctgcaaaacagttttttgctcactgttctggtccgtttgaaaa

SEQ ID NO: 53359 - DNA, 80 bp, synthetic construct
  source 1..80: mol_type = other DNA
aaataggctctgttgtgatagattagctgggaatatatgctaccaataatctttggtagtaaataactagaatcaaacac

SEQ ID NO: 53360 - DNA, 80 bp, synthetic construct
  source 1..80: mol_type = other DNA
ataggtaaggcaaggaaatgatccaaacttactgatttttccagaactgtccactgaaagagataaaggcaaacacatca

SEQ ID NO: 53361 - DNA, 80 bp, synthetic construct; identical to SEQ ID NO: 14049
  source 1..80: mol_type = other DNA

SEQ ID NO: 53362 - DNA, 80 bp, synthetic construct
  source 1..80: mol_type = other DNA
aagcgatcctccagtttcagcctcctgagtagctgggactacaggtgcgtgctaccacacccagctaatttttgtatttt

SEQ ID NO: 53363 - DNA, 80 bp, synthetic construct
  source 1..80: mol_type = other DNA
gaaatataggtatatctcttgtgttgatgttacttgataaacctaacatagaaagcacaaaataggctggcgccgtggct

SEQ ID NO: 53364 - DNA, 80 bp, synthetic construct
  source 1..80: mol_type = other DNA
aaattagctgggtagggtggcaagcacctgtagtcccagctgctcagaaagctgaggtgggaggattgcttaggaagtca

SEQ ID NO: 53365 - DNA, 80 bp, synthetic construct; identical to SEQ ID NO: 14050
  source 1..80: mol_type = other DNA

SEQ ID NO: 53366 - DNA, 80 bp, synthetic construct
  source 1..80: mol_type = other DNA
tgaaaattgtatgaaattcaaatttcaatgtctaaaatagtattttattgggacatacccatgctcattcttttatatat

SEQ ID NO: 53367 - DNA, 80 bp, synthetic construct
  source 1..80: mol_type = other DNA
tttgagaccagcctaggcaacatagcaagactcagtttctacaaaaaataaaaaaaagttagccaagcatggtggcacac

SEQ ID NO: 53368 - DNA, 80 bp, synthetic construct
  source 1..80: mol_type = other DNA
aaaaaacacaaaaacccagcaaacaaaaacaaacataaaacattaaaaacatttgtagaaaaaatttgctcaccccagcc

SEQ ID NO: 53369 - DNA, 80 bp, synthetic construct; identical to SEQ ID NO: 14051
  source 1..80: mol_type = other DNA

SEQ ID NO: 53370 - DNA, 80 bp, synthetic construct
  source 1..80: mol_type = other DNA
aagactcctgcttaagagccaccaatggttccccatcttggtttaacaaaagtcaaaatcacaacagtggctttcaaaga

SEQ ID NO: 53371 - DNA, 80 bp, synthetic construct
  source 1..80: mol_type = other DNA
aaatattcccccctcagatattgcctggctaattctctcacctatttcatgttccatctagtagttatagcaattgctga

SEQ ID NO: 53372 - DNA, 80 bp, synthetic construct
  source 1..80: mol_type = other DNA
atgatataatgtccctcttttgtccctggtaaatttctttgcatttaggtccactttacgtgatattaatgtagccacat

SEQ ID NO: 53373 - DNA, 80 bp, synthetic construct; identical to SEQ ID NO: 14052
  source 1..80: mol_type = other DNA

SEQ ID NO: 53374 - DNA, 80 bp, synthetic construct
  source 1..80: mol_type = other DNA
tgcattttgcagtctgtcccttcttctactcccatttgctacatcttctagtttttattatttctaccttttatcttttg

SEQ ID NO: 53375 - DNA, 80 bp, synthetic construct
  source 1..80: mol_type = other DNA
taactctctaaccagaagaacaaattgattttggtcctttctatgtggtttcttgtttctgtgggcctttgacttattta

SEQ ID NO: 53376 - DNA, 80 bp, synthetic construct
  source 1..80: mol_type = other DNA
aaagtgtcagtgcaaataaaggaatcgagatgctacaaaagaccagaggaaactgagaaaaacagtaggagcttactggt

SEQ ID NO: 53377 - DNA, 80 bp, synthetic construct
  source 1..80: mol_type = other DNA
aactccactttaataacttaaatatccaggccattttgaatggcacgtatgatgggttatataagtgaaggccacttttt

SEQ ID NO: 53378 - DNA, 80 bp, synthetic construct; identical to SEQ ID NO: 14053
  source 1..80: mol_type = other DNA

SEQ ID NO: 53379 - DNA, 80 bp, synthetic construct
  source 1..80: mol_type = other DNA
ccattcattgtattctccttctagatttccattactaagtttacttactctttgccttactgtggcagggcaggtctcgc

SEQ ID NO: 53380 - DNA, 80 bp, synthetic construct
  source 1..80: mol_type = other DNA
tgggccttgaagcatgacaagattacgaaggaattcttaacaggacccgtttaggattaaaacaagtttattggggggtc

SEQ ID NO: 53381 - DNA, 80 bp, synthetic construct
  source 1..80: mol_type = other DNA
catcttagtcacagattagaagaagttaatgacttatgtctttagatgaatgcacacttacacgtagacatatagcttag

SEQ ID NO: 53382 - DNA, 80 bp, synthetic construct
  source 1..80: mol_type = other DNA
acctcagcctcccaagtagctgggattacaggtgtgtgccaccacacccagctaatttttgtatttttagtagagatggg

SEQ ID NO: 53383 - DNA, 80 bp, synthetic construct; identical to SEQ ID NO: 14054
  source 1..80: mol_type = other DNA

SEQ ID NO: 53384 - DNA, 80 bp, synthetic construct
  source 1..80: mol_type = other DNA
tgaactctttttttgtttaaaggaccttcacccattcctgcatgtaagttaggacaattttagaacactaagataaaatg

SEQ ID NO: 53385 - DNA, 80 bp, synthetic construct
  source 1..80: mol_type = other DNA
tctgtgttcctcagtcatctcttgattctaactcctgcgcataatttccccatatcccccctcccatagaaaccctccag

SEQ ID NO: 53386 - DNA, 80 bp, synthetic construct
  source 1..80: mol_type = other DNA
cttttcagctgcaagcagccaaacctgggtttggttacttacatttatgtgtatcaatattgtaaaaatcagcactaaaa

SEQ ID NO: 53387 - DNA, 80 bp, synthetic construct; identical to SEQ ID NO: 14055
  source 1..80: mol_type = other DNA

SEQ ID NO: 53388 - DNA, 80 bp, synthetic construct
  source 1..80: mol_type = other DNA
tttgtttcaaaataatcaaaattattctgttatttttaaatacttttcatttcattaatttttgcctaataaaagtagga

SEQ ID NO: 53389 - DNA, 80 bp, synthetic construct
  source 1..80: mol_type = other DNA
gacaagtaatgattttatactcacttatttctatatattctgtaatttctctcacaattttgtttgtaacctgtggatta

SEQ ID NO: 53390 - DNA, 80 bp, synthetic construct
  source 1..80: mol_type = other DNA
aattagttgaggcttgctctagttgaaggaattggtggtcaaggtaatcttttccatctgtgcttgcttggtggaatgtt

SEQ ID NO: 53391 - DNA, 80 bp, synthetic construct; identical to SEQ ID NO: 14056
  source 1..80: mol_type = other DNA

SEQ ID NO: 53392 - DNA, 80 bp, synthetic construct
  source 1..80: mol_type = other DNA
accatgcctggctaattttgtatttttagtagagacagggtttcaccatgttggccaggtgggtctcgaactcctgacct

SEQ ID NO: 53393 - DNA, 80 bp, synthetic construct
  source 1..80: mol_type = other DNA
cttatttttttataggaaaatagaaaaattaaaaaaatttaattcttttaattacatctgagagtttctagcttttaatc

SEQ ID NO: 53394 - DNA, 80 bp, synthetic construct
  source 1..80: mol_type = other DNA
ctaaaacggtgaaaccccgtctctactaaaaatacaaaaaattagccgggcgtagtggcgggcgcctgtagtcccagcta

SEQ ID NO: 53395 - DNA, 80 bp, synthetic construct; identical to SEQ ID NO: 14057
  source 1..80: mol_type = other DNA

SEQ ID NO: 53396 - DNA, 80 bp, synthetic construct
  source 1..80: mol_type = other DNA
ggtctactcattttaaagcacactaatatatttctccttcactctctccttctccttcttttcttcctgctttttttttt

SEQ ID NO: 53397 - DNA, 80 bp, synthetic construct
  source 1..80: mol_type = other DNA
tttgtagagacaggatttcaccatggtgcccagcctggtctccaactcctgagctcaagcaatccacctgccctggcctc

SEQ ID NO: 53398 - DNA, 80 bp, synthetic construct
  source 1..80: mol_type = other DNA
aacttctttttgagtttttactcaaaagtaaactccctgaagtatgtccctttgataattctttcactggggacctgtgt

SEQ ID NO: 53399 - DNA, 80 bp, synthetic construct; identical to SEQ ID NO: 14058
  source 1..80: mol_type = other DNA

SEQ ID NO: 53400 - DNA, 80 bp, synthetic construct
  source 1..80: mol_type = other DNA
tctatctaactatttttgtacctattaaccattcccaatttttctctctcctgactaccctccccaggctctggtaacca

SEQ ID NO: 53401 - DNA, 80 bp, synthetic construct
  source 1..80: mol_type = other DNA
tgtttggatttcattcttgttctgttgtattctggcacatattattgctaatgagatgtctagtgttaacatgatttttt

SEQ ID NO: 53402 - DNA, 80 bp, synthetic construct
  source 1..80: mol_type = other DNA
gcaggtgatctgcttctctggttgtctttatgatttgctttttaatgtctgtcagcttactacgatgagttttggcacat

SEQ ID NO: 53403 - DNA, 80 bp, synthetic construct
  source 1..80: mol_type = other DNA
ttctctcttatcaaattccattacacctgacctcattctatttacagctcttctttttcatattttcaatatcttctgtg

SEQ ID NO: 53404 - DNA, 80 bp, synthetic construct; identical to SEQ ID NO: 14059
  source 1..80: mol_type = other DNA

SEQ ID NO: 53405 - DNA, 80 bp, synthetic construct
  source 1..80: mol_type = other DNA
ttttcatgctgtactagctgtcatatgccgtatcagctgccttaccgtttaaaattttattatctccttcacctcctcca

SEQ ID NO: 53406 - DNA, 80 bp, synthetic construct
  source 1..80: mol_type = other DNA
agaccccccctttactggttctccttctttctccctgctcactacttctctatatgcatagttagatttttctcattcta

SEQ ID NO: 53407 - DNA, 80 bp, synthetic construct
  source 1..80: mol_type = other DNA
ccttttgatatagagtatatgcttggatggggggcagaatgtttagtgggatttttcttgttactcccaaattgacaagt

SEQ ID NO: 53408 - DNA, 80 bp, synthetic construct; identical to SEQ ID NO: 14060
  source 1..80: mol_type = other DNA

SEQ ID NO: 53409 - DNA, 80 bp, synthetic construct
  source 1..80: mol_type = other DNA
ttacagtgattgggggtatctgtgagaaaggatgtgtggcaacccatctcctggttgaatagtggatttgttgatttgtt

SEQ ID NO: 53410 - DNA, 80 bp, synthetic construct
  source 1..80: mol_type = other DNA
ctggcttgagccttcttgctagtatgtcactcaagtgggtggcctacttggtaagggcatctctgcagtacgagcaatga

SEQ ID NO: 53411 - DNA, 80 bp, synthetic construct
  source 1..80: mol_type = other DNA
gtattgtacaagacatttgggtgtctgctctagatgacatcaaaggacagtcagtctcaggttctcagagaaaagaacct

SEQ ID NO: 53412 - DNA, 80 bp, synthetic construct
  source 1..80: mol_type = other DNA
cgggccattaggagaggagagggttttaaaggggatggcttaagcattttaaataatttagcataactagaaaattatgg

SEQ ID NO: 53413 - DNA, 80 bp, synthetic construct; identical to SEQ ID NO: 14061
  source 1..80: mol_type = other DNA

SEQ ID NO: 53414 - DNA, 80 bp, synthetic construct
  source 1..80: mol_type = other DNA
tacttgccctcttgagccctcactctcactccagttaatcctccacaataatagagtgatcttttaaaattataaagtag

SEQ ID NO: 53415 - DNA, 80 bp, synthetic construct
  source 1..80: mol_type = other DNA
gttttgcacctccatagcaggcctgtgcatgttgtacttgttccttttgcctgaagcacactcccccttctataccatct

SEQ ID NO: 53416 - DNA, 80 bp, synthetic construct
  source 1..80: mol_type = other DNA
gactttgtcttgctcatggctatatttccagtgcttaggataatgcctggcctacaataggccaatatatatttgttgaa

SEQ ID NO: 53417 - DNA, 80 bp, synthetic construct; identical to SEQ ID NO: 14062
  source 1..80: mol_type = other DNA

SEQ ID NO: 53418 - DNA, 80 bp, synthetic construct
  source 1..80: mol_type = other DNA
tgcaccctggacagatctaactctggacctgtgtggatggctttgttttcatgcctggggcagatgggtgaagatatttt

SEQ ID NO: 53419 - DNA, 80 bp, synthetic construct
  source 1..80: mol_type = other DNA
tttcctcatcccctcaccattcctcccaagagcttaactttagctttcctttctttatatgtgttcctatattccatttc

SEQ ID NO: 53420 - DNA, 80 bp, synthetic construct
  source 1..80: mol_type = other DNA
ggtgttggatttttacattatttccctgcccatcctctttgatgactcctctgaaaaggacactatgcattcaatttggg

SEQ ID NO: 53421 - DNA, 80 bp, synthetic construct; identical to SEQ ID NO: 14063
  source 1..80: mol_type = other DNA

SEQ ID NO: 53422 - DNA, 80 bp, synthetic construct
  source 1..80: mol_type = other DNA
tttagaaggaactggaggaggatatataagcatatttgaaatctgttagaataacatagatgtctttcatgtttaaaaat

SEQ ID NO: 53423 - DNA, 80 bp, synthetic construct
  source 1..80: mol_type = other DNA
tcgctcatttactgacctgcctgggctcttttggcatctgcgtttttaaccttgacaggaactttgggttttaatattaa

SEQ ID NO: 53424 - DNA, 80 bp, synthetic construct
  source 1..80: mol_type = other DNA
tgatctggtttaaaaattgagtcactgttggtatgtgttaccttggaagttgggtttagaactaaaataatggggctggg

SEQ ID NO: 53425 - DNA, 80 bp, synthetic construct; identical to SEQ ID NO: 14064
  source 1..80: mol_type = other DNA

SEQ ID NO: 53426 - DNA, 80 bp, synthetic construct
  source 1..80: mol_type = other DNA
ttatgaatcaaaaagtttgtcttgcagtcctaatctggaggactttgggtaatgtagaagcaaatgaatatgagaaatat

SEQ ID NO: 53427 - DNA, 80 bp, synthetic construct
  source 1..80: mol_type = other DNA
gcattatctaacatattttgttggagtctgtgaggggaggacttgtgtgggcaaagaaggaagcattccaaaccacccta

SEQ ID NO: 53428 - DNA, 80 bp, synthetic construct
  source 1..80: mol_type = other DNA
ctttgggtatagtctcgggtagagactgccatatctttctgtttcctttgaatagcattataatgtttgagagaacactg

SEQ ID NO: 53429 - DNA, 80 bp, synthetic construct
  source 1..80: mol_type = other DNA
ggtaataaggaagcaagggaataatgggaaccacaaatcactttgacagaagtgaagtgaaggggaccaaagagaaccaa

SEQ ID NO: 53430 - DNA, 80 bp, synthetic construct; identical to SEQ ID NO: 14065
  source 1..80: mol_type = other DNA

SEQ ID NO: 53431 - DNA, 80 bp, synthetic construct
  source 1..80: mol_type = other DNA
gtacatatgtgtttgaaatcatgtaaatgtaagcttccttctcagggagaagctagattagcagagggcagaggaaactg

SEQ ID NO: 53432 - DNA, 80 bp, synthetic construct
  source 1..80: mol_type = other DNA
aaatacaaaaaaatttctcctccctattctgagtcagtgtgcctgagactggccactaggagaggagagggttttaagag

SEQ ID NO: 53433 - DNA, 80 bp, synthetic construct
  source 1..80: mol_type = other DNA
tctgatctttaacaaagctgagaaaaacaagcaatggggaaagggcttcctattcaataaacgatactgggataactggc

SEQ ID NO: 53434 - DNA, 80 bp, synthetic construct; identical to SEQ ID NO: 14066
  source 1..80: mol_type = other DNA

SEQ ID NO: 53435 - DNA, 80 bp, synthetic construct
  source 1..80: mol_type = other DNA
gggaataggcacttttcaaaagaagacgtacatgcagctcacaaacatatgaagaaaagctcaacatcactgattgttag

SEQ ID NO: 53436 - DNA, 80 bp, synthetic construct
  source 1..80: mol_type = other DNA
ttgttggtggcaacgtaaattagttcaaccattgtgggaaacagtgtggcaattcctcaaagaccccaaaacggagctac

SEQ ID NO: 53437 - DNA, 80 bp, synthetic construct
  source 1..80: mol_type = other DNA
tacatatacaccatgtaataccatgcagccataaaaaggaacaagatcatgtcctttgcaggaacatggatggagctgga

SEQ ID NO: 53438 - DNA, 80 bp, synthetic construct
  source 1..80: mol_type = other DNA
ggaaaaataactaaggggttctaggcttaatacctgggtgatgaaataatctgtacaacaaacctgcatgacacaagttt

SEQ ID NO: 53439 - DNA, 80 bp, synthetic construct; identical to SEQ ID NO: 14067
  source 1..80: mol_type = other DNA

SEQ ID NO: 53440 - DNA, 80 bp, synthetic construct
  source 1..80: mol_type = other DNA
tgcctggggctatggtgtggagagggttttgggttgggggatagtgggaagtgattgctaaacagagtttttctgggggg

SEQ ID NO: 53441 - DNA, 80 bp, synthetic construct
  source 1..80: mol_type = other DNA
ggttctaatgcatcattaagggacagagaggagatattttccagaaaacatgcttgaagcctgctaaggtcagattattt

SEQ ID NO: 53442 - DNA, 80 bp, synthetic construct
  source 1..80: mol_type = other DNA
gtcttctttttcccttaaaatcacattcagtcgaacagcaggccctgttggctttgcccccaaaataaataaaatctgaa

SEQ ID NO: 53443 - DNA, 80 bp, synthetic construct; identical to SEQ ID NO: 14068
  source 1..80: mol_type = other DNA

SEQ ID NO: 53444 - DNA, 80 bp, synthetic construct
  source 1..80: mol_type = other DNA
ttccttttgcctgaagcacactcccccttctataccatctttctttagtctgttactcttcttatttttctacatgaatt

SEQ ID NO: 53445 - DNA, 80 bp, synthetic construct
  source 1..80: mol_type = other DNA
tacatatatttttaaaatgcattaatatctttgaagactttttcttttttttcctttagtgtttgacttgttcagtgctg

SEQ ID NO: 53446 - DNA, 80 bp, synthetic construct
  source 1..80: mol_type = other DNA
ggctatctttcatggatattctatgatataaataccctgggttgtggctctcttcttggtggctattgtcctaacttcct

SEQ ID NO: 53447 - DNA, 80 bp, synthetic construct; identical to SEQ ID NO: 14069
  source 1..80: mol_type = other DNA

SEQ ID NO: 53448 - DNA, 80 bp, synthetic construct
  source 1..80: mol_type = other DNA
tttctgctccttggaaatcttacccaccttttttatgcttaagcttggctgtatatttttcatttatagatattgccagg

SEQ ID NO: 53449 - DNA, 80 bp, synthetic construct
  source 1..80: mol_type = other DNA
tctgacaggccccagtgtctatttttcccctctgtgtgtccatgtgttctcatcatttagctcccgtttataaataagaa

SEQ ID NO: 53450 - DNA, 80 bp, synthetic construct
  source 1..80: mol_type = other DNA
atgggcatttaggttgattccatgtatttgctattgtgaatagttctgtgtttaacataactgtgcatgtgtctttatga

SEQ ID NO: 53451 - DNA, 80 bp, synthetic construct; identical to SEQ ID NO: 14070
  source 1..80: mol_type = other DNA

SEQ ID NO: 53452 - DNA, 80 bp, synthetic construct
  source 1..80: mol_type = other DNA
ttttatctgtgccgtgagaatacttagccgatcagcctctttgctaaggcttcagaaagatgtgtggatgaggactttgg

SEQ ID NO: 53453 - DNA, 80 bp, synthetic construct
  source 1..80: mol_type = other DNA
tttagatggaactagaggggagtatgtaagtatgtttgcaatctgttagagtaacccagatgtctgtcatgtttaaaact

SEQ ID NO: 53454 - DNA, 80 bp, synthetic construct
  source 1..80: mol_type = other DNA
cactcatttactgacctgcctgggctcttttggcatctgcatttttaaccttgacaggaactttggtttttaatattagt

SEQ ID NO: 53455 - DNA, 80 bp, synthetic construct; identical to SEQ ID NO: 14071
  source 1..80: mol_type = other DNA

SEQ ID NO: 53456 - DNA, 80 bp, synthetic construct
  source 1..80: mol_type = other DNA
gtccccacatatgaccagctgagaagtagagtacttacttgcggttctctgtgaaattactgaaaaataagcaaacagaa

SEQ ID NO: 53457 - DNA, 80 bp, synthetic construct
  source 1..80: mol_type = other DNA
aagatttagcagtgatgatgtaatgacgaagtcaaaggtagagtttccttaaaggccctctccacttattggacctgaac

SEQ ID NO: 53458 - DNA, 80 bp, synthetic construct
  source 1..80: mol_type = other DNA
ctctccacccccctgaaaattcctcctacttgttatttcgtagtattgttcagtttattgttgatgaatgctagcttagt

SEQ ID NO: 53459 - DNA, 80 bp, synthetic construct; identical to SEQ ID NO: 14072
  source 1..80: mol_type = other DNA

SEQ ID NO: 53460 - DNA, 80 bp, synthetic construct
  source 1..80: mol_type = other DNA
agttctagaggagatacaaagtaaatatatgtttgaaattatgtaaatataacttctttctcagggagaagctggatgag

SEQ ID NO: 53461 - DNA, 80 bp, synthetic construct
  source 1..80: mol_type = other DNA
ggaccagctgaaaaacagagaggtatcttagcaactgttttttctcccatgatattttcctttctatgtagagagtttct

SEQ ID NO: 53462 - DNA, 80 bp, synthetic construct
  source 1..80: mol_type = other DNA
ataggaaagtaagtggttaaagtagtatgcaccccaagcctggaaatcttagctgtaccagggaaaggagagattccaga

SEQ ID NO: 53463 - DNA, 80 bp, synthetic construct
  source 1..80: mol_type = other DNA
gttaagtcccttgtaatatatcattttgacctgctgataaactttctcccctgccctttattttttaataaaatagtaag

SEQ ID NO: 53464 - DNA, 80 bp, synthetic construct; identical to SEQ ID NO: 14073
  source 1..80: mol_type = other DNA

SEQ ID NO: 53465 - DNA, 80 bp, synthetic construct
  source 1..80: mol_type = other DNA
ctctgacttatctcttccctttttgcagtgactggtaactgcttgaaatcctgcaggggattgtaaattgatagtcttaa

SEQ ID NO: 53466 - DNA, 80 bp, synthetic construct
  source 1..80: mol_type = other DNA
agacttactgattgtgtgaggatgcgatctgactgaaaaacaagcaaagatactttttgttacccctttcttgtttcttt

SEQ ID NO: 53467 - DNA, 80 bp, synthetic construct
  source 1..80: mol_type = other DNA
agttccatgttgcaactcaagttccaatagacatcagtggactttgataagtgcaccacagagaaacaaataaataactg

SEQ ID NO: 53468 - DNA, 80 bp, synthetic construct; identical to SEQ ID NO: 14074
  source 1..80: mol_type = other DNA

SEQ ID NO: 53469 - DNA, 80 bp, synthetic construct
  source 1..80: mol_type = other DNA
gagggacactcccggacagtgtggtcatgagagatccaaacccaagcactccaggggctttggatttttcacatatgcca

SEQ ID NO: 53470 - DNA, 80 bp, synthetic construct
  source 1..80: mol_type = other DNA
agaaatcacctaagaaattattttgagtagtatggaaaaattgaagtgattgaaaacatgactgaccgaggcagttgcaa

SEQ ID NO: 53471 - DNA, 80 bp, synthetic construct
  source 1..80: mol_type = other DNA
gttctggaaacttaggtggtggtcatggaggtggtttcggtgggaatgacaactttgatcatggaggaaacttcagtggt

SEQ ID NO: 53472 - DNA, 80 bp, synthetic construct; identical to SEQ ID NO: 14075
  source 1..80: mol_type = other DNA

SEQ ID NO: 53473 - DNA, 80 bp, synthetic construct
  source 1..80: mol_type = other DNA
ggtacaaagaagacatgttttagacaaatactcatgtgtatgggcaaaaaactcgaggactgtatttgtgactaattgta

SEQ ID NO: 53474 - DNA, 80 bp, synthetic construct
  source 1..80: mol_type = other DNA
aataagggaccaaggaaattggaacattatcatatcacaatgtggatgcatacattttggcttaagatatgttagacact

SEQ ID NO: 53475 - DNA, 80 bp, synthetic construct
  source 1..80: mol_type = other DNA
tactactttcctgaaaggaaatatcagaaatggcaatggaagaaacatccttcttaggtcaggggcatagagcgctgtgc

SEQ ID NO: 53476 - DNA, 80 bp, synthetic construct
  source 1..80: mol_type = other DNA
atcctgcaggggattggtaatttctttaaactgtgctgcctttacctttcttctccctatttctgccatcctgtgaaagc

SEQ ID NO: 53477 - DNA, 80 bp, synthetic construct; identical to SEQ ID NO: 14076
  source 1..80: mol_type = other DNA

SEQ ID NO: 53478 - DNA, 80 bp, synthetic construct
  source 1..80: mol_type = other DNA
acacaaaatggagaaatcaacatgtgtagaaccaagtgaattcagttctcccttgataggcttaaagagggtaactgcag

SEQ ID NO: 53479 - DNA, 80 bp, synthetic construct
  source 1..80: mol_type = other DNA
ttagggacagtagatgcttgaaacacttctagaggttcataatgtcttaaacttatatgtacttttgtcagtctaatttt

SEQ ID NO: 53480 - DNA, 80 bp, synthetic construct
  source 1..80: mol_type = other DNA
ttgagacggagtcttgctctgtcacccaggctggagtgcggtggcgtgatctcggcttactgcaagctctggctcctggg

SEQ ID NO: 53481 - DNA, 80 bp, synthetic construct
  source 1..80: mol_type = other DNA
cccaccttggcctcccaaagtgctggattacaggcgtgagccaccagtgcgccgggcctaatttttgtatttttaataga

SEQ ID NO: 53482 - DNA, 80 bp, synthetic construct; identical to SEQ ID NO: 14077
  source 1..80: mol_type = other DNA

SEQ ID NO: 53483 - DNA, 80 bp, synthetic construct
  source 1..80: mol_type = other DNA
gcctcagcctcccaagtagctgggactacaggcatgcgctaccatgcctggccaattttttgtatttttagtagagacga

SEQ ID NO: 53484 - DNA, 80 bp, synthetic construct
  source 1..80: mol_type = other DNA
gtctcgaactgctgacctcgtgatccacctgcctcgggctcccaaagtgctgagattacaggcatgagccaccatgcctg

SEQ ID NO: 53485 - DNA, 80 bp, synthetic construct
  source 1..80: mol_type = other DNA
aataatttttattgacttgaaaagctttcttcctactcttctttactagggctgttgcgagccactaatttttgttaaag

SEQ ID NO: 53486 - DNA, 80 bp, synthetic construct; identical to SEQ ID NO: 14078
  source 1..80: mol_type = other DNA

SEQ ID NO: 53487 - DNA, 80 bp, synthetic construct
  source 1..80: mol_type = other DNA
gctataagtcttggcaatctgtgagtactgagaaaagcagtcttgattcaggggaatagtcaataacaaatggctcttat

SEQ ID NO: 53488 - DNA, 80 bp, synthetic construct
  source 1..80: mol_type = other DNA
aagttatcttataggactgtaaactccatggcgtcagtgaccaaccatatctttctctcccttattcatgactttatcct

SEQ ID NO: 53489 - DNA, 80 bp, synthetic construct
  source 1..80: mol_type = other DNA
ggttggttcgatgccctagattttaacaccagtttctccctagctcgtcacaatatgaactttcactttattctcttcca

SEQ ID NO: 53490 - DNA, 80 bp, synthetic construct
  source 1..80: mol_type = other DNA
taggacatgaggaaagagaaaggcctttggagagaaaactgtagaactcaggttagactagaccctgcatagtatttcct

SEQ ID NO: 53491 - DNA, 80 bp, synthetic construct; identical to SEQ ID NO: 14079
  source 1..80: mol_type = other DNA

SEQ ID NO: 53492 - DNA, 80 bp, synthetic construct
  source 1..80: mol_type = other DNA
ccctctagacactgtagaagatcaaggaacctggagggagaaggatagataaggtacttaccattggatccaggatattg

SEQ ID NO: 53493 - DNA, 80 bp, synthetic construct
  source 1..80: mol_type = other DNA
tcaagggattctcgtgcctcagcctcctgagtagcagggattacaggtgcccgccaccatgcctggctattttttgtatt

SEQ ID NO: 53494 - DNA, 80 bp, synthetic construct
  source 1..80: mol_type = other DNA
aacacctctattagtgatattttccaaaggcaagcagtgaaaatgattttctcaggaattactaaatctcagtattcagg

SEQ ID NO: 53495 - DNA, 80 bp, synthetic construct
  source 1..80: mol_type = other DNA
ggtgttggagatgagatccttaattgtattcctttccatattcccccagtgtttttcctcagatcactctgtttcactct

SEQ ID NO: 53496 - DNA, 80 bp, synthetic construct; identical to SEQ ID NO: 14080
  source 1..80: mol_type = other DNA

SEQ ID NO: 53497 - DNA, 80 bp, synthetic construct
  source 1..80: mol_type = other DNA
tgggagaaagtgcaaggaacactacattctgcaggaacaagggccagaaccccctcatcatgggaacatcttatcaatat

SEQ ID NO: 53498 - DNA, 80 bp, synthetic construct
  source 1..80: mol_type = other DNA
tctctgtgtcttttctttaaccctcgccttccctccaaaacctaacagttacgatatggggaaatgaaagtctaagaaat

SEQ ID NO: 53499 - DNA, 80 bp, synthetic construct
  source 1..80: mol_type = other DNA
gttatttggagagtgtatttttcactaattttatcctagaagtgaggctttgagaggtagagcaggggagaggaagtgat

SEQ ID NO: 53500 - DNA, 80 bp, synthetic construct; identical to SEQ ID NO: 14081
  source 1..80: mol_type = other DNA

SEQ ID NO: 53501 - DNA, 80 bp, synthetic construct
  source 1..80: mol_type = other DNA
tctagtttcttcttctcacagcttccagcttattggagagtgatagagcagtgactgctgctttgattagctttagagtc

SEQ ID NO: 53502 - DNA, 80 bp, synthetic construct
  source 1..80: mol_type = other DNA
cagtctcgacctcctgggctcaagtgatcctcccacctcagcctcttgagtagctaggactacagctgcatgccactatt

SEQ ID NO: 53503 - DNA, 80 bp, synthetic construct
  source 1..80: mol_type = other DNA
caggtgtgagcccatgcctggccaaaaccttcagtttttaatgagaatttggccttcagttgattttctagctctgatcg

SEQ ID NO: 53504 - DNA, 80 bp, synthetic construct
  source 1..80: mol_type = other DNA
aacctctgcctcctgggttcaagcgattctcctgccttagcctcctgagtagctgggactgcaggcgcacgacaccacac

SEQ ID NO: 53505 - DNA, 80 bp, synthetic construct; identical to SEQ ID NO: 14082
  source 1..80: mol_type = other DNA

SEQ ID NO: 53506 - DNA, 80 bp, synthetic construct
  source 1..80: mol_type = other DNA
taggagattttagttcctggtggatctgtggggtttctaagctaggtcagctcccaactcaactgacagaaggccaaaca

SEQ ID NO: 53507 - DNA, 80 bp, synthetic construct
  source 1..80: mol_type = other DNA
taagtctgcgtggttagttgaatctaaaaagaccatatcttcacccagtgggcattgcagttaataatccttcacttcag

SEQ ID NO: 53508 - DNA, 80 bp, synthetic construct
  source 1..80: mol_type = other DNA
taacttaatagttgctttgcctgtatctacaaatatgtatctttgattctgaagtagaagtcttatgatacctgccctct

SEQ ID NO: 53509 - DNA, 80 bp, synthetic construct; identical to SEQ ID NO: 14083
  source 1..80: mol_type = other DNA

SEQ ID NO: 53510 - DNA, 80 bp, synthetic construct
  source 1..80: mol_type = other DNA
tgttaataacctgttataacacccaaaaatgatagtggaaagaatgaagagttagtaaaacttcagtcttaattttatta

SEQ ID NO: 53511 - DNA, 80 bp, synthetic construct
  source 1..80: mol_type = other DNA
tatagggatcactcaaagaatgtgactaggttgctaaaagttgctgaaaatagagcctaactcttctggagagaactttt

SEQ ID NO: 53512 - DNA, 80 bp, synthetic construct
  source 1..80: mol_type = other DNA
gccgggcgtggtggtgggtgcctgtagtcccagctactcggtaggctaagacaggagaacggcttgaacccacgaggtgg

SEQ ID NO: 53513 - DNA, 80 bp, synthetic construct; identical to SEQ ID NO: 14084
  source 1..80: mol_type = other DNA

SEQ ID NO: 53514 - DNA, 80 bp, synthetic construct
  source 1..80: mol_type = other DNA
agaaggacttgatccttgagtccttgggcatgaataattgaaataaaaatagattgatgttctaagtaaagtactaaaag

SEQ ID NO: 53515 - DNA, 80 bp, synthetic construct
  source 1..80: mol_type = other DNA
taatttgtatactttccctagtaggaatctgcatcactattgtcaagttcagctgcagttgagtagtagaaatggtgact

SEQ ID NO: 53516 - DNA, 80 bp, synthetic construct
  source 1..80: mol_type = other DNA
aaatgctaggttgaagaaaaataagggttgaagaaaatgtgaactccaaacccttgaaatcccaacatggaaaccaggta

SEQ ID NO: 53517 - DNA, 80 bp, synthetic construct
  source 1..80: mol_type = other DNA
cagtatgcttcaccactgtgaaggaaatttccatttcccaacactcgctctagggagtatcataaatagaaacaacggga

SEQ ID NO: 53518 - DNA, 80 bp, synthetic construct; identical to SEQ ID NO: 14085
  source 1..80: mol_type = other DNA

SEQ ID NO: 53519 - DNA, 80 bp, synthetic construct
  source 1..80: mol_type = other DNA
tgcatggcctctttggaaactatgtaataggaatgccaggggagttgagaaagacagtgttaaaaaagcaagtcacccct

SEQ ID NO: 53520 - DNA, 80 bp, synthetic construct
  source 1..80: mol_type = other DNA
gtcagatatcaaagggaccagagtggaaaaacaaacttgatacttacgaataggggctgtgaattgcactgaaatacaaa

SEQ ID NO: 53521 - DNA, 80 bp, synthetic construct
  source 1..80: mol_type = other DNA
gcctggaagctgcataaccctcctaccagatcaaatcattcagcatccatcttaaatgagaaatttaagtaactaaaaat

SEQ ID NO: 53522 - DNA, 80 bp, synthetic construct
  source 1..80: mol_type = other DNA
tcagaagatttgaatacaattaagaagtatgagtgagaaatcctgcaggggtagaaatggtaacagttaggatgtggaga

SEQ ID NO: 53523 - DNA, 80 bp, synthetic construct; identical to SEQ ID NO: 14086
  source 1..80: mol_type = other DNA

SEQ ID NO: 53524 - DNA, 80 bp, synthetic construct
  source 1..80: mol_type = other DNA
gaatctatagcctcatctgaaggagacagtgggaattgctgtctctgtagtgattttggcccttattcaacagagtaact

SEQ ID NO: 53525 - DNA, 80 bp, synthetic construct
  source 1..80: mol_type = other DNA
acacacacaccccaccacacctctctacacctcataggctataagtgattctctcaccttggcctcccaaagtgctggga

SEQ ID NO: 53526 - DNA, 80 bp, synthetic construct
  source 1..80: mol_type = other DNA
atcaaatcactttttttctccttccttcagagttagtcctgtctcaggggctcaagctctgaacatcctcaaaaatgaag

SEQ ID NO: 53527 - DNA, 80 bp, synthetic construct; identical to SEQ ID NO: 14087
  source 1..80: mol_type = other DNA

SEQ ID NO: 53528 - DNA, 80 bp, synthetic construct
  source 1..80: mol_type = other DNA
tggacccactttaagcatcaaggccataaagggctggcaaaatctcagatcatataaaagtcattgtttccatttaccat

SEQ ID NO: 53529 - DNA, 80 bp, synthetic construct
  source 1..80: mol_type = other DNA
agatttattctttgttcataacaggggatatacatcccacacaaacatcagtgacagtctgggatcctcggtcagtgagc

SEQ ID NO: 53530 - DNA, 80 bp, synthetic construct
  source 1..80: mol_type = other DNA
gaatctcaagatttcggaaaagttaaaggcaatagtactttcttacagaggcaccccagtttattaagataagaataggg

SEQ ID NO: 53531 - DNA, 80 bp, synthetic construct
  source 1..80: mol_type = other DNA
aaagaacttactcatggctcctgcagttctggctaaaatacaaacaaaaaaggtgagtttgaagagagcatgactcaagg

SEQ ID NO: 53532 - DNA, 80 bp, synthetic construct; identical to SEQ ID NO: 14088
  source 1..80: mol_type = other DNA

SEQ ID NO: 53533 - DNA, 80 bp, synthetic construct
  source 1..80: mol_type = other DNA
ttttctcctttcctccatctttatgtgctttctcaccaccttccccattcctctggtagcaggcacattatagaatatca

SEQ ID NO: 53534 - DNA, 80 bp, synthetic construct
  source 1..80: mol_type = other DNA
aaattgaaaagtgtaacattatttagatttagactttcagaaggcatggagatagacaatcccattccctcctccccctc

SEQ ID NO: 53535 - DNA, 80 bp, synthetic construct
  source 1..80: mol_type = other DNA
aacagaagttgtgtcctctgtcttacctatattgtgaagttgcagtgaaaaatcaggagtaataacagaagggaaagatg

SEQ ID NO: 53536 - DNA, 80 bp, synthetic construct
  source 1..80: mol_type = other DNA
atttctgactgtcctttggaaagttctgagtcctgacagcagagtattataatgtgcacttaattctgtttttatttttg

SEQ ID NO: 53537 - DNA, 80 bp, synthetic construct; identical to SEQ ID NO: 14089
  source 1..80: mol_type = other DNA

SEQ ID NO: 53538 - DNA, 80 bp, synthetic construct
  source 1..80: mol_type = other DNA
ggaagagatgtctgtttttctatgtggtattttaggccgtcaatcactgaactgtcagtttcttgagaaggtgaagccac

SEQ ID NO: 53539 - DNA, 80 bp, synthetic construct
  source 1..80: mol_type = other DNA
ttaggatacatgtgagctgagcaggaaagagaatcatgataaattactgatttctgccacaggcaaaggcatgagcagaa

SEQ ID NO: 53540 - DNA, 80 bp, synthetic construct
  source 1..80: mol_type = other DNA
tgggttgaagtcattcttgtgcctcagcctcctgagtagctgggattacaggcatgtgccaccacgcccagctaattttt

SEQ ID NO: 53541 - DNA, 80 bp, synthetic construct; identical to SEQ ID NO: 14090
  source 1..80: mol_type = other DNA

SEQ ID NO: 53542 - DNA, 80 bp, synthetic construct
  source 1..80: mol_type = other DNA
tgtggggatcgatcacaaactcagttgcattaaggggcccagcaggtctcatgattgtgaatctgctagttataagggat

SEQ ID NO: 53543 - DNA, 80 bp, synthetic construct
  source 1..80: mol_type = other DNA
catctatacttcaacaacagtgcactttgaaatcagtatcatatggttgtggcctgagttgggatagggcaagtgaatcc

SEQ ID NO: 53544 - DNA, 80 bp, synthetic construct
  source 1..80: mol_type = other DNA
acaactttgctagtaggaaatgtgaccctaatatgcaaccacaaatgtaatagtcagtatgaaaacttttgtaggaaaag

SEQ ID NO: 53545 - DNA, 80 bp, synthetic construct; identical to SEQ ID NO: 14091
  source 1..80: mol_type = other DNA

SEQ ID NO: 53546 - DNA, 80 bp, synthetic construct
  source 1..80: mol_type = other DNA
taattttgtatttttggtagagacggggtttcagcaggctggtctcgaactcctgacctcaggtgatccacctgcctcag

SEQ ID NO: 53547 - DNA, 80 bp, synthetic construct
  source 1..80: mol_type = other DNA
aagtagggagctgggatacaactccagttagcctggctctagagtctgcatacttaactgctaggcaatactcctctgta

SEQ ID NO: 53548 - DNA, 80 bp, synthetic construct
  source 1..80: mol_type = other DNA
cccttgaaggtaggctgtgattagagagggacatagtcaagggaggatctgtttaagatggaagaaaatcaaacctgttc

SEQ ID NO: 53549 - DNA, 80 bp, synthetic construct; identical to SEQ ID NO: 14092
  source 1..80: mol_type = other DNA

SEQ ID NO: 53550 - DNA, 80 bp, synthetic construct
  source 1..80: mol_type = other DNA
gtctaaagtttcaataatccatcaatttcccaaaagtcttcccagaaatagtgtcctccctcaggttattagactttcca

SEQ ID NO: 53551 - DNA, 80 bp, synthetic construct
  source 1..80: mol_type = other DNA
gtttctccctccctctttctttcatcttttcagtttggagagtcttctttccctaatgtgatagcctcaagaaccaaaga

SEQ ID NO: 53552 - DNA, 80 bp, synthetic construct
  source 1..80: mol_type = other DNA
ctcttctttctgaatattccttaaacatttttttctttaacgtactgaccatcttccctctccaacattttgtttctgtt

SEQ ID NO: 53553 - DNA, 80 bp, synthetic construct; identical to SEQ ID NO: 14093
  source 1..80: mol_type = other DNA

SEQ ID NO: 53554 - DNA, 80 bp, synthetic construct
  source 1..80: mol_type = other DNA
aactcgtcatttagcattaggtatatttcctaatgctatccctcccccctccccccaccccccaccctccaccccacaac

SEQ ID NO: 53555 - DNA, 80 bp, synthetic construct
  source 1..80: mol_type = other DNA
tgcctagaaagaggtaaataaggaggacaaggtccctagacaaacaagcgtttatggtactgaaacaaccaagaacttgc

SEQ ID NO: 53556 - DNA, 80 bp, synthetic construct
  source 1..80: mol_type = other DNA
tgattttttcatggattgtttaggcatcttatattttggtggtgtggccgaggcccagaatgacatgtaggactgatgat

SEQ ID NO: 53557 - DNA, 80 bp, synthetic construct; identical to SEQ ID NO: 14094
  source 1..80: mol_type = other DNA

SEQ ID NO: 53558 - DNA, 80 bp, synthetic construct
  source 1..80: mol_type = other DNA
tttttttttctttttcctctacttgcttttaggaggtggaggaccttagtcttgattaaactttccttagtttccctatg

SEQ ID NO: 53559 - DNA, 80 bp, synthetic construct
  source 1..80: mol_type = other DNA
aatcattttagaaaggggacccttgattaggtctcattaagtacaatgggccatcaactactagaatgcttgggtttgaa

SEQ ID NO: 53560 - DNA, 80 bp, synthetic construct
  source 1..80: mol_type = other DNA
ttattatatcatcatttcagattgcagtccttatctgtttatacatgtatgggtaatggaccatagtctcctctatcttg

SEQ ID NO: 53561 - DNA, 80 bp, synthetic construct; identical to SEQ ID NO: 14095
  source 1..80: mol_type = other DNA

SEQ ID NO: 53562 - DNA, 80 bp, synthetic construct
  source 1..80: mol_type = other DNA
cctcagcctcccgagtagctgggactacaggtgcccgccacagcgctcggctaatttttttgtatttttagtagagacgg

SEQ ID NO: 53563 - DNA, 80 bp, synthetic construct
  source 1..80: mol_type = other DNA
gatgcttattatcataatgctttttataattcctaatcggacgttccttccacctctccttactccctaaaacacaccat

SEQ ID NO: 53564 - DNA, 80 bp, synthetic construct
  source 1..80: mol_type = other DNA
aacttctccaaacgttttcttcaccgtcttgctttaatattcctgtcttttaaaatactgtatctcaagcctgggtgcgg

SEQ ID NO: 53565 - DNA, 80 bp, synthetic construct
  source 1..80: mol_type = other DNA
cttgggtggctgaggcacaagaatcgcttgaacccgggaggtggagttgcagcgagccgaggttgcaccctgcactccag

SEQ ID NO: 53566 - DNA, 80 bp, synthetic construct; identical to SEQ ID NO: 14096
  source 1..80: mol_type = other DNA

SEQ ID NO: 53567 - DNA, 80 bp, synthetic construct
  source 1..80: mol_type = other DNA
ggctggagtgcagtggcgtaatcacaattcactgtagccttgacctcttgggctcaagtgatcctcccacctcagccttc

SEQ ID NO: 53568 - DNA, 80 bp, synthetic construct
  source 1..80: mol_type = other DNA
tgtcatttttgctccccattgctgtttccgaacagtcttctccagtagaaactcctgttgtctttgaagcacatatgaga

SEQ ID NO: 53569 - DNA, 80 bp, synthetic construct
  source 1..80: mol_type = other DNA
ttgttctccatattttattctaaaagactttttgtaatctggactctccctacctttcaaactcctccacgatctttcac

SEQ ID NO: 53570 - DNA, 80 bp, synthetic construct; identical to SEQ ID NO: 14097
  source 1..80: mol_type = other DNA

SEQ ID NO: 53571 - DNA, 80 bp, synthetic construct
  source 1..80: mol_type = other DNA
gttgtcttaggtatagcagctgcagtgctctaaatgatttcccctttggagggtttttatggcaagcctgcctcacatgg

SEQ ID NO: 53572 - DNA, 80 bp, synthetic construct
  source 1..80: mol_type = other DNA
agctttctaagggcacctgttcacagttgtatatacaacaaaacagccttattcatgggataaggttatggcacagtatt

SEQ ID NO: 53573 - DNA, 80 bp, synthetic construct
  source 1..80: mol_type = other DNA
taaacacatttaatgatgtcctgggggtagttggacaacctcaggacttggagtccaaaggccagtgtttagaacctcag

SEQ ID NO: 53574 - DNA, 80 bp, synthetic construct; identical to SEQ ID NO: 14098
  source 1..80: mol_type = other DNA

SEQ ID NO: 53575 - DNA, 80 bp, synthetic construct
  source 1..80: mol_type = other DNA
agagacttagaatttggaaatatgaaatttccctccttgctctcctaaaagtaaatataaacaaaaaattcatgtggttg

SEQ ID NO: 53576 - DNA, 80 bp, synthetic construct
  source 1..80: mol_type = other DNA
agcctgacttggggatgcctcagggaaggctgccctttcgtgctagccatgtaaagctttaaaattctgaggacacagct

SEQ ID NO: 53577 - DNA, 80 bp, synthetic construct
  source 1..80: mol_type = other DNA
cttttgactgattattgaagtgtctggttatggagaacaaagaaattggagaaatgtgaagcttaagcttctgctgtgct

SEQ ID NO: 53578 - DNA, 80 bp, synthetic construct; identical to SEQ ID NO: 14099
  source 1..80: mol_type = other DNA

SEQ ID NO: 53579 - DNA, 80 bp, synthetic construct
  source 1..80: mol_type = other DNA
catttttctgtccctataagtcttctttcattggtgattctgctgctctgttctttccttctctacctttcctccacctc

SEQ ID NO: 53580 - DNA, 80 bp, synthetic construct
  source 1..80: mol_type = other DNA
gccctatggagatgaagaatagcaagagaccaaatcaggaagttcttgaataatattagaagctaaagagtcaaagtagt

SEQ ID NO: 53581 - DNA, 80 bp, synthetic construct
  source 1..80: mol_type = other DNA
aaatatatcaagaaggaacccatattcttggtaatgaatgagaagttttaccacccatgtgataccttattgggggactg

SEQ ID NO: 53582 - DNA, 80 bp, synthetic construct; identical to SEQ ID NO: 14100
  source 1..80: mol_type = other DNA

SEQ ID NO: 53583 - DNA, 80 bp, synthetic construct
  source 1..80: mol_type = other DNA
aacctccagaaagaatgcagtcttgctgacaacctgattgttgtccagggagacatatatgacagatttataacctatgg

SEQ ID NO: 53584 - DNA, 80 bp, synthetic construct
  source 1..80: mol_type = other DNA
ttagaagtgatatgaaagtcatccaggcttgtttgtaaagtcatccactcatgatcttcaagcttttttctttctgttca

SEQ ID NO: 53585 - DNA, 80 bp, synthetic construct
  source 1..80: mol_type = other DNA
tattagggaaaaccactgagattttaagatccggggctaacttaatcagtgcagataagaaatataaaagagaagtcaca

SEQ ID NO: 53586 - DNA, 80 bp, synthetic construct; identical to SEQ ID NO: 14101
  source 1..80: mol_type = other DNA

SEQ ID NO: 53587 - DNA, 80 bp, synthetic construct
  source 1..80: mol_type = other DNA
atatttacttaggaacaaacatcaaactagtgatagattcttatcaacaataataaataataaacaacaagcaaatggaa

SEQ ID NO: 53588 - DNA, 80 bp, synthetic construct
  source 1..80: mol_type = other DNA
catacatgtagagtttaaagaaccagtaaaggattgtatttgggcaagaaatagaagagaaaagacacaggatgtagcaa

SEQ ID NO: 53589 - DNA, 80 bp, synthetic construct
  source 1..80: mol_type = other DNA
aagagtagtttggagggaagatggtcaaataaaagttattatctagtcttggaagaagataccgattatctttaattttt

SEQ ID NO: 53590 - DNA, 80 bp, synthetic construct
  source 1..80: mol_type = other DNA
ttgaaaacacaatataaattggaaacatttagataaacatataacaattcacaatataaaatgaactaaattcatctatt

SEQ ID NO: 53591 - DNA, 80 bp, synthetic construct; identical to SEQ ID NO: 14102
  source 1..80: mol_type = other DNA

SEQ ID NO: 53592 - DNA, 80 bp, synthetic construct
  source 1..80: mol_type = other DNA
gtctggaaattgattaagagtttcatacagcaagctagaaaaaggaacaaaaataaagcaaaagtaaagagaaggaattt

SEQ ID NO: 53593 - DNA, 80 bp, synthetic construct
  source 1..80: mol_type = other DNA
aatctgaaaattattagaactctaagagcacagcagggtggctagatacaaaatctactctcaaatatacaacatataac

SEQ ID NO: 53594 - DNA, 80 bp, synthetic construct
  source 1..80: mol_type = other DNA
ttgaatagtaggcaaccatgttaatgcatgggaataattgattttaccaattaatctacaggctcaatgaaatttcaatg

SEQ ID NO: 53595 - DNA, 80 bp, synthetic construct; identical to SEQ ID NO: 14103
  source 1..80: mol_type = other DNA

SEQ ID NO: 53596 - DNA, 80 bp, synthetic construct
  source 1..80: mol_type = other DNA
aaaatcactcaccaaaaccaaaaaacaattaacaaagccccatttggattaaagttctatatgtagaaagggaaatttca

SEQ ID NO: 53597 - DNA, 80 bp, synthetic construct
  source 1..80: mol_type = other DNA
tgtggtgttgggggagagtgagtagaggccttctaaaagtcaagagacagcataaaaatttaaagctaagagacagaatt

SEQ ID NO: 53598 - DNA, 80 bp, synthetic construct
  source 1..80: mol_type = other DNA
gatactcaatttcaggagtgagcagggaatgcagattttaaaaattgtatacgtattcaagtggcaataatagaaaaata

SEQ ID NO: 53599 - DNA, 80 bp, synthetic construct; identical to SEQ ID NO: 14104
  source 1..80: mol_type = other DNA

SEQ ID NO: 53600 - DNA, 80 bp, synthetic construct
  source 1..80: mol_type = other DNA
tagtaaaattaaacattaaaaaaagatactatattttgttcagtgataggtagagactataaatatatgtaaatagactt

SEQ ID NO: 53601 - DNA, 80 bp, synthetic construct
  source 1..80: mol_type = other DNA
agagaaaaaatacagaaaaaatagggcttgcaaaccagatgacagtagaattgaaagaaaaccacaaagcacttacctag

SEQ ID NO: 53602 - DNA, 80 bp, synthetic construct
  source 1..80: mol_type = other DNA
ctgacagccactcccaccagctactgcatatgctttccatctctaaaaatgggtttaatttttagtaggcagatgccatt

SEQ ID NO: 53603 - DNA, 80 bp, synthetic construct; identical to SEQ ID NO: 14105
  source 1..80: mol_type = other DNA

SEQ ID NO: 53604 - DNA, 80 bp, synthetic construct
  source 1..80: mol_type = other DNA
ggtatcactacagaggattacccaatcaacaccctcaaatatccagttaggcaagaaactggagacaaaatctcctcatg

SEQ ID NO: 53605 - DNA, 80 bp, synthetic construct
  source 1..80: mol_type = other DNA
tataaggtaagttgaggtcaaataaaagaaggaatggcaagatatttactcagctgactgagaattcaagttcagtgaca

SEQ ID NO: 53606 - DNA, 80 bp, synthetic construct
  source 1..80: mol_type = other DNA
agtgatgtcatggaaacagactttctaaaagatctggagacaaagcaaattacatggaaaactagtcatgttatcactgt

SEQ ID NO: 53607 - DNA, 80 bp, synthetic construct; identical to SEQ ID NO: 14106
  source 1..80: mol_type = other DNA

SEQ ID NO: 53608 - DNA, 80 bp, synthetic construct
  source 1..80: mol_type = other DNA
tggccaacatggtgaaaccctgtctctagtgaaaatacaaaaattctctgggcctggtggtacacgcctgtaatcccagc

SEQ ID NO: 53609 - DNA, 80 bp, synthetic construct
  source 1..80: mol_type = other DNA
caaaaatggaaaataccactgaaatgccgaacattttaatatgctgcacttgaaatttgttataaaaactttcatgcgct

SEQ ID NO: 53610 - DNA, 80 bp, synthetic construct
  source 1..80: mol_type = other DNA
aatatcttcctgccagaagatttctatagtctcaagttgaccagtacatttatattcctatgtctagaaataatggaggg

SEQ ID NO: 53611 - DNA, 80 bp, synthetic construct; identical to SEQ ID NO: 14107
  source 1..80: mol_type = other DNA

SEQ ID NO: 53612 - DNA, 80 bp, synthetic construct
  source 1..80: mol_type = other DNA
tatccaggttgtcacttccaagtcctgtggccttgggcaagtcattaatgttttttaagcataagtttctcttctgtaaa

SEQ ID NO: 53613 - DNA, 80 bp, synthetic construct
  source 1..80: mol_type = other DNA
gtggtggaaggtggtttgatttggagtataatttgaaagcatcagagatgggatttgatggtggattggatgaagagagt

SEQ ID NO: 53614 - DNA, 80 bp, synthetic construct
  source 1..80: mol_type = other DNA
gcctttcatatatcttcaggacacgtgtgctatgattatataggttggctcactgcacaaagggttaagggaactgaaat

SEQ ID NO: 53615 - DNA, 80 bp, synthetic construct
  source 1..80: mol_type = other DNA
gggtagctcacctttgtgtggttgacagggttgtttgtagatattcaatattaataaaatgaaaaaatgctcaccagaat

SEQ ID NO: 53616 - DNA, 80 bp, synthetic construct; identical to SEQ ID NO: 14108
  source 1..80: mol_type = other DNA

SEQ ID NO: 53617 - DNA, 80 bp, synthetic construct
  source 1..80: mol_type = other DNA
atgtgccatgttggtatgctgcacccattaactcgtcatttacattaggtatatctcctaatgctatccctccccgctcc

SEQ ID NO: 53618 - DNA, 80 bp, synthetic construct
  source 1..80: mol_type = other DNA
tacaaaggacacgaactcatccttttttattgctgcatagtattccatggtgtatatgtgccacattttcttaatccggt

SEQ ID NO: 53619 - DNA, 80 bp, synthetic construct
  source 1..80: mol_type = other DNA
gcaggttagttacatatgtatacatgtgccatgctggtgcgctgcacccactaactcgtcatctagcattaggtatatct

SEQ ID NO: 53620 - DNA, 80 bp, synthetic construct
  source 1..80: mol_type = other DNA
gaggaatagccacactgacttccacaatggttgaactagtttacagccccaccaacagtgtaaaagtgttcctgtttctc

SEQ ID NO: 53621 - DNA, 80 bp, synthetic construct; identical to SEQ ID NO: 14109
  source 1..80: mol_type = other DNA

SEQ ID NO: 53622 - DNA, 80 bp, synthetic construct
  source 1..80: mol_type = other DNA
tgcttttggtgttttagacatgaagtccttgcccatgcctatgtcctgaatggtattgcctaggttttcttctagggttt

SEQ ID NO: 53623 - DNA, 80 bp, synthetic construct
  source 1..80: mol_type = other DNA
atatttaaggtattacagtgtgcgattctaatatatgtatacattgtgaaatgattgccacaatcaagctaattaacata

SEQ ID NO: 53624 - DNA, 80 bp, synthetic construct
  source 1..80: mol_type = other DNA
tggccaacttctgcccatttcttccaccccctaacttctggtaatcacctttctgctgagttcaactttttaaggttcca

SEQ ID NO: 53625 - DNA, 80 bp, synthetic construct; identical to SEQ ID NO: 14110
  source 1..80: mol_type = other DNA

SEQ ID NO: 53626 - DNA, 80 bp, synthetic construct
  source 1..80: mol_type = other DNA
gtagcattcctgaatcatatggtagttctatttttaatttattggaggaaccacaatactgttttccataatggctgtat

SEQ ID NO: 53627 - DNA, 80 bp, synthetic construct; identical to SEQ ID NO: 14111
  source 1..80: mol_type = other DNA

SEQ ID NO: 53628 - DNA, 80 bp, synthetic construct
  source 1..80: mol_type = other DNA
gtgctgcacccattaactcgtcatttacattaggtatttctcctaatgctatccctccctgcttcccccaccccgcaaca

SEQ ID NO: 53629 - DNA, 80 bp, synthetic construct
  source 1..80: mol_type = other DNA
ctcatcattttttattgctgcatagtattccatggtgtatatgtgccacatattcttaatctggtgtatcattgatggac

SEQ ID NO: 53630 - DNA, 80 bp, synthetic construct
  source 1..80: mol_type = other DNA
tcaccacactgtcttccacaatggttgaactagtttacactcccaccaacattgtaaaaacattcctatttctccatatc

SEQ ID NO: 53631 - DNA, 80 bp, synthetic construct; identical to SEQ ID NO: 14112
  source 1..80: mol_type = other DNA

SEQ ID NO: 53632 - DNA, 80 bp, synthetic construct
  source 1..80: mol_type = other DNA
cccacataaatggattaatccactaatggattaatgagttgtcaggcaagtggaactggtggcttcataagaagaggaac

SEQ ID NO: 53633 - DNA, 80 bp, synthetic construct
  source 1..80: mol_type = other DNA
agtcccagcaactcgggaggctgaggcaggagaatggcgtgaacccgggaggcagagcctgcagtgagccgagatcgcgc

SEQ ID NO: 53634 - DNA, 80 bp, synthetic construct
  source 1..80: mol_type = other DNA
ttgcgccacatgcgccccctcagccttggactttccatcctccataactgtaagaaataataatacatttcttttcttta

SEQ ID NO: 53635 - DNA, 80 bp, synthetic construct; identical to SEQ ID NO: 14113
  source 1..80: mol_type = other DNA

SEQ ID NO: 53636 - DNA, 80 bp, synthetic construct
  source 1..80: mol_type = other DNA
ctttccctattgggtattcttggtaactttattttctcccatgttaattttctgtgtggatgctctattcattgtcaata

SEQ ID NO: 53637 - DNA, 80 bp, synthetic construct
  source 1..80: mol_type = other DNA
tgtctcttgttataatttttgactaaaagtctattttgcctgatgtaagtatagccacccctaccgtcttttgttttcca

SEQ ID NO: 53638 - DNA, 80 bp, synthetic construct
  source 1..80: mol_type = other DNA
tcaagtaattattgatagttaaggacttaatatagttattttcttggttgttttttggctgttttgtatatcctttcttc

SEQ ID NO: 53639 - DNA, 80 bp, synthetic construct; identical to SEQ ID NO: 14114
  source 1..80: mol_type = other DNA

SEQ ID NO: 53640 - DNA, 80 bp, synthetic construct
  source 1..80: mol_type = other DNA
actgtatatttaccttaccagtgaattttatacttggatatgttttcattttactaattattggcctttcatttcagctt

SEQ ID NO: 53641 - DNA, 80 bp, synthetic construct
  source 1..80: mol_type = other DNA
tatatcatcccactatgtactggcctagaaaatgtctgcatagaagtgctaatatccttttgatgtacctttaaatgtga

SEQ ID NO: 53642 - DNA, 80 bp, synthetic construct
  source 1..80: mol_type = other DNA
tgccttaaataagcatttattctattttatttctcttttcctctgagactccaataatgcaaaaagttagctcccttgat

SEQ ID NO: 53643 - DNA, 80 bp, synthetic construct
  source 1..80: mol_type = other DNA
tacttgatccatcatcttggaagctctctatttcctttttgttttagtttaggcattgcacccttcagctccaaaatttg

SEQ ID NO: 53644 - DNA, 80 bp, synthetic construct; identical to SEQ ID NO: 14115
  source 1..80: mol_type = other DNA

SEQ ID NO: 53645 - DNA, 80 bp, synthetic construct
  source 1..80: mol_type = other DNA
agaaacagtcaccctgttcaatatttgtttgtgcctacttcacaggtgggattttttcccttttttgagagaaaatctca

SEQ ID NO: 53646 - DNA, 80 bp, synthetic construct
  source 1..80: mol_type = other DNA
cacatccaactgattttttttttttttagagacggagtctcactatgttgcccaggccagtctcgaactcctagtctcaa

SEQ ID NO: 53647 - DNA, 80 bp, synthetic construct
  source 1..80: mol_type = other DNA
gaattctcaagtttgtgtccttttttccaatcccacaaagtcaaactgactgtgagatgtttccttttgttgtccatggt

SEQ ID NO: 53648 - DNA, 80 bp, synthetic construct
  source 1..80: mol_type = other DNA
gcctctcctaaccattcaactatgctgatcatctcaatgttctgggtggagtgagaaataagtgggcttatcggacagca

SEQ ID NO: 53649 - DNA, 80 bp, synthetic construct; identical to SEQ ID NO: 14116
  source 1..80: mol_type = other DNA

SEQ ID NO: 53650 - DNA, 80 bp, synthetic construct
  source 1..80: mol_type = other DNA
gaggaattgcatagctttggggaaaatggtgcctcatagcgtgatggtgaacatttgtgaacatttctcagaatattctg

SEQ ID NO: 53651 - DNA, 80 bp, synthetic construct
  source 1..80: mol_type = other DNA
tcggttatcatatgaagtgtctagagaattgaagaaaaattataagattcttaatttctcataaacagactcctatatta

SEQ ID NO: 53652 - DNA, 80 bp, synthetic construct
  source 1..80: mol_type = other DNA
gagaagaaaaatcttttaggaaagaaaaaaacatattaactttaccaacagttcatgaaaaaataagtttatcgggccgg

SEQ ID NO: 53653 - DNA, 80 bp, synthetic construct; identical to SEQ ID NO: 14117
  source 1..80: mol_type = other DNA

SEQ ID NO: 53654 - DNA, 80 bp, synthetic construct
  source 1..80: mol_type = other DNA
tggcactgtgctcttcactcttgttgttcatgatagatgaatcatagaggtaagaaggagaaggatggaccaagagtcca

SEQ ID NO: 53655 - DNA, 80 bp, synthetic construct
  source 1..80: mol_type = other DNA
ggtgggcctggtgtggacaactttagtggcttccagcaagaatgagaggtagctctagtggttcttgttgagttctggag

SEQ ID NO: 53656 - DNA, 80 bp, synthetic construct
  source 1..80: mol_type = other DNA
ggtacattgaaattagtggtactggtgtgtcccttcaaaaaagtagacagcgcattgccgtcttctcataactctcacgt

SEQ ID NO: 53657 - DNA, 80 bp, synthetic construct; identical to SEQ ID NO: 14118
  source 1..80: mol_type = other DNA

SEQ ID NO: 53658 - DNA, 80 bp, synthetic construct
  source 1..80: mol_type = other DNA
caaatggagatgagttgattcacactctaaagagtatattccttcattaactgtctagtagttcctaatctatttacctc

SEQ ID NO: 53659 - DNA, 80 bp, synthetic construct
  source 1..80: mol_type = other DNA
gaactaggaattgtgcataagctacaagagctgacgatgataagtgactgtgtcaatcaccaattttataatattagcca

SEQ ID NO: 53660 - DNA, 80 bp, synthetic construct
  source 1..80: mol_type = other DNA
acatcctgaagttggtactcttgtcaatcataattaccctaactgtgttcactctcgttattctaggatacattatattt

SEQ ID NO: 53661 - DNA, 80 bp, synthetic construct; identical to SEQ ID NO: 14119
  source 1..80: mol_type = other DNA

SEQ ID NO: 53662 - DNA, 80 bp, synthetic construct
  source 1..80: mol_type = other DNA
tacatttctgtggaagaattaggcaaaatgtttttattagttacttaggagaagtgttcttcctctgatcaaactcttct

SEQ ID NO: 53663 - DNA, 80 bp, synthetic construct
  source 1..80: mol_type = other DNA
gggaatacagctgattagaaagttgtgggagagaaacagaaaaatccaggaaagagagaccttatggcatagaaataggt

SEQ ID NO: 53664 - DNA, 80 bp, synthetic construct
  source 1..80: mol_type = other DNA
atactggtgtttagcaacatactgtcttctcacttctattttttttttttaaactcaggtaatttcccttggagctcagg

SEQ ID NO: 53665 - DNA, 80 bp, synthetic construct; identical to SEQ ID NO: 14120
  source 1..80: mol_type = other DNA

SEQ ID NO: 53666 - DNA, 80 bp, synthetic construct
  source 1..80: mol_type = other DNA
caatcactaataggtcagagattctttgactcaagtattgaaacagattcccagaatattggcaaagtctctagctgttt

SEQ ID NO: 53667 - DNA, 80 bp, synthetic construct
  source 1..80: mol_type = other DNA
caaaatagccaggatggcaagtcccagtagagtcaggatgacagccaaagttatttctgaaaacaaaaactcacctgtaa

SEQ ID NO: 53668 - DNA, 80 bp, synthetic construct
  source 1..80: mol_type = other DNA
ttagctcttacattggttctttggtcgtatactaagaacctcagatgctgtgtacccttggtttagagttggaaatctga

SEQ ID NO: 53669 - DNA, 80 bp, synthetic construct
  source 1..80: mol_type = other DNA
gaagaatgttaaagggaatcagtggtctacgaagctatccactggggtatggggaaaatattagaacttctattttctgt

SEQ ID NO: 53670 - DNA, 80 bp, synthetic construct; identical to SEQ ID NO: 14121
  source 1..80: mol_type = other DNA

SEQ ID NO: 53671 - DNA, 80 bp, synthetic construct
  source 1..80: mol_type = other DNA
tgcagtcataggagagaaaaatcttagacaatatcatatggttataaagggcagtggctatgaaggatcgggggagaaaa

SEQ ID NO: 53672 - DNA, 80 bp, synthetic construct
  source 1..80: mol_type = other DNA
caagatataataacacacctccaaccagggcagattaggcatttgtctactgagtcttctaggtgtttggtcctgtgaga

SEQ ID NO: 53673 - DNA, 80 bp, synthetic construct
  source 1..80: mol_type = other DNA
ctgtatattccttttcttcctttagtgtctgaaatgccctgtctatagggcagttagaagatggtccaccctattaatag

SEQ ID NO: 53674 - DNA, 80 bp, synthetic construct; identical to SEQ ID NO: 14122
  source 1..80: mol_type = other DNA

SEQ ID NO: 53675 - DNA, 80 bp, synthetic construct
  source 1..80: mol_type = other DNA
aggtctcgcatcatctggatttctttgtcagagagagatcaaggtaaaacgaaaaactcaagttcactgtttctgagcaa

SEQ ID NO: 53676 - DNA, 80 bp, synthetic construct
  source 1..80: mol_type = other DNA
caggagaaaaggcagaggatcaaaaggctaggaagatttaataatgctttggaggaccttgaacttgtataggatactgg

SEQ ID NO: 53677 - DNA, 80 bp, synthetic construct
  source 1..80: mol_type = other DNA
tttcggctcactgcaacctccacttcctgggtttaagcaattctcctgcctcagcctcccaagtagctgggattacaggc

SEQ ID NO: 53678 - DNA, 80 bp, synthetic construct; identical to SEQ ID NO: 14123
  source 1..80: mol_type = other DNA

SEQ ID NO: 53679 - DNA, 80 bp, synthetic construct
  source 1..80: mol_type = other DNA
ataccatatgttctcacttataagtgggagctaaacaacaagaacacatggacactaagaggggaacaacagacactggg

SEQ ID NO: 53680 - DNA, 80 bp, synthetic construct
  source 1..80: mol_type = other DNA
taaaaaaagaagagccttgaaacaaatgaaggtgaacaaaggaagtcaagttgttggagttagatagcaagaagaaatcc

SEQ ID NO: 53681 - DNA, 80 bp, synthetic construct
  source 1..80: mol_type = other DNA
atagtgggtaccttataagcacaaacttgtttaatccctaataaactgtacgatgaaattctttgagatggagagagaca

SEQ ID NO: 53682 - DNA, 80 bp, synthetic construct
  source 1..80: mol_type = other DNA
aagtcagtcacttgaagaggaaggtgatgacttctagttttaggatgctccacctgccaaaaataatctcaaaattgttg

SEQ ID NO: 53683 - DNA, 80 bp, synthetic construct; identical to SEQ ID NO: 14124
  source 1..80: mol_type = other DNA

SEQ ID NO: 53684 - DNA, 80 bp, synthetic construct
  source 1..80: mol_type = other DNA
gacttctcaacggaaaccttgcaagtcagtatttttaacctgcagaattgctatttatttctataatttctccttctgat

SEQ ID NO: 53685 - DNA, 80 bp, synthetic construct
  source 1..80: mol_type = other DNA
ctgaaatctagacattttgaatattataatgttgcaatttagaaaccagatttcctccctctacagagtttgctgttgtt

SEQ ID NO: 53686 - DNA, 80 bp, synthetic construct
  source 1..80: mol_type = other DNA
attagctaatgattgaacagagacaatgcctagaaccaaagcaaacactatgctagtctgtgccaaggaactctgtgtgt

SEQ ID NO: 53687 - DNA, 80 bp, synthetic construct; identical to SEQ ID NO: 14125
  source 1..80: mol_type = other DNA

SEQ ID NO: 53688 - DNA, 80 bp, synthetic construct
  source 1..80: mol_type = other DNA
gaccctaagtgggatcccaatgacaggtggaagactggaagaggagacgctttcagatgtgcataatggaaggcttttgt

SEQ ID NO: 53689 - DNA, 80 bp, synthetic construct
  source 1..80: mol_type = other DNA
tctcctgattcagtagagggacagctaaccctaaaggataaatttattactcaggcagctcctgacctcaggaggaagtt

SEQ ID NO: 53690 - DNA, 80 bp, synthetic construct
  source 1..80: mol_type = other DNA
aattcccagggtacacctgttaactactaaagatatggccagaacagttatctcattctaaaagtttatccactcccata

SEQ ID NO: 53691 - DNA, 80 bp, synthetic construct; identical to SEQ ID NO: 14126
  source 1..80: mol_type = other DNA

SEQ ID NO: 53692 - DNA, 80 bp, synthetic construct
  source 1..80: mol_type = other DNA
cgatgcccctatcagcaggaagcagctaagacccgtcatcatccatattcgaacagcagttagatgtacctcttcagaca

SEQ ID NO: 53693 - DNA, 80 bp, synthetic construct
  source 1..80: mol_type = other DNA
gccatgcccccatcctgtgcctgtaaaaatcctgagaccctagcaggcagggacagaagcggctggacgtcaaaaggaac

SEQ ID NO: 53694 - DNA, 80 bp, synthetic construct
  source 1..80: mol_type = other DNA
gagcagcctgactccaggggaaaaccaccttcccactccatctcccttctggctcccccatctgctgagagccacttcca

SEQ ID NO: 53695 - DNA, 80 bp, synthetic construct; identical to SEQ ID NO: 14127
  source 1..80: mol_type = other DNA

SEQ ID NO: 53696 - DNA, 80 bp, synthetic construct
  source 1..80: mol_type = other DNA
aagcaagtcagtgaaagagaactactggcagctgcagtgggatttcgatttaaatagattatcctggatatacctctgtg

SEQ ID NO: 53697 - DNA, 80 bp, synthetic construct
  source 1..80: mol_type = other DNA
caaggaatatgaagtggccagtgtcactggtatgaactgatccaggaaaacaacagtaggaaaataagttagaaagataa

SEQ ID NO: 53698 - DNA, 80 bp, synthetic construct
  source 1..80: mol_type = other DNA
gcacctgtagtccagttactcagaagactgaggcaggggaagaccctttgatcccaggaggttgaggctgcagtgagcta

SEQ ID NO: 53699 - DNA, 80 bp, synthetic construct; identical to SEQ ID NO: 14128
  source 1..80: mol_type = other DNA

SEQ ID NO: 53700 - DNA, 80 bp, synthetic construct
  source 1..80: mol_type = other DNA
gactgccaaagattgccaatacctaggcattaaggagaacataaatataagtatggaatttcatgcagaccagggttaaa

SEQ ID NO: 53701 - DNA, 80 bp, synthetic construct
  source 1..80: mol_type = other DNA
tttattgattaacagagggcttctaaagggcagttatttagataagaacttcttagatgagagtgcaacttcgctgagcg

SEQ ID NO: 53702 - DNA, 80 bp, synthetic construct
  source 1..80: mol_type = other DNA
caaacacatttttctttccctcaggttccagaatctgtgtctcaagcctacgtggcttagatgggatctaacaagaaaag

SEQ ID NO: 53703 - DNA, 80 bp, synthetic construct
  source 1..80: mol_type = other DNA
acaaaaggatatatatcagaggtggggactttcaacaaatattggactagagcaaataaaactgtcatatgcagttggca

SEQ ID NO: 53704 - DNA, 80 bp, synthetic construct; identical to SEQ ID NO: 14129
  source 1..80: mol_type = other DNA

SEQ ID NO: 53705 - DNA, 80 bp, synthetic construct
  source 1..80: mol_type = other DNA
tgtgacatattggctccttaagcaatatttggaaacagggtaatactgttgagaaaacaaacatattacatttagagatt

SEQ ID NO: 53706 - DNA, 80 bp, synthetic construct
  source 1..80: mol_type = other DNA
attatcatgatatggataataatcctccatggcaatgtcaaagatggtatttaaatagacatttgatagatagatagata

SEQ ID NO: 53707 - DNA, 80 bp, synthetic construct
  source 1..80: mol_type = other DNA
tatacatggaatctaaaaagtcagactcataggagtggagagcagaatggtgattacaggctggggaagtggggcgaata

SEQ ID NO: 53708 - DNA, 80 bp, synthetic construct; identical to SEQ ID NO: 14130
  source 1..80: mol_type = other DNA

SEQ ID NO: 53709 - DNA, 80 bp, synthetic construct
  source 1..80: mol_type = other DNA
tatgaaatatatataaatagttttgaggtacatatatctgtcaaaacttgatattatgcctcataaatatatatattatt

SEQ ID NO: 53710 - DNA, 80 bp, synthetic construct
  source 1..80: mol_type = other DNA
ctaaggtgacaatattatccaatgtgatagggagattcaatgtaattccttaccaaaatcttaatggcattattttttgg

SEQ ID NO: 53711 - DNA, 80 bp, synthetic construct
  source 1..80: mol_type = other DNA
ggtataaagaaaaatacagagacaaatggagaagcattgagaggccagaagtgaactctcaattcatttaccacgggtgc

SEQ ID NO: 53712 - DNA, 80 bp, synthetic construct; identical to SEQ ID NO: 14131
  source 1..80: mol_type = other DNA

SEQ ID NO: 53713 - DNA, 80 bp, synthetic construct
  source 1..80: mol_type = other DNA
atataattaagtgtagtttaatcttaaaaatataaattttgtaatacattaatacaattatgaaattatatacctaatat

SEQ ID NO: 53714 - DNA, 80 bp, synthetic construct
  source 1..80: mol_type = other DNA
agtctactaaatagtgccagggaagaatcaaaagctaacatcaataacagtagtgttgtattgctcactttacccctaaa

SEQ ID NO: 53715 - DNA, 80 bp, synthetic construct
  source 1..80: mol_type = other DNA
taatcgaatggaatctataaaaccaccaaacttctagaataattaatcagggattttagcaaggtctcagtgtacaaaat

SEQ ID NO: 53716 - DNA, 80 bp, synthetic construct; identical to SEQ ID NO: 14132
  source 1..80: mol_type = other DNA

SEQ ID NO: 53717 - DNA, 80 bp, synthetic construct
  source 1..80: mol_type = other DNA
ctgaaaatatcaattattggttatgtggagtcactgaaactctcatacattgcttatttgaatgtaaaatagtgcagcca

SEQ ID NO: 53718 - DNA, 80 bp, synthetic construct
  source 1..80: mol_type = other DNA
acctagaaacatccaggtatccatcagcagaaaaatgagtggaaaaaactgaagcatattcataaaatgaaattcaactt

SEQ ID NO: 53719 - DNA, 80 bp, synthetic construct
  source 1..80: mol_type = other DNA
aactaaactttgatgatgggaatcagactactggttgcctgtgaaaaattaatgttctttgtttggattaaggtatgaat

SEQ ID NO: 53720 - DNA, 80 bp, synthetic construct
  source 1..80: mol_type = other DNA
attcaagcctaatcttcttgagccttttaagactactgggttgaaagggagacagaccctagcttactttataacactga

SEQ ID NO: 53721 - DNA, 80 bp, synthetic construct; identical to SEQ ID NO: 14133
  source 1..80: mol_type = other DNA

SEQ ID NO: 53722 - DNA, 80 bp, synthetic construct
  source 1..80: mol_type = other DNA
caaagggaagaaaagaaatcctgtgtcaggaggacataattgctatctctccagaaaagaatgccaatccatgtatctct

SEQ ID NO: 53723 - DNA, 80 bp, synthetic construct
  source 1..80: mol_type = other DNA
tgcttcagcctcctgagtagctgggactacaggcatgtgccaccaaactcagctaattttttgatgtgtgtagaaatggg

SEQ ID NO: 53724 - DNA, 80 bp, synthetic construct
  source 1..80: mol_type = other DNA
ctatctagaaacagaataaaggtgagggggtaggtaggcaggattaaacaaacaaaaaacactgtcctctgtgaatgatc

SEQ ID NO: 53725 - DNA, 80 bp, synthetic construct
  source 1..80: mol_type = other DNA
gcagaaattatggtatgttacttcctatattaggtcatgaaaacattaaagtcttccttcttctcccccacttccctccc

SEQ ID NO: 53726 - DNA, 80 bp, synthetic construct; identical to SEQ ID NO: 14134
  source 1..80: mol_type = other DNA

SEQ ID NO: 53727 - DNA, 80 bp, synthetic construct
  source 1..80: mol_type = other DNA
ccaaaatgcaagcctaagctgaatcctagtagttcttctttgaatgcagcagctttgcccttgatacatgactttctctc

SEQ ID NO: 53728 - DNA, 80 bp, synthetic construct
  source 1..80: mol_type = other DNA
tgtcccattatagagatctagtgatttccatgtgagatttttgccctcacacatgccaattccccttgttctacctgttt

SEQ ID NO: 53729 - DNA, 80 bp, synthetic construct
  source 1..80: mol_type = other DNA
cttagttcagatgccttggccctgtgcatagtgtgctctatctcatgaatctgaagtaaagagaatcaaaaggatgaaga

SEQ ID NO: 53730 - DNA, 80 bp, synthetic construct; identical to SEQ ID NO: 14135
  source 1..80: mol_type = other DNA

SEQ ID NO: 53731 - DNA, 80 bp, synthetic construct
  source 1..80: mol_type = other DNA
cagggtcacaggacaatagtggagggaaggtcagcagataaacaagtgaacaaaggtctctgcttttcctaggcagagga

SEQ ID NO: 53732 - DNA, 80 bp, synthetic construct; identical to SEQ ID NO: 14136
  source 1..80: mol_type = other DNA

SEQ ID NO: 53733 - DNA, 80 bp, synthetic construct
  source 1..80: mol_type = other DNA
ggcagaggggctcctcacttcccagtaggggcgaccgggcagaggcgcccctcacctcccggatggcgcggctggccggg

SEQ ID NO: 53734 - DNA, 80 bp, synthetic construct
  source 1..80: mol_type = other DNA
gggtggctggccgggcggggggctgacccccccacctccctcctggacggggcggctggccgggcggggggctgaccccc

SEQ ID NO: 53735 - DNA, 80 bp, synthetic construct
  source 1..80: mol_type = other DNA
gacggggcggctggccgggcagaggggctcctcacttcccagtaggggcggccgggcagaggcgcccctcacctcccgga

SEQ ID NO: 53736 - DNA, 80 bp, synthetic construct
  source 1..80: mol_type = other DNA
ccagacggggcggcggggcagaggcgctccccacatctcagacgatgggcggccgggcagagacgctcctcacttcctag

SEQ ID NO: 53737 - DNA, 80 bp, synthetic construct; identical to SEQ ID NO: 14137
  source 1..80: mol_type = other DNA

SEQ ID NO: 53738 - DNA, 80 bp, synthetic construct
  source 1..80: mol_type = other DNA
caaaaaaatacgaaaacccgtcaggcgtggcggcgcgcgcctgcaatggcaggcactgggcaggctgaggcaggagaatc

SEQ ID NO: 53739 - DNA, 80 bp, synthetic construct
  source 1..80: mol_type = other DNA
agaggtctaatttacaaatacaaattcttatgagaaaaattttaattactgaggatgtttggtttgaaaagaagattagt

SEQ ID NO: 53740 - DNA, 80 bp, synthetic construct
  source 1..80: mol_type = other DNA
gccataattatttgcattattatgagagttaggtgtgcctgaaagaagcaaggtaacgtcaccaagatcagagctactaa

SEQ ID NO: 53741 - DNA, 80 bp, synthetic construct; identical to SEQ ID NO: 14138
  source 1..80: mol_type = other DNA

SEQ ID NO: 53742 - DNA, 80 bp, synthetic construct
  source 1..80: mol_type = other DNA
gtgtatctcctaggacggaccacagttttacctaaccttccagttttctccctcttgtttttctccattctgccttccca

SEQ ID NO: 53743 - DNA, 80 bp, synthetic construct
  source 1..80: mol_type = other DNA
ttcttcaacggagaatgttccccgaactgggatgcccccacacaccaaggacaaggggaatccaaaaccatcttcagtgt

SEQ ID NO: 53744 - DNA, 80 bp, synthetic construct
  source 1..80: mol_type = other DNA
ttcagcacaatgaagagagagtggtggtttgtagaaagtccagagaagaatttctgcatggtgacatgtgaagaaggaag

SEQ ID NO: 53745 - DNA, 80 bp, synthetic construct
  source 1..80: mol_type = other DNA
atccttattctagccttcagagtgctggcacatctgtgaccttctgcttagatcatcatgaaaattgtcctgattctttt

SEQ ID NO: 53746 - DNA, 80 bp, synthetic construct; identical to SEQ ID NO: 14139
  source 1..80: mol_type = other DNA

SEQ ID NO: 53747 - DNA, 80 bp, synthetic construct
  source 1..80: mol_type = other DNA
agggaaatctcttcttactatttttgttatcaaatatggaggaggggaggcgtttgaagggaagtattgcagtagagtga

SEQ ID NO: 53748 - DNA, 80 bp, synthetic construct
  source 1..80: mol_type = other DNA
aggaggagcccaagccttctggaaggaaagagcccttttctttaataagttctcactggtcagcaagtccagaattgtgt

SEQ ID NO: 53749 - DNA, 80 bp, synthetic construct
  source 1..80: mol_type = other DNA
ccttgtccttgctgcatgtaagacttctccagctgtttatcatcaagttgtcttcaaggatatagaatatgagcttctcc

SEQ ID NO: 53750 - DNA, 80 bp, synthetic construct; identical to SEQ ID NO: 14140
  source 1..80: mol_type = other DNA

SEQ ID NO: 53751 - DNA, 80 bp, synthetic construct
  source 1..80: mol_type = other DNA
gtgttctcattgttcaattcccacgcagccataaaaaaggatgagttcatatcctttgtagggacatggatgaacctgga

SEQ ID NO: 53752 - DNA, 80 bp, synthetic construct
  source 1..80: mol_type = other DNA
gaaccctttcttcctgatgatggaagagatccccttagtttttcttctacagtatttgcagatctgtaaaccacaagtgc

SEQ ID NO: 53753 - DNA, 80 bp, synthetic construct
  source 1..80: mol_type = other DNA
ccaggaagaatcaagccagagcctagtcctaatttcactgaccctaaagggaggcttacatatttcatcaagaaataatc

SEQ ID NO: 53754 - DNA, 80 bp, synthetic construct; identical to SEQ ID NO: 14141
  source 1..80: mol_type = other DNA

SEQ ID NO: 53755 - DNA, 80 bp, synthetic construct
  source 1..80: mol_type = other DNA
ttggactcagagctttagacctgtcagggataacagtgtccatcttattttcatttgtagctttgagtaaatcaataagt

SEQ ID NO: 53756 - DNA, 80 bp, synthetic construct
  source 1..80: mol_type = other DNA
aaaaaagaaagacctgagggcaggaattatgtcttattaaggattgtatctctaggccttagcatagtacattcaacagg

SEQ ID NO: 53757 - DNA, 80 bp, synthetic construct
  source 1..80: mol_type = other DNA
gtcctcatggaagttaaattgtactgacaaaggaggaaaatgtcagggagttaacaattcagtctctgtggcttcctcct

SEQ ID NO: 53758 - DNA, 80 bp, synthetic construct; identical to SEQ ID NO: 14142
  source 1..80: mol_type = other DNA

SEQ ID NO: 53759 - DNA, 80 bp, synthetic construct
  source 1..80: mol_type = other DNA
atagggccttcacaagcacagactaacaagcaaagagctacattcactgggaaggaagactcaaaagtaagtgaaaaata

SEQ ID NO: 53760 - DNA, 80 bp, synthetic construct
  source 1..80: mol_type = other DNA
ctccagagattatataaacaaaaggtgaacctaatgtaaaactgtggactttagttgaaaataatgtgtcactattcttt

SEQ ID NO: 53761 - DNA, 80 bp, synthetic construct
  source 1..80: mol_type = other DNA
aataatagcagaaataggggggagagaggagggatctaggagctctctggattttccattttattttgttataaatctaa

SEQ ID NO: 53762 - DNA, 80 bp, synthetic construct
  source 1..80: mol_type = other DNA
atattcagaatagaaaagttcatagggacagaaagtagattacctggggagtagggggtgaaaaatgggtagtaactgct

SEQ ID NO: 53763 - DNA, 80 bp, synthetic construct; identical to SEQ ID NO: 14143
  source 1..80: mol_type = other DNA

SEQ ID NO: 53764 - DNA, 80 bp, synthetic construct
  source 1..80: mol_type = other DNA
gcgtcactagcaggtcctcgtcttctcacttcataacattctttccaaaagtcttgttgacattcttctgtcttccacat

SEQ ID NO: 53765 - DNA, 80 bp, synthetic construct
  source 1..80: mol_type = other DNA
tcgcttggatcggaaagtgtaaaatttttttcctgactcaatttcctgtatcaactttctcaaaaagtctggaggaggga

SEQ ID NO: 53766 - DNA, 80 bp, synthetic construct
  source 1..80: mol_type = other DNA
ataaactgatcaggccaggtgtggtggctcatgcctgtaattccagcactttgggaggccgaggcgagtggatcatttga

SEQ ID NO: 53767 - DNA, 80 bp, synthetic construct
  source 1..80: mol_type = other DNA
gctgagatcatgccactgcactccagcctgggtgacagagtgagactttgtctcagaaaaaaaaaaaaaaaaaaaaaaag

SEQ ID NO: 53768 - DNA, 80 bp, synthetic construct; identical to SEQ ID NO: 14144
  source 1..80: mol_type = other DNA

SEQ ID NO: 53769 - DNA, 80 bp, synthetic construct
  source 1..80: mol_type = other DNA
tacagaaaaaatgtccagagaacctacattagggaaccaaagaatgaagcggggtgcagagtcccagagaaggaagtttt

SEQ ID NO: 53770 - DNA, 80 bp, synthetic construct
  source 1..80: mol_type = other DNA
gaggggatggcccagaactcatttcttttgcaatccattgcctaaaactcactgtcaggtgacacagagatgactctttc

SEQ ID NO: 53771 - DNA, 80 bp, synthetic construct
  source 1..80: mol_type = other DNA
cttgttctgttcagaagaaatcagtctcaggtgagctgtgtttgaagccaatgtcacattcactgtaaagaaagagaatc

SEQ ID NO: 53772 - DNA, 80 bp, synthetic construct; identical to SEQ ID NO: 14145
  source 1..80: mol_type = other DNA

SEQ ID NO: 53773 - DNA, 80 bp, synthetic construct
  source 1..80: mol_type = other DNA
ataagccctgggctttcctgtttctcatgtttccttagttactggatattcactgactgcctcccataggtgacttgtga

SEQ ID NO: 53774 - DNA, 80 bp, synthetic construct
  source 1..80: mol_type = other DNA
aagcaatccccaaacaagcagtgttttccacaaaaacgtcatcctggactctaaaatggaaacccaagaatcccttgaaa

SEQ ID NO: 53775 - DNA, 80 bp, synthetic construct
  source 1..80: mol_type = other DNA
cagaaatgtacacatgcacagacaagttttcccttctctcttccaactatatcacacaatcactggaatgacttgaggag

SEQ ID NO: 53776 - DNA, 80 bp, synthetic construct; identical to SEQ ID NO: 14146
  source 1..80: mol_type = other DNA

SEQ ID NO: 53777 - DNA, 80 bp, synthetic construct
  source 1..80: mol_type = other DNA
tgagttggtcttcatatttattttccaaacctgaaggaacataaggaatcaccaacctgagagagaaaaagttgcgattt

SEQ ID NO: 53778 - DNA, 80 bp, synthetic construct
  source 1..80: mol_type = other DNA
aagatgatggtatcgtctttccttccatgtccctccatggcacgtggggctgtgggaaccacccatctgaagagcacatc

SEQ ID NO: 53779 - DNA, 80 bp, synthetic construct
  source 1..80: mol_type = other DNA
ggagaaaagcttaagggggattgcactccacttagggatgaggctggctggagcattttcttattttgtttgtttgctta

SEQ ID NO: 53780 - DNA, 80 bp, synthetic construct; identical to SEQ ID NO: 14147
  source 1..80: mol_type = other DNA

SEQ ID NO: 53781 - DNA, 80 bp, synthetic construct
  source 1..80: mol_type = other DNA
tttctcccctgtccctgccaaaactgtcaatatttataattttggtttacacagtggatccagtttagtcttcagatgat

SEQ ID NO: 53782 - DNA, 80 bp, synthetic construct
  source 1..80: mol_type = other DNA
taaatttcatccatttgagtttgtggattttaagtaactatgacagtttcacacactggaggatttgatataaatttgat

SEQ ID NO: 53783 - DNA, 80 bp, synthetic construct
  source 1..80: mol_type = other DNA
aaaaaggcagcggtactgcccgtcgtccgaaggtctggcactgagtatctgcagggtcagtctgccctcgtcaatggcgt

SEQ ID NO: 53784 - DNA, 80 bp, synthetic construct; identical to SEQ ID NO: 14148
  source 1..80: mol_type = other DNA

SEQ ID NO: 53785 - DNA, 80 bp, synthetic construct
  source 1..80: mol_type = other DNA
tgggggtttcatggactcagaatagaggttgctcttctttaaggaggaatcattccatgatgtgtgtcagtctgagtaaa

SEQ ID NO: 53786 - DNA, 80 bp, synthetic construct
  source 1..80: mol_type = other DNA
gtcaggagttcaagaccagcctggccaacatggtgaaaccccgtctctacagaaatacaaaaattagtcgggcatgatgg

SEQ ID NO: 53787 - DNA, 80 bp, synthetic construct
  source 1..80: mol_type = other DNA
gtgaacagtttataaatttggccccagatgcctctgtacctgactccttatgtaacaaactgcaatttaacttagtacgt

SEQ ID NO: 53788 - DNA, 80 bp, synthetic construct
  source 1..80: mol_type = other DNA
ttttatgaataagcctaacttaggagctaaggctaacttaggagtacacttttgtaataaatagctgagtagcagctgct

SEQ ID NO: 53789 - DNA, 80 bp, synthetic construct; identical to SEQ ID NO: 14149
  source 1..80: mol_type = other DNA

SEQ ID NO: 53790 - DNA, 80 bp, synthetic construct
  source 1..80: mol_type = other DNA
accaaaatcataatgtttcagagttgaacaaaatagtttgcattaagtgcctggaagaccctgcagcgtgagcagaggtg

SEQ ID NO: 53791 - DNA, 80 bp, synthetic construct
  source 1..80: mol_type = other DNA
cgctatattttatttccccaatgctccacataggtggagttatagacacacaccagttgaatgtcctcaaataattttga

SEQ ID NO: 53792 - DNA, 80 bp, synthetic construct
  source 1..80: mol_type = other DNA
tccattctcatcaggccctgcccgtgccattttttctctattctaaattaagtgtcgtccttttctgttaaatgataaga

SEQ ID NO: 53793 - DNA, 80 bp, synthetic construct; identical to SEQ ID NO: 14150
  source 1..80: mol_type = other DNA

SEQ ID NO: 53794 - DNA, 80 bp, synthetic construct
  source 1..80: mol_type = other DNA
cctttatccatatgaggattttattccctgtccgtgtgtgacctgtgcacatattagatcttaaactggcttgccctgcc

SEQ ID NO: 53795 - DNA, 80 bp, synthetic construct
  source 1..80: mol_type = other DNA
tgcagccctgtttgttaataattgatgttctactagaatacaagctccttgggagccactatgcctaacccacttttttt

SEQ ID NO: 53796 - DNA, 80 bp, synthetic construct
  source 1..80: mol_type = other DNA
ccccaacaggtgtccagtgtgtgttgttccctgccatgcatccatgtgttctcaccaatcagctcccccttataagtgtg

SEQ ID NO: 53797 - DNA, 80 bp, synthetic construct; identical to SEQ ID NO: 14151
  source 1..80: mol_type = other DNA

SEQ ID NO: 53798 - DNA, 80 bp, synthetic construct
  source 1..80: mol_type = other DNA
cttgcactgttaagttagatagatgtagattagaaggtaaacatcaccatttcttcctgatttttggcaaaccatgtatg

SEQ ID NO: 53799 - DNA, 80 bp, synthetic construct
  source 1..80: mol_type = other DNA
tttgtaagactacaagcagtgatttcagtcttaggacttccatagagagctgggtgtcccatcattagagctcacctgca

SEQ ID NO: 53800 - DNA, 80 bp, synthetic construct
  source 1..80: mol_type = other DNA
gaactcagaggagtgactcttctcctaaaaccttcttgagagacagacttgtgtcaacctgccccaaacactggctttac

SEQ ID NO: 53801 - DNA, 80 bp, synthetic construct; identical to SEQ ID NO: 14152
  source 1..80: mol_type = other DNA

SEQ ID NO: 53802 - DNA, 80 bp, synthetic construct
  source 1..80: mol_type = other DNA
ggggctcagccatcggctggttatgttttaaaccacttatctcaggtgcagcaaaataataccctcagtccaactccgag

SEQ ID NO: 53803 - DNA, 80 bp, synthetic construct
  source 1..80: mol_type = other DNA
ctgggtgtggtggcgcatgcctgtagtcccagttactcaggaggctgaagcaggagaatagcttgaatccaggagatgga

SEQ ID NO: 53804 - DNA, 80 bp, synthetic construct
  source 1..80: mol_type = other DNA
accatcctggctaacacggtgaaatctcgtctctactaaaaatacaaaaaattagccgggcgtggtggcggttgcctgta

SEQ ID NO: 53805 - DNA, 80 bp, synthetic construct; identical to SEQ ID NO: 14153
  source 1..80: mol_type = other DNA

SEQ ID NO: 53806 - DNA, 80 bp, synthetic construct
  source 1..80: mol_type = other DNA
gcagctccctttcccctcaacacatagaacagagatgatgccatgcttcctataggtgtccatctgatgctcactggaat

SEQ ID NO: 53807 - DNA, 80 bp, synthetic construct
  source 1..80: mol_type = other DNA
tctgctggggagggcagaggctccctccacaggtgtgtgccagcacctcgtacttacccagctcagtctggagtttctct

SEQ ID NO: 53808 - DNA, 80 bp, synthetic construct
  source 1..80: mol_type = other DNA
atgatacagctttttttccttttctctgcacaacaaaaatgctgtcacttctatctccccatgattctgttggtttcttc

SEQ ID NO: 53809 - DNA, 80 bp, synthetic construct; identical to SEQ ID NO: 14154
  source 1..80: mol_type = other DNA

SEQ ID NO: 53810 - DNA, 80 bp, synthetic construct
  source 1..80: mol_type = other DNA
tattaatgctataatgtatagtaagacaagattccacactgtactgttgtattggggggttggttgtttttgctgctatt

SEQ ID NO: 53811 - DNA, 80 bp, synthetic construct
  source 1..80: mol_type = other DNA
acttgtgagtaaaaacaatcaatgcagaagaaggaaaggtagaactcaaaaataacgcaggcgccataacagctattcaa

SEQ ID NO: 53812 - DNA, 80 bp, synthetic construct
  source 1..80: mol_type = other DNA
ctctcctgctgatctgagcatgtgggtcctagaggcagagcactgacctgggaggctgatgaccgaccccttctcctcag

SEQ ID NO: 53813 - DNA, 80 bp, synthetic construct; identical to SEQ ID NO: 14155
  source 1..80: mol_type = other DNA

SEQ ID NO: 53814 - DNA, 80 bp, synthetic construct
  source 1..80: mol_type = other DNA
gagttcagatacactttatttgttccccagtctgggtctttacattttagcatctgaccagtacttttctccagatccag

SEQ ID NO: 53815 - DNA, 80 bp, synthetic construct
  source 1..80: mol_type = other DNA
atgatgtcttgaactccaatttgattgaagatttaacacaaagtcagaaatcactccccaggggcctgttcttcctgcat

SEQ ID NO: 53816 - DNA, 80 bp, synthetic construct
  source 1..80: mol_type = other DNA
ttttctctatttaacgtgaaactcccacacccaaactaaggggactatattttccataaatgggaattctgtcttaatca

SEQ ID NO: 53817 - DNA, 80 bp, synthetic construct; identical to SEQ ID NO: 14156
  source 1..80: mol_type = other DNA

SEQ ID NO: 53818 - DNA, 80 bp, synthetic construct
  source 1..80: mol_type = other DNA
tacttttcataagacagatccattcttcagttgtccccttcttccctactccttcctgcttagctaatacaacagcaata

SEQ ID NO: 53819 - DNA, 80 bp, synthetic construct
  source 1..80: mol_type = other DNA
tttcacgtctcagtttctgcatagatgggattgggtagagaaaaaccaatgccctgagatacagatgccggacgtcagct

SEQ ID NO: 53820 - DNA, 80 bp, synthetic construct
  source 1..80: mol_type = other DNA
actaagcttgaagactccagaaccacttatttttaaatcaatcagggtagaggactaagcattaggaattaccttgatga

SEQ ID NO: 53821 - DNA, 80 bp, synthetic construct; identical to SEQ ID NO: 14157
  source 1..80: mol_type = other DNA

SEQ ID NO: 53822 - DNA, 80 bp, synthetic construct
  source 1..80: mol_type = other DNA
ccaggataggatgagcagggccaatgactctaaagtcttctataaaataagtgaaaaagaggaacgaggaaatgccaatc

SEQ ID NO: 53823 - DNA, 80 bp, synthetic construct
  source 1..80: mol_type = other DNA
aaaaatgtgggtgaggttgctgtctgtcacctaccagctatgtgattcggtggcaaatctattactcttggtaagatttt

SEQ ID NO: 53824 - DNA, 80 bp, synthetic construct
  source 1..80: mol_type = other DNA
tcctgaagtttagataataaatccatttattagctttttttagcctttcaggattcctcttctcttagatataaaaactg

SEQ ID NO: 53825 - DNA, 80 bp, synthetic construct; identical to SEQ ID NO: 14158
  source 1..80: mol_type = other DNA

SEQ ID NO: 53826 - DNA, 80 bp, synthetic construct
  source 1..80: mol_type = other DNA
gagatctgcttgtattcttcattgatgaagtctaaatatgaagctagaactgaagacattccatcagattgactgttaca

SEQ ID NO: 53827 - DNA, 80 bp, synthetic construct
  source 1..80: mol_type = other DNA
gtgttttttcccacttcgccatgctgcattttccttagggctctgacatctccttctgacactgattttttttttttgac

SEQ ID NO: 53828 - DNA, 80 bp, synthetic construct
  source 1..80: mol_type = other DNA
gcttaatttatgataagaagcagctgcatttcttgaccccaaagtactagagtgaattaataatttaacgtggtgcaacc

SEQ ID NO: 53829 - DNA, 80 bp, synthetic construct
  source 1..80: mol_type = other DNA
cattaaaaagatgaaagaactaaggtatgaggtgctcaagtaactttccaaaggtgactcagctaggagtggaggagctc

SEQ ID NO: 53830 - DNA, 80 bp, synthetic construct; identical to SEQ ID NO: 14159
  source 1..80: mol_type = other DNA

SEQ ID NO: 53831 - DNA, 80 bp, synthetic construct
  source 1..80: mol_type = other DNA
cacatccaaccctttacctaacgtgttatattgtgagacaatgtagcaaatgtaagaagccttgcttgctcatttcggct

SEQ ID NO: 53832 - DNA, 80 bp, synthetic construct
  source 1..80: mol_type = other DNA
cacataagataacgtctgattgaaggatacctctgtaacctataaccagatctgctcatacacccaaacgttgatgtagt

SEQ ID NO: 53833 - DNA, 80 bp, synthetic construct
  source 1..80: mol_type = other DNA
tgtaacctctgtattgtaccctccagtgaaaaaagacaactccaatatgaagagcccctttctttctgcctgaacttcct

SEQ ID NO: 53834 - DNA, 80 bp, synthetic construct
  source 1..80: mol_type = other DNA
tcaacttcgttggtgtgtcttcctacatcagtcctgacatttgccttccaatagaactttatgaaattattcctgcctca

SEQ ID NO: 53835 - DNA, 80 bp, synthetic construct; identical to SEQ ID NO: 14160
  source 1..80: mol_type = other DNA

SEQ ID NO: 53836 - DNA, 80 bp, synthetic construct
  source 1..80: mol_type = other DNA
taagtggccttttagaatagacttaaaaacacgaatgaattaaaaaaacaaaaagcccaactggcagaaactggcaaacc

SEQ ID NO: 53837 - DNA, 80 bp, synthetic construct
  source 1..80: mol_type = other DNA
attgaaagaaaacttgcttcacacaaagtagagaaaccagctcaggagcaatgtcaagtcaattacagtttccccctttc

SEQ ID NO: 53838 - DNA, 80 bp, synthetic construct
  source 1..80: mol_type = other DNA
aacttatatgagcccattcacaatacctagatcgaaaagggcagtatgatatttatgtgaaaatggggttgggtgttaga

SEQ ID NO: 53839 - DNA, 80 bp, synthetic construct; identical to SEQ ID NO: 14161
  source 1..80: mol_type = other DNA

SEQ ID NO: 53840 - DNA, 80 bp, synthetic construct
  source 1..80: mol_type = other DNA
gagagaatatatcagggaggataaccaccttggaccagggttcttaatgggcaaagaggctgttttgcccttagaggaca

SEQ ID NO: 53841 - DNA, 80 bp, synthetic construct
  source 1..80: mol_type = other DNA
ctgccacagggtttgctgtcaggatgctgaaaagctttggcacattttttgaaaatagataactagacttaaattgccat

SEQ ID NO: 53842 - DNA, 80 bp, synthetic construct
  source 1..80: mol_type = other DNA
tcaaaaacccatgtttaatttaatttaattttctggataaagtttaagtgttaaattgtaataataagtggtagcttatg

SEQ ID NO: 53843 - DNA, 80 bp, synthetic construct; identical to SEQ ID NO: 14162
  source 1..80: mol_type = other DNA

SEQ ID NO: 53844 - DNA, 80 bp, synthetic construct
  source 1..80: mol_type = other DNA
gtttcttttgctgtgcagaagctctttagtttaattagatcccatttgtcaattttgtcttttgttgccattgcttttgg

SEQ ID NO: 53845 - DNA, 80 bp, synthetic construct
  source 1..80: mol_type = other DNA
aaatgtggcacatatacaccatggaatactatgcagccataaaaaatgatgagttcatatcctttgtagggacatggatg

SEQ ID NO: 53846 - DNA, 80 bp, synthetic construct
  source 1..80: mol_type = other DNA
gatagcattgggagatatacctaatgctagatgacacattagtgggtgcagcgcaccagcatggcacatgtatacatatg

SEQ ID NO: 53847 - DNA, 80 bp, synthetic construct; identical to SEQ ID NO: 14163
  source 1..80: mol_type = other DNA

SEQ ID NO: 53848 - DNA, 80 bp, synthetic construct
  source 1..80: mol_type = other DNA
ttaatttcgtgcttcttcctcactcagcctgcttcacaagaacactgtgagggtcaaatgggctacaatcgcactttgaa

SEQ ID NO: 53849 - DNA, 80 bp, synthetic construct
  source 1..80: mol_type = other DNA
gtgtctccctctctcctttggggcgaaacctggtgctactgggtcttctcacttagccccagatgtatcttcatccacat

SEQ ID NO: 53850 - DNA, 80 bp, synthetic construct
  source 1..80: mol_type = other DNA
gtgaaaatgagattgcattctgaaaatcagaatagcacattcacctcctaacagctataatcctctcaacagtgaaactc

SEQ ID NO: 53851 - DNA, 80 bp, synthetic construct; identical to SEQ ID NO: 14164
  source 1..80: mol_type = other DNA

SEQ ID NO: 53852 - DNA, 80 bp, synthetic construct
  source 1..80: mol_type = other DNA
agctctgggccaaggtcccttgtgggctactttattgctctttttactcaggtactttatctccctttgctgagtaataa

SEQ ID NO: 53853 - DNA, 80 bp, synthetic construct
  source 1..80: mol_type = other DNA
agggggtctcagatatagtctcaggatttcaagagttctccagaacaatttttaatttaattgcagattttcatgtcaat

SEQ ID NO: 53854 - DNA, 80 bp, synthetic construct
  source 1..80: mol_type = other DNA
gacaaagaccctcccctcactgtagaggatgagagatttggagagaagagaaacataattaaacatggacgaggatagga

SEQ ID NO: 53855 - DNA, 80 bp, synthetic construct; identical to SEQ ID NO: 14165
  source 1..80: mol_type = other DNA

SEQ ID NO: 53856 - DNA, 80 bp, synthetic construct
  source 1..80: mol_type = other DNA
ggagaggctgctattaaattaattgtgtgaaagcccctgaatttatctggaaattaccagatgaactcctctgtcagaag

SEQ ID NO: 53857 - DNA, 80 bp, synthetic construct
  source 1..80: mol_type = other DNA
atggtaccaaatgctgcaattatttgaattttttatggtcagtcacatcagcgccaactcaccgcgtaaagaagctccgt

SEQ ID NO: 53858 - DNA, 80 bp, synthetic construct
  source 1..80: mol_type = other DNA
tctgcattctgactagagtccacctccaggagaagcgggaaaacaaggcataagctgctagaactgaggagagggaaaaa

SEQ ID NO: 53859 - DNA, 80 bp, synthetic construct; identical to SEQ ID NO: 14166
  source 1..80: mol_type = other DNA

SEQ ID NO: 53860 - DNA, 80 bp, synthetic construct
  source 1..80: mol_type = other DNA
ttaggtgtcattactgggaatggaaggtcttggaaagaaggtggatagaaaaatagaggagattagaaatgaagataaga

SEQ ID NO: 53861 - DNA, 80 bp, synthetic construct
  source 1..80: mol_type = other DNA
agtgagacttatacaggtatcgtttcctcagggaaaggaaagaaaaatcagcagctctcatctcctggaggcacagtggc

SEQ ID NO: 53862 - DNA, 80 bp, synthetic construct
  source 1..80: mol_type = other DNA
gtggccacggttcaatctgcacctctggccatttttcttgattggcaaaaagaaggaaagaagaaaggaagaaagggagg

SEQ ID NO: 53863 - DNA, 80 bp, synthetic construct; identical to SEQ ID NO: 14167
  source 1..80: mol_type = other DNA

SEQ ID NO: 53864 - DNA, 80 bp, synthetic construct
  source 1..80: mol_type = other DNA
attagctgggcgtggtggtgcacgcctgtaatcccagctactccagaggctaaggtaggagaatcacttgaacctgggag

SEQ ID NO: 53865 - DNA, 80 bp, synthetic construct
  source 1..80: mol_type = other DNA
catctattattttttgaaaatgatgaaattacctaaaattgattctactgcaggtgggagcctataagactaaagttccc

SEQ ID NO: 53866 - DNA, 80 bp, synthetic construct
  source 1..80: mol_type = other DNA
catgtctcacactggaaataggggacccttccaaatattgggagaaagaaggcaaagaaaatcataccgatatactaagc

SEQ ID NO: 53867 - DNA, 80 bp, synthetic construct; identical to SEQ ID NO: 14168
  source 1..80: mol_type = other DNA

SEQ ID NO: 53868 - DNA, 80 bp, synthetic construct
  source 1..80: mol_type = other DNA
ttaactgccaatatctttctttctaaaattgtgtttttgtatttcgtggtaaactcagttcaaagccgcggatgggggca

SEQ ID NO: 53869 - DNA, 80 bp, synthetic construct
  source 1..80: mol_type = other DNA
agagaggactgcttcattgtcttaaattcgttgtaatcacgtcgcaataccaggcactcattcttaaggtagcaaagcag

SEQ ID NO: 53870 - DNA, 80 bp, synthetic construct
  source 1..80: mol_type = other DNA
ggtgcatggaatggaatgtaaggaatcgttcatacttcatgtaggtttagcatttcttgattacaagctaaataaggggt

SEQ ID NO: 53871 - DNA, 80 bp, synthetic construct
  source 1..80: mol_type = other DNA
tagcatataatgagcagtgaggatgaccagaggtcactcttgtggccatgttggttttggtgggttttggcccgtttctt

SEQ ID NO: 53872 - DNA, 80 bp, synthetic construct; identical to SEQ ID NO: 14169
  source 1..80: mol_type = other DNA

SEQ ID NO: 53873 - DNA, 80 bp, synthetic construct
  source 1..80: mol_type = other DNA
tgggcatgggaaactatttttaaaatattctttattttttaaattgacctggatttttctttcaacttttattattttaa

SEQ ID NO: 53874 - DNA, 80 bp, synthetic construct
  source 1..80: mol_type = other DNA
gcctagaatgtgtgaatttaacaatggtaaaatacaaaaacaaattgtaattctatacaccacagcagaatatcatatat

SEQ ID NO: 53875 - DNA, 80 bp, synthetic construct
  source 1..80: mol_type = other DNA
gaattgatatttttgaaataacagttctcaacacgatcttgatcaatattcccactgggtttctttgtggcaatagacaa

SEQ ID NO: 53876 - DNA, 80 bp, synthetic construct; identical to SEQ ID NO: 14170
  source 1..80: mol_type = other DNA

SEQ ID NO: 53877 - DNA, 80 bp, synthetic construct
  source 1..80: mol_type = other DNA
gatatgatgaataaaatgacatcctagagatgaccattggatttggcaacatggagctaacacatgtcagtgacaaggag

SEQ ID NO: 53878 - DNA, 80 bp, synthetic construct
  source 1..80: mol_type = other DNA
ttcattagcagagttggatttagggaaaaggaaatgccgtggcatgtttatatgctgattggaatcactcactagagaga

SEQ ID NO: 53879 - DNA, 80 bp, synthetic construct
  source 1..80: mol_type = other DNA
taacatgtataaatgacatgtgaatatgtgaaaaaatttcaaactcttcattataagtcagagaaatgtaaataaacgcc

SEQ ID NO: 53880 - DNA, 80 bp, synthetic construct; identical to SEQ ID NO: 14171
  source 1..80: mol_type = other DNA

SEQ ID NO: 53881 - DNA, 80 bp, synthetic construct
  source 1..80: mol_type = other DNA
agtggcatgatctcggctcactgcaagctctgccttccgggttcacaccattctcctgcctcagccttcccagtagctgg

SEQ ID NO: 53882 - DNA, 80 bp, synthetic construct
  source 1..80: mol_type = other DNA
ggtcagaaatagcttttttagggctggtaaaatggccttcatctagattttctcatgcttgtttgtgaattggctcccct

SEQ ID NO: 53883 - DNA, 80 bp, synthetic construct
  source 1..80: mol_type = other DNA
ggtaaatcaaacggagaggaggcagtgcggcaagtacaaagaccatagttacaatactctaaaccaaaaatatctgagac

SEQ ID NO: 53884 - DNA, 80 bp, synthetic construct; identical to SEQ ID NO: 14172
  source 1..80: mol_type = other DNA

SEQ ID NO: 53885 - DNA, 80 bp, synthetic construct
  source 1..80: mol_type = other DNA
ggtatggcaatccacatgttgcaaggaaaaaggggcaggtaggggaagagtcagttatgtattcatcttgctctcagtaa

SEQ ID NO: 53886 - DNA, 80 bp, synthetic construct
  source 1..80: mol_type = other DNA
ggtgccaaatttttagtttcctttcacaatttatacaaaacacaactcaacagacatcctcatatcccagtgtatgtggc

SEQ ID NO: 53887 - DNA, 80 bp, synthetic construct
  source 1..80: mol_type = other DNA
atctagataattccttagagtaagggaacaagataatggccacaaccaagtaggaaagaatcacgtatacagacgatttt

SEQ ID NO: 53888 - DNA, 80 bp, synthetic construct; identical to SEQ ID NO: 14173
  source 1..80: mol_type = other DNA

SEQ ID NO: 53889 - DNA, 80 bp, synthetic construct
  source 1..80: mol_type = other DNA
tgatttgagatattaatgaccttagcctcatagcctcattgcctgacacaagcaaaactaaataacctctagagaaatat

SEQ ID NO: 53890 - DNA, 80 bp, synthetic construct
  source 1..80: mol_type = other DNA
aacactcccagtacaccagctagaaaagttaaaaatttaaaacacaaaattcgtactttaaaggaaaaggagagctgtgg

SEQ ID NO: 53891 - DNA, 80 bp, synthetic construct
  source 1..80: mol_type = other DNA
agggaaaccaagcaagggacacagggacagactaagaaattagatatttgaggttctcaaattctcaaattcatggcgtg

SEQ ID NO: 53892 - DNA, 80 bp, synthetic construct; identical to SEQ ID NO: 14174
  source 1..80: mol_type = other DNA

SEQ ID NO: 53893 - DNA, 80 bp, synthetic construct
  source 1..80: mol_type = other DNA
tggtaacaatgataaattctggaccaccttcattttccaatttatttcattgtgttgtgataagaacaccttacatgaaa

SEQ ID NO: 53894 - DNA, 80 bp, synthetic construct
  source 1..80: mol_type = other DNA
caccaacctattctctgtttctatgagattggctacctagacacctcatataagtgggattgaagcagcctcgtttgtct

SEQ ID NO: 53895 - DNA, 80 bp, synthetic construct
  source 1..80: mol_type = other DNA
tatttgtgtggttttgagtgactttcataatcctgagttctaatttgattgcactgtggtctgagaaactgttatgattt

SEQ ID NO: 53896 - DNA, 80 bp, synthetic construct
  source 1..80: mol_type = other DNA
gtcctgaatatccttgttaattttctgtcttgttgatctgtctaatattgacagtggagtgttgaagtctcccactatta

SEQ ID NO: 53897 - DNA, 80 bp, synthetic construct; identical to SEQ ID NO: 14175
  source 1..80: mol_type = other DNA

SEQ ID NO: 53898 - DNA, 80 bp, synthetic construct
  source 1..80: mol_type = other DNA
ccttcagttatgctctgatcttagttatttcttgccttctgctagcttttgaatttgtttgcccttctctagttctttta

SEQ ID NO: 53899 - DNA, 80 bp, synthetic construct
  source 1..80: mol_type = other DNA
ggccaagtcaatgctagctttcaaggcttttaagtacagataacggtcttgcttgagggcaatgttgcaggctacaaatt

SEQ ID NO: 53900 - DNA, 80 bp, synthetic construct
  source 1..80: mol_type = other DNA
agtgaaaccctgtctctactaaaaatacaaaaagttagccgggtgtggtggtgggcacctgtagtcccagctactcagga

SEQ ID NO: 53901 - DNA, 80 bp, synthetic construct; identical to SEQ ID NO: 14176
  source 1..80: mol_type = other DNA

SEQ ID NO: 53902 - DNA, 80 bp, synthetic construct
  source 1..80: mol_type = other DNA
aaggaattatagcagcttttaaggtttactatctgaagagggcctttgcccatgttattatggtaactcaggaagacact

SEQ ID NO: 53903 - DNA, 80 bp, synthetic construct
  source 1..80: mol_type = other DNA
aggagattgcaaaaatctacaaggctttggttgagatggcaaacaactttaaactgagtacggatgaggatggcattagg

SEQ ID NO: 53904 - DNA, 80 bp, synthetic construct
  source 1..80: mol_type = other DNA
tgcagacctcaacaagctccttaaaaatttgaaaacatgaaccccagcacaacaaggttttcattaataaagaggaatgt

SEQ ID NO: 53905 - DNA, 80 bp, synthetic construct; identical to SEQ ID NO: 14177
  source 1..80: mol_type = other DNA

SEQ ID NO: 53906 - DNA, 80 bp, synthetic construct
  source 1..80: mol_type = other DNA
aaacagtcaaaaagttaaaaaattaagtatataaagtttaaaaagttagagtaagctaaggttaattattgtagaaaaac

SEQ ID NO: 53907 - DNA, 80 bp, synthetic construct
  source 1..80: mol_type = other DNA
agatctaccatttaaaaatctttcatatggtattttcaccacaccttttgtatgtttagatacataaacagttagcattg

SEQ ID NO: 53908 - DNA, 80 bp, synthetic construct
  source 1..80: mol_type = other DNA
tgacacatttctcagagcttgtccctttagctaagtgatgcctgacttcagttttgccccatttctagagcatagtcctc

SEQ ID NO: 53909 - DNA, 80 bp, synthetic construct; identical to SEQ ID NO: 14178
  source 1..80: mol_type = other DNA

SEQ ID NO: 53910 - DNA, 80 bp, synthetic construct
  source 1..80: mol_type = other DNA
aatggtaggtctttgtttcctcaacaccactggacagtgaaagattttgcactgcctttcagaagttgacactttagttt

SEQ ID NO: 53911 - DNA, 80 bp, synthetic construct
  source 1..80: mol_type = other DNA
aacttttctacagcagaaaacggtagcagaaaaatggcactaaaacgcagcgtacacttgcaaacagcaaatgctaccaa

SEQ ID NO: 53912 - DNA, 80 bp, synthetic construct
  source 1..80: mol_type = other DNA
attttatcctatttttgtagttgttgccagtgggacaatttgtcctactgtgaccctaatgcatcttatactgtggtgga

SEQ ID NO: 53913 - DNA, 80 bp, synthetic construct
  source 1..80: mol_type = other DNA
tcaagaccatcctggccaacatggtgaaacccctgtctctactaaaaatacaaatttagctgggcatggtggcacgcagc

SEQ ID NO: 53914 - DNA, 80 bp, synthetic construct; identical to SEQ ID NO: 14179
  source 1..80: mol_type = other DNA

SEQ ID NO: 53915 - DNA, 80 bp, synthetic construct
  source 1..80: mol_type = other DNA
atcctacccaattacataggatactccacttccagttaccccttaagcattccccatgccaacagcctccaatcaggtcc

SEQ ID NO: 53916 - DNA, 80 bp, synthetic construct
  source 1..80: mol_type = other DNA
ataaattaaaatccaagaggctaacatttaattaatgacatttaagatcttctatatcggataatgctatacattatatt

SEQ ID NO: 53917 - DNA, 80 bp, synthetic construct
  source 1..80: mol_type = other DNA
tattgtctgttggtactaaatcaatttccccctgttttgtgcttttttccacatcacttggggttgaagcctggacacca

SEQ ID NO: 53918 - DNA, 80 bp, synthetic construct; identical to SEQ ID NO: 14180
  source 1..80: mol_type = other DNA

SEQ ID NO: 53919 - DNA, 80 bp, synthetic construct
  source 1..80: mol_type = other DNA
ttgtaaattgaaaatattgtgagttgaaagtgtagagtataagttgttcaccttcatgatcatgtggctgaggctgcctg

SEQ ID NO: 53920 - DNA, 80 bp, synthetic construct
  source 1..80: mol_type = other DNA
caaaccatcttaagtcaggtgtgtctgtagtttaaaaaaaattacaaataaagaatatccaatgttgttgggagtgcaga

SEQ ID NO: 53921 - DNA, 80 bp, synthetic construct
  source 1..80: mol_type = other DNA
cccaatggttacatcatacataactatagcacaatatcgaaacaaggaaatcgacactgatacaatgtatttgcagtttt

SEQ ID NO: 53922 - DNA, 80 bp, synthetic construct
  source 1..80: mol_type = other DNA
cccaccccccaccatccctacactgtgccaaccactaatttgattttcatctgtataattttatcatttagaaaatgtta

SEQ ID NO: 53923 - DNA, 80 bp, synthetic construct; identical to SEQ ID NO: 14181
  source 1..80: mol_type = other DNA

SEQ ID NO: 53924 - DNA, 80 bp, synthetic construct
  source 1..80: mol_type = other DNA
aatcaggcattcaactgattaaatgaggggaacccagttatggagggcaatgtactttacttaaaatctactgacttaaa

SEQ ID NO: 53925 - DNA, 80 bp, synthetic construct
  source 1..80: mol_type = other DNA
atgacatataataaaactaatttgaccataggctaattcagcgatccccaacatttttggcaccagggactggttttgtg

SEQ ID NO: 53926 - DNA, 80 bp, synthetic construct
  source 1..80: mol_type = other DNA
gtggtctgtggcccaggggttgggaacccctgggctaattgatgcgaacaagatttaagttcctgtggcttatttctggt

SEQ ID NO: 53927 - DNA, 80 bp, synthetic construct; identical to SEQ ID NO: 14182
  source 1..80: mol_type = other DNA

SEQ ID NO: 53928 - DNA, 80 bp, synthetic construct
  source 1..80: mol_type = other DNA
caaggtcatggatgactggagcctatcccggcagctcaaggacaagagaggaaccaaccttgtataggatgccatcccat

SEQ ID NO: 53929 - DNA, 80 bp, synthetic construct
  source 1..80: mol_type = other DNA
ctcatggacagtggccctggccaggaacctatttattttctcaccaacattgtaacaaaacgttgaacaaaacaatgctg

SEQ ID NO: 53930 - DNA, 80 bp, synthetic construct
  source 1..80: mol_type = other DNA
ctccacttacagaatcctgactgggagggagagggtctcatcagcgctcccacatggcctctactgacaccaggaaggga

SEQ ID NO: 53931 - DNA, 80 bp, synthetic construct; identical to SEQ ID NO: 14183
  source 1..80: mol_type = other DNA

SEQ ID NO: 53932 - DNA, 80 bp, synthetic construct
  source 1..80: mol_type = other DNA
tcagttatctgcctggtaggctgctctttcttgttcccttggatagagaaacatgctttccttaggatatttttgtctgt

SEQ ID NO: 53933 - DNA, 80 bp, synthetic construct
  source 1..80: mol_type = other DNA
gtctgtagctgtacttagcaggaggaataggaagaattgtacctacttcatcttgtcttagaaccagaaatctctcacca

SEQ ID NO: 53934 - DNA, 80 bp, synthetic construct
  source 1..80: mol_type = other DNA
actaaaactattaattatgttaaagccataaaaatatgcaaattttttcccaaaatatgggaaatgtgcgtgtgtgtgtg

SEQ ID NO: 53935 - DNA, 80 bp, synthetic construct
  source 1..80: mol_type = other DNA
ctcatattcaagtttttaccataggccacacctggctctcagattcacttagaaggatattagacaggagtcaaagtatg

SEQ ID NO: 53936 - DNA, 80 bp, synthetic construct; identical to SEQ ID NO: 14184
  source 1..80: mol_type = other DNA

SEQ ID NO: 53937 - DNA, 80 bp, synthetic construct
  source 1..80: mol_type = other DNA
ttgtgccataagcaatgttgtctaaaaatccagctgacattcttcctccatcaggtttccagaaaacagctagaaaatta

SEQ ID NO: 53938 - DNA, 80 bp, synthetic construct
  source 1..80: mol_type = other DNA
aaaaaaggcatggtaatacttataaaaagactttaaatatttttataagttttaaatattttataagtaattttataaat

SEQ ID NO: 53939 - DNA, 80 bp, synthetic construct
  source 1..80: mol_type = other DNA
gttgaccacaagagggaaacctagtcccagttatactataaattagaaaatcaagggaaaaatatgtgtcctgagaactt

SEQ ID NO: 53940 - DNA, 80 bp, synthetic construct; identical to SEQ ID NO: 14185
  source 1..80: mol_type = other DNA

SEQ ID NO: 53941 - DNA, 80 bp, synthetic construct
  source 1..80: mol_type = other DNA
tggaccccaaaaaagaatttcagtgaaagcagtaacagtcttctggcatatttctcacctttctttctaccttaaaggtt

SEQ ID NO: 53942 - DNA, 80 bp, synthetic construct
  source 1..80: mol_type = other DNA
tctctatcctcactattggtttttaaaaaacattttgcagcatggaccactgctcgtgtacagatgctctccaacttaac

SEQ ID NO: 53943 - DNA, 80 bp, synthetic construct
  source 1..80: mol_type = other DNA
tttagatgccatttagccacttatattctcttctattttattgtgagaactaattcccctcttacattctgtgcttgacc

SEQ ID NO: 53944 - DNA, 80 bp, synthetic construct
  source 1..80: mol_type = other DNA
gtgattccttctccacacttctaacttctcatcttcacactccttgtcttcctaacttcactacagtaagtgttttacat

SEQ ID NO: 53945 - DNA, 80 bp, synthetic construct; identical to SEQ ID NO: 14186
  source 1..80: mol_type = other DNA

SEQ ID NO: 53946 - DNA, 80 bp, synthetic construct
  source 1..80: mol_type = other DNA
taatcttcagttatgtggcacatggccaagagtaaaagtctttagtcacttggaagcagacagacactgtaatgctaaat

SEQ ID NO: 53947 - DNA, 80 bp, synthetic construct
  source 1..80: mol_type = other DNA
ttaccttgtaagaaaactggactaggaaacacagctgaaatggccagttctgcctccatttcctaaaccgtgttataatt

SEQ ID NO: 53948 - DNA, 80 bp, synthetic construct
  source 1..80: mol_type = other DNA
atctgtttatggacatgcgacactgttgttcacctcttttgcagaattcataaagaaatgatggggaaaacacatcaaag

SEQ ID NO: 53949 - DNA, 80 bp, synthetic construct; identical to SEQ ID NO: 14187
  source 1..80: mol_type = other DNA

SEQ ID NO: 53950 - DNA, 80 bp, synthetic construct
  source 1..80: mol_type = other DNA
ggaatgatgggacaaacaagtttctgttattgtctctctactgaccaaagggtggtcagagagtataggatgaagcagat

SEQ ID NO: 53951 - DNA, 80 bp, synthetic construct
  source 1..80: mol_type = other DNA
caagagtttcctctacttgatatgaagttgggtggttgaagatgataggattggcttctgcttccatcagaatcctaaag

SEQ ID NO: 53952 - DNA, 80 bp, synthetic construct
  source 1..80: mol_type = other DNA
agagaaaagctttacttggaacatcatccaggctcagagaacacaaatatttcatttccagtaagacgtttctggtcttt

SEQ ID NO: 53953 - DNA, 80 bp, synthetic construct
  source 1..80: mol_type = other DNA
accacactcattcctgccttcaacaatttacacagggatagaaagagatttatattaaatcaagttgggactttcaatta

SEQ ID NO: 53954 - DNA, 80 bp, synthetic construct; identical to SEQ ID NO: 14188
  source 1..80: mol_type = other DNA

SEQ ID NO: 53955 - DNA, 80 bp, synthetic construct
  source 1..80: mol_type = other DNA
acacacacacacaacacgtatgcatacaaacacatctgaattctataaaatcattctgaccttgatgagattccatagtt

SEQ ID NO: 53956 - DNA, 80 bp, synthetic construct
  source 1..80: mol_type = other DNA
tgagagcaacagaatgtcctatatcctaattctctgtgctgacttcggagtggccaatatgatagagatggaaggaactc

SEQ ID NO: 53957 - DNA, 80 bp, synthetic construct
  source 1..80: mol_type = other DNA
gacttagcttgtgccatttagaacagacaagaacacagagaattatagaacaatctgactacaggttctcaagttaaagc

SEQ ID NO: 53958 - DNA, 80 bp, synthetic construct; identical to SEQ ID NO: 14189
  source 1..80: mol_type = other DNA

SEQ ID NO: 53959 - DNA, 80 bp, synthetic construct
  source 1..80: mol_type = other DNA
cagcagaccagcttctgtgacctctcaggatgagaaaaagtaacacaagaaaagcttcttatgtagtgaattgagaagga

SEQ ID NO: 53960 - DNA, 80 bp, synthetic construct
  source 1..80: mol_type = other DNA
caaatgaagtattgaggtcccagacttgatctgggcccagtgtgaaagccctaacttatttctccagaagaatatgtcct

SEQ ID NO: 53961 - DNA, 80 bp, synthetic construct
  source 1..80: mol_type = other DNA
tctctcaggcttgctctgccccaggtttctgaacatggaatacatttctccagtgaaactcagtattatgagatttggga

SEQ ID NO: 53962 - DNA, 80 bp, synthetic construct; identical to SEQ ID NO: 14190
  source 1..80: mol_type = other DNA

SEQ ID NO: 53963 - DNA, 80 bp, synthetic construct
  source 1..80: mol_type = other DNA
caaataggaacttctctcctatcacagagaaagggaactgaaagtcatttctcaagtgtcccaaatttagtaatctcaca

SEQ ID NO: 53964 - DNA, 80 bp, synthetic construct
  source 1..80: mol_type = other DNA
agacatagaaaattatacatggttttgcctctaaaagaggagatgacaagcttaaatcataggatcagactcttagcaca

SEQ ID NO: 53965 - DNA, 80 bp, synthetic construct
  source 1..80: mol_type = other DNA
taatcagtaatgtatggaatatttgtgttcataacttgtgagaacggctgcatggcaggacaagaccccagcacaacagt

SEQ ID NO: 53966 - DNA, 80 bp, synthetic construct; identical to SEQ ID NO: 14191
  source 1..80: mol_type = other DNA

SEQ ID NO: 53967 - DNA, 80 bp, synthetic construct
  source 1..80: mol_type = other DNA
accatccgatgggctccctcactgccaggtcactcttcatggaagtatttgtattccagtcctttctgtggaaagaaatt

SEQ ID NO: 53968 - DNA, 80 bp, synthetic construct
  source 1..80: mol_type = other DNA
gaaggaatattaaagccgttctgtgggttattatctctaacgttcccaatagaataggctttgccagctgggtgtggtgg

SEQ ID NO: 53969 - DNA, 80 bp, synthetic construct
  source 1..80: mol_type = other DNA
gaggctgaggcaggagaatcgcttgaacccgggaggcggagattacaatgagctgagatcacgccaccaactccagcttg

SEQ ID NO: 53970 - DNA, 80 bp, synthetic construct; identical to SEQ ID NO: 14192
  source 1..80: mol_type = other DNA

SEQ ID NO: 53971 - DNA, 80 bp, synthetic construct
  source 1..80: mol_type = other DNA
gaaagagcttctttagtgaagctatgtcctcagtactgccaaaattcagacaatctccatggcctgacaatttaccttct

SEQ ID NO: 53972 - DNA, 80 bp, synthetic construct
  source 1..80: mol_type = other DNA
ggtatatccctgtctagaagtcagattggggttaaagagtctgtccgtgattgactaacagtcttaaatacttgatttgt

SEQ ID NO: 53973 - DNA, 80 bp, synthetic construct
  source 1..80: mol_type = other DNA
tggtcagactctattacaccccacattctcttttcttttattcttgtctgttctgcctcactcccgagctctactgactc

SEQ ID NO: 53974 - DNA, 80 bp, synthetic construct
  source 1..80: mol_type = other DNA
atgaaatctgggacgatagactacgaagcattggagaaaagacctatggacatttggaagataatgtgtggagtgaaaga

SEQ ID NO: 53975 - DNA, 80 bp, synthetic construct; identical to SEQ ID NO: 14193
  source 1..80: mol_type = other DNA

SEQ ID NO: 53976 - DNA, 80 bp, synthetic construct
  source 1..80: mol_type = other DNA
agccctgttcttatctgaatacatgatacagtagttattttttggagtgtaaatcctgtcggtatatattgagcacatat

SEQ ID NO: 53977 - DNA, 80 bp, synthetic construct
  source 1..80: mol_type = other DNA
acttagtaatatttccaagagagtagaaaaataagtaaggaaatggggaatctgatattattctctctcatctccagagc

SEQ ID NO: 53978 - DNA, 80 bp, synthetic construct
  source 1..80: mol_type = other DNA
catagggatacttacctagaaagacagaggatcttcccttggtttgtgaagaggcagctagtatatttgtgtgtgtttgc

SEQ ID NO: 53979 - DNA, 80 bp, synthetic construct
  source 1..80: mol_type = other DNA
gcaacatggtgaaaccccgtctctactaaaaatacaaaaaattagctgggtatggtggcacacgcctgtagtcccagcta

SEQ ID NO: 53980 - DNA, 80 bp, synthetic construct; identical to SEQ ID NO: 14194
  source 1..80: mol_type = other DNA

SEQ ID NO: 53981 - DNA, 80 bp, synthetic construct
  source 1..80: mol_type = other DNA
gatgctgggaagcagggggactatgacgctacaaggtctcagtcttaatttttggagtacttcagtccccaggtatattt

SEQ ID NO: 53982 - DNA, 80 bp, synthetic construct
  source 1..80: mol_type = other DNA
aaacccctgacaggatcaaaaccacagcagggctacataataggaaaactatacataaataggtagaataatctgctcag

SEQ ID NO: 53983 - DNA, 80 bp, synthetic construct
  source 1..80: mol_type = other DNA
aaagtgagagaacatttctctttaggggctgctgctggatttctaaaaagaaaataatttctcagctagtaacatggagc

SEQ ID NO: 53984 - DNA, 80 bp, synthetic construct; identical to SEQ ID NO: 14195
  source 1..80: mol_type = other DNA

SEQ ID NO: 53985 - DNA, 80 bp, synthetic construct
  source 1..80: mol_type = other DNA
tgaccaatcaggcgagtttatgtttgactttgatggtgatgagattttccatgtggatatggcaaagaaggagacggtct

SEQ ID NO: 53986 - DNA, 80 bp, synthetic construct
  source 1..80: mol_type = other DNA
aatccatagtttgaaagtagttgcttcagctctttgtgttagattattgtaactgattttccctccaagggtctaacctt

SEQ ID NO: 53987 - DNA, 80 bp, synthetic construct
  source 1..80: mol_type = other DNA
tcttatacctcaatattggctcaatttcttggggagggggtgctgtcagagattgttatctgaggatgtgacatagattt

SEQ ID NO: 53988 - DNA, 80 bp, synthetic construct; identical to SEQ ID NO: 14196
  source 1..80: mol_type = other DNA

SEQ ID NO: 53989 - DNA, 80 bp, synthetic construct
  source 1..80: mol_type = other DNA
cctcttctcaagcactggggtatggaccaacactcaatctcctttatttcaaggtttcctcctatgatgcttgtgtgaaa

SEQ ID NO: 53990 - DNA, 80 bp, synthetic construct
  source 1..80: mol_type = other DNA
tacatttgattctgagtgttacttcttcccacactcattaccatgtactctgccttatttccccccagagtttgatgctc

SEQ ID NO: 53991 - DNA, 80 bp, synthetic construct
  source 1..80: mol_type = other DNA
taggtgtggtcagaggaagacgtatatggagatatctgagggaggaaaacagggtggggaaaggaaatgtaatgcattta

SEQ ID NO: 53992 - DNA, 80 bp, synthetic construct; identical to SEQ ID NO: 14197
  source 1..80: mol_type = other DNA

SEQ ID NO: 53993 - DNA, 80 bp, synthetic construct
  source 1..80: mol_type = other DNA
ggtcaattcattgcatgaaatgggaatctcttagaggccaatgcctgcttttgcttctttagtctcaaatgtagtatgag

SEQ ID NO: 53994 - DNA, 80 bp, synthetic construct
  source 1..80: mol_type = other DNA
ttaagagagaagaggaaggaatctgaagcaaggagctcaaaactgatcttcaactccttggtaactatgtgtgtcttgct

SEQ ID NO: 53995 - DNA, 80 bp, synthetic construct
  source 1..80: mol_type = other DNA
ttgctccgtactctaacatctagctggcttccctgtctattgccttttcctgtatctattttcctctatttcctatcatt

SEQ ID NO: 53996 - DNA, 80 bp, synthetic construct; identical to SEQ ID NO: 14198
  source 1..80: mol_type = other DNA

SEQ ID NO: 53997 - DNA, 80 bp, synthetic construct
  source 1..80: mol_type = other DNA
tcctcatcaggaaaacctaaagtgggattggtttgttgggagatctctactgagcaatgatataactctatcttcagtag

SEQ ID NO: 53998 - DNA, 80 bp, synthetic construct
  source 1..80: mol_type = other DNA
aacatcgttcattccagatttaatgagcaaagagattggacactgaagactggccttacccattctgttagacatagtct

SEQ ID NO: 53999 - DNA, 80 bp, synthetic construct
  source 1..80: mol_type = other DNA
gaaaagctgagtgaaatttggggttggggagaaagatatgacattaagatgagaggaaggaatatttgaaacacgatgaa

SEQ ID NO: 54000 - DNA, 80 bp, synthetic construct
  source 1..80: mol_type = other DNA
ctgttgaaatgagttaggcttgggtttcatcttggctgtatcatttactagctatgttttcactggtatcttacttaact

SEQ ID NO: 54001 - DNA, 80 bp, synthetic construct; identical to SEQ ID NO: 14199
  source 1..80: mol_type = other DNA

SEQ ID NO: 54002 - DNA, 80 bp, synthetic construct
  source 1..80: mol_type = other DNA
ggtgataggcgcctgtaatcccagctactctggaggttgaggcaggagaatctcttgaatccgggaggcagaggttgcag

SEQ ID NO: 54003 - DNA, 80 bp, synthetic construct
  source 1..80: mol_type = other DNA
gactacaaactttattataaaataaatagcttaacacagagaatacactaaaacttagacaagcatggattaagaaagca

SEQ ID NO: 54004 - DNA, 80 bp, synthetic construct
  source 1..80: mol_type = other DNA
aaaaaaaaaaaacaaaaaattagccgggtgtggtggcgggtgcctgtagtcccagctactcgagaagttgaggcaggaaa

SEQ ID NO: 54005 - DNA, 80 bp, synthetic construct; identical to SEQ ID NO: 14200
  source 1..80: mol_type = other DNA

SEQ ID NO: 54006 - DNA, 80 bp, synthetic construct
  source 1..80: mol_type = other DNA
atcatatatccaccattacaggattaaacaaaatagcttcactgatctaaaaatgacccaggctccatctactcatcctt

SEQ ID NO: 54007 - DNA, 80 bp, synthetic construct
  source 1..80: mol_type = other DNA
tagccatatgcatacaggtttcctgcgtatattgtcatagcttgatagcttatttttctttaatgttaaataatactcca

SEQ ID NO: 54008 - DNA, 80 bp, synthetic construct
  source 1..80: mol_type = other DNA
aattgctggatcatatggtaagagtatgtttagctttgtaagaaacaactagaatatcttccaaaatggctgtatcattt

SEQ ID NO: 54009 - DNA, 80 bp, synthetic construct; identical to SEQ ID NO: 14201
  source 1..80: mol_type = other DNA

SEQ ID NO: 54010 - DNA, 80 bp, synthetic construct
  source 1..80: mol_type = other DNA
caacttaaaaccactaatttctttgctattaatctctagaatagtgtcattttgaaaatactagttaaatggaatcatgc

SEQ ID NO: 54011 - DNA, 80 bp, synthetic construct
  source 1..80: mol_type = other DNA
ctgtttctagtttggggtcactataaataaggctgttttgaacatgtgtttaaggtttttctatgagcatgagttcatga

SEQ ID NO: 54012 - DNA, 80 bp, synthetic construct
  source 1..80: mol_type = other DNA
aggaatttgaggccagccccagcgtctacacttttttttttttttgagacagagtctcgctctgttgccagactggagtg

SEQ ID NO: 54013 - DNA, 80 bp, synthetic construct
  source 1..80: mol_type = other DNA
ggtcttgacctcatgacctcgtgatccgcttgccttggcctcccaaagtgctgagattacaggcatgagccaccgtgccc

SEQ ID NO: 54014 - DNA, 80 bp, synthetic construct; identical to SEQ ID NO: 14202
  source 1..80: mol_type = other DNA

SEQ ID NO: 54015 - DNA, 80 bp, synthetic construct
  source 1..80: mol_type = other DNA
agaaagagaaagaaaaagaaggaaggaagaagggaaggagggagggaagggaggaagggagggagggtgaaaggaaggaa

SEQ ID NO: 54016 - DNA, 80 bp, synthetic construct
  source 1..80: mol_type = other DNA
agaaagaaagaaggaaggaaagaaagaaagaaagagaaagaaagaaaccgataaactattctctaattgctttgtgggag

SEQ ID NO: 54017 - DNA, 80 bp, synthetic construct
  source 1..80: mol_type = other DNA
tagtagctgggattacaggtgcacaccatcacgcctggataatttttttgtatttttactagagatggggtttcaccatg

SEQ ID NO: 54018 - DNA, 80 bp, synthetic construct; identical to SEQ ID NO: 14203
  source 1..80: mol_type = other DNA

SEQ ID NO: 54019 - DNA, 80 bp, synthetic construct
  source 1..80: mol_type = other DNA
gggttttcttgatataggatcatgccatctgcaaataggcatagttcaatttcctctcttcctgtttggatgcctttaat

SEQ ID NO: 54020 - DNA, 80 bp, synthetic construct
  source 1..80: mol_type = other DNA
tattattttaagttatgttcacttactactcagtttattaagagtttttaaatgaagggatattgaattttatcaaaaac

SEQ ID NO: 54021 - DNA, 80 bp, synthetic construct
  source 1..80: mol_type = other DNA
cagtttgccagtattttgtggaggatttttgcataaatcttcatcaataatatttgcctgaagttttcttttgtgtgtgt

SEQ ID NO: 54022 - DNA, 80 bp, synthetic construct; identical to SEQ ID NO: 14204
  source 1..80: mol_type = other DNA

SEQ ID NO: 54023 - DNA, 80 bp, synthetic construct
  source 1..80: mol_type = other DNA
gattatttgaatcttctctcttttcttctttattagtctaactagaggtcttttttttttattaatttttttttaggaaa

SEQ ID NO: 54024 - DNA, 80 bp, synthetic construct
  source 1..80: mol_type = other DNA
attgaggtctttctttttcatgtgggcatttgatgcataaatttcccacttaacactgccttagctgtgtcccagagatt

SEQ ID NO: 54025 - DNA, 80 bp, synthetic construct
  source 1..80: mol_type = other DNA
gcactgttgtctgaaagattgttttttatgatttcagttcttgtgcatttgctgaggagtatttgacttccgattatgtg

SEQ ID NO: 54026 - DNA, 80 bp, synthetic construct; identical to SEQ ID NO: 14205
  source 1..80: mol_type = other DNA

SEQ ID NO: 54027 - DNA, 80 bp, synthetic construct
  source 1..80: mol_type = other DNA
catcatagtgaataagtctcatgagatctgatagttttataaagaggagtttccctgcacaagttctcttgtcttgtctg

SEQ ID NO: 54028 - DNA, 80 bp, synthetic construct
  source 1..80: mol_type = other DNA
tgctgaaaagatatctgaaaatgtggaagtgactttggaactgggtaacaggcagaggttggaacagtttggagggctca

SEQ ID NO: 54029 - DNA, 80 bp, synthetic construct
  source 1..80: mol_type = other DNA
tatgctttagcaaagagactggtggcattttgtccctgtcctagagacttgtggaactttgaacttgagagagatgattt

SEQ ID NO: 54030 - DNA, 80 bp, synthetic construct; identical to SEQ ID NO: 14206
  source 1..80: mol_type = other DNA

SEQ ID NO: 54031 - DNA, 80 bp, synthetic construct
  source 1..80: mol_type = other DNA
ccaccacacctggctaattttttgtatttttagtagagacggggtttcaccatgttagccaggatagtctcgatctcctg

SEQ ID NO: 54032 - DNA, 80 bp, synthetic construct
  source 1..80: mol_type = other DNA
tgctgtatgcggtctttggacttggtgccctgtgtctcagccactccagctgtgactaaaaggggccaacatagagctca

SEQ ID NO: 54033 - DNA, 80 bp, synthetic construct
  source 1..80: mol_type = other DNA
tgggcagggcactcatgtggaacctctgctagggcagtgcagaagggaaatgtggagtgggcaccctcacacagagttct

SEQ ID NO: 54034 - DNA, 80 bp, synthetic construct; identical to SEQ ID NO: 14207
  source 1..80: mol_type = other DNA

SEQ ID NO: 54035 - DNA, 80 bp, synthetic construct
  source 1..80: mol_type = other DNA
ttttgattttacaggctcataggcagaagggacttgccttgtctcagatgagaatttggactgtggattttgagttaatg

SEQ ID NO: 54036 - DNA, 80 bp, synthetic construct
  source 1..80: mol_type = other DNA
gagggacctggtgggaggtaatttaatcatggggtaggtctttcccgtactattcttgtgatagtgaataagtctcatga

SEQ ID NO: 54037 - DNA, 80 bp, synthetic construct
  source 1..80: mol_type = other DNA
atctcaagtatgcctttattagcagcatgataatggactaatataaatgaatatatatttaagaaatggataaattcctg

SEQ ID NO: 54038 - DNA, 80 bp, synthetic construct; identical to SEQ ID NO: 14208
  source 1..80: mol_type = other DNA

SEQ ID NO: 54039 - DNA, 80 bp, synthetic construct
  source 1..80: mol_type = other DNA
tgagatgcaaggttagttcaacatatacaaatcaacaaatgtgatccatcacataaagcagaatgaaaggcaacaaccac

SEQ ID NO: 54040 - DNA, 80 bp, synthetic construct
  source 1..80: mol_type = other DNA
accttgtctctactaaaaatgaaaacttagctgggcatggtggcatgcgcctgtagtcgcagctactcaggaggctgaag

SEQ ID NO: 54041 - DNA, 80 bp, synthetic construct
  source 1..80: mol_type = other DNA
caatgacaaacccacagccaacaacatagtgaatgggcaaaagctggaagcatcactcttgaaaatcagcaggagacaag

SEQ ID NO: 54042 - DNA, 80 bp, synthetic construct; identical to SEQ ID NO: 14209
  source 1..80: mol_type = other DNA

SEQ ID NO: 54043 - DNA, 80 bp, synthetic construct
  source 1..80: mol_type = other DNA
agaggaagagtggaagtcaaactatccctgtttgcagatgatatgatcctgtgtctagaaaaccctaaatctccaaatct

SEQ ID NO: 54044 - DNA, 80 bp, synthetic construct
  source 1..80: mol_type = other DNA
attacctaagaatacagctaactatggagatgaaagatctctacaagaagaactacaaaacactgctcagagaaatcaga

SEQ ID NO: 54045 - DNA, 80 bp, synthetic construct
  source 1..80: mol_type = other DNA
tcatatggaagcaaaacagagcctaaatagctaaggcaatcctaagcaaaagaataaagtaagaggtactatgttgctca

SEQ ID NO: 54046 - DNA, 80 bp, synthetic construct; identical to SEQ ID NO: 14210
  source 1..80: mol_type = other DNA

SEQ ID NO: 54047 - DNA, 80 bp, synthetic construct
  source 1..80: mol_type = other DNA
aattgacaaatgggacctaatttaacttaagagcttctgtgcagtaaaagaaactatcgacagagtaaatagaaaaccta

SEQ ID NO: 54048 - DNA, 80 bp, synthetic construct
  source 1..80: mol_type = other DNA
ccaactatcatcagacatctataagctagctcactgcaaccctggcattgttgctactgcacatagcactctgcagccta

SEQ ID NO: 54049 - DNA, 80 bp, synthetic construct
  source 1..80: mol_type = other DNA
ccctggcgccactggcccagatagttattgctcacctgcaacagaaaatatttgcaaactatgcatctgacaaaggtcta

SEQ ID NO: 54050 - DNA, 80 bp, synthetic construct; identical to SEQ ID NO: 14211
  source 1..80: mol_type = other DNA

SEQ ID NO: 54051 - DNA, 80 bp, synthetic construct
  source 1..80: mol_type = other DNA
ataaaccattctaccataaagacacatgcacacatatgttcactgcagcactgttcacaatagcaaagacattgaatcaa

SEQ ID NO: 54052 - DNA, 80 bp, synthetic construct
  source 1..80: mol_type = other DNA
tggtgagtgttacagttcttaaagatggtgtgtccggagtttgttccttcagatgttcaaatgtatcccaagtttcttcc

SEQ ID NO: 54053 - DNA, 80 bp, synthetic construct
  source 1..80: mol_type = other DNA
gagtgttacagctcttaaaggtggtgcgtcctgagttgttcgttcctcctggtgggtttgttgtcttgctggcttcagga

SEQ ID NO: 54054 - DNA, 80 bp, synthetic construct; identical to SEQ ID NO: 14212
  source 1..80: mol_type = other DNA

SEQ ID NO: 54055 - DNA, 80 bp, synthetic construct
  source 1..80: mol_type = other DNA
gtccctgcccaacccagaagcccagccagcgtcacctctcaagatcatgtcctttgcaggaacatggatggagctggagg

SEQ ID NO: 54056 - DNA, 80 bp, synthetic construct
  source 1..80: mol_type = other DNA
ggaaaaatacctgtgagatactatgcttattaccttggtgatgaaattatctgtacatcaaacacctgacatgcagttta

SEQ ID NO: 54057 - DNA, 80 bp, synthetic construct
  source 1..80: mol_type = other DNA
ccaaggacagtttgtgactagcctcctcacattatccctcacattatcatttctcatctcttctcccctaaactttcatg

SEQ ID NO: 54058 - DNA, 80 bp, synthetic construct; identical to SEQ ID NO: 14213
  source 1..80: mol_type = other DNA

SEQ ID NO: 54059 - DNA, 80 bp, synthetic construct
  source 1..80: mol_type = other DNA
cgcaagcagcccaagaggttcttctggctgtttgcattcctggactcttctccgctccagctccgccaccgcccggaact

SEQ ID NO: 54060 - DNA, 80 bp, synthetic construct
  source 1..80: mol_type = other DNA
ctaggaaaagagtgatggctatgcccacaatcagcagggcgaggggcggaacaccttgactggcccccaccagccacccc

SEQ ID NO: 54061 - DNA, 80 bp, synthetic construct
  source 1..80: mol_type = other DNA
ttcctcctcctgggagcctccatccaaaagacacttctgctgcctcctatcatgccacactctactcattccttaaacaa

SEQ ID NO: 54062 - DNA, 80 bp, synthetic construct; identical to SEQ ID NO: 14214
  source 1..80: mol_type = other DNA

SEQ ID NO: 54063 - DNA, 80 bp, synthetic construct
  source 1..80: mol_type = other DNA
ccgtgtgtgtctctggacaaaaagggaggcacatttcaggtaagcataatatcatgtacaaaagcttgaaagaattgatg

SEQ ID NO: 54064 - DNA, 80 bp, synthetic construct
  source 1..80: mol_type = other DNA
ccatgaccccaacacaggtccacaaacttttttttttggactttctaaatccagaaaactcacgaattcacttgctgttg

SEQ ID NO: 54065 - DNA, 80 bp, synthetic construct
  source 1..80: mol_type = other DNA
caaacatacgtatgcatgtgtaaatacacacagatttcaaatactgtgcatgtatatatttttgatgtttttgtatttat

SEQ ID NO: 54066 - DNA, 80 bp, synthetic construct; identical to SEQ ID NO: 14215
  source 1..80: mol_type = other DNA

SEQ ID NO: 54067 - DNA, 80 bp, synthetic construct
  source 1..80: mol_type = other DNA
tctgcaaaggacgtgatctcattcctctttatggctgcatagtattccgtggtgtatatgtaccacagtgaatagaaagc

SEQ ID NO: 54068 - DNA, 80 bp, synthetic construct
  source 1..80: mol_type = other DNA
aataaactgcataacgcaaaaaagtaaaaatgaaaatcttgaacctgcattgattgaatggattcatcaagaaagcagtg

SEQ ID NO: 54069 - DNA, 80 bp, synthetic construct
  source 1..80: mol_type = other DNA
ctattgacattttggactagataatattttcttggtgagaggagctgtctactagggtccctagcttctacttgttacat

SEQ ID NO: 54070 - DNA, 80 bp, synthetic construct; identical to SEQ ID NO: 14216
  source 1..80: mol_type = other DNA

SEQ ID NO: 54071 - DNA, 80 bp, synthetic construct
  source 1..80: mol_type = other DNA
attcattttctaactttcagtttcctactcccaacaatacaaggaggcatcaaattaccaaccttggacagaggcagaac

SEQ ID NO: 54072 - DNA, 80 bp, synthetic construct
  source 1..80: mol_type = other DNA
ctgttctcatgacagtgaataagtcttatgagatctgatggttttataaagggaaaaaccctttcgcttgctgtcattct

SEQ ID NO: 54073 - DNA, 80 bp, synthetic construct
  source 1..80: mol_type = other DNA
agggagaaactaagaagatggcattctctcatagatagtttccaaaaaacgagcaagtccccagattttgcgtagagact

SEQ ID NO: 54074 - DNA, 80 bp, synthetic construct; identical to SEQ ID NO: 14217
  source 1..80: mol_type = other DNA

SEQ ID NO: 54075 - DNA, 80 bp, synthetic construct
  source 1..80: mol_type = other DNA
ttcggatttaactgggtatcctgtactttatttggcaaccttagcccaacttgctaataatgctcagaaggagtgaattt

SEQ ID NO: 54076 - DNA, 80 bp, synthetic construct
  source 1..80: mol_type = other DNA
tctctctcccaccctgagacacaccctgtacataagaaattctatcaataattcagactcagtctagtcactattcacta

SEQ ID NO: 54077 - DNA, 80 bp, synthetic construct
  source 1..80: mol_type = other DNA
atatattcctcacaggattattgttgagggtaaaactaagcagtggctcttcttagtgctgataatataataatcactct

SEQ ID NO: 54078 - DNA, 80 bp, synthetic construct
  source 1..80: mol_type = other DNA
ctggtttatatataataattcacatgcctaaacctcacacaaaaggagattgctgatatcgaagagagggacttcatata

SEQ ID NO: 54079 - DNA, 80 bp, synthetic construct; identical to SEQ ID NO: 14218
  source 1..80: mol_type = other DNA

SEQ ID NO: 54080 - DNA, 80 bp, synthetic construct
  source 1..80: mol_type = other DNA
ttctttgttcattttctttagatccagctggctccctgatcccagagcatagtctttccctgaggctcgctactcaaaag

SEQ ID NO: 54081 - DNA, 80 bp, synthetic construct
  source 1..80: mol_type = other DNA
accacaactggccactccctcgcctcgaaaaaatcatttttctttgattcccatgcatcacattccttgggttttttttc

SEQ ID NO: 54082 - DNA, 80 bp, synthetic construct
  source 1..80: mol_type = other DNA
cctcaccctgaactcctctcttatattcagttgacttcctgattgcttcatgtgagttcaaaaatcatctcaattttaat

SEQ ID NO: 54083 - DNA, 80 bp, synthetic construct; identical to SEQ ID NO: 14219
  source 1..80: mol_type = other DNA

SEQ ID NO: 54084 - DNA, 80 bp, synthetic construct
  source 1..80: mol_type = other DNA
caaaagagagaaattttaaagctgggggagacatcacacgttggtaggatccacagtgccccacaagccacaaaaaccag

SEQ ID NO: 54085 - DNA, 80 bp, synthetic construct
  source 1..80: mol_type = other DNA
aagtttcaggcaccattgtcatcaataacatcttatcaggagacatggttttgagatcaaccgatctgatcaaaatttat

SEQ ID NO: 54086 - DNA, 80 bp, synthetic construct
  source 1..80: mol_type = other DNA
tgctgagaaaaagaattcagcaatatttctcccatttgcttttgaaagaagagaaatatggctctgttctgcctggctca

SEQ ID NO: 54087 - DNA, 80 bp, synthetic construct
  source 1..80: mol_type = other DNA
ctcctcggctgataggattaagagattaaagtaaaggcaggcataggaaatcacaagggtattgattggggaagtgataa

SEQ ID NO: 54088 - DNA, 80 bp, synthetic construct; identical to SEQ ID NO: 14220
  source 1..80: mol_type = other DNA

SEQ ID NO: 54089 - DNA, 80 bp, synthetic construct
  source 1..80: mol_type = other DNA
ttccccttttctgtctgtctggaacacttgtcccttagatcttcacatggctgtcttattgttcttgtctcagctaaatg

SEQ ID NO: 54090 - DNA, 80 bp, synthetic construct
  source 1..80: mol_type = other DNA
tctcctctggtattgagttccatgagagtagggatcttttttatcctattcaagtagaaatctctgagcctagaacagag

SEQ ID NO: 54091 - DNA, 80 bp, synthetic construct
  source 1..80: mol_type = other DNA
ttcattctaatgacatgctatatcccttctcctccctgtgagaaattaaggcaaacttcttttctctcctctttctagtt

SEQ ID NO: 54092 - DNA, 80 bp, synthetic construct; identical to SEQ ID NO: 14221
  source 1..80: mol_type = other DNA

SEQ ID NO: 54093 - DNA, 80 bp, synthetic construct
  source 1..80: mol_type = other DNA
gctgcacccattaactcttcatttacattaggtatatctcctaatgctatccctccccccttcctccaccccacaacagg

SEQ ID NO: 54094 - DNA, 80 bp, synthetic construct
  source 1..80: mol_type = other DNA
tatccttttttatggctgcatagtattccatggtgtatatgtgccacattttcttaatccagcctatcattgttggacat

SEQ ID NO: 54095 - DNA, 80 bp, synthetic construct
  source 1..80: mol_type = other DNA
gccacactgatttccacaatggttgaactagtttacagccccaccaacagtgtaaaagtgttcctatttctccacatcct

SEQ ID NO: 54096 - DNA, 80 bp, synthetic construct; identical to SEQ ID NO: 14222
  source 1..80: mol_type = other DNA

SEQ ID NO: 54097 - DNA, 80 bp, synthetic construct
  source 1..80: mol_type = other DNA
gtgttttagacatgaagtccttgcccatgcctatgtcctgaatggtattgcctaggttttcttctagggtttttatggtt

SEQ ID NO: 54098 - DNA, 80 bp, synthetic construct
  source 1..80: mol_type = other DNA
tgtcagagatcagatagttgtagatatgtggcattatttctgagggctctgttctgttcccttgatctatatctctgttt

SEQ ID NO: 54099 - DNA, 80 bp, synthetic construct; identical to SEQ ID NO: 14223
  source 1..80: mol_type = other DNA

SEQ ID NO: 54100 - DNA, 80 bp, synthetic construct
  source 1..80: mol_type = other DNA
atgggagttcactcatgatttggctctctgtctgttattggtgtataagaatgcttgtgatttttgcacattgattttgt

SEQ ID NO: 54101 - DNA, 80 bp, synthetic construct
  source 1..80: mol_type = other DNA
cctggctagaacttccaacactatgttgaataggagtggtgagagagggcatctttgtcttgtgcccgttttcaaaggga

SEQ ID NO: 54102 - DNA, 80 bp, synthetic construct; identical to SEQ ID NO: 14224
  source 1..80: mol_type = other DNA

SEQ ID NO: 54103 - DNA, 80 bp, synthetic construct
  source 1..80: mol_type = other DNA
tggtatcaggatgatgctggcctcataaaatgagttagggaggattccctctttttctattgattggaatagtttcagaa

SEQ ID NO: 54104 - DNA, 80 bp, synthetic construct
  source 1..80: mol_type = other DNA
gagtgtatgtgtcgaggaatttatccatttcttctagattttcaagtttatttgcgtagaggtgtttatagtattctctg

SEQ ID NO: 54105 - DNA, 80 bp, synthetic construct
  source 1..80: mol_type = other DNA
tttgaagggttttttgtgtctctatttccttcagttctgctccgatcttagttatttcttgccttctgctagcttttgaa

SEQ ID NO: 54106 - DNA, 80 bp, synthetic construct; identical to SEQ ID NO: 14225
  source 1..80: mol_type = other DNA

SEQ ID NO: 54107 - DNA, 80 bp, synthetic construct
  source 1..80: mol_type = other DNA
ctgtagtcccagctactcgggaggctgaggcaggaaaatcacgtgagcccaggaggcagaggttgtagtgagccgaggcc

SEQ ID NO: 54108 - DNA, 80 bp, synthetic construct
  source 1..80: mol_type = other DNA
ctaatataatgaggctcctgacttcctctctgcttcctacctcatcctctgcctctgcatttccttgaatgctatagttc

SEQ ID NO: 54109 - DNA, 80 bp, synthetic construct
  source 1..80: mol_type = other DNA
ctacttattttgttgtctcagctgaatgtcactttctcaggcagagctttctaaacacatgagctaaagttgggtgaatc

SEQ ID NO: 54110 - DNA, 80 bp, synthetic construct
  source 1..80: mol_type = other DNA
tccatgagagtcgggaccctctctatcttaatcaaatacaatgatttgaacttggaatggagccgagtacacagtagctg

SEQ ID NO: 54111 - DNA, 80 bp, synthetic construct; identical to SEQ ID NO: 14226
  source 1..80: mol_type = other DNA

SEQ ID NO: 54112 - DNA, 80 bp, synthetic construct
  source 1..80: mol_type = other DNA
cttgagtccagcagtttaagaccagcctgggtaacatagcaaagtctcatctctagcaaaattacaaaaatcagctgggc

SEQ ID NO: 54113 - DNA, 80 bp, synthetic construct
  source 1..80: mol_type = other DNA
aatggatctcatagtgctctgggtctgtgcaagctttaggaatttctggaaatgatgacaacatagctggggaaaaataa

SEQ ID NO: 54114 - DNA, 80 bp, synthetic construct
  source 1..80: mol_type = other DNA
tgactttcagccctatgggatgtgaacaatgtccacattgtctctataaccccacacagtatatagtttgaacattatta

SEQ ID NO: 54115 - DNA, 80 bp, synthetic construct
  source 1..80: mol_type = other DNA
ttctatagaaaggttagaagagattcgtaataaacactaagctgggccaggttttccgaggatgccttaagttctttagg

SEQ ID NO: 54116 - DNA, 80 bp, synthetic construct; identical to SEQ ID NO: 14227
  source 1..80: mol_type = other DNA

SEQ ID NO: 54117 - DNA, 80 bp, synthetic construct
  source 1..80: mol_type = other DNA
ataaagggaagtgccgtatggggaaattattttagcatccttatttccaaatcctctaaacaccctgaggacatgtgatg

SEQ ID NO: 54118 - DNA, 80 bp, synthetic construct
  source 1..80: mol_type = other DNA
atccaataatacagatgcacaatctctgaccaaaaagtcacaaagtcttaagggacatggcctgggcacaatgttaacaa

SEQ ID NO: 54119 - DNA, 80 bp, synthetic construct
  source 1..80: mol_type = other DNA
acaggaaaggaccaggggccagaggaggaggcaagtcttactcaggaagaactatgaacccctccacccacattccaaat

SEQ ID NO: 54120 - DNA, 80 bp, synthetic construct; identical to SEQ ID NO: 14228
  source 1..80: mol_type = other DNA

SEQ ID NO: 54121 - DNA, 80 bp, synthetic construct
  source 1..80: mol_type = other DNA
gtgtgtgagtgtgtttaggagtaaaggagatggaaggaacatggttgtaaatccggagacatttaaactggtccttattg

SEQ ID NO: 54122 - DNA, 80 bp, synthetic construct
  source 1..80: mol_type = other DNA
gacagctattgactagagagcttaatccgtacctgtttacaggtagggatgtctttaataagttaaaggaaattgaaagt

SEQ ID NO: 54123 - DNA, 80 bp, synthetic construct
  source 1..80: mol_type = other DNA
cctaacaatgtgataaggtcaactgtgcaatccaagtattcatgggtctgagagatcgatcgaagactgtgaaagttagc

SEQ ID NO: 54124 - DNA, 80 bp, synthetic construct
  source 1..80: mol_type = other DNA
accatgcttggttaattttttgtatttttagtggagatgggtttcactgtgttagccaagatggtctcgatctcctgacc

SEQ ID NO: 54125 - DNA, 80 bp, synthetic construct; identical to SEQ ID NO: 14229
  source 1..80: mol_type = other DNA

SEQ ID NO: 54126 - DNA, 80 bp, synthetic construct
  source 1..80: mol_type = other DNA
catctaagattcagaatggacttcagaatacaactatgcttataaagttctgcattaattcacatgctaccacataggca

SEQ ID NO: 54127 - DNA, 80 bp, synthetic construct
  source 1..80: mol_type = other DNA
ggactacaggcgcccgccacaactcccggctaatttttttgtatttttagtagaaacagggtttcaccgtgttcgccagg

SEQ ID NO: 54128 - DNA, 80 bp, synthetic construct
  source 1..80: mol_type = other DNA
tttgaggccgtacacttctttcagtaacaatattgtctaagtaatggtatggcaaagttgtttctaccttttctggagct

SEQ ID NO: 54129 - DNA, 80 bp, synthetic construct; identical to SEQ ID NO: 14230
  source 1..80: mol_type = other DNA

SEQ ID NO: 54130 - DNA, 80 bp, synthetic construct
  source 1..80: mol_type = other DNA
cattaactccaaacatgcagcagtcaccaccttccggacttttttggaataacaaacactggtgaattctgggggcttac

SEQ ID NO: 54131 - DNA, 80 bp, synthetic construct
  source 1..80: mol_type = other DNA
tcagaaatcctgacgtcctagccctcttctatctgttttttccagttattgatgttgggttagcttttcctcgtaggaat

SEQ ID NO: 54132 - DNA, 80 bp, synthetic construct
  source 1..80: mol_type = other DNA
ttgattgccatatttgcaacataaggctgaaaagtacatggctgtccatccggaccaagacaaggtaaaatgtcagcact

SEQ ID NO: 54133 - DNA, 80 bp, synthetic construct; identical to SEQ ID NO: 14231
  source 1..80: mol_type = other DNA

SEQ ID NO: 54134 - DNA, 80 bp, synthetic construct
  source 1..80: mol_type = other DNA
aaatatccccaaatgccagtgggaaccttggtaggtttgtctcctccaactaatgtagttctttctctggtggggatatc

SEQ ID NO: 54135 - DNA, 80 bp, synthetic construct
  source 1..80: mol_type = other DNA
gctgttttgatgaaattttgagcggcactgattagcctagtgatttcctttgttacagtgaggacaaagtcctggtgttt

SEQ ID NO: 54136 - DNA, 80 bp, synthetic construct
  source 1..80: mol_type = other DNA
cgagaccatcctggctaacatggtgaaaccccatctcttaaacaaatacaaaaaattagctgggcgtagtggcaggtgcc

SEQ ID NO: 54137 - DNA, 80 bp, synthetic construct; identical to SEQ ID NO: 14232
  source 1..80: mol_type = other DNA

SEQ ID NO: 54138 - DNA, 80 bp, synthetic construct
  source 1..80: mol_type = other DNA
aaaagctagagttaaggttagcatctctgcagcagtggtgtgataaatctgatgcttcattgccttctatagtcatgcaa

SEQ ID NO: 54139 - DNA, 80 bp, synthetic construct
  source 1..80: mol_type = other DNA
ttacctaagagcatgtcctctgtaatgtctctgtgtccagccacacaattccgtctagcctggtctgcacacatttcttg

SEQ ID NO: 54140 - DNA, 80 bp, synthetic construct
  source 1..80: mol_type = other DNA
caggctctgtacaccattatttaccacactcctttcaattccttcaacaacttaaactctagtggagtgtgttcatgaat

SEQ ID NO: 54141 - DNA, 80 bp, synthetic construct
  source 1..80: mol_type = other DNA
taccgaaggaggcagtacagatgtttctgctattggaggaggtggtataggccaatttttatcctccttctcctgttttt

SEQ ID NO: 54142 - DNA, 80 bp, synthetic construct; identical to SEQ ID NO: 14233
  source 1..80: mol_type = other DNA

SEQ ID NO: 54143 - DNA, 80 bp, synthetic construct
  source 1..80: mol_type = other DNA
agcaactgcacataatgtttttcttcgatagacaaattctgcctcatgttactctgattcagaaaacttcccattcccaa

SEQ ID NO: 54144 - DNA, 80 bp, synthetic construct
  source 1..80: mol_type = other DNA
tgctccaccagatcttctttgttcacattctcatgtccctgtgtttagaaaccactatggtgtcgccctgtcgctgtttg

SEQ ID NO: 54145 - DNA, 80 bp, synthetic construct
  source 1..80: mol_type = other DNA
agcaagaagggggtcgttgtcggtctgctgcttgctccagagcagccttccaagactgcattccttgaacaatagattct

SEQ ID NO: 54146 - DNA, 80 bp, synthetic construct; identical to SEQ ID NO: 14234
  source 1..80: mol_type = other DNA

SEQ ID NO: 54147 - DNA, 80 bp, synthetic construct
  source 1..80: mol_type = other DNA
tcctggctaacacagtgaaaaccagtctctattaaaaaaatacaaaaaaattagccaggcgcagtgtcaggcacctgtag

SEQ ID NO: 54148 - DNA, 80 bp, synthetic construct
  source 1..80: mol_type = other DNA
cttttcagaaagagcacagtgtgaaccagtgctctcaacctcagcactattgacattttggaccaggtaattctttgttg

SEQ ID NO: 54149 - DNA, 80 bp, synthetic construct
  source 1..80: mol_type = other DNA
tatccctgggtaagaaccatgggtgtgaaccatttgaaaaaatctgtgttgaacaagccactattagttatggagcagct

SEQ ID NO: 54150 - DNA, 80 bp, synthetic construct; identical to SEQ ID NO: 14235
  source 1..80: mol_type = other DNA

SEQ ID NO: 54151 - DNA, 80 bp, synthetic construct
  source 1..80: mol_type = other DNA
tgacattctcatacagacagtttgcaaaaatgagcaggtcccagactttgagtacgacctttgcaaagctctctttgtcc

SEQ ID NO: 54152 - DNA, 80 bp, synthetic construct
  source 1..80: mol_type = other DNA
tagggtcaaaaggtttggcaaataaaaccagaggatgcccacttaaatttggatttccaataaattatggtgtgtatctg

SEQ ID NO: 54153 - DNA, 80 bp, synthetic construct
  source 1..80: mol_type = other DNA
tgaaaatttctcctatacattggaattagcagcccttgcatctctgctcccacttcaagaaacaacctgatacatatgaa

SEQ ID NO: 54154 - DNA, 80 bp, synthetic construct; identical to SEQ ID NO: 14236
  source 1..80: mol_type = other DNA

SEQ ID NO: 54155 - DNA, 80 bp, synthetic construct
  source 1..80: mol_type = other DNA
gaaaacatagggcagaaatactagcttatgtctaataatgcagtatacctaaacaaacctcacacaaaaggcatctgctg

SEQ ID NO: 54156 - DNA, 80 bp, synthetic construct
  source 1..80: mol_type = other DNA
attgtatactgaaaatcaaaggcctggtacgcagtcactgcaaaatgttatacggcatgtactgatggagaccagattca

SEQ ID NO: 54157 - DNA, 80 bp, synthetic construct
  source 1..80: mol_type = other DNA
gagcatctctggttcacagatcctcctgcttctcttcagcctttttagccttctcctttagattcagctggctccctgaa

SEQ ID NO: 54158 - DNA, 80 bp, synthetic construct; identical to SEQ ID NO: 14237
  source 1..80: mol_type = other DNA

SEQ ID NO: 54159 - DNA, 80 bp, synthetic construct
  source 1..80: mol_type = other DNA
tcaacataaacacctccagccctgaactcaccatgagtctcttaaattcccttgaccttctgattgttccacataaatgt

SEQ ID NO: 54160 - DNA, 80 bp, synthetic construct
  source 1..80: mol_type = other DNA
tgttctatcccctttacagtaatccattaacaggctaagcaaattacatgccgagtgtgtccccaagtttagtggcacct

SEQ ID NO: 54161 - DNA, 80 bp, synthetic construct
  source 1..80: mol_type = other DNA
tcaggggtctgagagattgatcaaggactcaaagtcagctgttgacagaaaaacactgctgtaaaataattaatatttta

SEQ ID NO: 54162 - DNA, 80 bp, synthetic construct
  source 1..80: mol_type = other DNA
tgtgctaactaatacgttacagaatgttcaggaaagagaaccctagggaaaaactatgaattacatcagctgatgtaatc

SEQ ID NO: 54163 - DNA, 80 bp, synthetic construct; identical to SEQ ID NO: 14238
  source 1..80: mol_type = other DNA

SEQ ID NO: 54164 - DNA, 80 bp, synthetic construct
  source 1..80: mol_type = other DNA
tgccaagatacactagtaaacagtacactatagattgagccaaattatatacctctcaagctcagccattagatcatact

SEQ ID NO: 54165 - DNA, 80 bp, synthetic construct
  source 1..80: mol_type = other DNA
gtaatccaggaaatccagctaaggttcatgttagtatttcaggataaaagggtggtgatgctggcagtggcgagctgtcc

SEQ ID NO: 54166 - DNA, 80 bp, synthetic construct
  source 1..80: mol_type = other DNA
ctccaggcccagagccttcactcctgcgttgctgctctcaccctgcagttgtggggagggcatggagctggggccaccct

SEQ ID NO: 54167 - DNA, 80 bp, synthetic construct
  source 1..80: mol_type = other DNA
cctgatgctcctgacagccaggcccgggctgggatctgttccccaaggtgcctcccccgccccatccaggcgagaaggag

SEQ ID NO: 54168 - DNA, 80 bp, synthetic construct; identical to SEQ ID NO: 14239
  source 1..80: mol_type = other DNA

SEQ ID NO: 54169 - DNA, 80 bp, synthetic construct
  source 1..80: mol_type = other DNA
gccttttgccacctcagtcacagggaagccaagggaagatgggcatgtaatatttgaagtaagtttcttatagggagcat

SEQ ID NO: 54170 - DNA, 80 bp, synthetic construct
  source 1..80: mol_type = other DNA
ctttggttttttcttctctggtttcttttcctattttccaatgtgttccttaagcaatttttagaattccatttttgaat

SEQ ID NO: 54171 - DNA, 80 bp, synthetic construct
  source 1..80: mol_type = other DNA
cctcctttatatccctttccacttctgcatgtgtaatatatatgttttattttctctacttgcatcaaaaccacatctat

SEQ ID NO: 54172 - DNA, 80 bp, synthetic construct
  source 1..80: mol_type = other DNA
cccttgttttaacataagtctcctagcatgaaattctcttgattttccttcctttaagtatgtcatggccaggcgcagtg

SEQ ID NO: 54173 - DNA, 80 bp, synthetic construct; identical to SEQ ID NO: 14240
  source 1..80: mol_type = other DNA

SEQ ID NO: 54174 - DNA, 80 bp, synthetic construct
  source 1..80: mol_type = other DNA
ctggatatacattctaggttaacattcctttcagccattaaaatatcttgtgccacttctgtctggtctgcatgatttct

SEQ ID NO: 54175 - DNA, 80 bp, synthetic construct
  source 1..80: mol_type = other DNA
tttggaaagtagtcagtcttccttcaagcactctttgggcatcacccatttgtcatttctaagactccagtaacacaaat

SEQ ID NO: 54176 - DNA, 80 bp, synthetic construct
  source 1..80: mol_type = other DNA
aaataacataaaataggaagagttccacatctcatagagaaagtaagtccattctataaagctttcccaagacaaaaccc

SEQ ID NO: 54177 - DNA, 80 bp, synthetic construct; identical to SEQ ID NO: 14241
  source 1..80: mol_type = other DNA

SEQ ID NO: 54178 - DNA, 80 bp, synthetic construct
  source 1..80: mol_type = other DNA
gtgattcactacattaactgaaggaaggagaatacacatgcaaccacctggatagagtcatgaaatacgatttgacagaa

SEQ ID NO: 54179 - DNA, 80 bp, synthetic construct
  source 1..80: mol_type = other DNA
agctacccaattgcacacattagtctcagcagtgaaatatttaaaactgtctccttcatatctggagtactagaggagtt

SEQ ID NO: 54180 - DNA, 80 bp, synthetic construct
  source 1..80: mol_type = other DNA
atagatttaataagtaaatttaaataatgttgctgattacaaagtcagcatacattaaaccaattatgttattgatatag

SEQ ID NO: 54181 - DNA, 80 bp, synthetic construct
  source 1..80: mol_type = other DNA
gcaatgtaagaacagactattacaggtggcaaggaaaagtaattctttatgaataacacactgaaatagggttaacggga

SEQ ID NO: 54182 - DNA, 80 bp, synthetic construct; identical to SEQ ID NO: 14242
  source 1..80: mol_type = other DNA

SEQ ID NO: 54183 - DNA, 80 bp, synthetic construct
  source 1..80: mol_type = other DNA
agtcttggagtcactgccctttgataatcagcactgcgcactaatagcaaaaagggcaatggctacactggctacatctg

SEQ ID NO: 54184 - DNA, 80 bp, synthetic construct
  source 1..80: mol_type = other DNA
ggtggagattttaaatactgagacatgcaacatgtgtagtaacatgtgcaaccacagagcatgtgcacccaaagagtcct

SEQ ID NO: 54185 - DNA, 80 bp, synthetic construct
  source 1..80: mol_type = other DNA
gctactactatttttccagctggaacagcccagaactgttttccactcctccctaggaatgtactttattttccttcaat

SEQ ID NO: 54186 - DNA, 80 bp, synthetic construct; identical to SEQ ID NO: 14243
  source 1..80: mol_type = other DNA

SEQ ID NO: 54187 - DNA, 80 bp, synthetic construct
  source 1..80: mol_type = other DNA
atgggtgaaacagatggagaggaggagacacggggtagactggggagtagaatgagaggaagacccacaaatattacaag

SEQ ID NO: 54188 - DNA, 80 bp, synthetic construct
  source 1..80: mol_type = other DNA
gtattcggatggaaaaactgagtaacgagagcaggggcaggatacagcattaagatgaaaagaaaatattagaaacacag

SEQ ID NO: 54189 - DNA, 80 bp, synthetic construct
  source 1..80: mol_type = other DNA
acaagctatgttttcactggtatcttgcctacattacccttggattcctcataaaaatactgatagtagttttcactgca

SEQ ID NO: 54190 - DNA, 80 bp, synthetic construct; identical to SEQ ID NO: 14244
  source 1..80: mol_type = other DNA

SEQ ID NO: 54191 - DNA, 80 bp, synthetic construct
  source 1..80: mol_type = other DNA
aaaaattgcagagaaagttcagggagttgccacaccccttcttccctaaaacagccctctgttcagtttctcctattact

SEQ ID NO: 54192 - DNA, 80 bp, synthetic construct
  source 1..80: mol_type = other DNA
gataaatacataatgccatataaccaccgttaaagtgaaatggtggataaagtgaacccaagagtcccttagacagtttt

SEQ ID NO: 54193 - DNA, 80 bp, synthetic construct
  source 1..80: mol_type = other DNA
tgttcctcattcatcatgattgttcccttacccctccctagttcttgttttcccatacctagctacatttcttccctgat

SEQ ID NO: 54194 - DNA, 80 bp, synthetic construct; identical to SEQ ID NO: 14245
  source 1..80: mol_type = other DNA

SEQ ID NO: 54195 - DNA, 80 bp, synthetic construct
  source 1..80: mol_type = other DNA
gtatgcatataggggctgggcgtggtggctcacacctgcaatcctagcactttgggaggtcgaggcaggcggatcatgag

SEQ ID NO: 54196 - DNA, 80 bp, synthetic construct
  source 1..80: mol_type = other DNA
ctgagatcacgccactgcactccagcctgggccacagagcgatcctctgtctcaaaaaaaaaaaaaaaaaaaagagagag

SEQ ID NO: 54197 - DNA, 80 bp, synthetic construct
  source 1..80: mol_type = other DNA
tggcagttatgaataaagcgctataaacattcgtgtacacttgtttgtgtggacagacgttttccactgatttgggtaaa

SEQ ID NO: 54198 - DNA, 80 bp, synthetic construct; identical to SEQ ID NO: 14246
  source 1..80: mol_type = other DNA

SEQ ID NO: 54199 - DNA, 80 bp, synthetic construct
  source 1..80: mol_type = other DNA
atttctgcagcctactaataaaaatctaagaaaagcaagataaaacaagcacaaaccaaggtggcataaccttgcaagac

SEQ ID NO: 54200 - DNA, 80 bp, synthetic construct
  source 1..80: mol_type = other DNA
tagagaatacactcaaactcagacaagtatagaatgaaaagcaaaactaaatccatatcctcccatgtaacaagaccatt

SEQ ID NO: 54201 - DNA, 80 bp, synthetic construct
  source 1..80: mol_type = other DNA
tgttaactgaggttcatagttacattagggttcactctattacacagttctatgggttcggataaatacataatgtcatg

SEQ ID NO: 54202 - DNA, 80 bp, synthetic construct; identical to SEQ ID NO: 14247
  source 1..80: mol_type = other DNA

SEQ ID NO: 54203 - DNA, 80 bp, synthetic construct
  source 1..80: mol_type = other DNA
tctcagtgatggctttgtgtgaggccagggtaggagctagacaaatccagggtatttcagtaacaaaagcatcatacaaa

SEQ ID NO: 54204 - DNA, 80 bp, synthetic construct
  source 1..80: mol_type = other DNA
caatatgtccataggtttcctccatgtgatttcatagcttgatatcttatttctctttactgttggaaaatactccacgg

SEQ ID NO: 54205 - DNA, 80 bp, synthetic construct
  source 1..80: mol_type = other DNA
ctggactgtattaaaagtatggttagctttgtaagaaacacccagagtgtcttgcaaagtggctgtactgttttgcattc

SEQ ID NO: 54206 - DNA, 80 bp, synthetic construct
  source 1..80: mol_type = other DNA
gcaagctccgcctcctgggttcatgccattctcctgcctcagcctcccgagtagctgggactacaggcacccgccaccac

SEQ ID NO: 54207 - DNA, 80 bp, synthetic construct; identical to SEQ ID NO: 14248
  source 1..80: mol_type = other DNA

SEQ ID NO: 54208 - DNA, 80 bp, synthetic construct
  source 1..80: mol_type = other DNA
tctgtaaaaatgcaccaatcagcactctgtgtctaactgattgtaagtgcacaaatcagcactctgtaaaaatgcaccaa

SEQ ID NO: 54209 - DNA, 80 bp, synthetic construct
  source 1..80: mol_type = other DNA
ccgggccagcagcggcaacctgtgggtccccttccacgctgtggagctttgttcttttactcttcacaataaatcttgct

SEQ ID NO: 54210 - DNA, 80 bp, synthetic construct
  source 1..80: mol_type = other DNA
tcgccaagcagtgagcaccatcaggaccctttcacttgctattctatcctatttttccttagaattcgggggctaaatac

SEQ ID NO: 54211 - DNA, 80 bp, synthetic construct; identical to SEQ ID NO: 14249
  source 1..80: mol_type = other DNA

SEQ ID NO: 54212 - DNA, 80 bp, synthetic construct
  source 1..80: mol_type = other DNA
cctcatgatctgcccaccttggcctcccaaagtgctgggatacagttcttaaagatggtgtgtctggagtttcttccttc

SEQ ID NO: 54213 - DNA, 80 bp, synthetic construct
  source 1..80: mol_type = other DNA
gttacagttcctaaaggcagcgcatccggagttgttcattctcccggtgggttcatggtctcgctgacttcaggagtgaa

SEQ ID NO: 54214 - DNA, 80 bp, synthetic construct
  source 1..80: mol_type = other DNA
tattcccttatctgacccctccacacactgctcattgggccattttacagagagctgattggtccgttttgacagagtgc

SEQ ID NO: 54215 - DNA, 80 bp, synthetic construct; identical to SEQ ID NO: 14250
  source 1..80: mol_type = other DNA

SEQ ID NO: 54216 - DNA, 80 bp, synthetic construct
  source 1..80: mol_type = other DNA
agcaggctgaagggcttctcaagcatggccagagcaaacgccaaggccgaggaggcgccgcgagtgagcaagggctgctg

SEQ ID NO: 54217 - DNA, 80 bp, synthetic construct
  source 1..80: mol_type = other DNA
catgagtggaactctcaaagtcatgtcacccaagtgagactcgcccatctatcctatctatcctgacccttgcctcttgg

SEQ ID NO: 54218 - DNA, 80 bp, synthetic construct
  source 1..80: mol_type = other DNA
gctcaccaatcagaaagaaataatttttgcccaaagccccgtctgctgggcgggactttctggaattttaggatccctcc

SEQ ID NO: 54219 - DNA, 80 bp, synthetic construct
  source 1..80: mol_type = other DNA
gcataacatctttataggacaggggtaaagtcccaatactaacaggagaatgcttaggactctaacagttttttgagaat

SEQ ID NO: 54220 - DNA, 80 bp, synthetic construct; identical to SEQ ID NO: 14251
  source 1..80: mol_type = other DNA

SEQ ID NO: 54221 - DNA, 80 bp, synthetic construct
  source 1..80: mol_type = other DNA
gccattgggaccagtttgacccacaaaccctgaaaaagtggtggctcatttttttctacactatggcttggctccaatat

SEQ ID NO: 54222 - DNA, 80 bp, synthetic construct
  source 1..80: mol_type = other DNA
gcaatttacatcccacaagaggacctctcagcttaccccaatatcctagcctccctatagctccctttcctattaatgat

SEQ ID NO: 54223 - DNA, 80 bp, synthetic construct
  source 1..80: mol_type = other DNA
agatcaaggcagacctgaggaagctttcagatgatcctgataggtatatagatgtcctacagggtctagggcaaaccttt

SEQ ID NO: 54224 - DNA, 80 bp, synthetic construct; identical to SEQ ID NO: 14252
  source 1..80: mol_type = other DNA

SEQ ID NO: 54225 - DNA, 80 bp, synthetic construct
  source 1..80: mol_type = other DNA
gagggtcaattgatcctaaaagataagtttattacccaattagccacaggaatcaggagaaagctccagaagtgagccct

SEQ ID NO: 54226 - DNA, 80 bp, synthetic construct
  source 1..80: mol_type = other DNA
acagaaaatggagcaggccaatcacccagtaaggcttgttatcagtgtggtttacaaggacactttaaaaaagattgtct

SEQ ID NO: 54227 - DNA, 80 bp, synthetic construct
  source 1..80: mol_type = other DNA
ttatcctcactgagccctgggtacatttaaccatcgagggccaggaaattgacttcctcctggacactggtgtggccttc

SEQ ID NO: 54228 - DNA, 80 bp, synthetic construct; identical to SEQ ID NO: 14253
  source 1..80: mol_type = other DNA

SEQ ID NO: 54229 - DNA, 80 bp, synthetic construct
  source 1..80: mol_type = other DNA
cagaaacaaagagggagtcagaaagaaaagagagaagagagaaaggggggaaagacagaaagagagagacagaggaagag

SEQ ID NO: 54230 - DNA, 80 bp, synthetic construct
  source 1..80: mol_type = other DNA
cataaccctaaaacactacaataccatcttgttgtcagtgtaaacaagggcatagcccgaaagcactgaggccactgaca

SEQ ID NO: 54231 - DNA, 80 bp, synthetic construct
  source 1..80: mol_type = other DNA
aaaaaattagctgggcgtggtggtgggtgcctgtagtcccagctacttgggaggctgaggcaggagaatggtgtgaacct

SEQ ID NO: 54232 - DNA, 80 bp, synthetic construct; identical to SEQ ID NO: 14254
  source 1..80: mol_type = other DNA

SEQ ID NO: 54233 - DNA, 80 bp, synthetic construct
  source 1..80: mol_type = other DNA
ggactcaatgaggtcttattaatagcaaagaataattgaaatcccaaacttacaaagttttccacaaaagtaaagtttgc

SEQ ID NO: 54234 - DNA, 80 bp, synthetic construct
  source 1..80: mol_type = other DNA
gcaggtttatctacttcattatcctactaccacacactctcaaaggatttctcagacagcttgtgagaaatagcaaaatc

SEQ ID NO: 54235 - DNA, 80 bp, synthetic construct
  source 1..80: mol_type = other DNA
acctggcatttacaggaaaaggcttctgaaatcagacaatgcctttcaaattcttataccaatctctggagttgggtgat

SEQ ID NO: 54236 - DNA, 80 bp, synthetic construct; identical to SEQ ID NO: 14255
  source 1..80: mol_type = other DNA

SEQ ID NO: 54237 - DNA, 80 bp, synthetic construct
  source 1..80: mol_type = other DNA
gctaaaggattgtaaattcaccaatcagcactctgtgtctagctcaaggattgtaaacacaccaatcagcactctgtaaa

SEQ ID NO: 54238 - DNA, 80 bp, synthetic construct
  source 1..80: mol_type = other DNA
gctgctgctcactctttgggtccgcactacctttatgggctgtaacactcaccacaagggtctgcagcttcattcttgat

SEQ ID NO: 54239 - DNA, 80 bp, synthetic construct
  source 1..80: mol_type = other DNA
tttttgcagatttatgtaaccaccacgcaatccagtggagagctattccatcccacagagatctcccctcatgctgccct

SEQ ID NO: 54240 - DNA, 80 bp, synthetic construct; identical to SEQ ID NO: 14256
  source 1..80: mol_type = other DNA

SEQ ID NO: 54241 - DNA, 80 bp, synthetic construct
  source 1..80: mol_type = other DNA
tatttctctgatataaatgtcccagaatgtaattcctggctcatgtggcaaatatatgtctagttcttcaagacacagcc

SEQ ID NO: 54242 - DNA, 80 bp, synthetic construct
  source 1..80: mol_type = other DNA
atttcccggatggctagtgatttattgtgcttatttgccatgtatatatatcttctgtgataaaatgtctcttcatacct

SEQ ID NO: 54243 - DNA, 80 bp, synthetic construct
  source 1..80: mol_type = other DNA
tattttcttcatatctctagcttacttttcatttcttagctggataccttacagaacaaaagtttttacattttgataaa

SEQ ID NO: 54244 - DNA, 80 bp, synthetic construct; identical to SEQ ID NO: 14257
  source 1..80: mol_type = other DNA

SEQ ID NO: 54245 - DNA, 80 bp, synthetic construct
  source 1..80: mol_type = other DNA
atactgctccactagtctctgtctatccctgcactaatgtcaatcaatattgattactgcagctataagaattctgaaat

SEQ ID NO: 54246 - DNA, 80 bp, synthetic construct
  source 1..80: mol_type = other DNA
tatttaggtttttagttgattaacacagtaaatctctccatgtctttaaattttttatttcttcaggatttcagcatatg

SEQ ID NO: 54247 - DNA, 80 bp, synthetic construct
  source 1..80: mol_type = other DNA
tcgctctgtcgcctaggctggagtgcagtggcacgatctcggctcactgcaagctccgcctcccgggttcacaccattct

SEQ ID NO: 54248 - DNA, 80 bp, synthetic construct; identical to SEQ ID NO: 14258
  source 1..80: mol_type = other DNA

SEQ ID NO: 54249 - DNA, 80 bp, synthetic construct
  source 1..80: mol_type = other DNA
tttttgtagaagttatttataaaattcaggaggtagtctttgatttctactattttgaggggttttttgttgttgctgtt

SEQ ID NO: 54250 - DNA, 80 bp, synthetic construct
  source 1..80: mol_type = other DNA
agcatggtgaaacctcgtctctactaaaaatacaaaaattagcagggcatggtggcgggtgcctgtaatcccagctactc

SEQ ID NO: 54251 - DNA, 80 bp, synthetic construct
  source 1..80: mol_type = other DNA
cttgcacccttgaataaacgctacttggaataatttacatattttttcagtttgactgatttttatttgctaacattttg

SEQ ID NO: 54252 - DNA, 80 bp, synthetic construct; identical to SEQ ID NO: 14259
  source 1..80: mol_type = other DNA

SEQ ID NO: 54253 - DNA, 80 bp, synthetic construct
  source 1..80: mol_type = other DNA
ctctagtgatataacatgtttcaatcccaatattggtgttttttctcctttttcccttctattttgtcctagaaatttgt

SEQ ID NO: 54254 - DNA, 80 bp, synthetic construct
  source 1..80: mol_type = other DNA
caggttaaagtgattctcttgccttagcctcccaagtagctgggattacagaaatgtgccaccacatccagctaattttg

SEQ ID NO: 54255 - DNA, 80 bp, synthetic construct
  source 1..80: mol_type = other DNA
gttattttagactacttttccagattcttgaggtgggaactgagattattggtttctgaccttttctcttttttagtgta

SEQ ID NO: 54256 - DNA, 80 bp, synthetic construct; identical to SEQ ID NO: 14260
  source 1..80: mol_type = other DNA

SEQ ID NO: 54257 - DNA, 80 bp, synthetic construct
  source 1..80: mol_type = other DNA
tagttttgttgggtttcattatcttgctgagtttctatatagttgttttattaatttttcagagatgtgaagtctcaaag

SEQ ID NO: 54258 - DNA, 80 bp, synthetic construct
  source 1..80: mol_type = other DNA
agaatattcattgctcggtgtattttatgttatctgatattatagccatttctgctttctttgacaaatgtttgcatggt

SEQ ID NO: 54259 - DNA, 80 bp, synthetic construct
  source 1..80: mol_type = other DNA
ctgccatctactttttgttttcttttttgtttcctttggtttttgcttctctgttttcttttcttgtttttcgatgtgtt

SEQ ID NO: 54260 - DNA, 80 bp, synthetic construct; identical to SEQ ID NO: 14261
  source 1..80: mol_type = other DNA

SEQ ID NO: 54261 - DNA, 80 bp, synthetic construct
  source 1..80: mol_type = other DNA
gttttaggataagtctgctagcatcaaattctcttgattttccttcctctaagaatgtcatggctgggcgctgtggctca

SEQ ID NO: 54262 - DNA, 80 bp, synthetic construct
  source 1..80: mol_type = other DNA
ggctgaggtgtgaagatcacattagcctgggaggcagaggctgcagtgagctttggttgtgccactgccctccacactcc

SEQ ID NO: 54263 - DNA, 80 bp, synthetic construct
  source 1..80: mol_type = other DNA
acttctgtctggtctgcatgatttctaatgagcaatccactgtcatttaatttattttctcctgggcatgaagtgtcatt

SEQ ID NO: 54264 - DNA, 80 bp, synthetic construct; identical to SEQ ID NO: 14262
  source 1..80: mol_type = other DNA

SEQ ID NO: 54265 - DNA, 80 bp, synthetic construct
  source 1..80: mol_type = other DNA
agcccattctataaagctttcccaagacaagatcgcaggttgatctaacttcagtaattattttaaaatatttaaggaac

SEQ ID NO: 54266 - DNA, 80 bp, synthetic construct
  source 1..80: mol_type = other DNA
tttatactctaagttctagggtacatatgcacaacgtgcaggtttgttacataggtatacatgtgccatgttggtttgct

SEQ ID NO: 54267 - DNA, 80 bp, synthetic construct; identical to SEQ ID NO: 14263
  source 1..80: mol_type = other DNA

SEQ ID NO: 54268 - DNA, 80 bp, synthetic construct
  source 1..80: mol_type = other DNA
ggcaaaccgcatccagcagcacatcaaaaagcttatctatcaagatcaagtcggcttcatccctgggatgcaaggatggt

SEQ ID NO: 54269 - DNA, 80 bp, synthetic construct; identical to SEQ ID NO: 14264
  source 1..80: mol_type = other DNA

SEQ ID NO: 54270 - DNA, 80 bp, synthetic construct
  source 1..80: mol_type = other DNA
tttagaaaaccccatgatctcaccccaaaatctccttaagttgataagtaacttcatcaaagtctcaggatacaaaatca

SEQ ID NO: 54271 - DNA, 80 bp, synthetic construct
  source 1..80: mol_type = other DNA
actgctcaatgaaataaaagaggacacaaacaaatagaagaatactccatgctcatgaataggaagaatcagtatcctga

SEQ ID NO: 54272 - DNA, 80 bp, synthetic construct
  source 1..80: mol_type = other DNA
gaggcatcatgctatctgacttcaaactatactacaaggctataataaccaaaacagcatggtactggtaccaaaacaga

SEQ ID NO: 54273 - DNA, 80 bp, synthetic construct; identical to SEQ ID NO: 14265
  source 1..80: mol_type = other DNA

SEQ ID NO: 54274 - DNA, 80 bp, synthetic construct
  source 1..80: mol_type = other DNA
gagtgaagaggcaacctacagaatgggagaaaatttttgcaatctacccatctgacaaagggctaatatccggaatctac

SEQ ID NO: 54275 - DNA, 80 bp, synthetic construct
  source 1..80: mol_type = other DNA
atgagataccatcttgcaccagttagaatggtgatcattaaaaagtcaggaaacaacagatgctggagaggatgtggaga

SEQ ID NO: 54276 - DNA, 80 bp, synthetic construct
  source 1..80: mol_type = other DNA
aaaggcacatgcacacgtatgtttattgcagcactattcacaatagcaaagacttggaaccaatccaaatgtccatcaat

SEQ ID NO: 54277 - DNA, 80 bp, synthetic construct
  source 1..80: mol_type = other DNA
tcactcataggtgggaattgaacaatgagaacactaggacccagggtggggaacatcacacactggggcctgttgggggg

SEQ ID NO: 54278 - DNA, 80 bp, synthetic construct; identical to SEQ ID NO: 14266
  source 1..80: mol_type = other DNA

SEQ ID NO: 54279 - DNA, 80 bp, synthetic construct
  source 1..80: mol_type = other DNA
cacgttatgcacatgcacctaaaacttaaagtataataaaaaaataattattatgtaaaagagaaaaatatataaaaata

SEQ ID NO: 54280 - DNA, 80 bp, synthetic construct
  source 1..80: mol_type = other DNA
aacaggttgttgggtcagggggcagatccttcatcattggcttggtgccatcctagctgaaatgagtgagttctgactca

SEQ ID NO: 54281 - DNA, 80 bp, synthetic construct
  source 1..80: mol_type = other DNA
tacagcgtgcaaaaccctgagccaatgaaacctcttttctttatgaattgcccagcctcaggtgtttctttttagcaatg

SEQ ID NO: 54282 - DNA, 80 bp, synthetic construct; identical to SEQ ID NO: 14267
  source 1..80: mol_type = other DNA

SEQ ID NO: 54283 - DNA, 80 bp, synthetic construct
  source 1..80: mol_type = other DNA
gttcctagaatatactccgtatgattttattcttgtgaaaataattgggactagttttatagtcatagtagttctatttc

SEQ ID NO: 54284 - DNA, 80 bp, synthetic construct
  source 1..80: mol_type = other DNA
tgatttccttcctgatctttgtttgctcaaagctacagagatgtttgttgtcttctatctacctccctacttcccacacc

SEQ ID NO: 54285 - DNA, 80 bp, synthetic construct
  source 1..80: mol_type = other DNA
tttctcaggcaggcttaatcttccacccatgttaagattcagtagatggaccaaagaataagagtggacacttgtccctg

SEQ ID NO: 54286 - DNA, 80 bp, synthetic construct; identical to SEQ ID NO: 14268
  source 1..80: mol_type = other DNA

SEQ ID NO: 54287 - DNA, 80 bp, synthetic construct
  source 1..80: mol_type = other DNA
aaacctagaatggaaatactgtattatccaaactactcacaggtttacaccaatctatgctcacagtgccacacacagca

SEQ ID NO: 54288 - DNA, 80 bp, synthetic construct
  source 1..80: mol_type = other DNA
ttattccaaactgtggctcaacaaacaaccaatttcatgtctccttgggcttatgtaggattggttctttaagacagatg

SEQ ID NO: 54289 - DNA, 80 bp, synthetic construct
  source 1..80: mol_type = other DNA
ttgaatcttctaaatccttgattttaaaacaaactattgtatttgccaattttgtcggggggtgttgggaaaaggacttg

SEQ ID NO: 54290 - DNA, 80 bp, synthetic construct; identical to SEQ ID NO: 14269
  source 1..80: mol_type = other DNA

SEQ ID NO: 54291 - DNA, 80 bp, synthetic construct
  source 1..80: mol_type = other DNA
tgggccttttgcagcctccagtttgcaactggccccctggctcccacgtttattaactcttaacctgtctcttctcattc

SEQ ID NO: 54292 - DNA, 80 bp, synthetic construct
  source 1..80: mol_type = other DNA
gagcaaatatttatatttactgactattggaatattctcttcaatactcagtctatatcctttgtccaattttctgtggc

SEQ ID NO: 54293 - DNA, 80 bp, synthetic construct
  source 1..80: mol_type = other DNA
ttcttcatgcaaaaaatcagtaattttcttcaaatattttttcatttgagtcttctggatgttgttttccttagaaagtc

SEQ ID NO: 54294 - DNA, 80 bp, synthetic construct
  source 1..80: mol_type = other DNA
atttctctatttataattaattcccaccaataccccaagccctaggcacccaatgatctgctttttgtgtctataaattt

SEQ ID NO: 54295 - DNA, 80 bp, synthetic construct; identical to SEQ ID NO: 14270
  source 1..80: mol_type = other DNA

SEQ ID NO: 54296 - DNA, 80 bp, synthetic construct
  source 1..80: mol_type = other DNA
ctgccctcatgttcatgttcaggggagcctgtcagataagtctatttttgttcccttttactgttgaatgatattgcttt

SEQ ID NO: 54297 - DNA, 80 bp, synthetic construct
  source 1..80: mol_type = other DNA
tttatgtctcttacatagattccaaggagtgaaattggggggtcatatggcgaacatatgttaaactttttaagaaactg

SEQ ID NO: 54298 - DNA, 80 bp, synthetic construct
  source 1..80: mol_type = other DNA
ccaggatccattcagtgaaaaaaatgagtttggaatacagcttaccaaaaactgaaactaaatatcaactctttctgttt

SEQ ID NO: 54299 - DNA, 80 bp, synthetic construct
  source 1..80: mol_type = other DNA
gtcaagagattgagaccatcctggccagcatggtgaaaccccgtctctactataaatacaaaacttagctgggcgtggtg

SEQ ID NO: 54300 - DNA, 80 bp, synthetic construct; identical to SEQ ID NO: 14271
  source 1..80: mol_type = other DNA

SEQ ID NO: 54301 - DNA, 80 bp, synthetic construct
  source 1..80: mol_type = other DNA
tattccatatatagatattccatgtatatattccatatatatagatattccatgtatatatatattccatatatagatat

SEQ ID NO: 54302 - DNA, 80 bp, synthetic construct
  source 1..80: mol_type = other DNA
gtggaatttaactacaaatactaacaacccaatggtaccacagtctatcatttccctaccctgaaatcaatctctcctac

SEQ ID NO: 54303 - DNA, 80 bp, synthetic construct
  source 1..80: mol_type = other DNA
ggaaacagtttagttgctccttataaaggcacacaggagaaaggagtatccttttcctacctctgggagttgctgtgaaa

SEQ ID NO: 54304 - DNA, 80 bp, synthetic construct; identical to SEQ ID NO: 14272
  source 1..80: mol_type = other DNA

SEQ ID NO: 54305 - DNA, 80 bp, synthetic construct
  source 1..80: mol_type = other DNA
ttggtggcaggcgcctgtaatcccagctactcgggaggctgaggcaggagaatcgcttgaacccgggaggtggaggttgc

SEQ ID NO: 54306 - DNA, 80 bp, synthetic construct
  source 1..80: mol_type = other DNA
catttcctcaacttagggaagaaagcctattttattgcaactctggaatcaaacagatcagacataattatcagcttatt

SEQ ID NO: 54307 - DNA, 80 bp, synthetic construct
  source 1..80: mol_type = other DNA
ttcaaatgattattactttgaaataggcttctgcattgattatgtaccgtttagatttgacatatttgatactgactctc

SEQ ID NO: 54308 - DNA, 80 bp, synthetic construct; identical to SEQ ID NO: 14273
  source 1..80: mol_type = other DNA

SEQ ID NO: 54309 - DNA, 80 bp, synthetic construct
  source 1..80: mol_type = other DNA
tttaatatgtgcattacctcacatacttatgaaatacatataaaaaccattatgctattaggaaataatcttcccttttt

SEQ ID NO: 54310 - DNA, 80 bp, synthetic construct
  source 1..80: mol_type = other DNA
atgaggcactgccatcaatgctgggacttcaggccaagggcaggagctgaggaagccacaaggatggacattttctgcag

SEQ ID NO: 54311 - DNA, 80 bp, synthetic construct
  source 1..80: mol_type = other DNA
aaagtgttgttttcagacctggttccactaacagcttcttttcctctctttcaaggactcagatgagagcactgcaggaa

SEQ ID NO: 54312 - DNA, 80 bp, synthetic construct; identical to SEQ ID NO: 14274
  source 1..80: mol_type = other DNA

SEQ ID NO: 54313 - DNA, 80 bp, synthetic construct
  source 1..80: mol_type = other DNA
agaggagcagaaacagaccatgtgacccatgaagcatgacatgtctgtcacaggatccagtgtaattgcattagccttag

SEQ ID NO: 54314 - DNA, 80 bp, synthetic construct
  source 1..80: mol_type = other DNA
gaaaggctttatccagggccactcatatactgagaactaacctcagcaaagccctatttcctcctctggaaaagtctatg

SEQ ID NO: 54315 - DNA, 80 bp, synthetic construct
  source 1..80: mol_type = other DNA
agtgatttttatcccaaattgaacctttttaattgagaccctgcaatattcatagctttgaaaatggggaagaaggctgc

SEQ ID NO: 54316 - DNA, 80 bp, synthetic construct; identical to SEQ ID NO: 14275
  source 1..80: mol_type = other DNA

SEQ ID NO: 54317 - DNA, 80 bp, synthetic construct
  source 1..80: mol_type = other DNA
ctgccaggaatgactgcttccccagaggatacaggtgtttctagaaactatacagggctacccccagtgacctgtgctaa

SEQ ID NO: 54318 - DNA, 80 bp, synthetic construct
  source 1..80: mol_type = other DNA
tccacttggcaggtgtaaacctctccacttcgaggaactgtttccagcatcaccagggtctggaaggtccagtctccatt

SEQ ID NO: 54319 - DNA, 80 bp, synthetic construct
  source 1..80: mol_type = other DNA
tcaactaggagaaaggaaatgtagagggaatgactcaggaagacagagtgaatctccctttttggctgtttgtctgcttc

SEQ ID NO: 54320 - DNA, 80 bp, synthetic construct; identical to SEQ ID NO: 14276
  source 1..80: mol_type = other DNA

SEQ ID NO: 54321 - DNA, 80 bp, synthetic construct
  source 1..80: mol_type = other DNA
atagcctttaatttatgaggtcataaagcttctcactccattccactgtgagagggctcatcacacttgggtgttccact

SEQ ID NO: 54322 - DNA, 80 bp, synthetic construct
  source 1..80: mol_type = other DNA
tgtgcccctgggaaggtaggacagacagaaatggttctccaatctttaagttcccagcaaagcatgagtcataaagcaga

SEQ ID NO: 54323 - DNA, 80 bp, synthetic construct
  source 1..80: mol_type = other DNA
tgggactcattacttggggtgcttatgcctaggaaaatccctaacactagcagactctcaataaatacattttttttaag

SEQ ID NO: 54324 - DNA, 80 bp, synthetic construct; identical to SEQ ID NO: 14277
  source 1..80: mol_type = other DNA

SEQ ID NO: 54325 - DNA, 80 bp, synthetic construct
  source 1..80: mol_type = other DNA
tcaacttttggtgaatgtcataataaaggtcaacaaaggggaaagtgagataagttgtgtcacaactattatatataaaa

SEQ ID NO: 54326 - DNA, 80 bp, synthetic construct
  source 1..80: mol_type = other DNA
agaaaacaaacagaaaaaatagcaagaaatttagacctaaagaagcttcagaagtgcctcagaggtctcctcaattcccc

SEQ ID NO: 54327 - DNA, 80 bp, synthetic construct
  source 1..80: mol_type = other DNA
acacccctcagctctcctcccctaaaccttcaccccaaccacacacaccttacactttccttccctgcatctctaaggac

SEQ ID NO: 54328 - DNA, 80 bp, synthetic construct
  source 1..80: mol_type = other DNA
acaaagacaaatccacactctacacacacacctgtgtcctcagaagtccttgctcaagattgagaggattctaaatgctc

SEQ ID NO: 54329 - DNA, 80 bp, synthetic construct; identical to SEQ ID NO: 14278
  source 1..80: mol_type = other DNA

SEQ ID NO: 54330 - DNA, 80 bp, synthetic construct
  source 1..80: mol_type = other DNA
aaacgtgctgtggggacacgaaggatccggtcacaggggcggcctccggggaagatactgacagagacgccgccatccgg

SEQ ID NO: 54331 - DNA, 80 bp, synthetic construct
  source 1..80: mol_type = other DNA
ccctccccgcctccagcctattctggagacctccaagcaggagctggaggaggatccgcccagcaccggagcccgcgccg

SEQ ID NO: 54332 - DNA, 80 bp, synthetic construct
  source 1..80: mol_type = other DNA
aaaacagacctctccactccgctgggggagcttaaagagcagtaaaagtgaggccaaaaaccaaacacacaagagcttag

SEQ ID NO: 54333 - DNA, 80 bp, synthetic construct; identical to SEQ ID NO: 14279
  source 1..80: mol_type = other DNA

SEQ ID NO: 54334 - DNA, 80 bp, synthetic construct
  source 1..80: mol_type = other DNA
caagaagccaggtattgaaaagcgttgtgggtggtgttaggatctgagatttatgctaaagacagtgggaaagtatcaaa

SEQ ID NO: 54335 - DNA, 80 bp, synthetic construct
  source 1..80: mol_type = other DNA
aaatttcacctgataagagtaaggggtcaaaagtgtctcagagctcttattggtgacatgagcttctgtagtttcaatac

SEQ ID NO: 54336 - DNA, 80 bp, synthetic construct
  source 1..80: mol_type = other DNA
ttacattatgaatcataccaaatgtagaatcactacagaaatctcaggcatgttagtgaaaaataattgcagagcatcac

SEQ ID NO: 54337 - DNA, 80 bp, synthetic construct
  source 1..80: mol_type = other DNA
atgcaactgtctacttttgcataatgaagcaagcaaaaataaaccataaagaactgaattgggtgctgagtgtataaaag

SEQ ID NO: 54338 - DNA, 80 bp, synthetic construct; identical to SEQ ID NO: 14280
  source 1..80: mol_type = other DNA

SEQ ID NO: 54339 - DNA, 80 bp, synthetic construct
  source 1..80: mol_type = other DNA
tatcttggtcctacataaaacgaatgctttatagaattctggtcccaatacagtgctatctttccagaaaatgaacttgt

SEQ ID NO: 54340 - DNA, 80 bp, synthetic construct
  source 1..80: mol_type = other DNA
agtgaatcacaaccacagctattttattcccatttaatgccccaactaactcacgtctttcagtctcccactcccaacaa

SEQ ID NO: 54341 - DNA, 80 bp, synthetic construct
  source 1..80: mol_type = other DNA
agctccgtttgccctttagaaatgatggcagagaggtgtgcaccctggatcaaacaatgtctatctttctattcctaaat

SEQ ID NO: 54342 - DNA, 80 bp, synthetic construct; identical to SEQ ID NO: 14281
  source 1..80: mol_type = other DNA

SEQ ID NO: 54343 - DNA, 80 bp, synthetic construct
  source 1..80: mol_type = other DNA
cttttatacattggaactagaagcccttgcatctctgcccccactctaagaaacaacctggtacatatgaatattagaaa

SEQ ID NO: 54344 - DNA, 80 bp, synthetic construct
  source 1..80: mol_type = other DNA
aataatcctcacaggatttttgtaagtgtgaaatttaataaagagtcttcttagcagtgatcacataataaacactcaaa

SEQ ID NO: 54345 - DNA, 80 bp, synthetic construct
  source 1..80: mol_type = other DNA
gaaacactggtttatgtctaataatgcagtatacctaaacctcacacaaaaggcacctgctgacatagaagaaatggact

SEQ ID NO: 54346 - DNA, 80 bp, synthetic construct; identical to SEQ ID NO: 14282
  source 1..80: mol_type = other DNA
